United States Patent Application Publication US 2015/0315605 A1 - sequence listing, part 13

SEQ ID NO: 20409 - DNA, 1501 bp, Zea Mays
aggaagacgccatcggaaacatgccttctgcactgccccctctgctctgctgtctcgcggcttagcggggataagatgaggagtctttagaaaatcatgcacactaccaggtgaaaacagaagttgtaaaggtactcgtgaaatatcctatagattgagggtccgcatagcaaaagagaagttaggccttcttgtccgcttgtgttggcggcggcgatggcgacgtcggcgagcacgtccggcgagtggctcaagggcgcgctgcaggaacttcgggagcgtaagggcagctcgctggagttcgactcggatctcatctcgggcctcgtctccttctgcgagctcgcgcctccctccgacgccaccagctatctcgagaattttattgggaaagaagctgctcaggacatcattcaagaatacttgcggaggaggggtcacattggttcctcaaatggaactgagagctttcagtcatctaaccttcagccttatgttaagccttcagctgatgcagcaactacacaaacaaagaaacaaacacgcacgcaaaaagattcagcatcttcttctagtcagagttctaagagtcaatcagaaattgcagaatcacaagttccttccaagagaggttcaaaaaagaaaggagcaaaggtcatttccctcgctgaggcagcaaaaggttctattgtcttcaagcaggggaaaccttgttcatgccaagcacggcaacatgaccttgtcagcaactgcttatcatgtggcaaaattgtgtgtgaacaagagggcgagggaccctgtagtttctgtggcgcacttgtcttgaaggaaggtagcacttatgctggtctaagtgatgttgggctacccctttccgaagcagaaactgcagctgaagcatatgcaaagaggcttgttgactatgatagaaatgctgcagcaaggactaaagtttatgatgaccaaagtgactactatgaaatggaaggaaacagttggctctcttcaaaggagaggtcagtcctgaagcagcagcaagaggaagctgaggaagcagctaaaatccaaaagggtaaagtgattgttacatttgatttggtgggccgtaaggtgattttgaacaaggatggaagtactgaggtggaaacagagcacccgatcatgcgaccgccggaagagaaggaccagagccaccgcatacagcccaaccccacaatcagagagcaacctgtgttcgtcgaaacaagtccagtcaaaccaaaaactgaccgagcgaaacagagcaagaggcttgccaagaatggtctgtgcctggaggtaaccggacggctgcagcatgatgacaagggcatggagagcattctgagtggcaaggtgaagaagggtgatcacttggcttacagctcctttggtcaggcacgcgaaggggatgatgttgaatgctccccggattttgactgagcctttactttgagggagagagaggcaaatggtggcttcg

SEQ ID NO: 20410 - DNA, 838 bp, Zea Mays
aagagaggtaactgaacgaagcatccggtgtgtgccctcgtcatccgccgccgccgccatgccgggcttcgctcagcgtctcgcgggcatcccgtggcggagcatcgcgaggcaaggcctctcccgcgtgttcctggtggcgaaggcctactgcgtgatccacgtcgtcaacgaccacctctgctcggtgaccttagtgcggggcgccagcatgctgccgtccctgaacctggcgggcgacgcggtggcggtggacagggtcagcgtgaggctcggccgggtcgcgccgggggacatcgtgctgatgatctcccccgaggacccgcgcaagtcggtcgtcaagcgcgtcgtcgggatgcaaggggactccgtcacctaccttgtcgaccccggcaaaagcgactcctcctccagaaccgtcgtggtaccgcaagatcatgtctgggtgcagggtgacaatatctttgcttctaacgattcgaggcaatttggagctgtgccttatgggctgattacagggaagatcttttgccgggtttggccgccggagagtttcggcgcaattgatgacgcaaccaagcagtcttaacgctgaggaggagccgaggagagcacatggacccatattgtttgctcgcgcccagagattctataatagccaactgcagggggggcccttccttgagctcgagagctttcgacgacctaccgcagcgcatttctacagcgaagcaaagagcgtgtcccgtgtttttatagttttggtgtgtgacaagttctgaaacccaaatcggcacaggtttcgagacagtttttttttttttgaatttcaagcaga

SEQ ID NO: 20411 - DNA, 2016 bp, Zea Mays
caaaatgtttgccactatggatggtcaaaacagcagaaactggatatatgtcccgcagattgatgaaaggcttggaagatctctcagttttctatgatcagacagttcgaaatgctagcggtggtatagttcaatttttgtatggagatgatggcatggatcctgcaaagatggaaggaaaagatggcatgcccttaaatttggatcaattgtttatgaaagtcatggccacatgtcctcaaaggggatcagatacattatctccagtgggcatcaaacagatgttagaggataagttcttgcagcatgacacctcatctgatggtggctgtagtgcagagttcaagaaaaacttaactgaattccttgataaacgtatagaattaatgaaatgcacaagaagggcactccatctacatgaggatcatgtagaaaagaaagattcttgcctagaagaatctattgctgctattatatctggtatatctgcaaaacaacttcaggttttcttggacacttgcttatctcgttatcagtcaaagaagattgaagcaggagcatctattggagcaattggagctcaaagtattggggagccagggactcagatgacactgaaaacatttcattttgcgggagtagctagcatgaatgttactcttggtgttcctcgaatcaaggaaattatcaatgctgctaaaaagataagcacacctattatcaccgctcagcttttgtcaaggaaagatgtgctttctgcgcgcattgtgaaaggatctatggagaaagcagtgcttggcgaggttgcagcaaccattcagactgtcctgaaatcaagtctgccaaacttggttgtcaaacttgatatgcaacttatagaaactctccacatgggaatatctgctgattctgtgaagctgtcaattttgaatcatccaaagcttaagttaaaatctgagcatgtccgagtcattgatagagccaagttgcgaatatatccagctggaactgacaagctcaaacttcagcttgaactgcataacctcaaatccatccttccaaaagtgattgtgaagggcattccaactgttgaaagggttgttattgatgaagttaaagtcaacaacgcgacagaaagataccaattgttggttgaaggaacaaacctcctggcagtcatgggtaccccaggagttgatgctaggaagacgaaaagtaatcacatcatggaaacgaaccaaacacttggaattgaagctgctaggagatctattattgatgagattcaatacacaatgaaaagtcatggcatgaacattgatcggagacatatgatgctcttggcagatttaatgacatacaagggtgaaattctcggcattactagatacggcattgcaaagatgaaaagcagtgtgctgatgcttgcttcatttgagaaaaccgcagaacatctattcaatgcctcatacagtggtcgtcaggatcagatagagggagttagtgaatgcattatcatgggcattcccatgcagctcggtaccggtattctcaaagtcaggcaaaggctcgaccatgtgcctgaattcaagtaccaaccggacccgatactgtcgtgatacatacatgtggactgaagctggaactctgtacatatatatagctgggtcatacatgcatagcgtagcgtagcctagggcaaccctggcggcttgtcatttctccggtgaacatctaactagtctcgttccatctccatgaggcagactctaggtcaacaactccctcttcggctgcatcggcaaatgcgagagtaaaattgtggcaaacacttgctacatcttctaggcagtggtacatgatcgtgttacatatctctgcaggctaatgaagcctgggaagaatcattgtttttttcttgactagataaatatctgtgttgtaaaggaaaaataataatacaatgagaattaagaattacacgcgtgtttgccaaaccacgatacttcagtgaga

SEQ ID NO: 20412 - DNA, 3318 bp, Zea Mays
aaactccaccgggttttaataaaagccacggactctgagtctctgacgctgccttttgctctccccttccaccccgtctgcccgcgcgcgctgtctcgtggcgacaactgggcgaccgccgccgccgtcgctgccgccgctacgccaagaagctaggtcttcatcggtcccttcgtcgagattttctccggagacaagcacccagcaggggactacaagattgattttgatggattatgacaagtctagaagaagtaactccaaaaagaggagacattccaattctgatgacggaaagaggaaacggttgagctctaggcatgatgacacatctatgtcctctgagccaattgaaaccatctacaggatattgtgcccggcaaaaaagataggcagtgtcttgggaagaggtggtgacattgttaaggcccttagagaggaaactaaagccaagataagggttgccgattccattcctggtgcagatgagagagtaattatcatcttcaattaccaaaatcaacctgaacttactgatgaagcagctgaaaaacaaattagtgatggcttagggaacatgaaaccccattgctttgcccaagatgccttattgaagatacatgataagattgtggctgatgaaatttatgatgaagtcgctcatgatgaaagttctgatgatgtcactgctcgaattttggttcaaggcaatcaagttggctgccttctaggaaaaggtggctccattatacaacaactacgaagtgatactggtgctgggatccgtgtcttgtcatctgaaaaccttccccagtgtgcacttcaaagtgatgaactggtgcagatatctggagcaccatctcttgtaagaaaagctctatatgaaatatctactcgtctccatcagcatcctcgtaaggaaaatagacctcttgaacaaataatagatgcaagcacacaaaggaaacacgagtctccaacactgcaacatgaaaatccaatgttgccgcacctgcatagtcatcatccacctccaatacccctgcttgacccatacagaagtggacctcagtatcctgttagtgaaactgaagagttttctatcagaatcctatgtgcttctgagctcattggttcagttattgggaaaagtggggctaatgttaggcgggtagagcagcagactggtgctcgcattaaagttcaagagattgacaaagatgcttctggagaaaggctgatcattgtttcatctaacgagataccaactgaaccaatatccccaacaattgaggcactcattttgctccacgataaagtgggcaggtgattactgaaatgagaagacgaactggggctgaaattcgagtttactcgaaggcagataaaccaaaatacttgtcttttggtgatgaacttgtgcaggttgcagggcctccagctattgcaagaggagccctcacagagattgcttcgaggcttagaactaggactttgagagatacaagtactgccaataatcctccaccttttgccccttccgatgatcctactgtcgatatgcctagcagaaaattaacactatatggagggcctaccaatgatacaccgtatggaaggcctgccaatgatccactgtatggaaggcctgccattgatccaccatttggaagacctaccaacgatcgaccatacggaaggcctgccatcgttccaccatttggaagacctaccaatgatccaccatatggaaggcctgccaatgatccaccatatgaaaggcctaccaatgatccaccatatggacgaccttccagtactatagcatatggaagaccaaacagaagtgcacctcgtgatccttcagatgcatatcctgtagactacttctctaaaagagaacatcctagtggaggccctatgtttactagtaatgccccatcagctgcttatgagagatatgcagcacccacacactttcctactagagaacctccctcaactttcagtcatcgttcctatcgtgaccacatgcctactgatagctactctagtaggggtacacagaaattagacatcacgagagatggaaattcagatgcttatgattatacagaggtacatctttgccgtgagcttccctcttttgcaaatggccatcacctaaaattttcattagaagcttgagactttacacatgactgttccactgtccctattctgttccataatttgctggcactactgaacattggggaaacgttatatgttggtgtcttagcttctgtggcagtaatgttcaccctataatgtggtcacactgtcacagtggtgcaactcttttcatttgttgtcacttgcatcttggttcaatatatatctggctgttggatgtactctgctgcttttagtttcaatcggtttttcttgatattatctatgcctaccagaacatctcatattctgtatatatttaaattttatcattgcacaggctgctggacaaattcatggactggaggactatagaggactgccaagtgcttctggaaggttctcgagcactattgaactaaggattccaaatagttctttggagtctattgttggtgttggcggggtcaatttagcagagatacgtcagatttctggtgcaagactgaggctacatgaggctcatgctggttcttctgagtctgtggtggagatccagggcacactggaccaagcaaaagctgcgcagagcctcctggagggctttatcagcgcgaacagcaggcagcagcaatcccattcttctcgcatgccactttacccaagatggggatagcttctggttgtggcaggggaaaaccgagtcagcagggttggctggagttatctcagactgcagattagatgcatcgatgatgttaatggtagctgtttaaattgaccgtgcaagcatgataacttatattatgccataggacaagtaatgctgattctctcatgaaatactaagtgacaagctgtctctgtagttgtatttgtttctgaatgtttgaaccctactgttacaacggctgctattttaggtcagatttcagaggccggataattatgttatctgcagagttgggccaaaaaaaaaagctcaatctggttgagactggcttcacccatgccgtttcatttttagaagttacagcatctctgcaaaatatatgggtaaggcctcttggaacgcatgaatttcatagaaatcagtttattttctcagaaaaaacatgggaaacaggggaaaaaaatcccacgttccaagaggcctaaagtttg

SEQ ID NO: 20413 - DNA, 1601 bp, Zea Mays
atttcaagtcgcaaagcgcgacgtccgacgagagagagcggcctcagaacaggagcgaagggatccgccagagtccccctgagtccaaccaagctcggtccggcccagtcccaggcccaggcccaggcccgagcggtagcctgtaggtcgccggcgatgccgttcctgtcgacgccgtcgttcgacctatccgccggcgcagagccaaccctgggcccgcgctcagcggccccgccgcctccacccacggcggccgcgcatcatcagccgccggtgtccgaggcggcggcccggcggcttcgggaggcggaggagcggctgcgggaagccatcgaggagctacaccggcaccagggcggtggcgttaagggagatggggacgagcagcgggagggagagcgggggtgcggtcacgacggggagtcatgcgcggcgcacgccgcggggaacctgtgccagagcttcctgctttcgtacggtgtccgcgtcggcatcggcatcctcctccgcgccttcaagctcgtgcgccgcaggtcctatggctcgctcctcgaccttaagcaactggtttcggagaaagatcttatagtaagagaggaagcttgccgggtagggttgctttttggcggattcactggatcatatcatgcacttcgatgtttccttaggagatttaggaaaaaggagacaccattcaatgcggcgtgatggagcagaatattagcaggttcggtggcaggattggccatactagcactggatgattcaagtaggaggcgtactctatctttatatcttctagcaaggctcgctcagtgtgcatataattctgcaaaatctaagaacaaatttcatttttggggaagccattggagacatggagatgcattgcttttttcattagcatgtgcccaggttatgtatgcttttgttatgaggcctgaaagcttacctaagtcgtaccaagaatttatccttaagacaggaccagtagcagaacctgtctacaaggttgtcaaagaatgctgcagaggtggtcctgtggatctaactgccctctcagcccatttatcaaacaagaggaatccggatttgataaatttaacaacaaatccatccattatcccatgttctgtgatccaccctgacagagcatcatgcttggctcaaaatgttaatgttgtttcatcaacattcaagaagacattccctctatatttctcattgacatttgtgccctttgttgtcctacgtcttcaaaagttcttggaatcgccaacgacaacttgttggcgtgctcttgtgggtgcagttcgctccaccacctttttgtctgccttcgtcactgtattccaggctgctatatgtttgcaccgaaaagttgcgaacaaagaccacaaacttgtgtattggtttgctggtttgatgtcgggtctttcaattcttttggaaaagaaagctagaagggctgagctagccctctatgtgcttccacgtgctggagattccctatggtatatattgatcaaccgccacctgctcccaaatattaaaaatgctgagcatgatctagaccctgacgagtacgaacaaaaactcgg

SEQ ID NO: 20414 - DNA, 2044 bp, Zea Mays
gcaactttgatttgtcatcttgcgagcggcccacgagtcgtccacatctccacgctcccacccacaaaacaggcccaaactaaccattcctggccgcacacgtcaccccccggcccaaccctagcaccggcattccggtggcgcccaccccttaccccacatgtcattcacccactaacgacctcacatataagcactcttccgttcacagagcaaccacgcgcccccccccccccaaggccccaaccttccaggaaaaaaaacccggaatccgcacccatccatggccgccgccgccctgctgcgccgctcgccggcggcgcgcgcgctcctctctccggcgctctcgtcccgcctcgtcgcgtccaagccccactcctcctcccccacgcagccgccccccgaggcaaagggcgcctccagcacgaagaccttctcgatctaccggtgggacccggactcgccgtcgaccaagccgcacctcagggactaccaggtggacctgtccgactgcgggccgatggtgctggacgcgctgctcaagatcaagaacgagcaggacccgtcgctcaccttccgccgcagctgccgcgagggcatctgcgggagctgcgccatgaacatcgacggggacaacggcctcgcctgcctcaccaagatctcctccgcctcctcggcgtccaccgtctcgccgctgccccacatgttcgtcatcaaggacctggtggtcgacatgaccaacttctacaaccagtacaagagcgtcgagccgtggctcaagcgcaaggacccgccgccgcagctaggcaaggaggtcccgcagaccaaggccgaccgcgccaagctcgacggcatgtacgagtgcatcctctgcgcctgctgctccacctcctgcccatcctactggtggaaccccgaggagtacctcggcccagccgcgctgctccacgccaataggcttccgctgtgggggacacttatgaaaccaaaacccaacatgttcatgcaccttcaagctcgaggatatcacggggtgtcagagaagagaaacctgcgggaccacaaacgtagattgcttgcagaaaagtttgagctgagaggaaagctgtataaggctgtctgtagggaccctgatcttccattggatatgcgggagaagttccgctataaattgtccaagttgccaagaaatagctccatgacacgccttagaaaccgctgcattttcacgggacggtctcgtgctgtctacaagaaattccgcatgtctcgtattgtgttccggacattggcaaacaagggtgaactgatgggcgtaaagaaagcatcgtggtagatgttaacgagccagtagaaaaaaagcgctagctctgcactagtccaggaaaaataaggtggatacaggacagccgtgaccagttcaccaaggagcgcctggacgccatcaacgacgagttcaagctgtaccgctgccacaccatcaagaactgcacgcatgcctgccccaagggcctgaacccggcgaagcagatcgacacgatcaagaagctccagttggacgcctgaaagcggtcatgccttcccttcaagacgaacatggaacaaaacctgtgaaaaattgcccttcttttgcgccgtggttttctacctgacaaataattcccgatttgggggcctcctggaggtagtgtagggagtgaataactgctacagcatttcatttttatgccgtatctaatttggtcatctgcaatgcattgtatggatcaccatcacttgtggatgattgccgttgcactttaaatttgcttcacataaacgaaatttgtctggccttttgagagtgaacgagtgttaaattgttaataacagtccgtcgtactgtggcgctcgttggtgaacgtatatagggtaaatctggttgttatctataagtactacctccgttcttaaatgtctggttgttacctataaattgtactacctctgatcttaaatatctgaccccgttgacttttttaaaatatatgtggtaagaagaatg

SEQ ID NO: 20415 - DNA, 1501 bp, Zea Mays
ggaattccgtagacctcgccgtcggccaccgcccgtgcaatttggagttgagggaagttcaccggaaggcagcacgatggttcagaagaagaagaaagcggccgcggcgcccaaactccgcaagcttccgaagcgcgacgcggataagaagctcgggaagaagggtgacatggcagagttcagggcgcagctggactcccttgggctgaagatagtccaagtcacggcagatgggaactgcttcttcagggcaatgggtgaccagcttgagggcgatgaggaagagcacatgaagtaccgagatatggttgtggattacattgtgaaacaccgtgaggagtttgagccatttatcgaggatgaagttccgtttgaagaatattgcaactctatgctaaaggatgggacttgggctggccacatggagctgcaagccgcttctctgctgacaagaagaaatatatgcattcacatgcttaattcaccacgttggtacataaacaacttttctggccgtgaagctactaacatggttcacttgtcttatcatcatggtgagcattacaacagtgtcaggctgagagaagatccatgtcaaggtcctgcaatgccagttgtcatcaagactgattccaatatatccaacacaaacaataacgctcaaacaaaagcaaaggaggtgaagaaatcttcacacaggtcaacctatgacgacacatcagttaaattggtcatggctggaactggatgttctgacattgccatagctgagcatgttctcggagaaatggatggtgatgttgatgctgctattgagtacctgatagcggagcgacttgcagtcagtactgatgatgcggaggtagacctttatataaaccatgcatttaacggagatgaacctaccaagaggcaagaggataataacatgatcgagcacaaggatgaagcaaattgttccaacgaagatgaaactgtcgagaaaccaaagcattcaaacgctgtgcattctaagaaggagaagtccaaaaccaatggttgttgctcttgtggatctgcaaggaagcacaaggcgtcttgtagtctagccacagcatcatcatcaagagagcctccaagggccaagggcgggcaagggaaaggccagagaggaaagaagcagaagaagaaagagcaagcggaagcagcagctgccaaggccaaggagtctgcaattgtgccagacctaggagctctttgcatctgaacacaagcagcagatacgccagccctgcttttcatccacctgtggcttatcatctcatgcttagttgaagcgaacgcagcagatctgctgcgtgctgactgagggaccgacgtgtaattcatccacaccacacgacaggaggggcgatgatgtcgctaaactagcaggttttgcgatggtatagaatcacaatcgtgtcattggtgtcatgcttactaaacaaatcttgttttgacgcgtaagctgatgagcctg

SEQ ID NO: 20416 - DNA, 1849 bp, Zea Mays
cactaatcggggctagtggattggcatattttcttcataatttactgctaaaaggatgatgaaagggtttgaaaactgccataattgagggagacgtcgtgggtggaacttgtgtcaacagaggctgtgttccgtcaaaggctctccttgctgtaagtggtaggatgcgagaacttcaagatgaacatcacatgaaatcactgggcctacaggtctcatcaccaggatatgacaggcaggttgttgctgaccatgcaaataatcttgcatctaaaatccgcagcaacttgactaattcaatgaaagctctgggtgtggatatactcactggtattggcaccattgtggggaagcaaaaagtgagatatgggaaagttggtttcccagacaatgaaatcactgctagaaacatcataattgccactggatctgttccttttgtccccaagggcattgaaatagatggtaaaactgtatttactagtgatcatgcactaaaacttgagtcagtccctgaatggattgctattgttggaagtggttacattggacttgaattcagtgatgtatacacagctctaggaagtgaggttacttttgttgaagctcttgatcaattaatgcctgggtttgatcccgagattgcaaaattggcgcagaggattcttattagtcctcgtaaaattgactatcacactggtgtttttgcaagcaagattaccccagcaaaggatggtaagcctgttttgattgagctgattgatgctaaaacaaaagaacacaaggagacacttgaggtggatgcagcactcatagctactggaagggcacccttcaccaaaggacttggcttggaaaatatcaatgtcgttacacaacaaggttttgttcctgttgatgagcggatgcaagttatggatgcaactggcaatgtggttcctaatttatattgtatcggagatgccaatggtaagctcatgcttgctcatgcagccagcgcacaaggaatctcagttgtggagcaaatcagtgggagggacaacattttaaatcacctaagcatcccagctgcttgtttcactcaccctgagatcagtatggttggcttgacagagccacaggctagggagaaggctgacaaggaaggatttgaaataagtgttgtaaagaccagttttaaggctaacacaaaggccctggcagagaatgaaggagatggacttgctaagatgatttatcgccctgacaccggagaaattcttggagttcatattttgggcttgcatgctgctgatctcatccatgaggcatcaaatgccattgcccttggaacccatgtgcaggacatcaagtttgctgttcatgcacacccaacgttgtctgaagttctggatgaactcttcaaggctgccaaggttaacacagctggttcgcattctatgaatgagccagttgcggtgtagagaggagccatagttgaaacaatctatctgctgcagccccacaccccagttatattgcctttagtacttaactagcctgctactcagaaaactgattttgtagccatttgcggacattttcgttatgagattcaggattagtgccagcactatctatttcatgagaaaatagaaatccaatgatctgtcccatgtatggaaaaatgtaaattttgtagtccttgtagagtaaatgtagtgcctttacgtggcaaaactcgctcttatgaatctatgattacttcaattcataagatgggcttgtttggtcagcattatgaatttttacagcttaggtcagcagctaccgtatctcattctttatttcattcttatttcaatcttca

SEQ ID NO: 20417 - DNA, 1136 bp, Zea Mays
caattaccaaaccagccctgactccctgaggtttgacggaggttgggttggatgggtggcccttcctctccccgtcgggagaacgacggcgagggggagtggcgggagatctccggctccggcgacatggaaggagcgcccgaggtccttcgacgagaagaccaggacggcgtgttggcgtaaggcagcggtgctgtcgggacggcacccggaacgctggcggcaggacgccgtgggcaacgtggtctgccgccgtttctggggctgccacggatgcctctgctacgagaggagaatccactgttgagaactgccagatcctccagactagggtgaaccgttccaaatctgataaagcatgggtagcgcaagcagagatgcagggtttttcctgcgatattatgtttactgataaggagctagatataattgagatggctgtgtacggggacgtcattcgtccagggaagcaatgtcgctgcagaacagtagccgaggtgctcgggcaggtgaagccaacgaatcgcatggctgcatgtgagttaccagacaaaggtgcctcttaaaatgtataattcgaataaattggtttcgaccctcacctgtcagaatacaaccttttgtagcgcagttgattccattcaacagaggaacttgagttctttctcacaagtcataatcttgggaaatggatgcagttgatctgcagcctgtgctcattcatgatatctgctcgtaaacattctgttgatttttttgttgttacatattgattgatggcaacgttatcaatgaattggcccattccaataattgggcttgaaaataactacttcgggtggttcaactcccatggctggtttagcttcagttggttggacctgtttagtaaggccactgtaaggatgtgagctgcaacagcctttgccgaggggtatagaaatgagaaactgaagtttaaatgttgtgttgtgatctgtagcctacatgatgtggtaacttcgaacttctacgcaaccatgatttctaccttaggaggcaaattccttaggagctgctggagaaggtcctcaattccgtatataccataccactagaaaagttgtaatcctacatgagtcagcttcaaattttgc

SEQ ID NO: 20418 - DNA, 570 bp, Zea Mays
agttcatgttcggagacctgcgagaagtctacagttatggtggtagccagaagaagaagacttccagccaaaggtggtcaaaacttcttgatctaaagaaaaccctggataaagcgcctaagtgaattacttagtatgcatcagtcaactgccaatgctgcatgcagagcaagagaatagtgctgtatcatgatgctggaatggaagtggcgacaacttgaacttgttcaaccaagatggaaggttggtggtttgtaactcattggctgttggctatccttttcttttgaacagaagagagaggattgaccatcttatctgaatggtatatacaatgcgactccatgcccagggactggtcatgttgagaacctagatacaggatcatacattataagcacatcatcagagaataaatgtgtgtgtgaacataactactatttgactgtttgtataaagcatttcatctttttttaaagttttaatataaaacatttcttgttggcacataagcattcatcatgcatccagtttcctttcaactgccaggagcacttcaacgtcataaat

SEQ ID NO: 20419 - DNA, 1460 bp, Zea Mays
tctgagtaccctatccggtgtcatgtctgctggtactctggcacgtctgaggatcagcaggttttggtgactgaggaagagtttcctgaggtgaaagtagatttccaggaaacatttttaggccataacagtccaattagccgatgtcgattttctgcatctgggtcaaatattgctagttcatcaattgatggcacagttaggatttggacatatgattcgtcaactgcatcatccagaaatgctactatatactgtgggtctgaagtcagtgcactttcatgggaatgcagatctgacagattgctgctcataggcacagctaatggaggaattaaagcttggaatgctgatgcaaagagagttgtttgcgacctgagtacatctagaaactttccaagcatcttagatttgaaatgcagccctgttgaacctgtgtttgtctctgcagctgcatcaagacggcatggatcaactacatttgagagaacaggatttgccaacttgacagtgtggcatatgaaaacatggaagccattgactgtcctccctcttggtgaggatccacctgccattacttctctttgcttcaatcacaatgggaagattttggcagcttctgctacagatggaatgattcacatgtttgacatgtctgctggtcttcaaattacaggatggcctgcccatgattcacctgtgagctctgttctttttgggccagcagaaactagcatcttcagcttaggctcggacggaaagatacttgaatggagtttgcacaatcaaggtcagattctttggtcaagagattgcagcagattctgcaatccggagagctttaaaacacgaatgcatgaaatagcattggattcaaatggcaagaggctgctggtcacctccggtttggttcgggccccaatataccaggtacaaggccatgaaagcgaactgaggacactgccgcacagttcatctatcacaagtgtggattggcatccaacactgccaatgtacatcactggatccgcagaccactctgtccgggtcacgtctatcttatgatgatctataaaacaaggtgctggcaacaacctttcccagctagctagcatgcatcaacccttattgacagtcttatccatgcgtgaggctcggtgtcacgctatttcctcgcatggaagatgagctgtgttcttgttttgtggctttggtgtgcgtctaattctgtaccctttggtgggttgctccaacatttttttttcttgttgtaaacaggcatagagttctgtggtcatttgctttaaaatgagtgatagatcaaaataagtaaactttgtagcccgtctctcgaaatctcacgtctgcatacgcagatatgctatatactgtatgtacttgtaaatgaatttgtagcccgtctcagatagtacttcgcattacaatctatcatccttcac

SEQ ID NO: 20420 - DNA, 2330 bp, Zea Mays
cacaaatcaggattggtagagcccatctctgcgccctgccttgctggctctgacctctccctcccttccccttcctcgattgttcctcccccttcttttattagggttttttttgtctccttagatttgcgcctgttctcacctgtgcgcatactagtctctgcatcagagagtagagacctcggagccgatcttcaacacgcagattgggcagagctgcctgccggagggagagtggagagagagagagagagagagagagagagagctcaaggggggcaaaaggagtttttttttatccagcttgttagcttgattctctttgatccgggagagcagccgccagtccaactaatcctagctattggtgtgccggggctttgattgttctccagatccgagccacctgctgggtggactccaggaatccgagcacgaagttgacaggggagttctcagggaaaaggggaggaaggaagagcctgaaagggcggtgcggagagaaagactataagagcgacctgggtcccttgaggatgccgtcaagaaaccgcgtggagaggagggcgatgagatgagggatgctggccgcggtgatggactatttcagctcctgctggggcccgcgatcgggtgacgggcacagggggaagggccccgacgccgccggccggcaggacggtctcctctggtacaaggacgccggtcagctcgtcactggggagttctccatggccgtggtgcaggccaaccagctgcttgaggaccagagccaagtggagtccggatcgctctccctggctgacccgggcccgcagggcaccttcgtcggcgtctatgatggccatggcggtcctgagacgtcccggttcatcaatgaccacctcttcaaccatctcagaaggtttgcaactgagcacaagtttatgtcagcggacgtgatccggaaagctttccaagcaactgaggagggctttctttctctagtcagcaaggaatggtctttgaagcctcagattgcttcagtgggctcctgctgccttgttggtgtaatctgtgctgggactctctatgttgcaaacctgggtgactcacgtgcagttcttggaaggcttgttaaggcaactggagaggtcgtggccatgcagttgtcatcggagcacaatgcgtgctatgaggaagttagacaagaactgcagtcatcacatcctgacgatccacatattgtggttctcaaacacaatgtttggcgagtgaagggtctcatccagatctcaagatctattggagatgtatatctaaagaaaccagagtacaacagagaaccacttcacagcaagtttcggcttcgagaaaccttccagaggccgatccttagttctgaacctcaaattactgaacatcgaatacagccaaatgatcaatttgttatatttgcttctgatggtctatgggagcacctcagcaataaggaagcagttgaccttgtccaaagtagtccacacaatggaattgctcggagactagtgaaagcggcgatgcaagaagctgccaagaagagggagatgagatactcagacctcaagaagatcgaccgtggtgtgagaaggcatttccacgacgatataacggtcgtcgtggtattccttgatttgaatgccatgagcaaagctagctggagcaaaagcccctcggtttctctccgagggggcggtgtcaccgtccctgcgaagtccctcgcacctttctcagctccggcacggctgaacagcacctactgaagttgctaccactcttgaaaggaagaacacggtgcagatctgcagtggtgagagaaaaaaaaacagcaatcaagtgtagcgttacagttacacctgctgtgttgttgctctttgcaaaactactgtctagactccgcctggtaattagtgtactgatagcgaggtaaaaaaaagttagattatttgttagcagcggcagtgatttgacatctaaggaacaacaacacggtgtccaccgattctgctatcctgatggctcgcggcagcctggctggtcggcacacgacacgaagtgaagctgttttactggcggcatctggctttgttatctcatgggacagtgatccacaagagtaagggatcagctcaatccaaagtcaatagatgttccttataaaacatagaggtacagatgttctcatcggctatgtgtatttggggaaaaaatcaatataaggggtgtttggtttttagggactaatttttagttcttctattttattatatttattccttaaactaccaaatacataaactaaaattctaatt

SEQ ID NO: 20421 - DNA, 874 bp, Zea Mays
gtaagttttgattcagagcgaggaagcgaggaacaggggaacaacaaggacatggacgctttcagtgcagtgatggacaaggtgaagggccacccagaagcgatggagaaggtcagcgctgtgatggacaaggtgaagagccacccggaagtggtggacaaggtcaaggacgaggtgatgagcctcgctggcgctctccgtctgcggagacatggatccgaagataaagaagctgagtccgaagagaaggcagaaggagcgcagagcgccgacgagggtgcctctgatggcatggctggagaacctagtgtgttggagcaggccgtgcaagagattcaggctgtcgccgcagctttgcagcagacagctgaacccgaagctgaaattccagctgagaccgctgctgctgctgctgcagaaacttctgctggaggagacaagcctgaagaaacgaacggggaggtggagcaagatgacccgaagaagcggctcgacttcgctgggttcttcgccatgctgctcgagaggttctgctccccggccagcaagaagaaagattaagttggttgcaggtccggcttgtggatttctcgttctgtcttctgtgatcttcgacttggacattacatggagtgcgtgggattgtgggtggtgtacagtctgcagttgtgttatcttaaaacaacaaatcagctattggttttttactaccttactttgatgacggggcaatggctacgttttacttgatgtaattatcatcgccattgtggatttaatttattttatctctactatatttaaagcacaagtttcaacggtcgtgcttcgtcaccttttttttaaaaaagtccccacatttcttctaaatcaa

SEQ ID NO: 20422 - DNA, 2388 bp, Zea Mays
cccaaccgtccggtcaaccgaccagcgtttcctgttccaccactcagttatttgaaacatcaagatggttaatttcggaaagaaattgatggctgatcaagtggacgaatggaaaggatactacatcaattacaagctgatgaagaaaatgttaaagcaatatgtccaacaaacccaacatgatgagaaagatcgcgaacaagttcttaaagacttttcaaggtttcttgatgaccagattgaaaggattgtgctttttctgctacaacaacaaggccatcttgccagtaggattgagaaattggcagaaaaacgcactgctcttctggaagagtatgacatatcacaagtttatcagctgcatgatgcatacagggaagtcgggcttgatctcataaagcttctccgctttgttgatgtgaatgctactggtatacgcaagatactaaagaaatttgataaacgctttggctacaagttcactgattattatgtcaccactcgtgcaaatcatccttattctcagcttcagcaagtatttaagcaagtgggaattgtagctgttgtaggtgcattatcgcgcaaccttgaatatctgcagcatcatgaaggaagctttgtatccatctatgatcgtccagcagttaccttgaaggaccctattatagaccaagtaaaccatgcagtacagaaactcacgcatgccacgaattttatgcaattcttgggacagcacgcgcttattgtccaggaagatgcagaaagcgagtcggaggatcttgttggtgatcagagctaccatttcatgtccctggtgcttaatctagtgaacacattcctttacatggtgaatacatatatcattgtgccgactgcagatgactatgcagtaagccttggggctgctgcaactgtatgtggtataattattggatcgatggcagtcgcccaagtattctcctcagtctacttcagtgcctggtcaaataagtcctacttcaaacctcttgtgttcagtagcattatgctgtttcttggaaacctactgtatgcattggcatatgatctgaattcactaatagttctcctgactggacgactgctatgtgggttaggttctgcaagagcagtgaaccgtcgctatatcagtgactgtgtgcctctcaagatgaggctacaagcctctgccgggttcgttagtgctagcgctcttggcatggcatgtggccctgctcttgctggttttctccagattaaattcaagatatactcgctcagttttaatcagagcacattgcctggatgggtcatgtgcatttcttggcttatttacttattgtggttgtggcttacattcaaggaaccagaacacttcactaaaactctggtcaatgaacagccgtcagaatctggccgccaaggaaattctaacttggaggcaggtctagctgaaccattgcttcaaggtatagaacgaaggcaggatgagaactcagaagttaatgatgatactgaagtagagtcagaaagctctcatgaaccagcaacatcaattgcttcagcatacagattgctaactccatctgtgaaggcccagctactgatatacttcatgctcaagtacgcaatggaaatactactatcagaatcgagcgttgtcaccacatactattttagctggtctacaagtgctgtggctatctttctagcgattcttggattaacggttcttccagtaaatgccattgttggaagctacgttacaaatttattcgaggataggcaaattttgttggcatctgaagtcatggttctcatcggtataatcatgagcttttgtttcacacctcactactccatcccgcaatatgttctttcagctttcatcacatttgtatttgctgaggtgcttgaaggagtgaatctgtccttgctctcacgagtaatgtcatcgaggctttcccgagggacctacaatggtggactcctttcgacagaggccgggacgttggcccgtgtagttgcagatgccacgattactgcagccggttatctcggcacggacctccttctgaatgtcactcttctcccatcccttgtgatttgcatagtctccatcgcagcagcactctacacttacaacaatctctattgaagctattgttgctgtacaagtgtacaacaatgttcctaagctaaaatgttcctgcccacaacgggtttgtatatctgttcaagcatggtttgtaaacattttgatcaagtttgtatgcaaaatttcttgtatttagtgcatttatgtaaagattcatcctgtaaagaattataaactatgagacgctattgccatttatgatcatttatgtttatctttttagccttatgtta

SEQ ID NO: 20423 - DNA, 1867 bp, Zea Mays
tacagtacatcgtgtctggaaactatttgctgtcaaaacagaccggatgtcagaaaaggtcattgccatccaaaagtcctgagagctttgatagaacaggcagaaaggcttacgctcagttctagagctttctacaatgataagttcccaatctttgcggaatatctgacaagcatgtttggatatgacatgatgttgccgatgaatactggtgctgaaggagttgaaactgctatcaagctggctaggaaatggggttatgagaagaaacatataccaaagaatgaggctttgcttgtctcttgctgtgggtgtttccatggtcgaactcttggtgtcatttccatgagctgtgacaacgatgcaactcgtggttttggtcctttggttcctggccatcttaaagttgattttggagatattgatgggttaaagaaaatcttcgaagagcttggagatcggatttgtggttttttatttgaacctatccaaggtgaagctggggtagtaatcccaccagatggctatttgaaaggtgccagagacttgtgttctaaacacaacgttttgatgattgctgatgagatccaaactggcatagctagaactggtaaaatgctggcatgtgactgggaaaacatacggcctgacatggtgattctaggcaaagcactcggtgctggagttgttccagtcagtgcagttcttgcagacaaggatgtcatgctgtgtatcagaccaggggaacatggaagtacattcggtgggaatccgttagctagcgctgtggcagttgcatcactgaaagtggtcagagacgaaggtcttgttgaaagggctgcaaagttaggacaggagtttagggaccagttacagaaggtccagcagaaattccctcaaatcctaagagaagtgcgcgggaggggtttgctgaacgcagtggatctaaacaacgacgcgctatctcctgcttctgcatatgacatctgcatcaagttgaaggagagaggcattttagcgaaacccacacatgacactataatccgacttgctcctcccctcacaatcagtcctgaggagcttgcagaagcatccaaggcgcttagtgacgtgctggagcatgacttgccacagctgcagctgcagaagcagataaaaaagccagaatctgaggcagagaagccagtctgtgacagatgcggccgggacttgtacggatgaatgaagcctccgaacagagataacttcattttcgtaggcacccatctcgccccagaagaaataataacagagcagaggatgccagctgcctagctacttgggttaccgtaatgttatgcgacttgttgcatcgtataccaagtatatgagctattgcaaccttggtgaatatgtcaaataaatggcagcattcacatgctcaaatatgggcagcattcacatgcactgtgacttctttgcaacgttttatcaagtatccgaaagttccaacaggaagttggtcaacaatcgataatcagagcaaagaaaaaaaatggatgatatgttcgatcacggtactgatgacatagtattcccttcaaaaaaacagaaacgataaaaacaagggagtattaatcggtcgagtaatatcgtatatcctctttccttggaaaccgtgatgccttgtttttttttccggttcttttcagaattttgatagggaaccaacaatgaccatattaccctcatgtaaacgaactgttgtaatcttacagttttgggataggatagtctttttatattaattatgaatataacaataacgacccatataaatatcccacaatctatattgttcacggatatgagaaattttattcaataa

SEQ ID NO: 20424 - DNA, 2510 bp, Zea Mays
atttgattaccactaagataactaaacatcatactgatattcaccaagcagtcactaagtcggtaacttctgactgttttcaagtcagacgacttgttggccgttaattgcgattaatcatgattagtcggccgacttgttggccgttaattgcgattaatcatgattagccggacgacttgggcgattaattgtgattggtccaaaccgacttggacgattaatcgcaactaatcacaattaatcggacgacttgaaaacagcctgaagtccgaaataaggtatgttgtagcaagcaatcattcatctattatactgatattagttcagttctcaccatctgatgggcagaggtttgatctatggtgtaaacatctgtttttcttctttatttgtgtagtagtggtcttgttttgtgcaatcatatatacggaatattttgcattgtttgaggtgcagatcagtggagtgcacccaaaacagaggatgtgtttccccaagaagattctttatttgttttaaccaactaaattcacccatgctgtttttagattcatccatgttgtttgcatactgaatattacttgtaaagaaacatgttacatgcataattgttgttgcaggctatcacacaagataccgttttcgctgcacagaaacaagatctgtctacggtgatgaacttgctcaatataaatcaacatcaagcacgagccctcctcattcaccaccgatggagtatggatggcatctatgattctctagacatggggcgagaacgcatgctcagaaattcagggatcgtgctgcaggaggtcaacagcattgcagcagctggctcaatgacaccatggagaacagtgacctgcaaagtgtgttttgaggacttctccatggatgctgtttcgaccatggactgtgggcactgcttctgcaatgactgttggacggagtatttccacgctgcggtagagagcgggaaaaagcaaattcggtgcatggaggtcaagtgctcggctttctgcgatgaggacctcgtgcggtttctccttgtccaaaagtatccagacatggccaagaacttcaatcgcttcctgcttgggtcctaccttgaggacaatgcctctgtgaagtggtgccctagcaccccgaactgtggccatgccattcgcgtgggcactgatgagcgctgctgtgaggtggaatgcccctgcggcttaagcttctgctttaactgcatggggcatgcgcactcgccttgcccgtgcaccatatgggagaaatggaatgccagccggtccgagggagagaacatcaagtggatcctcgctaacaccaagagctgccccaaatgcttcaaggccatcgagaagaacggcggctgcaaccttgtccgctgcaagtgcggacagtgtatgtgttggctctgcggcggaggtaccggccaagatcacacgtggaacagcattaccggccacagctgcaaccgctacgaggaggagatctgtgtagagaccgtgcacaccggcaggcagcagatgcagcggtacaagcactaccacgaccggttcaagatccacggcgactcgtcgtacggcgtggagaagcagaagcttggggcggccatcgaggagcgggtgcggcttcttgagtcggaccgcgagcgcccgctcgccatccgcgacggcgactggctgacccgggcgcaccggcggctgctggtttctcggcaggtgctgtcgcggtcgtacgtgttcgcatactacatgttcggcggccacgagctgcggacgcgcccggccgagcgggcgaacctgggcgtggcgcgtaacctgttcgagcaccagcaggagcagctggagcggcacgtagagcacctgtccaggtcgctcgcggagtcggccgacctggcgggggctccggacgcggagatcgtgaagcagaagcagacggcgatcacgctcaccaagaccgtggagcggctgtgcggggagatgtacaagtgcatccaggacgagctgctgacgctgctcgtggagcccatgagcatcgcggcgtacaggccggacggccccgacagagcgaagcccgcgatctgatggggtggggccgtggggggctgtcttttttactcgctgccacattttgccattagggctaggcgtaggattttgatcgccttggtttgataaaaagctgcctgtcaggcagcaaccaacacgccatatacagcgtgaacgtgccgtgaaatgattttaggctgttagcacacaagggttaggtactgactgaaagttaaaaaaaggctggacatgtttatttttttaaaaaaagctgattcatccgtccatttgaactccattctttttttttggagaccacaagatgaatccttgtgtctggtagttcgcctctattgtcttgatcttagcttaaccgtttaagcttctgctttgaacttgatttgtatggtatccaccttttctaaattagaagcatcttaagtttgg

SEQ ID NO: 20425 - DNA, 167 bp, Zea Mays
acaggtaccgcaggatgaggcgcttgaaggatgtggctatgtgttcgtgagaggtctaggtcgccgtctcccagtcaactttgggttgctggaccgttgtctccttataatgtaattatttattttgtgcaaagttcctgttatgtagtaaagatgtgacattcgat

SEQ ID NO: 20426 - DNA, 2791 bp, Zea Mays
aattgatccttttgaagattctgatcccagattaattcacgactagagttgtgaactctataggttttcttgtgtaaatttaacactaatttggctgctctttgggtctgggggcacaaatttgaaatattgggagtgctggtgtgatatagaggtctaggaggagatatgaggtactacttgcgtcaggtccagcgtttggttggagatatggaaggaggagctctcttgtttatagacgacctcaactccaagtgacaaagcgaacagctgttgaacgtttcccttctatttctgtttctttttgccggatttggagatggaggtgaattcctctggcgaggaaactgtggtaaaggtaagaaagccgtacacaataacgaagcagcgggagcggtggacagaggctgaacacaaacggttccttgaagccttgaaactttatggcagagcatggcagcgcatagaagagcatgttgggacaaagacagccgtgcagatcagaagtcacgctcaaaagttcttcactaagttggaaaaggaagctatgaacaatggtacttctccggggcaagcccatgacattgacatacctccaccacggcctaaaagaaagccaaacagtccatatcctcgaaaaagttgtctcagctccgagacacaaaccaaagaacttccaaatgacaagtcaacaaaaccaaatatgcccttgagcaatgggcatgtaaaaatggtaggcgatgcatctcttcagaattttcaaaggaaggagttgtctgaaaaaggaagtcgctcggaagttcttaatctcttccgtgatgccccatctgcatcattttcttcagttaacaaaagctcttcaaatcatggggcacccaggaggaccgaggcaagtaaaacagaaagccgagatatgtccatcatggaaaataattcttttaaccccaacacccaagaggatgtaaaggtgatcagtgatcaggaaatggaaaggcttaatggtatccagatcagatctaaatgtgaacattctcatgaggggtatttggacatctcaacgcaacaaatgaagctaatgccaaagtctgtggagacaacatatgtggatgaacaaactgcaagagcttcacacaccctagcagagagcgacgggacagctagcattccagtgactgtacctgaaggaactcatcctgatcaaacaagtgatcaagtgggaatcaatggaagcatgaacccatgcatccatccaatggtttctgctgacccaaaatttggtagtagtgccacaccacagactttccctcataattatgcggcctttgctccaatgatgcagtgcaactgtaaccaagatacgtacaggtcattcaccaacatgtcatccaccttctccagcatgcttgtttccacgttgttgtcaaaccctgccatccatgcagccgccaggctcgcagcatcatactggccagcagctgaaggtaacactcctattgatccgaatcaagaaaaccctgcagatggcgtccaaggaaggaacataggctctcctccaagcatggtttctattgtagcagctacagttgctgcagcatctgcatggtgggcaacacaaggtcttctccctttcttcgctccacccgtggcttttccatttgtaccagctcctagtgctgcctttcccacagttgatgttccacgaccttcagagaaagacagagattgcccagctgaaaatgcacagattgaatgccaagaagctcgaaaacaggtacagttcgaaggtttaagaattgctgcttcttcagagtctgatgggagtggaaaaggcgaggtgtctctccatacggagttaaagctatctcctgcccagaatgctgatgccacacctaccacaggagctggcacaaatgatgcattcaggaataagaaaaagcaggatcgctcttcatgcggttctaacacaccttcaagtagtgatgtagatgcgggcaatgttcctgaggaggacaatgctaatgagaaggcgaagcaagcctcctgcagcaactcttcagctggtgacactaaccaccgcagatttagaagcaatggaagcacaagtgattcatggaaggaagtttccgaagagtagggaaaagcttccgcaaagcttttctcccccacaagcagtagactcgaaggaggttgccaaggaggaggaagatgaagtgaccacagtggcagttgacctcaacaagaatgccacaagcattgatcatgatgacctcgacacaatggatgagcccagggcttcctttcccaatgaattgtcgcacctgaagctgaaatcgcgccgtacaggcttcaaaccatacaagagatgttctgtggaagcgaaggaaaaccgggtgccggctagcgacatggttggtaccaagaggattcgtcttgatagcgaagcatccacataattgatttcttcaaagttatatttacatctaagctactataggacttcagatcttgcaatgcagtgcttcattaaaactcaatctgttgtgtgctgtattttaatgcttgtcaagcagcccgctagactgctttaaaaccttatctcgtagagtctgatttaagcatcatgcaactatcaaacttttttttttggtcaaaatgtattttccttatgttttatatttttggaaaggaaaataattgaaatattatttattttgaaggctcatgcaaaggtttatttgatcaaggtgtaggataggctgagcgagagggtgaacattatgactaatatagg

SEQ ID NO: 20427 - DNA, 102 bp, Zea Mays
taacttacctttatttaaaagtaagatagagttgaatatttacagaccaaaatataacctatgagtgcagagtaatattattacacaccaagggaggcaaaa

SEQ ID NO: 20428 - DNA, 1024 bp, Zea Mays
cgatctcaacatccatactgtcacacaggagccggcgagcgatggagaagaagaagaagagcagggccagggcggcgacggagacaggctcgccgccggttccagctactgctgctactactactcgaggtcttccggcaccctcctgactggtggtgaacgggatcagatgcggagtctggtgtcggttcagccaggcaatccggcgttcgtgactgtcctcatgaagacccatgttgggcacaagaacagcatgctgaccgtccaccatggatttgcggcggagcaccttgaggggagatcgcatgaggtcctgctgctgaggccaaacagggaagagaggtggtgcgtcaggtactaccacgcgagccacaccagaggcttcaactgccgccgctgggtcaagttcgtccgtgaaaacaggctgcgcaaggaccacgtctgcgtcttcgagctcatcaaaggcgccacgaggacgacgatgcttgtccatgtcctcaggaaggctgatggacggcttgcgctggtggcctaagctcatgcatgtgccatgttgcaagtgccgtgcaatatgtacccacgtacgtatgtgtgcctctacccttgctatgaacctatctatggggtaaatgatgtcatcatccacaactcatgcacaaataaacttttggcatgaaaagagatatgagacggtaggtgcatctctaaggaggagcattacaacacagattaagtcgccaatgatttcattcaaaaatgtcaacatcttgtgcaaacatcatttaactcatgtgaaaccaacattaaaattattcgtcaatagctgttttaaacaccaaaaccatgccatgtaacgttaaaattattaagtcttctcgaaatcctaacgaggaaactagctattgttgggtaatttcttcgaactttgctgtggaagaaatgccataatagcttttattcccccaaaagacacatcatttatcctttcgaaaggatgggatctacacaacagattcaagtaccc

SEQ ID NO: 20429 - DNA, 1228 bp, Zea Mays
ggtcaaatcctcctttcgggaattctcgtctcgctcggctcctctgggcccacagcggccagcaaactgcctccgtcctccctgcgggctgtgccgcctcttcttcgcgtcggcgccgccctcctcccttctcttctgctgctgatggaactggatcctcgcctctacgagaacgtctctgtcagcgacaatgatgtccgaaacatagttctatcttatcttatgcacaactgttttaaagagacggcagaggcattcctatctagcaccgggttgaatttacctgtcgactatagtgtggatgtggataagcgtaaagaagggaatgcccttaaagccatagagctgacagaagaaatggcacctaacttgctagagaatgatatggatctacattttgatcttcttagtctccacttcattgagctagttcgctccaaaaaattcacagaagctcttgactttggccagaaaaaattgacatcatttcagaaggttaccaagtatattgagaaactagaggactttatggccctcctggcttatgaagagccggagaagtcacctatgtttcatctactaagcccagagcacaggcagaatgttgcagagggcttgaatcgggctgtccttgcacatgctaatcttccagcatattcatcgttggagagggtggtccagcaagcgactgtggttagacaatacctacagcaggaagttggcaaggcctttctgagcaagtaaatgtgcaaatggtcacttcttcagaacagggtaaccacctctccaggccatcatgtacatgtacccttgtggagtgcatacacgatgaagtagtttatacagttgaggtgttgttgacaccacttatacagttgcaatggtgttgtactttgaaaaggagggtgctgtatgctgtctgcttccttgatttacattctgttttacttgtctctctgccttagacatggcgaaagcatgtatgtatgacctgttgagctattctgtgcgttcgttcggtgaactcagttcgagtcggtttgtaattggtcttttttattactaccgccatgtgcagaggctaaaggtccgaactctggatgcgtaagcgtaacgggttattctgtccatggtactcctatttgcgatttccatatataagggactgtgaattcttcatcacttgtagatgttgatataattttttcagaaaaaaaaatgttcagag

SEQ ID NO: 20430 - DNA, 590 bp, Zea Mays
tttggctggggccaaagctctgtctttccttcagagaaagttggaaagatcagaaaacggcatgttttccttaaatctgagactgtaccctggtagatatgagattaagtttattgttgatggtgtttggaagaatgatccgctgcgacccactgtgcacaacaatgggcatgaaaacaaccttctgcttgtcacttgatttgaagttttcaccctggtagcatttttgtagatcattgcctagctccttctcggtatggttgatggcaactgattagatcggtccctccgtgtaactaatcagctttcttttcagtttttttctgtcttttctagataggtgtgtacaacataaacagtgtagggtgttattgaaatgcgtcgccctgttgagatagagaagaaagtagtgtgttcttttcttcccgtcgttctcccctgtgttggctcttcttcatgattctgtttaacaatgttgtaatgtctatatgctgtgaaggtggtctatcatcgaaattatccaaaagttatttgcaggagttgcattattgacgtgctatgtttatctgcaactaaccccacatagaaat

SEQ ID NO: 20431 - DNA, 3979 bp, Zea Mays
cccatgtgtaagcttttctcgcactcgtactccctcctccgctccggctaggaggctgctccctccgccgctccgccttcgtcgcgcggccatcgtttccggctctgtccccggatatctcttcgccaccgcttcctgcgccgcggcgccgccacaaccgaaggcgacccagtcgccttcaacactatggtgactcctcccactgtcgagcaggaggacgaggagatgctcgtgccccgccaggaggcggtcgacaccgacgcagcgcagcccatggaagtggtggcacagactgaggtggtgagcacggcggagagccagcctgtggaagatccgcagacatcacggttcacttggacaattgagaacttcaccaggttcagtgagaagaagcactatttagaggtttttgttgttggcggattcaaatggagtgtgctgattttccccaaggggaacaatgtggaccacttctcaatgtacttggatgttgctgactcaaccagccttccgtatggttggagccgctatgctcagtttagtcttgctgttgtaaaccaaatccagccagagtttacgatacgcaaagagacccaacatcaatttaatgctcgtgagagtgattggggtttcacatcttttatgcctttgagtgagctctatgatgcaagtagaggttacctcgtgaatgatactgttgttgtggaggccgaggttgctgtccgcagaattgttgactattggacatatgactcaaaaaaggaaactggttatgtgggcctgaaaaaccaaggagctacctgttatatgaactcccttctacagacactataccatataccctacttcaggaaggctgtatatcatatgccaaccactgaaaatgacataccatcaggaagcattcccttggcgctgcagagccttttctacaagctccagtacagtgacagtagtgtagctacaaaagagctgacaaaatcttttggttgggacacatatgattctttcatgcagcatgatgtacaagagctcaacagagttctgtctgagaaacttgaggacaaaatgaagggaactgtcgtagaaggaacaattgagcaattatttgaaggtcaccacatcaattacattgagtgtataaacgttgagcataaatctaaccgcaaggaatccttttatgatcttcagcttgacgtcaaaggctgtcgtgacatttattcgtcgtttgataaatatgttgaagttgaacgtctagagggtgataacaagtatcacgcagagaatcatggtctacaggatgcaaaaaagggcgttcttttccttgatttcccccctgttttgcaactccagctgaagcgctttgagtatgattatatgagagatagcatggttaagattaatgatcgctatgagttccctctgcaacttgatctggatagagatggtggcaaatacattgctccaaatgcagatcgaagtacacgaaacctttacactcttcacagtgttcttgttcatagtggtggggtacatggtggtcactactatgcattcatacggccaactttatctgagcaatggtataaatttgatgatgaacgtgtaacaaaagaagatgctaagaaggctcttgaagaacaatatgggggtgatgaagagttaccccaaataaaccctggtttcaacaacgctccatttaaattcacgaagtattcaaacgcgtatatgcttgtttatattcgtgaaagtgccaaggagaaaattatgtgtactgttgatgaaaaagacattgctgagcatttaagggtaaggttgaaaaaagaacaagaagagaaagaacacaaaaagaaagaaaaagctgaagctcatctttataccataattaaggtagctcgagatgaggatttgaaggaacaaattggaaagggtatatattttgatttggtggaccatgaaaaggtccataatttccgtatacagaaacaaatgccttttagttgtttcaaggaggaagtagccaaggaatatggcatccctgttcagtttcagcgcttctggttgtgggcaaagaggcaaaaccatacataccgccctaatcgtccattgaccgttcatgaggaaacacaatctgtggggcaactgagagaaatatcaaataaggcacacaatgttgagttgaagctgtttttggaagtagaacttgggctggatttgcggcctctccctcctcctgagaagggcaaggaagatattcttcttttcttcaaattctacaacccagaaaaggaagaactctgtttcatggggaggctctttgtgaaggccttgggaaaaccttcagaaatcctggcaaaactaaacgaaatggctggatttccccctgatcaagaaattgagctttttgaggaaattaagtttgagccaaacgtgatgtgtgaaactatagacaagaaactcacttttcattatagtcagcttgaagatggggacattatttgtttccaaaaatcaccaggagcagaatatgatgcacccgtgcgatatccggatgttccttcatttttggagtatgtccataataggcaggttgtacatttccggtctttggagaaaccaaaggatgatgatttttctttggaattgtcaaagcttcatacctatgatgatgttgttgagagagttgctcgccaacttgaattggacgatccagcgaaaattcggcttacaccccacaattgctactctcagcaacctaaaccacagcccgtcaaatatcgaggagtggtgcatctgtcggacatgctcatccactacaatcagacgtctgacatcttgtattatgaagtgttggatataccactgccagaattgcagttcctaaaaaccctgaaagttgcatttcaccatcctacgaaggatgaggttgttattcatagcatcaggcttccaaaaaatagcaccattgctgatgtaatatatgacttgaaaactaaggttgaactgtccagtcctaatgctgaactacgtgtactagaagtcttctaccacaagatctataagatctttccactacatgagaagatagagaatataaacgaccaatattggacactacgtgctgaggagattccagaagaggaaaaaaatataggcccaaatgatcggctaattcatgtttatcacttcaagaaagatattaatcagactcagattcagaactttggagaccctttcgttttggtcgttcatgaaggtgagactttagcagaagtcaagaagcgcatacagagtaaactgcaagtctctgctgatgaattttccaagtggaaatttgcatttatatcaatgaatcggccagactacctccaggattcagatgttgtacctactggctttcagaggagagaggtctacggagcttgggagcaatatcttgggatagagcacgctgatactgcaccaaaaagggtctatacagtgaatcagaaccgtcacgcatacgaaaagccggtcaaaatttacaattgagatttctaactaacatggccgcacggtgaaggcctccatacgagaggagcggccagaaaagggaggacagggaatttatactgtcagggggaaaacctcatagttagcgagccattcggtgtggcacggccatgtattccagcgctagaggccagccactgttatttcatctgtagcagccagcagctcctatagcaatgattttctttttgtacaagattttccttctttgccttagggtgatggcgcgagcgcattggtgtccgtttcggttgggcaattgcttcattcttagagcaaagctgggtacataagattttggtaggaagcgtgtatacaggcaggctgtatagttgtggctctctcggcttgatccctcgtatcttgtcttgtgctattgttaatgcagtgacaggggctgactgtaaatcgtggttccaattttcag

SEQ ID NO: 20432 - DNA, 4713 bp, Zea Mays
gagatagggataggaagagagagtgtgtggaagctaggagagagatagagatggacacgcagagacgcaagcgagagaattgctaaacaaacaaaaggagccgcaaggaagagaaaaaaagtggaaaggcgagcaagaaagagaagggcggcgaaccaaaccccaaggaggccaagacgcggacggcagcaggcaggcaggcaggcagccatgccgcggacgccgtcgctatcgccatcgccgtcgccgtcgccggagaggcaccagcaccagcccgcgcgccggaggggcggcgcagccccgtcgcagctggcactccaccaccaccaccaccaccgcggcggacactcgccgtcgccgccgccccgccgctcgctccgcccgcgccgcgccgccgcgccctcctcccgcccgctcgtcgacgacttcttccccttcccctcctcgccgtcgtcctcgcccttccgctcccgccagcgggggccgtcgccggagccgtccagctccgactccggcgctgacggtggcgccgcgggctcctcggtctccgaccggcgccggcgcaagctcaagctcgtcgtcaagctctcccagctgcccccggaccagctccaacgccgggccccacctcccccgtcgtactctgacgactccgatgggaccgaggacctggccggggacggaagcggcgacgaggagcaggtcaagccgcccaagaagcgccggatcgagccgcgcgccgacagatctcgccatcgcgagtttggtggtggtgggaggagcgaccccacgagcgcgccgcggacgaagcggccttcggtgccagggactgcgaggacgacgccgctgccagaccagaaggcgctggagatgattcttgagaagcttcaaaagaaggatacctatggagtgtttgctgagccagtggatccagaggagctgcctgattatcatgatgtgattgagcacccaatggacttcggcaccgtcaggaagaagcttgccaggaatgcatatcgctcgtttgagcaatttgaggacgatgtgttcttaatttgcagcaatgcgatgcagtacaatgcacctgatacaatttacttcagacaggctcattccatacaggagctggcacgaaagaagtttcaggaactgagggatgagggcataccaacagaaaacccgattaagattggacagaaaattagaccaaatttctgcactggagcactggttaagaaacctgttttgaggtatccagatgatgatatagatttgtcccacaaagagaaagttaagagacccaattcaaataatgtggatgatgacatgagcttcaaaaatcaagttaaaaaaaccatgtccaagaattcacaggatcgaagttgcttattacagaaagagcgaattaagaaacccattcccaggaattcagaggacaatttaagttcctcattccacaaagagcgacctaagaaactgatctccagacattcgaaggacgacccagactccccatctggcaaagagcaagttaggaaagtcatttcaaaaaatttagaaaatgatgaaagctccccgttccacaaacatcaagtcaagaagtccactccacagagttcaaaggacgacttcttatcccagaaaaaacacattaagccaattggcagaaatggagaagatccaggtttttcatcccgcaaaaagcccattgaggatccagttcgcacaaatgttgaagatgcaggcttctcatctacgaaaaggctgtctgagaagcccatcagtgtaaacggagaagaggatcgtgaccattgtcatcaggagtcatctaaggaaccgagttgcggagttgagcaggatggtcaaggttactcatgcgatgaagaggctgtgaaaaagccagtttgtatggatagccacgatgcccaaggttcagatatctctgctgccactattgcttctgtgggagatggctctaatggtttaagcatgtcacagcctaatgccactgaacctactggttgtcctcttaccaatggggttatagacaaagacatcagctctccactagatgaaataagatctgagaagactgacgatattttggccaaacctagctacaagccaattgtggtagacgaaacgagacggaaaacttatgatgcatctgaagaacagcctctgatgaaatctgatccagtttttgatgttttctctgcggaaccaaaagagctcgtgaatgttgggctcgatgctgaacactcatatgcatatgtaaggagtctggctcgttttgctggttcgcttggtactcaaggctggagaattgcttctgaccgcattcggcaagcattacctgctgatgtaaactatggtcgtggttgggttggagaatatgagcctccattaccgtctattcttgttgtgaatgatcaacctagatacccgaagagctctgagacaaatagacgaaggaatgctcctctgcctagggataatgaaaggttcagatcaacagaaactaataatccaaaggatatgagacgggtagccacttgcaataatgtagttggagtggctggaccactagagagtccagaaattaagccaagattatttggtgttaccactgagcctcaacacaggagcacagacgcgttatcactgcacgagaaccacagagtgtctggtaatgtcgcaaagaccaaaagaacaacgaatgagcaaacaagaaaaggcaattcatcttctagtgcccgacctcttgaaatgcagctacagaaaggagcttcttctggcgcgcttgatatccctgccccaaataaaatggctggccagcctagaccgtttttgcaaccaccagaatcaactagagctcagcaaatgaaaaagattgactcatcaaaaagcaaaattccaattgaaatggcaccacagcaagttgagtgtgcaaaagatgctgattctagtgtgcatgatactccttcctcaaatgggcagcctaaacacttcttccagtcacaagcagcagcttcctctggtgtgcatgatatgcattcctctaacgggcagtctaaacactaccaatcacaagcagcagcttcctctggtatgcatgctatgtcttcctctaatgggcatcctaaacactacttcaagtcacaagcagcaccttcgtcgggtgtgcatgatatgtcttcctccaatgggcagcctaaacattttttccaatcacaagcagtagcttctggtgtgcatgatatggcctcaaacgggcagtctaaacccttgttccagtcccaagaagcaactgtactacagcccaaaaatgaagcaacatgggtgtaccatggacgacctggtgatggaaaggttggaacatcaaaaaaaagcagaccatcgacaagtattgggttcatcactaaaaatcaatcaataaatgctgcaaaatttgccatgaatttgaatggccaaagtattgtcagtgaccatacaaaatcagcaggcgcaaccgctatgcctgcccaagcaaatataccaaacagaggtcttgatgctcctcggaacatattctcagcatttccagctaatgttagggagaaccagagcattccatcagctccagtggctcaatcttggatctcgtttggtgctgctacagagaacaaaccaaccattgtcagcccagctttcgttgacaataattgtggctggaaaatgccatttgctaatgtccaaccttgtgatgataccaaattaagcgttgttcctcagttctttagacatcctgttcaggtagttagagagaactcggttcaaaacaaggggctggtaatatttccccagttggtgcagccagatttcgcaagatcacaagggcaaccacagtggcaggggctgtttccccacatgcaacagaagccaggcaaggatgtactccgcccggacttgaacatcgggttcccatctccaggttcaccaccagctcgacaatcgtccggcatcaatttggaagcacagcagccagacctcgctttgcagttatgatctgggaaaagacaatgaaaacttcatacggccaggccaggatttatgctataatctctaagcatgtgaaggcatgaggagctcaggtgcgaaacaaggcgagaacagcattgggacatccgggacatggatcggtgatgattgattgtgatgttgactttacatgccatatggcgtcatcgcaactcatcaactcatcgcgtcgatgtacgacgatatcagaaaatggatggatgaacactgcttgaaatgagatcatgtctacttgggggcattctgacaggagttaagaatccagcatttggggaaatgctttggtggcatgcatgtaggtagcacactagcatgcccatgatctgaaaacttggggcgcgcctctctgaccacgatacagctttcttcggtggaaattttggcaccagaatttagaatttagaatttagaatataagccgttcattcggtagtgtaggtcctgtggtcacccctatgtaatgtaatgcccataccaaaatgaatgttggctgtaaattgttctgtgttgaatagattgttagggtagggcagtggccagtggccttcacacctcttctgaatgaaattgcttcttttgttcatgatgtatgtagcaggaaaccaggaactgtggtctccgttcaaaaaataa

SEQ ID NO: 20433 - DNA, 3477 bp, Zea Mays
gggagaggccgcaaggcaccgagtcgagccgctgctcgagcagacagggacgcaaacgcaaggagacgatgaggcctggatcgacccccggaccatcttcgcgccggtgcatccatggctccgccgccgcgctcccaacgctgctgctgctgcttcttcttcttctggctgcatcgtccgcgcaagctcagcaaacgtcaaggatgaagaccgatccagtcgaagcggcggcggtgaacgcggtgttcgccaagctcggccaggcggctacgtcggcatggaacatcagtggcgacccctgcacaggcgccgccacggacggcacgaacatcgacaacgaccccactttcaacccggccatcaagtgcgagtgctccgtccagaacaaccgcaccgtctgccacgtcaccaagctgaagatatacgcactcaatgcatttggccccataccacaggaactgcagaacctcacgcgcttgaccaatctgaatttagcacaaaattacttaaccgggcctttgccatctttcctcgggaatttgactgctatgcagtacatgagtttgggcatcaatgcattgtctggatctgttccaaaggagcttgggaaccttgtgaatcttgtatctctaggcattggctcgaactacttaaatggttcccttccttcggagttgggaaacctggcaaaacttgagcaattgtatattgacagtgccggcctaagtggtcccctaccgtcatcgttttctagactaacaagaatgaagacactgtgggcatcagataatgattttactggggaaataccagattatattgggagctggactaatttaacagaactgcggtttcaaggcaattcatttcaaggtccacttccagccactctttctaatctcgtccaactaacaagcttacgaataggtgacattgtaaatggaagttcttcaatgatattcatcagtaacatgacatctttgaacacattaattttgaggaattgcaggatatctgatagcctggcatcagtgaacttttcacagtttgcaaagttaaacttattggatttgagttttaacaatatcacaggccaagttccagaagcccttgtgaaattgaattcactcagcttcttatttctcggtaataatagtctttcaggaagcctgccgagctctataggaacttctcttaaaaatttagatttttcttacaaccagctgtcaggcaactttccttcttggactactcagaacaatttgcaactgtgagtattgatttctgaaacttcaaatgaccaccttgtattaccttcagggctgtcgtgtcttcagagagacacaccctgttttcttggctctccacaatctgcctctcttgctgtggactgtgggagcagtagatctatatctgggtatcaacctgatgctgccagtcttggtgctgcatcctattatgttacaggagcacaaacgtggggtgttagcaatgtaggcaagttcatggaagcatcaaatggaagttacataatttacagcttacaccaatttcagaacactctagattcagaactattccagacagcaaggatgtcgccatcatctttgagatactacggtattggactcgagaatggaaactacacagtcacacttcaatttgcagagtttgactttgaagattcacaaacttggaagagtgttgggagaagggttttcgatatctatctccagggcgagcgtaaggagaagaactttgacataaggaaggcatcaggggggaaatcttacactgctgtcgagaagcagtatattgttcctgtcactagaaactttcttgagattcatcttttctgggctggcaagggcacttgttgcattcctgctcaaggctactacgggcctgcaatctcagctttgagtgcaactccaaattttacccctacagtgcgtaattctgcacagaagaagaacagtagtaaaacaggtgtaattgttggggttgtgattggtgcagcagttttaggagtactagcacttgctggaatctgtatgtggaggcagaaaaggagaaaactattattggagcaacaagagctttacagtattgttggaagacccaatgtatttgtttatggtgagctaaggaccgctactgaaaattttagttccaataaccttcttggtgaaggaggatatgggtcagtttataagggtaaattagctgatggaagggtggtggctgtaaaacagttatctgaaacatctcatcagggaaaacagcaatttgcagccgaaatagaaactatttctcgagtgcaacaccgtaatcttgtgaagttgtatggttgctgtcttgaaggaaataaaccactgttagtttatgagtacctagagaatggaagccttgataaagcattgtttggaaacgggaaactgaacctagactggccaacacgctttgagatatgcttaggcattgcaagaggcctcgcttatctccatgaagagtctagcatccgtgttgtgcatagggacataaaggctagcaatgtcttgcttgatgcaaatctcaaccctaagatctcggatttcgggctcgccaaactttacgatgacaagaagactcatgtcagcaccaaagttgcgggtacatttggttatcttgcacccgagtacgccatgaggggtcatatgaccgagaaagttgatgtgtttgcatttggagtggtcatattggagactctagctggaaggccaaactttgacaatacgcttgatgaagacaaggtttacattttagaatgggtctggcaactgtacgaagaaaaccaccctctggacatgctcgacccgaagctcgcagaattcaacagcgacgaggtgctccgtgccatccacgtggccctcctctgcacccagggctcgccgcaccagcgcccgtccatgtcacgggccgtgtcgattctggcgggagacgtggaggtgggccaggtggcgaacaaacccagctacatcaccgagtggcagatcaagggcggcaacaccagcagcttcatgagcagcaacgtcagtgggcagtcgggcgtggcgccgaggtcggcctcgcacgcctcgtcgcagttcctgggctctgtcatcgaagaaggccggtgatgatgagtagcaagttttctcaagcgacggactgttccttgtaattaaacgcacgcacgttacaaaaggctctcggattatctggttttgacctttttcgttttccttttgaaaattttcggtttgatttcgatttgtgcagttggaatttgtatgcaaatgatgatattggatggttaagtctatttgtaattttggatgttttgaggtgtgtgtgtatatatatgatgtgatctgcaagaactaaaaaaataaatatcaatacccccaagtcgcttgttatctgctcagctcaaatttaaatccaataagtcacaaa

SEQ ID NO: 20434 - DNA, 2639 bp, Zea Mays
tgtcaccgcatcgcctccctgtctgtccgcttccgccgcgcccgattccttccccgatcccgcacggccgtccgatcacggatcatcgtacgggtacggcgtacgccatcaggttccagcgttcttccccccgcttcaccttgtccccttcccttccccaccactattcctccaccacctccatccgccactctaaagtctccaagcttccccactccaccgcagcgaagaaatttctctacccccgcaacccccctaaaatcctcgtcgctacgacaggggatccctcccccaatgcggctgctcccgctcctcctgctcctcctcgccggcgccggcgcccgcgcctccgacgaccccttcctctccggcgcggcgaaccacagctacaacatcgactgcggcggcgcggcggacttcacctcggccttggggcgccggtggctcgccgaccggttcttctccgcgggcggggccgccggcatggtggcggagccgcaccgcttcccgcagccgcaggagcgcacgctccgcttcttcccgccctcctcggccggcaagtcctcctgctactcgctcccgcttccccccggccgctactacctccgcctcttctccgtctacgacaactacgactccaagctgcgcacgccctccttcgacgtctccgccgccgccacgctcgtgctctccttccgctcgccctggcccgagcccgccgcgcgctacggggcctactccgacctcatcttcccctccgccaccgagcccgcctccgacctctgcttctactcgctctccaccgacgcgcccgccgtcgcctccatcgaggtctcccccgtccacccgctcgcctacgacggcgccaccaccggcgccgacctcgtcctcgtcaactacggccgcgtcacctgcgggaacagcctcttcggccccggattcaccagggacgccgacgccttctcgcgggtgtggcaggcggacgtcgatttccggaacaacgacctcagctacgacgccatcactgcgggcgggaggaaggtctttggcagcaaccagccgcccaactacttccccaccaagctgtacgagtcggcggtcaccacgggcggtgacgccgccaatgagatcgagtacctcatgccggtcgacacgaggctgtcctacatggtctggctccatttcgccgagatcgatgctgggatcggctcacctggccagagggtgttcgacgtagtgctggctggggagaacgtcacgaggatcgacatcttcaagcaggtcggaggcttcacggcgttcaagtggacctacattgtcaagaatctgacaagctcgacgttgagcgtcaggcttgtgccagtggtgggacggccgattctgtgcggccttgagaattatgcgatggtgccacttgagatgaggacagtgccgagccaagtggctgcaatgaaggcgttgaaggagtcgctgaaaattcctgccaggatgggttggaatggtgacccttgtgcaccgagggcatgggatgcatgggagggagttacttgccatcgcggtgacaaagggcttgtgataacacaactggatctggcgagtcaaggactaaaaggttacatcaccgatgaaataagtcatcttaaagacttggtaagcttgaatttgagctataattcactgactggaagcttaccacctggtttaggtcaaccttcacttgtgtcactggatatttcatcaaatgagtttactggaagcattcctggaaccataggttcatccaagttacagactgcattactaaacaacaatcaactcgatgggcaagttccagaaagactttactcaattggcgtgcatggtggcgtgatagacctctcaggtaataaaggtttgtgtggcgtgcctaccttacctgcttgtgcattattctgggagaaaggagggttgaacaaaactggcaaaattgcacttggagcatcgtttgggtttgttctgctcgtcatacttatagtggtctacatactgtgcatcagaagggggccatatgactatgattttgacttccctcaagatttgacctccatatcagcaatatcagcgaaaaggaataggtaccagagggcaaaatccgtgatgcttgctgagatggaggcacataacccggatggtttctacacaaacgggagccctcactaaatggcatgctcagaagttggtcgccctgatggccatattctttgaggaagcactcaccgtggtcttgcatcttcactcaggttccatgccatggcaggtccgcaggtatatatgttttgaatcaattttgcacgtgtcaccagcatggcggccttgcattttcactcaggttccataccataccatggcagttacactcacagtttgagatattcgaaatgtagttcgtgtagcgcatatgtgcttgtatcctgtaatatgggggcatatgaggcagtcatttagtagttcgtgtagcgcaccgattcttttttacttttgaccgaggggtctccagatagtttagcttacgcttgtgctcaatgaatcatgtcaaggctttctattgattttttttttagttcaaatggatcctctattttataatgtttgcaacatct

SEQ ID NO: 20435 - DNA, 2635 bp, Zea Mays
gcgaaggaacagtcgccgccatttcttcccatctccatcttcctcgcagcttcgacgctccatcttccgctccctcccttacccgcggtcggcacgcaggcgacgccggcggcgctcaggctcgggctctcatctactgcgtcagcagcttcccctcccgcatctcgccagtcgcctcgcgctctcacctccggtcttccgcacactggccggtgaccctgccttataatattctgccacatcactctgggtgaagcaagattggtgctctttaaatttggaacttggaacatggagcatgtgctgattagtagaaggtttccaactgatcctgctctctaaatttggaacatggagcatgtgctgagtagtagaaggtttccaactgatcccaatgagtataagttatatgaggaaattggagatggtgttagtgccacagtataccgagctctttgtgtcccacttgacatcttggttgccatcaaagtgcttgaccttgagaaatgtaacaatgacctggatgggataagacgggaagtgcaaactatgagtttgattgatcacccaaatcttcttcgtgcatattgctcatttacaaatgggcaccagctttgggttgtcatgccttacatggctgctggatctgctctccacattatgaaaacttcttttccagaagggtttgatgagccagtcattgctactcttttgcgtgaagttttgaaagctcttgtctacctacattctcaaggacatattcacagagatgtcaaggctggaaacatcttaatagatacaaatggggctgttaagctaggagactttggtgtgtcagcctgtatgttcgatactggaaataggcaaagagcaagaaatacatttgtagggacgccttgctggatggctcctgaagtcatgcaacaactgcatggttatgattacaaagctgacatttggtcctttggaataacggcattagaactagcacatggtcatgctccattttcgaagtaccctccaatgaaggtgttgcttatgaccttgcaaaatgcaccaccaggtttagattatgagagggacaagcggttttcaaagtctttcaaggatttggttgctacatgcttagtcaaggatccacgcaagcgtccttcgtctgaaaagctgctgaagcattctttctttaagcatgctcgctcagctgaatatctggcacggagtattcttgatggcctccctccattgggtgaacgctttagggaactgaagagcaaagaggctgagttgcttctcaataacaaacttggtcaggagagcaaggagcagctatcacagaaagagtacataaggggcatcagtggctggaacttcaatctagaggacttgaaaaatgcagctgcccttatagacagttcaaatggcacttgttatttagatgtcagggagaacagagttaaggatgactcacaagaagcttacaatggtccagaacatatttaccaggaaaggctcaaccatgttgcttctagaaggcctgaagaggatgagatacaagaagttgaagccttgaatgatgctgtctcctcttcgttttcaagccgctcccttgaggcactaaaatcttgctttgatgtttgtggtgttgatgatccgagcccaactgctactgattcaagagcgcaaccaagtgtcggaactttacctttccagcagttgcaaaaatttgagcattgtaaaagtggcgactgcaatggtgaaagcttggaaagaagcgtttctgtacctacgaatctggtcactagtggataccacaagcattcaagtggttctcttatacctgagcaagttctttctccctacttgagcagtgatttggaaagggatggatttcgtcagaaaaacttaagcagcaggaactgtagtggccctttattgttccgccaaatgaaggattcacgcacacatcaatctgttgcgccagacgagtcgtcggaaggaaaaattatccgtcgaagggggcgcttccaggttacatcagatagtatttctgaaaaggtagctacatcatcctgcaacagcagcaggataaatctaccaattgatgcagcacgttcaagtcccaagttgtctgcaattcttccaactttgcaattcttgatgaagcagaatactatgcaaaaggaagtactcagtaggctgatttcttcaattgaggaaacatctgatgattctgaagcaaccggaagcagttcatatcagtcttctggagggcctgcccgagaaaaggaattgcattttgtcaccgaacttgctgaggaagtgcaaagattaaagctccaaaacaataagcttgagcatcagatcaatatattgtcaagaaaagatgaaaggtcgtcaacgcaagataactgacaatgatgatatgccccttctaccacattgtaattcgattacccaattttgctttgttagaaagttatttttattccctgcagtcagagttgtatcattgtaagttgtaagtatttagcgaagtgtgaaatcatagtaattttgatctgtacagctttgtttggttaaccatgaagatatagttcttgtgttataagtaatgtgctgataatattgttttgcg

SEQ ID NO: 20436 - DNA, 1244 bp, Zea Mays
gccttgggctactaatctatctacccatgcattttcagcattctctttgccctgcgatgttgttatatatcatgctgctggcaatgaagcattccaatctggtaaatatttggaggctgtggaacattatactgctgctttgatgagcaatagcgagtccctacgctttttagcagtctgcttttgtaaccgtgcagcagcatatcaagcaatgggtcaaattttagatgcaattgcagattgttcactggctatagcccttgatgcagattatgctaaggctatttccagaaggtctagtttgtatgaacttataagggactatggccaggcagcaaatgatctccgtaggttgattgctcttcttgagaaacaactgcaagaagatatgaccatgccagtagagaggtctgagagtattcgtaacaatctgaatcgagccaatcttcggttttcttctttggagcgggatgccagaaaaggggcttcattaaatatgtatttgatattaggaattgagtcttcttcctctgctgtggatataaagaaggcctaccgcaaagcagcactaagacatcatccagacaaagccagtaactttcttgtcagaagtgaaaatatcagtgatgctgtatggagagatataacaaatgaaatacgcagggatgctgattatttattcaaaataattgggaaggcatatgctatgctttcagaccctacaacgagaagggaatgataacctggaggtggagtgatagaaaagcagtgcacatgtaacatgagcagcgggagcaatgaaaatgatgacaggacctcttagtgagagcatttaatcatgaagttggtaccgcacaaagctaccatactggagaggtcctatgtgaaattttgtgtgctctcaccaacgatatgatgccactggtgttgtccaatacctaatcacaaatgtcagtcggaacatgtcccacttttctgactgagtgctaataccgttacccccggggagcagtggatctttgtgttcatgcctgatcactgtttcgtgttctctgatgttccatttggatatgcagattgcatgagtctgagcacccgtgcaaaaggctagtttttttgtttgtgaagttgatgtcaatatatcaggtgctgtgcatagtagcttggagcagttcgagtggaatcaacaagagtggatagtgtaaatagaggtacacgtttcttgtacaccccctcactccaca

SEQ ID NO: 20437 - DNA, 1335 bp, Zea Mays
gcaagtgctagagagtgccaggcgacacggttcgctcggcggcggcgccatctggcagcttctgcaaaactgaagtgcccattccagccctcccgtagcgatcgacctctgaactacgcagcggaaaaatcccatcaaaaaacaaggggaaaaaacaacacagcatgaactgcttgaagaactcgcgttctgtcctctcgcgactccttcgccacaggccccacgtagcagcgccaccgccgccgacgccggcgacggcgccgcagtcaccggcttcacggtactactactacgcctcccgcgtcaagccagccgtctcccgaccgccgccgccgccccagttgccgagatctaggcactactacacatccccgcggcggcagcaggtcgtccacttcaaccgccgccgcggcgggtcccggtggtaccacgaccagcggaagctcacggcggcggtcttaatcagcggcggcggggcggtcgcgttctacttcggccatttggagaccgtgccctacaccaaccgctcccacctcgtcgtcctctcgccgaagttcgagcgccagctcggcgagtcccagtttgcccagctcaagaaggagttcgggcccaagatcctgccaccgctccaccccgacagcatccgtgtccgcctcatcgcctcggagatcgtccgcgccgtccaccgtggcatctccgtccaacagcgccacgacgccttctacggagaggacgcctcgtatgggtatggcggcatcgccgacgacctctccatcaagaaccgcgacgccgacgctgctgcagcgctgcttggtgcttcccccggcaagaacgccagtgctgccgtggccgctcagcgagatgacgagctcctggatgacaggtgggtgaccgagagtcggagccgaggtaaggcacgtggggcgcaaccgcagacgggtcacctggacggggttaactgggaggtgatcgttgtcaaagatgacctcgtcaatgcattttgcctgcctggtggcaagattgtagtcttcactggattgcttaacaacttcagggccgatgctgaggttgccactgttgttgggcatgaggttgggcatgctattgcgaggcactccgctgagcagatcactaagaacctctgggtggcaatcctgcagattgtcatcctgcagtttatttacatgccggacttgataaatacggtgtcaacactactactcaggctacccttctcacgaaggtcgatgaacatacagaccaagatatcaaaacttagcgggcccttttactgttattggcatcagttgtgtaggtgcattaatatcagttgcc

SEQ ID NO: 20438 - DNA, 3197 bp, Zea Mays
gttcaatctcgacggcttccctgccttccactacactcgcagagtcgcaggcagtcactttgcggcgagacgcttgtgtcgctcctttccaccctcagtctcagtcctctcatgatctcattccccaatcggcgacatttccagcaatttggtagtttcccacgcaggctgcgcgcaagcaaccatcccacccctcttccgcggcagtccactgcctcccggaaaatcccacctcgctccgatccaacccgtccccgcaaccagcgcagccgccgcgacggggtccgactcccggccgatctcccgcctccaccagcgccacgtgttctacctggaagggcatgattctggagtttccttgagaaagggagtaagtgctcaaggatggcctcaagggctatcatcaggaggaggaatgacattctacggcacactcatgtgcctattttgtccccttcattcactagcacaattgggcaaggacaatttgattgtgaggttgatcatcaaagatctgtatgttacttttcaaaggaaagtttagcagattctaatcatgctatggcacattgtactttaaataagcgaaagctttgtcatctcagtagcggtttcgcatggcatccagcttgtgaggtttctcttcctacttatggttctagagcacagaactttgtattcccattgggagtcaggtgtttcctgcagtcagtccgcaccacatcaaacacaactgcacagggtcaagttcatattatggacaagaagagtgaggatgagaagcagaagcaacaaaaaaaggaggcatcccctgaagaatgtgatcaggcagtggaaggattaagcactgcaaaagcgaaagcaaaagctaagctggaggaagtgcaaaagactgaccaatcagtggtacagaaattatgggcaaagcttcttggtattggccctgctttacgaattattgcttcaatgagcagagctgattgggctgcaaagttgaagcattggaaggatgaatttatttctacactgcagcattattggttgggcactaagctactctgggcagatgttagaatctcatcaaggctgttagttaaacttgctagtggaaagagcctcacaagacgagagaggcagcagctcacacgcacaacagcagatctattcaggctagtaccttttgcagtttttattatcgttccattcatggagctcttgctgccagtgttcctcaagttgttcccaaacatgttgccatccactttccaggacaaaatgaaagaagaggaggccctaaaaaggaaactgaaagcaaggatggaatatgcaaagtttttacaagacactgctaaagaaatggcgaaggaagttcaaacatcacgcagtggagaaatgaaacagactgctgaagatctggatgagttcttgaataaggttaggaaaggtgggcatgcctccaatgacgaaattttgagctttgcaaagctatttaatgacgagctgactttggataacatgagcagaccacggcttgttaatatgtgtaaatacatggggatccaaccttttggcacagaccactacttgcgattcatgcttcggaagaaactacaagacattaagaatgatgataagatgattcaagctgagggtgtggagtctctttctgaatatgagcttcgacaagcatgtcgtgagcgtgggcaccttggtttgttgtcaacagaggagatgcgtcaacagctcagagactggctggatctatcactcaatcattctgtgccatcgtctcttctaatactctcaagagcttttactgtatctggtaaaatgaaacctgaggaggccgttgtagcaaccttatcttccctgccagatgaagttgtcgatacagttgggactgtactgccttctgaagattctgtttcagagaggaagagaaaattggaatttctggagatgcaggaagagcttatcaaggaagaggagaaaaggcaagagaaagatgacaaggcaaaactggaggagccaaaggctactgaagaagatttggctttgaaggaaatgactgagcctactgttagggagaaagaggaactaaagaaagcaaaaacccacgataagaaagagcagctttgtaatatcagtcaagcattggctgtgcttgcatctgtttcttctgttaccaaggagcgacaagagtttttaagccttgtcaacaaggagatagaactatataataacatgctcgcaaaggagggtacagatggtgaagaagaagccaggagagcgtacaaggctgctagggaggaatcagaccatgctgcagaggcagctgtgggagaaaaggtctcttcagctttgattgatagggttgatgctatgcttcaaaagttagaaaaggagattgatgatgttgatgctcgaattggcaatcgctggcagctgctggatagggactgcgatggcaaggtgactcctgaagaggtagctgcagctgcaaattatctcaaagacaccataggagcagaaggcgtccaggagcttatcagcaatctttctaaagacaacgaagggaatatccttgtggaagacattgtgaagctggcgtcacaaacagaggaaaacaacgaagctgaagaaactgcacgatgatttggaatagcagccacattcttggctcttaaaactcgacggtccattccttttttaaaaggaaccgcacataataaagctagttcctggcagtctcatgcaaaaatcaccaagcaggatggtcattctttttgttctgactggcggctgcagagaaaattgtatcctgctgttgaaagatattcatttatacagttaagtcccagcacaaccgatcgttaggttaggaattctgtccgaaatggcaacttgcatttcaaacgtctgccatgaaaatgagaataaattcggcgggctctacagatttttcatctattgtctgaacaaaagtataggcatcaaataagtatctgggtaagtttatactatttgaataagaatcagctggatttgtttaaattcttaacaagaccgttttagcagtttgactatatggtcaatcaaaacactattttgtattgtatattgtactatgtgcacttttgcagtgagatttaaatatgggtatagagatagataagctactagagatagcctaaatg

SEQ ID NO: 20439 - DNA, 1306 bp, Zea Mays
ccttactcagcatggaacaggttctctgtcctcataactccaaccaaacaacggcagctagcgagctcccgcggtcccgccgccgccccctggtcctccaaaaaacggctgaaccctaaaccctccctagctcccgccgcctcgcttaaccgcgcccatggccgccgccgctcgcgccgccctcccgcggccccacctctctcttttttcgtcctcccaccgcagcccccatctgtccctcacgccctcctccgcccctcgcctgcgcagcggcgctgccacctcccctgcgctgcagcagcaccaccaggtcaccacgcgcctgggcgacgtgatcgaggcgcagcagttcgaccgggacgcgctgaacgagatcttcgaggtggcgcgggagatggaggccgtggagaggggttcccacggcgcccccagccgcgtcctcgaggggtacctcatggccacgcttttctacgagccctccacgcgcacgcgcctctccttcgaggctgctatgcggaggctcggcggggaggtcgtcaccaccgagaatgcgcgcgagttctcttccgccgccaagggggagacactcgaagataccataagaaccgttgagggttattccgatattattgtactgagacattttgaaagtggagctgcaaggaaagcagcagatactgcaaatattcctgttattaatgcaggtgatggaccagggcaacatccaacccaggctttgttggatgtgtacacaataaagagagaaattggcacactagatggaattaaacttggtttggttggtgaccttgctaatgggaggacagttcgttctctggcttacttgattgctaagtaccagaacattaagatatactttgtatctcctgatgttgttaaaatgaaggatgatatcaagaactacttaaattccaaaggtgttgaatgggaagaaagttcagatttgttggaggtggcatccaagtgtgatgttatttatcaaacacgtattcaaaaagaaagatttggtgagaggattgacctttatgaagctgctcgtggcaagtacatcgtggataaaaaggtcttagatgtgctgccaaaacatgctgtcatcatgcatccccttccaaggcttgatgagatcacagtagaagttgatagtgatcaaagagctgcatattttaggcaggctaagaatggcctctacataaggatggcattgctcaaacttctgcttgttggtcactgacatttcggctagtgctttagcttgtgctgcgtcaagggattagaagctgtgagg

SEQ ID NO: 20440 - DNA, 3351 bp, Zea Mays
taaaagcccaccaaggccatccgaccaccgcagcctaaatcaccttccgtcgccagctcctagaaacccctctcctgcccggcctcctccctctctcatccgatgggcaagtcaagcaagaaggcggccgccgtggctgcagcgccagcggcggtgcccaaggggaagaagcgggaggcggaggacgagatcgagatggccgtgagcgcgaagaagcagaaggcggcgccaccggcgaaggccgtgccgacgtccaagaaggacgccaaggaggacgccaagtccaagaagcagccgccccccaagaaggctgagaacagcagcagtgactctgaagaggaccccgagtccgaagaggagaatttttataatttgattgagtcggggagggcagacggagatgaggagtttgacgaggacgaggaggacgggttcgagttcggtgacgctgacgaggcgatgcaatgcgtggtgatggcggaaagcagcaccaccgccgcggcgctgcgtgctcacacgcaggactacgaggcgctagctgcgcacaagcgcaaggcccttgccgaggagcaaccccagagggaggagggtcccaaaaggccaagaccggaccaactttcagaagcagaagcagcaaccatgttcgaccaactgatggaaggctttggtcttaggcgtaaaagaaggtcaaaagatggcaagagaaggggaagaaagaaaggaacaaagaataagggcagtgctgaagttattaaaaagttgggtgatgctactctacttttcgctgaagaaaaatttaacgaggcaatacctatactacatgagattgtgcgaattgcaccaaatttgtcagattcatattatctacttggtagcatttatagtgagattggtgaactagataaagccataaacttcttgatgctagctgcatatgtttccccaaaggatgcatctctgtggaagaaacttattcccttggcaaagaaaaagggggatgcttctctggcaagacactgcattttaaaagcaatgaacgcagatccagaagatgtagatctgaagtatctttgtggttatatgtatcacaacctttgtgaatatcagaaagctgcagaaatatatgaacaaatagtcagaatttatcctgccaatagtgctgttcgtaaagtagcagcccagatgtacagagagtgtggtcaaattgacaatgctattaatttgttgaaagactatgccgatactcaaactttcaacattgactggagcgttctagatttattgatatcactttatctaagaaataatgtttttagtgaagcactaaagcagatcaagagggcacaactacatttgggatctcaacagaaactaccagtacaattgcaggcaaaagaagtaatctgccatgcatattgcggtgacatgaaacatgctgagattttccttcgtgatgtgcgtttggagccatcaaaagaaaacattgatgtgctcaaggaactcgcaagcaatttagaaaaaatgggacgatatgagtatgcagtaaagttttacctgctaattgaaaatgttgctactcaaaatgatggtggtttatgctttgatcacaaagaaatgggtagttggtatgtcaaagctgctcagtgctacatgatcttaggggacaaaaaaaatgctattccttatttttataaagcgttacaaagcatgaaggacaatattggtatacgattgaccttatcctcccttcttattgatgacgacaagacagatgaagctgccactttgctttctcctcccaaaattccagagttgcagtctgctaatactccagaccaacagaaaccttggtggtgtgatgggaaagttaagatggcgcttgcaaaactttattacaataaaggaaatttggaagattttgtggacacaatttttcatcctattctagaaactttgaatgttgaatatgctaatcgaaaggtcaagtcaatgagaaagcttccaaacattgttctgcatgaaagagtcaaagtattgggtgagcaacggccagatagtgtatttcaaggattaaggccaatagcatcacctgatgaattacaaaaggcaaacagagcaaagaaattaattgagaaaaggaccgctgcaaatgaagagttaaaacatgattatctgccaagaacaaagcaagttcctcctgttcctggtctactgacaaatgtggagcatcatcagcttgtgttaaatctttgtcgaacattagctttgctgcagcgatattgggatgcactgcagattatcaaccgaaccctcaaacttggaaatgacgcactcactggtgacaaaaaagaggaactcagatccttgggtgctcaaatagcttatagagctccagatcccagtcatggctttaagtatgtccgttacgttgttcagcagcacccatattctcttgccgcatggaattcctactataaggtggtatcaagaatagaggacaggtttccacatcatttcaaatatctccttcggacaagagaagcgaatcctgactgtgtgcctccaataatcatatccgggcatcgatttactgctataagtcagcatcagtcagctgcccgggattaccttgaagcttataagctggacccagaaaaccctcttattaatctatgtgtaggcactgccttgattagtttggcccttggcttcaggcttcagaataagaaccagtgcatcgtccaagcttttgctttcctgtacagataccttcgcctttgtgataacagtcaggaagcctcgtacaacattgctcgagcgtatcaccacattggcctgaataccttggcagctgtttactacgacaaggctttgtcaaccgaggagaaggatcatcccatccccaagcttccgtacgaggctggttcacgtgcgccagaggatctgaggccagggtattgtgatgtgcgaagagaggcagcgttcaatctgcatctaatctatatgaagagtggagctaccgatcttgcgagacggatcctaaaaacttactgcactgtctaaaagctggtatcgggcaatgttgttgggatcggatatcagatccttcaaggctccttgcattagcttaggatcaagctagtctataaagctagaacattggtgtaatatgtcactagtgactttagatgtgtagctgaagagttaacaacgtgcttgatccagatttaaacgtatattctggtttcacaatgctgtgttatagtcaaatggttcagcgatgctttgcttcatgtgatttattggcaattcattattatttttctctcaaacgcacaggagaacgcatag

SEQ ID NO: 20441 - DNA, 1006 bp, Zea Mays
ttaacccctgcaggcatgtggcctgtgctatctaccgttacacggcgagctacagagttgtcgccacaacattgtagtgtccgcagaggatggtgccgacatggcaagataaaatcctggtccagcaagatccgttcttccaaatgggatcaggtgattggctccagctcctcctcccctcagcaccaccagtccccctctgctcctcctttcagtctcagcccaatgacaaagttctaagcagagtagtgcacgggcagcacggcaacggcatagcacctccctccaccgatcatccagttccgcttgcgtaacgacttcccttcgcaagcaagcttcccgttcagcccacccgcaggccgccgtgctcgcgcgaccatggcgttgctctccgccacttcgcccgccaaggcgcacctctcggcgctcctctcctgccacgacgagccgcagcagcaccaacacgcgctcccggtcccgcacccgcgctgcttcggcggcggcaaggccaggcggcgcgcgcggggcaggtgcgcggcgtcaatgcggccgcccgacgcgtccgtcgctcccgcgtccgcgcccgcgggcgaggcgcggcggaagaagaagccccgggtgctggtggccggcggcggcatcggcgggctggtgttcgcgctggcggcgcggcgcaaggggtacgacgtgacggtgttcgagcgcgacatgagcgcggtgcgcggggagggccagtaccgcgggcccatccagatccagagcaacgcgctggccgcgctggaggccatcgacatgtccgtcgccgaggaggtcatgcgcgtcgggtgcgtcaccggcgaccgcatcaacggcctcgtcgacggcatgtccggctcctgctgagcgggggctcccggtcacaagggtcattagccgcatgacgctgcaacagatccttgctcgagcagttggcgatgacgctatattgaatggaagccatgtagtcgattttacagatgatggcagt

SEQ ID NO: 20442 - DNA, 126 bp, Zea Mays
catatcgacggaaatattacaaacctaaatagcgttacgcgatagcggatttaaacacctagcgacgaggcgttgtaaaattttatacgaaaatactagttatcgatgtatgactaagcgcaataa

SEQ ID NO: 20443 - DNA, 8380 bp, Zea Mays
atggcgtcctccccagtcaagttcttctcggtgttcctggccgtctccgtcgtcggatggatcgtcttcacgtttgcttcaagattgttagcttggttcttgagccgtgtattctctgcttctgtcggatttcgagttgctggtttcaactgtttgagggatgtaacaataaagttctgtaagggttcagttgaatctgtttcgattggtgaaataaaactaagtttccgcaagtctctagtcaaactaagttttggtgttatctcaaaagacccgaagttgcaattgcttataaatgatctcgaaattgtaactagatcatcttctgaaaataaaaagatacgaaagtcagcaaagcctcgctctacaggaaaagggaaatggctggttacatcaagcatggcaagacttttatcagtttccgtgacagatctgataatcaaggtaccgaaaggcgctcttgacatcaaagaactaacggtggatacatttaaaattgctgggcctaatcatactcttggtgtcaagttgcatcttttacctttgaatatactccttggagatttgggattgactactgatccaatgggcagttgtagtctgtttgatgctttccagtctgatcaagcttctgtatctaactcagagaaaagcttggccccatttgtttgtgaagatttgttggttacttgtaaccttggccatgaaaaggagaaaggtattaaaatcattaacctggaattgaaatgtgggtatgctattgccaacattgatgaaaggatgtttcacaagaagcgcacgattccagaatataacactgtctctttgaacaccggagattctatcacagatacttcagcgctcaaacaaacatcgaaaagcaaatctattctaccgctgttaaagaaacacatgctcacatttccagataagcttcagtgtgccgaagcttgatgtgaagttcagacacctgcatgaaggacttagtgttgacaacaacattacagggatccagtttacttgtgcaaaatccctaccacaagatgattttgaagaagcgacaccacacttcgatgttcaaattgatcttagcgaaattcatttaattagagaaggttctagttctctgttggaagttctgaaagtttttacaatagcttctttggatgtccctgttgacccatttcttccaatcagagctgagattgatgccaagcttggtggtacccaatgcaatattatgttaagcagactgatgccatggatgcggcttcattctttgagaaccaaaggaatgaaactttctaaaagaaactccaatcaagaaatttctcaaaaaaaggagatgaagccaattttgtggacttgcacggtcgctgccccagaaatgactgtcttgctttacagtctaaatggattggtcttgtaccatgcttgttcccagtcatcacatttgtttgcaaataatattgcaagcaaggggattcagatacacacagaacttggtgaattgctggtgcacatggaggaggaatatagagagttattaaaggaaaacatatttggtgtggatacttactctggttccctaatgcatattgctcggatgagccttgattggggatatagggaaagtgatgtccaagatatggttgaaactagcaggaatgcacttgttttttcgattgatataagtgatatggaagtgaaatttggcttcaagcatttggaatcaattgtgcttaatttgatgtcgtttaggactctatttaagagtctccagctatctggcggaagtgctaaagaaaagaatttggagcgtaaaggggagaagaaaatgaaaggtgtgaagaaactgaaattaagcctacaaaaattctctattacatactgtggtgatgcaaacataataagtatgccaattgctgatccaaagcgtgtgaactacggctctcaaggtggtcaagtaattgttagtgtttctgctgatggcacaccacgtagggcaagtataacatcagttttaccagactgccacttgcggttctccgcatctttggtaatatctcatctctctatgtgtatagacaaggagagaaagacaacagaagcggaattggaacgggtgaaggcaatctatgaggaattacctgaggatcgctctggtgtcagagtaactttactagatatgcagaatgctaaaattgttcgccgatccagtggtcatgcggaagttgctgtttgttccctctttagtgctactgatatttatttgagatgggaacctgatgctcatttagcactatatgagacattcatccgctttaagcatttcctacatcataatgtgtcccaaaattctgaaaagatgattaatactgaagttgcaagtaccaaatcaaatgaacatggcaacataactgccggtttcattaattctcagaaatccaacagaaaagggtcaatttttgccattgatgtggacatgttaagggtatctgctgaacttgctgatggtgttgaagcaaacatgcatgtacagtcaatctttactgaaaatgccaagataggtgtactgtctgaaggtctttctcttacttttaatggcgctagagttctaaagagcacccgtatacaaatatcctgtatacctttcagcactgggagtttacttgatgcaaagattgaaccatcatccaaaagagactgggttgttcaaggtctagatgtccatatttgcatgccttacaggttgccattgcgtgccatagaagatgctgttgaagatatgtttcgtgcccttaagcttgtctcatctgccaaaagaagtataatctgtcctgatgaaaaggaaaaatctagaaaggttaattctgggggatccaaatttggatctgtgaaatttgtattgcgtaaattgacagcagatatagaggaagagcccatccaaggttggctcgatgaacattaccatttgatgaggaacaaaatctgtgagctaggtgttaggttgaattatcttgaggaagctatatcaggaagtgtagatccgagcaatcacagctctgagagaaaagttctctacaatggtgttgaagttgacattcatgacaccacagctcttcaaaagttgcaggaagaaatccataagcaagcatttcgatcatattatgtgtcttgtcagaacatggtacttgcagaagggtcaggagcgtgctcagaaggttttcaagctggattcagacaaagctcgcgaagagcttctcttctttcactttctgcttccgatctggatgttactttgaccaggatagatggtggagagatagaaatggttgaatttataaaggggcttgaccctgtctgtcaggagcaaaacataccattttctcggttgtatggtagtgatgtttctgtcgttgctgggtccttggttgtacagctaagagactatacttctcctctgttctcttcactcagtgggaaatgtcaaggccgtattgtgcttgctcagcaggcaacatgttttcaaccccaaatacaccaagagttgtatattggaagatggcaaaaggtcacgatgctacgttctgccagtggtactacgccagcaatgaaaatgtactctaatttacctatttatttccagaagggagagatatcttttggagttggttatgagccatctttcgctgatataagctatgcatttcaagtagccctgcggaaagttaaccttagcactagagcaagctgttctggtctagcagtccaactgcctaaaaaggagcgcagcttaccatggtgggatgacatgagatactacttgcatggaaagataattttatatttcaatgagaccaaatggaagttcctggcaacaactaatccttatgagcatgtggataaactccaaattgtctctgaatacatggagatccagcaaactgatggtcgtgtggatgtttctgcgaaagaattcaagatatacataagcagcgtagagagtattacaaagaaccgccgcataaaagttccatctcgtgtgcccagaccttttatatatgctcctctattctccctaaatgtggttattgattggcagtgcgaatctaggaatccattgaatcattatttgcatgcactccctgttgagggggaacctcggaagaaagtttatgatccatttcgatctacttatctctctcttaggtggaacttctccctcagaccattgcaatcccagtatggtaatggcccaccacctcccttttatggaaataattcaatgctccgtgggatcatgtctggtagtccttgcaaaatgactgatgatgacttccctaccatgaacctgggagctcatgaccttgcttgggttttcaaatggtggagcttgaattacagcccccctcacaaacttcgttccttctctagatggcgtcgttttggaattcctcgggctactagatctggtaacctctcgctggacaaagttttggttgaattctttttccgtgttgatgctactccctgttgcataaggcatgcacctttaagtgaggatgatgaccctgcttttggtttgacgtttaagatgtcaaatttgaagtacgagttatgttacagtcgaggtaaacaacagtacacatttgattgtaaacgtgaatcactggaccttgtttatcgtggtctggatcttcacaggccggaggtttatttgatgcgagataacaatttgtcttcagttgaaaatgtatccaaagtaaggactatggtccaacagtcacatggaaaatttgttcatgacagatgcaacatgggtaatttccaagaaaagcatgaggatggcttcctcttgtcttcagattatatcacgataagaaggcaaacacgtaaagcagatcctgaaagacttatgggatggcaggatactgggaggagtcatgagataacatatgttaggtctgagtttgaggatgacagtgaaagtgaccacactctatctgagcctagcgacgacgacgatgattttaatgtggtgcttgctgacaattgccaaagagtatttgtttatggccttaggattttatggactattgagaatcgagacgcggtttggtcgtgggttggaggaatttccaaagcatttgagcctccaaaaccctctccttcacgacaatatgcacaaagaaagatgattgaagaaaggaatgctgagggctccaaggtgccgcaagattccagctcttccatacatgtgggttctccatcagtgcaacatctggatgcttcgggttcatcttcctcgttgcatagtaaagccaatcgctcctctgatgtggctgtaaatcatgacatttttgatgattcggataaaggagggacagcccaatatatggttaatgttattacaccccaattcaacctacactctgaagaagcaaatggaaggtttctacttgctgcagccagtggtcgtgtactggctcgttcatttcattcagttgttcatcttgggaaagaaatactagaacaagcacttggaacaagcagtgcacagattcttgagttacaacctgaaatgacctggaacaagtcggaactctcggtgatgcttaaagatgttcaagctcatgtagcccccactgatgtggatcctggtgctggtctacagtggctccctaaggttctgggtagctctgagaaattgaagcgcacaggtgccttgttagagagagtgtttatgccttgtcaaatgtatttccgttacactagacacaagggtggaactgcagacttgagggttaaaccactgaaggagctacgctttaactctccagacattactgcaacgatgacctctcgccagtttcaagttatgtttgacgtgcttagaaatcttctattcgcaagacttcccaagcctaggaaaaacagtcttcagtatccatcagatgatgaagatattgaagaagaggctgacgaggtagtacctgatggagttgaagaagtggagcttgcgaaaattacactcgaacagagggaaagggaaattaagttactgcttgatgatataaggtctctcactggaaatggtgataatgggaccgatcactgtcattctgcagaaaaaggtgattgtttatggatgatcaacagcgggaaagcttcattggtggaaggactgaaaagggatttcgcaaacctacaaaagtctagaatatttgcatcatcagcattgaggaaagcactttcaaatgcttcacaatcacatttggagaaagaaaagaacaaaaccacttcttgtgccatgcggatttctatgaaaattagcaaggttgtatggagcatgctcgcagatggaaacacttttgcagaagctgagatcaatgatatggtgtatgattttgatcgggattacaaagatataggcattgccctgtttacaactaaatactttgttgtgcggaattgcatggttaatgcgaaatgtgacaccttattgtctgcctggaacacacctcctggaaaaattaacatgcttcgtgtggatgccaagcaaggtgctcctaaggatggaagttctccacttgagctcttccaggtggagatctacccactgagaatatatctatctgaagcaatgtatagaatgatgtgggattacttcttccctgaagaagacgattcacaacgaagacaggaagtttggagagtttcaacatcaaccgggcctagaagaacaagaaggctctcttctggtgtcgatgctgttacttctagcagctattctgtcagagatcatgaacttcctgggaaatcaagtacaactgtatctacatcaacaaatgtttcaagttggcaaggtatactcagcgataactcacaggtgtcaaagtttcagagtataaaagcaaatatggtatgtggttcgcatcaagagttgcaccggtcgtcttcatttgaaaggaattgggaagaaagcgctgcagaaagtgttgcaagtaatgatgtggtatcactcctgaattcttcaattgtttcttcaaaagtagatgctagcaattctgtcttagagaaccctgttgtgggaagtgagatgtggagaagtaaaacgaaagattctaagcctgccaagtctggacgtctatctcacgaagaaaagaagcttgggaagtctaatgatgaaaagaagacaaaacctcggaagtcaatggaatttcataacatcaagattggcaaggttgaacttcttgttacatacgagggatcaaggcttgctattaatgacctaaggttgcttatggatactttccacaaggcagaatttactggtacatggaggcgactattctctagagtcaaaaaacatatcatctggggagttttgaagtcggtaaccggaatgcaggggaagaagtttagcaaccatagggaaacacttgagggttctattcctgaaaatgatcttaacttgagtgacagtgatgttggtcaacctggaagacatgatcaattaacagcttcatggttgaagaggccaggcgatggtgcaggtgatggatttgtcacgtcaattagggggcttttcaatacacagcgccgtaaagcgaaggcctttgtgattcggacaatgcgcggtgaagggcataatgacgaatatcaagacgaatggagcgagagcgatggtgaatacccttttgcgaggcagcttacaattacaaaggccaagaagctcatacgaaggaagttccgtccaagggtgcaaaagaacccaggtctgtcgatgcaagattcactcccatctagtccgcgggaaacaactccatatcaaagtgactcctccaggtcatcttacgaggacttccatgagcagtaaaacaatctggtgatgctgctttcagcttctacatttggtcgataagatgcagccatttatattggttatagtagggtgtatgtatatagtaggatgtaccatcaaaatccaatgtatcatgtatagtggttaggcaatactccgtaattatgtgcttgtaagttaataagaggccagctcgtactcctagaaaacaaaacccgtgatctatggcatggggcattctcattcccttgtacttcaggactagtatggattgtaaattcaacggtgaaggtgttgcaacatttattcagtaaagtatccttgttgaagaatttgtaaaaactatggcagaaacaatagggaaggagcaagtgactaggtgcctaggtgtattatgattcttttgctgactagttggaagttagaaatgcattgctccacgtcaaaaagaaatgcgtggcagacaaggttgttgcttaacagatcggtgagctatgaaatgctatctgttca

SEQ ID NO: 20444 - DNA, 2183 bp, Zea Mays
ccagcccattccaattcttgattccatcgccccaccatccaccactccccgaatccttccaacctcctcgtcgtccagtccaccacctccacgcgcaatggccagcggctaggcggcaccaaccagaaatcacaaggattcgtttcatccggcagcgcagctctagagcctccatgggcagctacgcgtacaagtactgcatgtgcttcacgcgcaagttccgatccccggacgcccagccgccgccggacgtccgcgccgcccacctctccttcgcctctgacgcccatgccctccgccgcttcgtcgccggcgtccagggcgagtcccccgccgacgtcgaccgcatcctcgccatgctctccgggggccacagccatggaatcgcccgcctcgtcacaaggtcgccggcggcatccacgcccacgctcgaagacttcttggccttcctcttctcccccgacctcaacccacccatcgcgcaccaggttcaccaggacatgtcagcgccgttctctcactatttcgtgttcaccgggcataattcctacctcactgggaaccagctcaatagtgactccagtgacgtcccaattgtaaaggcgttgcagggaggtgttagagtcattgaactcgatatgtggcccaatccttcaaaggacaatgtcgatattcttcatggagggacattgactgccccagtggaaatgatcaaatgtttgaagtccatcaaagaatacgccttctgtgcctcaaattatcctcttgttattactcttgaggatcacctcacaccagatctccaagctaaagttgctacgatgctcactgaaacatttggagatcttcttttcgtccctaatccagacccgatgaaagagtttccttctccagcatctctaatgaagagaataatcatatcaaccaaacctccacaagaatataaggagtttctcaaagctgagaataatcgcagtggcagcggaaacatagctgagttgccagaccaaggaagcctgagaagaatagattcaaatgccgatgaatctgatggaaaggatgaactggatgagcaagacgaggaagactccgactccgacgatcccaaatttcagcaggatacagcctgtgagtataggaaactcatcaccatccaagctggcaaaccaaaaggccatttgcgggatgcgctaaaagtggatccagataaagtcaggcggctttctttgagcgagacacagttagctaaagcgacaatctctcatggtgctgaagtcataaggttcacacagaagaatatactccgtgtgtatccaaagggcacgagggttaattcttcaaactacgatccaatgaacgcctggacccatggtgcgcagatggttgcattcaacatgcagggccatgataaagcgctccggttgatgcaagggtttttcagagccaatgggggctgtggttatgttaaaaagcctgacttcttgctaagaacaggcccaaatggggaagtatttgaccccaaggctagtttgccagtgaagaaaaccctcaaggtgaaagtatatatgggagacgggtggcgcatggacttcagtaaaactcatttcgatgccttttcgcctccagatttctatactagggtgtgaaggcagacagtgtgatgaagaagacaagggtgattgaggaccagtgggtgccgatgtgggatgaggagttcacgttccttctgacggttccggagctggccctcctgagggtagaggtccaggagtacgacatgtcggagaagcacgacttcggggggcagacagtgttgccggtatgggagctgaagcagggcatccgtgctgtgcccctgcacgatcgcaagggtgtcaggtacaagtccgtcaggctcctcatgcgatttgattttgtgtagccgagccgagccgccattcagattcagcttcttctttttttcccttcttgtgtgaattgaatgtattactcccttccttccatcttcaacgtatatgtgtatgtatgtacttatttttgtcggaataaaagttgtatggaatggaatggaaggaaggagtagaactgtcttcaaactccagcttctagatctgtacgggtgattcagttttacttgctggcacattgtttgtctgtttactttactggagatagatttgtac

SEQ ID NO: 20445 - DNA, 558 bp, Zea Mays
gcggtgacgaagcaaaatacagttgcttgtcgctctctcgtactcgaaagcgaacgcggttcgtggcgctgccagatgagataatcgcgtgacctttttctctcttcctctgccgccggagatgaaaggacgacagggcggccgcgcgcggttgctcgaaacatgtcagagagccagaaggtgtagactggtccgcagggtcccgtggtcggtcggtcgttttcctcggctgcgggctgggggaaagaccacctgctgccggtcgccggtggcggaagctgcagcttccttcctgtcctgtcctgtcttggtcttgcctccggcgacggggactggagcttcgtctaattgctttttttcttcttctgttggtgtgcggtccgctccgtctgtaaggctctcccttgcttgctcgtcgtgcgcctctactctctagatgtacgtaggtagctgaagaagctttagagtataaatagttcttacatgcatgcaaatggacgtactttgtgtaaatattcagtcaaagaggaataagggggttgcatgttttggtggtgc

SEQ ID NO: 20446 - DNA, 2964 bp, Zea Mays
agaggacgattcacccgatgtaatacgcgattgttccaaccaagattcgaaggagaggcgacgcacggcctgactgtgcatcacatcgatgccttgcaccacatcgatgccttgcacctgtctctcatcacccccgtcctcggtggctggtgcggcgatcccttctccatccacagcgccgagagaggtctcaatggtgaggtctgccatcacgcacacaaacagtgggaagacctagaggcggcgggctgccatggtgaggtctgccgtctgccatcagcccatcacgcaggacgaataggaagaccatcagttgtgcgatcagcgtagggcgcctggttcggtccggtccggtccactgggccatcgggggcaaatcacaatgaaccagagagtgcaggagatacggcgggagggggtttatgtaaaattgctgctggacgttggatgaggaagggatggtccagattaaaagtgctcacatgtgcacgggagcgccatgagcacgggacacgatccctttttttttctcctcaaatctgaatcctgccaaaatacccgcagcccagctccgattccaacgaccaccgctccttcctcgccccagcctagcagcgcaggcgcggcgcagcgcaggccctgcgccgccctccgcgcacgtccaggtatccttcgaccgcaaccgcgcgcgcctctctccctcctcctgccgcaacacgtcctcctcgacgtcgtcgcctccgcccccaagaagtcgtacgtgatcgctccggacctccgtcgtttccttggatggatcggacgccattgttcatccggccggtctgcctccgttttgctcgctgaccgcccgcgctgagcccgcccgcccgctccctggcacgaggacgatgtagaggagcgcaagaacgggaggcggcgttggggacgacggggacgagatggaggggcgcaatcccgtgcagagattcgttgatagcccaaagccatacaacagaaggaaagcgcgcggtatgcaaacaaggatggattcgagtgaccacggcgaccgccaaggtccgagagcctgtgaagaattgccaggcaagatggataacgaccgtgccgatcgtcaacgcttgaaagcctgcgaattcccagccaagatggacaacaaccatgccgatcgtcaagtttcgaaagcctgcgaatcgaaaggcaatgcctgtgaattgccaggcaagatggataatgaccaccccgtccgtcaaggtttgaaagcccgtggactactgcaacctaagtcggatgctagtgaagatggcgtatgcgaaggtttgaaagcttgtggattgacagccaacaagatggatgctactgaccaatgcgaccacaaaggctccaaagtatgtagggtggtgacaaccaagacggatactagtgaccaaggcgattgtcaaaccttcaaagtatgtgggatagcagccaagatggatgttaacgaccatgccgatcaccaaggctccaaagccagtggaatgccaaccaagacagatgctaatgatcaatgcagcaaccaaggtccctttaagacagctgagaggttagatcatcttctgaaccaaccagcaaacagatactgtgctgattgtggtgctccagatccaaaatgggtgtcaatgacttttggtgttttcatttgcatcaagtgttcaggagctcatagaagtcttggagtacacatatccaaggtggtttcggtgaagctagacgagtgggcagatgaacaggttgatattttagctgattcaggtgggaatgctgcagtaaacatgatatatgaagcatttgtgcccgaaaactacgcgaagccaaggcaagattgttcagcggaggagcgcaatgattttattaggagaaaatacgaggctcaacaatttttgactaacccccagctttcatgtcctccacgacgcaacgagaaacataatcaccaacagcatagtactagttcaagtcgacatggtttaggccattcattcaggaacagctggaggagaaaagagcacgaggccaaatcaacaaagaaaacaatcgaggtgggcatggtagagtttgtcggattgattaagatcgacatcataagaggcacaaatctagctatccgtgatgtcatgtcgagtgatccttacgttatcattaacctaggacaccagacaatgaaaacgaaagtggtaaagagcagtctaaatcctgtatggaatgaaaggctcatgctttcgatacccgacccagtgccgctgcttaaactgcaagtctacgacaaggacacgttcaccactgacgaccggatgggggaggccgagatcaacatccagccactggttgctgcagccaaagcccacgagacctctgctatcgcagataccgcgcagctcaacaaatggctggcgaaagatggcatctggatcccgagggacagcgccatctccatcgtcaacggcaaggtgaagcaggtggtgaatgccaggctccagaacgtcgagcgcggccagcttgagatggagctcgagtgcgtccctctcactcaatagcttgctgctcagtaggagtcgagtcctgagtccagattcacttacttgtgtacttcttcattagtctgcctccctctgtttgtgatgacagccatctgaaccgatgcaaatacttattgggaatgacgattctgtgctgtatacttgtatgtgtgggcaaacgaaacaaggatataccatgcccattcctgttgacatgcgagtctagtatacatgttacagttttctgctgtatctaccgagcatttcctgcaagttgctggaataatccattccatggactgcgagcctggtggttattccttgttttattatgataaaagtcttgacggttttgtaatgcaagctgcccccatcgggtttaattcctgccgcagtttcggcgtcaaca

SEQ ID NO: 20447 - DNA, 755 bp, Zea Mays
cagtagcaggctagtggtagatgctgctggtagttgtagctgatggctagtagatcgtactgcaaaaaagcggaaaggagggtgcctgtggatcctcttgaatggcagatctctcaggagatggcaaatagcatagttgcatctttagccaatacagtaggagctgctgagtctgtattaagggtggctgcaactggacatgacaagaagctgtttttcaaggtggtttctacattgtattttctagcagctttgggaagggtggtgtcaggcgctgccgttgcgtatgctgccctatgcatcttctgcctctacatgtttgcacaaagcaccgatctgtttgatcagctcccttcttgggtccctgtgggtagggattctttgggcggtactcaggataccgcgtgattttccacatgtacatggattgcagagtttttcttctcttccactgtctgtatatggtcttgcaggctaatagcttgaactatagcatctatctctgcccccacggtattacaactgtacccagtgtttagcaatggagtaatgatctttgtatatatatatgacacgtttgcaacttgccagatgccagtgatgcatcctgtatgttttcggagctcattgcagatctctctggcttgacatggttgttggtcgtgagattttgtgatggtgtgttttgcctgtaatctaaatatctaataaagatctgtctttcatcacgtaatacatgctcatgcattgcgaag

SEQ ID NO: 20448 - DNA, 208 bp, Zea Mays
cggtccttccacctttaagaatcataacaagcgggtcctggaatttgtgttctaaaccctgaactttataaaaatagtaaatgcagcccaaacgaattccaggaaataacaaataaatacagaaaatgagttttagtgtataagtaattcctacaaacttagaaaattcataaataattaattttaactcctttttaatctgttccag

SEQ ID NO: 20449 - DNA, 3424 bp, Zea Mays
aatattattagtggggcaaaaagacacaaatccgaaaccctcgcatcggcctgtacctagccgccgtcgccacagagccctcatctcgtccgtcctcggcggcctccgcggagcagccgtcgctggagcctggagaccaaagatccggccagatctgatgtcaggagggactggctcatccgggcgcgcggccccgcggtacgccccggatgacccgacgctgcccaagccgtggcgcggcctcgtcgacggcaccaccggctacctctactactggaacccggagacgaacgtcacgcagtacgagcggcctgtgccccccgagagccagctcctcccgcctccgcctccgttgccacccccgcctccacggagccgcgaccgccgcgacaggtccagatcccgatcccgcaccccaccccggcgcgaccacagggaccgcgaccgtgaccgtgacaggcgccacgacgagcacgcgtcctccaagacggcgtcttcccaccaccatccggctccggtagccgtcgccgacgatccttccaccgaggcataccgccgccgccatgagatcaccgtcacgggggataatgtgccgactccaataacttcatttgaggctggtggcttcccgtcagaaattctgaaggaggtatgattcagtgggtgaacccacctaactcatgatctaactctaaccctaacagagtcgcatgcgaggaataaaggtcttcaaatatggcgagctaaatggatcgtggacacgtgctccagttgcctgcttgtctctttatttgcttcattgtgctaaatcagggctcgtgtaccaactgcttatctccatatctgtggcagatgcgatatctgctctgaggtggagctaatgtcgtatgctgcctcacgtgccctcggccaatctataagtgggactggctgagggcaggtcttgttgatggagctgccaaggtgggtgagttcctgaggctgctcgctccttcctcgaggggctgccctttgcgcgaaggggcacccactcgtgacacccacggtggccgatttgttgctctgcgtccggttcttggaaggctccccccatggatgatggggcctcttctggggcttgacccgtggaggtctggcccaggctgtcaacgtccatccatatataggatcgggtggcagctgctgcaaggggcctcgtggatcaactatccatgcctgagcgcctccacggattctgttagagccttttctacttcgccttgtgtccgcaagtctacacattgtggacacattttattcatacaacgtgctggattcgcaagcccaacacctatccaagcccagtcatggccaattgctatgcaaaatcaagatgtagtagctattgcaaagactggatcaggcaaaactcttgggtatctacttcctgggtttatgcatatcaagcgcctgcagaacagcactaggaatggcccaacagtgctagttttggccccaacaagggaacttgcaacacagattctggatgaagctgtgaaatttggaagatcttcaagaatttcttgcacgtgcttatatggtggtgctcctaaaggtcctcagttgagagatttagatagaggggttgatgttgttgttgcaacacctggaaggttaaatgacatcttggagatgcgaaaggtgacaattggaagtgttgattcacttgttgctaatagttctattactcagcatgtagagatcataacaccctcagaaaaacaacggcgcctggagcagatattacgatcccaggattcaggttcaaagatattaatattttgtaccaccaagaggatgtgtgaccaacttgcaaggacactcaccaggcagtttggagcttcggccattcatggtgacaagtcccaaagtgaaagggagaaggttctgaatcagtttcgatctgggcggtctcccattttagtggcaactgatgttgctgcgcgaggtttggacatcaaagatatcagggtagtgatcaactatgacttccccactggtgttgaagactacgttcacaggattggcaggacaggaagggctggtgccactggtgttgcatatacatttttttgtgatcaggattcaaaatatgctgctgacctaatcaaaattctggaaggggcaaaccaacgagtgccccgtgatttagaggatatggcttctcgtggcggtggacgaggtaggaagaggaaccattgggcatcccgccctgacaggggtggttcacgttctgaactggattcaaggtacagcagcagagatggactagcatcttctgggaaatcagagagtggtcgcggcagtcgtggaagggatgataatggtagccgtggcaggtacgaccctggtgaaaccgatgggcgatctcgtaggtctactagaggccgcagtagaagccgtagcaaaagtgacagtagaagccgtagcccaagtcccaagaagtcacgtcgtcatgaaggtagacgtagcaggactaagagcaggagcaggagcaggagccgtagaaatcatggcgctagccacagcaagagtcgcagccctgtcgctagccgtaggtatgaaaagactgcttcaggatctgctcggcctaactcggggcatgcagagcacaaaagccctccaagatctcactctagggatgaccatgtgaaccactctgaccacaaggatgaccacaaggatgaccacatggaagatgggaagatggaaagggttgatcttgatcgctcgcccagcccacacgatgacaagtctgctccatatagtcctgtgtacaatggcaaagccagtggctcaatgagccccaacggtcagccagaggcaggtgccaaatttgttgaaccttctgggaaacctgagcctgcatctccagtgcgctgcagcaaaggcagagatgatgatgaggaaggtatcatagacgaggatggagagattggtgaggatgatccgcgtgcaaatgcagctgtgcagaatggtaataactgacggagagtggcctgcatcttctgtgacaaccaagacttatctgttatgcaaaatgcagtcattcccatctgcaagtcctgaatacggaaatgcatttgtgtgccattaaatatctcgtagaacatgtgatactgatgcctctgccatcgatgaaccaaaactgttgatgcatgtcatgtcatgttgttaaacttaatgacattgttgtgttctggtgttttacagccagttctgtaagtgatttatgataaaatatattgtcaggtctggaagtggtagtttatgataactagcaaagttatgttgctacggtttctatttataaagtatagaatataaaatacaaagacatgtgttctgttggttaggtgaatgcgaatatgggtttatagcaaaa

SEQ ID NO: 20450 - DNA, 2341 bp, Zea Mays
atggagcggtgggagattggaggtcgaggcttgaagcgcgacgaacgccgagccggcgccgtagttgacggcgcagcccacaggggcggccggctagatacacctgcattgcgtgaaattaaaatagataaaatcagcccatggaagccatttttgaagatgcgccaaaatagcaggcttaatctggatttctcattcagtggtggactcaattcgagaaaacagagatttgatgaatcatttggcttgagagtgttcaaaattggctacgaagtgtatgccgatggtttaacaagagttttacgaatttgtgaacatgcagataatcccaaaattgagaaaattcaatggccaatagcaaatatacagttcagaatttcttatgtgtgtattcatcttcttgacaaggaccagaatggggaaaatgtccaattgccatctacaattttagcagcaagacttcagcatgtttcttctgattcagttgtcacaaatagattcaagcaagtatctgttgcaattcattcattgaatgtggatgaaaaatgggaaggggcttcaattgggacaattcttaggaggaacaagcttcaggatgctactctcgatgaaaatattcttcgtatgatctttgtactgaattcaactgactccagtgtcaaacaaatacagtattgtgccatcatcctacagcctgttgatcttaagattgatgaggaaacgttaatgaagctagtaccattttggagagcatctcttgcaccttcaggcacgacaagcacacaattttatttcagacgttttgaagtacatccaattaagatcatagcaagctttcggcctggtggccgacgcacaacatatagttctgctcaagaggctctgagggcactacttcatagtgttataaaggtgcctgaaattagcaactcagctgtggagctcaatggggttctcctaaatcatgctttagttacatttcgtgagctacttctaaaatgcgctcagcactactcatggcatgtttaaatttataagcaagaacatgaagtcgggtggtttttctggaacaaaacggtaccttggtgatctcgggaaaactgttaaaactgcaagttcgaacgctctctttgctgctgtcacagaaatttcagatagtgttgttagaggagcggaaacaaatggtttgaatggcatggttactggtttccaccagggcatgttgaggttggcgatggagccatctgtcttagggcaggctataatggagggaggtcctgacagaaagatcaaacttgatcatagccctggacttgatgagctatacattgaagggtacctgcaggctatgttggatgtcatgtataagcaagaatacctccgtgtcagggtgattgatgaccaggttatactgaagaatctaccaccaaatagcgccctgataaacgaaatcgtggacaacgtcaaaagctttcttgtgagcaaggcactgttgaaaggcgattcttccacagttcgaccgatgcgccatctgcgaaatgaacctgaatggaggattgccccaacggtgctcaccctctgcgagcacctttttgtgagcttcgctgtgcgtgtgctgcaccgggaagccagcaaggccatcgctggagtcatgtcgagagtgaagaaaccgaccggagaggaggtcgaaggcgactcgcccgcatctggtggcgtcctgtgtaagcggaataggctgtggactgtcgggaggtttgccgtctcgggcatggtcgcctatgtagatggccggctgtgccggcacatacccaaccccatagcccggaggatcgtcagcgggtttctactgagcttcatcgaaaacaggggcaacgaataagcgggcagccggacaggtgataaaagggctcgccttctgccacctgctaataaggcgtaccatggaccatggtaaataggcgtgcacgttgtacaaagaaccgaggtgtggtagtgctcttgagccgtaaccgatctctgcatagagctgtgcatcaattttgaccgccttcaggcccacgtttggtgtacagaaacactgggacagtaattccgcagatgctacttcctgcctacatttcgttgacatggactcgtgcttagagtaagtttaatagtccacaacgagccttttcacataacaaactcggttagaggccctttcacatagtctatctatatcatcttattatacttgttctacatgcaaagtgataaatagcatggctatgataaacgtatggagccgttggtgtgttgatcatgagtcactccactgggtatatctctaattttattgttt

SEQ ID NO: 20451 - DNA, 4111 bp, Zea Mays
gaatgggggggaattaggtcatggatgcgagggtctcattggacgatttggttcttcaaacaagaagaacatcaccatacttaagaatgtcaatggtatcctcaagccatccaggatgacacttcttcttgggcctccatcctcggggaagagcacactcatgcgggcactcgccggcaagcttgacaaaaatctcaaggtctctggcagcattacgtattgtggccatccaatttcagagttctatcctgagaggactagcgcgtatgttggtcaatatgatctccacaatgccgagatgaccgtaagagagacactggatttctccaggcggtgcctaggcattggtgccagatatgagatgatcgccgaacttgctagaagggagcgggatgcaggcatcaagccagatcccgagattgatgctttcatgaaagctactgcagtacaaggacaggagactaatattataactgatctcactctcaaggtgcttgggctggacatttgtgctgacgttattattggcgatgagatgatcagaggaatttctggcgggcaaaagaaacgtgtgacaactggggagatgctaacggggccagcaagggctttatttatggacgaaatatccactggtctggatagctcgagcacatttgagattgtaaagtttatgaggcagttggtccatgtaatgagtgaaaccgtcatgatctctctgctccagccaccgccagagacatacaatctttttgatgacataatcctgctatcagaaggatacatagtgtaccatgggccgcgcgagaatatcctagaattctttgagtctgccggtttccggtgccctgacaggaaaggtgtcgcagactttcttcaagaggttacttccaagaaagaccaacaacaatactggtatcttgatcaggagcagtatcattatgtatctgtacccgactttgcagaacgtttcaaatcattccatgcatgccagcagatgcagaaggagttgcaaataccttttgaaaagtccaaaactcatcctgctgcgttgaccaccagaaaatatgggctttccagctgggaatcactcaaggcagtgatgtcaagagagcagctattgatgaagcgcaactctttcatctatattttcaaggtcacccagttgatcatccttgcactcatgtccatgactgtgtttctcagaataaagatgccccatgggcagattgctgatggcaccaaattctttggggctctgacttttggtttaataacaatcatgttcaatgggttcgctgagctacaattaaccataaagaagcttccagttttctacaaacatagggatttcttattcttccccgcttggaccttaggagtggcaaacataatcttaaaagttcctgtctcgttcgtggaatcagcagtatgggttgttctcacgtactatgtgatgggctttgcacctgctgcaggaaggttctttcgtcagtttatagctttctttgccacacaccaaatggcaatggctttattccggtttcttggtgctgttttgaaaacaatggttgtggccaatacttttgggatgtttgtgctgctcattattttcatctttggaggatttgtcatccgtagaaatgacatcagaccatggtggatctggggttactgggcatcacctatgatgtatagccaaaatgcaatatcggtcaacgaattccttgccagtaggtgggctattccaaacaatgacacgactatcgacgcgccaacagtaggcaaagcaattcttaaatccaaaggcttgtttactggagaatggggattttggctttccattggagccctcataggattcattattttgttcaacatgctctacctttgggcccttacatatttaagtcctagtagtggctccaatgccctggtttcagaaggtgaggatgatgtaaatgaaatggcattggaaggaagaaggaaagatgcaagaagaagcaaagatgaaatatcccaagttgtatccagtgatccaggcactaatggaggaacaaacacgctagctcaatcacgagtcactttgcctttccagcctcttgcactttgctttaaccatgtaaactattacgtcgacatgcctgcagaaatgaaggaacaaggattcacagaaagccgtttacaactactctctgatatcagtggcacttttaggccaggggttctaacagcactggttggtgtgagtggagctggaaagaccactttaatggatgtcctggcaggaaggaaaactagtggagctattgaaggagatattaccctgtcgggataccccaaaaaacaagaaacttttgcccggattagtggttattgtgaacaaactgatatccattctccaaatgttactgtatttgaatccatcacctactctgcttggttgcgtctttcctcagatattgatgatggtacaaaaaagatgtttgtggaggaagtgatggcccttgtagagcttgatgtgttgcgcgacgctctagtgggtctccctggagttagtgggttatcaactgagcaaagaaaaaggctgacaattgctgtggagctggtagcaaacccttcaatcatcttcatggatgaaccaacttctggtcttgatgctcgagctgcggcaattgtcatgcgtacagtaagaaatacggttaacactgggcgtactgtggtctgcacaatccatcagcccagcatcgacatatttgagtcttttgatgagcttctgcttttgaaacgtggaggtcaggttatttatgctggtgaacttggtcgccactctcacaaactagttgaatattttgaggcgattccaggtgttccaaagatcacagaaggatataatcctgcaacatgggtgctggaagttagttctcctctatctgaggctcgattgaacatgaattttgctgaaatttatgcaagctctgtgctttataggaaaaatcaagaggttatcaaggagttgagtattccccgatcagacaaccaggacctgtcatttcctacaaaatattcacagaatttctacggtcaatgtgccgcaaacttttggaagcaataccgttcgtactggaagaatccaccctacaatgctatgcgctatctgatgacatgtctctttggccttgtatttggtacagtattttggcaaaaaggaaagaacatagattcacaacaagatttatataatctgcttggagccacttacgctgctacattctttcttggggcttcaaattgcatcacggttcagcctgttgtatcgattgagcgagcagttttctaccgtgagaaggcagcggggatgtactctccgttatcctatgcatttgctcagacatgtgtggaggtcatctacaccatcttacaggggatactgtacacagtcatcatatatgcgatgatcggatatgactggaaagcggataaattcttctatttcctgtttttcatcactgcaagcttcaactacttcacattgttcggcatgatgttggtagcatgcactccctccgcattgctcgcgaacattctcatcacgtttgctctacctctgtggaacctctttgctggattcctcatcgttagaccggcaataccaatttggtggaggtggtactactgggcgaaccctgtgtcgtggaccatctatggcgttgttgcgtctcagtttggcgagaacgaaggtgagctttcagttcccggtgggacgcccgtggtggtgaagcagttcttgaaggataatctcggcatccagcatgacttactcggctatgttgtgctcgtccatttcgcctacgtcattgtgttcttcttcgtattcggttattccatcaagttcttcaacttccagaaacgttagcgggatcatttgtatgtaattaatcggtcgccgtaagttctagttctagttctagttctagtcaaagcaagtgcttgttttgggaggaagcctgtatgcaagtagcagtgtattcctcttgtttcttcaatgcaaaaatattaaaaggaagatgacgaatgcaaaagtgacatgtcttgttccttttcttcttga

SEQ ID NO: 20452 - DNA, 3480 bp, Zea Mays
ctcctttctcccgtccccgcacaaaaacatttgccccccacccggccacccctcccgagtcccgactgctactgccgctgcctcctctccctttccgcctgccttcgctctcctcgtcgtctcctccgtctagggttctccaccccacccgccccgccgccgcccgatccgaggcagatgccgcccgcagccatggcgctgccgtcccaggccccgtctaactcaggggatccgctgtacccggagctctggcgcgcctgcgccggcccgctcgtcaccgtcccccgcgtcggcgacctcgtcttctacttcccccagggacacatcgagcaggtggaggcgtccatgaaccaggttgccgggaacccgatgcgtctctacgatctgccttccaagctgctctgccgcgtgctcaacgtcgagctgaaggcggagaccgacaccgacgaggtgtacgcgcagatcatgctcatgccggagcccgagcaaaacgatgtggctgccgagaagacgagctctgggtctgctgcgccaccgaggccagcggtcaggtcattctgcaagacgctcaccgcctccgacaccagcacacacggcggcttctctgtcctgcgccgccacgctgacgagtgcctccctgccctggatatgtcccagtcgcctcccactcaggagctggtggcgaaggatctgcatggcatggagtggcgattccgccacatcttccgcgggcaacccaggaggcatctccttcagagtggttggagtgtttttgtcagttccaaaaggcttgttgctggagacgccttcattttcctcagaggagaaaacggtgaacttcgagttggtgttaggcgcgctatgaggcagttgtctaatgtaccttcttcggttatatctagccaaagcatgcatctcggggttcttgcgactgcatggcacgctattaacacaaagtccatgttcactgtctactacaaacctaggacgagcccttcagagttcatcattccatatgatcaatatatggagtcagtaaaaaacaattattctattgggatgagattcaggatgaggtttgaaggggaagaggcccccgagcagaggtttactggtacaatagttggctgtgaaaatcttgacccactatggcctgattccagttggagatacttgaaggtgcgctgggatgagccttctactatcccgcggccagataaggtctctccctggaagatagagcctgcttcatcacctcctgttaatcctctccctctttctagaggaaaaagacctagacaaaatgcacctccaccttcccctgaatcatctgttctcacaaaagaaggtgcaaccaagattgatactgattctgctcaaacaccacatcaaaattcggtcttgcaaagtcaagagcagatgagctttaggaacaacctgactgaaagcaccgactctgattccactgttcagaagcagatgatgtggtccccatcacccaatgggaaagttcacactaattttcagccgagacctgctatggataactggatgccattgggaaggcgtgaaactgacttcaaggacacccgttctgccttcaaggatgcccgcaccgcttctcaatcgtttggagatacacaggggttctttatgcaagcttatgatgacagtcgtcaccgtctttctttcaacaatcagtttcaagatcagggttcagctcatcgctttgcagatccatacttctatatgcctcaacaaccttctctgacggttgaatcaggcacaaggacgcaaacagcgaacaatgacttgcgtttttggagtgagcggaattcgatgtatggtaatccaagtgaccaacagcagggtttcagctttgggcaaaacacatcaagttggttgaaccagccacttccccaggttgaacagtcacgagtggtcaggccgcatgcaacggttgctccatttgatttagagaagactagagaaggcagtgggttcaaaatatttggtttccaagttgatacaaccaatccatcacctgtccaattgagctctccattgtctgctatccgagagcatgtggtacaaactcgaccatcggcaccagtgaatgaattgcaacctgtgcaaattgagtgcttgcctgaggtgtccgtaagcacagctggaactgcagctgagaacattcagcaagtccagcaaagttcgaaagatattcaaagcaagtcccagggcgcttcaacaaggagctgtacaaaggttcataagcaaggagttgcgcttggccggtccgtggacctctctaaattcaccgactacggtgagctcaaagcggaactagacaagatgtttgagttcgagggcgaattggtatctgctaaccggaactggcagatcgtttataccgacaacgagggtgatatgatgcttgtcggagatgacccgtgggaggagttctgcaacatagtgcgcaagatctacatctacacgaaggaggaggtccagaagatgaactcgaaatcatccgtgccgaggaaggaggaacccccagcagcaggcgaaggctgcgccgccgccgccgcaaacgagtaggatgtctgcctgcactgcagcaagcagttttagatgactaggtaagtcctccgtttgagccgcagtactctgttttttttgttgttgttgcaacagtggtggtgaatggggttttgactctggactaaaggagcaacgaatttgtctttgttgaatacctgttaatgcattgctaaattcagcatctcggctgcattggcgctctggtcacatgatacttaagtttggcattggcatgataggaggctgcagtgatgggaaaaggaaaaaggggggctcatcttttggttgtcgctttttggctttgtgtgtaggtcgtgtggaggaagccgacgatgatgcatgcgtgatgaacccgttccttgtgcaggaggtggtgccagcccgggtcccagggaagtaaaaactcctgagatcttttgcttgtccgttgcagccccatcccccgtccgtttgggttttagttgggaacgtagaaactactgtctccgcctgcttctccgaagctcgctgttggtagcaagttttattgctagtattattgttattgctgatttgctcccctctgcctttgcgatgtaaatatttgtgtacccagccccagccccagccccagccccagcttgtagtgagcagtaacaagcagtagcggtaccttcggtattaaccggcagctagctatttcgcggcattttaatccctgtaagcgtagctctgtggcgtgagatagatgacaaacactgggtatatgtatgtctgatctttctcactgaatgtaccataagagagtttgtagagtacctgacctgtgaccaaccccgttcctgtcagctctctggtctcagcaacacgctgtgtgatgccgcatatggtcaatgcaag

SEQ ID NO: 20453 - DNA, 907 bp, Zea Mays
ccttgcacttgcttatattcttaagtcaagcaaatggtggtcgcaacacttgctgaatcaggaatgaatctttcagatgatattattgaaggcattattgataagacatttgaggaagcagatacaaagcacgatggcaaaattgataaggaggaatggcgcagccttgtcttgaggcatccatctctgttaaaaaatatgaccctcccatatctccgggatatcaccacaacatttccaagctttgtgttcaactctcaagtagaggatgcgtgaggtcccagcgtctacggcaccattgaagcccctggggcacagcagatcaggttctgtgggggcacttagttgtttttgtttccttgaaaatgtaaattttatgtggtggcatgtcctcctgtatagtgagtattgctattgtgcacagaattagggcatgaagcgtttcttgtctgtgtttataaaatattcttcaaacatattgctcataaaaactactcaaagtaagaatcaaattgagtacaaaactactcaaagtaagaattgaattgagtacatgtgatgccacaaaagatggagatgctctttgcctcctttggcgggatgagctcaatagccaaacctttgtcggagcataaacacaaccttatttgttgtgtttggtaggtagtgtttggttgtggagttagatagaccgagccgctctgtatagaattgagctgctctaaaagtgaaatattcttctaatattctaatatgctgtatctctgatctctctaacttgtttttgttagttgtcttctcttttgttctgcgtcacttcgaaagaatggagccgctctgttccgcttcactttggaaccaaacaaaaaacagaggctccgttctaattaccaaacacaaaacaaaa

SEQ ID NO: 20454 - DNA, 197 bp, Zea Mays
gacggtcgagtgggatgctgctccagcaggagatgagcaaggggagtagtgggctaggccttgcccaattcctcgctaccgacgacatcgattatccactgcgttttaccttattttatgaacttttaccagctacgtgaaaaactctgatctatgtaataattcagtactttaaattgaggttttcctgtttcatt

SEQ ID NO: 20455 - DNA, 1947 bp, Zea Mays
ctttcatctccaagccgaaaaaacacccacagaaccctaccctcccgagtcccgaccccgtcctgctcgctccgccgtccttcgcccgccacccgccacccgccggactgccaaagcccggaggcctgaggcccgagttacgcgaggagcagccgaaccagcggcccggcgcctcatccctcagcggccccgcccctggggccgtgtagtcagcaagcggccacgcgagtgcgcggtcggcgcggagtgagcaggagcaacccgtggctggcggtcagtcggtggctagctggagcctggagttgcgacttgcgagcggcgttagaactcgctccacctataatttttgtgtggctccgtcactgattccacccgttctgtggccggcgacagaggcacagagaagcgccaatccgccggcttgatctgaagcatggacaggccctcatcaccggtcgttgctggttctgccctctgttgctgaagatcgtgaccatggaactcgcgtcgtcgtcctagagctcctcgcgatgttgctgctccaggctgccatcctcatgtcaacggtggagggccttgtgcggatcgtgcaagaagctccacaagttcctcatcaataagatcagtttgaggcttggccatgcctttaaatatagatattgatctgttcaagctggatattgatgagctgatagctgattattccaaggagaactgtacgtcactctttgaattcaaacgagtatggatgggcaagaaattttcttatatctatgaaggcaggcctaagacaaactcgggtttattcatgcagtccctctttctgcattgtattggttatttgacttctcaaagttcactgcaccaaagattggctgggctatactgcctttactgtctgtatgagtgccagccatacaagccgcagttcaagatttacttgtctcttgaggagtgcaggcaactgaaagatatcgttgttatggcgaagcaaaatggactgcagctcgtgcctgcacttgtcaaaaggatgctggataaagacatgtttttgtttggctacatgaatttgatcgacgacaacggggacaagcaggtcgaggaattgaccgcattgcagaacaagcgagtaaaatttgcatgtgacaagttatttgcaaatacccaagcagaaagatatttgcacatggacttgggtgctgagttcgagcttgatagcatcaagaaattgtcaaaggagtatgcagaagcaaaggaactggcccttgcagaggcaagccaaactgtcgaagttgacgatgctaagcacctccttcagagtgagaggctgttgggcgacaagatagatgaagtcgtcaaagaatgggatgtccagaaggaggggttctacgagaggacaggattatcctcatcccctggcgaccagctcatggccatcgacaacgatgaatcaggagctcaatgtcacgaggatggatcccgtggcgatcagctcatggcggtcgacaatgatgaatcgggagtacaggatcacgaggacctcgacgacgacgacggctttgccgagttagaactgctgctagaatgaagaacatatacaagtctgtaaactcttactaccgccgtataaccgtgtaatcagaacaccgagagatgtaatcctcgctcgtctttactagcctctcctttttaggtgccagaccttctgttcatctacactggctgcagtaactgtacattgaaataatccagtgcgccagcctatgcaggggagaaaagaaagaggtgagcttgagtaaaaatgtacatgaacagtgacaagaaaaaaaaacgctggctgcagtaattgtgcatttaaacgatacagtgtgccagactatgcagggtgaaaattggtggacctgagtaaaaaatgtaagtgaacagtgacgaaaaaacgcaaaaaat

SEQ ID NO: 20456 - DNA, 1544 bp, Zea Mays
acagaaagacgaggatattaatgaagatgttagctataggattaaagaagggtggatgaagtggcgtcaaacatctagcgtttttatgtgacaagagcgtgctacaaaagttaaagacaagttttataggacgacaattagacctacaacgttgtatggtgtagaatattggtctacaaaaagacgacatgttcaatagataattgttgcgaaatacgtatgttgcgttggatttgtggccatacaagaagggatcgagtctaggacaatgacatacatgataggctaggaggtgcaccaattgaagaaaagcttgtccaacactggttgagatggcttagacatatccaacgaagaccgttcaagacaccaatgcgtagtggaatcctaagacgtaacagaaatgtgaagagaagcaggagaagaccgaagttgacatgggaagagacagtaaaggaagacttaaaaggatgaaatatatccaaagatttagccttcaataggagttcaaggaaaataactattcatgtgctttaaccttgacttatggtttgtgttgggtttcagctatggtctaccccaacttgtttgggattggaaggctttgttgttgttgttgttgttgtgagctataatgcagcaatccattcagcttaatctttttccaagaaaaataaatcagattgcacatttaattccagttgaactcgttgtgctcaaattgcactattgcagttatcttcaacagcatggcagcagcttttggttctggggctctattctccatcgtgagtggaatggggaccccaaatccagtagctaatgcaattacaactggtgttggttttgctgtatttcaaggtggttttttcatgatctctcaaaaattttcacagccacagagtggagatacatactattctcgtggaagaagcatgctgcaaaagttaggccttcagaactatgagaagaacttcaagaagggtctcctaactgatcaaaccttgccccttcttacggacagtgctctcagagatgtgaagatcccgcctggccccaggctcctcatacttgatcacattaaaagagatccagagttgacaaaagcaaattaagtgatcggcactgcggcactgcctcacggtgccagttcttttccccctcgagttgcagaaattggaccaggagaaccgtttaatttagctattcagtgacgacctctttggagcagtatttggttgtgcttactagtatatgttttctagtcatcattcacgcttttttttgagccgaagtgtttgcaaatcactctgatcttggaatgacagaattttgtattctcaaaggtttatgctgatcaatccagattttactactagtttagggatgtcaaacgaagggaaactgcaattcgcacattttatttggcttctggatggtagtttggttctgatctgtaacgtttagccctttgctaagctgtgtcctgcataaggctttgcggcctgattaatataagcacacatgttggaatttcaaatgaa

SEQ ID NO: 20457 - DNA, 152 bp, Zea Mays
ccaacatgagagacgataagatctactacagtaacaagctggaagcaggcaagcttgcacgaatccacgagaccgcgcgccacccaggaggccaggacggacgggatccgtcgagggccgggctgtgctgcggactagacatgtacgcgcgc

SEQ ID NO: 20458 - DNA, 789 bp, Zea Mays
ggaaaaaactaaacctagctttgataccatgttagaataggaacccataccccaatcaggggttggagtgatattaaatagagagagtaactgagccaaggcccattacacaggggtataacggtcattacacagagaataacacaaaccctagacgggtagtctaacactctggtctggtgaaagggcgcacttgtttggcatgccacacccacaccacacgggcacggttgctagtgtgacgctgtcggccacctcgcctgcgtcagcgagcaagggcacgaagaagcaggcagcgccgagacggtgctcggtcgggccggccaattcgatggcgacgacggccgcggctgccgacgcccgaaagtccgagtcgaggggcgatcgacgaggccctgccggcaaggaccgcttggttggtccatgcttgagttggcttgtccgtcggtgacgttttcctttttcccctgcagcgtgcatgctggaatcgtccgacgctccgacgacgacggccggccaggttcagttgtctgctgcaagcctgcaatgaatgcctgcccctggtggtgccatcatatcatcatcaggtaaccccagacggccggcagacacggagtagggcgcgcgagcggtacggccgagaactctgggcggggcgagcgccgcctggtcgtgccatttgtggtgctgcgccccgccggccgcccggaagagcaggcaggccatggaacgaccgggcacgccgtgcagaaatgcatggctacttcggatgcgacaacgctgccgtcg

SEQ ID NO: 20459 - DNA, 2110 bp, Zea Mays
tgcgcatcttcgatttgtgggttctgtaagaaaagatggcgctgccatccatgagtcttgtggcaaagggtgtgcttcccttctcagcacgtacctcgagtggtgtcacacaaaggccggtgtcagtgactgcttccttggagcacaaaaccagcgatgccagaaggaagttcctaaaacttgcgcttgggaaccttggagttggactgcccaccttgttgggcgctaagaaagctctcgctgatgagcaaggcgtctcgtcctcgaggatgtcttattcgaggttccttgagtatcttgacaaggatagagtccgtgtgcagcttcctggtctaagccaggagcttcttcaaaagttgagggagaagaacatcgattttgctgctcacagcaaccaggaggactctggttctcttctgttcaaccttattggaaatttggcattcccgcttatccttatcggtggtctgtttttactttcaagaagggcacagggtggcctcggtggacccaatggtcctggctttccccttggttttggtcaatctagggccaagtttcagatggaacccaacactggtgttacatttgatgatgttgctggtgtcgatgaagcgaagcaagacttcatggaaatgtttgttggtgttggagcttccagagttcgtgaccttttcaagaaggccaaggagaatgctccttgcatagtgtttgttgatgaaattgatgctgttggaaggcaaagaggtacaggtattggtggtggaaatgatgaaagggagcagactctcaatcaactactaactgagatggatggtttcgagggcaacactggaattattgttattgctgccactaaccgggctgacatattggattccgctttacttagacctgggcgttttgatagacaggtgtctgtcgacgttcctgatgtacgtggaaggacagagattctaaaagtgcatggtagcaacaagaaatttgattctgatgtttctcttgatgtcatagcaatgagaacacctgggttcagcggagcagacttggcaaaccttctgaatgaagcagccattctggctggaagacggggaaggacagcaatttcttcaaaagagattgatgattctattgacagaattgtagctggtatggaagggaccgtgatgacagacgggaagagcaaaagtcttgttgcttaccatgaagttgggcatgcaatttgcggaactttgacgcctggccatgatcctgtccaaaaggttaccttagttccaaggggtcaagctcgtggtcttacatggtttatcccgatggatgacccaacactcatctccaggcagcaactttttgccagaattgttggcggccttggtggtagagctgctgaggaggtcatatttggagagcctgaggtgaccactggagctgctggtgacttgcagcaaattactggcttagccaagcagatggttgtgacattcggtatgtctgaaattggtccatggtctctgatggagggtggagcgcagagtggggacgtcatcatgagaatgatggcaaggaactccatgtcagagaagctcgcggaggacattgattcggccgtgaagcagttgtcggatgaggcctacgagatcgctttgaggcacattagaaacaacagggaggccattgacaaaatcgttgaggtgctcattgagaaggagacagtgaccggagacgagttccgggcgatcctttctgagtttgccgagatccctgttgagaaccgggttcccccagccacaccggcggccgcgctcccagcctaaaccctagccttgtaggggaggattttcttgttgtatggtgttcatattttggattcttggtgtacactaactctactaaatctgccggattttcggtacacgacatgtaagatgtaacttactcatggtgaattaatagtaaaatgtaattagattaaaataataggcctggcgcaacattttcagtttgtagcttcgcttctggcgagcgaaatctcttgctatatgttccacggttcctacttcataaaactatatgttctaattaagaacttgccattttgtttttggaactg

SEQ ID NO: 20460 - DNA, 1005 bp, Zea Mays
tctcggtcaaccttttcattaggcgaaaaactcgttctccttctccactatgggataggagcaactcaccaagtccaagaaggcatagaagcccactatctccaaggagacacagaagacagagaagtcggagcactacaagttcattagagaataacccatccagtccaagtcacgcatcagagaaaataaattcctctgtaaaacaaaggctggaagaagaaaagaaaaggcgtcaaaaggaagctgaatttaagttactggaagaggagcttgctagaagggtcgaagaagctataagaaaaaatgtcgaggaacgtctgaaatctgaagaggtgaaacgtgacatagaacaccgaattgaggagggtattagaaagttatttgatgaggttgacgctcagctacaaaaagagaaagcagtggccctttatgaggccaggcagaaagcagagcaagaaagaagagagagggaggagttggatagaatgctcgaagagaacaggcgtaaagtggaggaagcacaaagaaaggaagctcttgagcagcagcagaaagagttggaacgatatttggagctggaaaggatacaaaggcaaagagaggaagcgttgcgcagaaagaaaatggaggaggaagaagagagagccaacaagctgagattgctggggaaaaaccggggttgagaactgtcatctttatatacacagcggtctatgtgccgtggttgcccccatttgacttgttagttgttgccttaccagtgcgagaacttttgtttgatgtacgaacatgaaaatggtcatgtatgacatctatgaatggaacctgtagcttattctttgagtacgttttaagacaggttatttggattcctcaatgttttgctctgccatgcttaagaattttttaaatgcctagtctggtgcacaagggagcaatagtaatgaatgagctcatgcccaacttcatctgtttgctcaagagagaagaggagcatgtgaa

SEQ ID NO: 20461 - DNA, 2368 bp, Zea Mays
ccgccgcctccgtcctttctctctcttaccccttcacccggacccgcgcccgcgccaagccaacgccacgccatgccgctggctcctctgtcgctggaaccccctcccttccgtctcatccgccccgccaccggcagcggcggacgcgtcctcccggtcccagggcctgcaccgcgcctatgtcgatcgctgagggcggctccggtggcacccgacaccacggaggagccgtttgcggccgcgcggggccggctagagtcgctgagccaggtcacaggagtgctgggcacgcagtggggcgacgaggggaagggaaagctcgtcgatatcctctcccagcgcttcgacgtcgtcgctcgctgccagggtggggctaacgctggacataccatatacaattctgaagggaagaagttttcacttcatcttgttccatcaggcatccttaatgaaaacactcaatgtgtaattggtaatggagcagttgttcatcttcctggattcttcaaggaaatcgatgggctagagtctaatggaatttcttgcgagggaaggcttttggtatcagatcgtgcccatcttttgtttgatcttcatcaagttgttgatggtcttagggaggcagagcttgggaattcctttataggaacaacaaagagaggaattggaccatgctattcgaacaaggttacaaggaatggacttagagttggtgacctgcgacatatggatatctttggtgcaaaactcaacaccctattaagagatgcagctctacgcttcaaagattttgaatatgataacaagattctgaaagaggaagttgagaagtataaaaagtttgctgaacgattggaacctttcatcaccgataccgtgcatttcgtgaatcagtcgattttgcagaagaagaaaatattggttgaaggtggtcaagctaccatgttagacatagactttgggacctacccctttgtcacttcctctagtccctcagctggtggaatctgtaccgggcttggtattgctcccagaagtctcggtgatatcattggagtggtaaaagcctacacaactagggttggatccggtcctttcccaacagaactattgggtaatactggcgatttgcttcgtgcttctggaatggaatttggtaccacaacaggtcgccctaggcgttgtggctggcttgatatagttgccctgaaatactgttgccaaatcaatggtttctcgtctttgaatctcacaaagctcgatgtcttaactggactcaaggaaattaagctgggtacctcatactacaccgatgatggtaactctgtccaatcattcccagcagatctctctcttttggagcaagtaaaggtcaaatatgaggccctgcctggatgggaggaagacatttcgtcaatacgagattacagtgatctcccagaaacagctcgtcgctacgtggagaggatagaggaactggtcggcattccagtacactacattggtgtcgggcctggacgcgacgccctcatatacaaataataactcgtctggctctggtttcaaagatctctcgcttagttcaataatgtaattgctttggttactaataaaacaggctgatcgtggaagatgtagaattcagcatcctttgctaagtgaccgatatcaaacgattcaacaacatgatgagtgaccatggcatctattcgagggagaggcttctggttccgatcagcaacccagaaatccttcttggcagcacctgctacatcgagatggaccataacgctaagagagaggttgcaatcttttaccccgagggacgcccaggtggcaaaactgactctgtggcaagcattgtctctgcggagaggagaaacaaaaggattctcgagtcggtgaggcggagcctgcacgtcgatgatggcactgctgcgtactacttatctgttactgagggtgatccgagggctgccatgacggagtactccgaggacctgaggtgggagcagcaacgcgcaggtcggtagattcatatatattccaatggcatatgttaagatcatggtgcttgatccttatcatttggtgtatatattgtacaatctggatggttgtaagtataaatacaaactttggtctaatgaatatagatgcatgtacatgataacaattgccaaatggcatcggtgctgagaacaaaaatcgcgccgggtgataattggctggtgaaaagtattacatgacattcgtgaacctgcttgtttgtaagtaacattgtttgttgttgctaaattccttgcggaatactcgattatgctgccgatttttagtttctgtatttaataatttaaagataaaaata

SEQ ID NO: 20462 - DNA, 464 bp, Zea Mays
gatagactaatcaagtctctcaacccgagtctaatcttggtccccaatccaatcccgcacccaccattgcgagagatcatcagaggaccgcgtccaatcgaagcggagaggaggagaagggtgtgctgatggcgacggcggtggcggccacggccgcggcggcgggtggcagcaatgtcgagttcatccgcgcgcgcagcgacaagcgggagtaccgccgtgtggtgctcgcaaacgcgctcgagatcctactaatcagcgaccccgacactgacaaggcggcggcgtgcatggaggtcgaggtgggctcgttcagcgacccggagggactcgagggcctcgcgcacttcctcgagcacatgctattttatgccagcgagaaatatcctggagaacacgagtatacgaaatatatcacagagggacgacctcggcactggagcctctatagtggccggtatagc

SEQ ID NO: 20463 - DNA, 2657 bp, Zea Mays
attaatttaagtgtgtagtgtaacgacgattaattaagtatcgaactaattaggatctagtgctaattttatttacgcatcgcatgaatatcaattaatatgattatgttgagataagtattttaatctatagctgcttaacgtaatcgttatgtctctcggctgcagcttcgaccgtcgtagtttcttttctcgcatagtcgtagatgcgagccctgcgccacgcgtctgtttagttgttctattttattgtgtggtgtattgttgttttctatgttaaaaatgtggaatgtatgtttgaactcatataggtaacggtccgttggcagagtccgaaggagttgcaggcgaagaccctgagcaacagctggttggtgaaagcaagtgtcctataacccatttatgtcctacttattttataattcatcccccgtatttacataattcatatataaggatttactagtttttgtttatcttgtccttgttcacctatttgggttgaattatttctggattagctctatgctagcgctcactttaatcaataaacataatgagaattatttatgatacgaggtttacttttagaaattgatgatgacattgtgatatttaaggggctcaagcggtttctcgagtgtctctccgtaaggactggtttgttggatgatcacaaggaaaacagtacaaccatgagggtagatggatgctcttagctaattaattagaggaaccgatgtgtagtttacttcgccgtcatgctgctaataaggttcgatgtatgcggctcgctctaccgagggtggtttgccccttcggacgggcgaataccgaaatgcggacgggcgaataccgaaagacgccttgtgacagcaaacacggaaactgagaacacgagcagaaggcactcgatcgcataggtacagacgtacagtagcacagccgcgcacactaccaccagtcggacacccgccccgagctccggctatggaggaagccgccgccgccgccgctgcttgggcgtctaatgccgccacgcccgtcccatccgagcccatgagatcccctcctgatgctgaagcctccgttgatcctaccgctgttggtgacgatgagcacgactccaaggaggtcgttctgcgcaggtacttcctccaggagtgggagctggtctcagcgatcctccaccgtgtcgtcgccggcggcggcgttgccgaatccgccgatgtccataggatccgctctatcatggacaaatatcaagaagagggtcaactattagagccataccttgagaacattgtttcaccacttatgtcgttggttcggtcaaagacaatggaacttggtgctagtactgatgaacttcttgacattatcaagcctctgtgtatcatcatctacacccttgtcacagtgtgcgggtacaagagtgtcatcagattcttccctcaccaggtttcagatcttgagctcgcagttgctcttcttgagaagtgtcatacaatgagttcagctactgctcttaggcaagagagcacaggagaaatggagactaaatgtgttgttctattgtggctttatatactggtcctgatcccatttgacatatccactgtggatacaagcattgctactgctgataacgtcgatgggcctgaggtcgttccactggtgacaagaatactggacatctgtaaggattatctctccagttctggtccaatgagaaggatgtcaggattattgcttgcaaggctcttgactcgtcctgacatggcaaaagctttcagcagttttatggactgggcacacaagatgttactgtctgtatcagatgactttgttgatcaatttagatccattggtatagtggaagctttagcatcaatatttaagattggtaaccgtagagcactgcatgatgctgtttctggtacttggagtgattgttcacttgtgatgaagactaatgtctcagccaggagtccacttcttagaaaattcctggtgaaactggcccagagagttggtctcatcagcttgcctccacgtttaccatcatggcagtataagtcaattagcagttcgttgggtgcaaacctttcaagttatacagctggagaagtgtattcaagtggatcaagggaacaagttaacattgatcaaataggcatgtgttttttggaagaagatatggatgttccagaaatagcagaagagattatcgacttgctattgactggtttgagggattcagatacaattgtaaggtggtctgctgccaagggaattggtaggataactgcatgtttaacacctgcattgtcggaagatgtgctatcatcaatattgcaacttttttctcctggagagggtgatggctcctggcatggaggctgtttagccttggctgaacttgctcggagagggttattgttaccttctagctttcctgatgttgttcctgttataataaaggctttacactatgatgtaagaagaggtccacatagcattgggtcacatgtaagagatgcagcagcatatgtatgttgggcatttggtcgagcttataccaattatgatatgaaggctgttttggaacaacttgctccccaccttctaaccgttgcttgttatgatcgagagta

SEQ ID NO: 20464 - DNA, 3181 bp, Zea Mays
agccttgtactttgtttgccaattctgcaaccgtgcctttttctctcctcccaatctcccattaccccagcggcccagcgtgcggagacgggagacgcgctccccagtccccacccccctctcgtgtcgtggcgacgactggggggctgtcgctgccgccctacgtcaggtggccaggtcgtattagggcacttcgccggcgacgagtaccacaaggcagtggacactttctctggtatcagaggatcaatgtccaattattatgatgactacgatgacattgacgggatggaggatgattatgatatggatgatcccattgatgacatggtagacgagcagcaagggattagggattctgatgtggaagataatgattatggacaaccaagtgatgtcctcacacagttgcaaaatgtcctgctgaaaattgcaactacccaaattatggatttggtactactactactcttttatctttctaaaagtgctcctctctatccttaatctccgttggctttgctatgttgttgcttattttgtcttggtgtctgagcccttggtaaattgctgtcattttaggtttgtctttggaagcataatagtatataagatgatggttgtgttcatggtttattctatgactttataatatttagcttctagttttacagacacaattttgtatgagtttggtttccttctattgtaccacccttggtttcccatgcaaatgaattgtgagattgaacttgctgtttgacatggaaaagctatgatacaatccattccaagaaaaccaatgctatattgttattgtgcacttcgttgcatccaaaaccctggcatggtgtatcatttgtgttacaactcaaacattgtttgagttgcttatacagtcgcttatattgctctaaatgattgtctattttcccctttagaatgataagatcccagatacttcatcagcagatgcaagaaaaggaagggacattcaaggaataccctgggagcagataaacataacccgtaaaaaatacagacagtccagattagaacagtacaaaaattatgagaatgtacctaactctggagaagaagctatgaagagaaaggtgggatatactatgagtttagacgaaatactagatcggttaaatcaactattctacattttcagaaatttggtatgggcaacgtccaagcacgacatctacctagtatctcattactcaattcgtcactggtcagcattgagtggtgtggatactgaacttatcaacgtccaaggacatgtggcaccaagggagaagcatgcaggaagtttattagaggggttttatcagactcaagttagtaccttgacagtcaaggacaatttactggtagctggtgggtttcaaggagagctgatctgtaaagtaagttaacaactatggatcaagttcgtttgaatccatgctgttgatgtgctagctgttggcgcagcatctttgctgtggactgtggtcacattatctcttctaaccactttatatatctatttttacttttatctgtccttaccactggaatcttcctatatagaaacttggacatataatgcacacattaggctaatgatgtcactgggtatccagtcctttactcaaactcatgtccgtgttatttggggagggtatatatccagtaaaatatggatatggggagggtgtcaatgggtaatacccattacacccatacccactctaaacatgagagatggtgatggtgaaggagatatgcgggttcagtgaggcggagacggcaaggagaaaaggatggtgcagacaattgctgagtaggcatcagctagtcagccgaggccgggtgatgcacatcggcggcacggaagaatgccagcatcactgcccagcagttccctggcaacaacttatatctcagttctctgtgtgctctccatattgatcttttgttcaattgaatatcttctgttgatgtcaaatgcagcaccttgatcaggaaggtattagtttttgctgtcgaacaacttatgatgataatgctattacaaatgcggttgagatatttaatacctctagtggcgccgttcacttcatggcatcaaataacgactctggtgtgagatactatgacatggagagattccagctattcaagcattttcagtttgaatggccagtgaatcatgcttcgttgagtcctgacagaaaggtggttgttattgtgggtgatgatcctgatggtctacttattgatgcaaactctggaaagacagttcattccataaaaggacatcgggactactcatttgcatcggcttggagccctgatgggcgaacatttgctaccggcaaccaagacaagacatgccgaatctgggacgtgaggaacctttcaaaatccgtccatgtgttgaggggtaaccttggagccatccggtccatccgcttcacctcggatggccagttcatgtccatggctgaacctgctgactttgtgcacatctacgacgtgaagagtgactacaacaaaaggcaggagctggacttctttggcgagatatccggcacatcgttcagcccagacactgacacgcttttcgttggtgtgtgggataggatgtatggcagcctgctacaatttggccgcctgtacaactactcgtatcttgactccctgttttgatgtggatccaaacgggtgttgaactgttgggttttggtgtacctcagtgctctgaatgttgtcagcataaattaggtggttatccctaatcaggatattaagttgcaaagataattgaattaataaatgttgtaccgtgcccgatgtgtatatgtaaaaagaaatgtatacatgtgcctattgagagaccgagttgagatgtgacttaggggttgtttgtttgggattataatctattcagattatataatctaatttatttgttttaggggttgtttgtttgggattataaatataatctaacttatttgtttgtttgagattagtctagcttgaaaagtatgtttgaccttgtgtgcataggattgaatacagtgtgtgtagtttcatgtagacgcaggtaatgtatgtttctgtcacgggactgaccggccgtggtaggaatgtgtgtcgaaggaaaatatcttttggc

SEQ ID NO: 20465 - DNA, 496 bp, Zea Mays
ctccatagcctttccttccccagcagcgcatactattaggtcgctgaaacacttggatcaaaacagagcttgagatgaagcactacaccctgaaggatcagggtgtttatgctcttccatctactgcaaaatccaattggaaggatatctactgcatctacttccaaaacagcatgatgcaatacttgacgacaaaggaaaaggtccaaccgttacaattgaatctccacccaaaaggttcaaaatggacctctacgtattaaagaaaggtcggacacaagatcttccaacaactgaagattttctcagattatcagcagcttttaggttgtagaatgtcctttatataattatatataactgctcaacttttatgaagacatttcatgtaaatataacaaggtagcttgaaatgttgcaacaaacatactaccttctgccagtgctcatttaactctattttactttatacaaatctgctatgctctaaactgtc

SEQ ID NO: 20466 - DNA, 1628 bp, Zea Mays
gttttcttgccaagtgccagtcagtctctctcgtctcggcgacgccgcgcgaaggtcggaactcggaatcctcttcccggcgtcgtcatcccacccccgtcggttcccttctaactcctggctcctggggccgccgccgagccgaggagaggcgcacgcgcctcgggaatggagctggcgcctccgctccgcctacgggatccgagcctgggatggcttcctgcaacttgcgcaggactcaagtgtgatgaactgatggggactcttggactataactggtttcctcttattcttccagccaatcctgacaaatgtggcatctcaagctgatagctttaatttatggctctcttttctttatgcacattccatatgctagaggttctgacctaaacaccgataagcaggcccttcttgcatttgctgcatcactgcctcatggcagaaaggtcaactggacctccacaacccaagtctgcacgtcctgggttggcattacatgcacaccggacatgaagcgtgtgcgtgaagtcaggttacctgcaatagggctctttggtcctatcccatcaggcacacttagcaagctcgatgccttggaggtgttgagccttaggtcaaaccgtcttactattaatctccctcctgatgtaccatctattccctcacttcgctctctttatcttcaacacaataacctgtctggaatcataccaagttcactttcttccagtctaacattcttagacctgtcctataactcgttcaatggagaaataccatcgaaggtgcaagacatcactgaactgacagcattgcttctccagaacaactctctttctggacccatccctgaccttcgcctccccaagttgagacatttggatttgagcaacaataacctgagtggacctataccaccctccctgcagaagttcccagctacttcttttctgggaaatgcctttctgtgtggatttccattggaaccatgtccagggacaccacctgcttctccatcgtcgccatcgtcccaaaatgccaaaagaagcttctggaaaaagctcagccttggtatcataattgcaatagttgctggaggaggggttgtattcatattgatcctgatcctcttggtatgtatcttcaaaagaaagaaaaatgcagagtctggcataggatcatcttcatccaaaggaaaggcaattgcaggtaaaaggggagaaaaatccaagggggaatacagcagcagtggtattcaagaagcagagagaaataaactgtttttctttgagggctcttcatataattttgacttggaggatctgttgagggcttcggctgaagtccttggaaaaggaagttatgggactacgtacaaagctgttctggaggatggaacaacagtggtggtcaagagattgaaggaagtggtggcgggaaagagggaatttgaacagcagatggagctaattggcaaggtttgccatcatcagaacactgccccattgcgtgcttactactactccaaggatgagaagctcttggtgtatgactatgtcccactaggtagcctttgtgctgctttgcatgctatttgctacttcaacttgaaagtataatccag

SEQ ID NO: 20467 - DNA, 1583 bp, Zea Mays
aaaacgggcagaaaaataaaacggaaaaggagccaaccaaaccgatcggtcgaccgatcaatctcaatcgaagcaccaggaaaactcgcgcaacacaaatctcaacaattatccggctggtgcgccggcgagcaccgtcctccggcgaccggctgggcagcagcagcaaagggggatcttgtcacgcttcgagatcggtcgccgcgctgggggcgactcactcgcgccactcttccccttccctgcgctggtggcggaaccctaatgccggcccgagtctagccgccatggactttgccagccgccacgccgcagcggaggcggccacatcggcatccgccgctgcccccgcgggcgtcgccgaggagcccgagtacctcgcccggtacctcgtcgtcaagcactcttggaggggaaggtaccgccgggtcctttgcatcgcctcttccggcgtcgtcacgctcgaccccaccacgctcaacctcaccaactcctacgatgcccgctccgagttcgaccacgctgaggctctcaccgccaccgacgagttcacgctcgcagtccgcaccgatgcccgcagcaagttcaagcccatgcgcttctcgtcgccgctccgcccggggatcctcaccgaactccaccgcctccgcccggtccaggcctccttcgacttccccgttctccacctccgccgacgcacccacgaatggtcctccttcaaatttaaggtcactcctgtgggtgttgagctccttgaggcttctggtgatatacgctggtgcttggacttcagagatatgaattctccggcaattgtactcttgggggatagctatgggaggaagacttctgaaggtggagggtttgtgctatgccctctttatggtaggaagtcaaaagcttttatggctgcttcaggaactacaaacactgcaattatatcgcatatgacgaaaactgccaaattaaagattggattatcactatctgtggataactcacaatcaatgaaagcggatgacttcatagcaaaaagagctatggaggcagttggagctgctgaaacacggcatggagagtggtcggtaacaagattacgttctgctgcgcgtggcactgctaatattgagagcttaagtttgggtgttggaccaaggggtgggcttggagaacagggtgattctgtctctcgtctgcttgttcttacaagtacttcacttgttgaaagacgtccagagaactatgaggctgccattgtacgaccactctcagcagtaagtgcttttgttcgatttgctgaagagccacagatgtttgcatttgaattcaatgatggctgcccaattcatgtatatgcaagcacttcccgtgataatctacttgcaacagttcttgacattttacaaacccagagacagtgtgcaattccagtgctaccaaggttaacaatgcctggtcatcggatagatccgccttgcggggtatcacatcttcagatgccccatcatagttctgttgatatggagtctgctaccatgcacattaaaacatctggctgcagctgcttaagagctgtagcgtca

SEQ ID NO: 20468 - DNA, 1257 bp, Zea Mays
atgcaaatagactagatacaagatcttaccggcctatgaaggtgacaaacagcagcttcaatggttttataatgcatgttgtggcatggcacaggttttgaacacggctccagtagcaccagcaaatctccctatgccaaatccagcaccggcaatttcatctgtggcgccttcagaacaatctgcacccagcaaggaggatgttgaattagcaatggctatcaatgcctccattcaatcagctattgcagagggagtatcagtgcccaatgttcaaccaaatgcatccacccccaacaacaatggctgggctgcccctccaagtaattctcacaacggatggggaccaccagccactcctgcaccatcaaagacgagcggtcagtcccaggtccgggtagacgccccaagcagcagcacttacaatggatgggatgtgcccggaacaagctctagtcaaagttcatcgaaaccccaccaaacccaaaccaaccctccagtcttgattccacaggaagcacttcaggctctcccaaccccaaccgcgccaccatttgctgaagaaaccttctacaacggtcctgttcactatccatccatagactctacgcctgtcgatgtaaccatgccggctaccactggaggcggtagtacaacagtcatcgcaacggcagcacctacagaacagttagaaaatgaagctgatgcaagtgacagcggcaaaactccctctggtacttgcgttatatgtctggatgcccctgtggaaggcgcctgcatcccgtgcggccacatggctggttgcatgtcctgtttgaaggatatagaatccaagaagtggggatgccctatctgccgtgccacgattaaccaggttgttcgcctctatgctgtttgaggagttgaaacggtgggttcagaaagttggcaatggattggagggttctcgcaacaaatgttgatgggaacgtctctatctcaaaattgtgcaattatgctattttgcacttcgtactgcactacaaatatgacttccgtgtaatgtatgtgggctgacgcctttatgtacataggtagtactatacaagacaattttataaaaatctgggtattgttgcaagttgcaactcacgtagtcacgttcaaagttgcacgattgtggagcttttccaagaacctaagatagtggatcgccgggtgcttgtctcatcggttaatgatgtgtttagtttgaggtcaaagtgggatgaggcggtg

SEQ ID NO: 20469 - DNA, 833 bp, Zea Mays
atctcatccttattgtcttgatagaatttactccatcgaatcacatatataaattaatctaggctaaaaggatggatgttgtatggggagagactgctggtgttgaaggtcaattgttgctgttgtgccctctcctttttctattgcagggatttgagggttatgttgggtttttacttcttcgcacagctcatactggtgtcgtccctgagtggcaggtggtggtctgtgggatcctgctgatttccatggcaattggcaacttcgcaaacacattggatacattgatggccaagtctcggttcaaagcgaagatgaagaaatcaaagggcaaacgggatcttgacacgtgcccctcaccaacaggttcgtcgccgacagattcagcaaccagagcatgaaaaggtcaagagggccagttgcttaccctatgaccattgcccgtgtttaaccagggctggtcaccattgtaaatcattagtgttttctggccatcagcccctaatccttactgtctctgtcagagctcatactcatgtaagcatcaggcaactaggttgctgatggtcctaggctgaaaaaggatactgagaataaacttctggtgtttgtttatacctatatcctgaacatggagtggagtagatgagctttaggactgcaagtcttagcaaaattttcccagtatagttgtgaagctgtgagacatttgtcacaatgcgaagctgtatacaggttgaggcactatattgcttattattctgccctcggtgtatgattgatgaaatggagagtgcagaacagcgctgacactcagttccccatgattgcca

SEQ ID NO: 20470 - DNA, 6222 bp, Zea Mays
gaagatcttctcacacagtttgagaaaaccttcgaacccctgccccatccatacagcgcggtacgtagcccatgtgaaaatgatagcgaccaaggattaggccttagaccggtgctttggcgtgagactaacgaggtattttttttacccccaacctgaaatccgctcccatggggagttgaactcaggatctgagaggtgctactcacaccacctaaccaactcagctagtaactataaataaccattttcttatatgtagagattgttgggaaatgcacttgttttcattatgaggccctaaggcctgtatatatacatcggtacatgaggataaatatgcactaaacaccttattcaatggggatatataggtacatgaggataaatatgcactaaacaccttattcaatggggatatttaggaatacatatatatacatctaacaccccctctcaaactcaaggtggatcaatgacactaagtttggagagataaaactgatgctaagctctggtttgcgccctgatgaaggtaccagccaactgaagctctgaaggcacatggcgaagaacaatgacatcatcatcctgaatctgcgctcgtgtataagaagcatcaacaccaatatatgcttagtaagctcatgctttaccggatcacgaacaatactaatagcacatgtactatcagacaaatgagaagtcggtatagatacagaaactccaaaatcaacaagcaaccaccgtagccaagtcacctctgtcgtcgcaagagccatagcacacaactcagcctttgtactcgaacgagaaactgctaattgcttcttagtcttccaagcaatgagggaaccactaagaaaaacacaatggtcagaaagagattaaggatatgagaaataactagcccaagtcacatcaaaataggcatggagctgcaaggagctagaacgaggaaagaacagatgacaagagatagtcccacgaagataacatagaacacgaagaagatgattgtagtgaagttgagtgggggtagatacaaacatattcagaatatgcacatgatacgagatgtcatggtgagtaacaccaaggtaaaccagactaccttcaatgtgacgatatcgagtagaatccgaaagaggctcgccattagtggcacaaaggcaaacattgagctccatggggtcttaacagtgcaatgatcagagacacacaagggtgactagcaagtaactgggcacgaagaggctcaaacttttcacgcggatgggtaagcctagacattttacccgctacacgctacccgaacccggacccgaaatacccgaacccacagtacccaaaatctatttcggataaaaaatgctattacccaaaattagtttgggtagtttggctagcagcacctgatacccgaactacctgtaacaacgggtaatatgccctggcgtgcgaggtgtcggagtctgctatctgcgaaccgtggagacgtcagaagtggagtcatgcgacgacccatgagcccatcaagccaaggcgcattcgctttagcttcatctgatccgacgcccgacagtcgacgctgcataacctagcagtagccgccaactgtctccttgtcctcggtggcggtacccgcctgcgactacgccggacgccggttgcttcttcaccagtcaccacggccgtacactccgttgcacagtcgctgcccttactcccttcgtccctcgtccacggtccacctttgcccagttttgatgactggtagttctaaattcttttcctgtaaatcttcaagccgtatgtaatgtgctttggcctttgggcgtatggactctggaatgttgggtgtgtcactgtcagtgtgagcatgtaatgactgttgttcgatgagagcagatagcttctgtcaaatatgctttgggcttctgtcaaatatgcttttgatgagtgatgaccgctagttctattcaccggaaatatttcgggtaaatcgggtataccgaactcgaacccgaaattacgggtagagttttttcttggctgtaatggggtaacaatttctattacccgaatttatcaaagcccgaactacccgacccgaattaaacgggtaacccgaaggtcccgaacgccagtcttatggatgggtcaagaagtcatatgtgcgacgaaactcaagatcagtcttttgatccagacagaactcacatgtgctaggagacatctacagactaagagtatcaagctgacgctaggcgtcagacatctggctatagaattcatcaactgtagaatctccctgacgtaaagaccactcctgacgaatggcagcaagataagtagatgtccagcacacacaacaatcacgaagaagggtccacatctgatgagaactgtcactcaacaaactctgtagaaaagcgagcctccacactagcggtgagaatagaaccagctcaagcatcctcatccatccatatccgatatgcactctactgagcctcatatgatgccagctgatcatcataatctgcaagtagagtgcatcagctgctccctatactgctccattactcgtcttattaagaaaatggctttcatggttgaccttctagagttctaggcacgaaaccaaattggttaaaagagattctcattattcctctcaggcggcgctcgataactctcttccatatcttcatagtatggctcgtcaacttaatttctcggtaattagtacaactttgaatttattcttgtagatcggttccgatatactttaccactcagacatctttattttggacaaacccagccagaagtatctatattttgggatgtaggtagtagtcgataatgtttgttgtgtatggaaaaaaatcaacatatccctgggtgatttagcttacagccgaggatctggaaagcacccacaacttatgccttccacccccagatgggctgttgccaatggagctggagttatattaagtgtctgtgatgaggaggtagctcgttatgagacagcaaatttaacagcagcagctgttcctgcgcttctgctacctccgccaacgacacccttggacgagcatttggtggctggtctgccccctcttgaaccatatgctcgcttgttccatagatattatgcaattgctacaccaagtgctacacagaggttgctttttggtcttctcgaagcacctccatcatgggctccagatgcacttgatgcagcagtacagctagttgagctacttagagcagctgaagattatgcttctggcatgcggcttccaaagaattggatgcatctgcatttcttgcgtgccattggaactgcaatgtcaatgagagctggtattgctgctgatacagctgctgctctgcttttccgaatactttcccaaccaacgctgctttttccaccactgcgacatgctgaaggagttgacgtacatcatgaaccactaggtggctatttcctgcatctgaggccactatcgatgccactgcacaaggcattgcttctttgttgtgtgctcatgggcctgatgttgagtggagaatatgtaccatctgggaagctgcctatggtttgctaccactaagttcatcagcagttgatttacctgaaattgttgtagctgccccgcttcagccacctacactgtcatggaacctgtacttaccattattaaaagtattcgagtatctacctcgtggaagtccatctgaagcatgcttgatgaggatatttgtggcaacagttgaagctatacttaggagagcttttccttctgaaacaccagagcaatccagaaagccaagaagtcaatctaagaatcttgctgttgctgaacttcacacaatgatacattcactctttgttgaatcctgtgcctcaatggaccttgcctcccggttgctatttgtggtgttaactgtttgtgtaagtcatcaagctttgccagggggcagcaaaagaccaactggtagcgataaccattccctcgaggaagccactgagcattcaagattaacaaatggaagaagcagatgtaagaagagacaaggccctgttgctacgtttgattcgtatgttctagctgcagtttgtgccttatcttgtgagcttcagctgttcccttgcatttctaagaatggatcacattcaaatttaaaggattccatgaagattatcatacctggaaaaaacaatgggatcaataatgagctacacagtagcatcagctcagcaattattcatactcgtagaattcttgccatcctcgaagcccttttctccttgaagccatcatcagttggtacctcatggagctatagctcaaatgaaatagttgcagcagctatggttgctgctcacgtttctgagttattccgtcggtccaggccatgccttaattcactctctgcactgatgagatgcaagcgggatgctgagatttctaccagggcatcatccctctaccatttgattgacttgcatggtaaaacagtgtcctccattgtgaacaaagctgagcctcttgaagctcacctgacccttacaccagtaaagaaggttaatcaacatcgctgtgaggaaaacaacaccaactcatcggatagtgccaagttggaaaacaagaatggttcaacacataagaaaaacggtttctcaaaaccacacttgaaatgtgcagaagaggttctgaacggcaatgttgcaagtacatctgggaaatccattgcaagcttacaggtggaagcatctgatttggcaaacttccttaccatggatcggaatggggggtaccgagatgtctgcagaaagcacatcagctcaccaaggatggaggaaggttgtggatgcactttgtgatgtcgtttcagcctcaccaaccaaggcctcagctgctatcgttctccaggccgagaaggacttgcagccttggattgctagagacgacgaacaaggccagaagatgtggagagtcaaccaacgtatagtgaagcttatagcggagctcatgaggaaccatgacagccctgaaaccttggtgatactcgctagtgcctctgaccttctacttcgtgctactgatggaatacttgttgacggtgaagcttgtactttgccacagcttgagcttctcgaagtaaccgctcgagcagtccatcttattattgaatggggagatccaggtttatcagttgctgatggcctttctaatctgctaaagtgccgtctttcaaccaccatccgctgcctttctcacccaagcgcgcacgtgcgcgcgctcagcatgtccgttctccgtgacatcctggaccacggatccgtgagccccaacaagatcagccgaggggaacagcagcggaatggcatccagagcccatcgtaccggtgcgtggccgcaggcatcctcaactggcaagcggacgtggagaggtgcatagagtgggaagcccacagccgccgcgccaccgggctgacgctcgccttcctcagtacggcggcgaaggagctcggctgccctctcccgtgctgacgaggccgctcccggatctgatctgacatcggcggccacttgacggccagtgctggcagcttgctgcgggaccggcgagtaggacgctaatctctcgaccaaggacgactcgccggtttgttcacgtgatatgtgatcaaactgatattagatggtgtttccaaagtatatatctactgaggggcttgctcccatgatgcgattttattccaatctgacgtcagatgctttacgagcatatttaactgcttgagctgtacgtagcttgtattacttgtaactttgtgtaatatggttattattgccgaagaagcagaacatagctttttcttttttttctctctcttttttagactgctgctagatccttatccatgcgttgcaacggagcgccatatagattgaagttccccttgcagggctccttgtacggtctataacatgaacataaagatggcatccagtagtcaatcagcaactatcgcaatgagattggtcttctgcacgtgacccagtttagctcccgtgcagggctctctgtaacctactgtgatgtcccatgacatgaacataaatgtggcaggtttatcattcaataaccaaacagcagccgatatgtttcatctttatacataagtgctgatctaat

SEQ ID NO: 20471 - DNA, 826 bp, Zea Mays
cgccgcacaagttcacagtcctgtccccgccctcaaggccacaagacccaagtggacgcctaccctaccgcagtgccgccccccgccctcatgatacagctccaaccttctaggcggacactcaagctccactgctggtgcctgcaagatccaacaaaatccgccgtcttccagagaattcctttgacatatgatgaggagaaaggagcttggtttcttgagaaagagttgcctgaaggacggtatgaatacaaatacgtagtggatggcaaatggctatgcaacgagcatgagctgataacgaaaccgaatgctgacggccacgtgaacaactatgttcaggtctccagagacggcacgagcgatgaagagaaggagcttagggagcggttgactggtccggaccctgatctcacggaccaggagaggctgatgatcagagagtacttggaacagtacgcggatgccgccgagcgctaggaggtccaaagaatgatgatgactgaggaagagaagagacacaccatgagacgacggaccgaagccgacctgaccgcaccttcctttacggagaggtcgggcttcccctctcttgtcaatcaaatactcgtagcttaaccgtgcaaaagggcacgttctgctcgcatacttggagaatgatgatgaaggagcaaactgtacgtattgttgaacagcagctgtgcagaaataacaaaggtagtagcgtaaaactactgtactgaccataatgttactactgtatgctccttcttggctatgaataataataataataataaaagagtaaataaacctcatcgatccc

SEQ ID NO: 20472 - DNA, 1142 bp, Zea Mays
cttacctcaagccctcaacaaaacacgagagataaaatggacagtggctacaagtgggtcaggccgagaaggaattcaaggtggaggttgaagccatcggcaaagtgaggcacaagcaccttgtcggtctcatcgggtactgcgcagaaggccctaaacggatgctcctttacgagttcgtcgaaaacgggaacctggagcagtggctgcacggcgacgtcggtccggtcagccctttgacctgggaaatacggatgaagatcgccgtcggaacggccaaaggcatagcgtacctgcacgaaggcctggaaccgaaggtggtgcaccgcgacatcaagtcgagcaacatcctgctggacaagaagtggagccccagggtgtcggacttcggcatggccaaggtgctggggtccgggtccagctacgtgacgacccgcgtgatgggcacgttcgggtacgtggcccccgagtacgcgtccacgggcatgctgaacgagagcagcgacatctacagcttcggcgtgctgctcatggagctcatctccgggcgcagccccgtggactacaaccgccccgccggcgaggtcaacctggtggagtggttcaggggcatggtgggcagccggcgcgtggaggacctggtggacccgcgcatcgccgcgccgccgccgccgcgggtgctcaaccgggtgctgctcgtctgcctccgctgcatcgacgccgacgcgcacaagcggcccaagatggggcagatcgtgcacatgctcgagggcgacgagttccccttccgcacggagcaccgctcgccgagggcgtctcaccggacgtcgatggccacgcggccgtcgcttctgtcggagaacgtaggtgccactgacgactcagacaagtccatgtggagatgaaggatctaaccctgcacgaacacacctggcgcggcatgcgaggagccggagctggggcttgggggatggactgactttttctcaactggtgtaattttttgttgttgatccacggcgggatgagcgttctaatttgctatgctgctcgtttggtttgatggtgtttaccgtaatgtatgatttggcacagacgcacagatcttcttttttgttacataaaaatcaaaagataaaacg

SEQ ID NO: 20473 - DNA, 1538 bp, Zea Mays
cccgtcgtcctctccatttccttctgtctgcttgccctcaaaccctagcccgtaccggcgtccaccttcgcgcaccctcgcctcaccaaacacccacggcgcattggcgcttccacctcttatcgtacgaaggcgagcggctttcacggtgtctctctgtcgcatgcaatggcaccgctgtttgaggggcgcccaacagctgcctgcccacggcatgctcaggggcgctggggtcccttgccgctgtccctgaagtctagcctgggttgttgatcttgccgcagatgcggtactccattacttctccgcccgcgccatcatttcggccacacctcagtctgttggtcggtcgcagatcccttgccccgtcgagcttaatatgcaatccgttgcttgtgaaggttgtggcttccttgggtgatgcttatttgagaacatagctgttgtgctctgagcatgtcctgtgtgcctgtcatggcggcttcttttggcgacatcataccaacatattcaatgtcaggctttaaaggagtgagctggtttctatattttaactgatgcaccttgatgctttattgagcggtgtctatgaaatgatttggatggaagtaaataactaagtgacaatggaaagcgatagatgacatccatgggcaaataactgaagacaacaccaacgtagaacttatcatagttttggaacttctgcgggtactcctttggaacatcatgacttgagaaacggttgcatctcagcaagtgtcccatttaggttaaagtggattgaccatttaggttaaagtggattgactcatacatttccaatatgtgttgctgcctgctgtcccttcatgtttgtgatttcaaaaggctatcctatgctgctgatcagtacttaatggatgggagaagggtcagacctcagataagtacctaacttgctatttcctatttttttatcacttttattgatgcccaattgcatctaaagtgttgtccacttctattgcagcagtgcttgaggattcagtgatcagcagatctgcaaggacaaaaggaccaaaggagtgagctggtttttatattttaactgatgcacctggatgctttattgagcggtgtctatgaaatgagttggatggaagattggagaaacgcccatgggcctggcaaactgtggcatgtggctttgaactttgccaattggagacctgatgtggatcattttgggacgcgagttaagccccctgtttggagtgccagaaacaaaacagatggagaagggaaaaaggtgtcaggggataagagccagcgcctgatcaccgttttattcgtttttgagtaaactgtagcgagcaacaggtagcctataattgagacaatgctgaatggattgtagaaaaggatctgctttaatttccgttaatttagcgccttcagtgatgttcctagttgctggagtacatgttaagtatatttaccatttaaatcctcccaccactctcgcgtagctttataaaaaagctcttaataaacca

SEQ ID NO: 20474 - DNA, 2343 bp, Zea Mays
gatagggcatgtcgggtctggtgggaaaccctttcatcgtcctcctgcgtcgccagagcggagcaacgaggggcgcgcgcgatggcaggcggcggtctccagggagcgaagaagcgcaagcgcgagcacgcggaagggaaggcaaagcctcggaagcaagtcaagggaggcggggacggagcgaagcggaagagccactcggccgccggcggctacacggcccatggcggcgccggcgaagttgtcgcgaggaagaagaccccggttacccccaaggagaagcgcctcgcggccaaggaaatgtcggaggccaggaagatgaagaggaggcagcattacagccttgagaaggaactaacgaaattgtgggaaaagatgagatgtcacgatgtgagcaaagaggagaggtccaaggcagtaagtcaggctatccataaaatggatgggaaatatttggacattgccacatcacatgttactgcacgtgttcttcaaacatgtgtaaagtggtgctcggagtcagagagggatgctatctttgatgttctacagccacatttgcttaccctttcttgcaagaaatatgccgtttttcttgtaaagaagcttatagaactcgcctctaaaaaacagtttgccagtttcatatcttcccttcatggtcgtgttgccaaccttcttcatcatactattggagctgcagtcgttgattatgcatttcagcgaggaacacaacgtcagaaaaggcaattgttagttgaactgtactcccctgaacttcagctattcaaggatctgactgtgcaaagttcctcctgtttgatagatacaatttccaagcttgggttgcagatatcatctgtcctgcttcatatgactattgtgattgataaaatcttggagaaaggtactgttgagtacttaatagtgcacacggccatattggagtactttacaattgcagataaggggcattaatcatagatggagatgaacctacaaacgctccagaactaccaaagaaagcaaaagctaagaagaaaaggtcgaaagagccacttattgttcggatcatgcagacaagggaaggattaaaactaggaattagttgcgtcaagtatggcagtgcaaaggacaggaagaagattattaaaagtttgaagggccacattatgaagcttgctctaagtgattttggatgtctttttcttatctgcattatttctattgttgatgacacaaagcttgttaataagattgtcattcaagagctggtaaaacatttaaagcagctcatttttgacaagaatgggagacggccattgctgcaactacttcaccctttttgctcacgctatctttctccgaatgatctagcttgtctgaactacaatgtgccttctcttagttcaacagaggttgagacatcagagagtgctataggagttataacagaaaataaattagatgatgtgactgctcaagatcccaatggcttagaaggcaagcaaattgtgtttgagagcaagaaggatccattacaaaggcgacatgaactgttgataaaaagtgagcttgccgaggctctcgttcagtcatgcattgaaaatgttggagaattacttcgaacaaattttggcaaagaagtattgtatgagatggctgttggtggtaaagacaacgttctggatggcctcaccgataggatccacatgttgcacgatgcaatagcgtctgatgcggcccaaccgaagactgaagatacggaacatgcatttgaaaacttcttttccagccgtgtaatcagaagaatggtaatcgattgcccagcgtttgcagtcactctctggagaaaggctcttcaggggaagtgcaagatatgggctgaaggacacagttcgaaggtggttgcgagtttcctggagtcgccaagtacggaggtcaaggatcttgcaaaacctgagttgcagccgctggttgatgctggcatccttaaagtgccagaccctaaggttgttcaaaaatgactcgtgcgcgggggcctttttgcgccagtaaatgactcgaggaccatcccttgtttaagggatacggataggttttttgaagctcgttctgccgataaaaattgttaaatcactcgttcgtgtgtacgccagtccgttgtacacataccctggatatatggtgaatcggatacgttattttgttttaaactcggaatgctcctttttatctataaatttttttaggagatttgtgttcttgtcctgctttggaaggccaaaaattattttactcttgtttttttttaaaaaaatccgaggttcttgtaagctcact

SEQ ID NO: 20475 - DNA, 2602 bp, Zea Mays
gtggcctcagcgattttgctgccccccatctcctttttttagcacatcgcttgcgttctctctctggtttcctcctctgctctgcgctccgcttcccaccgctcctcccctgccgtctctcctaccacaaagccgtggcccgtgggcgctgttcgcggcggcgacgggtctctcatctcctctaccctctctcgcgcgcaacggcctaaaaaaaccctagcgactcggtcggcgctcgacttggatcgtgccggggggctaggggcaggggcagctctcttctctcgtcgtcgtccaggacattgttgataacttgatactggattttcttccttctcgaacctgtagagggctctgctttatttgaaagtggagagacatggatcgtgatgatatagctggtttcgtcagtggaggttgctatgagtcctgaatttctaacccagtatatataacagagttatgatatccagaaggcagacaattgtttcttttcgttttctagttggtttgcatttgatgtttcataattggaatggatacaactactcaaggccttgagtttggtggtggtatcaactctccgaagccatattgctattggagcacaactcaagacactactgtgcacaaagatagtacaccagaggcatattccaccttttctatttccaactcaaaagcgtcaaaaaggaagcaaggtgccatgtctggagcaaaaggtggaaaccctttactcactttgggtctaggctgctcaccaagttcatcttataacagcaagctaagttctggcactgcttgcataacatcatcatctttattaaaggagattgatgaagagtcttcaatagatcttggccttaaccttgggttgtatattggaaatgatattggacactgccaacagaaatcccatgctggttttgaaaatgtgctctcgacaaactctcctaaactggatcttcagttgagtttgtctaccagttcgcctgaatcagttgtcattgatgcaaataggtcaccagatggcttggcgatgccgatggccaattcaccactcgccattgtagaagaaggatcagtaccacatagttgggttttcgagcattcaattgtttcatcatcacatgcttctaaggcaacgcatggctttccattatcaaagaaaaccaatggaggatgtgtgaaaggagcaagaggggcatcagggcgttgcatagcacatggcggcggtaggcgttgccagaaacctggttgtgagaagggcgctgaagggaggacaatctattgcaaggcccatggtggaggcaggagatgtcaatttctcgggtgtacaaagagtgctgaagggcgcacagaccactgcatagctcatggtggtggccgccgctgcagccatgaaggttgctcccgagctgctcgtggaaaatctggcctgtgtatcaagcatggtggtggcaaaaggtgtcagaaggagaactgtaccaaaagtgcagaaggccattctggactctgcattgcccatggtggtggaaggcggtgccagtttccagactgcacaaagggtgctcagggaagcacaaagttctgcaaggcacatggtggaggaaagcgctgcacattcgtcggatgcaccagaggggctgaaggcagcacttcattttgtaagggccatggtggaggcaagcgctgtgcctttcagggcggtggcgtgtgcccaaagagcgtgcatggtggcactcagtattgtgttgcacatggtggtgggaaaaggtgtgctagctttggttgcactaagagtgctagagggcgcacagagtattgtgtgcgccatggaggtggcaagaggtgcaagttcgagagctgcaccaagagtgcgcaggggagcactgatttctgtaaggctcatgggggaggtacacgatgcctgtggggccaggcggacacaagctttggtgctggtgcacagcaatgcgataaatttgttcggagcaagaccggtctctgctcagctcatagtgctttgatccaggaccactgtgttcatggcggtggtacattaggttccgctatctaccagtctgtgcatgtcaaaccgactgagatgatcaatggtgataaaactttactggatccggctatccctgttacaaacagtggtgttcatcctcctgtcctagctcagtctatgatcgatccgctgccagagggcagagttcatggtggtggcctgttggctttactttcgcggggcggaagcagaacaagcgctggtggctcagaattgtgcttcgggcaagatcgtgtggatctgaggctatcaggatctccatgaaactgatgactgcctgcagttttgatccaaattgtgttgctcatgctcgggttccataggatctacccggacgtgtactgtgaatctacccagacgtgtactatgaaaataagagggtagctcctagagcagatgtgttgttttattttagttaattgtttcagtgcatgtaatcacttactttaatgctcatgtttggacttgattaactctcagcaacttaaggttgaaatataatgtgcattttgctgcttattctgctga

SEQ ID NO: 20476 - DNA, 1663 bp, Zea Mays
caaagctattgcccagccctggagtctgacgacctcgtttccctgctgtctcgcctctctttcggttctcacggcgacgactgggcgagcgccgcctcccctccctcgctccgtgaggtcctcgccggcgacgagtgccgccgcccgtttccatgttttttccgccgattagtgtccaccagatctagtgaaggctggtaacttgacgcaaggggaatatagacacagaattttttgaacattgatctgtagccagtgctgcaatggctacaaagcttgtggttctcggtatcccctgggatgttgacactgaagggttacgagagtacatggccaagtttggacccctagatgattgtgtcgtcatgaaggagcggtcttctgggcgatctcgtgggtttggctatgtaacattcgcatcagccgacgatgcaaagaatgttcttgattgcgagcatgttcttgggagccgtacattagaagtgaagatagctactccaaaggaagaaatgaaatcacaaggaacaaagaaagctacaaggatatttgttgctcgaattccacagtcagtggacgagtcgatgtttcgtaggcattttgaagcttttggagaaattcttgatctttacatgccaaaggaacatggttcaaaggggcatcgtggaattgggtttatcacgtttcagagtgcagagtctgtggacagcatcatgcaagagtcacatgagcttgatggcacaacagtagttgttgatcgcgcgactccgaaggaggaagatgtaagataccccccgagtagaccatctcagggtggctatggtgcatataacgcttacatttcagctgctaccaggtatgcaactttgggtgcaccaacactgtatgatcatcctggatcagcctatggaagagggtactatggatcctctcaagcagtgggcaagaagatatttgttggtagacttccacaagaagcaaacacggatgacctaagacattactttggcagatttggtcgaatcgtagatgcgtatattccaaaggaccccaaaagaagtggccaccgaggttttgggtttgtcaccttcgctgatgagggtgtggcagaacgggtatctcgtagaagccatgaaattctgggccatgaggttgcaatagacacagctgcaccacttgagaatgattcagctggtggtggttacattgatcccatggacctttacggagcttatggttcaatgagatcttttggcaggttctgcggtggtctagattataattacggctatggccccagcagcggaagcagcagatcaaggtcggattggcgataccgaccttactgaacgtgttttagtttacctctagggaaggaaactgaggagatggagaaaagaattacctgtctaagaatgctaagtgaggggggtaccttacgcgtggaatctatcattttgtttcatgttgtgattttggatttgtcgtgattcacattattgacaagatgaaggcagtccttgtagttactgtatggaagtgctgtatgtgtaataaaaaagtatcatttgcgaaaaaagttataacgccatcagacgaggtgcctgcacgtttatatacactcgctctgttccagtatactgttacttctacttctttatttttg

SEQ ID NO: 20477 - DNA, 2069 bp, Zea Mays
gtaaatacccgcacggccatagatccgcacgctaccctcggcatcgttgccggctgcccttcctcgctccccaccactccgttccatccctcgcctgccttcgcacgggtgtgccgcccgttcgacggccacgccgcgccgctgccccggcgcccgcccttcctcgtcgagctcgggatcgacgtctcccacacctcctcgcgcccgttccgggctccgcatccggcccctccccgtccccaacaccattccgcagcaggcgaccagcacaacatccggaatcccccgccgcgccttcggctcgtcgtcgctcctcctccgcgtcccgccaccccccgcacgatgcttgtcccaacagaaaggcaacagtaactttcttccattgggtgctcttgtattccaggaaattgcctggttctactacttgaaagattcaagctatatgcatctacacatgacatgggttctcgagaaaggatgttatttgaccttaacaaactcccagcagaagttgaagaagaagctgctgctgtcgtaccaaatgaatctgctgttgttgtgtcacaagaagctgctgttgtcgcgtcacaagctgctgttgttgtgtcacaacctcagaaatccctccctgttccaatgacgtatgccccatcattgtttcagccagggggaggatcacagtcacaggggatattgaacgataataatgccttcaagcatgcatccattggatctggctttcagccctttgtgaagaacaacaaagattcaaacaatacaaaggagccgatgaaggtggaagataatcagaattctagtatacaatcaacggccatggtaaacaatcgaaccactgatagtgcttctcctaaggctgaaacttgcaatcaggtgtcacaagccgttgaaagagaagaaggagaatgctttgatgcagatagcatttctgaaaatgcagggagtagcaacaaagatgagatcactggtacggcaagcactcatttgaagaaagaatcccaagagagcgagccccatctcattaaatctggtggtgtgactaaagatgatactgctgctgaatgtagtgatgctgaaatggttgatgcgtctaaagatctggttcatggttcttctacaggatcagagaacatgcaaatttctgaatgtaaaggaaatcagcctggtgatgatctagatccttgcaacaggtcaaaggatgttaaaggagtggaagccaattatgcgtttaggtttgcgagcaatcccgcaaagagacccaagttaaatgaacacaaagaggccatgcttggcaaaaaacgagctaggcaaaccgtcttcatcggtgtagaggatgcgaaacaagctggtactatgaagacgacaacgcccaggaggcagtcgtcctttccagcaccgattgttacacgtactgtgaaggaagcttctcgtggtattggtgaaaaggctgcagaaaaacaaaatcagcaagcaatcagagatcagagacaacctgaaatgatgggatcagaacgaagcaattctgtagatcctagtgaccaacacactgaacccaatggtgacactgagttgggtacccagggctggtcaaagaaaatgaatacagaagagccagcctcagatggttatcagcatcctgcccaaagacaagcttcattaaagcaaaccatggacttcaagcagccaaagggccgaccattctcttcccaaagaacaattctaacagggcaaaacaatgctgatcagaagccagccaacaaaagaggaggctgaacttgagtgtgttcctggaagttttgaatctgctgaggagtacattagagtttttgagcctttgctttttgaggaatgcagagctcagctttatagttcgtatgaggagagtcttgaggctgtgggaagggatgcacatgtagcggtgcaagtaaaaaccgtggataaacgtgaaagaggttggtatgatgttgtcgtcctaccgatacatgaacgtaaatggaatttcaaagaaggcgatgttgctattctgtcgtttccacatcctggttcaggta

SEQ ID NO: 20478 - DNA, 752 bp, Zea Mays
agaagtggagcgacctagttttacaaacgcaacaacacgactcactttagagagcggtaatgttgagggagacaaatctctctccaccatcgcaccgcgccgtcctcgccctcgccgctgcgcccctcccgcgtcttccgcctgctccggcggcgctctcgcctgcgccgcctgctatggggctgctcacgtcggcggagctcaactacctcgtcttccgctacctccaggagtcaggttttattcatgctgcatttactctaggttatgaagctgggatccataagtgtggcattgatggtaatgcagtcccacctggtgctcttatcactattgtgcagaaaggcctccaatacattgaactggaagcaagtagcgatgagaattatgatgaagttgagagggattttgcgcttttggagccacttgaaatcatcacaaaagatgttgaagagttgcaacagattgtgaaaaggaggaaaattgagagatctcaaactgaacttgagaaggataagggaaaagagaaagaacgtaacgaggagcatgaacgacgtccttgtggcgaaagggagagggaacaacatgaaaaagaaaaagagcaagtcagggacaaggacaaatctgaaaaagatagggaccatgataaagagaaggagaaagagagagaaaggcagcatgcagagcgtactgataaggttaaacacgaggatgattctcttgttggtgcagattagtctgcacgaggccat

SEQ ID NO: 20479 - DNA, 123 bp, Zea Mays
tcgcgaatagactgcgatccatttctgaactttgaggaaatcgacggtcaagcttcggtgaccaagagatcaaactcttcgagttctacaaagttgaagaccctgagcagcagtcggttgggg

SEQ ID NO: 20480 - DNA, 1972 bp, Zea Mays
cgtgtgtgcgttggaattttccaaggaggaagaagggaaagcctaggaaagccaccgctcaccttctctttctctgtagcctctgccaccaaacagctttggagtgggatctcctcttccttccccgccctcttccgccgacagcgggagagtacgcggcgcagcggctacaccaccgtctccaggctcccaaacacgtccctgccatccttttttgactccggagtccctcccctccttgcctacctggcgaggatcccatacccaatcccatccaactagcttcctactacttcccccccgtcctctcgatccctctccccgttcccctgaccagccgggcgtcaagtggcagggaggagaggcggcaccgcgtgtgaggctcaatggggaaggggagcgcgcgggcgctggccctggcgctcgccgtgattctcgcctgctccgacgtcgccgtcgtcacggctcaggaaaccgagcggatcgaaggaagcgctggtgatgtgttagaagatgaccctgttgggaggctcaaggtctatgtctatgatctccccagcaaatacaacaagaagctgctcaagaaggatcctaggtgcctgaaccatatgtttgccgctgagatcttcatgcaccggttcctgttgtcaagcgctgtccgaacttttaatcctgaggaagcagattggttctacacacccgtatacacgacgtgtgatctgacccctaagggtcttcccttgcctttcaagtctcctcggatgatgcgtagcgcaatccagctgattgctacgaactggccttactggaatagatcagagggcgcagatcatttctttgtcacaccccatgactttggtgcttgctttcattatcaggaagagaaagccattggacggggaatccttcccttgcttcagcgtgctacgttggttcagacctttggacagaagaaccatgtctgcctgaaggatgggtccatcacgatcccgccatatgcgcctcctcagaaaatgcagactcaccttatccccccggacacccctcgatccatctttgtgtacttccgaggtctgttctatgacaccggcaatgaccccgagggcggatactacgcaagaggtgctcgtgcatcggtctgggagaacttcaagaacaacccgctgtttgacatctcgaccgatcacccaccaacatactacgaagacatgcagcgctcggtgttctgcctctgcccgttgggctgggcaccgtggagtcccaggctggtggaggccgtggtgttcggctgcatccccgtcatcatcgccgacgacatcgtgctgcccttcgcggacgccatcccgtgggaggagatcgccgtgttcgtgcccgaggacgacgtcctgaggctggacaccatcctcacgtccatccccatggacgagatcctccgcaagcagaggctgctggccaacccgtccatgaagcaggcgatgctgttcccgcagcccgcggagccgagggacgccttccaccaggtcctcaacgggctggcgcgcaagctgccccaccccaaggacgtcttcctcaagcccggccagaaggtgctcaactggacagagggcgcccaggatgacctcaagccgtggtaggccgtggctgctgctcttttgtaaacgacacaaccagatcgatgatggtgatgctgatgagtgaaccacacaaccattggttaaatgtaaagctcttaatcctcttgctcctccaacctttcttctttttgattttgaggcaatgtgcatgtcttgcctgtatatatacactagtacatgacaatcagggtggccggccggggcaagacaaattgaggtgccaacacattacacactaatagtattagtattatattctagcatgttttgacggcaattcctttctttagaactcggtatagcagagggacaaacccaacgtttttttttgtttttta

SEQ ID NO: 20481 - DNA, 2189 bp, Zea Mays
  misc_feature (2189)..(2189): n is a, c, g, or t
ttgagccatgtccctcttgtcgcggcacgcgcgtcaccccactacgccgccgcccgcctctttctccggcggcgttgagaccccacctcgtcgccgcgtccccaaagagaacgttgacccctcctccccggcgcgcaaccaccactctgccctcgaccacggcgcctcccccttccgctccccgtcctccgcggccaagccgctctccgcccgcaaccgcttgccaccgcgtccgccgtcctctaatccactaaagaggaagctcgaagtctcccctgcagcggccgcggtgggctccgcgcacgatgccgcacccgggctcgactccggcgtccaggtggtggtgaggatacggccgtcgtgctgggtcgatgaagaggaggcaggcgaggatgggaggggaccggaggcctgcgtgcgcaagacggcggccaactcggttgcgatccaggggcaggacttcacgtttgatgctgtcgctgactcggtctccacgcaggaggatatcttcacccttgttgggctgccacttgttgaaaattgcttatcaggtttcaacagctccatatttgcctatggacagactggcagtgggaaaacctacactatgtgggggcctctatctgcattgtcagaagattcattgagcagcgagaggggcttaacacctcgtgtatttgagcagttgttctcccgcattaacgaagaacaagttaaacatgctgacaaagagcttacttacaattgtatctgctcgtttctcgagatctacaatgaacagataactgatttgctagatccctcgcagaagaatcttcagggcctggcaaaccggaggactggggcaacgagcgcaaatgctgatagctcacgctcgcattgtgtttttacgtgtgtcattaagatggattctaagaatccagaggatggctcaagcatcacaagatcaagtaggataaacttggtagaccttgctggatcagagcgacaaaaactaacacatgcagctggggatcgactgaaagaagctggaaacataaaccgttcactttcacagctcggaaacttgattaatatacttgcagaaatatcgcagtctggaaaacaaaggcaccatgttccatatcgtgattccaagcttacatttctattacaagaatcccttggaggcaatgccaaactggcaatgatttgtgctgtttcaccgtcccaaagctgtaagagtgaaacgttaagcacacttaggtttgctcaacgtgcgaaagctataaaaaacaatgccgtagttaatgaagagaaaattgaagatgtaaatgcgttgcgtgagcaaatcaggcaattgaaggatgaacttcaccgaatgaaatctaatggaggcatagaagggaacagcggcagctttgccactggatggaaccctaggcgcagtttgcatctgttgaaaatgagtttgggtcatcctacaacattccaatgtataaaagaagatagtgacgaggaaatggaaattgatgagaatgatgttgagaagccctacaatcatgaaaatatggcaatgtcttctattaatgttaaagaatccaaacgtttccaagcttcaatgaatgtaagtgctggaacttcacaggttgaagatcttgacagggataagattttgatatccataaaaaggtcctgctgtagtgctaataaatttaatactggtactgatgttggagatggaaaatgcaaattaaacattgccgccagtatacagaggggacttcaagtcattgaaagtcaccaaaataatagtgcatggaagagagcatcggttggattaaatgctagaatcatggatattcaaccttgcaaggttgatgttgcaattcagactgatcctgaagaatacgaaactagagataaccctctagctctggttcctagttgtctgcttgaagcttctgcaaatgagagtagggatcccagtacttgcagggacctacaactagtaccagttgatgtgacagtaccatctgatgaccaaaagcagcgacattttctgaaagctgtggagaaggtcttggctggagctatcaggcgagagatggctcgtgatgaacagtgtgcaaagcaagctgcagaaattcaacaactgaatcgtctggtgcaacagtacaagcatgaacgcgaatgtaatgctgtaatgn

SEQ ID NO: 20482 - DNA, 881 bp, Zea Mays
cgtttgacaagcattttggattttccagtctcaaagcattccaaaaggaagtcttggatgcttggtttggtcatgaggattgtgttctcctagcagccataggatcaggatcacatgaaaattattgaagacgacggtccaggtgcagccttctatgccagtgctaaggccatgactaatggaaatcacactttctatggacctctcaagcaacaacctcaatggataaggcatattaaatagtaatgctccttccatttcataatgtgtaagcattacttcttcagcatcatgggagaaaatcttactgtcagggttcagaggatgttgtacggaatgaagttggttgatttgacgaagaagaaaacatttttagtcttgtggctgtgcgtctagctgttgatgcagctgatgagaagtcggctatagccgagagaattttagtcatcctgcagaaatatgtcttcccatatgacttatttcgttgttggatttatcatcaagtggagagtggcaatacttagtctggccactacttgtgcttgccaactttgcttagcaacttttaatgaagggctttgctggtgttgcgacaaagatacatgccaagagcagtatggttgcaggtgaagcagtgagtaacatctgcgttatagtggcattcaacgttcaaagcaagaaatgtatttggtttaattattgcaagcagtgatctgaaatatgtaaattatctttatatggtctttgcaagggaacacattttctggctctataccatcagtgattagccctgtacaaattttattgaaagaaaaactaaaggaatgtttttattgctcttgcatctagaatctatatatattgactctgtagtgctcgct

SEQ ID NO: 20483 - DNA, 69 bp, Zea Mays
tccgtcttcaagttggcccgactaacgacatcgtcttgcggagatgtccactctctgcatcatcttggg

SEQ ID NO: 20484 - DNA, 551 bp, Zea Mays
  misc_feature (551)..(551): n is a, c, g, or t
ttctgaccttcaagcatgtaatgttgtgcattcagccttgggtttgactctttcactacgatgtcccttggaccaaatatttgtgccaacatgacgcccatggaaagatctatatctgccaaagaacctgagaattcagaggatttgcctacagtagttagaagcagtgatgaaatggacactagaaacagtggcgacgttcgtcgtgacacagttgacactcttcctgagtcgaagcagagccatgaaagttgcgcttctgttagtaacaagttcgactctggagagtaccaagtcattttgcgcaaggagttgactaagagtgacgttgcaaattccgggcgaattgtgcttcccaagaaggatgctgaggctggtcttccaccattggtgcaaggagatcctctgatactacagatggatgacatggtgcttccgattatatggaaatttaagtatagattttggccaaacaacaaaagcagaatgtatattctggaagctgcaggtgaattcgtgaagacacatggccttcaggcaggggatacacn

SEQ ID NO: 20485 - DNA, 3824 bp, Zea Mays
gggatagcttagtgaagtttgagatgtaattcacagcaattttttcgatcaaaaggctgggaaaaactgttgggccaaacaaaacccgcccaaaacctgtatttttattgtaaaaagaaaaaaaacaaacaaagaaaccctcacgattcactaggaattcttccagatccagcccttggctcgcagtacaccacaccacgcccagatctcaacgtgccccttctctcagatctcaattcccaaatgccctcgccgtcgtagctgcaccccgaccccgcgcgctcgctcggatccatgggcggggtcagggcagcatcgccatcaggcgcaggatccggagccgtcgcgggggcgggatccgatcacggggcgccgcgactggctatggcgtgtgtgctagcgtcagaggccgccacggtgctcgctgtcatgcgccgcaacgtccgctgggctggcgtccgctacggcggcggcgacggtggcgcgggcgacgacgagcaccttgaccacccgctcgttgcggggctcaaggttctccgccgccgcgctgccgcttggggccagggtagttgggcgggcgttgagccgctcctctacctccgacccttcctcgatatcgtctgctccgacgagactggggcgcccatcacgggtgctgcgctctcgtcgttgcacaagatcctcacccttgatgtcgtcgggcccggcgcaccaggcgccgccggggccatggccgccgtcgtcgacgccgtcacggcttgccgctttgaagtcaccgacccggcgtccgaggaggccgtcctggcaagggtcctgcaagtgctgctagcctgcgtgcgcagccgtgcagcaccggcgcttgccaaccgccacgtctgcacgatcgtcaacacatgtttccgcgtcgtgcagcaggctggaaccaagggggagctactgcagcgtgtctcccgccagacaatgcaggaggttatacgaactgtctttgcccgcctgccggacatcaatgtcaccttgttgtccgacgagcaggtacacacctggattggacaagaatcttcttggggactacctgggtaatcatgatgagttctctatccaggtccttcatgaatttgctagaacctttgacttcaaggatatgaatttggatgctgccttaaggctcttcttggaaactttccggttacctggtgagtcacagaagatacagagaattcttgaggccttttctgagcgatattatgaacagtcaccacaaatgtttgttaatagagatgcagctctggtgttatcatattctgtaatcatgctcaatactgatcagcacaatgtaagggttaagaagaagatgactgaggaagactttattaggaacaatcgccgtataaatggaggaaatgatctgccaagagaatttttgtcagagctttattattctatttgccggaatgagatcagaactattcctgagcaaggagctgggtgttctgagatgtctttcagtcgctgggttgatctaatgtggaggtcaaagagaacatcattgtacattgcttgtgactcctacccttttcttgatcatgacatgttttcccttatggccggaccaacagttgctgccgtgtctgtggtttttgacaatgttgagcatgaagaggttcttacaggatgcattgatggttttctatcggtggcgaaactggctgcattctatcatcttgatgatgttctgaatgatcttgttgtggcactatctaaattcactactttgttgaacacttcctacattgatgatcctgtaatagctttcggggaggataccaaagctaggatggcaacagaagctgttttcactatagcaactgcttatggtgatcacatacgcagtggatggaggaacataatagattgtattttaagattgcataagataggacttcttcctggtcgcctcactggcgatacaactgatgatcaggaatcctcttcagattcattacctggcaaacatacttcatcagctcctcaagttttgccaattagcactcctcggaaaacttatggactgatggggaggttcagccaactactgtacttagatgctgacgaaccaaggtcccgaccaactgaggagcaacttgctgctcagaggaatgcttcagagactgtaaagaagtgccaaataggtatcatcttcactgagagcaaattcttgcaagctgattcactctcaaatctggcaagagctctcattcaggcagcaggcagacctcagaaaatcaccagctcacttgatgatgaaggcgtagctgccttgtgcttagagcttctaattactgtcacattaaacaacagagacaggattgttcttttgtggcaggatgtttttgagcacataacccatattgtccagtgcacggtgatgccctgcaacctagtggagaaggctgtttttgggctcctgcacatatgtcagaggttgcttccctataaggcgaacttggtagatgatttgctgaggtcattgcagctgattctaaaacttgatgcccgtgtagctgatgcttactgtgagaacattaccttggaggtcacacgtcttgtcaaggccaatgcgacccatatcaaatcccagatgggctggcggactatcatttccttgctctgcatcaccgcacgccatcctgatgcttctgatgcaggatttgaagccctggtttttatcatgtcagaaggtgtgcacctctcacctgccaacttcatcctttcagtggaggcatcaaggcagtttgcagaatctcggcttgggtctgcagaaagatctatccatgctttgaacctaatggcagactcagttaattgtcttgtgcgatggtcacaagaggttagagaagctggtggagaggcagatagaatattggaaggaattgcagagatgtggctgcggctggtgcaggctctacgcaaggtgtgcatggatcaaagagaagaagtgaggaaccatgcattgttatcgttgcatagatgcttggtagttgatggaatatcagttaagtcttcaacatggttgatggcatttgacattattttccagttgcttgacgaactgttggagattgctcagagctactcaccaaaggatttcagaaacatggaggtatctctcttgcatgctgtaaaactgttatgcaaggtgttcttgcagtcacttaaagacctctcaggacagcacagttttgataagctgtggttggaggttcttgacatgatagagaagttcatgaaagtcaaattgagaggcaggaggacagagaagctacaagaggctattccggagttagtcaagaacatactaatgatgatgaaagctagtgggatcctgtcaaaaacaggtgccagtgaaaacagtttctgggaagcaacatggcttcaagttaacaagattgcaccctctctacaattagaaatttttcctgacaatgaggatggcagcacaactcaagttgaagaaaacaaattggatacacaagtgcaatctgaccagaacaatgatcgataggacattatactttctcccatcctatcaagttagttgcagctggaacctttcaactttttgttccaaaaccatacacagatgcttggcagttctgtatgtgccattaggaagagtaagatggtatattgtaattttcttagtttacatatataattttgttgttgacaaggttgttgctttgtgctttactgttgcaacaccgaagttgtatgatatatatactgtgttactggcctgggagaatcaaagcttttggctgttt

SEQ ID NO: 20486 - DNA, 826 bp, Zea Mays
gttaggttggaggtgtggtcgtacacccaaccaaccaggttcaagtcttctccagcttgaatttagtatcgctggtaggtgaatcagctcctccagaaatgcttcagaagttgacatatctggctatcagacaccatcctcagattaagcgtgttgacaccgttcgagcatacacctttggggtgctttactttgttgaggttgacattgagcttccagaggacttgccacttaaggaggcacacgccattggagaatctctccaaatcaagattgaggagctacctgaagttgagcgagcattcgttcacctagatttcgaatgtgaccataagccggagcattcaattctcaacaagcttcccagcagccagccttgatccgaacgaatcctgtgtggtagattgtcgtgcagaatctgctgcagttcttgcattggcgtcttgtgctgtatgacaaaactaagagttcaattagttttgtggcggtgagtttaagatcaggcgcatctaagactacgagagatgaaggtgccgaatgcagagatttctcgagtgtggaaccctttgtggttctgttggtatggtcttcgttttgagcgaaattaagcattttgctgttggcatcatggcatgtgattggcggcgatctagctgtgtgctatcgactacggtgatgtttagacatggtttcgagaaagagagtagatccttgatttctttaagcaaatctcagtgcctttttattttagggctagtttgatatcagtttctaagtgatttctattttttttattttttagaaaataaagtaattttacttgaaa

SEQ ID NO: 20487 - DNA, 1039 bp, Zea Mays
acttgaacaatgataaattcaagctgggattatataataaccgaaagaaagctgggtggaatttgctttttattctcatgcttggtgcctttcttgtcagtctaggatattctactgtgactttcatggcatcctacaacaattatcctggtggctatgctttaaaggctctacatgaagcagattcttcagtgaaggaaaagatggtacatattgatgccttcactgcaatgagcggggtttctcgtttctgtgaaaatgaatatccttggagatactccaaggaggaagaaattcccatcgaagaatttgagaaaaggaatttcacctatctactgaatgagcaccgctccatcggtggctaccagtgcctgttcgctgtggatggattctccagagtaaaacttacgccccaaatccccccgctctctctggtgaaagaacccaaggtgtttgcacatgggaatacgagagaccctgacattctttcactgagttggcccggttgtccttgagggcatggggacaccggacacccagattcctgtggcaggaccactaactgccagcagtgaagatgtgtttgagtcagtccgcgtgacacatatatggtatacatctctgggtcttgccatgaagctaccttacctgcaaatctagaatggggcccctcctcccctagatcccacggcttcgaaaccacagctttaaggaacactgccattttcaggtgcaaatttgtgtaacattttagagccggaagaaagacagaaagcacacggggggtggggggaatcatagcaattagcaaccttgtatttacaagttggtcgatatatttttttcccttttgaggcaactttcatactccatcttatataacaagagcttctagactttatttatcggcagcaggcatacagtcgtgctggagacgcatacttgctccattcaaagataatatatttgttttctatctgctgtggccctgctttgcgagtcgtattcggttcggtggcaggctggccgcattctatct

SEQ ID NO: 20488 - DNA, 585 bp, Zea Mays
cgagtagacgagcaagctactgtggatcttgaggtttagcagatagaagttgctgagcaggagctcattgaaggcaagttgtgcccttgatcacttatttttacccagccatgttcttattaatcataatgatctgctgttgagggccttcttctccccaaaggtgttataagcaaaaacaccttcggcaagatgatatgcaagcaggtacgacatgaagatttatgtcgaagctacaattaaaagagcttcggcatggtggcatgcctaagacgaagaaaggcaccaacttaaagaggaaaagaccacatagtccctgataatttgtattatgatcataattagttatcaaggacatgaatgtaattttgtccgggctgcgtcccgtgcctataaatagatgaacagtacccccgtactgttcatgctgacttgtaaccactcacgtgtcactcttgctttttcaccttctgtcaagccgaaggtacaaatgtaatttaaatatcattgatatttgttcatgtttatataataagaatataaatggtctaacgatttgaaatgattattcatattcctttcaca

SEQ ID NO: 20489 - DNA, 480 bp, Zea Mays
gagcaatttcttacgagaaagcagtgcatcatttgatcaaaagtttggttggcaagagaggctgtcaagtttgcaggatagagcaaggatcttctttgccgttctgttctggatgtcattgtttttctggggaagtgcttgggatggaagtaacaactccggaggcaagaagcggcaacgatttcgaaagaagtcaaagtgaagatgctttaagattggcatttttttcatagggatatagccttctatgttcaaggagacaaggacttgtgaacattcaatggtgcatagtgaaggtgtaggcatagaaagttgtcgtgtcgtgttacatagttgtatttcagcagccggtaccctaaagtaaattgcttggtcctgctgtatatactgccaatcatgaatcatggagacatgggtgacatcataatggactaaggagacatatacgtctgtcgcttcttgtttaatcttgtttgggtg

SEQ ID NO: 20490 - DNA, 1960 bp, Zea Mays
cacgacgtggccaacagcgcatcgcttttacacttctgcaggttccacggagccacaagaggaggaggaggagggcgccggggcattagaagcggccaaggacaacaagcgggtacatggtgcacgaccccaggggcagaccaagaatgcagccccctgtttcactcgagaacgccaggaccagcggcatcatcggttgggagctgttcttttccaaggcaggaagggcagggcgcagcggccggcctcgcttgatttcggctgccctggtgttgccagatcctcgacgcattctccggggttcccggccgccggtgtcgcggtggtgaacaaggggatgggcgtatcgtatccgtcacacagtaggccggacgtgctgtctagtccggggacgccgagctgcaatcggcgtgggatggcaggcgttggctaccagcagggtcctcgttcagaaagagtgatcccgccttggaccggccatacaagccattctgggagcggcatggtgttaccttacagcactgggactgggaggacgctgccatcgaaatgggaggatgcagagaggtggatcttcagccccaaccccaaccccaacaatgcactcgggaggtcggtcccgcaactctggcggccaaaatccaaaagtgggcctcttggacctcccggtagattttgtggggcgtactcttgtgtttcgtcgtcggctcagtttcttgacaacggtagagttggaaatctcactgtgaatgcacattacatggctgggatgttgctacctgagcatatttgcgggggtgttatggactgggaaagggatgcaagtggagcatcgggtgaggatagtagcaatggccagggaggctgcaggcctggtcaaatgaatgttcggcatcctgctatgcagcccaccagggtttctcagcaacatggtagtgcaatggagtcatatcagtcattgcatgcttctcttcaatctatacaagatggtggaattgaaagcataaaagactctgccactagcagtgcccccattattctgaggaaggatgtggcaacacaaacaagccctgctattagcaggtcatcctctcccagcacgaggacttcgttctcccgttcactatcgtcacaacaagtcaaagagctggagagttgtttctctaagctcgaggtcagggatgtgcaggtggatgatcgggtgactctgactaggtggtccaagaaacatgtcacccgaggctctgaaaagaatgctacaaatattattgagtgcaagaaaaaaaccgtggattctaaatcttctgcctgggaagtaacacaaactgcaaagtgtatttcaatgattgagggagaggaagcaaaaatgactgcatgggagaatatgcagaaagctgaagcagaagcagccatacaaaagcttgtgataaaacttgaaaagaaaaggccatactcgctggagaggattttcaacaccctcaggtctggctctcggaagacacaggtggtacgcagtacatcaaccgcaaatcaggatcagcatatttccagaactatcaaaacggcgccaaacctcagcaagaacggtcaaatgagttcattgagtggatgctttacatgtcatgctttctagagatgtagctccatggaaaacacaggtggtccatgcacacttaacagtagtttccttgttttcaggcactattgttagtttaaagtgtagaggaaaaaaatagatccttgtcagtaaccaactagggactgaatcccccctcccccttttccaatggtcaatctatagcatcgatcataatctggattgtccttaagtttttattgtgctaggggaacataagaaagtatgtagagcaaaatgagaggagctgttgttaccctcaattctttgtgattattggtattccaccatataataataaaagaggttcctcttctactagta

SEQ ID NO: 20491 - DNA, 997 bp, Zea Mays
gtcttttggtattcgctttgacacgcagacttcagggcgccagccttctgcgaactgtctctacccttgacgaaggaaaaggcagccttctcaccgtcggacccggcgatgcagcggcacgtcgcctccggccggccgtcgggcacggacggctccgacttttcttaccgcatggtcgtcgaatcccggtaccagagggtcgccgagggcagatcccgcctcgcgcgcctcatcctcgtgcagggcgattgcggaccatggcagtgctgcttcggctttacacaagcttgtcatcaattgcggttgcattctctgtgacgtgcattatccggtcagagttgttcttgaaggttatgaagcaaaacacagaggccatcacaagctacgaaatgcttgatgcggttcgtgttgctcttggtatcctgctgcaaatggtggttatagctacaactaccagactcctgcagaatatgtctcctcccaagagagcttcatgaatgctatgacattttagctttgtttcaagtagtaagggatacaaacttcgagttaaaaatattggccaagtgcgatagtcttgtaccgaagatgctactggtgtacaactgtcaggaaatcgtggtttacttgtttcctcttttgtttttgttttacttcttcccttttctggatctggaaaattcgtagtcgttggcgagctttgcaagctaaaggctaacggagcatatgtgtttttaattccgtcttcatgtttgtgtccatgtttctgctgcgctggaagttgctactcaggctatttctttcatgtcctgaattcaactcgggggacctcttcggcgcgattgcatcttgctgaaagcccaagataaccacaaaagaatgccaataattctgtcggtatctttgattgccatgtctgttttggaaataagactctgaatatgatctgtagctactcagcgtttcctgtgttcatgccttttggatcctatttcta

SEQ ID NO: 20492 - DNA, 2092 bp, Zea Mays
gcaccacgcaaaccgagctcgagaacaccaccacgaacaagaaagaaacacggccgcggcggggcggggcggggcttcttctccttttccaactcgctgcccgttgcgtgattccgccgcgtcgcgtcgcgtgtgcatttgcgcgcgcgcgcaggagccgccgctccgatcgccctgaaaaagatggcgaatagtaggaagcctcctggcctcaggttactcggaggcgccggctcactgacaacgtaccagacactagtcctggtcctcacgttcttggcatacacatgcttccacatgactcggaagatcccaagcatagtcaagagcgctctggacccgcagacgaaggtggggttctcgcactggggacggttgcacgccagcagaaacgctctcaccaccggctggctgccgttcaacaccgccgacggctccgcgctgctcggcgagatagacgtcgcgttcctcgccgcgtactccgccgggatgttcttcgccggccacatcggcgaccgcatggatctgagggtcttcctgacggtcggcatggccggcaccgccgtgttcacgacgctcttcggcgctggatactggctgaacgtccacagcttctactatttcttggttattcagatggtttctggcctgtttcagtcagttggctggccttcggttgttgcggttgtcggcaactggttcgggaagagtaagagaggattgatcatggggatatggaacgcacacacctctgtcgggaatatagcaggctcgctgctcgccgcgttcctcctgaagttcgggtggggctggtcgtttgccgtccccagccttatcatggcgctcgttgggttgatggtgtatgttttcctgccggttagtcctgaggccatggagattgacagtgacggcggtgagcttaactgcgagaaggacgctgtgaaggagcctctcttggaaccaggccaagaagtgaaacatagtgcagtggggttcttagaggcatggaggattcctggggtcgcgccgtttgctctgtgcctcttcttctccaaactggtcgcgtataccttcctgtactggctgccgttctacatcagccatacacgcattggtggcgagtacctctccgacgccacggcaggaagcctatcgacgatcttcgacgtcggcggcgtgctgggaggggtcctggcgggccacatctccgaccgcctgaacgcgcgcgcgatcacggccgcgagcttcacttactgcgcgatccccgcgctcttcctgtaccgcacgtacgggagcatgtcgatggcgtggaacgtctcgctcatgttcgtcacggggatgttcgtgaacgggccctacgcgctgatcacgacggcggtgtcggccgacctcggcacgcacagctcgctcaacggcaactcccgggcgctggccaccgtgacggcgatcatcgacgggacggggtctgtcggagccgccatcgggccgctggtgacggggtacgtctcgtcgaggagctggagcgccgtgttcaccatgctgatggcggcggctctcctcgctgggctcctcttgagcaagctcgtgtgcgccgagctgcaagggaaaacgcattccagcgtgagcaaggacgcaggcggtgaacatggtgcctactcagatgaagtgtaagtctgaagccctggttagtaagcccacgttcccgacctgaagatgaaaaggcagagatttagctgctgagtgacttgctcaaatggcaattcagatgattttcttttgttttgtgtggtagaagatgtaagtgtgtgcttagattggtttttcaggtttactagactctagagcccaaatacaggcacattttaggcgcctttgtaaataaggtcgggctcatactagttaccattgctagttgctcaattgtatgtgatgtttagggtatatgtcaaatggagggcgaaccaccttttgtacactggaatggccaactctgcatttactttgaatgttggccttctttttgtacgtgtaaaccgtgtgaaggttcagagaattttgaattgaagcatctaggctgaccgctaaaaaaaga

SEQ ID NO: 20493 - DNA, 1021 bp, Zea Mays
ggggaggggagagctgctggcggctgcaactaggagagcattggaaatttcttttttgctggggcacgcatattcttccagtcgttggatgctgcaatttttttgttttcacgcgtatcacagatcccagcagaaagtcttgtgcttcctgttatatccacaaatgacagacttactctgggatgtgaactatgggatgggactatcattcgtggccaaaatgaaatatcacatccaagcaatggacgccgagaaattgtcaacaaggattgtaattcatgtagcacacttccttcaaggatcaagcgtgtgttttacatgtcaagtgaaggcagcaacctattgcatgaggttttccctgaagttaaccatacagttttggagcagctaagtaaggtggactgcattgtctatgctatgggatcactctttacatcagtctgtccatcactggtattacgtggcattggtgagactatagcatcaagatccatccccaagagagactgctgggctgtctgcctctggttttgtcactgcaattaccgattctctaaatcggacttatggcgaccctcacaaaagcttaaagaatcataccaatgactatgtaaatgctatattggttccagaaggaggccaagttcctttagatattgaaaatttggcagctcagggaatttttcatgtggtaaccgtgaagtctattcatgaccctaaagttggcgtcatatttgatgcacggtcattgatccaagccctaaccattctcatatctgaacatatggatatgtgtgtatcaaaagttcagaacgtggtcatgtaactgaaaatgtaaaagttgtaagctgatctttcaagtacaaaaatgaatgtaaagtccctcttaacaatttattgttttactaatcgatccatagtgcgaatactcatgtttttatttcagctagcactagtgttgcaattctgcctgacttgacatgattaatgaaaaatgagacatgtatttttcaatttctgt

SEQ ID NO: 20494 - DNA, 1475 bp, Zea Mays
tggtacttctaaaaaacgataaaagcaaggcaccgtagcatgttggtttagtcaattagattagactgcacggccgctgtccatgggacaagaggaaatgtctctcacgggagaacgacaagttttaagtcgatgaattggacttgtggtagatgaccaagtaggcaaagccgcaaaggaggtggaaccggtggcaaaacattgtcagctgccgaccttcgcgatcctgaaatttcagctctggtggcttccaagctgagggagttccacaaccttgacatgcctggtcccaaatctgtgctcatttgggacagacttaggaactggctcagaactgccaagagcttgtgtccacctgaagaagccaaggaatttcggttggacagtctggagaaccagattactgcattggagaacgagtgttcaggtgattaccagtggattggtttctgtcacaatgatcttcagtatggcaatatcatgattgatgaagagaccaacgtgctgaccatcattgattatgagtatgcaagcttcaacccagttgcatatgacattgctaaccatttctgtgagatggcagcagactatcattcatcaaagcctcatatactggactacagcagatatccagatgttgatgagcagaagcgttttgttaagacctacctgaacatttctggtgaggaacctgatgcggaagttgtggagaacctgctccaaagcattgagaagcacacgctcgccagccatctagtatggggcctctggggaataatttcggaccatgttaacgacattgacttcgactacaaggagtatgcgaggcagagattcgagcagtactggcacaagtctgcgatcttaacatcttgaacatgtgtataaacacccgtacgtggtctcaggaactccctgagggcctgtggctgcacacacgaaattgtgcagtgccactgacacatagataagctgtgaaagaagaaatactgacgacgacgacgaataatcccgttttgggctcgggaggttatttctccgcaactcgatgagcttcaggcttcagcttcaggaaggaaggaaggagctatggggatttggctgcccgcttatgctgtaccaatgcaattaaaagataaagatccggtccggtgttgcgtgtgctatgtttagttttggctagcaccgccgagagccgtggtcctgttgtggtgtttctagtttctgtatgcttgatgttgttagtgtgctggataatttggttttgtgcttggggagtccttagctttgggacaacgcatacattgtatactgggtagatgtataaacataaaacagctatgggaatttggttctctacctttatttctctctcgaacaggctgtatttcgttaagaaggtaaatttgggtttgtatttgttattatcagcttgttatacatgtgtcagatcaaatgcatttcttttggtaccc

SEQ ID NO: 20495 - DNA, 1641 bp, Zea Mays
ctgagagtcgactagtgtggttgagcactgcagctgcagcctgagctagctgctagcaaggagccgaggcagagagaaagagggatcggaggaggagctgataaggctagcctcgctcttttggtggtggtggtggcggtggactggtggcgcacactctccctctcgctcgtcttgatggtggtgggtggcggcagcggctgcctcgcatggctgggttctctctgaggagcggcggagccggaggaggcggaggcgggaggggcggggaccggggcggcgatcactcgatcggcgccgacagcctgttcctgtacgcgcgaggggcggccgccgcggccgccgacacggcggccagcggcggcgggatagggttccagctctggcacccgcaccaggtccagcaggcggcggccgcgccgcacacgtcgcagttcttctcctccggcgccgtggccacgggcgtcgtgctcggcttctcgtctcatgacgggggcgccgccgggatcgccggcgccgggggcggcagggccggcaccagctgccaggactgcggcaacaacgccaagaaggactgcccccacatgcgctgccgcacctgctgccggagccgcggcttcagctgccccacgcacgtcaagagcacctgggtccccgccgccaagcgccgggagcgccagcagcagctcgccgcgctcttccgcggcgccgccaacagcaacagcgccgccgccgccgcgagcaagcgcccgcgcgagctcgtccggtcccttggccgtttgccgtccgccaactccgccatggtcaccacgaccacctcctcaggcgacggcggcggcggtaggttcccgccggagctgagcgtggaggcggtgttccgctgcgtgcggatcgggccggtggacgagccagacgcggagctggcgtaccagacggcggtgaacatcggcgggcacactttcaaggggatcctgcgtgaccacgggccggcggacgacgcgggccatctgccgccgccctcggcggagtaccaccaccaccagctgacggcggggcaagcgagggaagcgccgtcgccggcggggagcagcgaggcggcggccacggcagcgacgtcggcggcggtgctgatggatccgtacccgacgccgatcggcgccttcgccgcaggcacccagttcttccctcataaccctagaacctagctcactactactagtatctacatattagctagctttgctgcttccattattatggctttcgatcgatcctagtagtagcttaattccttgatggttccatttacttcctccaagttccaaattaaagatgatgatgatgatgagcatgaactaagttgtcgtcatcgtcgtcctcgggattagcaaacaaattcgagacaaacgggaagatatttttattgttactatttcttcttccactactactgcatacgcgcatgcgtttttcgagccgttgatcgatgaacactactaatgcatgatcaatggaacacatataatgtccttattattaattgagctagtgcactaccgctacctgtttgagcaatcttatttcgagttcattaataactaattggccaattcttaatgcaatgcaaagacaagagtttca

SEQ ID NO: 20496 - DNA, 2259 bp, Zea Mays
ccgcatgaccgcatcagctcatcgcatcggccgctttgctttgcttgctgctctcttctctccgctttccgccgcggtgcaaggccagcgaattccatttccttccgcgtctgtccccaaaagcgggaggcccgccgccggaacgagccagcaaagccaagcaagcatattgacggaggaggcggaacggcggaagcgtgaatccggaggctctgcagctgttctccagaagcagccgactgggtgtccgtccgcggaccggtcggtgtataaatggttggcgaggagagcggctgcggcgtcgagggagggacaggaggaggagaagtgccggcggcctctgctcccaacggggaccgctcagggaatagccgcctcgccgtgccgtcatcctccgcagatgatagaggcttccatagatcaagcaccatgccaggggtgattaagaatgatgaaattaccaatgaatctactggaccatcaaatttggaaaggtccagaactgagcgtcgtcggcaaaataatccaactattgatcctgctaaacagttacttgatgaaaggattccaataaaaaagaagctcaaaatgctaaatcggattgctacagtaaaagatgatggaactgtggttgttgatgtgccaagtggtctggaaccaactatagttggtggaactgaggatatttatactgaagctgttgaagaagcattagatggaacggagatactatacaggcctcctatgcaaatagttatacttattgtgggtacacgaggagatgtgcagccatttgttgctatcgggaaatgtttacaggactatgggcatcgtgtgagattggccactcatgccaactttaaggagtttgtactaacagctggcctggagttttttccgcttggtggagatcccaaaattcttgctgaatatatggtgaagaataaaggattcctaccttcgggaccatcagaaattcctattcaaaggaaacagatgaaagaaattattttttctttgctgcctgcatgcaaggaacctgatcctgacactggcattccttttaatgttgatgcaattattgcgaacccacccgcgtatggacatacacatgtggcagaagcactaaaagtaccaattcatatattctttaccatgccatggacgcctactaatgaatttcctcaccctctttctcgcgtgaagcagcctgctggatatcgactttcttatcaaattgtggactccatgatttggcttggaataagggatatgataaatgagttcagaaagaaaaagctgaagctgcgtccagtaacatatctaagtggttctcagggttctggcaatgacattccgcatggatacatttggagtcctcatcttgttccgaaaccaaaagattggggcccaaagatcgatgttgttggattttgcttccttgatcttgcttccaattacgtacctcctgaaccacttgtggaatggcttgaagccggtgacaagcccatatatgttggttttggtagtcttccagttcaagatccacaaaagatgactgaaattattgtcaaagcactggaaattactggacagagaggtatcattaacaaaggctggggtggccttggaaccttgtcagaaccaaaagattttgtgtatctactagacaactgccctcatgactggctttttctgcactgcaaagcagtggtgcatcatggtggtgctggaacgacagccgcaggtcttaaagcagcgtgtcccacgactattgtacccttctttggtgaccaacctttctggggtgaccgggtgcatgcaagagggctagggcctccgcctattccagttgatcagtttggtttgcagaagttggtcgacgctataacattcatgatgaaaccagaggtgaaagataaggctgtggagctggcgaaagccatggaatctgaagacggggtgacaggtgctgttagggcattccttagacacctgccatcaaaagctgaggaacagagtctgccgcagtcatcgggcttcctggaattcttaggcccactaagtaaatgtttgggatgttcttagtgcacaaggcatcgttactattcacggattggcggtgtaccatttcctcgaagcagccacgagttatcgtaatattccatgcaaagaagcttcagacgacgatttcacgtctgcatggccaacccgttctgtatatgaaaagaaacaggtgcctacgttttcttcgttttc

SEQ ID NO: 20497 - DNA, 1476 bp, Zea Mays
cgggctcagccatgccctaacacaatgccgtatgtgccaaaataagggaatagaaaggtgccgtgtcatccaataattttcctcgacaaatcctaaccacacacaaaaggccctattttaaatttctgaggagaaaaactaaacagaaaaatcgaggaaaatatgctgctagcaggggccgccattcccactagggttttcggattattaggtttctagaacctttcttcgccgccccccccccccccccccccagaccccatgcacgctccgccgctggtcgcgttcgcagggggcgcctgccccgcttccgctgcctcctcgctgtcgccctggttggcctcgctgcggcccgccatcgttgctgcgccggcgaggctgctatggttccgccgcggggcactccggctggaagccaaggccgcgtggagggctaccggagggggacggggcccgcgggtcccggccaagggcgctgtgctcgcctcctatatgggtgccgaggaggtggtgggacccttgtcgctgctcgacgaggaagagctcattttgcacataagaaaggaacgggataatggaaaacttcctgcagatgttgccattaacttggaggagctgtattataattacaggaatgcagtcctgcaaaatggtgatcctaatgcatatgagatcatgctttcaaatatgacagctttgtttgatcgtgttctactggatgtacagaatccatttacctttccaccgtatcacaaagctgtgcgggaaccatttgactattacatgtttggtcagaactacattaggcctctggtagatttcaggaactcctatgttggcaacatttcccttttccatgacatggaagagaagctccaccagggccacaatgttgttttgatgtccaaccatcagacagaagcagatccagcaattatcgccttgcttcttgaaaaaaccaatccatggattagtgaaaacatagtttatgttgctggcgatagggttgttaccgatccactttgcaagccatttagcatgggaagaaatctcatttgtgtgtactcgaaaaagcatatgaatgattttccagagctaattgagatgaagaggagatcaaacactcggagcctcaaggaaatggccttgcttttacgtggtggttcacagctaatttggattgcaccgagtggtggtagagatcgcccaaatccttcaacaggagagtggtacccggcgcattttgattcatccacagtggacaatatgaggaggcttctggagcatgctggtgttcctgggcacatatatccactatcattactgtgctacgaggttatgcctccaccacaacaggtcgagaaagagattggtgaacagagggtgatatccttccatggagtaggcttgtcagcaactgaagaaacaaagtatggggatattacttgtcataccaagaatgctgatgaggtccag

SEQ ID NO: 20498 - DNA, 3594 bp, Zea Mays
cagtcagcgactcacctcgtcgtcgcccggtcgccgtgcacgtagatgttcgccaagcggctcttccacagggcactcggagtaggaagaggaggaggaggaggagcctcagcaccagcggcatcaccagcggatgccatccaaatggacgcgcagatctcgactcactgcggggtgccatacacagcttcactactcgccttcgatcccgtccagcgcctcctcgctgtcgcaactctggatggtaggataaaaatatttggcggtgataacattgaaggcctccttatatcaccgaagagtgtgccgtacaagtttttgcagtttattacaaaccagggacttctggttgcaatttccaatgaaaatgaaatccaggtatggaatcttgagttcaggcaactattttattcgtcacagtgggatgtcaacattactgcttttgcagtcatagagaggacctttatgatgtatcttggagatgagaatggccttctttctgtattgaagtatgatgtagatgatgggaagcttcaaataatgccatacaatgttcatatccattctctaatcgaaagatctggtgtttcgttacaggatcctcaacctattgttggaatactgatccagcctgacacttttgggacaaggttgctaattgcatatgagagagggttgttggttctttgggatgtatctgaggaccgtgcagtttctgtcagaggctatggggatttacgcatgaagggtcaaatcaatggtgctcagggggattctggtgaagatcaactaaatactactattgatgacagtgaagaagaaagagaaatttgctctctttgttgggcttcaagagagggctcaactgttgcggtgggctatataacaggtgacatacttctatgggatatgactacaaaatcctccagacaagagaagcaaagtgatgtttcatctaatgttgttaagctacagctggcctcagggagtcgtaggcttcctgttattgtcttgcattggtctgctgggtcagcagtacattctaataaaggagggcatctttttgtttatggcggcgatgatatgggatctgaagaagttctcacggttcttagcctggaatcaactgctggattagaatcagtgagatgcatgtcacgaactgatctcaaacttgatggatcatttgctgatatgattcttattcctgatactggggttcctgataaaagcagaacttctgcactttttattttgacaaatcctggacagctgaatttttatgatggtggctctctattttctgtgcaaaactcaaaagagggaactcctcttcctgaagcacagaaatttccagtcgcaattcctacccttgatcccaacataacggtcactggtctttattcgctaaccgaaagtgaatttccaaatatttcactgaagaaattttgtgctaggaaaaatgctgggcatttcatatcagagaacatgaaatggcctttgactggtggggttccaaatgagatgtcactggacgaagatcatgctgttgaaagaatatacattgcaggctaccaagatggttctgtgagaatatgggatgcaacatttcctgttctaatgccaatgtttgtcttggatggaaatgttgctgatgttaatttggatggagctaatgcttctgtatcatctctagccttttgttcattaagcatgactttggctgttgggacaacaagtggtctggtgcgcatctataaactccgagaacacactgggggttcaagcttccattttgtgagtgaatttaagcaagaagttcatgttgttcatcatgggaaaggatttcattgttatgttgcctttttgtcagcaaattcctcagtgctatctctattatttatggcttcaggtggcctccttgctgcaggctatcagaatggtcaggtggcaatgcttgatccaagtcagttatcaattctattcactgtagatggtgcatcaggaacaaattctcctgttgtttccttgggcatctacagtgttgctgcatctgctgcaaaagcagatcaatcaaagaaagataatcctcaaaatgcaacgttatccagagatgttcttctttccttgacaaaggatgctcgtgttactgtacttgactgtacaacgggtgtgatgataaattcacatatcatacatcagaagcaatcatctgctatttccatatgcagagtcagacgagacacaaacccaattatcagaggacaaaattccaagtcaaggtcagacagggaaagatggcaatgatcttgacaaaatacaaacccaaggaattgaaaagcacctgaaaaatgcttcccagctttcgcaaaatggtggttcagattcactccttgtggtgtgctgcgaggatgttttgcttttgttatccctggcgtcattgattcagggaagcagcaagcatctacagaagacgaaacttgcaaaaccttgttgctggtcagcagttttcaaaaacatggatgacaaagtttgtgggctgatattagcttatcagactggcactatagaaatgaggtttgggccagatctggctattgttgctgagacctctttgatgtcattattgcgatggagttacaagacaggcatggaaaaatccacaagctcctcaaatggacaagttactttggtaaatggatctgaatttgcgattatctctcttatggcctcagagaatgacttgaggattccagaatctctgccatgccttcatgacaaagtacttgcagcagctgcggaagcagctatgagtttctcaactgatcagagaagaaagcagaatccagcagcagggattattggtggcttcattaaaggaatgaaaggcaaggctgaagaaaatgcaaaaatgagagaaagtttgacattgcgagctccaagcgaacagttggagtcaattttctcgaaagaaccatttgctgaaccttcaatacccgaccttgatgatccgatggaagaactgtcaatcgatgacatagagattgacgatgaagtagcagtagccctggcacaagcagcatcgtccacatcccaagggaataagagaacagcagtggaggaggagagagcgaagctgtttgaagggtcaaacagtgcggataaaccgagaatgagaacgcagcaggagattctaaccaaatataggtttggcggggacgccgccgccgcagctgctcatgcgaaggataagctgatgcagaggcaggagaaactggagagaattagccaacaaaccgcggagcttcagaatggagcggagaactttgcttccctggcgcaggagctcgcgaaaacaatggagaacaagaagtggtggaagctataaactgggtttgtttgtacgtatgtgtgttgttggatgccacccgtcgttgcgaattgggacacataccagcattaccatttttttgtgtccgtattaatcactttggatattctttttgtgttttggtgatgtacgtgtaaagataaaaaagagagaatgaaaggaaccctcttctcctggctatatgagcgagtctcttattcgtc

SEQ ID NO: 20499 - DNA, 1503 bp, Zea Mays
atccggggccactaaacgcagatttcctcggttccttgtacgttcagggccggacgacggggacagacagcggtgtcgcggggccacctgcttcccaacgccgaccgcacctgctgccctgtcgtccgccctccttcccttctcctcccctccaactgtttcctcaacctcccgacccaaccacggccgtgcccgccaaggcgccaaccgcacaggttataagattgtctgcagcaactcaggatgttccaaggtctgtgatttgtaatgttcatggagttaaccccaaatttattgagattggcaaattgaaacatcagcagctatgccaaagagagcaagcattcttcaagggtgcatattatatcggaaagatggtatggagtaaaggttacacagagcttcttcagcttcttcataagcaccaaatggaattgtctggccttaaaatggagttgtatggcagtggggaagatgctgatgaagtaaaggcatcagctgagcgactgagcttagatattagagtctatccaggccgtgatcatggagattcaatatttcacgactacaaggtcttcataaacccaagtacaactgatgtggtatgcacaacaactgcagaagctttggcaatggggaagattgtgatctgtgcaaaccatccttcaaatgtttttttcaaaagatttcctaattgtcacatgtacaatactgatgaagagtttgtgagactaacaatgaaagctttggcagaagaacctatcccactgtcagatgatttgcggcatgaactttcctgggaggcagcaacagaaagatttattagggttgctgatattgcaccaactgtgcctgtgggacaaccaccaccctcctcacagcatttcatgcgcatctccccagatgaactgcagaagaacatggaagaggcatcggcatttttccataatacaatctctgggtttgaagctgtgcgttgtgtgttcggtgcaataccaaacacactgcagccggatgaacagcaatgcaaggaacttgggtggaatttgcagggatagcattagcttttcttgcgatgctgttgccatggaccatagaatgaaccagtctaactcaacggcaaaaagatgtgtcgctcggagaggttctcagattgatcaaacatacattctatgtggtgttctggtgtggcggcactgcattttttcttcatatatcaaaggcgttctgaagttcctggatgcatcgtatcttctgattgttaatcttaagcagtctgaagtgcacactagtattacagtctcatatatgtggactgtttttcatcgtgttgtttcccaggattgacgcgtgtgttgaaaatcttattgtataataatatgccccttgttttcgcagccatccatgctgaaacttttactacaccgcctaaaatctgtgtgctagttgatactacctgtgttctcgataaataaaaaagaacagaaaaagtaaaaaaaaaaa

SEQ ID NO: 20500 - DNA, 1580 bp, Zea Mays
ctctacgctacgcctctggtgcagcagcagcacccaccgcaccgccactgggctgctgccttgcaaaaagtggggcgagtgaagaaagcaggcagccatgcttttcgggagaaggggaagggaaaagcagccagccagccagccaccacactaccacagcaaagcaaagctcgcacctcgctgcgcactcccactgcgcttctcttcctcgcaccagcagtccagaccaaggagggacgcggcgggggcagcacctttcctcttcctcctcccccagaaatcaattcctcttcccacacgatccatccggaggcgatccagctcttcgcgccctctcttccccaaacaggatacatgagtggggaggccgcggagagagctgattgatcgggaagaagaagaagaacatcgcaattcacttgctcctgcggcggctgtactagggtagccgagaacccgcccatacccatggcatcctcctcggggggcggcggaggccgtaggatgacccccggaggagactcctctgcctccgccggcggcaggaggatctaccgcacccagaccgccggcaacctcggcgactccatattcgacagcgaggtcgtcccgtcgtcgcttgtcgacatcgcccccatcctgcgtgtggccaacgaggtggaggccagcaacccgcgagtagcctacctctgccgcttctacgccttcgagaaggcgcatcgcctcgaccccacctccagcggccgtggtgtccgccagttcaaaactgcgctgttgcagaggctcgagagggagaacgatcccacgctcaagggcagggtcaagcagagtgacgccagagaaatgcagagcttctaccagctctactacaagaagtacattcaggcgcttcaaaaagttgctgataaagccgacagggctcagctcaccaaagcctatcaaactgcagccgtgctcttcgaggtcctcagagccgtcaatgtctcccagaaaatcgaagtcgataagtcgattctggagacgcacaaccaggtcgaggaaaagaagaagctataccttccttacaatatcctcccgcttgatcctgacagtgccaaccagcctatcatgctctatcctgagatccaagctgctttccatgctcttcgtaacactagaggtctgccatggcccaaggaacacgaaaagaagcgtgatgcacccaaggaacacgaaaagaagcgtgatgcagatcttcttgcctggcttcaggccatgtttggattccagaaagataacgtatccaaccaaagggagcatctcatactcttgcttgccaacgtgcacataagacagattcccaaatctgaccaacaaccaaagttggatgaccgagcactggatacagtaatgaagaagctatttaagaattacaagaggtggtgcaagtatcttggtcgcaaaagcagcttatggttgccgactatccaacaggaggtgcaacaacgcaaacttctctatatgggtctttatctgctcatatggggcgaggcagctaacctgagattcatgccagaatgtctttgctacatctatcatca

SEQ ID NO: 20501 - DNA, 3399 bp, Zea Mays
acatcgcgggctccctactccgctttccccaatccacgcccttccgaagagcggcgaatccgccccagaacctcgcgatttccctcaaaccagttctcggatcagagcgtcgtgggtgtcgccgggggcatggcgcagacgccgaaccccagtaggaggtcgtgggtcggcccggcgccgatgccattcctcacgccgcggccggagcggcggcaccttgagatgcggtgggcggacggagtgtcccaaagcgctgctcgccgtagcggcgtcggcgccgttgccagggatggatgcgagagggatcaggaggtgaacgttcaggtcatgctgcggtgcaggccactcagtgaggaggagcagagagtgaatgcgcagagcgctatctcttgtaatgaatcaaagagggaggtcacagttctgcacagcctcttcaagcaagcagacaagacatttaccttcgacaaggtatttggaccacaatctcagcaaaggtcgatatataaccatgccgttgcaccattagtgactgaagtccttgaaggctataactgcactgtcttcgtgtttgggcagactggaaccggaaagacatataccatggagggagagatgagacagaaggttagtgaactaccggatactgccggtgtcattcctagagcagtgtgccatatctttgaaatacttacagcacggaaggctgattatagcatgaaggtaaccttcttagagctgtataatgaagatataacagacctattgtctttagaggaccaaagcagattccctgaaggtagacaaaaaaggcctataactcttatggaagatggcaaaggcggtgcggtaataagaggtcttgaagagattgttgtctatagtcctagcgacatatacagccttttggaacatgggtcagctaggagacgcactgctgacactgcactaaataagcaaagcagccgatcacatgctgttttttctataaacatccaagtcaaagaaacaacagtaggaaatgaggaactcattaagtatgggaggttaaaccttgtagacttggcaggatcagaaaatattgctcgatcaggggcaagagagggtagagcaagagaaactggagaaatgaataagagcctactaactctgggacgtgtcatcaatgcacttgtggagcattcagttcatgtgccatacagggatagtaagctcaccagactgctaagagaatcattaggaggcaaagccaaaacatgcatcatagcaacggtgtctccatctgcccattccctggaagaaacgctggtcacacttgattatgctgctcgtgctaaaagcataagaaacaagccagaggcaaataaaaaaacatgcaaaactgttgtgctcaaggagctctaccaagaaatggaaagaatgaaacaagatgtcaaagctgcaagggaaaagaatggaatctacatctctcacgaaaggtttgcccaagacgaaacaaaaagaaagacaatgaaggaaaaaatagaacatttggagctcagtcttgaaaagcagaacaaagaagttcaaaaattcaaagccttgtacctagcagaacaggaatgccactgggactttgaaagtcagaacaacgatttgaaggtaaatcttgaaagcttgaagggcaagttcatagatcttgaagaagctcattgcagagctcacatgtccctgagggagaaggacttcattatatcaaatttacttcattctgagcacttaattattgaacgtgcaaaggatatgcggaacaccttggagaatgcaaccgaagatatcagtgtacttctgaataaacaagaaaggcaatcaaaaactgaagctgaaaacaaaaggttgctatctggttttcgggctgaattggatcgtagtcttggagttctgcatgctacagtcgttggatcagtatgtgaacagagtaaaattttggagtctataaatgaacaaacaaagttgtactttttagccagaaatgagtttctagaagtgatgttttcagaagctgaacaagttctaaatgatgttctgaaatctacttcagatctcaaggaactattagccttttctgcagaactacaaaacactggattgagaaggaatcttgcttctgttcaagcaatgtcaaagcaatcaattgatttctttgaagatataaggatacatgtgtctcagctcatgacacttatggagcagaatcaaatggaaaggtcctccaagcttgttaaatttgagaatgagtttaaggaaacttgtgttaaagacgagcaagctgctctgaataagattgctgcaattttatcagagttgaccgccaagaaaactacaatggtttcatcatatatgggacagcttaatgagaggtatagtgaagatcagaagaacctgaaactggagatatccaacctacaacaggtttcagataatggcaaaaatgagtctgtggcttgtgttggagtgatagagagtcagttccaggaggatatgtcatcacatactaaatcaaatgatcaaatggaaggcatcttaaaacaatactcggagaaaggtagtcattttgtatcttactggtcacatatacaatcatctttgcatgatcttgttaagagctcaatcatggagactgacgattttattgaggaaagcagaaacaaaaatgaaaatatattccaggaagggcttctgttttcttcacagaatgatgcagagtttcatggcattacatctgacgtgctgactgtttcaaagaattccctcttactggatcatgaaacttgcaagatggtagagactaacactaccattttctcggatcatctggaactgctgaatgaaaagcacagcgaaggcgtggaatctacaagaaacatgatgagtgattgtcttgaaaaggattacatggctaatagtccggttcgaaaccatccacgggaactactgaccagtgcaaacagcttggaatcaattgacaaactaagagcttctctgccagatctggtggcaaagttcaggctcgagaacaagttgaatgaaatggataaggggaagcaatactcggatcaaaggacacgtactccaagaagtcctttgacgcctgtcaaccagtaacctgagtggagaatgcgccaaattctgggatgctcaaatgttgtaaagatggcaagatatcttgccgatatgttaccaccttaatttagcgtgctcgtcagacgttaggatgctgcatgcaaagattctgattagggttagataagaaatccagcaatattggatttcaatttgtatcatgtaaaatcaacataatattctcacttatgccttccatttctgatcagtcatttgagtaaagtagcatgcaatgtcgaa

SEQ ID NO: 20502 - DNA, 1468 bp, Zea Mays
gagcatattttccagcccagcagaggacacgagtggaggtgcggtccaggagcgtgagccggcaccaatcatgccgcttgcattgctggtaccgacccgtccccaccagtccagtctataagagcgacgggatcacggaaacctgttcaccgctgcgccgcctcactattgactgtcggattccccactcgccggcgacaaccgccgcgcccgatccgtctgctaggtcttgcacctccgggctctggccatggctgccgaagctggcccaatctccaaggtcctcatcgtcgtagcgatgcagacggaggcgatgccgctcgtccacaagttcaagctcgtcgaggcgcccgcccacgaatccacatttcctaaaggtgccccatgggttaggtaccatggcaactacaaaggcctccacattgaccttgtattgcctggaaaggatgctgttttaggagtcgacagtgttggtacggtatcggcagctcttttgactagtttttccattcaaacattgaagccagaccttatcattaatgctggcactgctggtggcttcaaggccaaaggggcaagcattggagatgtattcctggcatcagatgtttcattccatgacaggaggataccaatacctgtttttgacatgtatggaattggagcacggaaaacttctgcagttcctaatatcttgaaggaactcaatttgaagattggcaaattgtcgactggggattctctggatatgtctccccaggatgagaaggtgatactgagcaatgatgctacagtaaaggatatggagggagctgctgtggcatatgtcgccgacatgttttcaacgccagcgatctttgtgaaagccgtgactgatatcgtggatggggagaagccaacatctgaggagtttctgcagaacctgattgccgtgacggcggcactggacctggcagtcaccaaagtggtggatttcatcagcgggaaacgcatctctgatctttgaaggctgtcatgaaatccgacacccccactgctctgatgcacgatgctaggctacgaacaatacaacattgggtcaacgattttttgtgaggtgttttctatggcggacctaggtagtgcctagtgaggatacggaggtgtcctactcctaatccagatgttggaacggggatgtttggagcaacgtggactcggggccaagaaaggagcagtgtcagtcttgtcattgttgtctaagggtgtgtttagtttacttttggctttaacttttgcttcgtaaaagccaaaagctaaattaaaaagctggatctagaaagcagttttttctgaaaactgactttctcgtattataaaattgaaagcatgggattttcttttagcagcttttatagatggaattgttcaaatatatatgaaataatttttaacggttttagtggatttcactaaataatttttagct

SEQ ID NO: 20503 - DNA, 289 bp, Zea Mays
ttcagttggagttccgccagacagcaagcactcgaggaagcatcgaaaggctaaaagcatggtttgcgaattcctgcagcacaccttcaaaccgtttcccctctaaactggcaagatcattgcatagatcagcaatacaagactcgccaagctttcctgcctcgtatagtgtcacagcatgcgacttcaaacctgcaacaggtcagtggcaactgtactgtcagttagaaagttcagatacatctcaggcaattaaatgcaagggaaatctatctaacctggagacagt

SEQ ID NO: 20504 - DNA, 1529 bp, Zea Mays
gctaaactagggctactcctaattcctaatgctaaggtgaaggatgctcttgaacaatttgagaatgcattagagctgaatccaacatctattgaggcccaggcagcgctatataacaaggcatgctgccatgcgtatagaaagcaaaaaggctgcagaatgtttaagggaagctttgagagactacaatctcaaatttggtaccatacttaatgatccagacttggcgccattcagagcatcaccagaattcaaggaacttcaagaagaggctttgcgtggtggagaagatattggttctggtttccgaagagacctgaaactcattagtgaagtacaagcaccattccgtggtgttcgaagattcttctatgtagctttgacagcagcagctggaatttcaacattctttaccattccccgacttgtactagcagttcgagggggtgatggcgcccctgatcttctggaaactgctggaaatgctgccatcaatattggagtatgccgcaggtattgttgttctggtagctttgtatttctgggaaaacaagaaagaagagaagcagatcacacaaatttctcgtaatgaaaccctttcaagattacctgtgcgcctgtcaaccaatcgcattattgaacttgttcaactccgggacatcactaggcctgttagtataactttctctatctttaatgtccactgtatgtttgctgaaattaattgtttttctcatttatttctgaaacctttattcagccacttgtcatttgaggtgtattttaggtgatattggcaggttcaaaagcatctgttactcgggcattgcaaagagctgagaggtatcggactgaactgctcaaacgaggcgttcttctaattcctgtgatctttggtgcttctcagaaagaccaaaccaaaccaaggggttttggtgcaagaagagctgctgcatcagttccttctgttggggttagaccaaccttacatattggctaaataccaaaaacctcacctgcctcttagtttgtgtgttttgcaccaaaaacttggtccctttctttgataatttaatgcaatgttgattttgacagggtgactttgaaaagcgtactgaatctattgcagcaaaatcacggttgaagactgaggttcggtttaaggctgatattgtttccccagaacaatgggaaagttggatacgagaccagcaagtgtctgaaggtgtcactcctggtgaggatgtctacataatccttcgtctcgatggacgtgtcagaagatctggaataggcatgccaaactggaatgacatattacaggaactgccacgacttgaagatctgatgagcaaacttgaacggtgaaaaaggtgtgggagcagctaaagttttaccattactctttttcccccattccattcgccttgcccttatctgctgaaacttgaagctggaccatcgtagttcttgtataatatagtgaaattctgctattttgtttatagcttgccgaagtttttctgtca

SEQ ID NO: 20505 - DNA, 1116 bp, Zea Mays
ctggggttgatttttagggagcatgcaaatggcaacaagctgaatccccccggtcacttgtttggtaaatgaggtccgggagctccttggcgatctgccgacagagatgccgaacttcctttctgatgccactatccgccggttcctccgagcaagaaactggagtacgatgaaagctaccaagagcctcaaagaagctaccagttggcgacgtcagtacaagccagagaaaattcgttgggaaagcattgccgacagtgagaatgaggctaggagagcctacatacctgactaccttgacaagaaaggaagaatggtcttcgtaacacttccaacaataaagtccaaatcttcagagaaggatcatctaaagtatctagtgtacaacttggaaaacctgctcatcgattgtgcagatgcagaagaggataacgttgtttggatctcggatttcaaaggctggtcaatatcaagcacaccattttcgttgacccgacaatcgctgcacataattcaacaatattatccaggattgatagcagttggtattctaaccaacgctcccaaaatttttgaatccttttggaagataatgaaacatttcctcgagccaaaaatggacgaaaaagtgaaatttgtgtacaacgacagttcggagagccagaagatactgggcgacatgttcgacctggacgagctggagcatatatttggaggaagaaacacggccgactttgacatcaatgtgtatgcagagagaatgaaacggcgagatcggatacggggagcttcgacagaggataatggcgaggccacctcttcccgatgttggacgaagaccacgagaaactccagttctgtttgaagagcgcagtaccactaatctggacgaaggttgaaactttagtgttatcctatatactgtatatgctctgagccacgcgagcgcggttatatgataaaactgcttagcatttatagttatgaacacaaagagtgttaactttaaggatctgcgactcgactcctaaaagaatgtaaaggctagttcggaagtttgagaaataaacctagggttcgaaaaatctttcataaataactaaatatcttattcaa

SEQ ID NO: 20506 - DNA, 1800 bp, Zea Mays
cgcgcgtcaaggcctaagggttcgggacacggagagcagcctggagaaggtgaagcggcagctgtcgtcggggtccgggaggtacctgctgcaagggcccctgctcaagcgatctgagacgttacggaaatggaatgaacgatgggtcatattggatccgacatctgggaagatggaatacaaactccggagaaatgaaactgtcattaaggggaccattctgtttgatgcctcaagcaccattactttatctcctgtgaactttcaagggatgccaaaatacgatggctgctgcttctacattgggactcctcaaaagaaggaatactttctttgcgctgaaactcctggtgctgcaaaagcttgggtatctacattacacgcaactcagttagtcttacgagctcataaagaggcagtaaattctttggctgggaatggctctccagctacattaggcacagttgctactgcagttgctaatgctaatgcaacagccatggaggctaccaaggagatagaagctgcactaaaggtttcaatgagggcagcccttgggttgggtacaaataactccaacgatggccaacttgatgacctaacaatcatgaaggagactctacgagtgaaagatgaggaattgcaacatttggccaaggatatacgttctcgagatgctacaataaatgaaatagcagacaaactaacagaaaccgcagaggctgcagaagctgctgcttcggcagctctcacaatggatgaacagaggcgacttttgtgtttggagattgagcgactaaaacaagccttggaaagacaagtagaacaatcaatgctgaagcttagacagtccgaagagaaggtcatcagcctgagcaaagagaaggagcagttgatgaaggaaagagacgctgcgtttcaagaggctcatatgtggcgcgtcgaactaggaaaagccagggagcaagcagtgatacaggaagcaactattgcccggaccgaggagaaggcaagagtctccgaagcagatgctgcagctcggattaaggaagctgctgaaaaactgcgtactgttgagaaagaaaaggaggagcttctagccctggttggtgttctccagtcacaagtccagagagagcagagcagcacaaagcaagtgtgtggggagaggtctgagtcgtgttcaggcgccgacagcccccctcccctgacaaagcatgttgatgcatcggacgatgacgtggacaaagcctgcgtgagtgactctagatcagtgctggtgtcgagcgacagcactgaggtccagctggctgtggacggggtggacatccgtcctgtcggcgacgcagagtggggtggcttccagcagtcagatgcgctgatcgctgatgtccgtgaggtctccccagaggcagatggaggcagcttggacattcctgtggtcaaccctccaccgatcagtgatcatgttcagggaggcgcaactcatccctgaaggcctgaggttgctggcttgctgctgccttccgagattggtgtggttgctgggaaaccgatagggatgtctaaatctggagagtcgccgttgagggtgcatattgcatcgatgcgattgtatgtccattgaggtatacgattgaataaaaaggtagtaactgtgtctggctgtgggattgtaaatattcgcctcattcccttttgctacggctattcacgtgtgatattttagctcaggtggatggattgtgtgatatcctggtcaagatttaataaaattaatagagtatttatactaataag

SEQ ID NO: 20507 - DNA, 211 bp, Zea Mays
ggtcatgaagcataatactaataaaagtattgaccaaagaacgcaaatggcttcttcaaatggtcatgtcatacctaatgtatctcaaaatgattcaaagctcgagctctttggttttgattctctagtcaacattttgggactcaagaggtatggccaaatgttctactattttcaccatatttactagagccagggtgtttttggtagc

SEQ ID NO: 20508 - DNA, 1476 bp, Zea Mays
cttcctctccagtctccacgacaacaaccccacccatctcctccttcacgaaccttctagaaccccgtccagaaccctacccaaccatggcggcctccctcctctcccgcgccgccgctgccgccgcggcgctgcgcggcgcggcccggccgaaccacctcctcgctcggggtcgggtcgggtgggcggcgcgcgcggcggagggcgccggtgggccccggtgcggcccgtcgccactgctgggcgcgttcgggatcgcggcgcggtgcaacgccacgtcgtcttcgtccgcggtgtccgaggccaccggcgtccacacagtgcccccgacggagcccgtggtgtcggccgagtggctccacgccaacctcaaggaccccgacgtcaaggtacttgatgcctcttggtatatgcctgcagaacaaaggaatccattacaagagtaccaggtggcccatatccctggtgctttgttctttgatgttgatggaatatccgacagaacatctagtttaccacacatgctgccatctgaaaaggcattttcagctgctgtatctgctcttggcatctacaacaaagacgggatagtagtttatgatggaaaggggctgttcagtgctgctcgtgtttggtggatgttccgtgtatttggacatgataaagtttgggtgttggatggaggtttgccccaatggcgcgcttctgggtatgatgttgaatcaagtgcctctagtgatgccatcctaaaggccagtgcagctggtgaagcaattgagaaagtttaccagggtcaattggttggtccaaccacatttgaagcaaagttgcagcctcatcttctttggagtcttgatcaggtgaaagagaacatcaacacccagacacatcaacttatagatgctcgatcaaaacctagatttgatggtgcagttcccgagccacgaaaggggattagaagtgggcatgtgcctgggagcaaatgtgttccgtttcctcaggttcttgacagctcacaaaagctattgccttcagatgagctccgtaaacggtttgagcaagaaggaatatcacttgatcagcctcttgttacctcttgtggcactggtgtgacagcatgtgtattagccttgggccttcatcgacttggcaaaaccgatgtcgcaatttatgacggatcgtggaccgaatggggcgcccatcctgacactccagttgcaactgctgtttagtctcttcataataggacgcccgtgctcttcatagaggacctcttgattgtatttgccccgtgctgtgattctatggaggttggttggatgcttggatgtaaggctggggaagcgaagccttttggccttcactgtaaaagctgcaacagaaaaactgtcacatgcactgaattataagataactccccttgatctctcgtcttggttgattaataatgctaaagtttgtctgctgtatgtgagc

SEQ ID NO: 20509 - DNA, 371 bp, Zea Mays
ttaaaagtagtgctcagctttaacccctattgttgatcagccttacacatcacatgaactccaaccattggtgagttcatgcccactattttccccacaacttgttgagctctgatcacgtgtgagctcactcttgttgtctcacacccccacaggagaagagtaggtggttcaagaggagccacaccacgaggaggtcgatttgatcaaggtggcgtctcccagttgactttatggcgccaaggatggactttagttcgatcaatcttttattttgtaaagacttccgctatgtaataagtactttgattatattgtgacatttatctctataaactctattattatatatgttgtcttcttcggcgtat

SEQ ID NO: 20510 - DNA, 2519 bp, Zea Mays
attaggatcaccattataaaaaccctataaattctccaccaacgaaacaacaaaaaaatggaaggggggcgatacaccataaggcaaacacaaaacaaaagcaacaaagcagagcaaagattggattgttccgggaataaacaagaaaggcaagggtggatggagtaaaaaaagcaactagtagaaataactgcccaatgccgagttccgaggagagcgagaggtggaggaggagagagagaaaagcgcgggggcgcgaaggcaagctgtagttacacacatcacccaccccgtcgcactcgcaccgcaatctccccgatccccaattcccccattatccgccgagccccgccccgccccgccaatggaccaccacctcacgccgacgccgccgccgccgccgccgccgatggggaactccgcggcgggggcgtcctcgaagccgccgacgccggcgtccacgcccaactcgcgcctcgcctcggcgccgtcctcccgccacgccgccacgccgccgcacgcgtcggcggcggcgtccgccccggcgccggcctcgcgcaccgtctacagcgaccgcttcatccccagccgcaccggatccaacctcgcgctcttcgacctcgccccctcgccctcctccgccgcctcgtcctcgcactcgcacgacgccggccccgcggcctcgtccggatctgcgcagcccgccgcgtcgccctactgcacgctcctccgcgccgcgctcttcggccccgacacgcccgaccgcgtcgcgtcctcggccgccgcgtgctcctcgtcgtcgtcctccttctccccggggccctcgcctgtcggcacccccgccaccgggaacatcttcagattcaagacggaggtgcgccggaacgccaagagggcgcttttttcgggagaccaagaggaggacgcgctgttccccggcattttcaccaccaggggcgcgggaccaaggaaggtgccaaggtcgccgtacaaggtgctggatgcgcccgctttgcaggacgacttctacctcaacctcgtcgattggtcttcacataacgtccttgctgtcgggttgggcaattgcgtttacttgtggaatgcatgcagcagcaaggtcaccaagctttgtgatttgggggtggatgacaatgtttgctctgtggggtgggcgcagcgcggcactcacctagctgtaggcacaaagcaaggaaaagttcagatctgggatgcaactcgttgtaaaagaataagaactatggaaagccatcgcatgcgtgtaggtgctcttgcatggagttcttctttgctttcttctggaagccgtgacaagagcatcctccaccatgatatccgtgctcaagaagattatgttagcaagcttaccgggcataaatctgaggtttgtggactcaagtggtcttatgacaatcgtcagcttgcatccggaggcaatgacaatggactttttgtttggaatccacattcagtacaaccagtactgaagtatactgagcacacagcagctgtcaaagctattgcctggtcacctcatctccacggcctgcttgcatctggtggaggaactgcagatagatgcatacgattctggaatacgaccacaaatacacacttgagttgtgtggacactggcagccaggtctgcaatcttgcgtggtcaaagaatgtgaatgagcttgttagcacccacgggtactcccagaaccagataattgtttggagatatccaacaatgtcgaagcttgccactttgacagggcacacgtaccgagtattgtatttagctatttcccctgacggccagaccatagttactggtgccggtgacgaaacactccgtttttggaacgtgttcccctctccaaagtcccagagctctgatagtctaagttgcatcgggggtacatcgtttgttagaagctacatccggtgacccgcagaaacgtagtttgaactgagctcataaggtaattgcagcatatgtggatgatcatcagcatcatcccattcatgacaaccatgccatcaggtcgtcaaccatccaaggtagctgaatttttgagatgccacggcgcagcccgatggaagaagtggcttgcgaatccgggcatggctcttttggccgagagtgtacatatttatcagagcaacaacggcgcgcatgttacaggagtgcagcatagcggaggcctcaagcatcggcattgttcccagctgataagaatacgccccctttttttgttgttatttttttgtccattttgcgggtcaaacgtcgacctggtatgtgtgtctagtgcgctagcagttaacctattcgaaacgcttactgacctgtgacgcccatttctcattcatgctggcacggtgtaagatgagagcacttgttccatggtttcgttcctggtgtcttgaaaaggagggctggttctgccctcgactggcttgtttcgaagtaatagacagtcgagaaacgtgtgttcgttgttaaaaaaaaa

SEQ ID NO: 20511 - DNA, 1617 bp, Zea Mays
accattccattgccccggcccccgggcactcctctccttccatactatactctcgcgcggcgagctcctcgagctcgctccccgttccaagctagctagaaaatggccgcggcggaagcagcctcctccgcgccggcgcccgagcatctcctggaggtggaggacgacgaggtgatgatcgacttcaagcccaacgccaagtgccgcgccgacctccgcctccgctccctgcacccgtccctccccgtcgccttcaaggtccagacctcctccccgctcaagttcctcgtcagcccgccgcgcggcgccgtgccgccgctctcctcggcgtccctgcgcgtcgtgctccgcccgcagccgcacgcgccgccgtccttcccgcgctcccgcgccgaccgcttcctcgtcctgtcctcgctctccgcggcgcgcctcgactccgtgggaagcagcaacgacggcggcggcggcgggggcggagtcagggccgtccgcctccgcgtgttcttcggcgggccgtaccttctccgcctcgccgcggacgccggagacgccgcggccgtgcgcctcatcctgcgccggcagccgcacctgctgccgttcctggagcaccagcaggccgccgcggcgcccgacgccggcgagcagcagtgggcgccgctgcacgcggcggccgccaggggggactgcggggagctgaggcggctggggcccgaggcgctggccgcgcgtgaccgcgaggggaggacggtcctgcacgcggtcgccgcggccggcgaggccgaggcggtggcggtgctggtggacatgggcgccgacacgtcggcggtcgacgcgcgcgggaggactccgctggacgtcgcgcgcgacaagggataccaagaagtggtggacgtcctggaacggtgggagctggtgatgacggcggcgaggcgaggcgacctcgggagcctcgagtccctgctcagcaagcgcgccggcgtccgcgggcgcgaccagtacggcctcacggcgctgcacctggccgcgatcaagggacacggcgacgcgatcgcgctgctcgccgggccgggatgcatggacgtcgagtgcgaggacgtggaagggcacaggccgctccacctcgccgtcgagggaggccacgcggaggccgtggagctgctgctcgacatgggcgccgacgccaacgcccggaccaggcgcggcgccacgccgctccagatggcggaggccatggggtacgaggccatcgctcagctcctgtgcgcgagaggtgcggaggtggccgccgcgtcggcgttgtgcgccgcgtcgtcgtcttcatcgtccatatcgtgcgcctgatttgctgccggttatcggttgggagagactgttggacggacacgaaggcttgtttgtttccgctgctgctcctgctgtgcgtgagccgagagatgcctacagccgccgtggctggctttaaagtaagaagaagcgaacccgtccgaaattgtactgtactgtatagtggtttgttctgctttgttgggagagtagctcattgttgagacggtcgattgctatacgcggcgtgctggtggaaaaaaaacattcgctatgcaattgcagtgcttt

SEQ ID NO: 20512 - DNA, 3274 bp, Zea Mays
cggatgggccgcctataggcccttccggccttccctgttgccctcccattttccctgtgtcattcgttgtcttcggttcatcctctcggccgccgtctggactgtagcaagcggtgctgctgtccgccgcgctccggagccatgcgggaggggatgaaggagagggacagaggtgggagcccagatgcctcgggccctcctcccttccgcggcccggcgtacaagacgaagctgtgcgctttatggagaggcaggggcggctgcccccgccccaactgcgggttcgcccacggcgaggctgagctccggaggccgccccctcgcgcctccttccagcctcgccctcggcctggtatgcaccacgcgcacctccatccgtctctccctctcgctcccattctcgatctgcgcgtagtttgtcgttttaggttttgcatcgccttaccgtatgcttctgggttttgccgtacccaaattgttgtcgattccatgccaatctgtcggattaagttatttggacgtttcatccgagcaagagaaaccagcgcgctcttcttcaaagagatgcatcttctgcctgcttgtccatcttgttattgggatgattggttgatgagtagaggctccaaagtggtgcagcaaaccggcaatgtgatccgaatcatatgttctcaggagaagagctagcagacagggaagatagttgcaactgcaagaattatataatgataacaacttgcaagtgcatccttggaggatgtacaaatgggggatgcagatgttaatagctgacagttctgggaggctttatagtttgtactcgtggttgagaagaatctacacttcaattgcatagcaatatgatggtttgacacctgaatcttttctcagttcgtgttatctcatttttttgtcttctggtgcatatacaccacgattcctgtgtggtggtacttaaactgagtgcttgctgttgcagaacacaaaaaaaaacatcaacaagcctgatttcattgcagataatcttggcattgctgcttattattttgattttacaattgtgtctcatgggcagatttattgagactgagaatttgagattgactgcttccagaggatgacacatcctatttctatcctggccttcttttcagttgacaattggtcatttatgttcaattgaatgcttaacccgcctcagaagaacataatatggaagatatcatacattgtatcttgatgagattcatgctatggtcagtgagccttaataatgctgttagaagcttttgcaactaattgaaacacgtcatttgaatataatgcataaagctatatccgtggctttattgttacctgcccttcaagtatcatctttgaacaatttttttggcagtcatatggataacatctgaccaagtgaaattaaatttatttgctgctattggagttttggcagattatgccatgatgattggaaatgatagctaattaattttggtgattccatccaaattttcttcagatgattggtattacaagtactggatctattctaagtggtgaatcatgacgtgtaatcatgtattggcatatactctttcattagttgtattggctcgtctgtgtttatggtctatggtgtattggtgttattgtggaccctctaattcttgtagctaattgaataaccatttggctcaaggttatggtaagcttaatgggtttctgtgttgccttgtatctgtgcagctcaatctaacttttgttctttgatggcataatatttttgtgtaaaccttccaccttcctgatttatagggagaagggattacagagataatgactttagagttaggcctgagagaagacactcaccctatgggaggttttcccctgaaagagatatcaggcgtcgttcatttcgtgataagagacagagagcaagttctgaagataggggatctagtcattcaagatcacctattaggaagagtgagagaaaacatagcaaaagtcctgatggtggaaaaaccgattcatccgtaagttttagaagttcagataacgaagacaaaggaaaagatgaaaggtacttaagcagtgatgagaaaaatggccgtgaagaacaattgaaacaaatgcatctggacatggaagcattgcgtgaagataaatcaaagctggaggcgatattggagaagaagactgatgaagagcgcaaactttgtagcagagtagaagatcttgaattgcaattgaacaaagagaaagatgatttccaaaggatgacctccaaaaccaaaaagctaatcaaagcacatgggcgttatataaaagcacaggaggatttaaagaggtctcaggctcgctttgagaggctagcagatttgcttgcttcagatattttgaagccttataccaaggagcagggttccatcggtattactgccaatgacgatccatataatggtaatgaaatgagcccaagcgaccaaagacaaaaccatgtttcagcatcgagaaagagacctatttccctcccaagaagtgaagaagcaaaaactgggaagagacagagagagaatggtgatgatatgattccaacaccagagaactatagacctgaagatgctctagaacatgtccaagatagcaagggaactgatcgactagaatcatttacagtgaagaagttaagagtgggtgactacgatgatgaaggaaacattgtttcttcaagcaatatttttgcggataggtacaagggcgatgatgaggaagttgatgttgattagtgacccgatgccgtcggtcgctgataacgatttgagctgtacgaagcaatttcagcagacgacatcgatgtcagcttctaaaactacttgtatgccttttgcatcgggtaatagggcctggtatatttggtagctatttatgtgcttagactgagttgtgatgctgtcaaacatgattacatgcgatgctagaattttcttcttttctgtgtttcctgagactcgaagaggatattaatctgtattcgcctcatgtattattcttagccagtttgagtatgagatttttggactggtgttattctcagcctcaggttagaaacaccatgcatccatgattcatttacctatcatgaaatgcatgtgtgatcattaagcttactaagggtgtgtttggttgaggagtggagaagaatatggtggatggtggctttatttctattttttggatgttaagggcctgtttgtttacccca

SEQ ID NO: 20513 - DNA, 475 bp, Zea Mays
tgtcagtccctgccccaaccatctcgccgtcaatggcggaactgcgtcgcgatctcgggagtctgttgctcattcccgggccgccctgctcctatataaggtgccatgatcccgagtcaaccctgcttccacccccgcgaacctcgctgtgcaattacggtcgtattgagagaaattcgagagagggcgcttgtgcaccgggaccgccgtccctgcacacgcgattcatcggcgctccgaccgagaagccagccaggcgatttttcaccgccatgcaccgagcctgggtgtagcagagttgggctcgggggaaagcatttggacaccggggacactcaccggtgtcgggcggatccgaccaacccacacctcgccgggggcaaacgtaacctaggctccagcaccgacgagcaagggattgagaacccaggtgttcagcaggtagaagttgctgagcaggagctcattgaaggca

SEQ ID NO: 20514 - DNA, 2059 bp, Zea Mays
atcactaccaaacctacatctcgtgagatgcgtgtccttgtcgatatatagcgtggtagtgagcaccactagcgtcttcgaccacttgccactaccccttcgcgctacctttcgcatcgcatccttgtcgactaaaggagtggtgcgttcaagatttagagaagctttcctaaatttaaatcctctctatggaagaatgagccgacggatcttgagatcgacgaaatcactaaaccacgcggaggaggaggacgattatatatatggacataaattgggtctccttgctgcgtaaatgcttcaagagataaccatctcagtgggaacattcctgaggagcttggggagatcgtcgagataaacacgcttgatctgtcacacaatgagctttccggtcagttgcccgtgcagttggggaatctcagactggctcgtttcaacatatcctataacaagctctcagggcctatacccagtttcttcaatggcttggagtaccgagacagcttcttgggcaaccctggcctgtgctatgggttctgccgtagcaatggcaattctgatggcagacagagcaagattatcaagatggtggtcaccatcataggtgtcagtgggatcatcctactcactggcatcgcttggttcggatacaagtacaggatgtacaagatcagtgctgctgaattggatgatggaaaatctagttgggtgctgacatccttccacaaggtggattttagcgagagggccattgtcaataaccttgatgagagcaacgtgattggccagggtggcgcaggcaaggtgtacaaggtggttgttgggccacagggtgaggccatggctgtcaagaagctctggcctagcggtgcggcgagcaaaagcatagactcgtttaaggctgaggttgccatgctaagcaaagttcggcacaggaacattgtaaagcttgcgtgcagcatcacaaacaacggcagcaggttgcttgtctacgagtacatggcaaatggtagcctgggggatgtgctccacagtgagaaacgccacatcttggattggcccatgaggtataagattgctgttaacgctgctgaaggactctcatacctgcaccatgactgtaagcccgtgatcgtccatcgagatgtgaagtcgaacaacatcttgctcgacgcggagtatggtgccaagattgcagattttggtgttgcaaggactattggggatggcccggctaccatgtccatgattgcagggtcttgtggatacattgctcctgagtatgcctacactctccatgtcactgaaaagagtgacatatatagctttggtgtggtgatccttgagctcgttaccggaaagaagccgctggcagcagagattggcgagatggacctggtggcgtgggtgactgccaaagttgagcagtacgggctagagtctgtgcttgaccagaacctcgacgagcagttcaaggacgagatgtgcatggttctgaaaatcgggctgctctgtgtctcaaaccttccaaccaaacgcccgtcaatgaggtccgtggtgatgctgctgctggaggtcaaggaagagaacaagccaaagctgaaggcggtggcaactctgcccatctgacctggaggaggcgaccccatctgatcaataataacaaataaaagtagtgtctgttcttcttgggatagtgtactaaaaaaactatttgcattatatctgatcttgagaagttcattcagggcagcagctagctagctaggtctgagaacattttcagcatagtgtttgctaaagcttatgactgtggtatccttttgctctaaatgagaaagtgctggttgctgtcaattttatccctggcaatctttttgttcatgattggctggccccatcaagggtgagtctacttccattcttttttgtgcctatttctgatcctgaaaggtgtagtttccaatcatgtacaccttgtggacctgataatgcgcctaatgatttacattaggaatttgcacgacagatcttctgtttcggtaactagtagagc

SEQ ID NO: 20515 - DNA, 1551 bp, Zea Mays
cgggggtcgtcctgcaacgcggagcgaggaggctgcgaaagagaccacaacgccgcgcagccggcaggccggccgtcgcgtggctcgttgatacgcccgcgaaccgcgaccccgcgtacgccatggtccggcctgcgcttatccggcgacattactcacgaggcgatggcgatgcgaggaaggacagctaggacctatccttatttaaaccctgacgccaccttgtgctgttcaaggagtgaatactgaacagtccagtcagtcgtctctacctcatacgcctgacgaatcttgattcttgagcttgattgggtgtcatctcttttagctgcaactgcagctggctgtgatcatggcatcgctgagtgctgacctcttttacgacatactcaagcgtctcgatgctgcagctctggcaagagcaggctgtgcctgcgctgattttcgtgccatatcaaatgaagaggatctgtgggaaaatgcctgcacatctctgtggccatcaatgagacgagatgacgttaggagcttaattgcctctgctggtgggttcaggaagttctatgcggattgtttcacacttatactgaacaaggacgtccctgtggttcaagccaatgaaactaacttctttgccgaagaatgggctgagtcttgactactactactacgacgacggcggcatggacgattctgaaaactcattgccttcggatttcgtgtctttgatcgatgtatggtacaaaggccatgcgctctactcgaaggtcatatggggaattcccagctcagacagtgccaatggatggttctacaactacccgttccggatcgacctgtctcaacactcggctgaaaacaacgagaacaacaacggagatgtattcctatccactgtcagtggcgtgtcaccggtaccctcaatggagcaagaaaggaaagacggcaagctatggagggagttgaacgatggtgtaaagctgagctggattgttgtcaacaagaagatgaagagggcagtgaacctgacgagctggcacccgctgagcgggcagaggcactggccgaccgatgctgacttcgttctgcggttcgggtctgtgcttccggcgaaggaggtcctgccctgccaggtggcggaatgcatcctgctgatgaagttccgcgtgacaggcatgggcggcgaggaggctggggagccttcgacgctcgcgctgacggaactgagcatgcagatccaggacatgggcggcgtccatctcaacggccgctgcagcctcctcctcctcaaggaggcgctgagctgccaccgcagcaggaactacgatgaggtgctggagtcttgcaatttgtacctcaaggcacagagtgagctgaaggaagagaagatacgcagcgagtgccggttcgacacgctgtgtgttttcagtggcattgcaatatttgctgctatctgcaccatgtggtatagaaagttttagaagatctgactccataggtagataaggctagctgcggattcaattcatactttgaaaatagcctgttcct

SEQ ID NO: 20516 - DNA, 4856 bp, Zea Mays
cgctccggcctgcccgcccccaccagtacagtaccacccgcgccccgtacggcctccccgtccgtccccgtcgtgggggtggggccggcgccggcggcaccaccacccaccgcacccgtccgggcccgcccccgtgcccggtcgctaattacgcgcacctgccatccggccgtccacgcacacggcgcacgccaccaggcccccgtccgtcgccgcgccaggacgcttacccacgcgggaggtcctcttcctcgcccgctttgcgctgctgccttctctccgctcgattccccgctgcctctctctctagtctctctacacacgccttcctcccagcgccgcaccacaccatcagggcgggcagcacattcctctctctctcccactcccacttcttcatcctccgccgattccagcactacgcaggtgggcagggaagggatattttctgctctggccctatttctggacggctggggaggcggcgaggtgacgtggactggcgccgaagacttgcgtgagagatccctgatcggttgccgcggctgagttgggaggcccggagaccttgaggagcgatgcagagggaggtggggccgcaggtggcccctccgctcttccttcaccagatccagccgatgcctccccacgccgccgccgccgcgaagaagcgcggccacccgtggcccgcggccggcgccgcggaggccggcgctgggaactggaaccccaggctgtgggactgggacagccgcgcgctcaccgccaggccgtcctccgatgcgctccgcctcgccggtggccagccccagccggctgctgaggcgcagcgccagggggccggcgcgctgaacctccagctcggcctgcaggaggactccacgaccccgatggacgccagcccgacggctcccgcggcggcggcggcggcgtccccgccagcttcggctgcggcggggcaggagccggtcgttaggccgagcaagcgggtgcggtctggatcgccggggggcgctgggggagggccgggcggcggtgggactgccaacggaggcgcgagctacccgatgtgccaggtggatgactgtcgagcggatctgaccagcgccaaggattaccaccggaggcacaaggtctgcgagacccacagcaagaccaccaaggcggtcgtcggcaaccaggctcagcgcttctgccagcagtgtagtagatttcacccactcgcggagtttgatgagggtaagaggagctgccggcggaggcttgctggccacaaccggcggagaagaaaatcccagccaacagatgttgcttcacagttgctgctacctgtaaaccaagaaaatgcagcaaatagaacacaagatattgtcaatctaattacagtgattgcgcgcttgcaaggctctaacgttggtaaagtgcctagcatccctcccataccagataaacagaatctggtggaaattataagcaaaataaattcattgaacaacgcaacctctccggcaaagtctccttcgccagaagtcgtcgttttgaatacttcacaagagcaacgagagcaaggacatgattctgtagacaagacgaccaacggaatcgacaagcaaactgtaccatcaaccatggatttgctaggagttttttcaactggcttcgcaacttcaacacctgtgacaaatacatctcagtcccaagggagcagcgacagcagtggtaataacaagagcaagagccattcaacggagccagcaactgttgtaaattcacacgatatatcaacccaagattttcctgctgctggtttcatgagaagcaacagcacacaagaaagccgacctcatatatacaagcagacagaacacgagacaagaccatacttgtcactacagctgtttggcagcagtgaggaggatattccacctaagatggactcattgaataagtacttatcttctgagagtagtaatcctctggatgagagatctccttcatcctctccgcccataactcgcaagtttttccccatacattcggttgatgaagaggttcgacaccctcatattacagattttggggaagatgctacaatgggtgaagttagcacaagtcaggcatggtgtgcaccaccacttgatctcttcaaggatttagagcgtcccctcgagaatggatctccaccaaatcctggttaccagtcctgctatgtttcaacatcttgttcagaccattcaccttcaacctcgaactccgatggacaggaccggactggtaggattatcttcaaactatttggcaaggaacctagtacaatacctgggaaccttcgtgacgatatagtaaattggctcaaacacagtcctactgaaatggagggttacatccgccccggttgccttgtactatccatgtacctatcaatgccggctattgcatgggatgagcttgaagaaaatctcctccagagagtcaactcattagttcaaagttctgatttggatttctggagaaaaggaaggtttttagttcgaaccggctccaagttggtatcttataaagcgggaatgacccgtttatcgaaatcgtggagaacatggaatactcctgaattgacctttgtgtcaccaattgctgttgttggtggacagaagatctccctcattcttaaaggccgcaatctatctattcctggcacacagatccattgtacaagtacaggaaagtacatatccaaagaagttctgtgctcagcatatccaggtaccatatatgatgattcaggtgtggagacttttgacttgccaggacaaccagattttattcttgggcgctgctttattgaggtggaaaacaggttcaggggtaacagcttccctgttattgttgcaagttcaagtgtttgccaggagttgagaagtctagaagtggagcttgaggattcacaggttcttgatgtttcttcggatggtcagattcatgactgtaggcagtcaaaaacgagggttcaagttctgcacttccttaatgaactcggctggctctttcagagggcttctgcctgtacattgtccaccagacctgatgtgtctgatttggatttgactcagttttcaatcacacggttcaaatatcttttactgttctctagcgagcgtgactggtgctctcttactaaaacacttctggatattcttgccaagagaagcttggtcagcgaggaattatcaaaggaaactatggagatgctggctgagattcaccttctgaacagagcagtaaaaagaaagagtaggagaatggtgcatttgcttgtacagtttgttgtactatgccttgataattccaaggtttaccccttcctcccaaactttcctggccctggtggtttaactccgttgcatcttgctgcatccattgagaatgcagaggatatagttgacgccttgacagatgatcctcaacagtcagctttagacgaagatggccaatctcctgaaacatatgccaagttgaggaatcataattcatataatgagcttgtagcacaaaagctggtggacatgaagaacagccaggttactataacggtcaatggcgatgaaattcatatggatcagttagggaatgttgatgaccgtaaaaaatctggggttcaggcattgcaaataagatcttgctcccagtgtgccattttggagtctggtgtgttaaggcagcctatgcggtcaaggggactgcttgctcggccttatattcattcaatgcttgctatagcagcagtctgcgtatgcgtctgtgtattcatgcgagctttgctgcggatcaattctggaaaatccttcaagtgggagaggctggattacggtacaatataattgtggggacacacctgagccttgtggtattattaagttaacaagcagttgttatggagctattttggagccttgaagggtatggagattgtttcatgcttcctcgaaactcgcccatccgtatggctgagtggaataatgtaatatttttgctggacaattcctttacttcctgtgaaatagaagtgttaataggtgagcagccggagatgttaggggggtggcaaaacttggtaccaaatgtggagcttgagcagagttggaacatgtcatggcaagggccgtagcaactgcgctcccacaacatgatatgcatgcaatgcacaaaatgtcgatatggatgcaatccgcaagatggatgtaatcacagttcggggagaatgagcaagtaagtaaccttggtttcctttttgctgctgtaagctcgactcttttggttcatgtatcccaagaatgatgtttaatttatcttgctcactgtttcatatttttgtgtgtgtgtgtgtattaaatacagtacgctagcatgaatgtaccctatatcgactttagatagtagcaggggtaaatgaaaagaggctttgcatatgtctgtgtcgaccattttgacttgtagctacatagaaatgaggcagatctgaagtgtacttggatctttcgttgttgttgttgttgttgacatccaccatatgttctcattctgatgaagcttagttacacctttgtcctatattgttctcttgatacctgccggctgctatcattatcttggttcactcgcactttccttctgacccaagttttcactgatcaaaatcctattgtatgacttgtttggaggctgaaattcatgttcgtttaagaactttgagcgcgttcggctgccctgcacggagcactgttgcagctgcaaatcactgttgcagctgcaatccctagagagaaaatactgtagaagccgcagccgcagtcggatta

SEQ ID NO: 20517 - DNA, 661 bp, Zea Mays
aacaagctcactcccggccatcaggcgcacaccgctctcccgccgccgtcctgcgtcggagcgatatccctacatccccacctcatttgcacccggattggcttcttcttctactactactgtacagaactttttatgtggctgcaaagttctgtaattctagaggagcaaaatggagattattatcattatctcacttgtcattcttttggcactaggagctctctttgcgatcccaaaatcgcaaaataaaggtaaatcaaaaggaaccgacttaggagctggaatgacatctaggagctttacgaaggaagagatctctaaacataacacaaggaaggactgttggatcgtcatcaaggacaaggtctatgatgtcactccttatgtagaggagcatccaggcggagatgccattctaaataatgctggtggtgattccacagagggcttttttgggtctgtaacttatattgcttcctatacctcataacatgctctgtcattgcctgattagttcagcacttcagtgcctttcttggaattgtctcttcagaaattagaaaatcatgctttttgatcattaaaaatttacatagtatgccttttcatattgagattattcatctccgatattttaaacaatattcgatgaagactt

SEQ ID NO: 20518 - DNA, 1152 bp, Zea Mays
ctgcgacgtcaaacgaaaggactgccctaacctcatgcagtcgtgcccgcttgtttcacttgctcgccttcacccctcgtcgccgccgccgccaccgccgtcgccgtcgcaagcgatgatgctcaacatcaacttgttccgcactgacaagggcgacaacccagaccttattcgcgagtcccagcgtagtcggttcgcctccgtcgagctcgtcgacgaggtcatcgccctcgacaaggcatggcgcgaaaggcagttcgagctggataagatccggcaggagcttaacgctaccagcaagaagatcggcaagctcaaagccagcaagcaagaagaggaagcgaagaagctcatggagagcacagacgaaattaagaaaaggttgacaggcaaagaagttgaggtgtaggaggccaagagcaccctcgacgccaaggtcacgacgattggcaacatcgtgcatgagtccgtgccagtcagcaacgacgaggcaaacaataaaattgtacgggcatttggagagaagagagtagaggataatttgaagaaccacgtggacctttgcagataaaagttacatggatattgtcatcaaaggtggtgtatgggtcggtcatttactctctggttactccttgccaatggacatgccgtcgcaagtaaatgtaaagagttctgaagaggttgctggaatgtggaagcactccatcaaagtttcttatgaagcaacaaaggcagcatttcctggtggtgaagttatcgcacatcttgatcacaagatgggagagtgtcggatgcttcttcatatactatttcttggtccgtcaaatctgcttgacccaaatgcaagttttgctcaaatgtggcaaaaataattgtctcatcgattgttagcgcgcctgcttccagcaaagtttcagagaaggaaaagatggaatgtaactcaaattttggtggccgcacaagtgtggagacttgaattcatatatacttagttaggctcaatattagtgcaaacagttgataaccaagtttttcaattagtatttagttttggctttagagtacacttatgtatgagttatttgacaatatttatttatgagatattgaatggtacttatctatattatattagttacaatgttatta

SEQ ID NO: 20519 - DNA, 1230 bp, Zea Mays
tcgctggctggttggggcgccatttcatcagatatgagtttaaagcaaaccacgaggagtgggttaacactgttaaacctaagcttggccttgatatctctactcgtgtgctacaagccgtgaattttgcacgggaaaacatcaaatctttgtacgcaataagaaatgaattgcgggttgcactcaagaatcttctaaaggatactggaattttagttctaccaaccacagctggatatcctctgaagagaaactctaaagaaagactatcatctggatttgaggatagaatgtacaaatttgtaggcgttgctgcactttctggatgttgtgaggtcactattcccatggaaaatctggatcatcatgtatctctttcatttgtagcagcacatggatcagacaagtttctactccgtaatatcttggatacatattctctcatccaggaccaagtagttttggcatccaagttggaaactgcaccagtaaccaatgttgatgttgatgtcaatgcatcagagcttctaaaagaaaagggaaatagcgctttcaaaagaagacagtggatcaaggcaattgagttttactcagaggccatcagtttgagtgacacaaatgcaacatattactgcaacagagcagcagcttatctggaactgggccgttttaagcaggccgaagcagattgtgaccgggccttactgttggatagaaagaatgttaaagcatatctacggcgtggttttgcaagggaagtaactttgaattacaaagaagcacttcaagatttcaggcatgctttggcattggagccacagaataaaacagctcttgcagcggaaaggaggctgcagaaactcctgaagtgatgtggggagcagcagcacatccgacttgtaaattattttgaagacttgcctggttgaaggcaattttgatcggcagcatgtgaaaggaagatgcgatctgctggataagagtcattaaactattttttgtttgccatcattcgaaaatttgtatctcacgacgattgtcagcaagttttgatatagcttcttgctatgaccgtctattaagggaaaatcttgtatatgcattgtatactacttcgatctgaaggccgagaacgcgagaacccatgcgagcgcttggctctgctggagtgtatgattgtgtagtgcaggatctaatttgggaggcgttgagacgccccttattctccta

SEQ ID NO: 20520 - DNA, 146 bp, Zea Mays
atcgggtcccatcaaaattaaacctatgtatggtaaatgattataacgaacattattgggtaacaaaagtggtcaagggcacaacttgcctagcacttgagattccaggtaccagtatgattctttagatcctcgtaacctcaccg

SEQ ID NO: 20521 - DNA, 4131 bp, Zea Mays
atgtcctgctgtgatatccatgggtaagttggttcgtattcccattaactaggtctataaatagattaaatagaattattggtcacaataaatattattaatttagcatgcgtatattgtgatgattgatttagatagctcgctaaatcaactaattaagttacacagtttagagagttaataaaaagcttagaataaaaatagattttctagtgtaatatgtcaatttgattaatggatatagtcgatgtcctgctgtgatatccatggtgcttaatgcttggttttaagtgtttcatgctttttagcgtagattatctatattatactcgttatacatgtgctcatacatgtgcatcatgcatctcatgaggtacgataaataatcgcgtgatgcggaagaagaaccaagccgaccccaagcgtgggctaatctgcaagctgaagctgatgaatcaacctgaagacggttaaatcaagcaagtgctcggtcgaaggatactcgtcaagcggacgtcacctaacaacactaacctagtgttactcaggctctcggtttgcgtgaacctgatctggtcttaagaaccccggtggcgggttgacatatgcaagggttaagtgctacatatgtcatgtgattggagatcctcagctgagtataatcaattcggatcgccgtaccttcgcggttatgaagacttggtcacttccctgcaacctaagtcaggatgtgaacattatgaataaaaaggatgttgtattgatgagatgatgaaattagactagatgcaaacagtgtctattaatattcaatctggcgttaaaatattgaaagtaaggactcactttagtaagctatttctacaaaagtatctaagttgattcttgctaaagcctctccttgattcctatttatccagcataaccttgagagtcttttccttagtcgggtaagacttgctgagtaattccatactcagggttttattccttgttgtttttcaggttctaactttgtgctgttgttgatggtgttaagtgccggtgggctcggccttcttataagtctaagtaacccttctatacttcttattgaggatgatcccttgagctagcatatatttcaaacttatatttttgtaatcactccgataaactaatgtaaaatttttgtaacttgtaaaatttggtagtaagatttccgctgtaacaatattggtgtgtgtgatttgtgttacttaatcacgcggttctggttttaagtggtttatccgatgtccttggggcaatcggacggatcctgttaagttatctggtgcacatgcatagccgtccgaggtctttgagacaaggacaggtgcatgtgggcccaataacttgggaggttctgccacaacctggccaagctccgactgctgccgctgcgcctctgcgcgtgccgccgctgcctctgctcccagatcgacacagagcaaccgaaggtccgccacctcggcgctctgttgggagaggcgctcggtagcccaggcaagcgtggtcctcagggaccgcagcgaaccccagacaatggcctcgcggcggatgaacgacgacttggcggcgctcagatctgtcagatcctgaggaaaggaagcggggcatcacaaagaatgccttgaacacgtgaaaggtatgcttgaactcattacctggaggatcttgggaacgtccctgcgaaggacctccaaggtcgaccgaagcgaccccaccgttgcctcggcacactcacgaagcccgtcccaagactgctcctctcgctcttcgtcaagaacgaagaggggatccgaagccccactggtccagaaccggagcgactgacgccgcccgttgggactgcgccgcgcggggacgaggctgccgctccccaggatgggtcgcggttccgcgccccctcctccgaggcatcaggtagcgacgcctcggccatctcagcatcggcggcaacgggtgactccacggccagaacagcaacgacctcggcagaagccggtgccagcaccggcaacacgtctggtgagcccgaggccacagccgcgccagcagcctcccccagcgcgacggccgcctcgacagaggagtcagcctcgggagctttccccacggcaacttgtgccacctgagccccccgctttggggcgtcttgtgagggggtcagctggccggcgaggcccgacgcggcactagctgcagaagccgacgccgtcttgaggaccttccagggagccagaccgatcgaaccgtgcctccgcttgctaaggagaaagggaaaaccaggatcaggacatacgaaggaggagccagaacgaagatatcctaagatacttacccacttcgggccatgatcaatcgtgtctgtggggaggtctctcgaacctcgatccccgagggtaccaccgaggtccgccccgctgccggcttcagcaccatccatgccttgggcgcccgaggcacccgagggacggactgcctaggcgcagccacgacgacccgaggatcaccctcctgcgcagtcagcacgggcaacggttctcggggaacaagcagctcggcctgactccccggggtcactgttgggtctatgcttcgtcgccgaaggtcttcaagggagaagcagctttcggctgaggctgtttgcatgagacggccgaaggttcctttccatgaagcttcgacagtgtaaaccgacttaaagatagaataactttttagtccatgaaggtctgagtcaatgttgtaagcttttataaggggcatacttgtaattcctcacaggctgcgtcccgtgcctataaataggtgaacagtacccccgtaccgttcacgctgacttggcatttgcttttgcgtcacacttgtattttcatctccttccaagccgaaggtacatttgtaattcgatattgtctctatttttctatgatgatataaaaaagctaaatcgatgatgttatatgattattcatgctatcttttatgtttcgtatgcttcgtctttcattaatgtatattgtgatgatgaaggttcgtccttcatgaccttcgtctgaagatcgttatatcctaagggaaataatgcttcaaaggacgaaggactttatcatttaacactctctgtgttgccttgttcttaactcatagcatttgagaacaagtccccaacattggcgcccacctccggtgaactcacttccacttttcgagctgatggcttcgttcaatgaccgagctggagctgcttcgaacccgaagctggtgctcccgatcacaggtggttcgtcctcagaaccagctaacaagaaacaaaagaaggaagcacagagaagggtacaacatgttggggtgcaaggacccttcatcaagtcaagatggtctcacattcctattaccttctcccaagaggaccttcagctcaaagattacccacacaacgatgccatggttatctcttgtgttatcaaaggatttctggttcacaatgtcttggttgatacaggtagtgcagctgacatcatatttgctaaagccttcaggcaaatgcaagagccagaagataagattcatgatgctacacatcctctttgtggcttcggagggagacagattgtagcactgggaaagatcaccatgtcagtgaccttcggattcatcaataacactagaactgagcaaattgtgtttgacattgttgacatggaatacccttataatgcaattattggtcgtggtaccctcaatgccttcgaagcaatccttcaccctgcttatctttgtatgaagataccttcggatcagggacccatcgctattcatggaagccaggaagctgccagaagggccgaaggaaactggactgattcaaaagcaatccataacatagatggagctgaagcttgcgaacaatacaaattcagaagggagaaagcagcttcagcagatcagccgaagcccatgctcttatgtgaggatgtagcagaacagaaggtgctgttgggctctcagttatccgaagcacaagagaaaaccttgctaaggttcttgttcaacaacaaagatgtttttgcatggtcagccaatgatctctgcggagttaat

SEQ ID NO: 20522 - DNA, 2650 bp, Zea Mays
atggccctaaaatttttgagtgagtcggcgatgaatctcacgatactgaagatgaattctgctcccgatgcaaaactcatggttgtcatcaactctctattgcgcaagagcagccgtctggggacaaacgcagttcctgcgcgcatgcaggccactacactagtttgtttaccccggggcccgggcgcagaaaagggtgaagaagaaacagccgtgacattatcgaggtggcatgcccacaccttccgccacatttccgtcccccatcccctccgcaccgcagctgtctcttcctctcctggtcttcgtcctgccactcctccacctcaacttgctctgctcttctcggattacggctcggggttggtcattggcggacagggcgtttcaagaaagggcggcggcgcttttcctgacgcaagttgccccggtgtcctggcttgctgcgcgcttgggggttgggctcaggaatggggggagagcaggcgctgcgtcgactggtcctgttcccatctctctgaaacttagatggatgcatctgtgaacgccaagaagaaggttagtttctgtgggaacaccggccacagccgctgcggtgaagttcatttagctgcggtgtgctccggtcgtatgcgaagcaaccccttctcacttcaggtttggtttgcatttccgttcaagtataaaggaagcagtatttggcatggcatttgaatagcgtcggaacctagaaaacagtgttccagcagtattacgtcacactggtgttatactattatagaaaaacatggtggacgtagaactgtttgttaaggagactagtgatcacagcatcagctctgaggaagaagatatccttgtcaggagctgtagcaatctcaatgtgagctttggataccattgtgattctcatcagagtttttctcctgaaaatgatcatggcaatggcatttctcctaagaacacgtttgggactaataccatgatggggtcacgaaatggctcattcacttgtttatctggtgctgctattagtgcaaatttcacactggcaaatacaaacatttgcaatggtcttattggcgaagaaattttaccagaactagattctccaaactcctttagaaaaattgtttcttctccatcaatgtcaagattggactcgttctccacctcacaaggaagtcctgtgtcaactgagagctctatatttgagatcagtaaaaacctttggaggtccagtgcaccaacaactgtatcatccaattttctgactaatacagaggtgaaaatggctgggggagctgctggagaggatagagtccaagctgtgtgctcagagaaaaatggatggctgatttgtgggatatatgatgggtttaatgggagggatgcagctgattttcttgcagtaactctatatgataacatagtatattacttgtacctgctggagaatcggataaagcaacaaaatggtctgtacaattcatcagaaagctctctcgatggtcttaaaagtgagttaacactagccatgagaaactcagagaatgaagacataaaattttctgaaacatttcgatctggcgtgctgaattgcctttctactgctgttgagcaagccgagaatgactttttatgcatggttgaacaagagatggatgatagaccagatttagtttcagtagggtcttgtgttctggttcttcttcttcatggaacagatctgtgcatcttaaatatgggggacagtagagctgtgcttgcttccatgccatatgtagaaaatggtgctttgaaggctgctcaactgacagagacccactcacttgaaaatccttcggaataccaaagacttttagctgctcatcccaatgattcttcagttgtcaggggtaacaaaataaaaggaaagctgaaggttactcgtgcttttggagttggctatctgaagcagaggaagttcaatgatgcactcatgggcattctacgagtccgcgatttgagcagccctccatatgtttacacaaatccacacacattgagtcacaaagttacagatgatgatttgttcgttgtgcttggtagtgatggcctatttgatttcttcagtaatgatgaagttgttctgttggtttatcaatttatgcacgataatccaatgggggatcctgcaaaatatcttatcgagcaacttatactcaaagcagccaaggaagcagctttaacagccgaagaattgatgaggatacctgttgggagtaggagaaagtaccacgatgatgtgactgtcgttgttatcacccttggaaatgcacagagaacgatgactgcgtcaacatccatgtgaaagaatggagagctagagagacgggctatatcagctggtaatttttgtgggtttttgcatacgtgtcctccaaattacaagcccttttttttgttgagattggcgtgtggtagtcagtaaacccgaataaaaatgtatatattgttttggaatttgggaagtgaacaaaaaccttttgttcaatcgcaaggtgggcatggattgtttggcctacttttgtacatacatgaattaaaacatggaggttcgtacttgagccaatgaatccatgagcagagcggtggatcgttccagttt

SEQ ID NO: 20523 - DNA, 506 bp, Zea Mays
ccgtcacccacccgtagcatttcagcttgatggatccaagtaggcattcaatggcagccaacaactctgcaaagccgtcgtggctgggtgccagaatctcgcggcgcatgcaacggggctcgagtgccggtgcccggcgccatcgatccagcagcgcctctatataagccccgcgcgcgcccgcaggtgcagtgtcccagtgctacactcgcatgaactagcatcggccgctgctcctctctttctcctccaatcgtcggtggtctttttcgggcctgaaacatacgggagctagcagaggagagagctagcaaaggaagagatcgatcgagagaggtagtaggcaagatgagcggcaaggctctcctagttgtcgccgtcgtcctcttggtgggcgtagcctctcggtgctcgggcagcaggggcctgcatcagcagggcgatcacgttgctgaacagaagtcttgctgctggtgagctaataatcttgtgccgtacgtacgtgc

SEQ ID NO: 20524 - DNA, 680 bp, Zea Mays
gacatacacatgtggcagaagcgctaaaagtaccaattcatatactgtttaccatgccatggacgccaactagtaaatttcctcatcccttttctcgtgtgaagcagcctgctggatatagactttcatatcaaattgtggactcgatgatttggcttggaataagggatatgataaatgagttcagaaagaaaaagttgaagctgcgtccagtaacatatctaagtggttctcagggttctggcaatgacatccctcatggatacatttggagtcctcatctagtcccgaaaccaaaagattggggtccaaagatcgatgttgttggattttgcttccttgatcttgcttccaattacgtgcctcctgaaccacttgtgaaatggcttcaagctggtgacaagcccatatatgttggttttggtagccttccagttcaagacccacaaaagatgactgaaattattgtcaaagcgctggaaattactggacagagaggtatcattaacaaaggctggggtggccttggaaccttggcagaaccaaaagattttgtatatctactagacaactgccctcatgactggctttttctgcaatgcaaagcagtggtgcatcatggtggcgctggaacaacagccgcaggtctcaaagcagcgcctatttatggcacttttgac

SEQ ID NO: 20525 - DNA, 523 bp, Zea Mays
ataacatgtagtataattgataagaaaatataatatcgattcaactaggagcctccgcgggaattatggacaattttatggtagacgtaaaaatggtattcatcgtcgtaaaaatcatcactggaatgtataaatagtataaataaaagacataaaacataatcatcgatgacataaacatggatcggatagttcgttgccgcgccgtaggacaatcacgatgccgctagatcaaaggacgtggccgaagccaccagatcgaaggacgccagagccacccacgcctcgcgtggctgccatcgctagagacgaccgcaccttgcgcgtccgccggagcgatccacgtcttccatggccaccactaggattgtcgaagtctatcgcacaaccgccatcgccactgggcctagggcgcgccgccggtcgcccgtctcggggcggcaccgctgctggcctcgggatcgccgccgctcacgtccgagggaaccgtctccatcgctcgcacgcccgagggaaccgtcac

SEQ ID NO: 20526 - DNA, 149 bp, Zea Mays
aggttctatacaaaataactaaataattacatcatatgacgacatcgatccaccgcaatcatagtggaccgggagacgacgacctaaacctctcacgaactcatcgtgacatcctttatgctcctcatcttgtggtacctgtccttgac

SEQ ID NO: 20527 - DNA, 2366 bp, Zea Mays
cttggtggtctcttgggctgggctttaacatctaaggagatatcagaccttgaaggggaactgttgtcaattagaaatctgcttaatacacaggcagctttaattcacggtctatctgaaggagttcagatagattcattaacttcaggccctgaaggttctgcagaagacgacatatccaaggttgaagatcaggagccttcagaaattcagaaatggtctgcagattttcctgacatgcttgacgttttgctagctgagcgaagagtggatgaagcactggatgcactggatgaagcagaacgggttgctgttgatgcaaaacgaaaacagactctaactgcagctgaagtttcggctttgaaaagatctatctctgataatcggcagaggctggcagatcagcttgctgaagctgcttgtcagtcttctactcgtggtattgagcttcgagctgcagcttctgccctcaaaagacttggtgatggcccccgagctcacagcctcttactgagtgcacataatcaaaggcttcaatgcaatatgcaaactatacatccatctagtacttcatatggtggggcatacactgcggcacttgcccaacaggttttttcagtcatagctcaggcactaagtgactctgtggatgtttttggtaatgagtcatgttatgcatctgaactggtaacgtgggctaccaagcaggttatgtcctttgcgctcctggtgaagaggcatgtgttgtcctcttgtgcagctgctggaggcttgagggcagctgcagaatgtgttcagatatcacttggccattgttttttgctggaagctcgtggtctgtctgtttcctctgttctcctcaaacaattcaagcccagtttagtgcaagcattagatgctaacttgaggagaattgaggagagtactgctgcactagcagcagctgataactggatactcacatatcccctaactggtattcgtccattaactagatcgtctgctgctaatttggcacttcagccaaagctctctagtagcgcacaccgtttcaattcaatggttcaggatttctttgaggacattgcaccactacttagcttgcaattgggtggttcatcaatggatgggatcacacaaattttcaattcatatgtaaacttgcttataagtgctttacctggttctatggatgatgaagctaacttagatggtttaggtaataagattgttagaatggcagagactgaagagcagcagttagctttattagctaatgcatctttactagctgaggagttgctacctagagcagctatgaagttatcgtcaataaaccagtctatggatgatttgcataaaagaggaacagataaacaaaaccgtgtgcctgagcaacgtgagtggaaaagaaaactacaacgaatggtggacaggttgagagataatttttgcaggcagcatgctcttgaacttatatttacagatgaaggtgatactcatctcagtgcagaaatgtatatcagtatggacaatactgttgaagaaccagaatgggttccgtctccaattttccaggaactgtatgtaaagttaaacaggatggcaagcattgccgcagaaatgtttgttggtagagaaagatttgctactttactgatgatgcgcctcactgagacagtcatactgtggctctcagaagaccaggccttttgggaagagattgaacaaggagcaaagcctttaggccccctaggtctgcaacagttctacctggacatgcaatttgtcatcatatttgggcaaggtcgttttctctctagacatgtacatcaagtcattttggatgtcattgatagagcaatggctgcattttctgctactggaatgaaccctgatagtgtccttccgggcgacgattggttcatggatgtctcccaagaagttgtcagcatgatcagtggaaggggtagagttgctaatggtgacagggaagtaaacagcccaacggcctcagtttcagcgcactccatttcttcgttcaaatcccatggcagctcctagtttgcaagtcggtattctttgtaggcaggtcattgtataataatcattagtatattctttcaacctattcctccactcatttgttttttcttttctttttcagaacttttgtgatagtatagtatagatggataattgtttgacctaggaaaataaatcttttttagtaattttgttttagggtgtgtttggttgaggagtggttccattccattttttggttgttcggttttcaataaaaataatagcggagtggctcttgtatctttatatgaaaatttactataaatagttggaacgct

SEQ ID NO: 20528 - DNA, 106 bp, Zea Mays
ctaaaagtcgctaaaagtttttctatatatattttcacagttccatccaaaagccgctaaaaacaggtctagaggtgctttcagttttgcactgcaagaaagtcgg

SEQ ID NO: 20529 - DNA, 292 bp, Zea Mays
ggaaaatcagaaacacaatgaaaatcactaaaaatccaaaaataatgcaccacatatgattcatgtaaagtttaatttgaataccatataatatccatcaaagctaattcatccatcatcacatcatataatgtcatctctattagaaatataatataaaaatggtacaagtctgttggttaagaacttcggcactagaataaattacgagtttaacactttttcacaagcttcatgtggaatgccatttcatttttcttctccatgttggtttcatgtgttgtttccactc

SEQ ID NO: 20530 - DNA, 1768 bp, Zea Mays
cgagtcttgaagccgtgtgccgtgaagcgaccggccagccgatctgatatctgactgacccgcgccgcctgtcgccgtctgcccccacccttcccctccaaatccaacagcgggagcaaagccaaaccaaaccagcttactgctccgctccgctttgttgccaatttccgctccaagcgtcgcggtcgtgaagtctcgttgcgatggattcgaggccccgcgagactgacgcccccggcgacccggccaacggcgccgcccctccgctggccgcggcggtgacggccgcgaccggggacgtcgagatcatcaggccccgcaacgacaagcgtgggtaccgccgcgtcgtgctccctaactcgctcgagtgcctgctcatcagcgaccccgacaccgataaggcggcggcgtcaatgaatgtttcggtggggtacttctgcgaccccgatgggctggaagggctcgcacacttcctcgagcatatgcttttctatgccagtgaaaaatatccagaagaagacagttactcaaagtacattgcagagcatggtggttcaacgaatgctttcacatcttctgaacacacaaacttctattttgatgtgaacagtgatagcctgcacgatgctttagataggtttgcccaattttttatcaagccattgatgtccccagatgctacacttagggaaataaaagctgttgactctgaaaatcagaaaaacctcttgtcagatccttggcgaatgagtcagcttcagaagcatctttgtgcagagaatcatccttatcataagtttagcactggaaattggaacacacttgaagttaaagcaaaggagaaaggattggacacaaggcttgagcttattaaattttatgattcacactactcagctaacttgatgcaactcgttgtgtatggaaaagccttgataacctgcagaaccttgttgaaaataagttttgcgatattagagatgttgggaggaagccattttcatttcctggtcatccatgtacacctgaacatctccaggtccttgtcaaagcagttcccattaaacaagggcacactttgagaatcttatttccaatcactcccaatatccgttgttacaaagaaggcccttgcaagtacattagccatctgattggtcatgaaggagaaggatctcttttttacgtacttaagaagttgggatgggctatgagtttggaagctggtgaaggggattggagtcatgatttttcattcttctgcgttgttattcagctcacagatgtaggccaggaacacatggaggatactctcggactattgttcagatatataaagttgctgcagaactctggaactcctaagtggatatttgatgagagtaatgtaagtgctcttattgatatgaaactggagaaatacaaaaacatacgcgaagaatcagctttcttctatggagagatttctgaaggaaccctcaaatttgatagaaaagaagcagaggttgctgcactgagggagctcaagaaggaagagttggtaggcttcttcaatgatcatgtcaaggtcaatgcaccacaaaagaagattcttagtatacaagtgaggtcgaggcctttatatggatcattcaggggaggcgttggtcagatgaagctatagttcaacattttctcatcattctgtaaaattctgaaaaagagtcatctttctgttcaactgcatctacactaaaaaggaaaaaaaaagaaatattcggttaatcaa

SEQ ID NO: 20531 - DNA, 3189 bp, Zea Mays
acttttgcccttcgaactaaaagcgcctgcatctcaaacccgacggcgctctcttctctatcctctgtgtcccctccaccaaaaccgacgacgacgtcgctctcctccaccggtgctcggcgctctccctccaccagcggtggtccacagacgctcggcgagctccaccggcgggcgctggcggctggtcagatccgctcggcagtcatccatctggcacatcggccgaagctcccagcgtcctcctgcaggccgagctgaaggttcagcgcgccggtggagttagacgacgaaactccgtcacgtcatacctctccgcctcccgtcttccagacgtctctaatcggggtcccagcgtctcggagaagaggagcagcacggcacggcagctgtggcgaggaaggctcctgtcccatcccaacccagttagcagccgcccaaggaggaggagatccaatcggcgtgcgggcgtccgcggtccatccatcgatccaattccaatctgcaggcatctcgagtgcaccgtcggccgcaccagcaggcagcatcccgacaccgccgttccccagcagacagcagcaggtcgccgtcgttccccagcaggcagcaacaggtcgccagcgctagtcctcgacggacgacgaccagcatcagccgccgccccagtcgaccagcatccacggcggcacgagcccacgaccagcagatcaacgcggtggcagatcaacgagcccacgactagtcagaaaatttttacagcagcatatccaccggatacccgatacccgacgggtacccggtgggcacgggtatgggtccatttttttacccgattggcttggtgcgtatggatatttgtaaagggtcgagtatgatatcgggtcgggtattatacccgaacacaacccgacccgctgccatccctaaacgcagctattctgtcaattccttaaatagagcagcactgagcatatccggcggagaatttagttcagtgccggtttccatttcacttcatatctgggcttaatcttgtgtcagcttacctacacattgcaattgttgtcacatagcttatgaatgaagcacggaaatgatcgagttatattagaactatctacaccgacgtattgtgttgaatttaagatgccatcgatgccttttaaatgtgtatagtgctttcgacagccttgtgtttgcatgccgaatttcttacaagtatcatacatgtataccgaactgtgaatttaggttatactcaaactgcacacagtagcatccttctggtacaggtacacccttccctcccggctgtgcgaagcaactccaccctaatttattttgcagaaaaagttatcggtccgcccttggttactgaaactggtcaggtgtatgtaattttgaagtaacaaaggatttggaacccagccctctgttctccaccaccgcttcgaagatgccgcaggtaatggtggtggcacggaacttcatggatatggtggctgctcttcctgcgggcaagcttgatatgctctatgactcagcctttatctgtgaggcagtactcaggtcacttcccccactggcaaagaagtatgcactgcagatgttgtatgtgctggcaccagtgaccgctgcagcaatggaagagtgggtgcttgatgaatatgctgccaagcataaggttgccattgataagcttctacagctcagggtctttgttgaagtgcgcgacagacgacgggacgtgagctacaagatgaatcagaagttccagggaaacatgcagaagtatttggttgatggtggaagtttaccaagggaacctttaccattaagtgtcactggtcgattgcccacaccagcagatctggaagcctatgctcttgatcaatgggagtgcttcttgttgcaattgatcaattcatctcaagtcgaaaaagggtcaagttttagctcctccatgatgaagacgtttcagcgtggtcttctgagttcaagggatggtgaagcttcaaagttgactgaaaatggcttccaatttcttctgatggaaacaaatgcacaactttggtacataatgagagaatacatttcatctgctgaggaacgtggagtggaccctacggagctgatatcatttctcttggaacttagctttcataaattgggagcggcttatagcttgaacactctgactgatgtccagaggattgccatcagggatcttgcagaattaggactagtcaaacagcagcagggtcgaaaggatagctggttcattcctacccaattggctactaatctttcagcaagcttgtcagattcgtcatctaacaaagagggatttgtggttgtggagacaaactttcgaatgtatgcatactctacttccaagttgcactgtgaaattctacgcctttttgcaagggtggagtatcaacttccaaacctcatcgtaggagctgttacaaaagaaagtatctatggtgcttttgaaaatgggataactgctgagcagataatttcatttcttaggcaaaatgctcaccctcgtgttgctgacaagatacccgctgtcccggagaatgtcacagatcagattaggttgtgggaaactgacctcaacagggttgagatgattccatcgcatttgtacgaagattttcctagcaaggaatggtttgaacaatgctgtgattatgcaagggataatgggtacttgctgtgggaggaccccaagagaatgagactaattgtacgaggggagttccaccccgaaatgagggagttccttcgcaggcaaagatgaggaacgaccttgtacttgacggaccatgctatgcttctttgtagtgcatagaaacactgtatcgggtaatagttctcctttaaatatcaggaaagggtctagaaaagggctcagtttttgaattattttggtgacctgtgagctgtggaagcatatgaataatgtggtgttcaatggagcaaggcccaacatccttgatctgcttctaaatgttactagtgactgtaccctatgctggtgtatggctggtggccaggtcctgttggaactcttaggtaggtagtatggtgggatggagttggtatgctcttaatttgttgttatttggattgattctatataggacggagtgattttaaaaatgaaaaaaactcaaa

SEQ ID NO: 20532 - DNA, 1267 bp, Zea Mays
ctctagtttgctattttactcttgctctactttcatcaactaacactacatcgttcgcaaaaagcatttaccaagagatatccccttgtgatcttatccatcaccaaggcaaagaggtaatgactcaaagatgacctttgatgtagtcttattctaattaggaagtcatttctcatttgtgtctctgttacttgttcgaacactagtcacaacatcgttgtactgtcattaatgagtcgaaggtattttgttgaaacactatgtttgttcgaagcccaccacacaatgttccttgatattttatcataagccttcttcaagtcaatgaaaaccatgtataggtccttgtgctcccacttgtcttattaagaaaaacagcttttatgggtgaccttccatgcatgaaaccaaattgtttcatagagatcctcattattacttttagttgatgcttgacaattctctctcatagcttcatagtatggctcgttaatttaattccttagtaattagtacaactttgaatatctccctttttttagattggtatcaatatgctctccactcgtcaggtatcttgttcgaccagaagatattattgaacaacttgcttagtcatactatagctatgtcctcgaggcatctccatgccttaattaggttaagtgaaatatgaaacatcgataaggaaaatatgaagcgctaatattatattaaattctagagccttgacatgatgtactgatctggatgatttgccttatatatttttgtttcattttgtagctggtgcaaaaatattctcggctcgaacaattaaagttaaggaagaggaggatattaggacatattacttctatgaattcagtctggacaagcaacacgtagctctgatggctaccgtgaatagtgggaagacgtacattgccggcgctaccgctccagagatgaaatggggtgatgatggcgtgaagttacgttcggctgccgtatctctatcggtttcatgatttattgtgcagaagataacaactaaaaaaatgtgatacaactctcagattcagcggtacgcatagagggttctattactgttctagtcattgaaagaaggtaaatagttgggttagtcggcaaaagcaacaaaagcactggatgagactgcaaggtttcagtcaagtctgtaaacaattttggaagtggatatgtattgttatgaagactggcatcatgattgaaatttgataattgagttcttgtctgcctataa

SEQ ID NO: 20533 - DNA, 1044 bp, Zea Mays
gattaatcttatcatataagatacatctgtaatctgtttagagattgacatatacatctagagccatgtgctttggaagcagatcatacattttgggaaaaaggttcgtatataaaagtacattcttatgatgtcaatttcatgatccgaacaatttagtgctgaaggctgtaccaggttaaaccgtgccctactctttgctaagaagggggtgacttaggaagacaaatttggcaaaggaaaggataaatatgtgaaatcatttaaatgctattgttcttgctgaagttaaaccacatgagaaaaagaagttcatatctgaactccagaaagagcacaaggtagtcgccatggttggtgacggcattaatgatgccgcagcactagcttcagctgatgttggaatcgcaatgggtggaggtgttggggcagctagtgatgtatcttcagttgtacttatgggcaacaggttatcccagcttatcgatgctttagagttgagtaaagagaccatgaagacggtgaagcaaaatctttggtgggctttcctgtataacattgttggactacccattgctgctggagcattgcttccagctacggggacgatactgacaccatcaatagctggagctctgatgggttttagttcggtcggtgtgatggccaactcgttgcttttgagggtgaggctgagctcaaggcggaagcgagaaccactgaaagccatctctgatgaggttgagaaaaattactcatcgaaatggagtacctgagtagttcggatcttagaccatgttcacgttcactcattcatatgatttggacacacgcatcaaaggcagttgtcagttgaacaaatgaaacagatgtagtatgcaattgctgaggtcagtcagttcctgtggtttggtagatcttcatggtgtgctataatataataccccctctattccaatttataaattttttgacttttttttaccaagtttgattagcttgtcttatttattttttttcgaaaaaatagaaatttcacttaaa

SEQ ID NO: 20534 - DNA, 4756 bp, Zea Mays
ccgaaagatcaaacgccccacctaaaacaccattaaagaaacgcgcacagacacaaaaaaaaaactctctccgttcctcttcacaccaaagcacgggaggcgaagaagaggacaaggggcggaaggctgcaaaccctagcgctgggtcgaagcaacgtcgtgcgccagccacaggcgccagacccgcgcgcacctgcattcgcgattcctttaccttcacgccgcggcaactccgcattgtgttgtgccgtgctttgtgccaggacggggatccatggcgttgtcggcgcgacgaggctcgtggtggtagggccgcgcgggtgccggatccgggagacgcggcatggcgctcttccgcaagttcttctaccgcaagccgcccgatgggctccttgagatcaccgaacgcgtctatgtgttcgattcttgcttcacaactgatgtcttcgatgatgataaataccgggattatattggtgacattgttgcacaacttcagagccacttcgctgatgcttcatttatggtcttcaactttcgggatggagacagtcaaagtttactggcgaatatattatcaagttatgatatggtagttatggactaccccagacaatacgagggatgccctctccttacaatagaaatgattcatcattacttgaggtcaggggagagttggctctctctgggccagcaaaatgtcctaataatgcattgtgagcgtggtggctgggctgtacttgcattcatgttagcaggactgctgttgtatagaaagcagttcattggtgagcagaggacactggaaatgatttacaggcaagctcctcatgaactggttcagttgtggtcaccattgaatcctatgccttctcagataagatacttacattacatatctcggaggaacgtgagttcagagtggccacctcaggaccgggcccttactttagactgtgttatactaagaaacattccaggcttcaatgaagagggaggatgtagaccaatattccgtatttatggacaggatcctttacctgctacaaataacacacctaaggtgctgtttgcaacaccaaaaaggagcaaatatgttaggctttacaagaaggcagactgtgaactgattaagattgacatccattgccatattcaaggtgatgttgtccttgaatgcattagcattgatgttgatcaagaacgagaagagatgatgttccgagtcatgttcaatacagcctttatcagatctaacattctgatgttaaaccgtgatgaaatcgatatattgtgggatgccaaagatcgattcccgaaggaattcagagctgaggttcttctttcagaaatggacactgccaatcagttaggtcccatggaggtggcaggtataggagagaaggggggtttaccagttgaagcatttgcaaaggttcaagagatgttcagcaatgtggactggctagatccaactggggatgctgcagtccagcttttccagcgacttacttcatcagaaaatattcagctgaggcaaggattcttgtccccaagtaagaaagaagcagaatcgttagagcttggttcaatctctccaatagacaagcattttgacaatgttcaacaagaaccaagcaaagttgaacaccccacagtctatgtgaacaaactggaaaatgttggccaagagagattggtcttgttggagcaaaccactaattctgaagttaaaactggaatttctgttgtccaagaaaatcctggctctctagttcacaaggttgacagtaacgcaaaacagtcaatttcactggaaaaggctgttccctctaccatgaaatctattgatccagttcttaaggatcaaaatgctaaacttgatgagcaacatggttcaggccaacactcttttcccactataattatgtcacagcgatttccaatttctagttcatgccctgctctttctggctactccagtcctagattactttcagcttgtccaagatttaatagtgcaccttcagcccttggaattacagctctgttggaagaccatgctggaagtgctgagaatcgttgtggttcaactactttgacctttgacacaacaggtactcctgttgtaacaaagggtatgccactgctacgccctccaccatcgccactagatttgctggtatcagattctactatgatgtcagaagcaaaaggctcatcccaacctaccctcaacaattcaggccttccatctcatccagagagacaattgacatttcagtcacttggaactactactccggccacaaatcatcagaaatcctcaactactgtcacaattgaattgttgccaacttctgctccacccccacccccactgcccccaccatcatcagttttcagttctaggatttatcatctgcctccatctccaacttctttcagatctccagcgccagctgcaccacaacctccacctgtgccacccccacctccacctatgcctaggccttttcctgtaaggtctcatgcaccacaaccgctgaccccccaaccacctgctttgagttcatctcttatactgtcagggacacctcaatccccaccttccccaccgccttctaggtgctctctcagtaaacctcctgcaccaccaccaccaccaccaccacctccactacttgcttctacttcatctaccattagacctgctgcatcacatctgcctctatttgcatctacttcatctcctgttaggcctgctgcaccccctccaccgcctgccccaacatcatcacctattagagcttcagcattgcctccacctccaccacctggaacgagctccagtccacgtccaccccctccaccatgctattcatcaaaacaatcatccagccccatgggcaaatcgatgccatcacctcctgttccgccaccaccctcccatggaggacgcaatggagcttctggtaacattgtacccccgccagcaccccctggcagtaatgctaaactgtttggtcctcaggggcgtggacctgcacctccttcaggtccaatgtcaaagagctttcaatctggccaggctgtgttgagaaggtctaatttgaagccacttcattgggtgaaagtaacaagagcaatgcatggtagtctgtgggcggagtcacagaagcctgacgaaactttaaaagctcctgtgtttgatatgtcagaattagaaaatcttttctcagctgcactgccaagttcagattcaaggcgttcagataagtcaggcagtcgtgcatctgggtcgaaaccagagaaaattcatcttattgatcttcgccgggctaacaattgtggaatcatgcttaccaaagtcaaaatgccactgcctgacctaatgagtgcaattctggctctggatgatactgttctggatgctgaccaggtggagaaccttattaagttcactccaactaaagatgaaattgaacttctaaagggttacaaaggagacaagcaagttcttggagaatgtgagcagttctttatggagcttatgaaattaccacgtgtagaatctaagctgagagttttctcatttaagattcaattccgttcccaggtttctgaccttaagcggaacctgaacattgttaattcttcagcagaagagatacgaggttcagtcaagttgaaaaggattatgcagacaattctttctctcggaaatgcattgaaccaaggcactgctagaggttctgctgttggtttcaggttggatagcttgcttaaacttagtgacacccgtgctcgtaacaataagatgactttaatgcactatttatctaaggtgctttctgagaaacttccagaacttctagatttcccgaaagacttgtctagcttagagctggcagcaaagatacaattgaagtctttagcagaggaaatgcaggctgtcaacaaaggactcgagaaagttgagcaagagcttactacatctgaaaatgatggtcctgtgtcagagatcttccgcaagacactgaaggatttcctcattggtgcagaagctgaagttaggtctttgacttcactttattctaatgtgggccgaaatgcagatgcgttagcgctttattttggagaagatccagcacgatgtccatttgagcaagtagttacaacactccaaaattttgtgagattgttcacgcgttcccatgaagagaactgtaagcaactggatcttgaaaagaagaaagctctgaaggaagcagaagacaatagtaaacaactggaccttgaaaagaagaaaacccagaaggaagcagaaacagagaaaataaagaagaaatctgacagtgagaaagcttgtaagaaagaactggaaaatgataaatcttctaagaaggattcagcaaatgagaaaggcaagcttaacaatcccatcaaagagctagatatatcacttcaatcacctgcacaaactgccagtgccaaatgacgaccgtaccagatgaactaacagtagcttttccgaaagaggaaaactagttttggctgctcccaacagtgcttccttttgacgaatcatgcaggataaggaagccgaaaactgcacttttaatacgttctcaggggattgtcgaagaaattaacctggcgacaagctgtacagatctgacataataatagccttttcttttggggttgacccctgcttggatggtttattcgtgtaaaactccaattgtgc

SEQ ID NO: 20535 - DNA, 2050 bp, Zea Mays
gaaaagttcaaatcagggacacaacagtgtaacaagagagtagttatttttggagtggtccagatgtaacagcagaggaaacctggggtgtaaactacaggtcgttgaatgatctgtttgaaatttctcaaacaagagcagattccattacatatgatgttaaagttcagatgattgaaatatacaatgagcaagtgagggatttattaatgactgatggtgcaaacaaaagattagagatacgcaataattctcatgtaaatggactcaacatcccagatgccaatattgtgccagtcaagtgcgcacaagatgttttggatctgatgaaagttggccagagaaaccgagcagttggatcaactgctcttaatgaacgaagtagccgctcacacagtgtgttgacagttcatgtacaaggaaaggaggtaatttcaggctcaactctaagagggtgtcttcatctagtggatctcgcgggaagtgagagggtagacaaatctgaagcgactggagaaagactaactgaagccaagcacataaacaaatctctgtcagcacttggtgatgttatatctgcacttgcccaaaagagttcccatgttccatatagaaatagcaagttaacacaagtgctgcaggatgccttaggtggtcaagcaaaaacattgatgtttgtgcatgtgaaccctgaaacagactcttttagtgaaacaatgagcactctcaaattcgctgagcgtgtagctacaatagaacttggtgccgcccgtgcaaacaaggaagcaggccaggtcaaagacctaaaggaagagatcgccaagcttaaattggcattagatgaaaaggaaaatgaagtggcacagtttaaagatcttgctaaccgtgtgacttctgagatgagaaatgcaagaacaagatcacctttaaccgccagcatgtccttgaaacctgaagtcagtcaagaatccagtgtagacacctgtacaagtgagataagaagttcatcatctggcaagcaaagaaggttccgttcaccgttgtcagtgagagagctagacgataagtcacctgtcatcagcagggaactgtacctgagtgcgcgaaagtacaagactccctctcctccggttagaagctcactctctgtcgagagaggcagctttgccaaaatcgtggagaacactggaagcatcgactgcacaccgatatccaaggtcgaagtgcctccaaaagtgtggtccagcaactcgaagaccacaccttcatctgtcctgacagctcagagcctacggaaattccgggactccgaggagaacagaaccaaaattccgcccgctgtccggcagagcatggcgaagaacaggtctgagagtacgccaaagactcacaatgaagagaaaccggcgaacaggcaccactcgggtaccaaagcgaggtcagaggccaggaacacgagggactcgtccgaaatcgagaacgagtttgcgggcgatgaacctactttccacttcaaccgaactgcgaagaagttaccgacaaaggtgatgtcaagacagtcccagaacatagatgtcagtgtcagggcctctgtccggggggagatggagcctctgaccgaaggaaggcaacgccggaactggagcaagccgccgcacgccgagaggaccaatatgccgttgccggacatccggcgcagtgtctccctgccgcgcgggaagaaccctcttgtgtgaatctagctcgtttcgccaaccaggcattctttcattggttgtttgtttctttatcctgcggttcgatccgaatgtaggctctacggctgtgtagaacacttcatccggatgcataacacaaagtctgtcgagttgcttccaccaggctcccatgaaaacgcaaagttcacgctcttatacgcgatgtaaaaatgtatgggttaatgttgcactgcaggctgcagcatctcgttccagtggtgattccgtaccaattttgttcttatattattatatagaccaacaaatatattattaatacatcacaaaatata

SEQ ID NO: 20536 - DNA, 2338 bp, Zea Mays
gacgaaaggactcgctgatctgcccatcatccatccaatccatatggagaagcttaggagcctctgtgcctgctgcatgggccctccgcggccggcctcgccggcctgtgccaccgccggcgtcacggtcaaggtcagcgacagatacgtcgagatcaaaaacggcatctttgacctgacgctgtccaacccggacgggatcgtcaccggcgtgcgctacaacggcgtggacaatctcatggagattctcaacaaggaagacaaccgagggtactgggaccttgtttggaacccaccaggacagaaaactggcatctttgatgtgatcaaaggcaccgaattccgcatcgtttaccaagatgagaaccaggctgaggtatccttcaccagaaattgggatccttcccttgaaggaaaagctgtccccttgaacatcgataagaggttcatcgttctccgtggctcatccgggttctacacctatggtatctatgagcataaggaaggatggcctgatttcggcttgggagagacgagggtggctttcaagctgcggaaagacatgtttcattacatggcattggctgacgacaggcagagaattatgccaatgcccgatgaccggttgcctcctcgaggacagccattagcataccctgaggctgtgctccttgtggacccaatcaaccctgaacttagaggggaggttgacgacaagtaccagtactcttgcgaagaccagtacaacaatgtccatggttggatgtcattcgatcctccaattggcttctggcagatcactccaagtgatgagttcaggacaggaggacctctgaagcaaaacttgacttctcatgttggccctactatgctggctatgtttcttagtgcacattatgcaggagatgacctctcaccaaagttcacgaatggagagtactggaaaaaggtccatggaccggtattcatgtatcttaattccagttgggatgcaagtgacccaactatgctatgggaagatgcaaaagttcagatgatgattgagaaaggaaactggccgtactgttttgcactttcagaggattttcagaagacagagcaaaggggttgtgtctctggtagattactagtccgagacaggtatatagatgatcaagacctttatgcctcaggagcctatgtaggcttggccctaccaggagaagctggatcctggcaaagagagtgcaagggataccagttctggtgtagagcagatgtagacgggagcttctacataaggaacattgtaactgggaactacaacctgtatgcttgggttccagggtttctaggggactacaagctagatgccacagtgaccatagcttcaggggatgatatttatctgggtgacctcgtgtatgagccgccaagagacgggccgacgatgtgggagattggagtacctgatcgatctgctgctgagttttatgttccggatcctaaccccaactacgtcaatagattgtacgtcaaccaccctgcagatagatttagacagtatgggctctgggaacgatacgcggaactataccctgacagtgacctggtatacacagttggccaaagtgactatagcacggattggttctatgctcaagttaacaggaaaattgatgacaacacttaccagccaacaacatggcaaatcaagttcgaccttgacagtgtcagcccaagcagcacctacaagttcagggtggctctggcgtcttctgcgctcgctgagttgcagatttccttcaacgaccaggacagggctgttcctcacttcgccaccgggctgatcggcagggacaacgccatagcaaggcacgggatccatgggctctactggctgtttaacatcgatgtggccagtgcttggcttgtgcaaggggtgaacaccatctacctgaagcagcccaggagccagagcccgtttcaggggttgatgtacgactacttgcgtttggagggaccgtgcggctgctaatcgatttgtgtgtgaaattgcgttgctagatgtgaaattacaactgcattcactgtgtaaacccaatgcatacgattggggaaaagatgttgcggtattataggcattggggttacgtgtaggtaatgttagtttaattttcgcatttataaccgtgcagctatgctgatttgtaactataatgatgtaagtgtgtacgcaataatgggtgtttttagtcaggtaactaattacggacaacttcaacacaaggtcaaaaacggaggttgtttgaagggtattgtagaccactttatctataaagcaaaggtgatactcggg

SEQ ID NO: 20537 - DNA, 2256 bp, Zea Mays
tgatactcatccatgaataaaacacccaaaggaagctatgtactcgttatcacttctcagaaagatgctggctcttatctgggctcccctgtgtaccaagtgaactcaatgaaattcttatgctgcaacgaggctatcaagcacttgactccacaggaaagaagggatgaggcatacttcatgtctctcctgagaattgcagaaactacttgtggattgtattattcatatgacagggatttgacactaaacttgcagagggcatccaagttggctgctgggagggtacataaaccactatggaagcaggctgatccacgttttgtttggaacaaaaatttgttagaggaacttattgaagctaagcttgatgagttcatcatcccactgatacaaggaaatatccaaaaaatgatagttccatgtcactgtttatgtatatatttggtttgcatgcataatgtggggcctataccttgccatcatccaaccatattagaaggatatatttcaaaaagttgcaatgcattcccattgttttctatacttggaggacgaacatgatcaggaagctggtgtcctttaactcctatagacccatacgttttcagtcagcacaatttaccttgaaggatagaccagtgaggataacattgttctcaaggagatgcaacaggcgtttaggaacaagaatgtggagaaggggtgcgaatcttgaaggcgccacagcaaattttgtagaaacagaacagttggttgagtatgaagatctcacatcctcatttatacagcttcgaggttcaattccacttctctgggagcaaatagtggatttaagctacaaaccacggcttagcattattgaacatgaagaaactcataaggttgttcaacgccactttcatgatctttcacaacgatatggcaagataattgttgctgacttgactgataaacgaggtgatgaaggagatttgagcaatgcatttgctgctgaaatggacagaattcctggtgtcaggtatatacattttgatttccatcatgtttgtcgtggaggtaactttgacaatttgcaagctctctacaatcaaattgaggaagctattcataagcaaggatattttcttatgaacactaaaggagagattttgctggagcaaagtggtgtagttaggtccaattgcattgattgcctggaccgtacaaatgtgacacagagtttccttgcaagaaaatcattggattctcaattgcagctgatgggagcattattgtcatctgaaagcatttctctctctgataacattcatgatacattcaaaaaattatgggttgagcacggtgatgagctgagcctggagtatgctggctcttatgctttgaaaggggatctagtgagatatggaaggcagacattgcctggactaattaaagatggaatgagtgctctttcaagatattatttgaataattttcatgacggagtgcggcaagatgctcttgaccttattagcggttattatacagtcagccaaggcagctcttctccttttcataatggtgttgattcttcttcgtatctgccggtggcttcagcaatcatagttggtgggattaccgcgacaactttcactctcagtcaagttggacggaacgcgcagcacttgatctcctccattatctgtgcgggcttaacagtcggagtagtagccttggtgaaagccaatgggaaacagttttgctctaggccccgtctgtgtggtctaatctaatccttggtcttttccccccttccctttcatattgccctttgttagaaattgaatgtaaaaggattagaatgttgttttattcgttgcaagagtaaggttaaataaggaggcaggatggcctgccggtcccgtaatctgaagctgctaatttgtaagcctatagtttggatttgcacattctatttgttatactttttatgtatccatgaatagaaaattacgcctcgaaattccaaatttgtaataaatccgagagaccacatatttttttagtgtgactggttggtagcgacggtcttggcgtcttgcatagttgctgacacagaaaagacacctccgtccctctgtctggtacagtgagggtggggcatcaaaaacacaaagatgctgttcttatcaggcacagatgtttgccaagtataattccacgttgcgctatacagtcgggtttgctcgtatgcatttatgatctagatactta

SEQ ID NO: 20538 - DNA, 1256 bp, Zea Mays
ctcatccctcccaagtcccaactccgctgctacgccttcttctacatcgcaatcacgcgcccgtccggctctcccccttctccctcgccctcacgcgctcacgccctcacctcagtcctcatcgctctcggccgcctgcttaaaccctccgctcgaaccggaacccaaccaagaacagatccaaaacgcaagccgcaccatgtctcgtgtcgcgggctcgcgcctcctccctaggatctctgcgctctccttctgcaccgcctccccggcaaccgccgccgcttcctcctcctcatccacagcggcggtggcagcggcagccgccaccgcctccgaggcttcctccaccgccggagacccatcctcccagccgccccagactgcccgcaagccgtggggcgcgctcaagttcgccgccttcgccgccgtgtccaccgcggttggcggcacgggctacgtcagctacgcttattctctagaggaagtggatcagatgacgcgggagctccggaagaagtcgaagcagcccattcctgaggatgcttctggctttgagaggtttcaggctatggcttattcagcagctatgaaagttcctgttgccgctattgaggtatacatggatgtgaggagccaaattgaagatcaaattcggggatttagcgaaccagtatcagacaaacttcttccagatcttgctcctcaagagcagcatgtattgactctagttctggatctgaacgagactcttgtatactcagattggaagcgtgagagaggatggaggacctttaagaggccaggagtggatgcttttcttgaacatctcgggaggttttatgaaattgttgtgtattctgatcagcttagtatgtatgttgatcctgttgttgataggctggatccaaagggcaatattcgacataggctatcaagagttgcaactaagtatgaaaatggaaaacattatcgggatttgtcgaagctgaacagaaatcctgctcaagttctttatatcagcgctcatgctaaagagtcaagtctgcagcctgaaaattctgtggaaattaaaccttggaagcttgaaaatgatgacactcaactgcttgatcttattccatttctagaatatgttgctatggcaagaccttctgacatcagggctgttcttgcatcctatcaaagtggtgatattgctgccgagtttattgagcgctctaaggagcaccagagttggtgatttggcatgccttggg

SEQ ID NO: 20539 - DNA, 3192 bp, Zea Mays
caaccgccaccggtcttcatgcccgagatcgaaatcgaacccaaacggccaaaccaaccatcgtctactcggcggctgggctagcaccctccctaccaccatggcggccgtcgtgcctccgcccgacaacctggacccgcagccggctactcccccagccgccgctccttccgccacgctcaccccgcctcccgccgccacctccaccccaccaacccccttgacgccgggccccgcggcgcctagcccaaaccctaacctaccccctgcccctgcccctgcccctgcccccgcccccgcttccacgcctccggcggcagtcgcgccaccgatgcccccagctccgatctccttcgctgctaccttccgtccactcggtgccccagcgccaccgccgccgtaccaggtcccgcagtacgtcgcggtgccggcgaacccgggctacccgatgcagccgccgggcgtccccgtcgttatgcctccgggcgccgtgcggctgccggccatgtacgggccgccccagccgggagtatacatgccgcagcagggcgctgcgatcccccatcccggaatgtctcgttatcctgcaccgtatcctatgattcgtcctggttttgttccacgtccaatgccgccgcctggtgttgtgccaattcaacgaccaacaataatttctgggatccgggctattcctcctttggtagccccaactgcccggccacctgctccagctgttaagctggcagataaaccgccaaccgcagtttatgttgggaagatcgccccaacagtggacagtgatttccttctttcacttcttcggctttgtggatctgtcaagagttggaagcgtgcccaagatcctagtaatggaaaacctaaaggttttgggttttgtgaatttgaatctgctgaaggcatccttcgtgcgacacggcttctcaacaaattgagcattgatggtcaggaactggtgattaatataaatgatgccaccaaggaatacctgaagaaacatgttgagggaaagaagagagcacaagagaaggaaaaagaaacagaagatgcaagcggggatggaactacagctgttgctgaaaatgaatcatcaaaacctgtccctgatgaattggatgagacaggagatgctggagataagtacagggaagacaacactgataaatttgggattgttactgacgaagactctcaaactgacaaagatgtcgcagaaaaaataagcaatatgattgaggagtggttaaagactagaccgccacccccaccttcaccagttcaaccatctgctgatagctctggcgtagataaggcaaaaaatgattctgatgataagaatgctgctgatgctgataaaagggcagctaatgaaactgagagatctgaaactgcctctcctgataagaggaaggatagagagcatgataaggacaaacgggacaaagatcttgaaaggcatgaccgtgaacgtgaaagagtacggagggatagagagaaggatcataagcatagagaagctgataggctctacagggatcgccttaaggagtgggaatctagggaaagagagagagaatatcagaggtatagtgaaaaggagaaagaaagagatagagatcataaccgcagaagggagatcctgaagcaggaagatgagagcgatgacgaggataataggaaaaggaaacgaaggagtattagctcacttgaagataggaagaggaggaggcaacgtgaaaaggaggaagatttggcagataaaataagggaggaggaggaaattgcagaagcaaggaggctggctgtagagttgcaacggcaagcagatgaagcagctgcggcggcggctgcagccgccgaagagtctgcatcacttatggagattgatggtgatgacgaaaaggaaacagatgcacaaaacaagtcggctgttgtggaagctgataacatctcgagctttgctaatggtgttggtgctggtcgacttagtaagggaaataatggtgaggaaacatgtatgacacctggtcaaaccgcagatactaagcaaaacaacaatgttccagcaaagaaactgggttttggtttgattggcttgggcaaaaggacatctgttccatcagtttttgctgtagaggatgacgaaaataatgttgataaaagcataagacctctagtacctatcgattactccactgaagaattacaagctgtacatgctaattcttctactggggcaaatgtcacagcagctgccgagtttgccaagcgcatctcagtttctaattcaaaggaagagaaggctgaagctgagaaggataggaataggagatccagtgaagctcgtcctaatgatgagcgaagagagaagctacatgatcgcgagaaggataagcccaagtcagagaacaagaagattctggatgcaaagcaactaattgatatgatcccaaggacaaaggaagagctttttgcctatgatataaactgggcgatatatgacaagcatgagttgcaagagagaatgaggccttggatttcaaaaaagataattgaatttcttggcgaggaggaatcaactttggtggactatattgtttcctgcaccaaagaccatgttcaggctgaaaagatgctagatcttctacagtcgattttcgatgttgaggccgagatgtttgtcctcaagatgtggaggatgcttatatttgagatcaagaaagtcgaatctggactatcaggaagagcaaagtcatgaagcgaagcctgttaccctgtatgacctctgatctgcattactcatcaactgtgaccacacttgtaaggtcatactgcactacaagtatcaaaaaccatttttagtgacagagttgatggatctttttacttgtttcttgtacaaatgcatacgagagttaatgagatactgtgcgtaatatttttattttgatagattgcataactgtgtttggcacagttcacacgagtcaactgcctacttttgcttaacttgttctctggtgaacgaagaatgtcaatgctggcagtagccacaagtgatccctaatcatacatggtgtgtgtgcaaagatgttcgtataatcgtatttcacttttgcttctgtactgtagcagtaccgttgagcttttcgtggttgctgctgtgcgataaat

SEQ ID NO: 20540 - DNA, 2310 bp, Zea Mays
tagcccgtggggtttaccttccccttccttcgcggaccccaacttgccggaagcccgcaaccactagcttgatcgatccaaaaccctcatcgatctcgtcgcatacggccatggaagcgcagaccgactccgcccccggcggcggcgacgatcttgcgatcatgcgcgagcagtgccggacactggaggagtccatttccacccgccgtgaggcgcagctcgacctcatcggctccctgcagcacctcgtccccgacctggttccatccctcgaacaatcgctccgcctcatcgccgccttcaacggccgccccttcgtccccacgctgtaccccaacgccagcgtccacgtgcagaaccccaaccttaagccccagcaccgccgcgccctccccggcccggcccgctccacacgcctcaagacctcgccggggtcctccccagcttccgccgccgcccggtgtgcgggaaccagtggtggcatccacgccgttcgtaccatggttgccgtctgtctcctcgagctcgtcccctttgccgagatcgatgccgccgcgctcgcgcgccgcctgcagtccgaaacgtcgtctgccagcgaggccgagcgcgctgctctggccgacctcgccgcggagcttgggggctccgcccccgctgctgttgctcttgccctccgtcgcatcgcagaagacagcggcggcttgcagatcgaggaggccttcattgggggcaagcagatgactatggtctgggccatcgaccggagcaaactcctcaaagagctaccagaatccgcttctgtgctccaaatccaacctccaccaactccacaggtggttcccctcgatactgatactaacatcataccaaggcctccgccactgcagcagtcggatatgtggggtaacccaatgccaccgatgttcccacgtcccaggggcatgacaatgccaagaattccgccaggtttgatgccgctgcagcgaccattcatggcaccaggggcagttatcccaatgggtggtggtccggtgccgagttccacacagctgaagctgaggacagaggaagatgatcttaaggaccttgaactgctgctaaacaagaagacgtatagagagaagcagaatacaaagactggagaggagctgctggatctcattcaccggcctacagctaaggagactgcagtcgctgcaaagtttaaaacaaagggtggctcccagctgaaggaatattgtaccaacttaactaaagaagattgccgacgccaaacaggttcttttgtggcctgtgataaggtccactttcggcgtattatagctccacatactgatacaaatctaggagattgttctttcctagacacatgccgtcacacaaagacttgcaagtatgtccactacgagcttgatcaaacgccagatgtacctcaaatgatggcaggtgccattgcaccacctaggcaaataaagccccagagagctgaatattgttcagaaatagagcttggagaatcgcaatggataaactgtgacattcggaacttcaggatggacatcttaggacaatttggagtaattatggctgaccccccttgggatattcatatggagctaccatatggcacaatggctgatgatgaaatgaggacgcttaatgttccaactctgcaaactgatggtttgatttttttatgggtcactggtcgtgccatggagcttgggcgagaatgtctggagctctggggttacaagcgtgttgaagaaattatttgggtgaagaccaatcaacttcaacgtatcattcgaactggtcgcactggccattggttgaatcacagcaaagaacattgtcttgttggaataaaaggaaaccctttagtgaacaggaacatagataccgatgttattgttgctgaagtccgtgaaacaagcagaaaacctgatgagatgtacgcaatgctagaacgaattagcccaaggacaaggaagttggaactgtttgcaaggatgcataatacacaagctggatggctttcactgggtaaccaattaaatggagtaaggcttgttgatcaagggttgagagcaaggtacaaagctgcttaccctgatgttgaggtccagccaccatcacctcccaggacaagcacgccaatggatgttgaccaaagtagttcacagaaggttgctgcgctagatggtggcgagaggcccgcctgatgctagcaaacttacttgcgagttatcgtgtcaggacccactactgatcatatagaacatgatggatgggcaccatcagctcgct

SEQ ID NO: 20541 - DNA, 341 bp, Zea Mays
cacatggtaggcccctatcctaccatcgaaagttgatagggcagaaatttgaatgatgcgttgccggcacgaaggccgtgcgatccgtcaagttatcatgaatcatcggatcggcggaaaaaacccgcgtcagccttttatctaataaatgcgcccctcccggaagtcggggtttgttgcacgtattagctctagaattactacggttatccgagtattgagtcccttcaaacaaactataactgatttaatgagccattcgcagtttcacagttcgaattagttcatacttgcacatgcatggcttaatctttgagacaagcatatgactactggcagga

SEQ ID NO: 20542 - DNA, 1639 bp, Zea Mays
atgttcagcagtaataaggcacagatccttgaatatttatgggggcatccatttgcaactctggacggtggcggcgagctgctcctggcccatttgcgcctgaatcaaacggtggagggagttagatgtaaaactttccacgccagccaaggatggtgggaggagttctctgcaaaattgccggctgtcgttggatggaagatagatggccgagatttaatatgcgcatatgagtacggtaccggtttgagcacacgatacgttgccttctcgaaacgccccgctcgacgactagggttttctggtaaaagaagcgaacacgatcctctccgctgtcgacatcggcagccgcattccaagccccgtcgcgggcatcaacagtgcctctcttctgcgtctgcggtggcaaacgacacggggcgagcagggtgcgcgaacctgaggttcgtaggcgtcgccttccgcccctcactgaagtcgtcgtcagcagctccctccagtctctgccacgattggactccatgtcggcggcgctcgcggtgacggacgaggtggccctgccgatccgggcggtgggggatctggcggccgccgccgaggtctcgcgggaggaggtcgccgtcatcacccagtgcgcggcgctcggtgggaagttgccttttgaagatgcatcagttggtgcggttcttgcagtcattaaaaacgtggaaagcttgagggagcaattggttgctgaaatcagtcgggtgctgaaagctggtggaagagtattggtgcagagccctgcaccctcatccagtcagaagccgaacactgaaattgagcgcaagttactgatgggtggatttgctgaagtgcaatcttctgctgcaaactcgcaagatagcgtgcaatctgttacagttaaggcaaagaaggctagctggagcatgggctcttcttttccccttaagaaaacaacaaaagcccttcccaagattcaaattgacgacgactctgatctgattgatgaagacagtctcttgactgaggaggacctgaagaaaccacaacttccagttgttggggactgtgaggtgggggcagcaaagaaagcatgcaagaactgtacttgtggcagggctgaggccgaagagaaggttgggaagctggagctcactgcggagcagatcaataaccctcagtcagcttgtggcagttgtgggttgggtgatgccttccgctgtggaacctgtccctacagaggtcttccaccattcaagcctggcgagaaggtttccttgtctggcaacttccttgctgctgacatatgatggcgatgcaagtgaacatcggcaaaacaaggagacgggggttacctacgttgttagtcgagtgaactgcattccaaatagcttctgttagccaatgcgaatgtgcgtgtgagtgacttgtctttcggatgatatatatataagctggccaatcgcgcctctacacaaacacaagtgtgcatcagtgcatgtgttttcagattgattttgtgagcctggatgtgaagaatgaatatcgctcaaccacattgtaaagctttacatacagactgcagagctagtcgccgctgaatttctaagcttaagaatcaattctaaaaacaaaa

SEQ ID NO: 20543 - DNA, 2824 bp, Zea Mays
agttagcagtacctgttgtgagtactcattgcgtcccatttgaagcaccgttggttatatctattgtgtttgcctctatcaaatggagggaagaggaagacaaagacacgtattagtggttaaatgtatcaagatgttgacttaatggatcttttcattactgactataattgtatatcaaggattcaatagttactagcggtggtatatcatgtaaatgttatgtattgtccttaatgctgaaaaaaggacagacctagtgctggcggttcccacatgaggggtctgtggaaggaataatcgaggtactgggaataatatgcttcaatatccaaactctcaagcacagccatttccaaccacggcagctgttcaaggtggattctcacagggttgccttagtatgcctgttcccttgacagaacagcctctttttgggcatgaaagacagccaattgatccaagtgaccaacctttggaatttaacagtaggaaagctcctgatttggcagtacatataaatgtcaattccaatatcccagctcctcaaacactagcacctaatcatgatgtagctgcaacctctacacattcatggacgccatctgctacagtagggtacctgcctcgagctcctgtgccaccacaaacagcacagatggatccttctgtgcatgctgcaccactttttggagcagcatctagttctagttatgtttcacctgcagcatttggtgttggtaatgtaacagaagtgttccctacagatccaaacactccttttagtgttgcagataaatcaaagaaacctccagtacctaactggcttcgggaagaacttttaaagaaaaaatcggaaccactgagtgcttcagcgcaaaactcagaaaacttaaatcccatggaagctaatgaggcagtacagacaataggaagacctgaccaaagtgacagcagaagcaatgattccgctaaatccactgaagacgatgacgatgatgaggatgaaattgaagcagctcgaatggcagcaatcaacaaggaaattaagcgtgtgttgactgaggtccttttgaaggttactgatgagctttttgatgagatagcaacaaaagttctaaatgaagacgactcagctgaatccaatgaagccactggtgttttcggatcaaaggagactggtctgggaagatcaagagccaaggcctcggctaaagttgttctccctgctaagtcaacaaatagttctgatcataaagatagtactgggttaagttcccctaaaggtgctcttctcggcctggctagttatgattcagatgatgacgacgatgctgacactgacagcaaggataagatgccaatatcaaatttatcttctaaagataatgctggtgctgtaaatactgaaggtgataaaagcactcttggtaaaagaaatgggaatcacaatgaacagaattcttcacttggaagttctccatcaggggaagatcttaaatctaataatcaaaactttcaaaggaatgcgaatgcagaacctgaacaaatgcatattcgtgatacagagaatggggagttccgtttcaaggccaagactcgtactgagccaaagggtgcatttgacagaatggatgagaaggcacatacgtatgcagaggtagatatccagaacagaaaaacctcttttggcaataatgctgaaaagcacaatgatttggaaagcagtcacagacattcagaaaagagcagcaaagaggactttgttaatgagttgaaggctgatcatacaaaagaactcgaatattctagagcagaaaaatataataacgatgacaaatacagcatgtatggaaatattgacaaaaggggtagctgcaaggagggaaaaggttctgatagtgctgcaaagcatgaatccgatacaagggagccacattacagaggtaactctaagcttgatggtgcaaagggagattggaaggatttgccgaaggatagagagagaaatagagatgatagaagggggaaaggaaaggatgaaaaggacgacaggttaaggcagatgacaagtcataacagcagaagttcacggtcacgatcaccaagggggagaagtcgtactagaaaggagaactcacatgttcgagggagtgtttcaagtgatgagccttctgatagtgtgaaaaagagaaagcattattcccataaaaccagcatgtcaccttcacccccaaaatctagaaacagacgaatttcgcggtctccacatagcaagcattctcaccgcaggcattcgccttattcatcggctggcaggaagaggcggtcgagatcgagaactccggtcaaaaggagatagaaggcatggacagtttatccgacgagatctttgcctaaacattcctctgaaacaaccaaagacatttttgcggttctgctgttgtctatctagtgcgtcttttgctccgacaacataatggtagaacagcattcctacagtgacaaacatgaaggcgaggactggatgtaccttgatataagatgcacattgaactgtatcttgtttgatagatgagctatataactagctcacgcagctggctgtatgatctgtagttcccccgttatctgaattgttcatgtattaggccatgtactgctcagcagagctatgtagttagttgcacttgtatgacttcagcatgcctgttgccagttgtttgtttgtctatgcaggatttttttcccgtttcctacttttttgataaaaataaactgattcctgtgaaatctatatatgatttctctcaaattcctgcca

SEQ ID NO: 20544 - DNA, 1782 bp, Zea Mays
attcaagaattgttcggttacattttgcctgtttgctgtttttttcgtcggttcgcctcgtcttctccgcctggcccgagactcacactcaattcggtcgttttctgcattaacggagtcaggcccaggcctaacctcagtacatcagagcagccgaacacgcccgcggcaaccgccgccattctaccccaggtcggacggacccttgccggagacgagcacacgccacagcaggaattatcgggcgtagagcagcgcgaagcgagagatccaatggcggcggcggaggggcagtgggtgctcatggcaacggggcggacgccgaccaacattgcggtgatcaagtactgggggaagcgggacgaggcgctcatcctccccatcaacgacagcatcagcgagatctcgctattaggaggaaggtttcagagctgcctcagagaaatcagaaagcgtgctcgtgactttgaggacaaggagaagggcgtcaagatcaagaaagaggactgggacaagttgcatgttcacatagcctcgtacaacaacttccccactgctgctggtttggcctcttcagctgctggccttgcctgtttcgttttcacccttggaaagctgatgaatgcgaaagaagattatggagaactttcttcaatagcaaggcagggatctgggagtgcatgccgcagtatatatggtggttttgtgaaatggtgcatgggagaaaaagatgatggaagtgacagtattgccgtgcagcttgctgacgaaacacactggaatgatcttgtaattattattgcagtggtcagttcaaagcagaaggaaaccagtagcaccagtgggatgcgagatagtgttgaaacaagtcctctcttgcagtacagggcccagacagtggtgccaggtcgggtgttgaaaatggaagaagctatcaagaaccgtgactttgaatcctttgccaaattaacttgtgcggatagcaaccagtttcatgctgtatgcttagacacgagccctcctatcttctatatgaatgacacgtcacaccgaataattagccttgtggaaaaatggaaccactcagaaggaaccccacaggtcgcttacaccttcgatgctgggccaaacgctgttctaatcgcacaaaaccgtaaaactgcagcacatctcctccagaagctcctatactatttccctccacaggataatgatttgagcagctatctggttggcgataaatcgattctaggtgtcgccggattgcattccatgaaagacgtcgaggctcttccagcacctccagagacgaagataccggatcagaaattcaagggcgatgttagctacttcatctgcagcaggcttggcgctggtccaaaggttgtttctgacgaaggtcaagcattgatcgattcagtcaccggacttccaaaaggcgtgtagttctagatttaggttggaataatggtttaagctggggattaaagacaatggtatcatacaagcaacctgggccgggaagatacattaggctcgtgtcacgttggtttcgtgctgattgacttgacggtgtattggtcatgtattatgcatttgcgctggtgttcgttgctgtccaataaagatagaacacgttctcgccttttgtttttctccctcgcctagtatgtggctcaaatatttgtttcactattttattgagcacttcagctgagacaaaagcggagaataactttgtatggctgcttgtcacagtggatgaaaaaatctcgacccccc

SEQ ID NO: 20545 - DNA, 5902 bp, Zea Mays
ccgcgacaaggcaagcatatgcctgcgtaaaaaaaaaacagaaaatcagagatggtcctggcgatctgcctgctgaaactgtgaaagcttctgaagacaaatcagccgagcgagcgtgcgtgcgtgcgagacaaccaggtgggttcgtcacgcgggcgttcgaggccatgctcaaggagtgcgccgccaaccgcggcaagttcgccgcgctgcagcaatccatccagtcatacctcgatagcatcaagggggctacggcggagggcgcggtcatcacggaggcgctcgcgtcggctgggcgcgtgctcgacggaccgcaggccgagctggtgctgcagccgctccgcctcgccgtcgagaccaagcacgtcaagctcgtcgagcccgcgctcgactgcctccacaaacttattgcttatgaccatttagaaggcgatcctggtttagaaggtggtaaaaactccccaatatttacagacatcttgaacatggtatgtggttgcgttgataacacatcctctgacagtactgttctccaagtcttgaaagtgcttctcaatgctgttgcttcaaataggtttagagttcatggagagccattgcttggggtcattagagtatgctataacattgctcttaatagcaagagccctgtgaaccaggctacctcaaaggctatgttaacccagatgatcagcattgtattcaggagaatggaatctgagcaggtttctgtattgcctgcaagctctgtggttaaagatacaccttcatctatcacaaatgaatctgaaaatggagaaatatctaccgatggccaagatgaggaaaaagttactccgggagatgcattgtctatgaatcggccttctgaagcacctccaacatctgttgaagagcttcagaatcttgctggtggagcagatattaaggggctggaagctgttctagacaaggctgttgaacttgaagatgggaagaaagtgtcacgtggaattgacctggacactgtgaacataatacagcgggatgcactattgctctttcgaactctttgcaagatgagcatgaaagaagaaagtgatgaagttgctaccaagacaaggctgctatcacttgaactgctccagggattgctagagggagtcagcaacgcattcacaaaaaatttccacttcattgattcggttaaagcatatctttcatatgctcttctgcgagcatctgtcacttcatctccagttgtttttcagtatgcttgcggtatattttcagttctgttgctccgttttagagagagtctgaagggggaaattggtgtcttctttcctctgatagttttaaggtctttggatagctctgatagctccctcagccagaaggctagtgttcttaggatgttggagaaagtttgcaaagatccccaaatgcttgcagatgtgtttgtgaactatgactgtgatcttgagggaccaaatctttttgaacgcacggttagtgcactctcaagaatagcacaagggtctcaaattgctgatactaactccattgtgtcatcccagacagtttctgtaaaaggctcgtctctccagtgtttggtgagtattctgaagtcattggctgtttgggagcaacttcgaagatattccttaaagcaagggagcattgttgaatctcatgaaggggatgcttcaaggagcgtgacaactgatgagatgaagagccaagaggatgttcggaatcagtttgagagagccaaagctcataagtcgacactggaggctgcaatctcagagtttaatcgtaaaccaactaaagggattgaatatttgttgtcaaataaattgatagaaaataaggcatcatctgtagctcagtttctcaagagcaacccgggcctggataaggttatgattggtgagtacttgggacagcatgaggagttccctcttgctgtgatgcatgcctatgttgactccatgaagttttcaggattgaagtttgatgctgcaattcgtgagttcctgaaaggatttcgccttcccggtgaggcacagaagatagatcgcataatggaaaagtttgctgagcggtactgtgctgataatcctgagcttttcaaaaatgcagatactgcttatgttcttgcttatgctgttataatgttgaatactgatgcacacaatccaatggtgtggcctaagatgtcaaaatcagattttgttcgtatgaacactgcgagtgatgcagaagaatgtgccccaaaggagctcttggaagaaatttatgattccattgtcaaggaagagataaagataaaagatgattctcatgatacttcaaaaaccacaaagagacctgaaacagaagaaacaggccgtcttgtcaatatcctcaatttagcccttccaagactgaagtcagctagcgatacaaaggctgagagtgaaaagatcatcaaacagacacaggcacttttcaggaaccagggacagaagaaaggtgtttttcacgttgcacagcaggtggagcttgttaggccaatgcttgaagctgtaggatggcctttgcttgcaacattttctgtgaccatggaggaaggtgacagtaagcctagggttgtatcatgcatggaagggtttcgtgctggtatccatcttactcgtgttcttgggatggacaccatgcgctatgctttcttgacgtccttagtgaggtttacatttttgcatgctcccaaggagatgcgtagtaaaaatgtcgaggcactgaagactcttcttggtttagctgacactgatatggatgctttacaagatacttggaatgctgttttagaatgtgtatcgagactcgaatatatcacttcaaatccttcaatttctgcaactgtaatgctgggatcaaatcaaatatcaagggattctgtagtccaatcgctgaaagagttggctgggaagcctgctgaacaaatctttgtaaacagtgtaaaactgccaagtgattcaattgttgaattcttcaccgccctttgtggcgtttctgctgaagagctaaaacaaacacctgctcgtgtctttagcttgcagaagcttgtagagataagctattataacatggctcgcatacggctggtgtgggctagaatctggtctgtgttggcccagcattttattgctgctggaagccaccacgaggagaaagttgcaatgtatgccattgattcgctaagacaacttggtatgaagtacttggagcgtgctgaattaaacaacttcacatttcagagcgacatactgaaaccctttgtcattttaatgaggaatagtcacaactcaaaaatccgaggtttaattgttgattgcattgttcagttgatcaagtcaaaagttggcagcataaagtcagggtggcgttgtgtattcatgatatttactgcagcggctgatgacgaggatgaatcaattgttgagagtgcttttgaaaatgtagaacaagttatcttggaacattttgatcaagtcgttggtgattgcttcatggattgtgtcaactgtcttattggttttgcaaataacaagtgcactcctcggattagtttgaaggctattgctctcctgcgtatatgtgaagatcgtttggcagagggattcattccaggcggtgctgttaaacctattgatgttgttccagaggccaattttgatgtgtctgagcattactggtttcctatgctagctggtttgtctgatttgactttggactctagaccagaagtcagacattgtgcactggaagtgttgtttgatttgttgaatgaaagaggacataagttctcttctcccttctgggagagtatttttcatcgtgtactatttccaatttttgatcatgtaaggcatgctgggagggatggactttcttcttctggggatgattggcttcgtgatactagcattcattcactgcagttaatctgcaaccttttcaatacattctataaggaggtatcctttatgcttccacctcttctcagtttgctgcttgaatgtgcgaaaaaaacagaccaaactgtcgtttcaattgctcttggcgctttagttcatctgattgaagttggtggtcaccagttcagtgatggtgattgggatacattattaaagagtattagggatgcatcatacacaacacagcctcttgaattgctcaattcattaagatttcagaaatcaaaacaccagcagttactttcaagagaagaaagcaatgcacaaggcaatagttaccttgacagccagggggaaccctccatcagtgacagtaataatggtgagcataatcatccagaggcaggtctgcaaactatcctggagaattcagaagatttaccgtcaccatcagggagaacacaacctgccgttttcccacgtggccaaagctttggacaaagaattatgggcaatatgatggataatattttggtcagaagtcttacgtccaaatcaaaaggtcgaacagatgatattgctccaccctcacctgtgaaggcccctgatgatgaggctgacaaggctgaagaggaagaaagccctatgatggaaactgtcaggagcaaatgtattacacagttactgctgcttggggcaattgagagcatacagaagaagtattggagcaggctaaaagctacacagcagatagcaataatggatatcttgctctcactcctagaatttgcttcttcatataactcaccttcaaatcttcggacgaggatgcaccatatacctccagaaagacctccactgaatcttctccggcaagaactagctggaacaacgatttatttagatatcctccataaatcaacagtggagcaggatgaaaaggactccattgaggaaacaaatggtttaaatgtggaatctgatgaccaggaaaagatcaagtacctagcagaagggaagctggtttctttttgcggacaggttttgaaagaggcgtctgatttacagcctagcactggggaggctgccagtgcagacatacatcgtgtattagacttacgggcacctgttattgtcaaggttttgaaaggaatgtgcatcatggatgctcagatcttcaaaaggcacctgaaagagttctatccattaattaccaaacttatctgttgtgatcagatggatgttcgtggagcccttggtgatctctttagcaaacagcttactccactcatgtcctgaagtatggcagtatttcctccgttgcatatatcttgttggaatatattcgtcatcagcatttttgtgcaaacatggagcaccgtgttttccctagcgacttggatgacacaagggatgatgcttccattatacagtagagtagtgttggtgacatgtacgcattgttcaggacattgtacttgaggcctgttgttattttatggcaatagtagattatttgcggcaagcctcgtttttgtgcgtctaataaagtgaggtcctgatgtatagccttgtctgacttgcagaattgcgttggcaaattccctttgtcctccaagttgctgtaatgttgacatgacggtgcatttatctgctgtcacctgtggagaatccgataagtcaagcgaatccaaccattcatttgctgccacagcaggcgcattgcaaattgtttatttggtttcgtattttcaatcatctattgagaatccgagacggtcaaggtgaatgcagcatattgtgtattgaatattgatacttcatcttgtgtactagaattgatcgctgtagaacgaatcggcaagaccgataaatccacaatgaccaacaccaacccaagtgaacaggttgcgagactcgggtcactataatatggccagaatgtttgattgtac

SEQ ID NO: 20546 - DNA, 164 bp, Zea Mays
tcctgtttttgaggaccttcgtaagccgaaggcccccaacactagtataccagttttacactctgcagaggttgcgcatctttacccacaagtcgtgttacccatttgccacggagttgatcagaccccctacacctctaccaaggaagcgaggcagggtacca

SEQ ID NO: 20547 - DNA, 671 bp, Zea Mays
cggagggggagggtttctccagcctctcgtttctagccatcccttggccccaggcgcggcgtcgccgggcgtgagctcgcgagaaggacgccgagaagcaactccggcccaccctaccgggtgaagtgcgagcctgacgagcccgtaccagctagccagccaaaccaagggagcgtgcgagtgcgagggaggaaggacaggaagcggatcaagcagcgggacgacttcatcacggctgagaaggagaagcgcagagcacagtattctgccgctgttaagagaaaggaggcagaacggacagaaagggagatggctgctgtggcaagagatcgggcatgggcagaaaggttggtagagctaaaacagcttgaggaagaaaagaacactgcaatggcataaaagggcatgctctggaaaatgtcaaggcatctaacttgtttttgcttctctattctttccccattttttccacatagtatagaatgtcacagttgtaatggaagactagttgtaccacttctttcaaccgtatatcaaatgctggacgtggtgttaatacgatttttcattagtccatgtatggagtttgtttattttgatgtatttagaataagtgatgtgatggtttttgtgtgctggagacctgagatgactgtcgtttgcaacatata

SEQ ID NO: 20548 - DNA, 1891 bp, Zea Mays
tggtggtcaccagttcagtgatggtgattgggaaacattattaaagagtattagggatgcgtcatacacaactcagcctcttgaactgctcaattcattaggattccataaatcaaacaaccagcagttactttcaagagaagaaagcaatgcacatggcaatagttaccatggcagccggggggaaccctccatcgttaataatggtgagcatagtcatgcagaggcaggtccacaaactagcctggagaattcggaaggtttaccgtcaccatcagggagaacacaacctgctgtttccccacgtggccaaagctttggacaaagaattatgggcaatatgatggataatcttttggttagaagtcttacatccaaatcaaaaggtcgagtcgatgatattgctccaccctcacctgtgaaggcccctgatgatgatgagacagacaaggctgaaggggaagagagccctatgatggaaactgtccggagcaaatgtatcacacagttgctgctgctcggggcaattgacagcatacaggtaagcagtttcctccactttatatgcatgctcttagatctgagtccatccattgtttctctgacaatgtggactggaagcacctttgtctgtgatacaattgaggacttctagttgcaaataaggaattcatcaccctaatatattagccagccctacttgggttgatatactgtgattaactattgatgaaacatttcagaagaggtattggagcaggttaaaagctacacaacagatagcaataatggatatcttgctctcactgctagaatttgcttcttcgtataactcaccttcaaattttcggacgagaatgcaccatatacctctagaaagacctccactgaatcttctccgtcaagaactagttggaacaacaatttatttagatatccttcataagtcaacagtggagcaggacaaaattgactccattgaggaaacaaatggtttaaatgtggaatctggtgaccaggaaaagatcaagtacctagcagaagggaagctggtttctttttgtgggcagattttgaaagaggcgtctgttctccagcctagcactggggaggctgccagtgcagacatacatcgtgtattagacttacgggcacctgttattgtaaaggttttgaaaggaatgtgcatcatggatgctcagatcttcagaaggcacctgaaagagttctatccattaattaccaaacttatctgttgtgatcagatggatgttcgtggagcccttggtgatctctttagcaaacagcttactccactcatgccctgaagtctggcagtatttcctcccttgcatagatcttgttggaacatattcttcgtcagcatttttgtgcaaacatggagcaccggttgggtgcttgacatccttaacgcgctttctggtgcaacagctactccctaggaacttaagagcttgatcagcgggaacggcaggtccctaggccacatcttttttttttggatgacgcaagggaagtagcttgactgatgcgcacaccgtgtttttcctagcaggcttgtactttggagctatttatctgtgcccggacagggatgatgcttccattatacagtagagtagtgttggtaatatgtacacattgttgagaacgttgtacttgaggcctgttgttattatacggcaatagtagattgtttgcggcaagcctcgttttttgtgcgtctaattctctgacttgcagaattgcggtggcaaatacccattgccctccaagttgtgcgttagcgtatttatccgtagttgacagcaatgaacatattactactgctttctgtattttctattaacgcatgcacatagtttattgg

SEQ ID NO: 20549 - DNA, 2487 bp, Zea Mays
gtccacgtgcgccgcacacgcgggaaaggggactctacaacacgcatcgccccgagccgagccctctcgcttcccttttataccccttgccacgcgcattcccctctccactgccagctccggtccgcagagggagggaggaggacgccagttgccactgccgcgccgctcccgcctccctctctccatccgacgagctcgagaagccaccatgatctccgcgcgcaccgccgcagcttcccccgcctccctgtggaagcggggaggacaaagtgagggcggcggcagttgcgacggatgtcggacctacaggaacactttgcggagggccgcagcagcgaaggtgcgtgccttgccgtcgagggcggtggaggcggtcaaaatgggctccgccgcggaggtggagcaggaggaggcggaggtagccgcggccgcggacggcgtcgtcgtcgaggaccactacggcgaggacagcgccaccgaggagctgcccatcatgccctgggccttctccgtcgcaagcggttacaccctcttgagggatccacatcacaacaagggtcttgctttcatggagaaggagagggatgcacaccacttgcgggggctgcttcctcctgcagttgtgcctcaagaactccaaattaagaagatcatgcacaacctgcggcagtaccaggtccctttgcagcgctatatggccatgatggaccttcaggagaggaacgagaggcttttctacaagcttttaattgataacgtggaggagctgcttcctgtggtttatacaccaactgtaggtgaggcctgccagaagtatgggtccatctttcgacaaccacagggtctgtatgtcagcttgagggacaaggggaaggtcctagaagttctaaggaactggccacataggaacattcaagttatctgtgttactgatggtgagcgaatcttgggacttggagatttgggttctcagggaatgggaattcctgtaggcaaacttgctctatacactgctcttggaggagttcgtccatcagcttgtttgcctatcacaatcgatgttggcacaaataatgagaaactgcttaatgatgagttttacattggactccggcaaaaacgtgcaactggcgaggagtatcatgagcttatggaagagttcatggctgctgttaagcaaatctacggcgagaaagtcctcattcagtttgaggacttcgcgaatcataatgcttttaatttgcttgcaaaatatagcaagagccatcttgttttcaatgatgacatccagggcacagcatcagtggtccttgcaggtttgttagcagcactcaaggtggttggtaggaccttggcagagcacacttatttattccttggtgctggggaggctggaactggtattgcagaactcattgctcttgagatttcaaaacagacgtcggctccaattgaagagtgccgcaagaagatttggttggtggactcaaagggtttgattgttgactctcgtaaaaactccgttcagtcattcaaaaaaccttgggcacatgagcatgagcccttgacaaccttgtacgatgctgttcagtccatcaaacctacagttctgattgggacgtctggagttggaagaacattcacaaaagaagttgttgaggccatggcttccttcaatgagaggcctatcatcttttcactgtcaaatccaacctctcattctgaatgtactgctgaagaagcatataactggactcagggtcgtgtaatatttgccagtggcagtccatttgaccctgtggagtacgatgggaaggtttttgtacctggacagtcgaacaacgcctacattttccctggatttggcctcggtcttgttatctctggagccatccgtgtccacgaggacatgcttcttgccgcctctgctcaggccacacaggagaacttcgacaagggatcaatcttcccgcccttcaccaacattagaaagatctctgcgcgcattgccgcagccgtggctgcaaaagcttatgaactcggtttggcgacccgtctgcctcccccaagggacctggtgaaatatgcacagagctgcatgtacactcctgtctaccgtaactaccggtagtgctgctgggatcaattctgcagtaataaaatatgtcgacgcagatgatcctgcaatgttgtagtttattttttcatttgttggccctgctgctgaccacctttgtggctgctagacactgtacctgtctatgcatatatgatactggaacatttggcgcgctgtgggcgtccctgtcatgagatcaattgcagaaataaaatgcaatttagatttgagcaccaaaataaaaatagtaataatacacaagtgaggcaagcatatgttgaatctgatttgcttcaccttcgattagagatgacaatgagtaaatattcaccttcgattagagatgacaatgagtaaatacccgt

SEQ ID NO: 20550 - DNA, 650 bp, Zea Mays
ctggtcatagtgccttgtgtttcgagagctacagacagaggatattcaagctgttgacttctgcatattccacaattagagttgctgatgtggctcatttcatggggatgagtgaggaggatgcgacaaactatgctgtgcaaaacggttggagtttggatgcagcggccaagatgcttactgtcaaaaagccaaagtctcagaccaaccagaagcttgatgctagcaaactgcagcgtttgactgagtgtgttttccaccttgagaactgatgttcactgtcaatcgtgttgtgtccctgtttcttctctgctccacattgtaagaagcatgtttaccatgtgacagctatatgcctgagcgacttggcccctttcggccgaaaaggggtgatctctgaatttgcatcttatgtgatttctgacagcgtgctatgggttaatgtgcctattggtgacccctcctgccagtggctcattgaaatgagtcacactttgtcattagggcaagtataataacagcctataagccggctaaatgctgggttgtatgagagagaagagagaaaaaacgggctgtaaacttatagttaccttagacagaagaacaaaaaaaatgtgagacaagtgtatgtattaatagtgaagaga

SEQ ID NO: 20551 - DNA, 4409 bp, Zea Mays
attttatcttcccagactgacctaaaaccctcctcaccttatcttctcgtcgcctccccttcccccaccctgcttcctcgaatcctactgctggtgccgctgttttcttgcttcgttgcgtgctggcggagcaagaggcggacatggccaccaccaccgacgccgccccagtcgcgcccgtggaggaagggaacgccgccccggcggccgccgaggaggagccgcccaagaaagtcgaggcagccgtggccaccaccgacgccgccccagtcgctcccgcgtccgtggaggacgaaaatccggccctggcggcggcggccgaggaggagctaaccgagaaattcgagtcggcagcggcggcggcggcggaggaggaggtggatgatagggaggcgccgaagcaggtcgtggcggatgtgggagagagggaggaggaggaggaggaggtgagattggaggcgaagagtgagggcgttgcgggtccagaggccgagaacggaaaggcggagggtgttgtcgtcgggggacatgatggcagggatgtaaatgaggcggaagaggatcgtagagttgggaagttgggcgccgcgacggccgtgaaggatggcggcggcgaagaaccggcgtcggaggatggagaggcggccgcttctgtgtcagcgccagtgtcagaggtggagtccaagtcggagaacggtgaatcgggggagggggatccttctctggcttcccctgatgcgccggaaagtgatgagaagggcgaattgcaggaggaggagcagcatgatgaggaaagaggtgctgcagtagaggtaaatgttgtggataagatagcagaggatgtcgagtcgcctgtggctgaagaggagaaactggtaccggaagttgagaagggcgaggaggtaggttctgggagtgcagttggtggcgagttgagtgatgaggaggagccactaacaaggatgctgttggtgatgatgtggtggctctgggaggtgaagaagccctagaagaatcgaccaagaaggatgctgatgttgaagatgaggccatcaggcctgagccaccgagtgaggcaactgcagtggttatgaatgatggaagcatagaggagcttgcccctgcaagtgctgaggagatcatagacagtgtgcgtgaggatagtcctcagaaggagcagagcgctgaagaccaggccgttgccggtgaagtggtggaagatgttggtgttgacaagcccacagaggttgaaaatgttgatgctactagtgctgatggtatcctctctcgagaattggctccagaatcaatcaaagaaactaatggtactggtgagattgaaggtgccactgaggttgttgatcatgaagaggaggctgctgataatgacataattgaggctgtgccagatgatgcggatggggatggtaatgaggctgaggacgatgacgacgggacaaactctgacacgagtcctgcacgggttgcaattttagagagctctgaagccgcgaagcagatcatgaaggagcttgcagaaggctcctctagtggtagtatctcaagagacttcaccaatagcatggatgggcagattatgcttgatgattctgaggatgatgatgatgataatgatgatgatggggatgagaagggatttgattctgctgccctggcggcccttctgaaagcggcaactggtggatcctcaggtggggatatcacagttacttcacaagatggttctagaatatttaccatggaccgacctgctggtcttggttcatcagccccttctctgaggccgactgcgcctcgccaatctgcccggtcaaacctattcagcccctcagagctagcagttacagctgaccctacagaagagatgacagaggaagagaagaagctgcatgacaaggttgagttgattagagtaaagtttctgcgtctggtttacagattgggagctactcctgaagaaacggttgcagcacaagtgctgtaccgtctgagccttgctgagggtatccgacatggcaggcagacgaaccgagcattcagccttgataatgcacggaggaaggccttacttcttgaagcagagggaaaagaggatctgaacttctcatgcaacatacttgttctaggaaaaactggagtcggcaaaagtgcaactatcaattctatatttggtgaagagaagtccagaactgacgcctttagctcagcaaccacaaatgtgcgggaaattgttggtgatgtggatggtgtcaagattagaatcattgatacacctggccttcgacctaacgtgatggaccagggatcaaacagaaagattcttgctgctgtcaagaactataccaagaaatgtccgccagatattgttctatatgtggatcgtctggatagtctgagccgtgatctcaatgatttgcctcttctgaagactattactgctgttcttggctcatccatatggttcaatgccattgttgcactgacacatgctgcctcagctcctcctgaaggcctcaatggtgctcccatgacatatgaggtcttgatggctcagagatcccacatcatccagcagtccatcaggcaggctgctggagatatgcggttgatgaacccagtagcacttgttgagaaccatccttcgtgcaggaaaaaccgggagggccagaaagtgcttccgaatggccaaagctggaggcatcagatgttacttttgtgctactcctcaaagatattatcagaagccaactcactcctgaagcttcaggatcctaatcctggaaagctttttggtttccgtttccgctccccgtctcttcctttcttgttgtcctcactcttgcagtctagagcccaccccaaactttctgctgagcagggtggcaatgaaggtgattctgatgttgaattggatgactattctgatgtagaacaagatgatgacgaagaagaatatgatcagcttccacccttcaagcccttgaccaaagctcagcttgcaaggctcacaaaggagcagaagaatgcttattttgacgagtatgactacagggtcaagcttctccagaagaaacaatggaaggatgagatccgcaggttgaaggagatgaagaagagggggaaaactgatctggatgattatgggtatgctaatatcgctggtgagaacgatcaggatcctcctccagagaatgtatcggttcccttgcctgacatggtgcttcccccttcatttgattgtgacaatcccacataccggtaccgctttttggagtcaacctcgactgtcctagcaaggcctgttttggatgcgcatggatgggatcatgactgtggttatgatggagtgagcgttgaagagacactggctatccttagcaggttcccggcaaatgtagcagttcaggtcaccaaggacaagaaggaattcagcatccatttggactcttccatcgcagcaaagcatggagagaatgcatcatcacttgctggttttgatatccagactgttgggcgccagcttgcctatattctccgcggcgaggcaaaaatcaagaacatcaagaagaacaagaccacaggaggcttctcggtaactttcctgggtgacattgtggcaactggactgaaggtcgaggaccagctctcccttgggaagaggctgtcgctagttgccagcactggcgcgatgcgagcccaaggggaaactgcatatggagctaacttggaggcacgcctgaaggacaaagactatccgattggccagtccctctcaacgctgggtctctctctgatgaagtggcgccgggaccttgctctgggcgcgaacttgcagtcccagttctccatcggaagggggtcgaagatggcagtgcgacttggtctgaacaacaagctgagcgggcagatcacggtcaggacaagcacctcggagcaggtccagatcgcacttctgggtctcgtaccggttgcagcctccatctacaggagcttccggcccagtgaaccgtccttcgcttattagcctgtcaggagtctcagtccaattacttcataaccatgtggtttctcttggcaattttcttcttcacatgaaccatgtttcttgctgtttcagtttactcccttgtaattggcagatcgtttcctaccataattttggctgaagagggttgtgcgatttatctggaactgtagctgaataaataatgtcgagaaatgtaccatccttgtgtttatcaatatctattgcagcgtctattctgattattcttgtggctatcaatctattaggccccgtttgtttcgttgaaattgaattccattttaataattataatttagacaaaactaattaagttcacatatttatactaggtgtgtgcccg

SEQ ID NO: 20552 - DNA, 3085 bp, Zea Mays
atatgtttcctgaaccaatccattaaagatcacaacagctagcgttctcccgctagcttccctctctcctctgccgatctttttcgtccaccagcatggagaagaggaacctgcagtggcggcgagggcgtgatggcatcgtgcagtaccctcacctcttcttcgcggccctggcgctggccctcctagtcgcggacccgttcggcctcagtccgctggccgaggtcgactaccggccggtgaagcacgagctcgcgccgtacggggaggtcatgggcagctggcccagagacaatgccagccggctcaggcgcgggaggctggagttcgtcggcgaggtgttcgggccggagtctatcgagttcgatctccagggccgcgggccgtacgccggcctcgccgacggccgcgtcgtgcggtggatgggcgaggaggccgggtgggagacgttcgccgtcatgaatcctgactggtcagaagaagtctgtgccaatggagtgaactcaacgacgaggaagcagcacgagaaggaggagttctgcggccggccgctcggcctgaggttccacggggagaccggcgagctctacgtcgccgacgcgtactacggtctcatggtcgttggccagagcggcggcgtggcgtcctccgtcgcgagggaagccgacggggaccccatccggttcgcgaacgacctcgatgtgcacaggaatggatccgtattcttcactgacacgagcatgagatacagcagaaaggaccatctgaacatcctgttagaaggagaaggcaccgggaggctgctcaggtatgatccagaaacaagcggtgtccatgtcgtgctcaaggggctggtgttcccaaacggcgtgcagatctcagaggaccatcagtttcttctcttctccgagacaacaaactgcaggataatgaggtactggctggaaggcccaagagcgggcgaggtagaggtgttcgcgaacctgccgggcttccccgacaacgtgcgctccaacggcaggggccagttctgggtggcgatcgactgctgccggacgccggcgcaggaggtgttcgccaagaggccgtggctccggaccctgtacttcaagttcccgctgtcgctcaaggtgctcacttggaaggccgccaggaggatgcacacggtgctcgcgctcctcgacggcgaagggcgcgtcgtggaggtgctcgaggaccggggccacgaggtgatgaagctggtgagcgaggtgcgggaggtgggccgcaagctgtggatcggaaccgtggcgcacaaccacatcgccaccatcccctaccctttagaggactaaccatgatctatgctgtttcaatgcctcctaatctgtgtacgtctataaatgtctaatgcagtcactggttgtaatcttgtttgtgtttggcaaattggcataataatggacagattcaatgggcattggtgctgtagtcgcatcacactaattgaatgggatcatgttgagctctcactttgctacaatttgctccagcttgtacggttgtaccctcttgctcgtctatagtaagggccatctaaaaaaaactcaaattagatctgcaatacaagtatgattgggccgaatttggattgtcacgggtccgcgaccgcgaattgggctcggtttgatttagccgacatagtagtgaccgacccgagccggcggcgagccaaaccgagcggacgccgccatggatcgcgagtggggctccaagcccggcagcggcggcgccgcctccgcgcagaatgaggccatcgaccggcgggagcgcctccgccgcctggccctcgagaccatcgacctcgccaaggacccctatttcatgcgcaaccacctcggcagctacgagtgcaagctgtgcctgacgctgcacaacaatgaggggaactacctggcccacacgcaggggaagcggcaccagaccaacctcgccaagcgcgccgcccgcgaggccaaggacgcacccgcgcagcctcagcccaacaagcgcaagcttgccccccgcaagtctgttaagattggcagacctgggtataaagtaaccaaacaatatgatcctgagatgaagcaacactcgtttctttttgaaattggttacccggaaatcgaagataattgcaagccaaggcaccgtttcatgtcatcatatgaacagaaagtccaaagttgggataagggttatcagtacctactttttgctgcagagccctatgaaattattgcattcaagataccaagtacagagattgataaatcagcgaacaaattcttctcttactgggatcctgacaagaaggaatatctactgcaactgtacttcaagccaagaccgccagaagctaataaaccaccaccagctcctccggggactttgcctaatgggactggggttcctggtgctccaacaaggccaccggcgcaagcccctccacccctgccacaagttccaccgcccccgcctcatgcacctcctcctgcacccatgggaatgccccctaggattcctccaccccctatgggtggtgttcaacctccgccgcctcctccaccgccagttgcaaatggtccgcggccaatgattccaccgccacctaacttcactcctggagcacccccaccacgccctccaatgcatggttttcctgggcaacaacagcagtagttaagtgcttagcaatgttccagtaattgacagtcggcaaaagtttcacgcttgcttgtgttgccttatgttttccaactcaaaactttgaatgttatcataggcttacatggtctctagactatactcagatttggtcgaccgatttggtcaaattgcaagaaattgagttacatcaaaatccaaggtacaaaggaagacaacaattaaaaccatcaaaatggtgaaagtgcaatggagtcagtacttgtttgaagaagccacatgggcacattttttccccaaaggggaggttggtcatgaccctatcatgatagtcatttccatactcatcatgagaattatatgcatttgaatctcaatttgtttaattatgtaatca

SEQ ID NO: 20553 - DNA, 295 bp, Zea Mays
cttgaattgcgtcgcgatagcttctgttcatgcggcgcaggagcgccacggcggcatctaagcaccggcgagaaattgcccagcgcttacaccaaccccgagcacggcgaggccacgtacatcaccgatgcaccccggcgaatcacccagaccagtccccgagggatcgacgatggcacacacgagggacggcgtttgcgacacccgccaccatacccgacgatggcgatgaagtctgattccaagggattcggccagcagcgagattcacggcaagggaatttgtccgcccaac

SEQ ID NO: 20554 - DNA, 2377 bp, Zea Mays
cgcttttttgaaccttggagtagagaatgcggattttacggcttccgtcctgaaatataagactaacttgaggtggcattctaagtctggagaaagtccaatctctccagttgatttgacatctagtgatgaagaacacagccatgatcctgattcttcttccataaaaaagtctaggaaaaaactaaagcagctagatgccacattagctgaaggttctgaacacgcttcagtctctgagatggacattcctttgtcagctatgtgcaagtcaccagaaagcacacattcgccgaattctttgctctctgagaagagcagtcctcaaggttcacatgtgatagtgaatttggttccaatgaatggacttcattgtgcttcttcagggcattcagcaccagtggacaaccaagcaatcctgtctgatatgggtgtttttgatggtgagcttcatgaatctgtatctgggagaagcgttgatgcatatgatatgcttcccattgctgaactaagaaagaaaatggcttcagctagaagaaattgtgctgtccaacatacagaggaacaacatgtgaaatcgctcagagtgaagaaatgtatatcgaatagtaaagacaaaaaaacgcgccctattcaagagcttatgggagaaattcagttgaagggaaacaagaatttctctagggactttgttttagctttgggcgtctctagggatggcccgactactttatctccagatagactggtgtcaatagggccaaaaaggtgctcaagtacaaaggttcttgcctgtaagaaattggctaagaggagaggatccaaagaactgtgcagtccaaatagctcattggatgtgactaggactgaccagcagggaggaagaaaggaagtggcagaagcaatgaaagaatgttccttagcattggagtgtccgaaatctgatgctcaagggcagcttgacagaactttggaggatgcaaagaatataactgaattatcaaatcaggagaacctcttatccatgctgcctcctggctttaaatcagtgtctaacaggaaaggtactaacatacatgatgctcaacttggggaagaaccagcggttatgaccaacaacagccttattgaaccgaatggaaatgatgacatgtgcacagaccatgctgctactaccaagttagctgaaaactacaatgtgatggaaacagctatcatgtctattgattgtccggctcaacaaccctgtggggaagtggatgagaggtcagttttaggtcttaagaatgctgggagtacacagtgcatcatcgacagttctccatcgagtgagagcttgttgccttcaccgcaggctttgttcgtcaagagctcacctgtgtggcatatagttgaagcaatgcatgtgtttaaagagttacctcaacaaccacatttcattccactccaagaagtccccccgacactacgcgaaggaatggcattaggtatgatggtgtcattcgcggacttggtgaaggttacaatggaagcaagcataggcaacgacatggaatggtttgaggacaagatcaggacaatctcccatctagaggcaaatggatttagtgtgcaatctatacagagcgccatgaccgaaatggtcaaggtcaaaactgagcacaccagttatcattgcgaaatcggcaagctgagttcaaagttagtggagaatatggcttcctcctccagagccggtgcactgcttgatgaaaaagatgaagctgcagcacggctcgaggaagaacttgtgagtattcgccaagaaagccagaaaatcgcaaaggagaaggaaaaaatagatgcagaggtcgtgagtatcaagacagcatgtagcgggtatgaggatttgtgcagcggtgtggaacgcaagtttaaggaagtcttggctgggctgcagcggaagaggctaacctgatgcgcaaggtgttgatgtcatttcgctgcttcaaagttctaattctgaccactgtttctgcttttgggctgtaggtcatctatgtatcacggtaggttcagatcgatgtgctgtgcttagtttgtgcaagtcattcggtaccttttatatatctgtatggtgatcatgatggcttagggagcctgatgaagatcgactcttgataattgttactgctatattagttggaccgtatttatttgcctgcggcataattagtttgagggcaatttgtttccgttcttgtcaactttgattctcctgacttctatcgtctgatgttatttgatccaacttgacataggattgtcttatccgatgtctcgcttgaaacctttgtaacaccctatccctacctcaacagtaattgtgctatgtatc

SEQ ID NO: 20555 - DNA, 1249 bp, Zea Mays
acaggcacaggcacagcccacccacgggagggaagaaaggagagagaaagagaggagaggcaacacagaaacaagagaagaagaagaagaaggggagatcgagatcgatcacgcaccgggggagcagatccttcgcctcgccatcagggatcaaggagcttgttagcagtgcaaatgtttctgaccaccgggtttttggggacactgaaaaattgcaaaatgcgaaattgtgtgagcttcatccagcttcctggttctgtgttgcctggtatcctgtttatcgtgtgcctcgtgggaatttccgtgcggcatttcttacttatcattcactggggaagttggttcataaaaaatgctccatggatacgaatgacgggcatacacaagtagtttcaccagttgttggtctccagagttacaacgacaagggagagcagtggtttcagctgagatgcccagatttgaagcaattgccaatagaagattctttaaaaaccagtcctgctgaagttcataaagagaggctgaggacgctgaagatgggtgcattggccatggcaagagctgttgtcccaaagggaagtggggagtcggtgaaccaccatcctgattacgagttcttcctgtctcgttgcgcctaggctaagcggttgtgatatgaaggaagaggggcttttctgcttctagctcctgaatgtagtagtgaccatgaaaatgaaaaaaaaacccagagtagtgactaaccagagaccggctatagatacagtttatcttagagagaggagagcctggggtgatgcatatcactgactgtataggagatagactcgaatattagatactctaacctgattccggattaccaatgcaaaccaagttggtgagctgttgaagtatggcagtacccgcgggatgggtgctttattggggctgggggcaaagatgagaagataccacagatgagatgacgctgcaggtgttcatcttttgtacaaagaccacaccagaggagcagcaagaaatttgctaccagcaagaaatttgttaacacatttgcgaggttgggcttttgttgtggcttgtttgctttgcagacttgcagtgttgctgtttctaatcatgatactgtgctgcttctgtttctaatcatgatattgtacatgaatgtgtcaacgtctggtgctgtgctgctagcaaacgcaagtgaaagcgtgcgagtaattagaggcgtgcaacctcattgcttctc

SEQ ID NO: 20556 - DNA, 3128 bp, Zea Mays
aatgttctaatcgtgatgaaagcttgccctgcgctgtgcgtgtaggatgcgcaaattaccaaaagggccctgggctactgagttggcggctgctctctcggtggtcccaaagggaagagggggaaccgggcagagagcagcgcaggacaagacaggcagagaagtcgctagccagactagtctgcgcggtgatccgtcttccctggggtgttccgccgtcctgcagcagaggcagggggttgccgctctcgccgccgcacgctgcggctctgctctgctccgcctgatccttcctgcggcccttgttttttcctctcgtttcaggtggccagccttggttttgcagaactcattcagtggcctctgctgaaaagtgttcaatggcgtcaggagccaccttaagctgggttaaaaccccatttgacacccgaagatttcatgacctatctaatctaagtttccgctgccgaaacccttttggatcaattcagccctggtggctgcaaactgatcaagactcatccctaatcaaggttcgcgtggctgctgattattcagactcaatgccagattcaaagtacacgagagatcggggttatcaccctcttgaagaagttaaagaacgtccaaagaagaaggacctgttgctgacagatattgaaacagctagaacagtagtagaggcaaatagcaaggggttgcttgtatttcctgctagggtacacaatgaacctcatggacatgtttcttggtcggagtttcaatatgttgttgatgaatatggagacattttctttgaagtacctgacagtgagaacatcctggaagatgatactgcaaacaatcctgtgacagttttgattggaatggatggacccattattggagaaagtagtgtggcgattagtgatttcagtgattacatggatggtgaaaattttatggacgttcctgatgagcaccacaccaagattgatacagaaataactgatattctcatagagtgggggatgcctgcaacaatgcgtgcaatacatccgatttactttgccaaatgtttgacaaaggtaagcgataaataattatttgaagagtgcagacaccacaaaccagcagcacttggaatagtgaaaatggtcaagctgataaagatgctattaacgaaaggacagacccagtgggcagtggcccgttctggtggctcccacatgagtagggtctagacaaggaataatcaaggcaagctttactcctgcattttgcagagaggctgcattgaactaggacctttggctcagtgagaaggcttcgcaccactgcaccaggcttgcccttcaataaagatgctattaatgattcattgaattcagcttacatcatgcacgatttgaatgtgaaccttcaaatcatgcactttagattgcagtctccagaccactccggttgcccatatcaagttctgaaaaaaaaggcaaagatagaaaatcaagatggtctcatgttagcttcagaatatggtatctttcaggagggatagcaaatatcagtaaaacaaaagaaagattggcaacagtttgatgtctttctcggagtatcccttttcccatcaattagtatttgataaaaactctgctaaaactagaatatatttagcttttgtatatatgccaatccgaactttttaatttgttctgaactttcatgtgccagtctgttgtagagtaaaaactttaccaaagcatttctccgagcataagtggtcacaagagcatagctctaaatgtgtccctcatcaaatctctcaagttgcagagaactaggcaatcacgttacctgctcttttactgcacaggccattcataataataatggggagaagatggatagtccatcaaacggtctctctattgtaggatatctgagacctgctttcatagaggaagagtcttacttgaggagcatgtttcatggtgacaatggtggttattcatctgactggaaagtaaatgaaaccgatgaatacaacagagaaactcggccagtttctggaaccaatcgcctcattgatgatgataaatcaagatttgacttcaatcatgctgaaactagaactgattcaatgatctacaagctggagataatgacaattgaactgttttccatgtatggaaagcagtttaagattgatccacaagattttcaagattcagaaccagatattcttgcaaattctgcttcatcgataatagaacggatcaaagaaaacagtgatcagtgtgccgcggctctcaggtcgctctgtcgccggaaaaagggcctcactgtcgaggaggcaagcttgattggtgttgacagccttggtattgatgtaagagccttttctggcttggaagttaagactgttcgattttcattcaatgcacaggctctctgaacgttcagctgaaaagaagatcaggcgaatgcttttcccccgttaccagcgtaaaaacgtgaaagcctctactgaagatgagtcttaacctatcagctgtttttcctgagaaagcatgcaaacacctggttcaaagacaaggtgtcaagggaatcaacacaatatcatcttatgcgagtttgctaggagatagcgcacaacctgtcgactatgagaatgaccaaaaacatcagagtaataaggtttgccatgcatggtctctaacatgcttccaagaatatagtttggtttctgacagataataaaaaaaaaacgaataaggtgccagttcatgtataaaagatgaactgcgactttatgctggcggaaactgattagctgaccaagctttgtcagctacaaattcccagtaataataacgagctgcgaggtgaaagggcagagtaataaggtctcgttggcctaaatcagttcttagtttcttacccacaacctgtaactaactttgttgtctcttttcatgtagacataaatgtcatgcaacgcaactgcgattatggcattgttttgttgaactatacataaaagaaaacttgataaagtttcgagtgcttttagctgtcagattctactgtgctcgattgcactactgtactcgtgtactgtaagaaaagactgaccagttattttccag

SEQ ID NO: 20557 - DNA, 283 bp, Zea Mays
atgtaccagagttcttccttttctgggttgtagaatttgaagaaaagaagaatatcttccttgcccttctcaggaggagggagaggccgcaaatcctaaatgagtaaataaagataggtaagggatccacagctgagtgccacagcagatactataagcaacatgcagaacaagaaggaagcacaaatcaggtgtatcactaccagcccaagttctacttccaaaaacagcttcaactcaacattgtgtgccttatttgatatttctctcagttgccccacct

SEQ ID NO: 20558 - DNA, 3503 bp, Zea Mays
cgtttgaaatccgttgcagcgttttcatatttcgtttcagcgaaaactcgtcaaatagaaaaattggcatcaaaattttcgaaatctcacaattgggccttctccgataaggcgataaccgaaccgattccgtgaaccgcccccgaactttccatcgaccttttctcccctaaaaaaaaccgagcgattccaaatcagactgccttccggttccccatctcccctccctcagcgcagactcagccatggcttccgccgaaaccctagcccgctccccctcgcgcgagccttcctccgacccgccccgcgcaggctcttccgagccccaccacaacggcgccggtgactcgtctcgccgccgccgccgcagccgctgggagcagtctaacgacgactccgccaacaactccggcggcgagggcggggccgtgggccggaagcgcaaaacgcggtgggccgaggaggagccgcgcccagccatcgcgctgccggacttcatgaaggacttcgcggccgagatggaccccgaggtgcacgctctcaacgcgcgcctcctcgacatctcgcgcctgctgcagtcgggcctcccgctcgacgaccggcccgagggcgcgcgctctccgtcccccgagcccgtctacgacaacttcggcatccgcataaacacccgcgaataccgcgccagggagcgcctcaaccgcgagaggcaggatattatctcgcagctcatccgccgcaaccccgccttcaagcccccctccgactaccgcccacccaagctccagaagaaactctacatccccatgaaggaataccccggctacaactttatcggcctcatcattggccctcgtggcaacacgcagaagcgtatggagaaggagactggtgccaagattgtcattagggggaagggtagtgtcaaggaagggaagtttctgcagaagagggacctcaagccggatcccagtgagaacgaagatctccacgtgcttgttgaggcagagacgcaggaggcactcgatgcggctgctggtatggtggagaagctgctcaccccggtggatgaggtgctcaatgagcacaagcggcagcagctccgggagcttgccgctcttaatggaacaattagggacgacgagttttgtagaacatgtggtgaggctggtcacaggcagtatgcttgccctaacaagatgaacacgtttaagagtgatgtgcagtgcaagatctgtggggatggtgggcacccgactattgattgtccagtcaagggcacttctggtaagaagatggatgatgaataccagaacttcctggctgagcttggtggcggcagtgcacctgagtccatgaacaaatctggtggtccaatgttggctcttacaggaagtggtggtagcggtggtgcttctgctggaacggggagtaacccgccttggtcagccggtggtggtgctgctgtcattgggctcaatggtatcaagaaagactatgacgagacaaatctgtatatcggctacctgccacctacaatggatgatgatggattagtcagtctgttttcgcaatttggggatattgtcatggctaaggtgatcaaggatcgaaacaccggacagagcaaaggatatggatttgtcaagtattcagacgtgtcagaggccaatgcagcgattgctgcaatgaacggtcaccatcttgaaggtagagttattgcggttagagttgctggaaagccaccacagccggcaccagcagtgtcagcacccccatcgtatcctcctacggatcctacttcaggtggatattcctcccaatcctacatgggggtaccaccaccacctcctccagggagttacgctccagttccttggggacagccaccaccgtatgcttcatatcctccgccaccaccaggctctagcatctacaatcctgcaccccctgcacctggccatgctgccccacctccatatggggtgcagtatccaccacccccagcagctcccatccctccaccaggcactacatcaagtgatggagctcagaactacccccccggtgtaacaccaccaagttctggtacacccactcaccctgttgcaacatcagtatatgcatcatctggcgcaccaaatgcaccattgatgtaccctccaccaccttatagttattccccatactatcctcctccaccatttcagccaccacctccaccaccactggctagtgttgatccctctcagagtattgcaactgcaccttgggctacccacagtgcagtgcctccaccaccaccaccacctttgtcctccacaaccgaccagcctactgctccctatggtgccgatgcagaatatgacaagtttatggcagatatgaagtgatataagcgaagttgggtgattcttccaatgaagggcaaaaggcttgatctttcttggagcttataccaacctgatttatttcttgttggaagtttgggactcacatcttaaccttgctgtgtgctgttgtaaaccattgcagaggttgcatgcttaagaaggcatcaagtgttactggctcagctggcatcgaaatatttgcttatgtccttgaactattttaaagaaccttttactaatgcttttgttttgatatctattcttgttattatttgagattatcctgttatgtcactttaatgctctgttcttcgtgacagtgtgttaaccctcactattattcatattttgttcttcatcttgatttggtagtgctagcagtccttttgatctggaacagaaaagcttgctgcaccatgctggttggtataacaccaaaattaaaatgcatgtttggtatcttctgatgaatctgtcatgcttttctatcttatgacttcacctaagttgtttggcagttgttgtgacagcttggcacaggcaatagcacttgatgaatatcaggtatactgaggtgctaattattgtgtggacctaatgtttttcattttggtttctgcacaattttcaactgacagacagtaactagtttctcatttttggtagttgatgtttgtgcattagagtatctaagcatgcacgtaatgctgaaaaaaaatctttgatgaagagcttacaaatatattttatgttgctaatgctcttttgacatcattggaatttttgtttgcggttcaagtaggacatgctggcatgcagatctagtctggagtcctgtgcgcaagacacttgtcacaatgatatttgtgagatggtctgaaggtttggagtgggaatggacatgttgaaagggtgtggtcccttcgcagaagaggtgtggcccttcggtaagtaaccaccgatgacagttatggtcaccaataatgattttcaacactccccttaatcaactccataattccttcaaaaatcctgtggaaaaaatgagcaatgtataattcgatgtcactaaaactcctttaaacatgtaaaccctaatatgagattctcaag

SEQ ID NO: 20559 - DNA, 311 bp, Zea Mays
gcacaccgaacctttcgcctctcttccccaccctcataccaggcggctgcaagatccggtgacctccacacgacagtttcatcattagaccaagatgcctccacggaagagatccacacggctcacccaaaaattcgaagaaattgacacaagatatgaagcgccaaatgaggtatagactgaaacagaactacagaagtacttcaatgggatatctgcaaatcaagtgtggactacatcgcctatttcaagcatgtctgacaatgactggagaaagttggtggagaagttgtctaccccaaatcacaaga

SEQ ID NO: 20560 - DNA, 1413 bp, Zea Mays
agatggtgctcctattctctctgttgaacaatttgtcaaaatattatcgccatctatgtctgatctcatcctccttcaagaggcgaggagctattgtcacaacattcattgtttgctatgctcttacttcattcatctctggatatgtcagtggtgcattatactcacgtcatggaggtatgggcttatttatcatgtaaaattgaactgtatacctatagttctataaggtgctcagttgttttaaatccttttggaggaggagcagggaaaaactggatcaaggcaatggccatgacagcatcacttttcccatttatgtgctttggaattggcctggtgcttaacactattgctattttctatggatcgttagctgccataccatttggtacgatggtggttgttttcatcctgtgggccttcatctctttccctcttgcacttttgggaactgttgttggtagaaattggagtggtgctccaaacaatccctgtagggtgaagactattcctcgccctattcctgagaagaaatggtacctcacaccatctgtcattgcgcttatgggaggactgcttccttttggtagtatctttattgagatgtactttgtcttcacatcgttctggaactataaggtctactatgtttatgggttcatgttgctggtctttctgatactcatcattgtcaccatatgtgtaacaattgtcggtacatatttcttgctaaatgcggagaactaccactggcaatggacttcattcttctctgctgcttccactgcggtgtatgtttacctctactccatatattattaccacatgaagaccaagatgtctggattcttccagaccagcttctatttcggctacactctaatgttctgcctaggcttaggaacactatgcggtgccgtcgggtatcttggatcgacattgtttgtgaggaggatctacaggaacataaagtgtgactaagtgaagataatatcgccccattttgggtcagcgcagagaaaatgtatggcagagccttatttgattgagcgatcactgattctaaaaccaagaacgcaggtcattttgtgaaatatgatcgttgcttggcgccgagctgaaagccatgtttttctattcttgtcctcgtttctctctgatttcttctggacttggacaggcaacaaattttcatgttgaattagttatatatatagcggtggttgtagttgttgagtagttctgtagtatataccacaattgttatccttggccccaatgatacctcagattgatgggtataaactgtaacatttacattacctgatgtttgacgatgaacacagttccaaataatcatgttcggtactggaggatcgagatttttgagaggcaacatcaaagaaaaaa

SEQ ID NO: 20561 - DNA, 2094 bp, Zea Mays
gcgcagtagcagtgtagcacccccacaattccagctcacgctgcactcctccatcccagtcgacctgttcccaacttcccatcccctcggcaccggcccgactaccggagcctcttgccgcatttttcagactgtcctgtttcgtgacgtcccaggattctaggagaagagaacaccctcgcccccctggggcatagtcgctgccgagccagtggtactggccgcgacggagcggtcagaagctgcggcggccggcgcggtttcggtttcggtttcctggctggcccgaggagtttgactcctctcctgatttgtgaaagtggagaaataagatacacagtggaagatgagatcagttgttcggtcacttcgccagcttcgccgtttcactcagcaccatgcagaggggcactcacaagcaaccagattgttcgggcagcagaacgctttaatcatgtgcggttcgacatctggttcactgagcacgttacgttgtaatggtgaaattagcagatttgcaagccctggcgtcgagttgatgaggtccatgttctctactgtagtgactgatccgatcaaagatattggaagaggtggtccaatggtggaatatgagaggagaatagcatcaggagagctagtagacggtgatagctttcaggttgatacaattcaacaattacaaaggctctatgaggagttgattgagaatgaagaagactgtcagctggatagatataaatcatctgagaaatcaggccggagtcgatggctatggtcccgcctcattactcagccttctacgtatgctcctattaagggcctttacctctatggtggtgttggtacagggaagacaatgcttatggacttgttctatgaacagctgccatttaattggagaaaaaaacgtattcactttcatgatttcatgctgaatgtacatagtcgtcttcagatgcacaaaggtgtttcagatccccttgatgttgtagcagctgagatttcagatgaggccatcatattatgtcttgatgagtttatggtaactgatgttgctgatgctatgattctgaaccgtctgttcagacaattgttcagcaaaggcgttattcttgtttcgacttctaaccgtgctccagataagctttatgaaggtggcttacaacgggaccttttcttgccatttattgacaccttgaaagaaagatgcatcgtgcatgccattggatctgcggtggactatcgtcaactgggttctgctgaacaaggtttctattttgtcggaaaacattacagtacgcttctgaaacagaagctccagtctttaattggagatgagaaacccagcccacaaactgttgaagtaattatgggaaggaaattacaggttcccctaggagcaaatggttgtgcatattttccttttgaagacctttgtgataaacctttaggtgcagcagattactttggactctttaaaaaatttcacaccctggcacttgatggtattccaaagcttgggtctagtaacagaacagcagcttatcggttcgtcacactgattgatgttatgtacgagaacaaggcaaggctgttatgtacagccgaggctggaccagtaggactgttcgagaatatcgtgactgttgctgaagcacggaaggtttcaccaagatcttcacgctcacagaaaagcgacgacactgacctatgcgtggacaatgagcttggatttgccaaggatcgtacgattagcaggttgacagagatcaacagcagagaatatttggaggacttcgaaatgagattgaggcaacagcagcagctgcccttgcaaggtctagataaaaggtggtgatgctgtactaaacataagaagcagaaggcttctgcgcctcatcttgaaattcttgtattcacacccacctggcttacataggcaactgagaagctatgcttttccaacagtggtgcatgtaaatgtccaataaagctatgtaagggcatttttgctaacaggtgagtgatctataaaatggcccaacctgggggaggggggataccatatcgttttttttagtgtaaataaaa

SEQ ID NO: 20562 - DNA, 1259 bp, Zea Mays
ggccagcgtgcacctgccctagccgcgttgctgggaagtctggaacaaggaagcagccgtccccgtccagccttccgccccgcacgccgcaagccgtgctcctgccttcctacccgtcgcgcgcatcgccgattcaccggtgcccgtcgctcgcagacctctccctcgcccctcgcccagcttgtcggaggccgaaattgatttgctctgtccagctctgggctctgctgctttggcctccaagcgcgccatgtgtttctatcgacaataaaattcacaatgtgcttgcccctagcagcttgccggagcttgcaactgttctgctctaaaccagtgaaacgtgaagactgaacctgcttctgcttggctgcttgctccaattcaagaatcctctcttctcggcttacttcatttactcttgcttgttctattccttgttaactgactgctgtaatacagatcaattacattgaattttaccatggcagctgaggaagatgtcaagcagaggcagatcattgaaaatcgtgccagaaatataagccacaatgttaggtgcactgagtgtggtagccaatcgattgaagattcacaggctgatgttgctattctccttaggaagctcattcgtgatgaaataaaagcaggaaagagtgataaagagatctacaagaaactagaggatgattatggggagacagtactatatgcccctaaatttgatcttcagactgctgggatttggctttcgcctgtcattgttggtggtatagcagctggaatctgggcttaccaaaggcataggcaaaggacaaatgttcacattatggctctgaacctggtccgaggggtaccactgactccaagggagaaggagaccatgctagacatccttacacctccaccggctccaaggaaatggtggtggccaggcaaatgatgtagaattcatgtgctggacctggtagatgctcacaaatggttaggatgcaaattacagtttggatgcatgatactttgatcgtgactttcagtttaaccaaaagcctgttcatttggctataattcatacaggcttctactagctcaatagtgttttgtctctatggattgtagctgcagcagctcaaacagttggctttaatccgaagcgaacaactagaagtcaaaactttgtaatgtgtactctatcatcgaactagttgtatgtcacacccgattttggaaggcaaaccgaatgcgaaccatgtatgtgtcag

SEQ ID NO: 20563 - DNA, 1860 bp, Zea Mays
caacctcttctctccatccatctctgccctgtgcactcctcgcgtgaggcagcatgtccgcagctgctctgtctcccgtcctctcgttctcacgcagtagaagatgtctctctccctcttctctgacgtcgctgattattattggttttgttgcaaaatggatacagaagcgactttaaacaagtctggtggttctgaatctgtaatgtcattactggaacagcttgctgaagtatttggaaacttgaaatcccacaccgaagcatttctgcaattgcagaatggtatgcaatgggaagatatcaaagggcatttcctcagccttgataagtcgtatggaagcaagtttgatgaattggtagagaagcagaaggcattagaagaaaagaaagctgaagcttgtaggttgattgcagagaaagaggctgatatttctataaaagagcgtgcctccctgaatcagcttcaggagctaagggatgctgctgtctcttctctagcagaggttcggcaaaaatataaggtggagcttgctgagatactcgataccagtgaaagcaaatacaaaaaggtatcattgaggagttggttaagaggcacaggcaaattgatgcagttcatttcatacaagctttcgggctttcagagacattcccccctgcaccactgctgaagacctatattgaggagtttaaggatacaattgaaaataatggggatgcaactgtgtccctgttaaaggacgacccaaaatctagggagctactcactttgagggctgtgataaagtgtatcgaggagtacaagcttcagaaggagtattcacttggacctctccaaaagcgtgtttctgagctaaagcctaagggtgagaaaaggccatcaactgatgctggtgggcgtacttatgcaaagaagcctcgaggccctggcatttcatttaccaggagacctggcggttccattggttcagctgctcgcaggcctccatttccgggctatagctggcagcgtgctcctgcgccaatgccttcccatggtcctgcaccaatgccctcccgtgcccctcttcctgatggatatggagctgctgaccggtaccattacacgccaccagccccagcatatgatgcaggcgcattttcttcttacggtgagccgttcagcaccccaaaaccattccagtatgccccagggtcagtggcagcatcgtacaactcgagtccctataaaatcgcgtatggtggcccgggagcgccagctgcaagcgcatatgcaggttattccggtggggcccaagcaccagctgcaagcgcctatacaggttattccggcgggtccggtccggcagcttctagcagctatgcaaactatctgggatccgtctattgccctccccagcaaccatagattcgcttcatctctctcagaaatgttgtgctggttataaggtgtgttgtgctggtgataaggtgtaactttactctcttttctttttgactcatccacagcactgggttttgggttttggaggtgtaactgatgtagtccagtttctttggaagctgtgtgaggcgccggtcaaaatatgagtgttctcatgtgcactcgtatttacctttagctgtgcttattccttaggatgtttatatctttctgtcaacaagtctgtcttatgtaggaaagtctgtcccatgtactccaggaacatgtaacttttttacttgctaatgttgtgattgagctggaaaagccaaaaagtgtcaaacttgcgaagcttgcgcatctgacgatcttaagcaaataatattctctactttcagttgacatggcttgtacagttgtacttgcaggtctggc

SEQ ID NO: 20564 - DNA, 971 bp, Zea Mays
gctacctcctccactagaatcttgctgaatggtgttcctggggagatcattgcgcaccaaaggggtctaagactgcagatcaattttttgcatttaaggttcctatgcgagatggagaattaaatagtctatgccgtggtcttgacaaggcattccaagtttatacacagctggttactgcacccctagttgataaagaagatttagctccgcctattcctgttcttactcgatataaaaaggagcttggaatcaaggcttttgtaaaaaaagaggtccaagaagttagaacagttgatgagaggaaagctagcgaaattactcagcttacaatgccaaagctttgtgttcgtcttaacagtctatatgacgaaaaagtgaaaagtcaaagagtgccgtccctaatcagaagaatcaatttgatggcagcagaaaagaaatcaatactgctattgatcgtctctgtgaatttactgggacaaaggttatattctgggacctgcagcagccatttgttgagaatttatacagaaatggtgttgctcaagctcgattggacaccataactgaagtgcttgatttggtccttaatcaactttgtgatgtcattgtggaacaactgagggatcgtgtggttacagggcttctgcaagcatgcctggatggcttccttcgtgtgatactggatggaggttctacacgtgtcttctctccaaatgatgcagctttattggaggaagatcttgaaaccctgaaggaattttttgtttctggtggagatggactgcctcgtggaactgttgaaaacttagtctcgcgtgtacgtcctgtaataaatctgatcaagcaagagacccgcgtgctcattgatgacctacgagaagttactcaaggtggcaagagcaaatttggagcggactccaaaaccctccttagggtcctgtgtcacagaaatgattcagaggcatcac

SEQ ID NO: 20565 - DNA, 142 bp, Zea Mays
cagttatcttgactgcgtcagcacgcgactgtggtcgtgttcatcgaatttgccaacgctctgttgccgattctactatcgtcgccagtgatagcttcgcgtgttgtcgagccagtcgtttcccctgtcctgtgctcgcgca

SEQ ID NO: 20566 - DNA, 439 bp, Zea Mays
attttcatcacatggtcactttaattgggacttctgtagcaaatgcttcgattgatcctgctcaatctttacatggcagcaatctttcaccaccaacagtactacagtttgggaagacaaggaagctatctgagagatctgaccctagaaatcggcaactcctgcaaaaacgacagttcttccattctcacagggcgcagccaatgcaactggagcaagtgttctcggaccgtgatagtgaagatgaagttgatgatgatattgctgacttcgaggatagaagaatgcttgatgattttgttgatgttacgaaagatgaaaaacttattatgcatatgtggaattcatttgttcgaaaacaaagatggtgctatgtcacaatacacaagggtggcatgacaagatgagcagtggtggtccactcgcaaagaagatggcg

SEQ ID NO: 20567 - DNA, 540 bp, Zea Mays
gccctagggcgtggaccgtccggccgtcaggcagggaacccgagctcctgcaccaggtcgcggaccgtccggcccttcgcggacaggaggaagaggaagaagaagcggcagcgagcgaggatgccgtgcctgaacgtgtcgaccaacgtgaacctggagggggtggacacctccgccatcctcgccgaagcctccaagtccgtcgccaacatcatcggcaagcccgaggcctacgtgatggttgttctcaagggttcggtgcctatggcatttggaggtacccaggagccagcagcttacggtgagctggtttccatcggaggcctgaaccctgatgtgaacaagaagcttagtgctggcgtgtcagagtgcttgcttcctacctagcatagcatgcctgtgctatcttgttattggtattggcttgatatcagtctatattatcatttattatggttggtccttcgggtttggtaactgaaccaacaaaaaaaaactgattttagtgctggtttttttttttggcaagaagaaaacgtg

SEQ ID NO: 20568 - DNA, 139 bp, Zea Mays
tgcggttatgagtacgaccgggcgtggacggaattcggtcctccggattttcaagggccgccgggggcgcacaggacaccgcgcgatgtgcggtgctcttccggccgctggaccctacctccggctgaaccgattccag

SEQ ID NO: 20569 - DNA, 773 bp, Zea Mays
tcaccaccccctaaaaaggcttcaccccctaggtcaagctacattccgtgctattcaaaggccccaaggatgacgcaatggcaatgactatctaccaatggacatcgtggagctatcttccgatcatttgatagagaataaacctttgctgctaaaggatgtcaagttctaaaacgtacacgggcttaccagtgcttatggacctttgtttgttcgggacactacctttgctaatggggaacaggcaaggggaaaatcttcttatagatctgttccgtcactgtgacaatcatttgggagagaaacaaaaaactccatctggaagtgcacgacagccactacagttgactaacgatgtaaccaagatgatgcaaaagcatcagctagaaacgccacagttccatcagacccgattttccgttttacagaatgtaccgaggagcacagagaaagatgtctcctttttaattcctcattcttggctgcctgctatgttagatgatcagatgtcatttccatccttaagacaaacaagaactacaggctgcttccgtcttcacccaatcagggatgaggatgccaagttcaagctctgcaacaggaggtctgttcagtttgacgtcggcaacatggtcatggtgaccggcgggaggaacactgggcgtgtaggagtgatcaagaactgggagaagcacaagggcatcttcgaggaaaacatagaatggaattcaaatttggtggtcgtaaaagtgtggagacttgaattcaaataa

SEQ ID NO: 20570 - DNA, 960 bp, Zea Mays
tttcctgtcaactctactatgcatgtgaacacaggtgtatgatctggccacgatctaatgtgttgtgctgttttcatacctataccaaactggtactctatttacccaagcaaaagaatgcagaaccaacaatttcaaagtgcagcacaatcctctttgtatatgtaagagctagatcatttaaatgtaagagacaaagttgttctccatgtcaaagaatggaaaaagtttagaaaatgttgtaagccgcatctcaggagtcatcgaggaataatatagcaaagcagaaaaataaataaataaaaacatgtatatgtaatcccactgtgcaaattcaatggcaggtattgtcagccttcaacccagctaataaaccattaggagagattcacttcatgggagcatgaaaattgtggcatataaacttatttaaattgcagatgccacacttaacattttctcggcacttgtaaaggcgtcttagtaggataacacctctgtttttttactaatggcaactggtctcaagaaagcacttgcaccatagatcgaatcactgaaatagaagtggctccctgccgacctttatatgcagaggttagcttcccacgcaaatgacatgaaaccttcagataacatattgctcctaatatttggttcttccttgctaaatactgtctcaaaagaactttttatatccagtggggaacattttataaccagaaaatacggaccgcttcaagtagcaaggaatctaaactgatttttagttctactccaatcacaaacataagtctaactaattcttacttctccaatcgcaaacataagtctactatctatgtaaactaaccatggtacatgatatcacaatttttcaaaacaaaagacttatcttaggctacatgggcaaggacctttatatgcagtacccactaacaaaaaaattaaaacccaaac

SEQ ID NO: 20571 - DNA, 4445 bp, Zea Mays
attcctttcccaccgctccttcgctttcccttcctcgcccgccgtaataaatagacaccccctccacaccctctttccccaacctcgtgttgttcggagcgcacacacacacaaccagatctcccccaaatccacccgtcggcacctccgcttcaagatgcagatctttgtgaaaaccctgactggcaagactatcaccctcgaggtggagtcgtctgacaccattgacaacgttaaggccaagatccaggacaaggagggcatccccccagaccagcagcggctcatctttgctggcaaacagcttgaggacgggcgcacgcttgctgactacaacatccagaaggagagcaccctccaccttgtgctccgtctcaggggaggcatgcagatctttgtgaaaaccctgaccggcaagactatcaccctcgaggtggagtcctctgacaccattgacaacgtcaaggccaagatccaggacaaggagggcatccctccagaccagcagcggctcatctttgctgggaagcagcttgaggacgggcgcacgcttgccgactacaacatccagaaggagagcaccctccacttggtgctgcgcctcaggggaggcatgcagatcttcgtgaagaccctgaccggcaagactatcaccctcgaggtggagtcttcagacaccatcgacaacgtcaaggccaagatccaggacaaggagggcattcccccagaccagcagcggctcatctttgctggaaagcagcttgaggacgggcgcacgcttgccgactacaacatccagaaggagagcaccctccacttggtgctgcgcctcaggggaggcatgcagatcttcgtgaagaccctgaccggcaagactatcaccctcgaggtggagtcttcagacaccatcgacaatgtcaaggccaagatccaggacaaggagggcatcccaccggaccagcagcgtttgatcttcgctggcaagcagctggaggatggccgcacccttgcggattacaacatccagaaggagagcaccctccacctggtgctccgtctcaggggtggtatgcagatctttgtgaagacactcactggcaagacaatcacccttgaggtggagtcttcggataccattgacaatgtcaaggccaagatccaggacaaggagggcatcccacccgaccagcagcgcctcatcttcgccggcaagcagctggaggatggccgcaccctggcggattacaacatccagaaggagagcactctccacctggtgctccgcctcaggggtggcatgcagatttttgtgaagacattgactggcaagaccatcaccttggaggtggagagctctgacaccattgacaatgtgaaggccaagatccaggacaaggagggcattcccccagaccagcagcgtctgatctttgcgggcaagcagctggaggatggccgcactctcgcggactacaacatccagaaggagagcacccttcaccttgttctccgcctcagaggtggtatgcagatctttgtaaagaccctgactggaaaaaccataaccctggaggttgagagctcggacaccatcgacaatgtgaaggcgaagatccaggacaaggagggcatccccccggaccagcagcgtctgatcttcgccggcaaacagctggaggatggccgcaccctagcagactacaacatccaaaaggagagcaccctccaccttgtgctccgtctccgtggtggtcagtaagtcatgggtcgtttaagctgccgatgtgcctgcgtcgtctggtgccctctctccatatggaggttgtcaaagtatctgctgttcgtgtcatgagtcgtgtcagtgttggtttaataatggaccggttgtgttgtgtgtgcgtactacccagaactatgacaaatcatgaataagtttgatgtttgaaattaaagcctgtgctcattatgttctgtctttcaaaaaaaaaaggacggctccgcccaagggtcggaagggagggagttgccgcgccgcggccggttcgatcctttgcgcgagatcgagcttctccggttggtgttggggctggcgacatctgggatccgtcgtctctcctcgtgttcttgagcagttttccacttgcctggcaaaagaacatttgacttggaagagcaaacactggaagctttgtggtttgtcctaagtgatcctatcaagttctcataggctgcatactggtacagcattttctcctgtgttttgggccacagaagaggggggagccaaggatttttctatctcagatctacataatggacgagaggaggactattttgatggaccgttacgaaatcgggaggcagttaggccaaggaaacttcgccaaggtatactttgctcggaacctgaccgacgggcagtccgttgcgataaagatgatcgataaggacaagatcacgagggttgggctaatagtgcagataaagagggagatctctataatgaggctggtgaagcatccgaatgtcctgcagctcttcgaggtaatggctagcaagagcaagatctacttcgtattggagtacgctaaaggcggcgagctgttcaacaaagtatcaaaggcgaagctcagcgaggatgccgcgaggaggtatttccaccagctggttaatgccgtggactactgccacagccgaggcgtctaccatcgcgacttgaagccggaaaacctactcctggacgagaacgagaaccttagagtctcggacttcggtctgagcgccctgtctgaatccagaaggcacgacggcctcctacataccacgtgtggaacccctgcctatgttgctcctgaagtgcttggtaggagaggctacgatggcaccaaggcggacatatggtcctgcggagtgattctcttcgtgctcgtggctggttacctgccgttccacgacccgaatctcatcgagatgtacaggaagatctccagagctgaatacagatgccctcgctccttctccggtgagctgaaggacctgcttttcagaatgctcgatccagatcccagtaccaggatatccatttcaaggatcaagagaagcacttggtacagaaaacctatcgaggcaaacgcggcaaagatcaagcacggcacagcaagagacaccaccgtgcgcgacggtgaagccgccacggcctcgagctcgatagagtgcagtaaccggccagaggaagaccaagggtcgtcaagcctccctaacctgaacgcattcgacatcatttctctctcgaccgggtttgacctatctaacctgttcgaagaaagacacgggcggagggaggagaggttcaccaccaggcagccagtgggagcggtgtttggtaggctgaaggagctggctgagcggttgaagctgaaaatccagaagaaggagagcggggtcttgaaactggctgcgcagaaggaagggatgaaggggttcctggagctcgacgccgaggttttcgagcttgccccttcgttccttctggtcgagctgaagaaggccagcggtgacaccattgagtaccaaaggctcgtgagggaagaagtgcggcctgcgctgaaggatatggtctgggcttggcagagcgaccggcaccagcagcagcagcagcggtgcgagcagtctgtgcaaggagaggaccagcagcagccgttgtcgtctttgccgacgcagcagtagtcactgcaccaccagttgcgaccgccataaccagatcacgtcaaaactgcaccaagccgcacaggactagtaactcccacttgcatcgacgcttatgtgattgcggaattgtgtttcaggttacctgcctgctgcggtaggacctaaaacgcctacctgcctaccatttggcatttttttgtatactgtacgtacattagagtaataaacaaacatgcttaacttttcagctttcgattggaatgtgcttttcgatgtaactctgtaaccagtgtaggtacgaagtcgattagccacagggtctggccatgttgacctcacgtagccctggttcattggtgtaacagtttgttggctgcggctttacattattttgtctctatggattacggctgcgactatgtgtagctgaacaagctggtatatgatgagccctggaaacgtgtgtttactgcagctatttgcagccagtgactgttgatacaaacgacgaagtagagttggttgtttatgtaggcacgcagcatgaccataattatccatgaatcatggatagatgcacaatgtttaggaaacaggtgtgtgtggctggctggtggtgcgagaagagatgcgctgccttgatgtactgtactgggactgggagggatgcgtctcgcagtacagtctgtactatcatctctacacgcacgcacgcaggctcgacgtgtcggcggcgg

SEQ ID NO: 20572 - DNA, 2837 bp, Zea Mays
attagatctcacgatggactatatctggagtttttctataataaaacgaaaaggctaagagtgggaagagtttttctaaaacaattgtgcactgttagatctgattttaaagccaggattttaggccagccctcatatgcagctgataggatcccttaaatgtcggtgacagtcggttctcactcatttcacctgtggctgtgcaaggtccgttggaatgaggcacgaggggcccgggctgtcaattaggcatgatgctgcgggctccatggcaggagctatcttcatgtccaacagcgtcacaagggaccaatgcttccaagcaagcattttcggtctacccttggagtatcgatcctttgtcagccacatcagaaaagggatgcccttgtttctctttgactatacactgcgtaagctttacggagtctttgaggctgcctctgatggagggtttaatattaacagtgacgcacttagatcagttcggcgctcatatccttcgcaggttcgcatcaatattatttggaagtgcaagccactaagtgaggatgagttttttcctgctatagaagacaactactatcggccaaggaagttctactttgacctttcctatgagcaggttgttcggctttatgaactgtttggcaacaagagagtaggacgccctattcatgactatcaaaaaaatgagtgtttgcaaacaaaccgctcaagcaaagggatacctgacaaagaaagcttgactccagatcctcattccagtaatcaatcacgccttttggttcccaacatttccgaaatcataagatattctactcctacaagcatacacacagatttaccacttaatgttgaggcatacccaagcacgttgatgcccttgggaactgaagttaatggagccaaaattgctcccaccttcagctcccatagtgaccaaatagaacctttttctcaaagtgagtttttcccagctgcttcaatgacagatgctgtttcaactcaagtatctgccccttgctctgaaactaataaccagttggttgggcaatcacatccattaccgcacaactatccacagaatattttttctgctggatttacagcccaggacccaattgaaggatctaaatttgttgcaaaccaattgtattcattatgtcgtgattatatgcacgatggcttgttaacttctggatatggaactcaaaatcgaacttacaaagggatgaatcacttgaattcaacttgtcctccatatgacccattacatccttttttgccagtgtcaaataatttcgattatcaggctcaatgtgacatctattccaaccaaggctgccctgatacatgtaatgacatatgtgcatatgagtgtgagtgtttaagtgaagaagtggtagcagcggaggaactgaaccaacgaggtatttctacatgcccacaagttcttggatgggatgggaaagcagtatcagcaattcatcaacagaatatgtgttctactgattactttcagatttctgatcgtgatgaagactctgaaaatgatcagatgaaacatggtactcatagcaatgcttcagattcatcagatcgtgaaaatggtattgttgatccacgacatacacaacatgctgtaggaactgaaaacaacacaaaggatcagtgtagccagccaaaaaaaggtgtattttctcgcttatcagtgaggaaggaactgacttctcaagatgccactggttctacactcaaccaattggtttcttctcttgttcggaagacagaacagtggagccacaacaatagaccgattgaagatggtctcattattcctttgattggggagcaggctgactgttctcatgcagcgctgaacctgctgagtgaactagagctggataaagacgtgagcatagagccacaacttcccttcttgaacttcaagagacgcagtgaagcagggaaggtggatgcaaatttaggaaaggagatcagtgggaaaatgaagagaagaaagcttgtgcgtccttccttaggagaaaacaatgattctacaaattttggagagcagcttataggaaattgcacacaagacaagaatcaaaaccatcaggaaagtgaaaaccattttgacattgacctaaacatacctgcagcaccaatagacgacggcccagtggaggttaacagaattgcagtgtgtcctagtgttgttatcaaggtacaaacagagaaaccatatgaaatagatacaaacaaggtaaactcaaatgtgatggagacaactgaagaacatgatccatccagtgcacccacacaaaaggttatccctgattttaacatggcagacttgaacacaatggatgaatctaaacttcgcacaatcctcgagcatacatcatcattgttgcaagcacttgctgaagtaaaaaatggggagtccaacaactgtgaacaggctaagtcaagctttgaagataagaaagtaaacatggcatactctgacggggccaccaaatctgagtgcgattagcagtagctgcaaagatattgatgtttatacgctaaactggtgcccgtcagtgcatgcagtggctttatccttaatcatagtaatattttttttgggttttttttggggtgcgggtgggagtgggattggggttttatcttctggaagagggaagagtgactatccccactcgttggaacctgaaagactagccatggaaccatgatccgtctaatgcgaagatgttctttaaattttgttcatatactcttgttactgcaattttagcgacaagaaattattgaattttctgcca

SEQ ID NO: 20573 - DNA, 636 bp, Zea Mays
atgtggtctcctcaagcaagctttgaggaggtggatgtggcatggcggcactatgagcaggccggtactggattagctgctatattcataaacctggctgttgagaacttctctggatggaaatatactgcgacatttgctataataaagcactcgtattttgtgggattctttgtgtacacagttttcaatttagccctggtcttctcttctgtatatatagtcacaaactttgctccagcagctgctggatctggtattccagagatcaaaggttacttaaatggagtggatacacatggaatcctccttttcaggacattagttgggaagatctttgggagcattggatcagttggaggtggattggctctagggaaagaagggcctcttgttcatactggggcctgcattgcttcgcttcttggacaaggtggatctgcaaagtaccacttgagttctaggtgggtacggatttttgaaagcgatcgtgataggcgagaccttgtgacatgtggatgtgcagctggagttgctgctgccttcagagctcctgttggtggggtactatttgccttggaggaagttacttcctgttattcctttagctgctggcaacaaattcttcagtactaa

SEQ ID NO: 20574 - DNA, 5143 bp, Zea Mays
gcccgctacagtgccctccatgcaaaatacagcgctcaagacaacagcagcgaatgccaatgccaattaataactagctactgtctcgtccgtccaggaaataggccggagaaggagacgcctcggcctctcattgctgggtgcgctccatgttagcggccgtaatggctgatagcggcgatgcggccatggccgttgttcttggctggtcgtcatcttggatctgcggggaagaggacggcgggcggctcaccctcaccgtcgcgtccaagtgcgtgcagaggacactcatagactgcgtcaatgtggtcctgttcatcgcgtacgtctgcacgctggctgccgcctgcgtcaggcggcggcagcgctctgcagatgcgagcagcgggaggagcggcgctcctagtaggtgggtgctgctcgtcgtctccacgtgctgcgtggcagctgccgtggcctactgtgtcacggctctccaagacgcctacgacatcaagacggcggttccttacttcgtcaggggcctggtctggatcgcgctggcggcctcgctgcacgcccagccgacgaggccggcgagggtcgtggccgtgctctggtgggtgctcttgtcgctgctggccaccgcgtacaattcggagatccttgccggggggcacagcctggacctcgcggagatgattgcgtggccggtgagcctcctcctgctgctctgcgccctcggctccctgctgccgcggggcgacgggcaccactaccgggacgcctccaacggcagcagcggcttgtcggagcctctgatcggcaatgacagaaccgtgccaacctcggagttgtaccgcgctggcctgttcggccagcttgccttctcgtggttgaaccctctgctccgtgtcggccgctccaaggcgctggacctcggcgacatcccgctcatcgccaccgacgacaccgcgcaccacacgtcgcagcagttcacggaggcctggagccgccacgtgagcgacaaagccaggagccgccggggcgtgggcagcaacagcctcgccctcgtcttgggcaagtgcttcctcagcgagatcctgctcaccggcttctacgccttcctgagaatgctgtccatagcagttgcccccctgctgctcttcgggttcgtgtggtacagcaaccaggaggaacgagacctccgggtcggcctgtcccttgtcggctgcctgctgctcgccaagctcgtggagtcgctgtcgcagcggcattggttcttcagctcgaggaggaccgggatgcgtatccggtcagcgctgatggcggtcatcttccagaagcagctcaggctgtccattcaggggaggaacaaccactccactggcgagattgtcaactacattgcggttgatgcgtaccggcttggcgacgccatcagctggctgcacatggggtggacctcgccacttcagctcgtctttgcagttgccacgctcttctgggcactcaagcttggggctcttcctggtctagtcccgctagtcatctttggtttcctcaacgtgccattcgcgaaaatgctgcaggggtaccaggccaagttcatggttgcacaggacgagaggctccggtccacgtcggagatactcaacagcatgaagatcatcaagctgcagtcgtgggaagacaagttccgcagcacgatcgagtcgctcagggacggcgagttcaaatggctgaggcagacccagatgaagaaggcctatggtgcagtcatgtactggatgtccccgacggtcgtctctgctgtcatgtacacagcaacggccatcatggggagtgctcccctgaatgctagcacgctcttcacggtcttggccaccctgagggtaatgtctgagccagtgaggatgcttccggaggtcctcacaatgatgatccagtacaaggtggcattagatcgaattgagaagttccttctcgaagacgagatcagagaggacgatgtgaaaagggtaccttcagatgactctggtgtcagagttcgagtccaagccggaaatttcagctggaaggcaagcggagctgatctgtcactgaggaatgttaaccttcgcgtgaaccgaggagagaaggtggccgtatgcggcccagttggctcagggaaatcttcactcctgtatgcattacttggggagataccaagattatcaggatcagttgaagtttttggttcagtagcatacgtttcacagagctcgtggatacagagtgggactgttcgtgacaacatactctttgggaagcctttcaacaaggaactgtatgataaggcgatcaaatcttgtgctctggacaaggatatcgaaaattttgaccatggagacctcacagagatcggtcagagaggactgaacatgagtggaggccagaagcaaaggattcagctggctcgagccgtctacagtgatgcagatgtttatctactggatgacccattcagtgcagttgatgcgcataccgctgcagtccttttctatgaatgtgtgatgacagcacttgcagagaagactgtcgtccttgtgacccaccaggttgaatttctgactgaaaccgataggattctggtaatggaaggtggtcaagttagtcaacaagggaaatattcagaactcctgggatctgggacagcatttgagaaactggtgtctgctcaccagtcttcgatcacagcattggataccagtgctagccaacagaaccaagttcaagggcaacaagagtctgatgaatacatagtgccaagtgcgcttcaggttataaggcaggccagcgacatcgacgtgaccgcaaagggcccttcagcagcaatacagcttacagaagaggaagagaagggcattggcgacctgggatggaagccatacaaagaatatataaatgtatccaagggggctttccaattctctggcatgtgtattgctcaagtgctcttcacgtgcttccagatcgcatccacatattggttggcagtggctgttcagatgggtaacgtcagtgctgcacttcttgttggggcatattctggactctctatcttcagctgcttctttgcctactttagaagctgttttgcggctattctgggtctcaaggcctccaaagcattctttggcgggctaatggactccgtattcaaggctcccatgtcattttttgactcaacaccagtgggaagaattttaacgagggcatcttcagatttgagcattctagacttcgacataccttactccatggcttttgtggcgacgggcggcattgaggttgttaccacagtactggtcatgggtactgtaacttggcaagtcctggttgtagcgatcccagttgctgtcaccatgatatatgttcagaggcactacgtttcctcagctagggagctagtaagactcaacggaacaacaaaggcacctgtaatgaactatgcatcagaatcaattctcggtgtggtgacgatcagggcatttgcagcaactgagaggtttatctacagcaacatgcagctcatcgacactgatgccacactgttcttccataccattgccgcacaagagtgggtactcataagagtagaggcactgcagtccttgacaataatcacagcagcattgttccttgttctggttcctccaggagcaatttctccgggctttgcaggactttgtctctcctatgctttgactttaacttcagcacaaatattcttgacaaggttctattcgtacttggaaaactacatcatctcggttgaacgaatcaagcagtatatgcacctcccagtggagccacctgccattataccagatagtagacctccaacttcgtggccgcaggagggaaggatagacctgcaagatttgaagataagataccgtccaaatgcgccgcttgtcctcaaaggaatcacttgcacttttgctgctgggaacaagattggggttgtagggaggacaggaagtggaaaatcaacacttatcagctcattgttccgtctcgttgatccggcgggtgggaggatacttattgacaagttggatatttgctccattggccttaaggatctaagaactaaactaagtattatccctcaagaacctacacttttcaggggaaccgtgcgcaacaatttggatccccttggccagcattctgatgaagagatatgggaggccttggagaagtgtcaactgaagacagcaatcagcaccacctctgctcttctggatacagttgtgagtgatgatggcgataactggagtgctggacagcgtcagctcttctgtcttggcagagttctcctacgcaggaacaaaattctagttctagacgaggcaacagcatccatcgactctgcaacagatgcaatcctgcagaaagtaatcaggcagcagttctcaagttgcacggttataaccatagctcacagggtaccaactgtgacagacagtgacaaggtcatggtcctgtcctacgggaagcttctagaatatgaaacaccagccaagctgttggaagacaaacaatcagcatttgctaaacttgtggctgagtattgggctaataccaagagaaattcaacatgatctaccattattgcaggacatgataaaagatatgatcattttaatcaagatatcgaaagattcaagggttctcaaattgaatctttaacaagacaaggaatgccatcatgattatttgattgatgtggttactgggagtgaataagatatcaacagaaattcaattttggtaatggaagcaatttttggagtgagggctgatgttcgagagaactccagctggttgattgaacatgtggtattcaatgcaaaatgaaatggaggatccacttctagcatgatcaatggcatttttcatacataagcctttttgaataagagaagcgaagtaccaagtcgtgaattgcaatgaagaatgagtaaagtgcagtgctgagaagaataattttcatgtatcttgtgtactcaataatgataaactttatatgactgagaaggaaactgtcgcaaattgtcaaagtgattattcaatagattagggctaacccaacaggttagctatatagtgtttt

SEQ ID NO: 20575 - DNA, 1837 bp, Zea Mays
aagggggagaagcacacaaacatgtagggtacgatttcattatggccatcctgatgtttttgatagactctttcatctgacaaggggtggcataagcaaggcatcaaagattatcaaccttagcgaagatatatttgcaggtggctgttctcacagtgtatgtatttttatatgggaggttataccttgttttgagtggcttagaaaagtcaatactgcaagatccaaatatccaaaacataaaaccatttgaaaatgcacttgccactcaatctgtattccaacttgggatgttgctcgttctcccaatgatgatggagattggccttgagaaaggatttggcagagcattggcagagtttgtaatcatgcaacttcagttagcttctgtattcttcacttttcatcttggaacaaagactcactactatggcaggacgatacttcatggtggagcaaagtatagagctactgggagagggtttgttgtgcgtcatgcaaagttcgctgagaattatcggatgtactcccggagtcactttgtcaaagcactggagctgcttattcttttggttgtctacctagcttatgggagttcatacagaagctcaagtttgtatttgtatgtcacagtttcgatatggttccttgttttctgttggctgtttgcaccttttgtcttcaacccatcctgctttgagtggcacaagactgttgatgactggaatgactggtggaagtggatgggcaatagaggtggtattggattagcgcctgaacaaagttgggaggcttggtgggtgagtgaacatgaccacctgaggaatgcaacaattcgaagcttgctcttggagttcatcctttccctgcggttcttgatctatcagtatggtattgtttaccacttgcacatagtgcatggcaacaaaagcttcttggtatatgcactgtcatggctggttatagcagttgctcttgtgtcactaaaggttgtttcaatggggagagagaagtttgttacaaggattcaactagtgttccgcatcctcaagggcattgtgttccttgtgctcattggtttgcttgtccttttatttgttggttttgaccttgctgtctcggatgttggcgccagtatcttggcattcattcccactggctggtttattcttctggttgcgcaattatgtggaccgctgtttcggaggttgatcatagagccacttcacttgctgtgttgcccatatggtaccggtggtgcatgcagaggtccctgctgtgccaggttcagacagaggaccggtgctgcgcttcggaagatgggaccatgggactccatccaggagatggcgaggatgtacgaatacaccatggggctcctcattttcctgcccattgccgtgctatcgtggttccccttcgtctctgaattccagacacggctgctcttcaaccaggccttcagcagggggctgcagatctctaggatcctcgcggggcagaatggtagcggcacaaagagcgactgatgctttgacattaacggagttatccattccgttgtgccatgtggtatctcgttgctattgtccgctaccgttatgtgtagaatcaagtatgttcatcgtttgaaaaagtgtcgcgcagtttgagtgtgtatgtcggattttaacctcttaattcagttcatattcattggttgtttccatttgatttgcacgtatacgttggaatctgtctgattttcggtgttaaaagtaagtgtttgtttttagctagaactttctctactcctttaaagcaccaattttatatgtcatgctttgcgtacgaagca

SEQ ID NO: 20576 - DNA, 953 bp, Zea Mays
gaaaccctagcgccattcttctattccactcgcttcccccagccgcacgaaaccctaacgccgccgccgcttcacaggtaaaccgccgccatggtctcgggttccggcgtatgcgcgaagcgcatcgtggtggacgcgcgccaccacatgctgggccgcttgtcgtcgattatcgccaaggaactgctcaatgggcagaaggtggtcgtcgtccgctgcgaggagatctgtatgtccggtgggctcgtacgccagaagatgaagtacctccgctttctccgcaagcggatgaacaccaagccatcccatgggcccatccacttccgcgccccgtccaagatcctgtggcgcaccatccgcgggtgtgatgattccgcacaagaccaagaggggggaggcggctctggcgaggctcaagacgtacgagggcgtcccgccgccgtacgacaagaccaagcgcctggtcatccctgacgctcttaaggtcctgaggctgcaacctggacacaagtactgcctccttggtgagctttctaaggaggtcggatggaactaccatgacaccatcagggagcttgaggagaagaggaaggagaaggccaaggtggcctatgagaggaggaagcagctggccaagctgcgcctaaaggctgaggctacagccgaggagaagttagggtcccagctggacattcttactccgatcaagtactgaatttgtggaacatctgatccatcgttttaaaattgtgacagtataatcttgagtgctattccgaacacattttttagccggtgaatgtattgtttgttttatcagatgtggttcgcattcacattcttagattttcgtagcactctttccaacgcaaccacatcatcttaagtgctataaaactatgaatgaaacaatgtctatcaattcaaaatttctcatttcacgtcattatttc

SEQ ID NO: 20577 - DNA, 1976 bp, Zea Mays
catgatctgggttttataggaggaagagaacgacaagaaaggaaacctcgtgcccccttttttgtcgattcaagattctggtggtgtggtcaaatgttgttcattagagggaaaaattggaagattggaagtcaatggatgcaaggctatgcaatctcttaagaagattttgcatccaaccagttcaagtaagatcaacacgatatcaacaagtgatatctccgcatcaactgatactctcctggattcctgtattgcccctcatcttttgaaagcttctgtcattagtaatgctgagattcttcaacctggtgctatactatccatgagcgaagtttgggagaaagatgtagccccaaatgctaatgaggcgtcatcagaagttgcaaatatattgccattgatgtggatgcaccctgggaaacatgatatactcctttctgactgtagggaactgtgggactccaggcaaaccataaatcctcctgtgtcagatgaggttctctgtaaggagaagcactctgaacgtataaagtttttctgcttggattcaggaaatgatcaagagcaaacaacacaagagaaggacaacttcattcgatcctgcccggttattcttttgaaacatgccagagaaggaataccttctctagggtggtccatcattctacctttgagttgggtgaaacctttctggctctttctagtatctcatggtgcccatgcaattggcttaagagagagacggtggattgcagcaaagttgagaatgccatgctttccttatgattatccagatagcaaagcgtatgcatcatacatgtccaaagaagctgctggttttgataaagtagttgagcgccgccctgttgccaagagaccaccaagagttcctgtgcctcctttatggcactgtatcatgacttgttttcgtaaagattatgatggcatattgggtgttcttgaagtagacgacttggtgcgggctaacatggtattacctaaaaactcttctgcacattgcgaatctggagacgcagaaccatcgcaagcaaatgttgcatccttgcaacttcatgtgccaagaaccacccaaatgttgagacagtatgtggaagaatttgataggaagtatctgagctcatcatctgacatgaaagtggattctgatgaacccaacctagcttctgataacactgtcggcatgacacggttcgcgagtgaattatgccttacaagggttctgatccgagctttcaaggaaggttcttttgaagagggtgcagttgtttgtgccccattacctgcagaactttcagcttggaaaatcagatcaaaggaagaagaggaagaatgcgtagaaaaatgggagctccagcttcctcagtcccatgttagttcctatttctcgtggtttgatcccagcacgagcagcctccagttgcctacggatggcgtcgcacgggaggcgttcaggtggccgataggctttgtcaccagtggtttcatccatggaagtaacgggcaagacgcagtggcggtcgcattctgcgaggcaaagcttctggcagcgttgaggcgacagcaatggacgcatggaaacttgcagagccgggaggtgtgcgtccttgtcaggaacgcgagatcggctgcctaccgacgagcgctggccaccaccgtcctggagcatcaggaatcagacctagcgtttctgtagtctagtcgggaacctgttgacgttgattttttctctctctctcccttttggagttccatccatcctccactcatccgttgatgaacctaagtaatttactggtgattacagtttatttgtgcgatgcaaaatcattaaacagaagaagtaaatgcatctatctcatttgacggatttcaatgatttactgttacatagtatgaataataataaagcagctcgtccggaaaaatgaatgagtagctgttgtttgaaggcc

SEQ ID NO: 20578 - DNA, 1055 bp, Zea Mays
ggaagatggctgctaccagcctcagctcctcgttgcccagggccactgcaaaagagtgccaagatcttcgtcgtactacacccagctgatcttttgctcgaggcatcctttccagaaggcggcggcagctgcagctttccagaagctcccacccgagctcctccggctaagctacccggcgaggaataataagcatgcaagaaccagctggcggcgggccacggacaacgaccaagcggcgccggccgcggcacaaggaactaccagcacccctcctctcccaggctctcccgttccgagcgccgagagatccccggtgacgcccggcaacggccagccgcagcagccggtcgccgacgccaacggcagcgcgccgagcgagccgccgaagcgggcgccgctgacggcgcgggagcggctgcgggcggcgcgcgtgctggggaagtacgcagagccgtcggtgaaagggtcttcgtcgaaaccggccaaaccggagttcgggagcggtgtgctggacgcgctgcgcgaggcggacgcgaagaaggccgggggcgggggcgggggcgggcggcgtgggtcgcgcctacccgaggcgccgggcaacctgttcgacgacagcaagcgcgggatgcccaaggacgggtggacgttcgagctgccgttcggggtggacgtcttcctcgtcctcgtctccttcacgctcatcaccaccatcatgttcggcaccgccttcctcgtgtggaagctcggcgccatacacttcaacgagtactagcctttagactgtctctacttgattggaggataaagggcgattatgcagtgctagacgagagaattgtgtgtattcgtaatgtactgtattgaccacagacactggtctgccgaagattttcgagaaaacatagaaatgtgtgattgcacgaaacaggtgtcatgttatatagaactaataaatgtggttatgaaatcttacaacaatgtggctgtagtttagtggtaagaattctacgttgtggccgtagagacctgggctcgaatcccagcagccacac

SEQ ID NO: 20579 - DNA, 3771 bp, Zea Mays
cggggaagggggaagagaggggacgaagagggagaaggaactgggacttgccgcccccgcctccgaattccccactcctccaccaccgccaccactcaccccttgctccgctcggcctcctgaatccggcgtcgtcaagcaaccccactccttctgccgttatcagaaccctaaccgatcaatccgtccgattcccagctgccggtttcgcgttgggagcgccggagcaggggaggggcggagggtcggatcggcagccgcaggagcattgagcgatggctgccgtgtaggatgcagctggactccgccggccgccgcctagctgctgctgttgttgctgaagttccgatgcttcagcaaccgcgatcttaataggagcggagggtggagtaccggtggagtgggccggacggctggttgatctccgtgagctccagcgcctacgcactgggaggtggggaggtgattgccggaggcgtatggaggaacctgggagggagggggattcccccgggccgccgtgggcgccaagtgagtcctcagctttccgggcgttcgttacggcggtgggggagcgggcggtggcgtcgccttcaggctcggacaatggggattccgtctgctcaagcaacctccgcgccgtcaggaagagaccttttgttgcaagattaaccacatatatcatccaaacttttgaaaaatgcaatcctgagtttaagtactcagagtcactaaaccccaagcgctttctcaccaatcccgcagttcctgttcacaaccatggtcttgacaatgcaaactctgatctcatattgtatgtcaacctggaactgcttaataaaaagtcaagccggaggtatgttgtccaagaaatgcttggccaaggtacctttggacaggttgcgaaatgctgggatgcagaaactaacagttatgttgcagtgaaggttataaagaatcagcctgccttttaccagcaggctatcatggaggtctctttattaagattgttaaatgagaaatttgatcctgatgatgaacatcacattgtccggatgctggattttttcctctaccaaaaccatttgtgtatagcctttgaaatgcttggtaacaacctgtatgagctgttgaaaaggaatagtttaagaggtttgcaaatgaaatatgttcgaactttctcaagacagatactggatgccctgattatcatgaaagatgctggcattattcattgtgatctaaaaccagaaaacatccttatagctccaactgtaaaaacagcagttggagtgaaagtaattgattttggatcagtgtgcatggagggtaaaaccatttattcatatattcagagccgttattacaggtctccagaagtacttcttggttatccatatactactgccattgatatgtggtcattcggttgcatcgttgctgagctatatatagggctgcctttatttcctggtgcatcagaatatgatgttctttgccgtatgattgagattattggtgggcaaccaccagatgatctgctacgtgaggctaaaaacactgggaaattttttaagcatgttggaagtatctatcctagtagtgaggctcggaatggcgctagcagtgcatacagaattttaagtgaagatgagatcgaagcaagggactccaagaaaccgaaggttgggagatggtatttccctcgtggaaggcttgacagactcatatatacatacccctggaagaatttgagcgagggaaacttgccagaaaaggctgattgcttggcattagttgatttcttgagaggacttgttgagtttgatcctaataagaggtggtcaccgctgcaggcctcgtatcatccattcatcactggtgaagccttcactggtccttacgagcctgttcaggagaccccacgaattcctgttggacgtgctgcagtagttgaccacaatccaggaggaggtcacttgctgggtgctggtctttctcctcaggttggaagcattaacagatgcttacgatttaacaacgctttgcaaccaaatatgcctttttcatatggaagcagttgtggcagttttgggagccatggtagctttaacgataatgctggctttagctatggaagctatgattttaacagtgtcgacatatataattcaccaatggatccttctgggtttaatttacgttcacaacttggaggatcgtttctcggatctagcccacatattcgacgaagacctcatctctcacatggtggtggcattcggttaagccctggtggtccagggcatatgtctcttggggccagtccatcacaatttacaccgccaaattcccagatgcaaatcccaacaggtcctaatggaaggtatggtgcctctccttcaagaggtggacatggctcttcgttgggaaaggttgctgttgtaggccaatacaataggaggaggaatcagggttatccacctatgccaatgccaccacatgaacacacatctcaactgatccaggggcaccaaggagatggtgtcagtactgctcgctttggtgcatatgcccaaggaaattctacctacctacataatgcactccctaattctagtcattatagttggagatcgcaaaggggatctggcagtggtttacctttggacccttcttctagccgtggttcttttccacccaccaattactatggctttcctttacactccgatgcgtcagcagatacattgccctccacctcatcagtatcagatccagccgattgggatctcaactctagtgacaagtcactcctgcaagaggaccgaacactgtcagctgggttaagtgatcttcgcttgatagacgcaagtggccaaacaaacagatctagcagattggctcctttccaaagtcatgatattttaagttcaaacccttcgactatgaatcaaagaaatggacacctatttcatgcatcatctctgggagagagtacacatactccaggtcatgtcacattggatggatacgaacacacaacttattctcagcgaagtttcccaatctatcgtgggcaaccatttcagcagtacaacaacatgacttccagttacatccgaccgatgagggctcatcacaatggtcagcctgtctggtctaattataggctgacagaacctccaccaactacaatgggtgacggaatgctctggggagggaggggtggccattcgtttgcagcgagcggactgccacctacacttaggaaagattttgggagaatcttttagtcctgaatccggaggaatgccgaatgccaccaaattgatggcatcagttgtttgcatctgcaattccgggttggattatttgctgggggtgcctactggtattgcaatttgttgtgttcctccgatgtctcccaggatgttcggttcaaatgattatatggtacgggatatgattacagtgctcgttctttgctatacctgcacgatctagtagaaaaatgtcagttgtgctacttgatgcgaatcttgctagttcgaggtttgggagagtttttctgtctcggttattgtcttcctttctctattctatttttgacagagggttaagttcctgaaccttaacatggctaagactgaagtgaaggccacgtggtcgtggtgacatgatttcgttttcgtgatacttgaggagccgactatctgtttttaagcatctttctgttgttgttttgctacaacaggttttctaagggcg

SEQ ID NO: 20580 - DNA, 77 bp, Zea Mays
ctgctcctgtcgtcgacgttcctgctcctcacgtaggcggtggtgtagtctctccaagtggctggactgtccggcca

SEQ ID NO: 20581 - DNA, 159 bp, Zea Mays
caggatgaggcgcatggaggttgctgcgatatgttcgtgagaggtttaggccgtcgtctcccagtcaactttgggttgctggaccgttgtctccttataatgtaattatttatttattttgtacataactcctattatatagtaaagatgtgacattcg

SEQ ID NO: 20582 - DNA, 2770 bp, Zea Mays
aaacaatcgcgagcacgagacggggacgagcagctccacaacaattcgtgcctgcctgccctgcctctcggacacctccctcgtcctccccctcctacgccgcccccgtcctcggcccccacgcgctcgcgcggcgcacgaggcgacgaacccgacctcctcctccgcgcccgtccctgccaccggtcgccgatattggaaggagctcggagggctggggcgctgacctgagttttatggagagaggatgccagagctgcgaagcagtactcgccaagcatgcctaaggtcgaagaagcttgaagatctgcagctaggagagccgcctgcgaaaccggtctcacctgctccgccgagggcaggaaagcgtgctcctacacgtgctgctaggggcagaaagggtgccactgggaaaggagtgccccctgcacctacgactagaagaaagcggggtaatattgtcgacttggaagctgatccagcttgtgaagacccccctaaagctgtcaagggactggaagttgctgctgctgctgcacccaagaaccttcctttgaaggaggtagccgaggttggtgttctgaaaatgaatggtgtgagtgcagagaagattattggggctgaagatgaatcaacagcgacacctgtgccagagagggttcaagtaggtaattctccagagtacataactgacaggaagttaggtaaaggtggttttggtcaggtctatgttggtcgaagggtttctggtggagctgcccgcactggtcctgatgcatatgaggtcgcattgaaattagagcatcgaaacagtaaaggatgcaattatggccctccatatgagtggcaggtttataacactctcaatggttgctatggcataccatcggtccactacaagggtcgtcagggcgactactatatacttgtaatggatatgcttggtcccagcctttgggacgtgtggaattcaatggggcaggcgatgactccaaatatggctgcttgcattgctgtagagagcatatcgattcttgagaagctccattctaaagggtttgtgcatggtgatgtgaaaccagagaattttctgcttggtcagcctggatcgcctgacgataagaaactttaccttatagatctcggtttagcatccaagtggaaagagaataatggtcatcatgttgattatgatcaacggcctgatatctttaggggaacaattagatatgcgagtgtccatgctcatttggggcgcactggtagtaggagggatgatttagagtcactggcatacacccttattttcctgattagaggaagattgccttggcaaggctaccagggagataccaagagtttccttgtttgcaagaagaaaatggctacttctccagagatgctttgttgtttctgtccagctccattcaaacagtttcttgagattgtcacaaatatgaaatttgatgaagagccaaattatgccaagcttatctctatttttgatggtttgattgaagcacctgcgtcgagaccagtcagaattgatggggccctcaaggttggacagaaacgtggaagattgcatgcaaatctagaagatgaacaacctaaaaagaaggttagattagggagcccagcggctcaatggatttcagtttataatgctaggcgacccatgaagcagaggtaccattacaatgtggctgactcaaggctaagtcaacatatagaaaagggtaatgatgacgggctttacgttagttgtgtggcttcctcggcaaacctttgggcactcatcatggacgctggaactggtttctgttctcaagtttacgagctctcaccagtttttctccacaaggactggataatggagcagtgggagaaaagttactacataacagcaattgctggatcaaccaatgggagttcattggttgtcatgtccaaaggaactccttacacacagcaatcatacaaggttagcgaatcgttcccttacaagtggatcaataaaaagtggaaagaagggttccatgtaacatctatggccactgctggaaatcgctggggcgtagttatgtcaaggaactcagggttttctactcagagttggacttcctgtaccctagcgaaggcattcatcggcgatgggagagtggttacaggataacttccacagcggccaccaatgaccaagctgctttcatcttgagcatgccaaagcggaagccgatggacgagacgcaagaaaccctccggacctctgcctttcccagttcacatgtcaaggagaaatgggcgaagaatctctacatagcctcgatctgctacggacgaacagtgtgctgatagtcgaagagaggggcggccgcgctgactcaatacggtggcttgcgtcaagagattagagatgtgagatgaacattaaatcaaaaccagttctaatgatgataggatcagtagatctgatgatacggtatggtatcctaccgtagctgtaaagaaatgttgtacccagtgccggccgcgagaccgttactgccatgaagtgaagctaatgcattttggagtctcttcccgggaaaatggaacacaatataatgctcatgtgcaaatcatataggtttaatttcttgcgcactagagtttgcacgtcaaaaaaaatcataatctgaaaaataggccttcatatatatatatacatatatatctatctatatatatatattatatagctaaaataacacaccagtttgaagcaaag

SEQ ID NO: 20583 - DNA, 1369 bp, Zea Mays
tcctggtatccagttcctttctttgcccctcctccgctttcttcggttcttcctctcccccactccccacgctgcctgagaggctgagactaggaaggggaaggaaaataatagtttggcgcgcaaatatccgcctccattcgtacgccgctattctcgtctgcgatccgcagcgcgatgatgatcccgtggggcggcgtggggtgctgtctcagcgccgctgcgctgtatctcctcgggaggagcagcggaagtgatgcggaggtgctgaggtcggtggcgagggcgggcagcatgaaggatttagctgctatcttggacactgcaagtaaggtcctaccacttgtagttgccatctctgggagagttggttcagacacaccacttatatgccaacaaagcggcatgagaggtgtaattgttgaagaaacggcagagcaacacttcctgaagcacaatgatgccggatcctggattcaagattcggcagtgatgctttctgttagcaaagaggttccatggtatctggatgatggaactggacgtgtttatgtggtcggtgctcgttctgcagctggtttaattttaactgttgccagtgaggtttttgaggaatcagggaggacacttgtacgtggaactctagattatttacaagggttgaagatgctgggagtaaagcgaactgaaagggttcttccaactggaacctcattgacagttgttggtgaggccattaaagatgatgttggaactattcgaattcagcgaccgcacaaaggacccttttatgcatcatcaaagagcattgatcaacttattgtgaatcttgggaaatgggccaagttataccgaattgcttccatgggttttgcaacatttggtgtcttccttcttgcaaagcgtgcactacagcattttctagaaagaagacggcggcatgaactgcaaaaaagggttcttaatgcagcagcacaaaggcaagctagagaagctgaagggagcaaaggtacatcagacgcagagcctaacagtaaaaaagatcaattagtgttggacatatgtgtcatatgccttgagcaagagtacaatgctgtttttgtgccgtaagtattgtatcttttccagaacttgaatgctctttgttgagaatgaagcaacttgattttctctatttttctatttcctttttcccataattccaaatatactaggcaacattatggttttcatatttcctgttcactagtagtttcttgatttttctcttaatggcttgcctcataacttgatagaacttgaatactgctaaggccttctttggatgttcagtactaaggaactataattctagaacccattgatctgc

SEQ ID NO: 20584 - DNA, 1248 bp, Zea Mays
ctctctctctccctctcttcgttctcctccacacaccgagccgaccgagcacatcatcattctctcgcaaggcaccgcgtgtacgagctagccaagcggccggggcagaagcaaacaagctcacacaaaccacacgcggagagccagaggagtggtggaaggaggaggaagagcgaggggtcaagggctcaagctcaagagagagcgagtgagttcactcaacgtgcggcggcggcgacgtcctacgtcctacgcacaggatgtcggcgtcgagcgccgcgtgccgcgtatgtggcggcgtagcggagtgcgcgtgccacggccacggcgccggcgcgcggtgcggggccgccgtcgcggacctcaaccgcgggtttcccgggatgtggcaccagcaccaccagcagccggaggaggaggagcccagcgtcgccggcggtggcgcggcggcggggctgcaggagttccagttcttcggccacgacgacgaccacgacagcgtggcgtggctgttcaacgacccggcgccccacctgcaccgcggcccggcgccggccgcgggcgcggccgggaacggggttgtggccgaggccgcgcagcggagagcgccgctgttcgacgggtacgcgcacgctcagtacggccagctgccgggccacgggctcatgttcgacgtgccgctgggccggggcggcgacgacgacgcggcggtgctggaggcagggctggggctaggcggcgccggcgccggcgccggcgacagcaatccagcgacgacgtccagcgccacaatcatgtccttctgcgggagcacgttcaccgacgcggcggccaacggcagcgcaagcggcgccgacccggcagtggaccgggaggcgaaggtgatgcggtacaaggagaagcggaagaggaggcgctacgagaagcagattcgctacgcttcccgtaaggcgtacgcggagatgcggccgcgcgtcaagggccgcttcgccaaggtgcccgacggtgatgctcccgcgccaccagcgccggccgctgcggggggctacgaaccaggccggctcgacctcggatggttccgttcatagcaaacacctatgtcggtcacatcattagcggactccaacggaaccccggccccctcccctgccgggcatggagtgccccggcggctttccctcgcctccatcggcgcccacacggtggccccctcgtgggagccgcctgacgaagcaggttctgcacgtc

SEQ ID NO: 20585 - DNA, 3091 bp, Zea Mays
taagcatctggagaagtatggaattcctgtgcccagttatgctcttgtcaatagagaatatccggaccaagagctagactacttcatcgagcaagaagattttgttgaggtccatgggaagcggtttttgaagccttttgtggagaaacctgtcaatggggatgatcaccgaataatgatatattatcctagttctgctggtggtggaatgaaggaattattcagaaaggagagtgagacgtgaaggatcctacatatacgaggaattcatgcctactggtggcactgatgttaaagtttacactgttggcccaggatatgcacatgctgaggcacgtaaatcgcctgttgttgatggtgttgttatgaggaaccctgacggcaaggaagtacgataccctgtacttttgacccctactgagaaacaaatggcaagagatgtctgcaatgcttttagacagatggtttgtggttttgatctcttaagatgtgatgggagatcatatgtctgtgacgttaatggatggagctttgtgaagaactcatataagtattatgatgatgctgcttgcatcttgagaaaaatatttcttgatgcaaaagctcctcatctttcatcaaccatccctccaactcttccttggaagtctgaaccagttcagcccactgaaggtcttacacgacagggaagtggaattattggtacatttgggcagtcagaagaactgcgctgtgtaattgttgtaatacgccatggcgatcggacaccaaagcagaaggtgaaattgaaagtgacagaagaaaagcttctgaatttgatgttgaagtacaatggtggaaaaccaagagttgagacgaaactaaaaagtgctgtacagttacaagacttgctggatgctacaagacaacttgtaccaccaactaggtctggtcgggagagtgatagtgatgctgatgatattgagcatatcgagaaacttcgtcaagtcaaagcagtcctagaggagggtggacatttctctggcatttataggaaagtgcagctaaagccattgaaatggataaaagttccaaagcgtaatggtgatggtgaagaggaacgaccgattgaagccctgatgattctgaaatatggtggtgtgctcacccatgctgggagaaaacaggcagaggagctgggaagatttttcagaaataacatatatccaggtgaaggaactggtttgcttcgtctgcatagcacttatagacatgatttaaaaatatacagctcggacgaaggtcgtgtacagatgtctgcagcagcatttgcaaaaggccttcttgatttggaagggcagttgactccgatactggtatctttagtaagtaaagactcatctatgctagatggactagaagatgcaagcaccgagatggatgaagctaaggctagattgcatgagattattatttcaagtgagaaagcaaagaacacagaagggccagtggaatttccatggatggttgatggtgcaggattgcctgcaaatgcttcccagctcctgcctaagatggccaagttgacgaaagaagtgacttcacaagtaaagctgcttgctgaaggtgaagatgaaagacttgcgttgacgagcacattttcaaaatatgaccaggcaaaagctcttggaaagacaactattgatgtggctcgtattgctgccgggttgccatgtggtagtgaaagcttcctcttgatgtttgccagatggagaaaacttgagagggatttatacaatgaaagaaaggaccgttttgacattacacagatcccagatgtatatgattcctgcaagtatgaccttttgcataatgctcatctcaatcttaagggtttggaagagctattcaaagttgctcaaatactcgctgatggtgttattccaaatgagtatgggatcaacccaaagcaaaaactgaaaatcggctcaaagatagcgcgccgtttattgggaaaaatcctaatcgatctacgcaacactcgtgaagaagctatcagtgttgccgaaccaaaatttattgaagacgaagctctattcctaccaacaaaagaagcagagcaccagcagaaggttcatgttagaaatgaggatggaagaagatctagctctacgagtgagaagtcattggaccaagaagatgaagatgatagagaaactaaataccgattagatcccaagtatgccaatgtaaggacacctgagcgccatgtccgcactaggctttacttcacatcggaatctcatatacactcattgatgaatgtccttcgttactgcaatttggacgaaagtctacaaggagaggaaagccttgtctgccagagtgctttggaccgtctacatagaactagggagcttgattacatgagtaatattgtgcttagaatgtttgaaaacatagaggttcctttggaagatgagaagaggttcaggattgaaatgacgttcagtcgtggcgccgatctcagtcccctagaggacaaaaccagtgaaagttcttccttgctccaggagcacaccttgcccataatggggcccgagagactgcaggaagttgggtcctgcctgaccatggacaagttcgagaaaatggtgcggccattcgccatgccgccggaggacttccctcctgccgctccgccacaagccttgggctacttctccaaaggggcaggggtgcttgaaaggttggctagcctctggcctttccacaagagcgctaacgggaagtagctggaagctaacaaatccctgaaaccagttcatgtggttattcttgttctgtaacactttctgcacgccagcccaattttgacgatctgaatcatagtgaaaattttgctggttctttttcatgagcgcgagacataattgtgctatcatgttgcttgcatggatctgagatttaagggtgcgtttggttgctggatagccaaaacaggaatgtcccctggtatcctctcttgtccctccaattttaaggaacaactggggacaatactagaataattctgtctcaatccttgatcctgaactaaacaaacttattt

SEQ ID NO: 20586 - DNA, 4080 bp, Zea Mays
ctgccgtcctgctggcaagtggcaactgacgtcctgctggcgagcgcaaactggcacgggttcctgcctaaatctggagggcgggcctgatgcctgcctcgccgccgaggatggcggaagtcgcgcccggcggtcctggagccccggccgggccgcacgcacgagcggacggcgggacgccaccagtccaccaccacctcccctcccctccacccaacccccgctgtcaccgcgccaccgagggcaaagccgcgtcgcgaataaccgtgggggcgtgcgcgcgtgcgtgcctttctccgtccctccccgcccgccccacctccaccgccccattccccacctcgacgcgcgtcgcgtctctccaggtcggaggcggaggagcggaggacgatcaccggcgcggacgcaggcgtcccgcattcccccgatccggccccgcctgacccccgctgccacggcagctcgacccgaccgaccaactcgccggccggcaggcgccacgtagaaatacacggctcttcaattgttaacgtagaagtataggatggctgtatcactatgctatttctgccccgggctcacaacacggtcccggatgcccgtgaagcggtacaagaagatccttgctgaaatcttccccaaaacacaggatgaagagcctaacgagagaaggattgggaagttgtgcgagtacgcttcgaaaaaccctcttcgagtgccaaagatcacagtttacttggagcagcacatttaccgggacttaagaagtgagcagtacggctttgcaaaagtggtgatgttgatatatcgcagactgtcggtttcctgtaaagaacagatgcctctgtttgcaagtagcctattaagcattgtgcacactcttttagaccaaaagaggcaggacgatttgcgcattgttgggtgtgaaaccttgtttgattttactgtcaatcaggtggatggtacatatcagttcaatttggaagggctggtcccaagactgtgtgaaatagcccaagaagtaggagaagatgaaagggcaagtgccctacgagcggcagccctgcaatctctttcagctatgatctggtttatgggggagctttctcatatctcgtcagagtttgacaatgttgttcaagttgtactggaaaactacaaacctcagaagatgcaaaatgatgatcaaagtaccaatgatgctgacaaccagttggtgcaggaagaccagaaggctgagcacccgccttcccctttcattatcactccggccccctcttgggagaacatagttaatgccaagggaggaatcaacctgccagaggaagatgttagggatcctaaggtttggtccagaatctgtgtgcacaatatggccaagctttctagggaggcaaccacattccgccgcatcttggaatgtttgtttcggtactttggtaacaatagttcatggttatcagaaaatggacttgctttgtgtgtcttgttggacatgcaacttttagtagaaagttcaggacaaaatatgcatttaatgttgtcacttttgataaaacatattgagcacaagacaatgttgaagcagccagacatgcagcttagcatcgtggaggtggcagctacccttgcagaacaatccagtgctatcgcttcaccagcaactgtaggtgccataagtgatcttgtgaggcatttgaaaaggacattccatattactcttggcagcaaagatatggaattagtaaaatggaacgaaaaattccggaagggcatagatgaatgcctagttcagctgtcaaagaaggtgtctgatgctgggccagttcttgacatgatggctgttatgctagaaaacattgcgagcactcctgttgtagctagatcaactgcagctgctgtttatcgcacagctcagataatcgcttctgtgccaaatttgcaatatcagaataaggtgtttcctgaagctctgtttcatcagttgctgttaacaatgatccaccccgaccatgaagctcgtgttgctgcacaccgcatatttgctattgtcttagtcccatcttctgtttcaccttcgattcaagccagtccctcaggccaggtaaagaaacatgacatgcagaggacactctctagggccgtctctgtgttttcttcttcggctgctatctttgacaagatgaaaaaggacaagcactcagaaaattcacaaggagaaagcaaggacaatagtttgcatagcgttggtgaagggaccggacaaccaaagaatcaaaaccttcatgtgtctcaaagccgacgtagtagcatgagaatttctaatttttccatgaaaagaggcccttcaatggccatgagagctccttcagtagctatcagagctccttcaatatctctgagaggtccttcaatgtcttcaagagcatcttctgtgtctgtaaaggaagaccaaatttccccaaagaaatccgacgaggaaacggaatcagtgttggtgaagctgagcgcccgtcagatcacacttttgctatcatccatttgggctcaagcaacatcccctgaaaatactcctgtgaactatgaagccattgctcatacttacagtttgcttctactgttctctggatccaaggcatcaacttttgaggctcttacccagagttttcaggttgcattttctttgaggagctatgcgctcactgaagcagattcattacaaccgtctcggcgtcggtcattgtttactctgtcgacagccatgattattttctcgtcaagagcttacaatgtgttgccactcattccaatctgtaaacaaatgatcaatgatcgcgcggccgatccattccttcgtttggtggatgagagcaaacttacagctgtcaaggattgttcaaatgatccttcaaaaatatatggatcaccagaggacaacgctaatgcactgaagtccctctcagaaatagaactgtcagaaagtcaatctcgagaatgcatagtctccacaatcatgaacaacattgcaaatatgatggatgcggagttgcataatgtgagaagccaactgctaagtgatttcactcccgatgacatgtgtcctacaagcactcagttctttgaaatgcatgttgataatccttcagggtttcatgagactggtcaccatgaagagggtttgctgattgacctggggaatgaccatgatgcttttggggaagcttcggaaggcgcagaagctcgcacatcttctgtacctgcatcagatcttctgagtatcgatcagctccttgaaacggttggtgcagaaccagcacctcaggctggagtagtgtcggcagacattggattcaaggatatgactagccactgcgaagccctgacgatcgggaaacagcagaaaatgtctgccttcatgagcttccagcaaagcgtgcaagctgcaggggtgccaggcagccagcccaaccagacgacggagctggaccttttccaagacctgcagttgcctcaggccggggcgcagagcacaaacccattctctgatgagagcgttcagggatacccacagtacatgaacgggcccaacggcgacaacgcacagccaggccaggacttccaacagcagtctctgaagctaccggcggcgagcccgtacgacaatttcctaagggctgctggctgttaggagtccagttacatggacgacaaccacctcacctcaagatagtcccaacggaagatcctgcaatttttccacattttgcagggaaagaagaggggtatgtccgcgtgtgaggtcttagctagagactcaaaccgggttcgacacccattctttatgtatagctgtacgtggttgggctttgagccctttgctgctgctgctgttgttttcaccaatgcaacgtgtagagagggactgtgggggagcagtgccttctaccagactgtacatgtaacatgttgcagaaatatatgaagaaaaaatgacgtttgaaggatagatctggtgtagctcgtcgagttaccagatgatgggatcaaagaagcctttcatatttgcggtggaagttcgtt

SEQ ID NO: 20587 - DNA, 2449 bp, Zea Mays
gctagccgaagctccgagtcggtcaatctatttccaccagtccccatccagtacaggccagcactgccgctgccgtgtcgccaccggcccccggctggctctccagcgactccgtcggcggcttgccttcccgcgccgcgccgggcccggatcgctcgccctttccgactgtcctgctcaacgccgccaccagcacgtcctttcccgcgccggaggtcccgctcgcctgccacagcggtgcggcgcaagctcccccaagcgtttctcaagtgacgagaagaagaaagagggggagaaggaggttggcgtcagtgggtcccgcggaccaatcagctagagagctgagtgatgtctcgcaagcgatgaggtctttctttcaccctttcctctctcctgcattggattggaaaccggctgaggacgccgtagcgattagggagtgctagtattgtacgtgtaatggttggagagtgcttgacagcctcatgagatcggatcggaggccatcattccacgcactggtgatgaaaagctcgcttggtgcccctagctagctagtggcgaagcaaggaagctagccagccaagatcctgcttgtgagaaaaaaaagggagtagatccagtaattttaagaatctggtcaacatacctacggcaagatggctgatattgtaatccgcgacctggagagggtagtcaaagtcgcacttgcgatcaagaaggccgtggaaacagctaagcagaacaaggaggattgcgttaagatcggtgagcgtgcagctgaggtcagtactcatatgaagcggctgaaggagaatacaaaagcaatggaggaccctttgatgagcgatacgctcaagagtatggaagagacactccaacgcgctcttaagctcgtcaacgagtgccagaggaagcacgtcgtgctccattacttaaatgccggcggcatgtccaagaagctgcgccaggtgcaggaggatatatcatataaattgtggaatggggtcttggccaccgttgtcgacacaaggattgctttggaaaagcagatccaatctgctattgatgcccctctgcaccaacaccaacagcgtgcagggcaggtggaaacctcacaaagtagtcattcaagaactgatcaagctagcgagaaaggaaaggccatgttagcaagagtaaaaagggagcagtctgaacttttgtctgagggctgtgtggttgaaagaggctactacaagggagtattacacgacggactagatgttgccatcaagaagttagcagtctctgatgatactcaagagaggcgcctgcaacttgagcttaatattcgtgcaaagcttgaacatggaaacatacttaaacttctgggatattgcctcgatgcccaagaaaaagaaaagctatactttctggtcgaagaatacataccgaatgttgaaagcttggagaaatttattaatgtctctcgactcgattggtcctcgtgtttcaagataattcaggggatagcaaagggcttacattgcttacataagcatcatattctctatatggatttgaatccagccaacatcctcgtccgttcagatatgaatcctgtggtcatcaattttggatcatcaatagtgctggatcgtgatgatgataaggtcaccggggatgccgtagcaggcacactgggttatgtcgctccagaaaaacttatggaagcttatgcatcaatgatgtctgatgtgttctcttttggaatcatcatcattgagatcattaccggcaggagagcttcacctttcgttgatttaccggaatggggttcagttgatgagatgattacatcagcgaaagggttatttgatccggcgctagctaacgagtctcagctgatgaagattaataggtgcagagaggtcggactgaagtgcattgagcgggatccgaaacgtcggcctaccatgggaaatgtccttgagatgctaagtagctagagtgacaggcaccgatttgaggtgttctcggttaggagtggattgaagcggattagagataatcaaatctcttgctagtcaaaactgaatagaaatgggtttactttccctcaatcccctcctacctatgcaaccaaacaaggccttatgggtttcaacaatttggtttgatgtattgtcacaaattgatcatttgtaacattcaagatttatgcgcaaatgtattggcgtgtggattagagagtttctatcttataggctggctcttgaatgatatggcaaacataagctagcaaaccagttcaactactgagggtgcacatgaacctcgtgtttactagcatttttttttcgtatgctatttcctagttcaagtttgcatctcaaacctttttcatgtatgtacatgtattgtaaatgtgtcaagtgttaattttattgaaacaattgaaatgtgt

SEQ ID NO: 20588 - DNA, 392 bp, Zea Mays
tttttttgtaaattggtaactgtatagatttgatttcatacatggaagcaggtgacgatggtaaacagaatgccacttgtgaagtaagcctaaaaaccggaacaacagttcatgacttcagacaagagatgagctggtatggccctatatatgccttaacagccatgcccttaccttacctctgtattatatttgtaaatccattggtctcgtgccttataaaccatatggcatcaagcagcaggaaccttccttccatcttcaatgaagaaaatggccgactcaggtacctgataaaggacaaaagcaatgacaattcaataacaaaattcaacctgcctctgatggaagctataacattcttaaccaactccagcacatggtgactgctg

SEQ ID NO: 20589 - DNA, 1356 bp, Zea Mays
gtcctctgaatttttttgtttctgtttcaactacctagctcctttttttgttcatcttctatgcatagaatgcaacatcattgttgaaggcaattttttgttaggaagtaggaacactatagaagactactgtagcatccaagcatcagcaacatcctgataagaaacacaaaaccatgattgataagataaatgaagtatggaatagtcgaggaaaaaggaaggcgtatacttttttcttttggtttgaaacaaacaactaaattgttcattctcttccccatccaaaatttgtcaagtatcctcctttaaaaaaacaaatgtgcattactatgtttcatcttttagtttctttaatcaatttacatgtagttcatcgttgttttccttgtcaatggagttacagtcactgtcttgttttgattttgtactttggttatgcaatatcatatctttatgctacagttttatcattatgaatattgtagggagggaaggttcgtgatgcactttttcagattcttgaaaacgaggatgatgtaaccataaaacatggaacacaatcgagggagagtcggcgtgaagctacacaaggaatgcactcatctaaattttgcctgcatcctgccggagatactccctcagcatgcagattatttgatgcacttgtcagtctgtgtgttcctgttatagccagtgattacattgaacttccattcgaagatattatagactacaataaaatatcaatatttgttgggacaagcaaagcagtacagcctggatacttaacttcaactcttcgaagaatcagttcagagaggattctggagtaccagagggaaataaaaaaggtcagacattactttgagtacgaggatccgaatggaccagtgaatgagatttggcgccaagtatcccttaaagcaccactgataaagttgttgactaaccgcgacaaacggttgcttgaaagaggcaccaatggaacagattgttcgtgcatctgctctacaactccaactgacataactgcggccagttaaacaagatggaactcatcggcctacaagctctgtgcctatttcctgtgatcacattgcctgaattttttaggttgtacagttccatgtaaaacgagattaccagccactatttttgaacagtaaatttactaattaccacaatccttgagtttttactagatttgtataggaggagcggatagtcaggaaccttacagtgccctttttgtattgtaagttacattagctattttttgttgtcggcagttcgctgccctagtttttcgacctacataagcatcaatccccgtgccagtgcgtggaccaagtt

SEQ ID NO: 20590 - DNA, 302 bp, Zea Mays
caactgaactatctcctactccagagctcttcgagtcaatggccgacccagaagcagaaaaagaagatgaaattactaaagtggccgaaactattatggacgaagctgtttcttgactgctaaacgaagctgcggaaacagtttttaaaaaagaatagctgttattgtaaaaacatttggaatgtaatatttgctgaacaaagtgtgtaatattttatagttttgaatgtaatatataagctgtttgtaattcaattatttatgatgcatgaaacttttacgtacataccgtttttgagcct

SEQ ID NO: 20591 - DNA, 1135 bp, Zea Mays
agttatatgaagagccatatagcatctagtgattttgagggtatagtgcaggtttgggatgttactaggagtcaagtttttgttgagatgagggagcatgagcgacgtgtgtggtcggtggacttctcaattgtggacccaacaaaattggtcagtgggagtgatgatggatctgtgaagctgtgggatatgaatcaggctgggagtattggcactattaaaacaagggcaaatgtgtgttctgtgcaatttcaacctgatactgctcgctccattgccatcggctctgcagaccacaaaatttactgctatgatctacgtcacatacgagctccttattgtacactagttgggcacacaaagactgtaagctatgttaagtatctggatgcatcgacaatagtatctgcatctactgacaactcattgaagctttgggacttatcgatgagtccaggaaggataattgacagtccagttcaaacatttaaggggcatacaaatacaaagaacttcgttggcctttccatatctgacggttacattgctactggctctgaaacaaatgaggtttttgtgtaccacaaagaatttcccatgccagtgttggcctataaattcagcgtgacggaccctatatcagggcaggagattgatgaccagtcacagttcatttcatgcgtctgttggagagggcagtcttcaaccctactttctgcaaactccagcggcaacattaagatcttagaaatggactgaggattggagttgggcatctgctgagtctcagctataaatggactgacttcttaccaagttgtgtgcgtgtgaatttgtggcaacggagttgccaacggtgcgtggtgcagagttgggagaggtaggagtagctgtaacaggtttagcatggtttgataggattaaactagcgtggtagcaaaagtagcataaataggaaacagaattgaggtgtggggtagtactgcaaggaaaggttttgtacatcattggttcgaggtatacttgtacagccaatcaatccagtttttacctagcagcaccaggcttttgctcgtcgtagtgttacttgaaaggcaaaaagtataaagtggtctacatctgttgaatcagataa

SEQ ID NO: 20592 - DNA, 2719 bp, Zea Mays
gcatagcaagcggcaagcgctcttttgaccggtctcccgaccccgaagaccacttgccccctccaggccgaggccgccgccgccaactactgacacagtgacacgcaccaatgaccaacccggcggccggccacgaacgataacacgccggcccgcctcgccacgctcccaccctcctgcctccgcgcgccacgaccagccgccccagcagcagatgtcgcctccgtccgtcctgctcctccactcccgcatcccgcttcagccccgccccttcaggatgaactcccgggcagctccgagcagggtcgtcgtctgctccgtcgcgtctaccgaggggttcatctccgcagcgccgatcctcctccccgatggcccttggaaacaggtggaaggcggcgtcactgccgcgaaggggttcaaggcggcgggtatctacagtgggttgcgtgccaaaggcgagaagcctgacttggcactggtcgcctgcgacgtcgacgccactgtagcaggagcatttacaacaaacgtcgtagccgccgcacctgttttgtattgcaagcatgtccttagtacatcgaaaacaggtcgtgctgtgttaattaatgctggacaagcaaatgctgcaactgctgactccagcagttcacccaaagcttacccataagcactgttttgcactgtagactgcactgttcgcagagtggagtttgaatatgggcatgagtatgggtaagttgttggagatagtcttagagtggacgcgctagcgagttcgacccaaaaggttaagctgatgggagaaagtagtttatgcaccttttgggttgaactggttagtgcatccactctaacttggtatcaaagccagaggtctcaagttcgaatcctggcagaggctttatttgtgccttcacccattttattccatgtttgcgcctttctctttggctgcgtttgctcctttctctctggctgcacgtgagtgaagatgttgaagtgtataagtggataaactatcttcttccgtcagcttaagcttttgggtcgaactggctagtacctccactctaacaatattgaggttttgtctcaaatgattgcctatcagggtgatcttggctatcaggatgcagtggatagtgcagatgctgttgccaagcttctcaatgtaagcacagataacatactgattcagtctactggtgtcattggtcaaaggataaagaaggaggcacttttaaattcactacctagacttgtgggctcactgtcttcttcagttcagggtgcgaattctgctgctgtggccattacaactacagaccttgttagcaagagcattgctgtccagactgagattggaggagtggctattagaataggtgggatggctaaaggttctggaatgattcacccaaatatggcaacaatgcttggtgttttgaccacagatgctcaagtcagcagtgatgtctggagagaaatgatccggatgtcagtgagtagaagtttcaaccaaattacagtggatggtgatactagtaccaatgactgtgttattgctatggcaagtgggttgtctggtttatctggaattcaaagtcttgatagcattgaggctcaacagttccaagcatgcctagatgcagtaatgcaaagtcttgcaaaatccatagcatgggatggtgagggtgcaacatgcctaattgaggttactgtaagtggcgccaacaacgaggcagaagctgctaaaattgctcgttcagtagcatcttcttctttggttaaagccgctatatttggaagagacccaaattggggacgaattgcttgctcagttggttattcaggcattcaatttgacgcaaatcgacttgatatttctctgggagttattccactaatgaaaaatgggcaaccactcccctttgacagattgaccgctagcaagtatctcaaagatgctggagatgcccatggtacagtaaacattgatatatcagttgggagtggaggaggaaatggaaaggcatggggctgtgatctgagctacaaatatgttgaaataaatgctgaatatacaacatgagatttatatttgccatgaagaaaaaaaatcttgaaatgatgaatgggtgcgactaccgtcaggagaatgtagtttcgtgttgcaatggcagccttgcggatgtattatttcacgtgagatcaatcagaccaatatttcataagtgtaataatgtgatgaataacgatgggcgcaataacaacactgacgatgccaccttgttcggttctgaatttctgatgatgagaaagcattggtcagacaaataattttggaattcggtatacaaagctctggttctgccgtcctgcgtatcaaactgaagctccacttttatgtcagttggactgatatggtgttaatttcaccactgatacctatatcaattggattccttgacggtttgccagccgcagttctcttgttttaacattttagccttacaaacacaacgtgatgttgatgtagtttgtaacgtggaatgtcagaaataatattgatacaatgttgtagatttgttgttttatttgaaattatgtacattgctttagacgaatctcactaagtcatattcgatttggaaaagccaacgtttctaggttcatgaatagttataatatgagagaataaagatgtgctgttattaaaatt

SEQ ID NO: 20593 - DNA, 204 bp, Zea Mays
cgcggatggaggtggatctgcggaatccgcggcggtcgtgctggagcgcgagcgttgcggttgttggcgcggttgttccgcgggcgtagggaggcggccgagccgcgccatggctggctgcgtgggagcgaaatccgcggcggtcgtaccgaatccgcggcgcgcgcgtgcgggctggcggcgcgtgcgggagctggcgcgcgg

SEQ ID NO: 20594 - DNA, 457 bp, Zea Mays
taaataagaaaatattgacaataaattgtgtggctctgtcgattcattttttattttgaaactgcccctgcccttcgatccggtctatctccgtccctacttggcagagcctgacttccattccatctcgatctcggcgatgccgcgcatggcgcgacgcacagcaatgacttcgcgaagtcgcgaagctgcacgcgtctagcgagcgcgtgtagctcgcccccccctggcggaagccgccaccacaggcatggcatctggctggcggagcattcgtctggccggcgtcagacatgacgcggccgagatcaagccggagacggttcgtggcctcttctcaccaccacagccgcagcctcccagtcgccaggatactaggatgcgctcgtgaagactttccattacgttgaatcaaaggctgcagctctgcaaatattaataacgtgtagtgaccaag

SEQ ID NO: 20595 - DNA, 2967 bp, Zea Mays
caaacgtggaacaaatttgccggcgctttattgatgaaagaagaagcaagcttagcaggttgattgctgataaactggggtggtccagtttcagtggattctggttagcaatggatccaagtgtgcgtcgacacatgacaagggaaaagactgaaactatactgaaagttctagtgaaacaattctttatagagaaagaagttacatcaaccttggtaattgactcactgtatagtggacttaaggcacttgaataccagagcaagaacaaaaagggcatacctaaactaacagagacagatgctcggagcactccaatggtacttattgatcaggatatgtttgttttggctgatgatgtgatacttctgcttgaaagagctgcattggacacactgccacaccaaccattgcccacgaaggatgataaaagttcacaaaaccgcacgaaggatggcaactcaggtgaggagtttagcaaagattctattgagcgtgatgatagacggcttatagagctaggctggaagacattggagctttttgccttgactcatatatttagtcctgaaacagccgaatagaagtggcacatcaagaggctgtggctttgaagcgccaagaggaactcattcgtgaagaggaagcagctgggctagctgaaattgaacttaaggcaaagcgtagtgctgctgaaaaggaaaaacgtgccaagaaaaaacaggcaaaacagaagaaaaatagtcgaagaagtaataaagggaagagtggcaagtctgacatcaataaggaaatacttatgtacagcagtccttcaggtgatagaatcctggatgatttttctggacaaacggaagaaatgtcctcaaatgctgacaaccctgaagaagtttctgatatatctgacagcagagacgataattcagatgcgcttcatgttgatattgaagaccgtgaaagtagccctgttaattgggagacagatgcttcagaaactcaagctactgtgcctggaagtagtgaggtgcaaaatgaccatgcagggaagaggacctctactgtagatgatagctcatcgacttgttcatcagactcagtcccttcagttatcgtgaatggatcatatacaggaggtgcctggacaagcgtcagatccttatccaataggggaaacaaccggaggaataaggatactgaagcacgggcagcacttgcacaaggtggatcaagttcagcgcataatggttttataggatctggcggcagtgcctctggccactcaaaggaaagatacgaacctgaggatgataaagttgtcatgcagaggaagcaacatgcacggcacattgatgtcattagcccctctaagtcaagaatggcagtgtcttcattttcttctgtgagccctgttaagaagcaacctaacttgtctcatcagccaaaatttttgctagaaagcaccaatagttcaaatcaccgtgcaagcgaagtttcaggcgccgtgactgccactacaacagcaggtgcctcttcaaccctggcagctcagttagtttcaaataaaggacctgtatccagtgctgcaacccggaatgagaagccagttctagttacaaataaacccctgcaggttcttgtaccatcaaaatctgaagcgcagaaacaggcttccctaactggcagcgcaagcactcaggtcgtttcggtatcaaggcccttgagtgccccgcaagtccctgcagcaaaacaaagtgtgccagccacaacagctcagaacgcacctcttctttctcgctcagtgagtgctgttgggcggttaggaaatgagccctccgccaatgctcctagcttcattccccggtcacgaacctatcgcaatgccatgatggagaaaagttctggtggcgtaagcagtctcacacatcagcaaggttcatctgagcaggccgtcgcaccatcccaatcgatgtttacatcgcagccttccattctgtcatcggagaccttgtctatgaaagaggaaacgtcgttgagacctgggtttacatttggaaccgtaaagcccgagtcactgaacccttaccagggcagagaagagaactcactgcaagcgagcagcagcagcagcagtgactgtacgccatcgagttcgaacatcagaagtgagatcgcgaagctcagtttgaacggaagatcacggagcaagcaactcctgtctgaaatctctaccagatttactccctaccagccacaaggcttggtagctgacgagttcccacacctggacatcatcaacgacctgctggatgaggagcagagtgacaggagaagggttcttcagcctggtttcgtccagcaattctctgtgcataacggcgtcagcgcgcctgattatggcttgttcagtgagccgtacctgttcgaccggtccgagcagtactttgacgaggagcctccaaggttctacagtccattgagcagcgctcctcggaggatgagggaccggagctactcgcacttcgatctcccttcatactccaggagcagccagcttgatggtctattgatgagccagtggccgccatacagccgcgccgacctcgccatgcctggttttgggtcagacacaggtggctactcctatcagccgcagggtttcccgagtccagcgagtgcagcaagcagatacccgtcgtatcgccctgccaatgggcattgagagttttagcgattgcaattggtaataatgtgtggtggagtccatgctgctcgcttctgagctgagtgtaattgtaatagtccccccatagcagtgatataaagaatggttcctctgttttattcaatccatagttatatcatttgcctctctttttctatagttcagttttgctcagtggcaataaatctcggctaaaatgatctggacaatctaggctcagttttccctagttttgctgagtggcc

SEQ ID NO: 20596 - DNA, 1340 bp, Zea Mays
ccacctccaaggtttgattggactttgaggaggtgactacgatgtagggaggcaaggagctgctggctgctggggccgtgtacgtacgcgttgatgaaggtgaccgtggaagggagcggcgccggcccggccgcggtcaagaggaggcggagtggcgggcctggcaggcgccagagcggcggcgtgagcgtacggcggcgcgtgcaggtggacgcggcgaccgcgccagagccggcgccggcgccactccagcgtctgcttgccgcgtgccgccgcgcgttcggaggccccgggaccgtgccggcgcaccacgacgtcgtcctcatcagagacatcctcgacaagatgggaccagaggatgtgcacctgagagccgtcaccaaggccgccgccgcttccggcggccctcgaacgcaccctgttcctatcatcacacgaaccaccatttataaatgcaagaacttctcggtcgtggtgttcctgctgcccccaggcgcgaccatccctctgcacaaccacccggggatgacggtgttcagcaagcttctcctcggctcgctccgcgtcacgtcctacgactgggccgaggccgaccaacgtcccgtcgccgtcggcggcgatcgcccactgctgaggctggcgaagctggtgctggacgccgacctgagcgcgccgtgcgacgccctggtgctgttcccggagtccggcggcaacatgcacaggttcgccgccgccacggcgtgcgcggtcctcgacgtcctcggcccgccctactccggcgaccgggactgcacctactaccaggacttgccataccgccgtcatatcgacgatacagatgaggccgccggggatgaggagcagaagccgcgtctggggtggctgctggagacgcgcaagcccaaggaactgcacatgtacgaggtgccgtacaggggccctccgatcctgtggaagagacggcctgcatttgactcttggcggcggcagcagcagcagcacaagggacagtgagacatatagcgagtgtatgcagcatgtgcctccgtatgtacgctagctgttggtgggaggacgacgtgtgcaaattgttgagaactacgttaccctggatcaccagattcgtttcattcctcccgtcagccgtagaggcgcgagaagttgtagaagacccgtctcccttcccagaagcacgacaaaggaacacacgagacacatgatatagggttgggggcttggggctctggcctctttctcctctctgtcatatgaaggcgtgtacaagttccttatatagagatgtgggacccctcaggggcaaagtcggtatttggccacat

SEQ ID NO: 20597 - DNA, 1538 bp, Zea Mays
tttcttggacccgagtcgagtagtccggtacatcccaccgcctcgcaccgcggccatgttgacaccgcgcgtcctcaaggcttcgctgctccgctgcttgcgcgctaccgccgagctgcctccgttgcggcgaccccggatcctacctgtgcgggtttaccattccagaggctattctagtgggggaagctccaagtatgataggccaatgagacagttttccgaacagaatgagtcaacctctcagccattaatatattacattgctccatctgctctgcttgcttttgctgggatagccacatttgttcattacaatgatgagaggcgtgcagttcccttcgctaaagtaccaggacagaccaatgttcccaaaagatgtactaccaatagacctgcaataggagggccatttaagctgtatgatacagaaaacagtgaggtgactgaatcaaagcttcggggaaagtggaatctgatgtactttggctatacatcatgcccagatgtgggtccagctgaagttcagaagatagctgatgttgttaaactgttagagtcaaagtacgatatcaatattacaccactctttgtcacaattgatccacaacgtgattcacctgctcagcttaaggcataccttactgagtttgacccaagaatagtaggactaacaggtcccatcagtgcagtaagacagatagctcaggagtaccgtgttttctttaaaagagtagaggaagttggtcaggactatcttatagaaagctctcacaatatgtacttgctagatccatgcttggagacagtaaggtgctttggaagtgagtacgaggcatcagaccttgctgaggctataacaacagaggttcagaaagcatctgcctcatcaacaaattagtctagcggtatggcagcatcagcagttttccaatcttgccgtgaagcacctcctcgcctgttgcatagccctcacagaagggcgtgactcacagtgggctggccattcagctctgcctgcaaccaaccgattcaagttctcctattctcgctcttgttgtgtcagatctgagcttaactgtacagaatggtcttcttgcgacgaagtctcctggcagttccagatcacttacaattctgcgagatgagaatgatcttacaatttccagcaaacattaacctgctgcattggatgaggcatatgacctacagacttaccagccatttcattatactcggtgcttctttggccaagttagcgggctgctgcgcgggcggctagcccgggacctgtgtttctggcactgggctctatcgtgaaaattgttgctggaccctggaggctgtaaggagtgctgcacaattccagttctatagaatattaattgtgttttttttggggggtgggctaacaatatcgtctgtactcgataaaagaatattttatgatctctaagaattaataaatgtctgctaacaaaatttaatccaaattattatatggggtttgttgtaagaaacacaatggtacggtgtaa

SEQ ID NO: 20598 - DNA, 2359 bp, Zea Mays
caagcattgtgttgattgagacgaagaaacaagcaactcatgtagcatgatggagaccaaattggttgaaaacgaggcagcaatgtcgatgctaagggaaaactatgagaaaagaatattggatgaacaagtaaaactgaagaaagaagctagaaagtttcaggaggaggaagccttcctgcaagatcagttggcttcatctagaagaaccgtaacatctttaactgaggaagttcaaagggagaaggagctagtagagcagcttaaccttgagatagatcgacttaagagcagtattgcagaagcagaggaagacaaacatttgtctgaaggcaaattgaaggaaaatatggaagtgcttgatattttgtatggcaaggtaaatctgcttagccaagaggtaaatggcaaggacgaacacatcagggagctgagctcatcactttctgccaaggaaaaggactacgagaacctaaatgtgatctgcaatcaagccaaagaggacctagagcaggcaaattcccaaataaagcaagtggagaaagatgttcgtacagctaaagatgatctcaaatcgaaggcgtcacttattaactcactgaatgagaaagttcaaacattatacactgaaaagggtgaagtggaagaaaaactaagtgctctagtgagtcagtatacatacctgaaatctgcttctgaagagagggcttctcacgattctgaactattagttcagaaagatgatatgctcaatcagcttgaagaaaaactttctgctgcattaagtgactctagcaaagacagaactcgaattgccgagttgaacaatgaattggtcaccaccagaacaatactagataatgaagttgttgccaataaaaaattgtcagaccttgttcagttcactgaagaggcactaacaggttccagaaatgaggtgtttaaactctctgaagagcttgacgcagtaaagagatcaaatcaggatttgatgactcagatttcaaaactaacagatgaggccagtgaagtgaggcaggctctggctaacaaaatagagcaggcagagtcagtttatgcaactctttcagatgagctggcgtctgtaagggaagtacttaaaaagtcagaaggagaactcgagatcacctcgaagcagttagttttggtttcagaagcacatagtgaccttaataaagaattgctggatgcatataagcagttagagtccacgcaaagtgagctagtgaaagagcgtaaaatcaatgctactcttaacatggagcttgaggctttggtgaaacaatcagtgatagagtccgaagcaagaaaaactcttcaagtcgacttggatgaggccactagatcactaaatgaggtgaataagagtacactctgtctgtctaagcagctggaaacaactaattccaagatttctgctattaaagaggagaaagatatgctgtcaaagttccttgaggaacaaaagaaaagtacggttgaagctcaggaaaacatggaggatgctcagaataccataaaaaggcttgggactgagagggagagttttgaagtaaggtctaagaaacttgaagaagagttggccacagcgaaaggtgagatattgcgtttgaggagacatattagtacaggtgggtctccgaacacccaagttctttcggaagcaggtgcagcgccaattagcagtcgagcactgaaacagcaacccatgaatgatcatgttcaaaatatcaatggtgctgatgctgtagcgtcacgttcgcctaaacggatttataggaggaaacgcaaaccagcagcataaggattatctgaatgccaaggggctagtttgggaactccatttttccaaggatttttaatttctcaaggaaaaatgaactaatttctcttgaaaaaaaaattccttgaaaaaatagggttcacaaactagccttaaaagcaaaagctggcgttctttttattcctctattattcaccttgttataacatcttgtgaactcccattcttcgaaaggtagacctccttacagtattatcttcggtggtgctggctcttccgcgcatccctactgaaaccgagaaccttatgtagtcacatacggtttgatgggatttagaatccatgttaccgtgtgacctgtgtacacctttaactgagttggttagatgatctaagtagcattaatgggtacaaaacaatttttttgaggatcgactcagccgaaactgctttggccgtttcttaaaaccggccaggctggagtagtgaaatttcaactttctcattgtattcgttttgtcaaattgattgaaaaaaccatctcgtttggagttc

SEQ ID NO: 20599 - DNA, 3993 bp, Zea Mays
ctgagacacactgcaattgtggcccacgcctatctggttcgctactcttttcttcctctcctccggcgggccccggccccaaactagccaacggcggcgagatccagatccaccgcaccggacccggacccgcccaacgactccggccactttttacttactagccagcggcggcgaaatccagatctccatagcaccggacccggacccgcccgccccgctggaacaggatgttcggacttcaggcgagcggcgcggcggcctcgtgggtggtggggcggatgggcaccgacgcgcatctctacgacgaccccgacgacgcctccatccccgagctcctcgactcccgcttcgacgccgacaaggtcgacgccctcaagcgcctcctcgccctcatcgcgcagggcgtcgacgtcgcgcacctcttcccgcaggttgtcaagaatgtggcgtcgcagtcgctcgaggtcaagaagctcgtctacctctacctcctccactacgccgacaagcgccaaaacgaagcccttctttctattaacatcttccagaaggatttatcggatataaacccactggtgagggcttgggccttgcgcactatggctggcattagactacacgttgttgctccgcttgtgttggttgctatcaagaaatgtgccagggatccgtctgcgtatgtaaggaaatgtgctgcctacgcactttgtaagctgtgcgacttgattccagacgaaaatgcggctttggaggagatcgtggacaccttgttcagcgacaattcccctggagtagtaggagctgccgctgttgcatttaagtcggtctgtccaagttgtttaccgttagtatcaaaacatttccggaggctatgtgagaccctccctgatatcgaggaatggactcagatcgtcctcatcgagatcctcttgcgttatgtaatagccagacatgggttggtcaaggattctttactctttgcttcagatttaccgacagagattcatggcgttacagattcagatgctgttgctagcgtgcccacccaatctgattctatcgtcaatggggtttctgatactatatcaagcatcatgctgttccggcactacatcgaacaatgctcaggttcctctgatagagaaggcaataatttagaattatcgtctgtcaccgcaaacaacaacgatgatgtcacaattcttttgaaatgtacatcacctcttctatggagtcgaaatagtggagttgtacttgcagcagcaagtgtgcattggatcatggctcctattggggacatgaagaaaattgttggcccaattttgtttactctacggtcatctcctgatgcagcatatgtgatgcttggcaacatagtagtttttgtcaagacaatgccatcattgtttgccccgttttatgaggacttctttgtaaacacttcagatccgtaccagacgagggctttgaagcttgaaatactgaccactattgccacagagtcatctattccggccatttttgaagaatttcaggattacattaaagatccagataggaaatttgtagcagataccgttgcggctattgcattgtgtgcccagaaacttccctctattgccacttcttgcctcgagggacttttggcacttgtattttatgaatcttttattagtaactcagttcacttagatggagaagatgctgttttggttcaagcaatcttgtcaatcaaagcaatagtgaaaatggatccagtatcccacgaaaaggtaattgtccgcttggttcgtggtttggacaaactcaaggaacctgcagcacgatccttgatcatttggatgtttggagagtatagcttcatgggggatctcactacaaagattgttcctcctgttctcaagtatcttgcgtggtccttcgttgctgaagtggtggaaacaaagcttcaaatcctaaattcttctgccaaggttataatgcgttgtacagaagaagacatggaagaattcaaaagcatagttgcatatgtcattgagttggctacgtgtgacttgaattatgatgttcgtgatcgtgctcgtttactatcaagactcttgccgtgctacatgactcaccaagggtcctcacatcaacctcagaatggtgatatctataaagagctagccaatcatatatttaatgggaagttgcagccaacatctcatccagcaagcaactatcgcatatatcttccaggttcactttcgcaggttgttcttcatgcagcccctggttatgcaccacttccaaagcctcaaagtatggaattaaaccataatgtcacggcagcaattagaggcaaggccaaactttctggaagtgactccgatgctgaatctggatcttcaacatatgagagcagctctgtttatgattcggagagtgaaggtgctggcctatcggacagggatactgttgaatcccatcaggctcaagaagataaccaggatgctccactggtacagatatatgatgctagtatacagcaaggccaggcaggtcaaaatactgaggaaaatttggcagatcttatcagtaccgatttgactgagttgatgtctaagtcagccttggaatcatggcttgatgaggctcctgctgagccagttgttcagaatttgacacagacatcgtctgccagagtttcttttacaaaccgcaactttgagcgaaaacctaaactgcacacattgttagacccatctggcagtaatggattaagcgttctatatgccttctcgcctgaggtttcacccagatcacgtttgctagtatgtgtagacctatattttgagaatgtcactacacagcagctaacagatataaccattgaatctgaagaggcttctagcagtgtggattttatagaccaaacatcagaaggatattcgggtgtccctactatcgttcctgtggaagggatacattcgttggccccacaacaaatggcaaagttggttcttcaggtccattttcatcaccatatcttgcctctaaagctgtctgtgttttgcaatgggaaaagacatccagcaaaacttcatcctgacattgcttatttcgttcgtccactacccatggacctaaatactttcctatgcaaggaaaaccaattgaggggaatgtttgagtatgcgaggaggtgcgctttcaaagatcatcttcagaagctaggtcacgaggacagtgcagagcacatcgataagaaccttcaggtggcccagagtgttgcttcaaaaatactgagcaatgctaatattcaccttgtctcaatggatatgccagtaaccttcagtgtcgatgacgcctctggcttgtgttggagattcagcggtgaaatcctgagcacttcaaaaccttgcctgattaccatcctggcggaagggcgtgcctctggtccgctggaccttgctgtgaaggtgaattctgaagatacggtgttcgccctgaatctcctgaacagagttgtggcgatcatagattgaggtgagcatgaaattgtacattatcaacaaatagaagaggtatttggcaagcgcgtgactatttgtaagaaagtcttgttgaataatagcatctccaatagctctaaaaaaagaattgtgaaatgattgagttttacagcttgatgtgaaaaaagtgagtataatggttgtgtactaagaataccagagaaaatcgaagagatgggtgtagtctttggatcggtggatcgtcgacattggtggcatacataaggaagtttgggttgaatggatttaataacatacgtcttgtatgtggttgatattttgatgcaaaaaagatcagggattacatgtccagataatgtctaagctagcgagcaagagtcagggtgcgtttgattctgcattttgatgttctagagggcacttagtatcattcaagtgtgtgtcttctttggatgctgacagtgactcataa

SEQ ID NO: 20600 - DNA, 1182 bp, Zea Mays
gttttatttatttttcaaagaaaagatgcaaaaaggcaggactttgcaaagggagagatctaaaactagcaagccaggaatttacagcattcggagtcgcaacattagttctaagcaactttctacatggagggtccatgggcagctatggccacaacaggcatcttccttgctgccgcagtcactgattggctagatggttatattgctagaaagatgcagctaggaacaccttttggtgcatttcttgatcctgtggccgacaagcttatggtagcggcaacattagttttgctatgcaccaaacctttggaatcatcactgctcaatgatgggccatggcttctaacagtcccttccattgccatcattggaagagagattacaatgtcagctgtgagagagtgggctgcatctcagaatagcaaagttcttgaggctgttgcagttaacaatttagggaagtggaagacagcgacgcagatgacagcattgactctgcttctcgcaagcagagacccaagtctacctgcgcaaggcgctctagttgcccccggtgttgctctactttacgtctccacgggactcgccgtatggtccctagtggtgtacatgagaaagatatggcggatactgctcaaatagtattagcacaatatatatatagtgtaatagaagaaacaagcaaggcgagcatccgttcgtgatcgtacaacttttggaaggctgttgggtggcctgagccctagagctggttgggatcctcattcatctgtaacttgtgcgtcagtttttggtggatttgccgctaaatttgctgaggcatgccaggatcctattagatttttagaaacaagacatggtgtgaccctccgtgcgtaatgagaattcttagaaacaagaagacatggtgtggccctgcgtgcgtaatgagatactagtctgcgatgcagaagattgtaaccttatacaaatacaatctggaggtttctgcgtgtggagttctaccgttgtactctacacataatatcataatataccaagagcgtacaattattctttcagggtgtgtttgggagcaacaagactgaagacgttaaaatctccttatattcaaagcctctttaattcactttaatccacttgctcccaaacaaaccctagttgacaatatcccgtctc

SEQ ID NO: 20601 - DNA, 973 bp, Zea Mays
cccgtcgtcctctccatttccttctgtctgcttgccctcaaaccctagcccgtaccggcgtccaccttcgcgcaccctcgcctcaccaaacacccacggcgcattggcgcttccacctcttatcgtacgaaggcgagcggctttcacggtgtctctctgtcgcatgcaatggcaccgctgtttgaggggcgcccaacagctgcctgcccacggcatgctcaggggcgctggggtcccttgccgctgtccctgaagtctagcctgggttgttgatcttgccgcagatgcggtactccattacttctccgcccgcgccatcatttcggccacacctcagtctgttggtcggtcgcagatcccttgccccgtcgagcttaatatgcaatccgttgcttgtgaagattgtcgtgttttggacaatgccaacctttgtttccgctgtgcctgccaaggttgtggcttccttgggtgatgcttatttgagaacatagctgttgtgctctgagcatgtcctgtgtgcctgtcatggcggcttcttttggcgacatcataccaacatattcaatgtcaggctttaaagattggagaaacgcccatgggcctggcaaactgtggcatgtggctttgaactttgccaattggagacctgatgtggatcattttgggacgcgagttaagccccctgtttggagtgccagaaacaaaacagatggagaagggaaaaaggtgtcaggggataagagccagcgcctgatcaccgttttattcgtttttgagtaaactgtagcgagcaacaggtagcctataattgagacaatgctgaatggattgtagaaaaggatctgctttaatttccgttaatttagcgccttcagtgatgttcctagttgctggagtacatgttaagtatatttaccatttaaatcctcccaccactctcgcgtagctttataaaaaagctcttaataaacca

SEQ ID NO: 20602 - DNA, 224 bp, Zea Mays
cgccgctcccgccgtctgtccgcttcttccgtccgtccgcttctctctccctccctcccccaccccgcgagaccgccggcgaatttgttgcagtgcactgaagccaaccgctgcgggacaggaggaggaggaggagctgtttcaacaattatcccccgtgcgcccaggccagccccgcccccgcccactctcccgatgtgagcaacgcctttcctccagcggct

SEQ ID NO: 20603 - DNA, 3663 bp, Zea Mays
aaagcggtcagtgggtggaggcagccaagagtcaccctgtcgccgttgccgtcgccgaggcaggcagagtctccctgtcgccgttgccgtcgccggcctcctcctcctctgccacttcctcccaactcccagccgcaggggccgacggcgacgggagggaagaggcggcagaggtactccgaggggcgcggagagaggctgtgccaggccacgccgtccagtgcctccgggtccgtcgccgcagcttccggccgcgtcggagaggtagcccccggagctcttcgcggaggctcgggaatggtgcactgggttagcgacagtgatggcagtgataacttcgaatgggacagtgatggtaacggggagcagacagtgagcttcaacgctgctggtgctggttcatcagctctggcagcgacgaacactgatgctcctggcccatcgacacgggttgctaatggcaatgggaaggctgggcgatctgcctctttggttcagaagtatgtggacatgggtttctcagaagagattgttctgaaggccatgaaggacaatggggataatggagcagattcattagttgagctccttcttacttaccaggaactaggcaatgacctcaaagtggataatgactttgcttctagttgtgcccccaaaactgctgacgatagtgatgatgatgacacactggaaatctgggatgatgaggatgctggagggagaagcaccagggttgctaactctgttgatgattctgatgacgaggatttcttacatgagatgtcacggaaggacgaaaaagttgattccttagttaaaatggggtttcctgaagacgaggctgcactggctattaccagatgcgggccggatgcatctatttctgttctggtggattcaatctatgcttcacagaccgcaggagatggttactgtggcaatctgtctgactatgaggataattcctatggagggagaagcacagggaacaagaaaaagagaaaaagatatggaggccaagcacagggaagtagaggcccattagatggtagctgtgatgaacccatgcctctcccacatccaatggttggatttaacttgccagaccagtggtcaagacgagtggacagatcgttgcctgcacaagctattggtccgccgtacttctactacgagaacgttgctcttgctccaaaaggtgtctggactaccatatcaagattcttgtatgatattcaaccagagtttgtggactcaaagtacttctgtgctgctgccaggaaaaggggttacatacacaacctgccacttgagaacaggtcacctctcctccccatacccccaaagacgatatcggaagcatttcctcggaccaagaggtggtggccttcatgggacccaagacgacagttcaattgcctccagacttgcgtgtctagtgcaaaattgttagagaggattcgcgtagccctcacaaacagttcagacccacctcctccaagagttcagaagtatgtgttggaggagtgtaggaaatggaacctggcatgggttggcttaaacaaggttgctcctctagagcctgacgagatggagtttctactcggctttccgaaggatcacacgagaggtatcagcaggacagagaggtatcgatctctaggaaattcatttcaggtcgatactgttgcttaccatctctcagttctgaaggatctgttcccacaaggcatgaatgtgctgtctttattctctggtattggaggagcagaggtggctctccacaggcttggcatacagatgaacacggttatttcagtggagaagtccgaggtcaaccggacgattctgaagagttggtgggatcagacgcagacgggtactctgattgagatcactgatgtgcagacactgtcatctgagaggatcgaggcgtatattagaagaattgggggcttcgatcttgtgattggtggaagtccctgtaacaacctcactgggagcaaccgtcaccacagagatggtttggagggcgagcattctgcattgttccatcattattttaggatcttacacgccgtcaagtccatcatggagcgtttgtagttcttagaatctttactgttgttttggttctagtagaatactttgtgaccgaacttgtaaatggtttgcaggttgactggtttagttctcttgccactctaatttaggctagttttttttttatttaatcttctttggtgatcttggtgcagttctgtggcactgttgggtattcaaatgcagattgatccgagaggctgccctgttgcattttctttttaaaatttgtatttgtcaatgagagatcaggtattctggttgccaaaaaaaaatctgaagttgtggagctgagaaaaggacggtgctaagctacaaccacccactgccacaccatgcgcacccccaacccaaaagatcctgcttttgctcacgcttatcaccactcccatctccatccaaaaccataaaaaaaaccagtgcgagctgaagcatccaggctctggaatcatcgtcgggatgtctgtgccagcatcagcccaggtgcctcacaccatacgatctgctgggagctgctgcttcaggtcgtcgcatcaactatctgcgcagaatctgggccgacgtgagttcccgatctcagctttgagtggccttctttttgaaagtgagcacaggttcttccaaagcccgttgtgttcgtgtagatcgcaggtggcgggggaccggaaagaagaagatcctttccacccgtggcgtgcttgagtccagaaacggcgcacatcctggtggccttatgaagagaagcgcacgccttgcaggaaggtcgtggagcacatcatcctgctcagagccaagcccaacatctcagacgctgaagagaaagacatgctggactacctatacacatcgcagtaccagatgcgagggatactcgcggtctcgctaggccgcatcgaggaccccaacagcgacaacttcacgcacgctgtgttcatgcgtttccagcagaagcaagacatcgcggagttccagagtaacgcgtactactccaaagttgtcgacgagcacgtaaagcccgtttcctatggctcggtttctgtagatttcgagtccgaggtggaagacgacattatacctctctttcgcaggggagagaaagaagaagaaaaatgtggcaggattttaactacggcgtcgagtttatgctgctggtgtctttcttgaagactgcgtctagagaggcaacggaggacgcattagcgtctcttgacaagttgatcagccaatgcagcgcttctattgtgcaggcaacatgtggctgctgtttggatcgtccggataacgggtacagtcatgctgcagtaatccgtttcccatcatctgatgagttgaagctgttcagggagagcgaggagtacaaggatatgtgggcgtccaagttccgcccgatcgtggagagatccctgcacctgcacttcaccgttgaccccgtggggaaccagctgatgtagaccaaccgagtggtcatccctatacatgggaccaagagcatctgtactgtacagtgtaaaacagagagatggggtaatatagaggataccgatagggtcaacaaaa

SEQ ID NO: 20604 - DNA, 735 bp, Zea Mays
tacagagtttgaattgacatgtgatgtaattcttaaatcacttcccagagaagagacaggtcacaaacaatgctctagtgttggtggtgcacaggaagcttgggaccagcccagggtgacagggtctgcacggttcagttttccatagccaaaaccaagccagtggaagacatacccttagttatgcaattatgcaattgcagaagcatgttaaaattactactatgttgaagaattgaccagccagtttgctaggtgccaacaattgttgaactccatatcgggaacaataagctcaaagtctactacggttgagggacaaaggcagagtttggacgaaacacggcagctgcttgatcaaagaaaggagttgattacaaagtacagaggctctgtcgaagagctccttaagggagatcaaagataaagaaagcatcataaggcttaatatttaaggatttattgtcgtcaatacttgaactctgttacttgaattcggtggtatgcatcaatagagccggaagatgttctggagtaaggacctggcagtgtgatacgggaatttgacatctgaatagatattctcccttgtccctctggtaaaaaaaactgttgtcacatttgccttcgctgtgacttggatgtatcatgtatatctttgaccattgatatcttggttaatcagacggtgcattacaatcctggcctcattcatataccacgattggtttgcat

SEQ ID NO: 20605 - DNA, 1196 bp, Zea Mays
acctcccttgcgacccggacaagctcggacgtgagccaatctgctcatccgtgcaggctgtccacgcacggagctcgggatgcatctgcacacgctgccgttacaacgactaaaacacacacacacgcacaagacagtcctcgtgcgtggtttattccaacaatcaccccctaaactacgacgcggggatgtccgcctttcacaggagcgtcggctcgtcgtcagcgtcgacgacgagaagggccttctctttcttctttgcacggcagtccttggccatgtgtcctcggtcgccacagtcgaagcatcgcccacggtagcggctcctagcgcgtatggagctcgggctgtcgctatcgtcgtcggagtcgtcgtggccgtcgctacagccacctcctttctcgcggccaccacgtcgtcgatcacccccgtgcgcacgattcttgctgcgccgacgcgcctgccactgctcctcagtgagaagcaggcgcccaagctcatctgtcgtctcctccaggcagaagcggttctccgccacacggagccgcccgacgagctcctccagcggcattgtcttgaggtcgcacagcatctcgatggacgccgcgacttgattgaacttcggtggaacaacgcgaagtagtttccgcacgacgcgtacctcctccacctcctcgccgagctcgcgcatctccgagacgagggagctcagtctcatggcgaagtcgtccaccttctcgccttccttgaacttgatattctcgaagaccttgagcagcctttcggcgttggcctcccgaacacgcgcatctcccatgcgcatgcttctcacagccgcccacgcctcctttgcgctcttcttcacagcaagccccgccttcatctccggcggcactgcgcgcaggatggcagccaacgccctccgatccttggcacgctccctgcacacggcctctaccgcgtcccacagctccatcgcctccagcgaaacctgcatgaccaacgcccactcgtggtaattcgccttggtcagcagcgggagctcgacggagttggtgttgacgacgcgctccgccgcggcgctcgacgagcccacgccggtgagctcgcccaatcccggcgtcctcggtgtggccgacatctccccccaccaccccggctctggtaccaaatgttggcttcgtccaggaactctc

SEQ ID NO: 20606 - DNA, 4244 bp, Zea Mays
attttcgccgctccaattcgctcatccgtccgcgcgcccctcgccgaccggccggcgcggcgccggccgacgtcctctctccggggtagtcagtcgcgcactgcgcatcgctgttgttccttccggttcctttcgcgtccccccttcggagcagggcaacgtccaagagatattatcgctgccgctgccccgcgcgggccgctcgctgtcccactcgtgcgccacgcctcggactcggaggtgtattccctcttctccccccgtgcttatccgcgacggaatccaatcccttcgctcaagtccttctcctaagcaaagccccctcgcttttggcgtatgcccccgctggcgcgcccatgattcccgccgattcctccgcccgttcagtccagcaacccttgctgctgcagtgctgcggctagttcggtggcggggaaggaggaggaggcgagatcttggagtggggcgaagcggagatgtcgttgccgtcgaacaaccggaggacgtgctcccggagcagctctgcgcggtccaagcacagcgcgcgggtggtggcacagacgcccgtggacgcgcagctgcacgccgagttcgagggctcccagcgccacttcgactactcctcgtcggtgggcgccgccaaccgcccgtcggcaagcaccagcaccgtctccacctacctccagaacatgcagcggggccgctacatccagcccttcggctgcctgctcgccgtccacccggacaccttcgcgctgctcgcctacagcgagaacgcgcccgagatgctcgacctcacgccacacgccgtccccaccatcgaccagcgggatgcgctcggcatcggcgtcgatgtgcgcacgctcttccgctcgcagagctccgtcgcgcttcacaaggccgccgccttcggggaggtcaacctactcaaccccatcctcgtgcacgccaggacgtcggggaagcccttctacgccatattgcaccggatcgacgtcggccttgtcatcgaccttgagccggtcaatccagccgacgtgccagtcaccgccgcgggcgcgctcaagtcgtacaagctcgctgccaaggccatctccaggctgcagtcgctgcccagcgggaacctgtcgttgctgtgcgatgtgcttgtccgtgaggtgagcgaactcacgggctatgaccgggtcatggcctacaagttctatgaggatgagcatggcgaggtcatttccgaatgcaggaggtccgatctggagccgtatcttggactgcactacccagccaccgacatcccgcaggcgtccaggttcctgtttatgaagaacaaagtgcggatgatatgtgattgctgtgccactccagtgaaggtcattcaggatgatagcctagcacaacctctcagcctctgtggttccacactcagggcttcccatggttgccatgcacagtacatggcaaacatgggttctgttgcatcacttgcgatgtcagtcactataaacgaggatgaggaggaagatggggataccgggagtgaccaacaaccgaaaggcaggaagctgtgggggcttgtcgtctgccatcatacaagcccgaggttcgtccctttcccactaaggtatgcttgtgagtttctcttgcaagtatttggcatacagctcaacaaggaggtggaattggctgctcaggcaaaggagaggcacatcctcagaacgcaaacccttctttgtgatatgctcctgcgggatgctcctgttgggatatttactcggtcacctaatgtgatggatctagtaaagtgcgatggagctgcattgtattaccagaaccagcttttggtgcttggatcaacaccctctgagtcagagataaagagcattgcaacatggctgcaggataatcatgatggttcaactgggctgagtactgacagcttagtggaagcgggttatcctggtgctgttgcacttcgtgaagttgtgtgtggcatggcggccataaagatctcttccaaagattttatcttctggttccgatcgcacacaacaaaggagatcaagtggggtggggctaagcatgaaccggttgatgcagatgacgatggcaggaggatgcatccacgatcttcattcaaggccttcttggaggtggttaaatggagaagtgttccctgggaagatgttgaaatggatgctatccattctttgcagttaatattacgtggctccctgccagatgaagatgccaacagaaacaatgtaaggtccattgtaaaagctccatctgatgatatgaagaagatacaggggctacttgaactgagaacagttacaaatgagatggtccgcttaattgagacagcaactgcccctgtcttggctgtcgacattgccggtaacataaatggatggaacaataaagctgcagaactaacaggtttacctgtaatggaagccatagggaggcccctgatagatcttgttgttactgattctatagaagtggttaagcagattttggactcagctttacaaggaattgaagagcaaaatatggaaatcaagcttaaaacattccatgaacatgaatgcaatggtccagtaatcttgaaggttaactcctgctgtagtcgggacctttcagagaaagtcattggagtttgctttgtagcacaagatttgaccaggcagaagatgattatggataagtatactaggatacaaggagactatgttgccatagtaaagaaccccactgagctcatccctcccatatttatgatcaatgatcttggttcctgcttagagtggaataaagctatgcagaagattaccggtataaagagggaagatgcgataaacaaattgttaattggggaggtcttcacgcttcatgattatggctgtagggtgaaagatcatgcaactctaacgaaacttagcatactgatgaatgcagtgatttctggtcaggatcctgagaagctcttttttggtttcttcgacacagatgggaagtatattgaatccttgctgacagtgaacaagaggacagatgctgagggtaagatcactggtgctctttgctttctgcatgtggccagtccagagcttcagcatgctctccaggtgcagaaaatgtcggaacaagctgcgacaaacagctttaaggaattaacttacattcgtcaagaattaaggaacccactcaatggtatgcaatttacttgtaacttattgaagccttctgaattgacagaggaacagcggcaacttctttcatctaatgttctctgtcaggaccagctgaaaaagattttacatgacactgatcttgaaagcattgaacagtgctatatggagatgaacacagtagagttcaaccttgagcaagctctgaatacggttctgatgcaaggcattcctttgggcaaggaaaaacagatttcaattgaacgtaattggcctgtggaagtatcatgcatgtacctttatggggacaatttaaggcttcagcagatcctagcagactatctagcatgcgcccttcaattcacacaaactgctgaaggacctatcgtgctccaggtcatgtctaagaaggaaaacattggatctggcatgcagattgctcatttggagttcagctccaggcgttccagaggccctgatacaggagatgttccagcacaacccaggggtgtccagggagggcctcggcctgtacataagccagaagctggtgaaaacgatgagcggcacggtacagtaccttcgagaagccgacacctcgtcgttcatcatcctgatggagttcccggtcgcccagctcagcagcaagcggtccaagccttcgacgagtaaattctgaccctcatgctgctggaactgcagcgagtgttctgccgtgtcgaagtctcggttgtagctagccaagtggctgctactgaaacatcggttggtcggttctggtatctagcacggcctgtgtagtgcggatagatttggttgtttggctttggagagataagctagctggctaggtgtaacgtaacgtcgaccgataactgtatgtgaatgatgatgagctgtgaggacgaataaaggcttcacttgtgttctctattgctcttcttagagtatgatggccaacagctgtacaggaaagcatccacctaaatctgggctcgctgaatgacggctaaaagttgtttggtggctttaaactcttttatgctttgtaat

SEQ ID NO: 20607 - DNA, 207 bp, Zea Mays
agacaatgcaataaaggcgtaaagagagtagaattttattacatcatctgaatcattgtatctttaacaagtatcacatcaaagtaaagcggaatttaaataacaggggcaatctctcacaggaagatgaccggtgtatcgttagacttagaattcatcgtcgtcaatatctccatcaaagtctccagcatcaccctctgatcaaaa

SEQ ID NO: 20608 - DNA, 2624 bp, Zea Mays
ccttccggtcccccaccacgcgccggacatgaaatatcccactcaaaccaacctaccgcccacagacccaaatcggcaccccggaagcctcaaatccgctctattcctctctccccctctctcccccatcgcaccagcaggcgagcgcgaggcggaggagtagagatggagtcggaccagggcaagcttttcatcggcggcatctcctgggaaacgacggaggagaagctgagcgagcacttctccgcctacggcgaggtaacgcaggccgccgtcatgcgcgacaagatcaccggccgcccccgcggcttcgggttcgtcgtcttcgcggatcccgccgccgtcgacagagcgctgcaggacccccacaccctcgacggccgcacggtcgatgtgaagcgggcactctcgcgggaggagcagcaggcctccaaggccgcgaaccctagcggtggaaggaactccggtggcggaggaggcggcggtggcggcagcgatgcaagtggtgctcggacgaagaagatctttgtgggcgggctgccctctactctgactgaggatgggttccggcagtacttcgagacctttggcatagttactgacgtagttgtcatgtatgaccagaacacacagcgcccacgtggtttcgggttcatcacctttgattcggaggacgcggttgaccgcgtgctgcagaagaccttccatgatcttggtgggaagctggttgaggtgaagcgcgcattgccccgtgaggcgaatcctggcggctctggtggtggtcgttctgggggaggtgggggttatcagagcaacaatggccataacaccagctctggtagctatgatggtagaagtgatggtggcaggtacgggcagacacaacagggtagtggtggtggtggctatcctggctacggtgcaggaggctatggtgctggggcagctggatatggatatggtgctaaccctgcagttggatatggaaattatggggctggagggtatgggggtgttcctgctgcttatggtggacattatggaaacccaggtgcagctggttctggttaccaaggtggacatccaggctcaaatagaggaccttggggcagtcaagctccatctgcatatggaactggagggtatggtggcagtgctgggtatagtgcttggaacaactcttctggtggcggcaatgctctgaatagtcaagcccctggtggacctgcaggctatggaagccagggctatgggtatggtggatatggaggggatccatcatacgctagtcacggaggatatggggcttatggagcacgtattgatagtgctggcaatcctgctactggtggatcatctggatacaatgcaggctatggaagtggtggtgccaactctggctattcaagtgcttggagtgatccttcgcaaggtggtggatttggcggttcggtcaatggaggtgctgaaggacagtcaacttatggcactggctatggcagtgtgcagcccagggttgctcagtaaagagaggcattttgagtgtgcgaaatgaaccagtgcatctgggcagtctatgtattgatttgtcattccagtctctctggttgctctcagcattttgaagattgcccatttgctgcttaaatcagtatttatccgggttggaatgcttgatcctttagcggcttactactagaacgtctagtcaataagtagctaaaatgtggagtagcagtatcttgcggaatgcttttattaatttttacatttagctttatccatctgtgtggtttgccatgagtggagtttcaggttgcttcatctctagttataagctagagtagcttgactacttatgggcaaaattatctagttgtacctctattctacagatcatatatttgtgtttgacattagtatttatgctggatcttgctctacctatattctggaatgttctctatttggtggctgtattgacatgtggtattatcaacattgatgggtttgaaacagatgcaaaccctgaaatatgcaatcatagttacttgatgctgtagctgcttctaacagtattttcaactgtagtgcaagtgtttttatgtagctggaatggtacacccttcaagtatatcaccaagctatgaattccatccatttggtcctagatttcaatattttcaaagcagcagtaagcttattagcagcaagattgtagcgccaagtttctgaggttgaatgggatggcattctttttttagatatgcccaagcaaggtctatgaaatcaggcatttgaaaaaggcattttgcacagtgatttacatgaactggcgagaagttccaatatcggggttctgacagaatgcaagataccagcttaagtgcttcattttctgaagggtcttgtgctgtgctacaagatagtggacgaagtgcaacatgttggctggatccactttggctgggtctgagggagcatgggccaagatcttgggggctcggctgtgtggtgcaacgggcagcttgcttgcatactggtgatcgtggatgcttgtgatatagcattgccccccaatatttatgaggcctgggagtttgttttcattcaacacatatatg

SEQ ID NO: 20609 - DNA, 177 bp, Zea Mays
agggccgccgcgcagccatggccgcccgccctggccgagggccgcctagctcgcgtgctggggcccacgcccgccctggccgatggccgcctggctcagagccgccagaggtcgcgcccgcatggggttgcgccgccaggggccgcgccctggccgccggttggtttgggtggccgg

SEQ ID NO: 20610 - DNA, 162 bp, Zea Mays
aacacattttgggactaacaaatgttcattttgagaaagacagtatctgtagcgcatgtcaggcagggaagcaagttggagttcatcatccacataagaacatcatgacgaccgataggccactcgagctcctacacatggatctattcggcccgattgctt

SEQ ID NO: 20611 - DNA, 107 bp, Zea Mays
tgttacgggcttgtgttttggaattcccacagaaatgggatgattgtttaccattagcagagttctcatataataatagctatcaagaaagcattaagatggcaccc

SEQ ID NO: 20612 - DNA, 1197 bp, Zea Mays
ttttgttgcaatagcagttgaactgttgggcattttcggtgctttccggattactcatcaaggtcttgttgacagtctgaggtcatttagtatggaagcagatattggtatcaagaaactcagagttgcaaatcgtgtcactgcatcagaagtgcaatatgtagagctgttgtccttgatgaaaatagacaaggagatgccattacacaaacaggagcctcggatctttcatgctgatcgtcttttaccagatcttcatggtggatatgttcctgattctttcgtaccagatcttcatgatgagtatgctcttgatattgagaagtgtcctctttgtccgaactacaagcttgtttatgattgcacatcaaaggaatgcaagaccagcggatctagtatttgcagagggtgtgttgtttgcatctctagatgtttgcgatgtgggagatgtatcgacagtgagtttgaatttgaagagacattttttctggggagcatttgccatgactgtgtcaagtattcaccccaccacagaaaaatagatgtttgattctgttatccattggatggatacagttgtaacattggatttctgtgattgatgctcccatccatcagacatcttgactgagtatttctaacaaggaaaaaaagagaaaggtctaccagtttgctatcggtgtaggtgcagcagctgatatattgtttttgcttgcaagaaaaacgaaaaaaaaacagtataacccaggaaatcagaagatcaaagtatggtttccgtatcatggtgtcagcagtgaatggtgacaactgacaattgctgtagggatgtttccttctggaataatgggagtgctctgctcaggagtgttgaagtacaacatcatactttttttctttctctccagccggttgcttgatgctgcatgttcctggaacgtcagaagtaatttaattcattggcccaaaaataaaatcagatgtatctatctgtcccttacgttacctatctaattgcgtggctgtgtgctattacttgacaattgacaaatgtaatactagttactttctaggttatagacactttgtaccacgtgatttattagaataaaataaagacaaacctctaacccaactagattatatcgcgactgcatatgctcaggtgcctggttttgccaggtgcgtttcagttctatt

SEQ ID NO: 20613 - DNA, 1470 bp, Zea Mays
ggcacgtattgtgtgagaagcaggggaagatcaatgaagcttataagaagttgcaggatggatggctgaataatggggacaaagttcctcctgctgagtttgctaagagaatgaataaaggctatataggttaagttactgatcttgtacttattcatgaggtacagtttgtggtctgcatcacgatcttcttgtactgatagtatcctttgattttgaatgagcttgatctttggttgcactttgatgatatcctgactgccattaatccatttgtttcatggcaagtgcagagaatggatgctgtgtatgggcagttactagttaaagacggttgctttagctggcatatgaataatgcatctatgtgtattgactatcgagaaaaaggttttgtatgattttgttgcagctggcaaggcttctggtagcttagtcttagaaattagtacttggctgtttgcttttggtttagcctttttctgacagggaactggtctgggtactactcgccaaaggaccatatatcataattggaaaggagcaaggcaagctgtagggaagatcactgcacaattatttttatattatcgttcctataaggttttgagaatctgtggttaagttgtattgtaaagctagttagtagcaaaattgtttataaggctatttgagctcttatatcttcatacacatttaatttttcgcagcttgtgaacattgggaagcccaattaaatatttgaatctgcatagagtattggaaatagtcaatagtggtgaacttttgaatgattcagttttgagactctggttggagcatgtgtagctactatttagtggggtgcatgtgacatcaaatttcgattgttgacctcatatatgttactggacttcaaaatttgttcttccattttcaatctgactaactacttcgtcgaagtttttctcatattttttgtgccattattagataccatgatgataatagatcctgactttattttttgtactacaggtagcacaagagtattctgaatgcccatcagggaagaaaggtggagatcttggttggttcccgcgtggcaagatggctggtcctttccaggaggttgctttcaacacacctgagggaactgttagcgcaccattcaagtccacgcacgggtatcactttatcctctgcgaaggaaggaagaactgatctggaaatgtcggttggggagactgcatcatcaggttgtatgagacgcaatgcaaactactcaccttctctaataagcgctggacatgtgtactttgtgttgggctattcgcattctgttccaaacaagttgccaaaacaaaagaatgtgtgattcgctgtaattaacatattgtactgataatctgatatggcatacctatctgggtcagttaacaggtgggttttagcataccaaaatgacagtacatcatacaaaaaaatctt

SEQ ID NO: 20614 - DNA, 754 bp, Zea Mays
agccagctgtcttgttcctccgtccgggaggacgaggaggaggaggcgcatccctccatcctctgcgacttggtgcgtctctcgagctcgagtcgattgatgattcatcttcctagtctcgtctccgcgccattctccaaatccatctatcatcaccatcccgatcccagccccagccccagccccagccccgccagacccagacccgatgcagcaacagcaggacccagcacccgccgatcccgacccactgccgccccccgacctcggtgatgccgccgcctcgtccgcaacgcagacgatcccttcccgcaacgcctcctccaagtacgatttcgtcaaggtcaaggtctggctcggggagaacgccgaccactactacgtcctctccaggttcctcctcagcaggatgctcacagtcaccaagattcctaatcatgtcgccatcaagattgcccttgagctcaagaagctgcttgtcgacaacagcctgcttgatgtatcccagagtgatctagaggctaatctgttcaaggttagcttatggaaaaacggggatacggagaggagtatataaatcgctataaaatgatgacaaggttccatcatcaacgggttccactagtaattttggtgtgtggaactgcctgtactggaaaatcaacaatcgctacacaacttgctcagaggctcaatttgcctaatgttttgcagactgacatggtgtatgagctgctgcggacatcaacagagt

SEQ ID NO: 20615 - DNA, 447 bp, Zea Mays
tcaaacttgagagccgactggaaaagaaggttctttgtacttgatagtcgaggaatgttgtactactatcggaaacaaattactaggccacctgctggttgctccatgcaaagaagtgttaacccccctgaacatggttctgggttgttgagcagattgttctcatctcattaccatggcattgtacatgatgaaaagtctgttgcacggcatactgtaaatttattgacatcaaccattaaagttgatgctgaccaatcagatctgaggttctgcttcagaatcatttcacccacaaaaatctacacattgcaggcagagagtgcagtagatcagatggattggattgaaaagataactggtgttattgcctctttgctgaactcacaatccccagaacagccctaagggcagtggtcatgataggagtaccagcgatggaagctc

SEQ ID NO: 20616 - DNA, 4768 bp, Zea Mays
atggggaataagatcgcgcggacgacgcaggcgtcggccacggagtactacctccacgacctgccgtccacctacaacctcgtgctcctcgacgtcgtcagccgcggccgcttcctcaagtccgtccgctgcaagcacgacgaggggctgctcctcgtcaaggtctacttcaagcgcaccggcgagcccatcgacctcaaggagcacgagcggaggctggagcggattaggaaggcgttcaaggggattgatgggtcccatgtatggcccttccaggtttggctgcaaacagataaggcagcatatctcctgagacagtacttcttcaacaacttgcacgatcgactgagtacacgccctttcctcagtcagattgcaaagaaatggcttgcctttcagttaattcatgcagtggagcagagccatagtaagggaatttgccatggtgacataaaatgtgagaatgtgcttgttacttcttggaattggttatatcttgcggactttgcatcattcaagccaacgtatatcccggatgacgacccatctgatttctcattctacttcgacaccggaggaagacgaagatgctatctagcacctgaaagattctacgaacacggtggtgagtcccaagttgcagcagatgcacctctgcaaccatctatggatatattttctcttgggtgcgttcttgctgaacttttccttgaaggtcagccactttttgagctttcccaacttctggcttatcggcgtggtcaatatgaccccatacataccctagaaaagatacaagatactggtatccgtgacatgatacttcacatgacccagttggagcccaaaaaaaggttaccatgtcgaagctatctgcagaaatatgaaattgttgtgttcccattttatttctcaaaatttttgcacaagttcttctcagatattgttccacttgactccgatgccaggttctctttgaaggttgaaaagactcaagaaaattttgaaaagatacatgaaataatgatgggcagctcaacaattgaacaaattgagaggtccacatcgtgtgagcatagtgaaccatctgggagaaaaggcatgggaggagaaactttatattcaccaggagattatagaaacagcacatccataggtaagaaaaatacttctgtagaccatcaacatattgtcggaggtatcaatttcctcctcaaagaagtggagagcaggagcaacaacacaagcacaaaagtcacaaaagacactgagcattttgttgcaccgagcatttcatgtgcaagtggtgttcagtccttgcagctagttaatccagcaggaagacaaattggaagtggtttgatgagccagaacaatgctgtatctcatgtgaagaagatctcaaagactaacttatgctccttagtggctgcttatgatgatcaatcagatacctatagttttgacatttttcagcagatagacaccaaggtgagctgtgaaggaatggttttgcttgtctcgttactctgctcatgcatacgcagtgtgaaaaaacctgagctaagaagggccagcctaattcttctgaagttctcctccacatacatagatgatgataggcgcttacagctagtgctcccctatgtgattgcgatgctttcagatccatctgccattgtccgttgtgctgctttggaaaccttatgtgatgttctttgtcttgtgcaagatttccctatcagtgatactgttatattccctgagtatgtcctcccaatgctctctttgctccctgatgatacggaagagagtgttagggtttgttatgctagtaacattcacaagctggctttaacagcttacaggttcctacttcgttctcgtagcatcgcgaatattcgacctctggatgaatcactggtagctcacagatcccagtctgcagattcaccagcgaagaggcaagatattttttttcgccaacttgcagaactgaggaaatctatttatgagatagtgcaagatttagtgatgggacaaaagcagacacctaatacccgtagagctcttctgcaggatataggttatttgtgttacttctttgggcacaaacaaagtaacgattttcttctgcctatactcccagcatttctaaatgatcatgatgagcagctccgtgcagttttctttgcccagattgtctatgtttgctattttattggagcaaggagtgttgaggaatatcttctgccatatcttgaacaggcgctaagtgatggtatggaggctatccttgtaaatgcacttgattgcttgaccatgatgtgcaaaagtggttatttgaggaaaagagtaattgttggtctattggtaaaggttctccccctgctccggtatacaatcaattgggttaaacagtctgctgtaagatttgttgctgcctgcagcgagagcttaggatctgtagatacttatgtgtatctttctcctcagctacggcagttcctacacagggagccaccttcattggactctgaaactgctcttctttcatgtcttaagcctccactaccaaaatcaatgttctacgtacctttagaagatgctcaggacattggaaacattttactgaagagcagtggcaagaaagaacagatattacatggtggaagatactctggcatggcacaaagtggatctttgggcaaccttgaagatattcgtcgactgaaaggcactaatatttccagcagcgtgtccttggatgtcaaagactccttttcttttggcaaatcactatattctggttttgctctacatgcatctgctgcaaatagctccttttatgatggcttatctaaaggaataccatcatattctttttgtattgataaccggggtttaggagaaacacacatggtccctgattcatcagtgtataaagcttcgataaggctaccttggttggaaccgaatcgtcctggcatgcagactagagatgatcatttcagtagcaagcggcgagatttaagcatcaatgactctttgaagagcaattcttctttgcaaggggatagcatttcaaactctgatactggaggattgccgttctccagatcagcagtgaacctggagactggatggaagcctcgaggaattctagtggcacatctccaggaacatcgcttttctgtcaatgacattgccgtgtcgaatgacaataccttttttgtgactgcttctgacgactcgagtgtcaaaatctgggatacaagaaagttggaaaaagacattgctttcagatctaggttaacatatagcgtgggtaatagccgagctttatgtacggcaatggttcatggtacttcacaggttattgtcggtggtagcaatggaacattacacttgttttctgtggattgtgcacgaagcgttgggagtgtcgtggaaaggtatgctggaattgttggtgtaaaaaggaatgatatcaaagaaggcgcaattctcagcgttgtaaattgttcacccgacagctttagcccaactgttcttttcagcactgaacattgtggtatccataaatgggatacaagaaccaactcagaattttggtattttaaatcctctccagaggagggctatatatcagcacttgttgtgggccagtgtgggaattggttcatctcaggttcttcaagaggtgtccttacattgtgggataataggtttttactacctgttaactcgtggaactattcaatagtaagcccaatagagaaattgtgcttgcttatacctccaccaagttcaatatcttctgctggaaggccactagttttcgttgctgccggatgcaatgaagtctctctgtggaatgctgagaatggaagctgccaccagatgtttagaacagcgagcactgataatgaagctgtgatgtcaaaggcaccatcaaggcctgttaacaagccaatcattaaagatataataagagcacgtaattataagtacagaatcgatgagttgaatgacccacctgtgcgtcgtccaggcattcgttctttgctacccttaccaggtggtgatctgttaactggaggaacagatttgaagattcgttactgggatcaagccaggcctgagcaaagcttctgtattgctggtccctcggcgaaaaaagtccgttcagctaaagctgacattttagagaaagcagctggaaacgatgagtgttacgatataagatccagttttggagtacaagtcgtgcaggaaatgtacaaacagaataccacggtatccggtttgacgcccaagactcagttcgcggaggcagctgcagattctgccgggtgccatcgtgacgcaatactcgcgctggcatccttcaacttgtctagccagagattgatatcagccagcagagacggtgctgtcaaagtgtggaaatagctgctccagcatgggtaagatgacaagtcctttggcgtgtacatatttgcctggttagtgcttacacagtacacatatgccactagttattgttgtacagaagattgatccacacaagagtcgaaattgacacgtaagctttcatcctgtgtgacctgacctgtgtatataaataccaatggcttacctaccttacagtagtatattcatggattagtaaaagatatcataatgaataggaggtaggaaggctgtctaactacaataacatagggctccaaccataatcctccacacaaaaatgatctttttt

SEQ ID NO: 20617 - DNA, 2978 bp, Zea Mays
ctttgcttcccgcctgcctccatcactgagatgccatgttcttagcgaggaagtgttgatggataatctctctccaagcactctgctcaacagtatcacctgtcttggcgccttaacatctgatgtctctactgtgagacccaagcctgttcagaagtattgcaaaaatgtatatgatatctcaagcatcgtgaatccccttcttgaagatctttgcaagtctcccgaagagcaacttaatgaggtcctaagagatcttgacaccgctgtcaatgaagcttcaggtcttattggaaactggcaccagacaaccggcaaaatatgttttggttggcaaattgagtcagtaatatcagatattcagggatgttcccttcagttgtgccagctggttcattcgctattgccttctctgactgctcgtgcatgcacatgtattgagaaactccaggacataaattatgagcacctgtttgatctggttaaggaggttgccatggagcttgcagagacaggtgcagtgagttctgagaatctgttgaaactatcaagtttgttgagcttgtcaacaaacatggaattgtacatggaagctgtttcccttgagaatctcagaacaagggcactacgaagtgagaatcgtgaagaactggagctagccgagcagatgattccactggtcaactatatgcatgatcatcttctcagggaaaaacaacagcttagcatcaatggtgtccctattcctcctgatttttgctgtcccctttccttggagctgatgtctgatcctgttattgtagcgtctggacagacctatgagcgggtttatatcaagttatggcttgatgagggttttactatctgcccaaaaacacggcaaagacttggccactccaatttaatacctaattatactgtgaaggctctgatagctaactggtgtgaatcacatgacattaggctccctgatcctataaaatcactgaagttgaactttccttctgctgcctcctcccttcaggatttgagtgctgcaggtggcagccctctacatcctactcttgtgtcaaggtctaatattcctgggtccccagaagctgatgtgcacttgagaaacttaaatggcgcatcttctcctcgtagtttggccaatcagaattctcatgtgcatgcaaaccgtcctggtcatgaggtatcgacgagtcaaacttcagaaaatgcaaatggttctgcaccagatgtttcgaggttatctctcgcaggttctgaaacaagagagtctagtatggaagcaaagcgtgctggttcgattggacaaatgtcagaacattctactgatgaagcatttcaatcttctaatttagataggaatctgcaggacaacttggctagctcttcattgaatggtagtctcccaaatagtggtcaacttgatggggaatgtgacaatggggtgacaagggttccaagcgataggacaaattacagtagtgatgcatctggagaggttacagatggcggtgctgcgcccgtagcctcttctgttcctcaaagggaacacttaattcctgcaagattgggtactagacaatttataaggcggcaaccatcagataggggtttccccagaattatatcttcatcaacgatggatacacggagtgatctctctgccattgagaatcaggttcggaagctgattgatgatttgaaaagtgattccatagatgttcagagatcagcagcatcagatcttcgttctctagctaagcacaacatggagaataggattgtcattgcaaactgtggggctgtaaacgtgctggttggtcttcttcattcaccagatgccaaaacccaagaacatgctgtgacagctcttttgaatttgtcgatcaatgacaacaataaaattgctattgcaaatgctgatgctgtcgaccctctcattcatgtccttgagactgggaaccctgaagctaaagagaattcagcagctactctattcagtctctcggttgttgaagaaaataaagtgaggattggacgatctggtgccatcaagcctctagtagacttgctaggaaatggcacccctcgaggaaagaaagacgcagctacagcattgtttaacctgtcgattcttcatgagaataaagctcgcatcgtgcaagctgatgctgtacagcatctggttgagcttatggatcctgctgctggaatggtcgacaaagctgtggctgtgttggcaaaccttgctacgataccagaaggaaggaatgcgattgggcaggcacgtggcattccagcccttgttgaagttgttgagttgggctctgcaagagggaaggagaatgctgcggccgcgttgcttcagctctgtacaaacagcaacagattttgcagtatagttcttcaagagggcgcagtgccccctctagtcgccctttcacagtcgggaacaccgcgtgcgagagagaaggcacaagcgcttctgagctacttccggagccaaagacatgggaattcagcaaggagatgattttcccccttgtgttgtagtgtacattaaagcgtcaccttttatgcccatcatcgtgattgggtcctgttgactgttactgattggcgctggtaaatgcgttggctggaattatgcagtgccctgtgctctgtttatagattgagattgttattgctcatctcatgtaagtgttgtgggcggtgagtgttgtctgttgagatggtatgtttttttttcttctctttttcgtttttgaggattttttgtacagcttatccgttggtagcaacttgcatattcactgattttgtcctgtatgtatattctattagctgtggcctgtggaattatgatggttcgatggttgtacaagttatttatttgatctgtagtaccagctaccaaataaggccacatttggacgcaaagtatttttgaagtattggataaa

SEQ ID NO: 20618 - DNA, 1191 bp, Zea Mays
gcgataacgagcggcgccgcggcgggtcaggcagacgccacagcgctagcggcatagccggcgacagaaacaaccgatgccactcctcgccgtctgtccccgccgcgttccgccgctttcgctcgcgcgccgccaccgccgcagcttgtatcgggcccggtccctcgcgctcaaatgcgaggtctcctctcctccgctacttctgacccggaggatgtccgccgctggctcgctgcttgtcgctgtcgtccccgtccccgcgccgtcgccgcaactccccgtcgcctccgcgtcggagttggagacggagacggcggaaggagagagcggagcttctgaggggttagcattggagcgttacaccgaccaggagcagggcttcaccctcctcaagccggcctcctggcccaaggtggagaaggcgggcgcgacggcgctgtttcagcaggagggaaaagggagcaacaatattggggttgtcgtgaaccctgtccggctcaattcgctggcggagttcgggacgccgcagttcgttgcggacaggcttctgcaagcagagaagaaaaaggaaagtaccaagtctgccgaggtgatttcagtgggagagaggtcaggtcatggtggcttgacagtgtatgagatcgagtacacgctggacagcacaaggggagggatgaagcggatcttctcgggtgcgtttgtcgcttcaaggaagctctatctgctcaacatagcctattcagacacccaggagaagcccttggacagggagacaagaaccgttctggaaaaagttctccattcttttgattctgtataggtgatatttttttatagccgaggtatggcaccttttcttattttcggaatttctttcacttgaaaatacagtcgcaagtaattgtttgtttgtaaaatgagtgctgaccaaaatagctgcagtgtccatgtgtccaatactgttgcacttgcacctttatcagtgatttcaggttataagtaatttcagttcagataatgagcttcatcttctacagattggtagtatttgtgtcaccaggcagtaaaatgttgtgacctttgattcctagcctggcattactgcatctgtaatatcctggacaaagcgtggggtggtggcagtgttattccttgaaaaatctctgtgatatacggttagatgaaaataag

SEQ ID NO: 20619 - DNA, 1481 bp, Zea Mays
gtcgccgatccctcttgcttcccgtcgtcctcgtcccaagttccaaccccgtgggccgctacatcgccaaaccctaactaggtttttttcaagcctccccttccctaccctcgccccccatggatccgttttccaagaagcgcaagcccgacgacaacggcgccgtcactgcttctcccgccggtggggctgccacgctgggtctcacccgcgaggacgtcctccgcctcctcgagccgctctcccgggaccagcttgcggacatcgcggccgccgctgcactcgtctcggcgcacgcgctcgatgccgtgcgcgcagccgccgaccgcgacccggccctgcgcaagctcttcattcgggggctcgggtgggagaccacatccgactcgctccgcgccatcttctccgcctacggtgacctggaggaggccgtcgtcatcactgacaaatccacggggcggtccaagggctacggcttcgtcaccttccgccacgccgattccgccgtcctcgcactcaaggagccatccaagaagatcgacggtcgcatgactgtcacgcagctcgccgccgccggctcggcaggcgggccgtccgttggggctcccggcagtggcggtgctcctgtggctgatgtgtcgctccggaagatcttcgttgggaacgtccctgcagacatgtcgtcggagcgtctccttgcgcactttgcctcctacggcgagattgaggaggggccgctgggatttgacaagcagacgggcaagttccggggctttgcacttttcgtatataagacacctgagggtgcgcaggcctccctggtggactcggtgaaggtaattgatagccaccagcttgtatgcaagcttgccatagatgggaagaaggggaagcaggggcaatcacagcaatctggacctggcaaccagcagcagcaacagcaacagcagatgctgccgggtggtccgcaggaaattcagggaggcctggggcttggttcacaaatgggagcacagtatggtggccctgggagtggtatgccttcgtttggttttggtggcgttggcggtgggtttgggggtccaaacccttatgctaacatgccatcttccatgggtggaggaggcgcaggtgggttagggtcggtgggaggccaggtgcccactgggttggctggtgctggtggatttgggcctgggggattgggtggtggctcatttgggggatcatctcagtttggtgctgctgggatgggggcatatggtggccttggaatgggtggaggctccatgtaccgcatgcaacagggagcaggtgggctgcctgcaggcgcatttggtgaaggaggaaactaccctcttccaggttctggtttccgaggccacgaccctcaaggtggaatgtctcctcctgggccaggtggcagggctcctcctatgtatcccaacgtgccaccttatttctaagtgaatgtgtgactc

SEQ ID NO: 20620 - DNA, 2294 bp, Zea Mays
ctcatagagtcaaaagtcattgcagacttgcaagcttccctcccctactatcaggcgaatcatatccatccacttactacgctgctaggctgctacgaacaaaatcctcctaattaagacgggcgtcgttggcttcaaatactgggtctccccgtttctgtccggcggttctgccgttccactgcttttgatttcggagtgtgaacttacatcttgctggataataaagattggattttaagcgatttgggggtgcttgcctgatctccccctgcgaggtactgccgggggattggatttcggggaagttttggtggtttgagattcggcttggccggagcaggaatgacgatcgacatgtccattcccgggagctccgggctgctgaacgctgcggggaagagggacatgaagttcttcagcaacccctacgtgcttgcgctcacgggcgctgcaggaatcggtggattcctctttggctacgatacaggtgtcatatctggagcccttctgtatatccgcgatgattttccagcggtcaaggacaattacttcttacaggaaacgattgttagcatggccttagtcggagctatgattggagctgctgggggtggttggatcaatgatgcatacggtcgcaagaagtctactcttcttgctgatttgatgtttgctcttggctcacttgtcatgtgtgctgctgctggtccttacattctaattatcggaaggctcctcgttggtttgggtgtgggtgttgcatcagtcacagcaccggtatacattgctgaagctgctccttcagaaatcaggggaggtttggtgtcaactaatgtactcatgattaccggtggccaattcttctcctatcttatcaatcttggctttactgaggtgcctggaacatggcgctggatgcttggtgttgctgctgttcctgccattatacagtttgtgctgatgctattcctgccagaatctccgcgttggctttactggaaggatgagaaggcaaaagctattgccgtccttgagaggatctatgaatccgaccgcttggaggaagaggtagagctgcttgctacatcctccatgcatgaattccagtccaacaataccggaagctatctggatgtcttcaagtcgaaagaattgaggctagctttctttgctggggctggccttcaggccttccagcaatttaccgggatcaacaccgtgatgtattacagccccacgatagtccagatggctggtttctcctccaacaggctggccttgctcctctccctgatcgtcgcggccatgaacgccgccggaaccatcgtcgggatctacctaatcgaccgttgcggccgccgccgtctggccctcacaagcttggccggggtcgtggtctccctggccatcctcgccacggccttcatactgcagtcatcatccggcctctgcatgagcgccgccagcggcacgtgccagggcgcgctaggctggttcgcggtggccggcctcgctctgtacatcgccttcttctccccgggcatggggcccgtgccgtgggccgtgaactcggagatctaccccgaggcgtaccgtgggacgtgcggcggcatgtcggccaccgtgaactgggtctctaacctcgtcgtggcacagacgttcctgtcgatcgtggggctggtcgggaccggcccgacgttcctgatcgtcgccgggatcgcggtgctggccttcgtcttcgtggccacgtacgtgccggagacgaagggcctgacttttgagcaggtggagcagatgtggagggagagagcgtgggggaacagcggcggcaactgcgagagccttttggcgggtactgctgctgcgccgtaggctacccgttgccagcactggtcaagcgcgtcagttttagtatggccgctctgggcttgatcggctccgtcctggcattagttggaagaaagtaaaaacagattggagatgcagatgcaaactgttgtatgtggtggtgcttatattgctatcctgttgcctgattgtacgtgttgtcgtcgtggcaaatgttcagtgggtgtaaaatatgaggtcgtaccgtgacgtcaaactaaggcaaaaggccagttgtatgaccccagatgggtgattataattatttgtacagtttccggcatatgaatgaatgatgtcctggagagacagtagggcaggagtttttttttggttgtccttggtcaagtgagttggtgtttgggctctacatgcggaccatgacaaacgagcacgatcagtag

SEQ ID NO: 20621 - DNA, 1410 bp, Zea Mays
gagtgggatcgagatgcgtgcgaacagagccggcggcaaacgcttcaatgcaactctaatgctagagatgttgcggggtaaacgaatgttgtttgttggagattctctgaaccgtgggcaatatgtatctttggtttgcctcctgcaccgaatcatccctgagagctccaagtcaatggagacagttgattcccttacagttttcaaagcaaaggactacaatgccaccattgagttctactgggctccctttctggccgagtcgaattcggatgatgctgttgtgcaccggatcgcggatcggatcgtaagagggacatccattgagaagcatgccaagttttggaagggggctgacatcttggtattcaacacctacctatggtggatgactggacaaaagatgaagattttgcggaactccttcgaagataaaagcaaggatatcatagagatggaaacggaggaagcctatgagatggtacttaatgctgtgctgaaatgggtggagagcaacatgaaccccaggacatcaagaacattctttgtcactatgtcacccacccacacaaggagcagagactggggcgatgatactgacgggaactgctacaaccagacagcccccatcgaggacctgtcctactgggggccagacaccagcaagggcctgatgcgcgtgatcggagaagtgttcagcgcgtctaagtccaggatccccgtgggggttgtgaacatcacccagctctccgagtacaggaaggacgcgcacacccagatatacaagaagcagtggaacccgctgaccccggagcaggtcgcggaccctaagagctacgcggactgcacgcactggtgcctgccggggctccaggacacgtggaacgagctgctctactccaagctctttttcccctgagttaaaggtttgagttgcgaggtgcacggtgaagttggggtctctctctggcattggcacgctgcacaatactagttagcttggcattggcccagcagtctgaagatggatgctctgctgcggtatggcatggcatggtattgttgatgtacgattcattcgttggaaaacctggacgtgagtgctggaattgcaccatctggccttttctgtacatgcctgatgtaacggtggtgttgtgtttccccaccaccacctctcttttcacgatgatgacacagtgcatgaatagttgtatggggtaatgtgataatacatactgtaattctctggttccttcccttcttctctgtttgccctcccttttgttgggcctacgctagcatcaaatctgtctgataggctgggccttgcggagtgggccggtagacaaacatttcggcggctggtcacttggtcagtgacccgttgatattattattattattgga

SEQ ID NO: 20622 - DNA, 1548 bp, Zea Mays
gccccagcttatacaccagcagtgtgaaaaaataacattgaaagataaatccttgggggattgcaagctttcgctgtgcggttgcggtcgctccccttcccgactccggccagaagcagcgacggtgccggcagccggttactccactcggcggcggcccatcctttcatgttttctcctccagtcctacaaatacaggacacaacacgcttgctcttgtgatactctattaaggtacggcctgaagatgagagtcctcttcatctggtgagaacgaagctccttttttttaaaggaatacgacgctcttatatgcttacgtggattttgttttagtttttcgctaatatatattaaagaatgttttgcttgaggaactactggtcgcctgcatttgcttcagtaaaggaggggcctgttcgacatcatataaagtttaattgtgtagtggtttgtggtgccaggggtccaagaccgagatatccccgtgtatggaaaactcgtaagaaaattgggactatttccaagtcacagaagcttgttgaatgtattaaaggtctgtctaatgtaaaggaggaagtttatggagcgcttgactcttttgttgcatgggaactggagtttcccttgatagtagtaaagaaggcactgaagaaacttgaagacgaaaaggaatggaaacgaataattcaggtcattaaatggatgttcaacaaaggtcaggggaagacaatggggagctattacaccttgttgaatgctttgatcgaggacggacggattgaggaagcagaagagttatttagaatggtattctcacgatatatggagggtttgcctcgtacatttttcatgagaattatttctttctattacagtgctggagagcatgataagatgttcgagatttttgctgatatggaggaactaggcgtaagaccagatggttctattatcaggatgctaggtgatgtatttcaaaagatagagatgatggacaaatacgaaaagttaaaaaagaaatacccaccaccgaaatgggaatatcgatacatcaaaggcaagcgcattagaattagagtttaccctgatagtaaaactgaagagacggcaaaaggagaccatgacaatgatgaactcggagaggtagaaagtatacagcttgataatgaattggaagaagaagcaagctcaggcctcgacaggagtgtattggacgatgcaacttgtggagaccttgaatatatataattcagagcttccatttggttttttttaatgcctgcttaatcaaagcggcctggagcaaattgaaccgatcccacggcggtaacaccacaacaacaacgagcgccatcctcttcgcgtctgtgagctcaccgcggcggcgtgtacgcggatgcgaacgacagtgcgtacggggacgcatctgggcgggtagacactcgttgcagtcttgcggcttgctttttctccaacgatttcacgcacatgcatttctctgatatttcaatagtattttttttgtatgttttaactttgttttca

SEQ ID NO: 20623 - DNA, 2327 bp, Zea Mays
cccacgcatgattgtgcatgcttggcccgatagacccgtgggcctggtcatgtcgtgccttggcatgagcccaggtcgtatcgtgccgagcatgactagtttgctcatctatagttttgtgtcattgcggccttgagcccataagctattcggcccattagcttagcccagccgagacgccgcgcgcggcacagccctcctccggtactcggtcagtcggtcctccacactcctcaccagtcaccaccagaccaaatcgcagccgcgctcgagctaagccccgccgccgacgccgtcatctgcgccccagaaccccgtatttccctccgccgccttccgatctctcgctcctccccatgtcggagaaaaagcgccgcgccggtgcgagcgcggccggcgccgcatccagctccaagaagccgcgtgcttcctcggccgcgtcgtacgccgagtccctccgctcgaagctccgccccgacgcctccatcctggccaccctccgctccctcgcttctgcctccgcttccaaatccaaggccgccgccaggtccctcgcggaccacgacccgtgcgcggaccccgcctcctcgtacatcgtggtggccgaccaggactccacctccgtcacctcccgcatcaaccgcctcgtccttgccgccgcgcgcagcatcctctccggccggggcttctccttcgcggtgccctcgcgcgccgcctccaaccaggtctacctcccggacctcgaccgcatcgtgctcgtccgccgcgagtccgcgcgccccttcgccaacgtcgccaccgcgcgcaaggccaccatcacggcgcgagtcctctccctcgtccacgccgtcctcggcaggggcatccacgtcaccaagcgtgacctcttctacaccgacgtcaagctcttcggcgaccagacccagtctgacgccgtcctcgacgacgtctcctgcatgctcggatgcaccaggtcctcgctccacgtcgtcgcctccgagaagggcgtcgtcgtcggccgcctcgtcttcgccgacgacggggaccggatcgactgcacgcgcatgggcgtcggcggcaaggccattccgcccaacgtcgacagggtctcgggcatcgagagcgacgcgctcttcatcctcctggtggagaaggacgctgcattcatgcgactcgccgaggacaggttctacaaccgcttcccctgcatcattctgacggccaaggggcagccagatgtcgccacccggctgttcctgcggaggctcaaggttgagctgaagctgccagtgctcgcgctggtggattccgatccatacgggctcaagatcttgtcggtgtacatgtgtggttccaagaacatgtcgtatgacagtgccaatctgacgacgccggacatcaagtggctcggtgtccggccgagcgacctggacaagtacagagtgccggagcagtgccgtctccccatgaccgatcacgatatcaaggtggggaaagagctgctcgaggaggacttcgtgaagcagaatgagggctgggtgaaggagctggagacgatgcttcgcaccaagcaaaaggctgagatacaggccctcagttccttcgggttccagtacctcactgaggtctacctgcctcttaagttgcaggagcaggattggatttgagaactctccaatgctagatatcagtaatttccctagccaagataatgccctcctccgctcagtattttcaaggaccaaattggcatgaatgaagacttcgctatctagttaatcacatgtatttttgaacaccagctgttgtattatttatttctgctggagaactgttctgtggaaaacattgctgccagatatgtgctggaatttgatacataacacaggagggcggcttccaggttcaatcaaaactaatttcaacttcagctcttgcctgcacgacatcaactgcactagtttcagtaattattgcctgcacgatgtcaactgcagtagtttcagcttcagctcttgatgtcttctcatgatccgtgatgataatacgaagtggcagctcaacatgacctaggaggtattgctctttgatcttccgaagaacagatagaacaattcgagcttcaacctgcagaatacatggtattatggattacggtaagcacaaaaaacatagtgatggtttctgtaaatatcgctattcaaaatcagtcattatgttcatgtagcagatcatctgcatatcatatagcttgaattagttggatgtcatttattaccttttggaaggccacaaacatcgacaatttggttctgatcagcatcttt

SEQ ID NO: 20624 - DNA, 2024 bp, Zea Mays
tttcttcgaaccagttctgagcagtgtagccctcctgtccgctgttcggtgcccgctgcccacctccctctcctccttccgacctcgccgcctccctccctaaactctaaaccctccaccagccgaagctactgccgcggccgcagcagaggtcgcgacgacgaacgctgaagaagcgccggcgagggagagtcctttactttttcctatgctgtagcaaaacaagcctataccatcttccaaatatactcgttccgtgccggcggcctcccctcctacgcccctgtcgattcttcaatcttcaccaacgtctgcgcgtagcaggctagcagtcggcacggcttcctcagatctgccggacgacttgttgttcgtcaccgactcaccagcaaccaatgtcggccatcagccggcagcaggggaagctgggcggagggtcattgcggcacggcgtccaggcgtacagcaggcaccagcaacagcccatggcaaacgccgcagatgaccctatggtagatgaagccggagtagaagatgccttcacacatgagatcaccgattatttgtacgtccctagataccatgtgttgagttggatggaaactgtggaggggatggtggccggtgtggcggcgcttccgccggtgtatttgatactgaacagagatcttcttgagacgggatggggatggaagaggctggtgccctacagacctggttatgttgagtggcatgtgttcaagaaataccttggggactatttcgaccataatcgtgaagcttttctttgtgccgagcagaagcctgatccatttggatggattattgctgaaaagagtgccctgattgctgcagccaaattgtgcctcaagatggagaaggcacttctcaggtactgtgctagctttctcactcctgacgacaaaaggctgatcctcgggatcaaggaccaggcaaagcaaatgatccaatcagaggtgcttcaagcaatggttcaaatgggtgtccttgttcctactggagatatgactgttgtcagaagaaccgctcaatttttccttaatagctttcaagagtgcctaacagcacaaaggaaggagagagaaatggcaaccgcagaactgggtttcaaaaagcaattaactaaggaggagaagtttgaaaagaggaagcagagacttgctacaatcggagaggatcttttggcgattgctgctgatcaaccatttcgcttccctgccacatttacatttgtggtcagagcattctcagttctagatggtactgggaaaggccttcatcctaggtttcatattacagagattgctaagccctgagtactttttgcattactagcatctgaatacttattcaaaaacacacaaagcttgcacatcttcacttattatgtactgtctatattttcatcttgaacttttctggtactgacttgaaatgtctattaaatttgctagaaatgccaaggaattgctaagatttaatgacgctggtgttgaaatagttgtgaaggtgtgtggagagacatgtgtattcctcctatgacgaattcctcaggctccatgaaggtaagcctgtcttaatgggcttgattgttgaacctgacttagtacttttatccatgtcacgacattgaaccagacagtcactcatgtccttaggatattaacggtatacatcaacaattcattctattttaattgcttgcaaaacttttttggcccttcaaatgagttccacgcatcaagaagtcaagattccaggaggcctaaaataggagaggagggcgcagcttgattcaatccatgtcaagtcaaaggctgctgcgaagtttgcacatgcaagtagaatttagatggtttattcaatttcggttctaatgcttctgacagcagttgtatcagtcctcttgttcagcttacataataatgtactaaacttcagtttggtgtctatctcagtgtacctacactcagttggaaaacttcaaccacactgcaacaagg

SEQ ID NO: 20625 - DNA, 2752 bp, Zea Mays
tttcttttcacaatacgctccccgctcgcccaaaaacctcacacctaggccccccacgtcgccggctcccggcgatggcgccgctgcccttcctgctgggtttcctcctcggcgccctggcgctggcggctgtcgaggcggcggcgatccttctgctgctccgccgcctccgccgcagtcaggctgcggcgggggacgcgctaccagccgccgacgagctgcccggggaacgccccttcccctacgagaagcagggttttctgtggatactggagccagaaaaaatgccaaaactcagtaatgaccgcttatcggctggaggtcctagagagacaaaagacaagaagaatattgtggaagtttttcctgcaaagaagatggctaaaatcaagggaaactctctttgtttgtctggtcctgatggctcccaagcaaccattgagcttttgaactgcacggtacttgcagtttctgcatcaaggccaagaggttcccagtaaaattagaaagcaaggacaatgagatttataatggaagcaaggtgtgctatctttatacagacacttcctgggagaaggaatcatggtgtaaagcactccgtattgcagctactgctgacaaggaaaaattaaattggcatgccaagctgagcgaaaaattcctcaattacatatcatcattaaattctgaatacccatgttttctaaagcctccaatactctctggtgaggatcatgaggttatggacaagacatcaaagactgatgggtcttcaaaagtacgtcttttcctcaagaagttggcgaagaaggcatctacgaaggctgccttagagagcaaaacaagttcaggaatgtcagtgcaaggtgaaaaaaagatacttgataaattgcgcagctatcagggtgcaccatttattgaagcattaataggtccacaagaggacaagcttggtggcaattcatcgcaagatactgtaaaagccactgccccgcctgctgcattgaatcaaattggacagctttcaacttcacctgatgtgaatgcggatgaccgagttgcggatgaaggcacactttgttggaacctcctgtcatcacggttgtttttcgatgctaaaatgagtgatgagataaacaaggccatcaaagcacgcattcagaggactttgtcaaatatgaggacccccacctacgtgggtgaaattacacttacggactttagccttggagaacttccaccttatgtgcatgcgatgagagtccttccgctggatcttaatgaattatgggcctttgaagttgactttgagtattcgggtgggatactgctgcacattgaaacaaggcttgaggttcaggaaccagagttgcaaaaggacatcatgaaaagtaattttggagcagatgctaatggagatgttgattctgatcttcttgagagtattgaacagtatggtaaccaatttaaaggctcgcacaattcagcttcttcaattggggagaatgatgaagcagatgcttcaagtcagtcaaagagcattggatggacttcagcatatatatcaagatggaaaactatcctgcactcaatagccgaccatgtctcacaggttcctctttctctggcaataaggatttcatctgttcgaggtatcttgcggatacaaatgaagccccctccttctgatcaaatttggtatggatttacgtcaatgcctgatctagaatgggatttggaatcttctgttggggataggaaaatcaccaacagtcatatcgctgcacttattggtaacagattcaaggcttcgcttcgagatagcttagtgcttccgaattgtgaaagcatctccatgccgtggatgttggctgaaaaggatgattgggtacctcgcaaggatgctccttttatttggctaaatcatgagcccactgagatgagaatccatgccacagctacagcatcaactcagtccgaggaaggtggcttgaaggatggtgggagtgaggaatcatcgagagtagtggcatccattgacgaggcaaaacaagagcccaaggcagaggcatcattgcacggccagtcttcatctgctccaggcagtgaatctgcccacagcgatgcaaatgatgagctgaggaaaccgctgttgatcacagagaaactccaggaagaagcttcagaaggtatagccatgtctcccatgtccacatctcggagggcggtgataccagcaggggagcagccgcaggtgtcagcatcacccattggagaggacgcgaagcgaaaaagcgggaggcgagctcggatgatggatttcgggaagaggatgggggacaagctggaggagaagaggcggaccatcgaagagaaagggaggcacatcgtggagaagatgcgagagaatgctaggaccaacagcatggagaggaccagtagctagcgaggatgcaaggatcggcatcttgtttcgttgatttgggaagtggtgtataggctgaacttgtatgttttctttgtagagttgtgcaacatttagggttccacgagagctgatctattatgtgggtgtggcggcggcaaatatgcatggatgggatgagcggtgtacttgtgacctcatgttagtatcagcttgtggaatactatgaaaaatgcaggtgccaatgcctttcaccatgctactagttagtttgtctgctacttgttcccaagtttaagaatgtgatcaactgtgacaccttgttta

SEQ ID NO: 20626 - DNA, 2809 bp, Zea Mays
  misc_feature (1)..(2): n is a, c, g, or t
nntcttgaaacttggagacttcgtacacccaatgaatgggatcatatgactgtttggtatgatctgctccaatggaggaatgagatgtacaattcagtaatagatgcattcaaggactttggtcaaacaaatcctcaacttcatcatcttggctaccgagacaaggcttggaatgtgaataagctcgctcacatagctcgcaagcaaggtcttcctgaagtttgtgtaactatacttgataagatgtatggtcatgctactatggaagttcaggaagcatttgtgaagatatgtgaacaagctaaggcttacttagaaatgaaaggagaactagtcagtggtcttaacttaatcaataataccaatttagaatttttccctgtgaagaacaaagcagaaatatttcgtctgagaggtgattttctgttaaaaatgaacgaatgcgagactgcaaatcagtcttattcaaatgccataactctttttaagcatttgcccaaaggatggattagctggggaaattactgtgatatggtttttaaagaaacaaaagatgaggtttggcttgagtatgcagtcagttgttttttccagggcatcaaatatggagtttcaaactcaaggagccatctagctcgaattctctaccttcttagctttgatggacaaaatgaacctgttggaagagctttggataaatatcttgagcagctgcctcactgggtttggctttcatggatacctcagttgttgttgtcgttacagagaagtgaagcccaacactgtaaattggttttgatgaagatagctcaagtttacccgcaggcattgtattattggcttcgtacatacttgatggaacgccgtgatgttgctactaaaactgaaataggaagaaacatgttggctcagcagcgcatgcagcaagctatgatggcaaacaatgcggccaataacttacctgacggaagtgcaagggcatctaatcatgcaggtagtaacatgacttctgacaaccagtctcatcaagcctcccaatcagttggtgctgcaggttctcatgatggtggtaatgtccaaggacaagatccggaacgatctacccctgaaggtggcacaaataccagccatgatcaaggtcaacagagttctacaggtgctgagggctcacaagttccgcttagacgtaatagcggacatgggtgggtaacttctgcagcaagtgcatttgatgctgcaaaagacataatggaagctcttagaagcaaacatactaatctagccaatgagcttgagcttttactgtcagaaattggatcacggtttgttactctgcctgaggaaagacttctagctgtggttaatgctctgcttcatcgctgctacaaatatccaactgcaaccactggcgaggttccacagtctctcaagaaggaactctctggtgtatgtagagcttgcttctcacaagatgctgttaacaagcatgttgattttgtgaaggagtacaagcaagattttgaacgtgatcttgacccagagagcgctactacttttcctgcaacccttgctgaacttacggagagattgaaacactggaagaacattcttcagagtaatgtagaggatcggttcccagcagtattaaaactggaggaagaaagtaaaacacttcgggattttcatgttgttgatattgaactcccagggcagtacttcacagatcaggaaatcgcaccggaccacactgttaagttggacagagttggacctgacattccaattgtccggaggcatggcagtagctttcgacggttgacactcattggttctgatggttcacagcgccattttattgttcagacatcactgactccgaatgctcggagtgatgaaaggatgctgcagctattccgtgtgctaaataaaatgtttgacaaacacaaagaatctaggcggcggcatctggctatccatactccaataattattcctgtttggtctcaggttcggatggttgaggatgatttaatgtatagcacttttcttgaggtgtatgaaattaattgtgcacggcataatagagaagctgactcgcctattacaattttcaaagagcagcttaatcaagccgtttcagggcagctctctcctgaagcaattgtggagctacgtctgcaagcatacaatgagattacaaaaaatattgttaatgataatattttctcccaatatatgcacaagattctgccaactggcaactacctgtggaccttcaagaaacaatttgcaatccaagtggctctctcctgcttcatgtcgtatatgctgcagattggcggcagggctcctaacaaaattctatttgctaaaaatactgggaagatcttccagactgacttccatccagcttatgatccaaatgggatgattgagttcaacgagcttgttccatttaggctgacacgcaacttgcaagctttcttctcgaattttggtgttgaaggtctcattgtgtctgccatgtgctctgctgcccagtcagtggtttctcctaaaccagcacatttggcatcatttggctatgtttttccgagatgaactgttatcttggtcgtggaggcggcctctgggcattccatcagtccctgtcgctgctggaatgatcaacccatcagatttccaacagaaggtggtaaacaatgtggagcatgtcatcagtcgtatcaagtcaatatcgccacattgtctggctgaggaggaagtgtttcttggtgggattaatattgtatcattatggtgcttctga

SEQ ID NO: 20627 - DNA, 1536 bp, Zea Mays
attgcaaaaaaaaaaaaaagttggtccgctcccaccctccgtccgaccgtcctcgacctcccgtcccgccgcctcccacagtcgcaaccctagtcccacccgccgtcctcccgccctcccgcttcccattttcagtcgccgagccgcgtacagcgcacgcactgcacgcgcatcggcacttccagcgacgcgtcgtgagctcctcccttcgacccttcctgtggcgcgtcgtaagctctgtgcaggcgacggcggcgcgctaccagtgacggggggatacggcggcatcgtccccctcggcccctcctccatcccggtgcggcggcgccagcctacaggggatggtgagactatggacgaattcgaagaacggttgtttgggggcaaggacacagacaaaggatcactctacgagaagctcgatagggctgagaacactggtaggagatacaatatgggctctgggatgggtggtttgactgggttaagtgacaagagcagatctgggttgtccaagggtggtttcacttggttaagtgacagtagcagctctggtttccctgggtttcctgcatctggcgacaggagcaattcaggatggatggatggttatgattcttttaatgatggcttaaatgatacgattgctaatgcggcacgcaacatccaaatggaggaggacgaggacgtcgacggtgactgggaagatgactttgagttcaggcctgatgtgcggtttaggcaaggttcaacgtattctgttcgggaccttgaccttagaaaacctgcagccgcaaagaaccctcctagacgacagtttgaaacaactacagcggaggtactgaagaaggctgattttaggaatgttagattcctctccaactttcttacggaagctggaattatcatcaagagaagccagacccgtataagtgcaaaagctcagcgtaagattgcaagagagatcaaaaccgcacgtgcgtttgggttaatgccttttacaacaatgggtagaagaccattcatttttggcagaagtgcggaggagcattattgggatgatggatatttcggctatgtgaagcagaaggatggtgagcctgttgagaatgaggatgctgagccaaatgtggaggctgtgtaaacattctgaagcatccttttgcaagcgctccgttcagtttcttctggtgccttcatgacacaagtcacacaatgcttgttttgcgtcttcagatcatagcgtagctcagcttgaataaaactgtaacatcacgcaagttttgtgaaactcgtgccttgctcaattgtgccactttagcagacatccccagctcacctcatcctggctggagatcatatgcagatatgaaatggaacgtgggatcagagttttagttgacgctcaaaattttgagatagcagcactgatttcagtttctgttggataatgattgtttggctgttcaacgagaaaaatattgtatgcacgtacaaaacgttagattttttaacaacgaaaatattttcttcaaa

SEQ ID NO: 20628 - DNA, 1138 bp, Zea Mays
tttttttcattaggactgacacaaacagatgtacttgtgcctggcaatgcagctgtaccaccacccctattcgctggacagccagaaggtacggatggcgctggaagagaagggcattgactacacatcttatcacgtcaatccactcaccggcaaaaacatgaatgtggacttctttcgcatgaacccttccgcgaagctccctgtcttccagaatggagcgcatgtcatctatcgcgctatcgatattattcagtacatagacagacttgcagtgcatttaagtggtgaaatcccccctgtgaacactgaggtccaccaatggatgcagaaagttgatgcttggaaccctgagatgttcaccctcacgcacaccccggccaagcaccgtgcgtttgtctccaagttcataaggcgggtgctgattgctcgcatggctcaagcccctgatttagccagcatgtatcatgtcaagctccgtgaggcttacgagacggatgataaagtgaaggaccctgacatcatgaagcaaagcgaggaagaactaagcaaactccttgatgatgtcgaagctcagctcggcaagaccaaatatctcgctggcgatgaattctcacctgctgattcgatgtttgtccctgttcttgcgcgcataactattctggaccttgatgatgagtacatcaactgcagacccaagatacttgagtactacaatttggtgaagctacggccaagctacaagattaccattggcagatactttagtgggtggaagaagtaccggactctcttcaagacatctttcttcctttgtgttcgaaccctgttcaggaagtactagatagttcggcggatgaaatatctgaatcagtaccttgtgaactgacatgtatagtgagtttcggttaaaaaataaactgtatatcttccatgtgcctttttgtggtcttgagttcatttttacctgtaaaatcaatatgtttgtttgattatatatttctgcttcatgttggatgcaaaaatgaaggttatagaactgtatacagaataggactaagtatatattttggatttatcacttgttctagtccaattcatgtctaaaataaattgttgttagcttgtgattttggca

SEQ ID NO: 20629 - DNA, 176 bp, Zea Mays
gataaatgtcataaatatcataaatgtatttattacatagcggaagtcttacaaaaataaatgataaaataaaacgaactaattattattccctggtgccataaagctgactgggagacgccacctagatcaagtcgaatgcctcagtgttaggcagctcctcttcgaccacctgc

SEQ ID NO: 20630 - DNA, 141 bp, Zea Mays
aaagtcgagtcgccaccatctcaagcgtcaacggcttcatcgagggccccatcttcggtctcatgtaagatcgtccattgcaagtctctctcatatgcatgcatggatgtcgatggcatgcacaaacaaggcaagggctga

SEQ ID NO: 20631 - DNA, 154 bp, Zea Mays
cttgaacgccgtcaagccctagggttgagagagaaagagagcgccacgtgagagagggagagaaagaagcgaagctaccaacgtcgcgcctcgaccataccctcattcgggggatccactggtggtcaagaagattcacgagggacgactaaag

SEQ ID NO: 20632 - DNA, 214 bp, Zea Mays
gtggtgcaaaggcgccaccacatccaaaaatagttggtttacctttggtttgctcctgctccttctccttctcccatgcggcaatgccgcctagcctagctacctcttctttttttcctttctcttcccaacttggcccgtatctgattttttttttcttcatcccttaccacatgccatgaacggagataatgaaagcggatttcaatgaggt

SEQ ID NO: 20633 - DNA, 309 bp, Zea Mays
gggggctgtacatgtactgctggcaccctggtattatatccccaccgaattgtgggcaaaggccagggatccttttgcctatatattcagtgaaacctgcccttgatcagtgtccttcagtttaggtcagtggaacttcaccttgccgtagccagagtaactccagcagagtgccaagaaggagattctgaagaggagtctactccagtgtctgctgatcaagtgatggagctatctaactggttatggggtagaagtatctagaacctcttcactgcaataaggcaagccccggtgcatgcaacccct

SEQ ID NO: 20634 - DNA, 1537 bp, Zea Mays
gtgcagaagaaccggaggctcggctggtgttggtaccagaggaggaggcggtgagttcttgaaagatgatggaggggagacagacttggaccaccaacatatgcacgaggtggtgaatggggttccctatgagcttctccatcggctggcgtctcagctcccgtcagtcgcacttggaagcggatttcatttaccctttctcctcaaggtggccctcgatctagagacgccgtctatctccagcaagagcgataccgtcgaggcgcctatccacgccagacacaacgtccgcagtgatgggcgacctctaaggcctgaacggtgccaccataggcttctcggcggccggcggcccggaggaggcgactgaagaggaggacatgcggggctgcgagggatgcgctcgccggtggccgaagttggggctaagctggggctgtgcacagtcgagaagacgaaggcaaggcgagtcactccatcacgctatgcatgtcaccaaggcgcggcctcccaatctcgagcctatacttttcaatgagggttatggatttagcagcaggggaactcccggagattgtgcctcttggaaaaggcttctttcttgccaactatcctatttcaattttggattgaccattatcgttcgcgttcctttgttctccatcttcagatttattggaacttgagctagcacctgtatgagtcaagagcctagacttttcaacgagggttatggatttggcagcaggggaactcccagagattgtgcctcttggaaaaggcttctttcttgccaactatcctatttcaattttggattgaccattatcgttcgcgttcctttgttctccatcttttacctcttgtagttacacaagaacaacttgattgtgctaaacatgcaatcaaatctgcagttctgatgaacttggaatcaaggtgtaaccggcaacctcagctctgaaagaaccctagagtaaacactcacatcaagacactccactgttcactcttgtgctgctcctaccaatggagcaagagcatctccacctggcaatggtccactcgttgtattcatcactaagtcagctcgattccaccaatgggtgttcatgctgttggatggaaaatgacaacccctctttgcatcatgcactgttttgtctttctaaaatatttctgtttgctcctagcggcttgaacccctacaagtgcacctggcattggttaccaatctgcagattcataacatctcatgaaaaggatacgtgttggacaaccagataaggtattacagagaatatgaataatctggaggttctactgatgcatgtaaattatggaattatggtttcaattctagattatttgataatggcacctctatatgctcattgggcaatgatcagaaagttggaggtcatagaaatactgagaatggtgaattttgtttacatttatgggcacttttgaaaagaaattattttgtatggtagtattgttgaaaagatcaataattttagagactttgatgatc

SEQ ID NO: 20635 - DNA, 1429 bp, Zea Mays
cttcaaattttcagatcgtgttcgagatcctggtgaggggtctgatcgggctggaggcaggcccggagatgcagcagctcaagcaccagttccaggaattcattgtcggcctcatgtccctccccatcaagctgccggggactaggctctacaggtccctccaggccaagaagaggatggccacgctgatacaggggatcatacaggagaagaggcggcggcggagggccgcccttgaggatggcggagagggcgagggcgaggccggtcccccgcgcgacgtcatcgacgtgctcataagcggcggcgacgagctcaccgacgagctcatatccgacaacatgatcgacctgatgatccccgccgaggactctgtgcccgtgctcatcacgctcgccgtcaagtatctcagcgagtgcccgcttgctctgcaacaacttgaggaggagaacatgcagctgaagaggcggaaaaccgacgtgggagagaccttgcagtggacggactacatgtcactgtcgttcacacaacatgtgataacggagacactgcggatggggaatatcatcaacgggatcatgcgcaaagcggtgcgggacgtggaggtgaaggggcacctcatccccaagggctggtgcgtgttcgtgtacttccggtcggtccacctcgacgacaagcgctacgacgagccctacaggttcaacccgtggaggtggaaggagaaggacacgagcaccatgggcttcaccccttttggcggtgggcagaggctgtgcccaggcctggatctggccaggctggaagcttccatctttctccatcacctggtgaccagcttcaggtgggtggcggaggaggaccacatcgtcaacttcccaaccgtgcggctcaagcgaggcatgcccgtcaggctcaccagcaaagactagctagctagtcactacgacctgcttgtgcatgccatgcatgcagatttcagtcacgtcatatgcaatatatattggaccctggaggttgcacgtgtacagaagagaggatgcaggagctagcagatgatcggaggtatttaggcagactgaaattgaatcgaccgcgaagagtagcacactactataccacgagtatgatctgtagtagtagtaataagaggaatataatatcattagtgtggtagtatttacttattatactactctctcttttcgtttttatttatcgtgttttagtttaaaaatgaactagcgaggttagtcaataggcgtgcatgcatggcccatcatggtcatggatatataggccttgatggttatactagtataagcagtagtgttatgtcacaagggattactgggatctgggatgatgatccacaatcccatctaaaacgaaaagagttaataaagattgttaagtttactgctgggagcct

SEQ ID NO: 20636 - DNA, 813 bp, Zea Mays
ggtcattctcatcattcacgttgcaatttgtggagagaggtgcgtgtgtgatggatcatgatttggcactgtgcttctgccaagattgtctgggtcttcggcttgtgaagccagaagtcgacgaccacaccgggcgcgacgccggcgacggtgccggggacaatgacgacgacggtgccggaggcaacgccgatgccgggcgcgaccccggctatgccgacggggaccatgatgccaccgggcgcgacgttcacggacgccaccccggacagcgcgatgatgccgatgggtggcctgggcatcgagggcgggggccaaggcagcgtgctcctgggcggcagcagcagcgaaggcagcgtctcttggctcgccaacatggccaccggcgacgcggccgtcccgctggtggcttcggctcggttattggtggcgccactggcaacgttgctctgcggcctccatttgctgtagtagtggtgatggagggagcagaggaatctgttggcgattcgcacggtggcgcctttgtattgccgtgtctgtagatgattttactgtccattgatcatgttgcgttagccccggtcccaggattagatacttgtggctactagtagtactagttctagaggagaaattaaagcatggatgtggacattgattaaagttaatcgctgtcgtgctagctgcgctttgttgttgccactgttgttcgtgcgtggctcgaggttggcgaggaaacacgggcgcagcatggactcaagagactgtctggactaaaaaaaaattactagtgtcctgcgttcactgcac

SEQ ID NO: 20637 - DNA, 3138 bp, Zea Mays
atgcatgtggaggatggaagggagcagcgagatttggagcgtggatggcgggcgcggttcccgtggattttgggcgaggttgggcacgtcggagtggtggcgagaaaaggaaggaaggagcgtgcagtcggcgggattggaggcgaggttgggcgcgtcgaagcagttgcgaggaaggcgtgcacggcgtggttggagacaggggctcgggtgggggcaggcatggcgcggctttggttctcgccaaggtcgatgctcgcctccgccgtcgacgcggaagcgggaataggagaggagctggaggacgcaacctccacagtgggctcaccgcagcttttcgccattccgacgccgaggagagaggaggggcttaaggcgaacttccactccagtgctgcaaacgtaaagatgcgggttgggggactgccggactggggagtgggacgagacgaccagacaaatccagaatcgcagtcgcgttctgctcctggaggcccccgcctggccgcctgcgccttcgccatggaatcgcgcggcaagcggatcctcccctttctgttggtcattatcgccgctgcggcggctccgtccgccatgccccgtgacgagagagaggtggtggtagtttccggtgcgccggacggggttgtgtgggtggcccagctctcggatctccacttcagcgtgcaccacccggagcgcgcctacgacttccggcggtatgtcggcccggcgctggccatggtcaaccccgacctcgtgctgatcactggagaccttactgatggtaaaagcaaagatctgttaacaatgaagcaaaacgaggtcgaatgggtagaatatgaaagtacaatgaaggaaataattgaaaatagcaagcttccaagaagaattttctatgatatgagaggaaaccatgatagctttggtgtaccagcatctggtgaggactatgacttttatagtaagtatagcatcaacgccaaactaagacgacaggggcgtgtccaaagcattactttggagaatagtggtcggaagcatctgtttgttggctttgatagcacaatggagattggtcttagaggtccaaccaatctatttggacatccaactgacaagcagatgattgaattggatcaagcattatcacagtggaatactgactttgacaaggttccagtgacaaaaatcgcatttgggcacttcccgttgtctttctcagcattaacagagtcaggaaaaagtatcaaggatgtttttctaaagcaatcattggcagcatatttgtgtggtcatcttcatacaaggttcgggaagaacttgaaacgatactaccatcgggcagtccaggaaccatcattatcagagcattactaccaacataacatgcaccaaggagatgcattccagggtaataaggaaaactgttctgaagaagcttctcatgttgaagagttctgggaatgggagatgggtgattggagaaagagcagaagcatgaggatactagcaattgatgatggttatgtttcctataccgatatagatttcagattaggttcaaagagcataatcatactacctacctttccccttgattcaagattcatgcagagagcctctgcttttcgtgattttaaatgtcatgtcatgggggcatcatcttttgataccgtgagagctcttgtattctctaaacatgagatagtatctgtttctgtaaaaatatacgactcaaggccaggaactcttgaaatagtcttcgactctgaaatgaaaagagtggattccaatgaaactcgaggaaatatgtatttgataccatggaactggagggcatttgaagattcctctcccagccgatattggctccaaattgaagtgatggatataacaggtgacacaagtgtcagccagttgaggccattctctgttaacggcttgctggcaagagtgaactggacatggaaagagttttttgtgattggtattcagtgggcttcaatatatcatcctgcactgtggtgtgccttttctctaatcttttcgttgcttcttgtaccacaagttttagcagtggtattcaaagatcggttcacatataaatctctatgcgcatatggtgggcagaggacactgttgaagtctctagttggtggtttcatctgttgttttgttgaactcgccaggctggttcttgtatggttattgctactgttatatgctatctatttagtttttataccttggttattcggtcaccctattactgaagatggtagcctgacttacatgacacataaaggctggattctaaaaggacccagtagtagcaacgaagtagtccatgctgggattccagatgtcatggtcattgttctacctcacctttgctttgtgttagtacccaccattgtgattttagctgccatggctgctgagagaacagcatatcgagagcattatctttctcgatcaggaaagaagaaagatgactaccgtaagagcaggagacagatagaacatgaaaacttttggaacggtcgctggattagcaaatttctgtgtcttctctgcgtggtggttctatgcaaacattggaagctttgcagagcgctcgtgaaggcttatgctatgaaccccttgctccatgcgccagtacttttcttcttcgttcctttactcatggtgtttgccatctacaagacacggtccatttagctgttcgggagttctgaagatgtgctgcactggactgtccaataaatggtgcttcaactgtgaagactgaagactaacccacaactgaaggtgtgctacttcgatttgtcactttctctctctttcagagagcagatttgttagattgtttaacaggcatgtatagctttcagcgttgtgctccgtataaatgagggactgcacggcatttcattagaatggaatggttaggatttgaaccaaggaagaagagactaaactgctcaatatagtttttcctctttcttttgagaaagttctttttccctcctctgtttttgacctgccggttttgtttttgtacatttatccttcttgtgagactttgaccatctacagtataatagcactgtggcttgcggaatgcgtgtttac

SEQ ID NO: 20638 - DNA, 3608 bp, Zea Mays
ccagctcccagctcccatgccagcgcagtagatgctgcgagctaccacaccgaatacccacccatgctgcacacgatacgattgcagtcgcggtctcgctgctgtgggagtccctctgctctactgccgtgagagttgagacagcagacagacagcatggtgtggaagagctggggcgctgcgccatcgctgctgctgctgcgcattgctctgctcctcctcggcgctgcggcgccactctgctccggcgccggcgacgtcgccctcagtttcgcagccaccccgcgccgcgtctccaggtccacgtccgccgccttcgccttgcgggtcctgcgcgccaccggagggccttgcgccgactgcgtcgttacctgccagttggacggcgaggcagcgtcgctctgcggtgggacggcggcggcgagctatgcggggctcagggacggcaaccacagcttcacggcgtgcgcgagcacgacgtcagcttcgaactcgtcgtccagccccagccccacccccacctgcgccacctacgcttgggatgttgacactgtccccccgacggcgtccgtgtcggcggggccggcgttcacgagcgcgtcctccaccgtgtcggcgctcgtctccttctccgagccctgccccggccgcggtggattcgtctgcaacgccacctactgcaatctcatcgtgtacggctccggcagtgtggatccgtcgacgctccaggtgctgagccccggcctgcgctactccgtggccgtcgccatctcgccggacgccgagtacggccgcctcgtcctcgtcatgggcaggggcttctgcacggacgccgccggacacccgttcaccaggacgcccaactccactttcaccctgcgcttcgatcgaaggagcgactccatgaacatcaccgccaccgttgccgagaagatggtgcagatacagggcgtcaccaggctggttcaggccagcaacgaggaagagggcctgaggatatacctggccttcgcccagccggtgctcaactcgtcggagcagatcctgcgcgcgcttacagcgactgacgccgtcgccgtgcacctcacacccaccaacagaagcaccctcggcaaccgccgcttcggctacgttgtgaagaagatgtctgacgccgccgccattgtgagcgttgcctgcgacacaagctctattatcagcaggcaagggactccggtggttccagcagagccattcacgtttctttatgatacacagagaccttgggttaagctcggcacatcgactcggcggaccagctcacgcgacatcctcgtcctcatcaagtttgcaaagcctgtgttcaacttcagctcctcggcagtgcagcttattacaaacaccttgggttgtttcagctttcatgaagccagtaagagcatatacacgctgcagatacaggccgtcggtcagctggtatcggttcaggtagctgagaacgcggccatggacgtcgccgggaaccccaacctagcatcagaccgtcttcaagtcaggcactattctgtgcccgcgtcatcttcttggatcgcggcgatcaccaccgtcgtatttctgacaactgctgccgttgccgcgctcctcaccgtctccacgtcgtctctcgtcgctgccggagctgtctcgaggccctcttcctacatgatctcggagccatcaagaaatgtgctgaggatggcgtgccacatccaaatctttgctctgtcaagatggctgtcggccaacctgccgatcgagtactacgagttcgcaaagggggtagagtggagcataccctacatgcgtcttccatgggaaggcccagccgcagatccgtacctggggtactccacgatgcctgccatcgcgtactcggagtcggagctgctcgacaggagcgccgtcggcggcgctgcaaacatctcctcctatcgtcctcgagcacagcaaggtcagccggtgacgccagcgcagatcatcccgtcggatccggtattcccgacggagatccctgaagatgggaaacccacaccgccggtgcaaactccgggaggagacgccacgccgccggtgatgccagtgcagaccccgttgccgttggacgggatgccgctgacggcaatggagtaccgttccttcttcgagaacccggacatgaagcctgaggcacaaatcatcatgaagctacaagatttggatgggtggaagtacttcggcaggaacatgttctggctgggtgtcatcggcggcggcctcatcctcctgcacctcctcaccctcctctacttcaagctgaggtacagagacagggagcggcggcggcatggctacgccgcactgcttctccccaggctggagatcatggtcgtcgtcctggcgatgccgtgcgtcgcccaagcggcggcggcgctcatcaggggcgggaccacgtgcggcctggtggtcgggatcgtgctcaccgccgtcctgacgtcggtcctggtggccctgctgctgttcctgtctctgggcatcaccatgggcaagctgctgcagtacagggaggtgcaccatgaggaggggcaggaggagtaccactggtaccaggatctggcccgccgcacgctgggcgccggcaagcgcgggcagtggacgtggaaggacccgcgccgcgccgcctgcctgcccaggcttggcccgctcttcgaggacctgcgcggcccgcccaagtacacgcgtggcggtggaggcggcaagcgccgcgccgaaggcggcggaccagagcggcgggtcatcgcgtcggaggacgagaacgaggggtcgagggcgcccttggtgcagcagctcctcggcgtgctccgcatctacttgacgctgctggagtcggtgaagcgcgtggcggtgggcatcgtggccggcgcgcacgcgtcgtcggggcggtcgtcccgcgcgcacgccgtggcggtgctgtccgtcgcctcgttccagctcctgttcatgctgctcgggaagcccttcgtcaagaagcgggtgcagctggtggagaccctgtcggtggccagcgaggtggccgtgttcgcggcgtgcctggcgctcatcgacaggacggcatcgagtggcgggtggctgcccgacggcgaggcgcgcggcgtggggctggcgatgctgggcgccttcgtgctggggttcgcggcgcaggtgtgcaacgagtggaacgcgctgtaccggcaggcgcggctgctgagcgccgaccggagctccttcctggacggcgccaagacagcgggcctgggcctgctcgtgctggtgctgccgtcgtctgcgctcggcgaccaccgggatccgccacctcccgacggcggtggaggagccggggagagcgtgtcagcgtcgacggcggccgacgggggcaggggcgggagctccaacaacgagcggtggtggcttgggcagctgtgggagatggcgaaggctagcttcagcaaggagagtaatgcgtaagaatgtgtttggtactgtatctcggaacatgtaacatcagaaatcagcattaaacgattagaatgacagcgctcgagctcaagaaaatgattctttttttttggtaccga

SEQ ID NO: 20639 - DNA, 2799 bp, Zea Mays
tcgggatcaccggcaaggcaaggcaaggcaaggcaaggcaagcgaggcgaggcgccgaggccaggtgaagcatccgaacggtcccgaagaaagacgactcagcagtcagcacaaggacaaggttaccaaacgctccaagtccaaacccctctcctcccccgcgtcccgcgagctccgtcaccgccgccgctggcgagatgtcatcggtgacccgccctcagcgggaggccgactttgcacgcttcccgtcgtccacccccatcgtcatcgacaacggcgcttctaccttccgcatcgggtgggcgggcgaggcggagccgcgcctttcgttccgcaatgtcgtgcagaggccgcgccaccgcagcactggtgaaactgtctcaattgttggggacactgacccatctctaatgaaattctttgactgcacaagatcggcagttcgctctccatttgacgatgatgttgtctatcagttcgagtacatggaatatattcttgactatggctttgatcgattaggtgtcgattcagaggtgggccatccaattcttatgacagaatgtgaatgtaatccgtccttttctcgagcccgaatgtcagaactacttttcgagacatatggtgtaccatccatagcatttggcattgacaacgcgtttagttataagtacaatcagaaacttggaaactgtaacgaagacgggctggctatttcatgtgaacatggaacttgtcatgttgttccatttttgaaaggacagcctgtgttggggggcttgctgcagaaccaatatcggtggatttcacattactgattttctgaggcagcttctctgtctaaaatatccctatcacacggcaagtatttcatgggaaaaggctgaagagctgaagaaggaacattgttatatagctcctgattatatggcagagttgcagatatttaaaaacaataaggaagaagctgatgagaaaatgaggtattggcagctaccatgggtccccccaccaaaggaagaaccaccatctgaggaagaacttgcaaggaaagcagctttgaaggaaaaggctggtcagcgtttgcgagacatggctgctgcaaagagatctcagaagatagtggaactagaaaaacaactttcctatctggaggaactaatggaacaacttgatgaagctgaggaagaagaagcaacagctattctaggtagctctggatatctttcccagcaggaaatcagatctgccattttaaaagcatcacaatctttaaggaaagcaaaaggggagtccaatggcaatgatgagaaaacagatgcctcagcagttgataagtatccacttgtatctgttcctgatgagacactgacgccagaacagttaaaggaaaagaagaaacagatattacttaaaaccacaacagagggcaaattgcgcgcaaagcagaaacgtgctgaagaggaggctttgcgggagaaacaagaagaaaagaggcgtgcggagaacccagagttataccttgaagagcttcgggcccgatattcagaactttctgataaatttgagcagaggaagcgacagaaagttaatggtagtcagacaaatgggaaccatagttcatctgcaggtgtaggccgtggagaaagactaaatgcagctcagaaagaaaggatgcggctgcttgcctcagctgcttttgatcggggcaaaggtgaggacacttttggaatgagagacgaggattggttagtgtacaacaagatgagcaaagacaatgatgatgacagcaatgatgatgatgaatcggaacttgttcgaatttcatcgaagctccaggagattgatcctacatttgtgtccaaatccgaagctgttcaactgactccggagccacccaaagtccggccactaaccgctgaggattacagaattgccattgggatcgagcggttccgttgccctgaagtcctcttccagccaggcatgattggaatcgaccaggccggcatcgatgagatggtcagcatctcactcaggagattaatggaggacgagtctgtgaaggagcgcctctgccagtcgatccttgtcactggcgggagctccctgttccctggcatgatccctcggctggagtctgggatacggcaatatcggccctaccttgctcccctgaagcttgtcggagcagctgaccccattttagacgcgtggaggggtgctgccgcctttgcggcatcaagcaagttcggcaaacaaacgttcagcctagctgattacggagagcatggagagaacctgtttcatcggtacaacattgtttactcactataaccggaaaatgacatagtgatcgaaccatctcagtcaggctatttatttaacagctgatacaaattgatgtagcaacaaagtttttcaaaactgcaattgatatttttatgtgattggaattggagggttcaaatggtgaaggaatttcataaacctataatatgtgtgcctttttttagtcttcccagggcacaacttgtttaagaacaggtgagctgaatcctctataaagctaaggtcactatcgactatatggatggataaaaagaacaaagttgtccatggttacttgcataggggcatttctttttcattttcttttttagtctctattttgttatatctaccattaattaaaaaaaggaacacagtcttatatagggggtatgcctttttattttatttttaaatcttctgtttcttcagggttcctaaatctattttttgttttctttaacacac

SEQ ID NO: 20640 - DNA, 275 bp, Zea Mays
ccactatctacccaaaccactagtgccggcaatctcgcgtagaggtgggcagagcatcaccggagttggccgcttcaccgacgtggcaactgcggtgccgtaggagactcgacgtcggccgcgtggtgtacacctagatcttggggcgggtcgatttggtggctggggcgccagggggagctcgtcggcgacaagaatcgctgcgcttcccccctgcatcgtggacaaccacctgtgaacgctttcccttcgaagagcctgtgaccgaggatcct

SEQ ID NO: 20641 - DNA, 1101 bp, Zea Mays
gcaaagtttacttacaataaacaacaatgcaacacacttttgccatgaggtatggcttctatgatgaatgcttgcggaaatatggaaatgcaaatgtgtggaagtactttacagacttgtttgattatttgcctctcacagctcttatagaaaatcagatcttctgcctacatggtggtctctctccatcactggatactttggataatgtccgctcccttgatcgcatacaagaggtcccgcatgaaggacctatgtgtgatcttttgtggtctgacccggatgacagatgtggatggggaatttcaccaaggggtgctggatacacatttggccaagatattgcacaacaattcaaccatacaaatgggctaagtcttatttcaagagctcatcaacttgtaatggaagggttcaattggtgccaggataagaacgttgtgacagtgttcagcgcgcctaactattgctaccgatgcgggaacatggctgcgatcctcgaaattggcgagaacatggatcagaacttcctccaattcgacccagctccgcggcagattgagccggacatgacgcgcaagaccccagactactttttgtaatcagcatgctggctttctttcaacttgtctactgcagcgccagcacctgtagatctccttagaaaatggtgtttcctctagccgccttgtacccccatcattcttttggtgtggagattttattgccgcttctcagaacattgaggttgttgaaagtacatggcattgggtcttcctttttttttgccgtcttgtatctccattttgtatgattctgagacaaaagagaagagaagctgcaatagaattgtctcgaaatatattgtcctgtccagaagaacaggtgtggctccaaaaaaaaaagggaaaaaataaaagagagacaacaaggaaagatgcaggaaatggacccgatgttccgttgtgtctgttgtgatgcttcatgcttggctaggggagttctttcagtgctgtttgactccgaattgaaggaaccttggttgttcaacctacatcatcagctcaccgtcgaatgtctgcccagaccgatgaggacagg

SEQ ID NO: 20642 - DNA, 2920 bp, Zea Mays
attggccctgtcgcagggctctcagggagccaggctgccaggggattattcaagaacatggagagaaagagaaaccccattgtctttctggatgtatctgtaggtgatgagccagatgaaagaatgatctttgagttgttcgctgatgttgcaccccttgtgactgagaacttcagagctttatgcacaggtgagctgggaattggacacaagactaagaagccattatgttacaagggatcatcgttccaccgtgtcatcgaagggttcatggcacaaggaggtgacattgcgaaaggaaatgggtctggtggagaaaacatatatagtggaaaatctgcagatgaaacttgtgttctacctcatgatgatcgtggtctcttgacaacagcagatactggatccaaagctagtggctcccagttctgcattactttcaagcctaattctcatcttgacaggaagcacacagtttttggcaagcttgttgttggaagtgatgttctgaagagaatcgagcaagtagatgtgcaatcccctgattcaactcctgttgttccggttactatagtaaattgtggggagctcactgaccgtaaagatattggatctatgagaataggaattgataaaaagagggccgccaaatcaaagttgtcaaagggtatatcttctgatgaggaaagtaatgaaggacagcacaagggccgccgtaacaaatcttcaaaaaggagaaggaagaagagatatttttattcggagtcagatagctcttctgagtcggagactgaatcatctgattctgagagcgattctgatacttactcaagtgactcatctgatgtcagcagttcaagtgatgacaggcgaaggcgcagaaagagacattcgaagaaaaataaacgcaagcgttcaagaagaaagcatgaccaaaggcgtgaaagaaggcgtaggaagcgtgataggaaatcaaaacagaagtcaaaaaggataaagggtgacagtgaagctgaaagttcgagtgatagcagctctgaagatgctagaagcaagagacaccgccacgggcggaagtccaaggcatcatctcaagtttttgaggaaaatattgctgcagtgtctgctttgaaggatgccacgtcacctcaacaaaagagtggcataccaaacagtccagcacaagatgtctccccgctgcaaaatggggaaaactatacaaatggtgttaacgaatcaaaaattgaaaggaatgcagctgtcatgcctgttctaactggcaaccaaagcaaatctaggagccagagcatgagtgttaatcactcaatgagcaagagtatgagcatcagcccaagaagaagcccaatgaaaaggtcaattaccaccacaaagaggtcagttagcaggagccctgttcaccataatcgcagtggaagtcctgtcggtgctccccaaaaaagcgtgagcaggagttcagccagaaggcagagcatcagcaggagccctgctaggagcctcagcaagagcccacccagagatgcaagcagaagcccccacataagcaggactcctgttaaagctcacagaagaagcattagcaggagctcagctaggtccatggaacagagaagtctaagcaggagcctggagagaattcatgtacgaaaaagtgtcagcccaagaccaccattggcgaagccaaaaagcattacccgaacccctgtgacatctccattgcgaagcgttagccggagcccagctaggatttcaaggagcccacttaggccttctaggagaagccctatgagaagtccacgacggaacattcacagaagtctcagcaggagccctgcaagaatacttagaagtgtgagcagaagtccagtaagaggtggtcgacctcgccggaacattagcagaagtcccagtccacttcgcagggcattaacaccaccaaacaatggaaggagccgatctaggagtgattctcctgatgggtcacccaaacgcataagacgtggacgtggttttactcaacgctattcatttgcaagacaatatcgctcaccttccgctgatcgcttgcatcgttatggcggaagaaatgaccgtgacagatacatgggttaccggggttttcgccaccgatcacctcctcgacgttataggagcccctctagaggcagagtgtcatcgccaaggtacaggaggaggagccgaagcgcatcacgcagtcctgtccacagaggaaggagaggtgggtacaacaagagtcctgtacggagccgttcaccccccgccaggaaaaggtcacctagcgatcgtgcacggtcagtttctaggagccacctttctaggtcagtatcaaagtctccaccagtgcatcatccctccccacttgattctccatctctggagcgtgcaagtgatgggaaatctcggtccccatcaccgtctggtggaggcaagaaaggtttggtttcctacggtgatggcactcctgattcagctgggaagtaggtttccaccggatgtattgtactacctttggccattgtctcttgatcggtccagtgttacgtcactactgtagagaagagaacggttttggtccttgaggcgccccgtgtactggtgttgtcgctgtagaattgttacttaagttgtttgggatgatcgtcgttgtccttagattatcttaagacctagtactctgagcttagtttacgctcatgctgaacatgtagcagggcttcagcttaattaccattggtggaatttggatgttataatgtttgacgcatagagaatcattacattattttgatctcggagcacaataacatgtataattaataattaattccttctggaactatccaacactagcgtttctgcatgtatgcaataattcgcttggccg

SEQ ID NO: 20643 - DNA, 250 bp, Zea Mays
ttgcagcggaaataaactctttattgcaaaatgattacaagtttatcaagattttattatacctcatcggagtgattacaaaagaaagtgtttcaaaagaattacactttaaaatgttatagaatatttgtaaatttgaaatacatgctagcttaagtgacaatcctcgttaaagaaactataggagggatatacttatataagaaggccgagcccaccggcacttagcaccatccacaacagaacaaaa

SEQ ID NO: 20644 - DNA, 1945 bp, Zea Mays
atggaggatgctgacccttcgtcttccctcgctgggccttggaacgaccgcttaccaggaaaagaggactatacagatgagcctaagaagacaggggggagggaacccagtgtcgccatgggggagggaaggaggggtggttgccggcgtgggcttgtggtgggaagggtgcattggcaagttgatgatgacgtggaggaggatgacatagattttaaccctttccttagggaaggatctccgtctgagacctcatcaagccttacctcagaagcagaatgcgaggaacatagttctgaaaatcaaccaagtaaccatacatatcagcagaatactgtagttaatgaaaatacaagtgacagtgcacttcctcaaaatagattgtcgtctcaagatgctgttaacgaaatgtttccagaagaaacgtctacccaggttaatattgagaatgatggtcacttgaatggattggaaaaagacgttttagcaagcgaagctgcttgctctccaacagtgcaagaccctcatcatctatctctcgaaattagtgaggaagatgcaatttgcaaacggacaagggcaagatactcactagcaaactattcactcgaggaattggagacctttctccaggaatctgatgatgatagtggtctgcaaaatgttgatgaagaagaggaataccgcaagtttcttgctgctgtcctgtctggtgtaggcaatgacacacaaacattccagggggatgaaaatcaagatgaagatgataatgatgcagactttgagctcgagattgaggaggctctagaaagtgatggtgatgaaaatgttgagaactatcacaacacaaatcctagaaaagagaaagatgtccgtaggcctcagactaggcagaggcggccattaactgggatgtctggggctggtagtgatcaccaggaatccaataaaactcatttaagaccaattgtgccatatattccgtctgcattggtgactcctgcgcatgcttttggatggcaatatgctaaccagaatgcctttttcccttcatccttggtttcactaacacgtccacctttagcatgtggatttacttatcagcaactcgggcaattgcatgtgttgatatatgagcatgttcagctccttatccaaacattttccctatgtgttcttgattcatctaaacaagatgtggctaataatgtcaaaaagatgatagttgagttggttggtgctcgtgatcaagcattggccaggagctctcctcaacggcatatcttctttgaaacccaacatctctcatctagttttgtttcttctgataatttggaacgccaatggattccgttaatcaagagtcctattatatccgtccttgatgttgcaccgcttgagttggtcctcgactatttaagtgacgtcgcaactgctgtcgtgaagtatagaaaaagtcatgtggatggtactgctgacaaaacccgcaggaaagagcccctgtttccttcagcagcgattaacagttgcaaacaagtgaataatgtttctcaagatagatcaaatggtgtgcctacagcatcacctccatctgggcagttgcagcagaagaaatcgttggctgctaccctgcttgagaatattaaaaaggatacaattgctcttgttcctgctgacattgcaagattagcacagagattcttttcacttttcaattttgcactctttcctcataagtcacctccttcacctatggccaatagggttcttttcactgatgcagaggacagattattagctctaggaattctggaatataataatgactgggcagcaatacaaaagcgctttcttccttgtaaatcaaagcatcagaaattttttgagagtaatgaaagacatgaaatgctatcaagggcgccgagcccccgactagtcggaccgc

SEQ ID NO: 20645 - DNA, 169 bp, Zea Mays
cttaaatcaaattaatcaaactttcaacaattgaattggtagggttgagccaagcccaagcaatagtgcaacgctagggcgacacatgaatcttagtagcaagctacatattagattctccccataaaaaataaatttaatatcattgtgggcacatagcccacgtacc

SEQ ID NO: 20646 - DNA, 1683 bp, Zea Mays
gtttttgccgttagctgctagtaggtcgaggagctgaagaagcactacgggttgcggttcgtgacgtcgtctctggagaagaaggcggaggccggcatcataagcgccaagctggacgcggactccacgcggccgcgcaccgcgccggcgtacgaggtggcctccggcccgcagccgcgccggcccatacgaccgcacctggcctacgaggtggccgcgtcggccgcgaactacgtccgcgcgcgcgcccgcggcctgctctcgttcggaacgccgcaggcgcagctgcaggccggccacggcaggctgtacaactcgggcgtggccgcgtacatggccgcgtcgacggtgacggcggtggtggccgccgaggacgaggcgcgccaggaggcggcgcgcgacctgcgctcgccgctgtcgtcgccgtgcgagtggttcgtgtgcgacgaggcggacgcgcggacgcggtgcctcgtcatccagggctccgactcgctggcgtcgtggcaggccaacctcctgttcgagcccaccgagttcgagggcacgggcgtgctggtgcaccggggcatctacgaggcggccaagggcatctacgagcaggtggtgccggaggtcgaggcgcacctgcggagggcgcgcgcggggcgcgcgccgcggctgcggctcacgggccactcgctcggcggcagcctcgcggtgctggtcagcctgatgctgctggcgcgcggcgtggtgacgcccgaggcgctgcacccggtggtcaccttcggggcgccgtccgtgttctgcggcgggaaccgcgtcctggaggcgctgggcgtcggcgaggcgcacgtccggtccgtggccatgcaccgtgacatcgtgcccagggccttctcgtgccgctacccgggccaggccatcgcgctgctcaagcgcctcaacggcgtgctccgcgcccacccgtgcctcaacacgcacaggtcgctgtacatgcccatgggcgccacgtacatccttcagcccgacagcagcgtgtcgccgcgccacccgttcctccccgagggcgcggcgctgttccgcctggactcggagcgctcgccgacggccctggtagccagcgcgctgcgcgcgttcctctactcgccgcacccgctcgagacactgagcgacctgtcggcctacggcgcggggggcgccatactccgggaccacgagtccagcaactacttcagggctctcagtgcgctggccagggcgccaccgcggcgccggaagcaaccggagatcgtgtggcagttgcccggcgtcgagcggctgcagcagtattggtggccggggatcgccggcaccgtcatccccgcaccggtggccgtcctcagcaacaaggagctggtgtccgaggcataggacttcacgctgcgttccttgggtttgctcgcttgagcaatgtaacattatttggttctttggttggttccgcacgaggtacatagagaatgcacagcttcttttggtgtttgcgttcgtgtaaaaactgtaataatcatgcatagcgtaggacggtaggagcgtgtctggtttggtgtcctgatccgcggctgctcaataagacaatgggctttgtcttgggttcctgcgaaggaacggatgagttaacatgtaaacttgtttcaatgaagccttagaattcttaac

SEQ ID NO: 20647 - DNA, 2393 bp, Zea Mays
gcgagactaggacttggggattgtgctgctactcagctgaaagtttatagaaggtggagaagttgtggtgtttccctacctgttagtctgcacttctttgttcctgatcaactgctccgacacgattgttgtcttctcaacctctcttgccaagcatggctgggcaaacggcaaaggcaaaggaagcagaaaaagatgacagacaagaacccggagctgagggggcgaaaaacaagctactgccgtctcaccagcagcaagactctccagcttctgtggcggacaatgattcttcaggtgtctcttcagttcctggcgatgagtcgcctgtcctggatggggattctggtgagttgaaagtggaggaaaacttggatggtaatgggagtaaggaaaagaaaacgtctcagaagagcagtactagtgacggctttgcttctgctaaagtgagtgatgggacaagtagtttgaggaagaccagtggtagtgcgacgatgagtacacgggccgatttcactgagagtgggaagagtagcatgtgccgtgtgagcacggccagtgacattagcgacgagagctcgtgcagcagcatgagcagtgccaccacaaagccacacaaggggaatgattcaaggtgggaggcgatccatgttgtgaagtccagggataatgttcttggactgaatcattttaggctgcttaagaagttgggttctggtgatataggaagtgtgtatctctctgaactgagtggtacacggagttactttgcaatgaaggtaatggataagacttctttggcgagtcggaagaagctgcttcgagctcagaccgagcgggagatcctacagtccctggaccatccatttctaccaaccctgtacactcattttgagacagacaagttttcatgcttagttatggaattctgccctggaggtgaccttcatactcttcgtcaaaggcaacctggaaaatatttctcagagcaagcagcaaagttctatgtggcagaggtactccttgcattggaatacctgcatatgcttgggattatataccgtgatcttaaaccagaaaatgtcctcgttcgggaagatggccacatcatgctatcagactttgatctctctcttcgctgttcagtaagcccaacggtgatcaagtctgcaaatcctggcctagatgcaatgcagaggaacaatgcagcatactgtgcccagcctgcttgcattgaaccatcctgcattcagccctcttgtgtagctccaactacttgctttggcccccggttcttctccaaatctaaatcaaagtccaagtccaagtccaagaaggacaagtcaaagcctgatgctccaaaccaagagaacctcttcccagagctcattgctgagccaactgacgctcgctcgatgtcctttgttggcactcatgagtacctggccccagaaataataaaaggggagggccatggaagtgctgtggattggtggacctttggcatattcttgtacgagctgttgttcgggaagaccccattcaaaggttcaggcaaccgggctacactcttcaacgttgttggccagcccttgaggttcccagagtccccaatagtgagcttctctgcgagggacatgataaggggattgctagtcaaggacccgcagcaccgacttgggtataagcgtggcgctaccgagataaagcagcatcctttcttcgagggcgtgaactgggctctgataaggtgtgcgagccctccagacataccaaagcctgttgagctcgagtgtcgcccaaagcaagtgccatcagcaaatggaaaggtcgcgccagcccctaaccaaaaggggccagataattatctagagtttgaattcttctagggaatttttttttgtgatttctgaactgaaagagtgcatctgggcagatgctgtgaaagaaagtgaaagatgatgagctactctaggcatgtgcttggctggatcttttttttttctgccattagactgtacgctcgtttcaggatatccgagttgttttttcctgctgaactgcttaactctagggtgtactcaatccatcatgtatgttgcaattttcagaacttgcctatggtacttgaaatggacttcagggctacttgctccagctctctgtgtaattgctaatatacattgtaattgatgcttcatcttaggagttaggacatgtcttgctcttcaaatgctgatatctgaacctcgcattgctaatctcagtctgtcgtgaaaaacagaaaccggtgtttgcatttcttggttatccgaaggtgagacatcggcaaggcaatgcaacaagaagcttcgatcttgtgtaatacccaatttgtagatataatataaaag

SEQ ID NO: 20648 - DNA, 4074 bp, Zea Mays
atgtggcagcgtgatgcgccgcaagaagcttccacgaagcttcatggccgctaccgcctcgagaacaagtccccattcccgaccgcaaaagcgggccgagccgaggaagaagagaacaaaacgaaacccgaagctttttcccccattcttcgctggatatacaggaggattttcagagtcagggaggtgagggagagagggcgaggcaactgtgtgtgtgtgtgtgtgtgtgagcaggcccgccgagaagaaccttcgcgacgccgaggggtcggtcgcgcgcgggcgctcgtcggtcggtcggtcggtcggtgtcgtctctcctgcgaaggtgcccctggctgctgctgccggggtggtctgatcgggcatggcgcaggggagttcgccgccgccgccggagatccgctcgccggacgagcgggccgcggcggaggaccccgccgaggcggaggcgggggaggtggtcttcgacgacgcgttcgacataccccataagaacgctccgcacgaccggttgcgccggtggaggcaagctgctcttgttcttaatgcttcacgacgttttagatatactcttgaccttaaaaaggaggaagagaaagagattataaggaggaagatccggtcccatgcgcaagttatacgggcagcatttcttttcaaagaagctgggcaaaaagatatcagagaagcttatactggtataaatcttgcaacggcctctcgcagttttccaattgaactggaaaagcttaacacattaaacagggaccatgacagtgttcttcttcaagaaattggaggagttaagggattgtcagatttgttgaagagtaatttagagaagggagttagtccaaatgaggatgaattattacaaaggaagaatgtatatggatcaaatacatatccacgcaagaagagaaaaaacatactgcgttttgtatttgaagcttgccaagatttaactcttgtcattctgatgatagctgctgccatatcactaacattgggtatgactacagagggtgttgatgaaggatggtatgatggcggaagtatctttttagccgtttttcttgtgatacttgttactgcaacaagtgattataggcaatctctacagtttcgacatctgaatgaggagaaacagaacatacaagtggaggttgttagaggtggtaaaagatttggagcttcaatctttgaccttgttgttggtgatgtagttcctctcaaaattggtgatcaagttcctgctgatggtgtcctgatatctggccattctcttgcaatagatgaatcaagtatgactggagagtcaaaagttgtccacaaggatcaaaaggcaccattcttgatgtctggttgcaaggttgcagatggctatggttctatgttggtaacaggggtgggtacaaatactgaatggggtcagttgatggctaacctttcagaagataatggtgaagaaacaccattacaggttcgcttgaatggtgttgcaacttttattggtttggtgggcttgtctgttgctggtgcagtacttgttgtgctttggataaggtattttactggacataccgaaaatcctgatgggacacctcaatttgttgctggaactactggtgtgaagcaaggatttatgggggcaattagaattttgactatcgctgtgaccattgtagttgttgctgtgcctgagggactcccattggcagtaacactgacgcttgcatattccatgaaaaagatgatgcgagacaaagctctggtgaggcggctctcgtcatgtgaaacaatgggatcagctactacaatatgcagtgataagacaggaacccttacattgaataagatgacagtcgtggaagcatattttgctggaacaaagttggatccatgtgatgatgttagccagatgtcagacagtgcagcgtcacttattattgaaggaattgcgcagaacacaacaggaactgtatttctgccagaggatgggggagcagctgaacttactggttcgcctactgaaaaggccattctttcttggggccttaagatagggatggatttcgacgatgtgaggacaaaatcttcagttattcatgtttttccatttaactcggagaagaaacgtggcgctgttgcagtacagttagatgatggtgttcacatccactggaaaggtgcagctgaaatagtgttatcatcttgcaaaagctggctttccgtcgatggctctgttcagtcaatgagtgctgagaagcacgatgaattcaagagatcaatcgaagacatgggagcgaattcattacgctgtgttgcttttgcatactgttcctttgacattgaaaagatcccaatggaagacataacaagctgggagttgcctgaggatgacctgactctgcttggcatcataggaataaaggacccctgtcgcccaggtgtaagggatgctgtacgcctgtgcactactgctggtgttaaggtgcgcatggttacaggagataatattgaaacagctaaagctatagctctggagtgtggaatactagatgcaaatagtgttatttcagagccagttgtaatcgagggaaaagtgttccgtgagatgtctgaaagtgcaagaggagaggccgccgacaagataattgtgatggggagatcctcgccaaatgataaacttttgcttgtccaagctttaaaacgaaaaggccatgttgtagctgttactggtgatggcacaaatgatgcccctgcattgcacgaggccgatataggtctttcaatgggcatttccgggacagaagttgctaaagaaagctctgacattataatcttggatgatgacttcacgtcagttgtcaaggttgttcgttggggacgatctgtctacgctaatatccagaaattcattcagttccagctcaccgtcaatgttgctgcacttgtcattaatgtggttgctgctgtgtcctctggtgatgtgcccctaaatgctgttgagcttctgtgggtgaacctcataatggacacacttggagctcttgcattagcaaccgagcctccaacagacaaccttatgaagagaaatcctgttggtcgaagggaacctcttgttacaaatatcatgtggagaaacttgtttgttcaggccctttaccaagtagcaattcttctgattttcgattttgatggagtaaggattctgcgtctgcagaatgaaagccgatctgatgctgagaagataacaaatactttcatcttcaacacatttgtattttgccagatcttcaatgagttcaatgcacgaaaacccgaggaaaagaatgtcttcaaaggggtcacgaagaatcacctgttcatgggaataatcggtataacgacagtatttcagatactgataattcagttcctggggaagttcttcaaaatagtgaggcttggttggagactatggttggtttcagttgctatcggccttgtgagttggcccctggcttatgtgggtaaatttattcctgtgcccgtaagacctcttccggactatttcaaaccccgctgttgttggaaaccgccgcgccgagacgaggaggaaggtgggcagagctaaagcgcaacgagtgggcagtgtaaataggcacgtgataaaaaaatggagataaattgcactggttgattccatggtagcagcatcctggggatgtacgcataagatggcaggtagtcggcctcgtcgttttcttctaggagaagcagtcggaagaaaagaagtactatacagaagccaaacttgtctacccctatccagctggtgtgtctgctatgcggcagcgaaacttgagtcattagattgtagcctgaatgaaagcagcgctagcttgcgatgtagcagtacctttttttccctggcgatatcatctgactgtaaatttgtaaatgctttcggactacgagttgttcttatttttcatccacctcttctctacggaacgtttttttctatataagaaaataaagtcaacagagcagttctaaaacgactgttttttttttcctgaa

SEQ ID NO: 20649 - DNA, 4768 bp, Zea Mays
cgactgcggccgtcccgcgggaagccaaaatcaccgaaacgaaaaaattcttgaaaccgccgaccgcgggaaacattttgcgcgccgcgcccagctcccttcacaaataatcccttcccggttcacctcttcctctcccccaaatctccaaatctccggtcgtctccagttcccacctcgcgccccaaatccgtatccaccgccaccgccaccgcccaccaccccgccgccaacgctgacgccgcctcctccggctgcacccgtcacgccaggtgcttggacttcgggaatctgcaggttcagtagagtagacaagtgtttgagcaaggactggatagaggaatgcgctgcttgttcctagagtagcacccgcaagatccaagtcttcccgcgatggaaagcggcgccatggtactcggtgttgttcgtcccgaggagtcccctgaccgcaacggcggtgggccacgggacgatttgggcccatcgcagatgcaggtcgatggtcccgttgttctcaaccaatccgctgagctcgtctcggatgattcgatggccgtcgatgacgtcccagttcaacaaccatcaggccagccggtggaggcaacacaacagtctcctgcgacgctgattgatactatcatggaggtgcagaagcagctgaagcggaagagggcttctaatagcccagtgattgatgccgccgataaggacgctcttgttgctgggtgccggcaggagctcgaggggctcttccagtattacaaggaggtttctgaccgcaagatgcagcttgacggcgggaacctgtccttcaacgggatggttggctgtttgcttgaggagagcagtctcgggctgactaggttggtggacgaaatatatcaacagctgaagggattggagggtgtgtctgtggcttcagtccgcagctctgtgctgctcgctggccagaggatgatgtacgggaattcttcactggacgctgatgtgttagaagatgaatcggagtcggctctttggtgctgggagataagagatctgcgattgttgcctgtgaaagtacgcagcattctgagtacacggagatctgtcagaaagaaaatccatgagagaatcactgccatatattcgactttgtcggttcttgaaaattcaggagcttacatccaagtaaatgatctaaaaaaagcatcattgaaattaaacaaatcactgaacctggaagggatcagatcaatggtggaaagagcgacacaaaagaacacagaacggggtgtgaaagatgctgtatcagcagttaaggaattgatgcaagagacagataaaaatgaccaaaatgttagaaggcttgaggatactagtgtctctgagccgcagaatgggaactcacttggtaatgagaaagagattcagaaagcacaaaaacaagtggagaaggaaataaagcgccaggagaaagaagaagctcagatgagaaaacttcaaaagaaacagcaagaagaggccctaagagaacagaagagacatgaaaaggaggaggctgaagccaagaagcaacaaaagaagcaggaagatgaagctctgaaagaacagaagagacgtgaaaaggaggaggctgaagctaagaaacaacaaaagaagcaggaagaggaagttctgaaagaacagaagcgtcgtgaaaaggaagaagctgaaatgaagaaacaacagaaaaaacagcaagatgaagctgagaaagaacagaagcgccttgagaaggaagctgcacaactcaagaagcaactggtcattcaaaaacaagcttctatgatggaacgctttttcaaaagtaagaaagacaatggaaaacatcaaaaacctggagagaacaactcagctgaagatccatgcaatgacaacaaagagacaataccagcaaccacatcaaaaattgattcttcattgtatcaacaagagggatgggttttagatgatcttcggaggttgcaggtcactggttggaagaagctatctagctacaataggtcctccagatggggtacaagatgcaagcccaagatggaggcatttaaagagctgaagcttcagaaatcctcagatgatatggttgatgaaatactttccactccaaatgaagatggtggccgcaatccaattcaggagaacgaacatgataagcttgaaagtgatattgacatgatacaggctagtgaaatgcaatgccatggtgctagtaaccctaaacctctgcaaacgagattaattagaatgaagcttctgcaatttgacaaaagtaacaggccagcatattatggatcctggaggaagaaaagtgctgctattagtccaaggtgtccatttaagatggatcctgatcttgactacgaggttgatagtgatgatgaatgggaagaggaggatcctggtgagagtctttctgactgtgagaaggataatgatgaatttatggaggaagattccaaaattacagatgaagaggatgaagatagctttgttgtgcctgatggctatctctcagacaacgaggggatacaaattgaaagcctattggacgataaagaagaggaggccaatagctccccaaatggtcagtgtacagaagttgaagagttcaggtctctgctccgccaacaaagagtcctgaacactttgactgagcaagctctccggaagagccaacctcttattatatgcaacctaaatcacgaaaaagctgaattactgactgctgaagacctcaagggaacggaaaagattgagcagctatgcttgcaagttctttcaatgcgcatctgtccaggaggtgcaattgttgatgtgcctctaactgacagctcatctgcaactgttgaggaaattaaccaacccaatgtgaagaatggctctcctgaggctgcatctgctataccagaaacagacctgccagaatttgtacaggtgataagatcatgtcgagatggtatccacaaggtggtggaattactgcagcacaagtttccaaatgttccaaagactcaactgaatcgtaaagtgagggagatatctgacttcattgacaatcattggaaggtaaagaaagagattcttgacaagctagggttggattcgtcaccagtgaaacccaagaagaataaaagcatagctatgtacttctcgaagagatgtttacctccggaagaggctgtcaatgctctggctgcttctcctgagttgcggttgaaatctagaaatggtggccgcgaagctccccagatcaatctgttcccctcagagcagtaaagtttctaataaaggtcccctgaaagttggattaggggtcaatgaagctacgaacccagatgagcagaaagctcagctatccatgtaaaggctaggaagtgcaactcggttttgcatcgtcaccaatggaagatggtcttagtgcaacatgggtttttgtcaacatctggattatgttttcagtgctggacatgtaattttagcctgaaagtaggtttttattcaattatttggccttgatgtgattaacatgtatgtgtcctgttgttagcgcaaggaattgctacaaagttggccatctgccgcttgtgtgttgttaacattattctgattctggcaaggcaaataagcaaacatgtcttgtgactgctcaattgacagctttgggcagaaattaatttttgcaacctgtttgcatcaaatctgatgaatgcacatgttaatagtagcaaaggtaacaaaagcaataatatatatttgctttggtatttatttattttggttgaacagtcataacagtacaccgtagtacaaaagaatgacagcaatagtacaataatagaatagacatcaaagaatctcattttgaaggagcccaggccagcagtggatgggatcagacatggtacgattgccagttcttggcctggaggtcgtcgtcgtcgtcatcctcgtcgaggcggagggagaaggcaagcgcgagcgcggcccactcgaggacgaagatggcggtgccgagccctccgaccatcttgaggatgacggcgccgtcctcgtcgcggacgtaggactggagctcggcgaggaagtcggaggtgcgggtgaacgcgagcagcgcgatggcgccctggaagatggcggtgagcgcggctcccgcggtgtgcgcgttgtgccactgcgcgggcgtggcgggcgccgtgaaggagcccgagcagccggccgcggagaagacggcggtgagggcgtggaggaagagcaggagcaggccgcacggggacggcagcaggcgcagcgacagcgtgaggaagatgcagctggaggaggcgcccaggaggacgtagttgcagaggaggaacgccttgcgtgtgtgcgacttggccgccatcgtcgccgccgccgtactcgctcggaagctgttgggttgggtcttggaagcctgccgaggaagcgggatgccgctggcttgcggggctttgcgggcgaggggtcgaggtcgagagagggaggtttggagtggggtgggagcggcggagtggcgggtacttatgcggggtggcgcggaggatttggccgttgaggctgggggcgcggcggtggcgcggcggtggtgaggactgaggagtgaccgagtgagtccgacagggcaacgggcaacggctagtctggtggtggggctcgtgggggcccgcccgctcgctcgcatgagaattgagaagagagacgttgctgcatgaagggagtagttgac

SEQ ID NO: 20650 - DNA, 489 bp, Zea Mays
cggcaccgcacagcgcgcctagccctacctcagccccaccccagccccaggtcacgaccaagaccagcgtcgcgcaccagccgcgggcgaggctcgccgcttgacacggcgcctctgccccggcgtgctcccctgcctatgcagccagcgccccccgcccagcgcgacgtgcgcgtgtgcgcattccccactgcgctgtgcgtagttgcccgcccgtcgtgctgtttccttcggccccgcgcgcaggcgctccgcgtacgtgcagaggagtctcccgcgcgcacgccgtcgaacacctgcacccgcgcaccgaagctccgttgagccaccatctgcaccaccttcgttcgatctcagtccaagcctctgtaacgccctgaatttgggggtaaaattttttcttcttttctctcaccaaattcgggcgttactctcttttctctttccccttttgctctttcttcccaatttcaaaccagtatagcggca

SEQ ID NO: 20651 - DNA, 887 bp, Zea Mays
atggatatgataatttgtaggtctgcatggaaatttcattccccagacctaaggatggggatgcgcatatcggtctctacaaacaattgtctcttggtacagattgcaacaatattcatcaatagatgttccttctcacagggagattcagcaagttcttgttgaaattggtgacaaggatccatcatttattggatcttgtgagtggatcggagccattgagttaagctttgtcctcgacaaactgctgggcgtgagttgtaaggttatcaatgtgaggtctggcgatgagcttcctgaaaagtgcagagaacttgccaggcattttgaaacccagggaactcctgtgatgattggtggtggagtcttggcttacacccttttgggagttgattataacggagccagtggagactgtgcatttcttatccttgatccgcactacactggtactgacgatctcaaaaagattgtaaatggcggatggtgcggatggaagaagtctgtcgacagcaaaggccgaagcttcttcttgaaagacaagttctacaaccttctactaccccaaaggccaaacatggtgtgaaacctatattgttcaatatgttaatagtgcagacgtgcaggttcacgaggcacagatatttatgcttgtgatagaggtttatggttgcgatagcagaagttatgatttgtaaaaaaaatttagtgagacattatattgtttttttaataaatttgtagtgagtaaattaaattaaattaacgaatgagagttttacaggcataacactaaaagcagacgttttgcttgagacgtcatgcttaacatgtggagtctgtgtatttggtaaactaagggtctgtctgtatccattggcactgaa

SEQ ID NO: 20652 - DNA, 2052 bp, Zea Mays
tcttaatgagagaatgattcaaattagatatccatgccaaggaacctcctggagatgtcttaatatttatgacaggaaaggatgatattgacaagatggtatcaaaattggaggaaagaattcgaaatcttgaggagggctcctgcatcgatgctcttgtccttcctcttcatggttctttgccacctgagctgcaggttagagtatttgctccagcacctccaaactgccgacgcttcattgttgcaacaaatgttgctgaaacttcgctgactgtagatggtgtcgtgttcgtgattgattgtggttatgtaaagcagcgccaatacaatccatcaagtggaatgtattcacttgatgttgtccaaatcagcagagtgcaggctgatcagcgagcagggcgagctggtagaactcggcccggcaagtgctataggctatacccaatttccatatatcagaatgagtttcttgaggcaacagtccctgaaattcaacgctcttctcttgctggaagtgttctgtatctgaaatcgttaaatcttccagacatcaacatactgaagtttgattttctagatccaccatcacgtgagtcattagaagatgctttgaggcaattatacctcattgatgcaattgatgaaaacggacaaataacggatgttggacgagttatggcagagcttcctcttgagccgtctctttcaaggactttgattgaagcaaatgaattgggatgcctatctcaggcgttaactgttgcatcgattttgtcagcagaaataacattgcgatcagttagcaaggacgtggtggatggaaagaggaaaaggcaggagctccctgatgggtctggctggggtgaccatatacaattgcttcagatatttgaaagctgggaccaaactggctatgacacaaaatggtgctctcatcatgatttgcaggtgcggggtatgaaattgagcaaagatgtgaggaaccaactatgtcagattattcaaaaaattgcaaaaggttcaactgatgtggatgcaaggaaaagccggaagaatgaccctgattatagaaagctgaggagagctctctgcgtaggatatggtaaccagctagctgagaggatgctgcatcacaatggctaccatactgttggctataggacccaacttgtacaggtgcatccatcttctgtactggaaggcgatgagtatggaaagtttccaatgtacgttatttatcatgagctgataagtacaactcgtccatacatgagaaatgtctgcgccgtcgagcaagcctgggttcagcctatattaaagaagctcgacaaattagacataaacagattaagtggtggttcgagtgcaccgggagattctgaacttctgggagacaataagcaagtgaactcgtcaaagaatgacgtgggtgtaaaacaatcagaggtggacagtaaaatccaggcagctcgagagcggtaccttgcacgaaaaggcaagaaatgacaatcgacacgtttaactgatcgctcagcatccttctggtcagcctgaagcttctctgaagatcataccgaggaaccattcgtgttattgtgggtggtgtatgcttcaacgtgcacaaacaagagaatttcttatgtaatcttttgtttgaggactctaaccttttcttttatttggcattactgtgatgtgaccttttccttgggccgaaatattttacaggcttttctgcatgggctagattcttttcccccatattcctatatggtgttgtctgttgaggtcttgtccctcctgcctagcatatgttgagtcccaagcaaggcaacaccgcaatatgatgcgatcttggaagtgatactgatatgcgctctgcttgggtttctctaacaaattttagagtcccgctctccctccctccgttccaaaatataatttgttttagattaattacacattcattaagtaacatatgaatataatttgtatgtatattcattatcatttgaatgaatgtggacaaaaaaaagtgggctagaaggaa

SEQ ID NO: 20653 - DNA, 1384 bp, Zea Mays
ccgggctccggcggataagttgggtggcccgtcgcgcgcgaccgagcggaggtgatcttcctggggcagctgcggcatcccaacctggtgaagctggtgggctactgctgcgaggacgagcaccgcctgctcgtctacgagtacatggagcacggcagcctggagaaccacctcttcaaacagattcctgccgtgctgccctggtcgacccgactaaacattgcagtaggcgccgccaagggtttggcgttcctccacgacgccgagaagccggtcatctaccgtgacttcaaggcctccaacatcttgctcgactcggactacaaggccaagctgtcagacttcgggctggccaaggacgggccggagggcgacgacacgcacgtgtcgacgcgcgtgatggggacgcacggctacgcggcgccggagtacatcatgacgggccacctcacggccaagagcgacgtgtacagcttcggcgtggtgctgctggagatcctcacgggccgccggtccgtcgacaagacccgccccagccgggagcagaacctggtggactacgcgcggccgtgcctcaaggacccgctcaggctgggccggatcatggacccggccatggagggccagtactcgccgcgggcggcccagagcgcggcgctggtcgcgtaccggtgcctcagcgccagccccaagaaccggccggacatgtccgccgtcgtccgggcgctggagccgctgctcgacctccacgacgacgtgcccgtggcgcccctgggccacgccggccccgtcgtgctgttcgtagcggccgccgccgaggaggagaagaaggagcgggccccgaggaaggacgtccacgtccaccggcgcaggcccatgtcgcccaaggcgagccccaggaagcgccccggcaccggcgccggcaccaaggaggagttctgggtgtggcatctgccggtgccggccgaccataagacacgtccgaccttgggcggcggcgttgtgcaagcgtgtgcgtgagccaaggtgctattggggctcagattgtgccttggaccaaattgttgtgtttttcagtctgctgttacagtgagatgagatgcagagtgactcgagcaaattgtacaccggaagccatcgttctctactccagtatacccttgtatacgcttgtattcagatgaagcgacgatggcaattcgcaaacgaacagaaacgtttgcgtacgtacaggccatgggcatgtgacaagagggtataaatcatggagcagtgattggcttttggcatcatgatttcttctgattgactatactctcttggtgatttacaaaccaaacaaaacggtagtacaagaaaaatccttttcatggagatgtgacgg

SEQ ID NO: 20654 - DNA, 1024 bp, Zea Mays
gtaattcccagctggtttctggttttgacactgatgggcaattgttcaccacccatccatcagcttatgcagtcatctgtgcatatggaatcttaaccatcctgtggaatgcagagcagcattttgctgccactatatatgcagattccagaaggactgtttccactgttgccacgagtagtagatcttgtttcagactcgagcattccagttattgccgctggcggaattgtagatggacgtggctatgttgccgcattggcactcggtgcccaaggtgtttgtttaggaactaggtttgttgctaccgaggaaagctttgcacatcctatttataagcaaaagctaatcgagatgagtcacacagactacacaaatatattcggacgtgctagatggcctgatgctccacagcgggtcctggaaacacccttctatgatgagtggaagaataatttcccagaccaggaaacagaggaagatcaacccatcataggccactctatcatccatggtgtgcacaaggatattcgtcggtttgccggtactgttccaaacgcgacggcaacaggagatatcgacatcatggccatgtattcgggtcagggtgttgggctaatcacggagatcataccagctgctcaagttgtcaaaagtctggtcgctgaagcgaaggaagtcatcagagaaaagctttctggttaccaatagaatccttcctgaactgcaaactagaagtatctgtgtgtgagtagtcaccaatcagaataatcggaagcaccaaggtttaggtttgattcttgtgctatttttaagtacaataaagtaaaaaatgatgaaaataaacgagactaacaaaggtattctgtcagacatttgtgtgcgtgtgtgtgaaaatgtttcataatccatttgtgatcttggccatacataaattttgttattttaatttagctgtttcactactacattgcaaccatcagtatcatgcagacttcaatatatgtcacgatttgcatggtct

SEQ ID NO: 20655 - DNA, 489 bp, Zea Mays
ctcgtagcgacgtgtagatcattattatgcagtttgttcatatgtttagtgtgatattaattttgtctataccatgtctgtttgtattgctacgactagcagtgagatcgcgaggatctgaagaatcatcctagtacctgggatctcaagtgtcaagcaagttgtgtctttgatcacatttattacccaataatgttctttattatcacttattcatgcataggtttaattttgatgggacccaataggtcaccctagtctgtttatcttgttatcttgtttacccctgaatcatttgggtagtttttgctattgccctatatgtttttgggattaatactacattatgtccatgtttcaattattctgttattttatttatgttcatgtcaagatcatcattatctttaattggaacatggagcttaactagagaaacatgtgccaccacaagggtgtaatgggacgcccttggctaactaattagga

SEQ ID NO: 20656 - DNA, 962 bp, Zea Mays
ccggccgcgctgtcctttgtacaagaggagatgggatggtcgccacggcccccgcccatcacccgcagcaccgcatcactccgcctcgtcccccacttctcgcacttccgcttcagcttccaccgtgcccaagagtcacgaggcggcggcgggtcacgccgacgtactctcaggtgctgcggtgggactgcccctgctgctgccgcgggggcggcggaggggaggatggccgcggcgacggcggcggacatggtgtgggtgagggtgcttgaggatggcgtgttccggttcgacgcgtcggaggcggcgcgcgccgccgcggggcccagcctctcgttcgcggacccgcggcggcgggaggcgccgcatgacggggccgacatgcccgccgttgtcccggtatgcgaggtcgcggcggggggatcccagaaggtcgtgataaagcttcctcctgggacatctttctatggtactggagaagcgagtggcccacttgaacggactgggaaacgagttttcacatggaatacagatgcatggggttttgggccaggaaccacttcgttgtaccagtcacacccttgggttttggctgtcctccctgatggaaaagcattgggtgtccttgctgataccactcggcgttgtgagattgatttgcgacaagaatcaactataaagttctctgccttatctgcctaccctgtcatcacttttgggccatttaatactccagctgatgtcatgacatctttgtcgcatgcaattggtactgtgtccatgccgccaaaatggtcacttggctatcatcaatgtcgttggagctatgattcttctgagaaagtactcaaggttgttaggacatttagggagaaagacattccttgtgatgttgtctggatggatattgactatatggatggttttaggtgcttcacgtttgatagtttccctagcggcga

SEQ ID NO: 20657 - DNA, 2387 bp, Zea Mays
cgaaattaatgcccatacccctctcattgtcccatcaaactcgctactggcctcgggcccgcccgtcgtgaggtccgagctcgatgcagccgatccggcggcggcaccgaggctttgcactcctctgtctctccgccgccctcctcgctgccgccactctgctccccggcgccgccgtcgccgaaggtgtcacgccctccgaggcgcgccggctccgcgacgaggtgaaagatatgttctatcatgcgtttgatggatacatgaagtatgctttcccactcgatgagctgcggcccttaagttgccaagatcgattctttggataccttggctttactgggtgataaggagaaatttggtgctgctgtggagtgggttggtaagaatgtccactttgatattaataaaaccgtctctgtttttgaaaccaacatacgtatccttgggggtctgctatcagctcacctgattgccagtgattatgccactggtatgagaatccaatcttatgatgaccagttacttcatttagctgctgacttagctcagaggttgttgcccgcatttgacactcctacaggtattccatttggatctgttaatttattgtacggagtcgatgaaaatgaaagcaagataacatcaacggctggtggtggtactttgacactggaatttggcatattgagtcgcttgactaataatactgtttttgagcgagttacaaaaaaatcagtgcgtggaatatggtcacgcagatcaaaactcaatcttgttggtgcccatataaatgtctttactggtgaatggacacagaaggatgcaggaattggcacaagcattgattcattctatgaatatcttctaaaggcatatttattgtttggagatgaagaatacctgtacatttttcaggaggcttacaaagctgccatgcactatctccatcatgatccttggtacgtggaggttaatatgaactctggtgctactgtttggccactcttcaatagtctgcaggcattctggccagggcttcaggttttagctggagatgttgatcctgctattcgcacacatgctgccttcttcagcgtctggaaaaagtatggttttacccctgaaggttttaatcttgctacatccactgtacagaatggacaaaggagctacccgctacgaccagagttgattgaaagcacatattggttgttcaaggctaccagagattacagataccttgatgttggaagggacatattagcaagccttcaatatggtgccagatgcccttgtggttactgccacatatcagatgtggaaacccacaagcaggatgatcacatggagagttttttccttgcagaaacggtcaagtatctctggcttctttttgatttagctgctggccctgacaatattgttgaaaatggaccatataagtacatatttagtacagagggccatttgttacctgttactcctgagatagccttggaagatgaacattgttcatattttggagcattctgtaatggcggtgccgaccatggatatggtgctagtgctagttctactaagcatcgaaatggaaactatacccaattagatgatattcaaaccccttccagtcactattcaatgtccaatgtgttgtttacgccaggttacatcaagggagtttgtccaggattgactcatgcgcagaaatttgggatatcatactctgatgaagaggataactttatagagcagacttctgagagtcttgatcatcatggtgaatctgccatagaatctagcgtccaagaccaatcaagttctattatattgatctctcacccagtcgcaagccaacaggatgaggcttttgagagcgagtctggaagtcaagatcatgcaaatattgttgtaacttctgattctgattctgattccacaagccgtgataatactgttggctctcccggaatgaactcggaagaacttatggacgacatatagggcacctctagacaggacaaaagatgaagaggttgctcacagtgttgagtccaagatatcagctgaccctttgctcatgtagcaacccatttctgtggaatcttcagggtcaatggcttgccgaatgcagaacaagttagcaagcaagcaaaatgtctggtagacgattccagtatcttgccagcttcaacatcggaaattgatatttactttcagatagaatatattacagggcgtacattcactaatttgttcttttttttctgtatcgatcactaatagatattattttgattaatagagaatgcacgagttttgtacaccagatgcatatgaagaggcgcggcacacatcacaggatctatttagtgtagaacagaaca

SEQ ID NO: 20658 - DNA, 195 bp, Zea Mays
tttttttgaaagggaggggcaaaagatttaccgctccaatatattagaaatgagatacacttacaagacacgcacacgaagacaaagggaggagaaaagaaagaagaaggacaacctcaaccgcctactgagcctaaccacaactccgaaactaccaggcacaaactaacacaagaaagcaccaactagctcttt

SEQ ID NO: 20659 - DNA, 1340 bp, Zea Mays
attttgaaataagttcctgaagcctttgctctatggagggaaaatagatgtcacaagccagctgaaaagttcaagaaacgaggtaaaagagagaagtgtaatgaagttagttagagatactggggtgcaacaaagaaatagccttttgggcgatcttggtacctcaaagaagcatgcaactgggaaaaggagcaatgctctaatttctggaatggaaaatgcaaatgaaactggtactagaaacagatcatttgcacagaaacaatctcattctagtcaggtggagaaccatggaactgctgactctcctgatagcttgaagccatcattgctcaaactcaaatttaagcgtccacattttgagcagctaaacacccaggcctctcaaccagaggagccgacctcctgggtttctcagcaggaggagcagttaaatgttgctaaaggccagagatcaaagaggaagaggccttcgatggagaaggcagatggtttggacggtataactccagccaagaggcatcagcagagcacagatgaagtgatggacgcaaactggattctacgcaagttgggcaaggatgcgatcggaaagaggattgaggtccatctaacttctgatggcaaatggcatcaagggatggtgtctaatgtcatgggtggcacactgtgtattcggttagataatggcaggtctgagaacgtggagctggggaagcaggccatccgcttgattgcttcaagatcgaagggcgggaagcgatgaaaccttttccccataatatgcagcttaggacctgttctcgctcaatacattgcgccatgattatggcaggtagagtcctccccccctgaggtttgacatccgctggagcacagcctctcagcctttgctgactggacgagatactgagcgcaacttccatctgttgcgccatgtttcgctagcctagcgtgtaacagacatcgttttttggtgttggaagccccattggctttcgactagattctgttagggtagggaatgaggttttagatcaccttggatgtaagagaagcaggtagcgccgtgtctggagtgttttgtatgtttagttttccgacgagtttctcgacaatttgttattcacttatatttggttgctggtgttatttgctggccaatcaatgtctttttgtgatagtaataatttgtctacaaatacaaatagaagctggtgcgaaaccgaggctttgcctttgctcgaccgtctagcatgctcaaatgctcgacgactcaccgctggttttcgaagggaatttcaggagggtgaatttggtgaggattgtatgtatacctg

SEQ ID NO: 20660 - DNA, 2137 bp, Zea Mays
atcaccactgagtcacgactccagatctcgcaccgctcgccatggacctcctcgacgcgaggcaccgccacacgccggatttgagctcctcccaagatgccgcctccaacatggggctcccgctcgccggtgccgcctaccagccctacgtttctgagcttctttccttctccatcgagcgcctccacaaggagccggagcttttgagggtcgacgcggagcgggtgcggcggcagatgcaggaggtggcggtggaaaactacgccgcgttcatcgccgcctctgaggcgctctccttcgtccgcgcgcagcttgagagcttcgacggccacctcgaggccatgatagaggagataccaaacttaacatctggctgcactgagtttgttgaatccgcacaacaaattttggaggagaggaagcttaatcaaacattactagccaaccacactacattgcttgacttgcttgaaattccacaattgatggacacgtgtatacggaatgggaactatgatgaagcacttgacctagaagcttttgtgagcaaaatctggaagttgcaccctgatttacctgttgtccaaggattagccactgaagtcaagaagacagtgcaatcattagtttcacagcttctccagaaacttcgatcaaatattcagttacctgagtgcctacgaattgtagcacatctgcgccgaattggagttttcagcgagtcagaattgcgcttacagggaagcttggctttctggaattcttgaagatctggaccaaaggaatgtttatgattacctgaaaggcatggtgacttgccacagggtacatctatttgatgttgttaatcaatatcgagcaatattcaacaatgataaatctggaaatgatgagaactatgacggcgggctgcttttcagctgggcaatgcaacaagttagtaatcacctcactactcttcaagttatgttaccaaacataacagaaggtggttctctgtccaacattcttgaacaatgcatgtattgtgcaatgggtcttggcttagtcggattggattttcgtggccttcttccaccgatctttgagaatgcggttctaaatttattctcaaagaatatgagtacggcggtcgaaaattttcaggtcattttggattcacactgttgggttccgatgccatctgttggttttgtagcaaatggtgttgtcgatgagacttctgatgatgtgactccaccttccgttttaatggagcatccacctcttgcagtgtttgtcaacggtgtttcagcagcaatgaatgagctaagaccgtgcgcaccattgagcttgaaagttgtccttgctcaggaggtggtcaagggactacatgcagtctctgactccctagtaagatacaaagctatgcggatgcttcgtggaaatgagtccgcccttttcctttcactatgccaggcattcatcgaggttgcatatccttattgtgccgcatgttttggccgatgctacccaaacggggcaacattgatctcagagcgtcaaggcacatttgacgctgtccgtcagctattgaccgtgccggcaagatctaacagttccagcatcgaaagaaggcagtcaggaggcatcgaaagaaggcagtcaggagccattgaaagaaagcagtctgttgagagcactgggatagcggtcactgataacgggctctcagccgatggacctgggctagagacgaacagttctgctgcaaccaccacctcaccggtagacgacggtccaccagcgagtaagtagcttggacctccgtttgaatcgtcaaagtccttcatcaaggcctggtttagtcaaccagagaaaaaattgctgcaaagttatattaatagagaattattcatagttttgttctcagtcttacagtgcacacaagatctcactggatatctgtatctcacttttttatcactcgaacaattaaacttctagctgttcattgttatactcgatacctagatgttgtagagtttccaaccggaacattcaataatctgattaagtgattagtacaaaccgtgttcaccgtgttgactacacttttgaagtcaaagaactgattcatgagtcatatatgtaatct

SEQ ID NO: 20661 - DNA, 4183 bp, Zea Mays
acggccagcaggtaccctgacgatcaatacgacagattatggacacctatgattattgacgccatcgactggctggtgctatccacgacggaaaaggtgcggaacatatatgatgacctcttcgaggtgccgtcgaaggtgatgcagacggcgatcacgccgcgtgacgctaccagcagcatcaacttctattggaactccaagggctcgtcgcttgggtacataccggtcttccacttctccgaggtgctgcaggcgggcgccggcgttgttcgccagttcaacatcaacatcaacggcaagcggttcacctcccatgattattacacaccacggcacctcgaaagtggctacgtatacggtaccagaccttacaccaaccagatccggtataacgtctccatcgttaagacagacacgtcaacgctcccgcctatcatcaacgccgacgagattttcatcgtcatctctacgaccaacgttggcacggactcggaggacggtacgtgggatggactgacgtgcagctatgccatttctgatcctccaaaaattactgccctaaacatgtccttcagtggtctgaccggtgacatatcatctgctttcgcaaatctcaaggctgtccaatccttctatgccgataatccagacctttgcaccaacgccggggattcatgtcagacggcgccgcaaggaaagagcaagctagtcatctactacgtcgctgttcctatggctctgatcgtggtggcgttggcagtactgctgtgttgtcttctgcggcggcgaaagacgcgagggctagcggacgtctctgtgaagccccgggacaagactccgacgagccttgcttcaatggcggccgacgaacacagacttagctcgctgcggcttgagaaccgccggttcacatacgaggacctagagatgatcaccgacagcttcaagcgtgtcattggccggggcggctttggatacgtctacgagggcttcttggaggatggcactcaggtggcggtgaagatgaggtctcagtcgtccaatcagggtgccaaggagttcctcacggaggcacagatcttgacacggatccatcacaagaaccttgtctccatggtcggctactgcaaagatggggtgtacatggcgcttgtctacgagtacatgtcagaaggatccctgcaggagcacattgcaggaaaacgcttgacttgggggcagaggcttcgaatcgcattggaatcagcgcaagggctagagtatctgcacaggggctgcaacccgcctctgattcacagggacgtgaagaccagcaacatcctactgaacgcgaaactggaggccaaggttgctgatttcggcatgtcaaaggctctagaccgcgacacctatgcgtccacgaacactcttgttggcacaccaggatacgtcgacccagagtacctggaaacaatgcagccaagcaccaagagcgacgtgtacagtttcggcgtggtgctcctggaactggtcacagggagacctcctatcctgcacagcccacagcccaccagcgtgatccagtgggcacggcagcacctggcgcgcggcgacatcgaggtcgtggtggacgcgtccatgggaggcaaccacgacgtcaacagcgtgtggaaagccgcggaggtcgcgctccagtgcaccgagcaggcgtcggcgcagcgccccaccatgggcgacgtggtggcgcagctcctggagtgcctcgacctcgagaagggccgctccgccaacgaaagtttctgcgacggagacgacagcggctccgcgaccgcgagcttgagccacagcagcgcatttgtgacggggcgtatttttgggacggtgccaatggtggagacaggccctgccacgagacgcgcgctcgtgtgtgtctcactgtctcccctgtcccctctcccgcgtgctcgtctaccttcggctcccccatgggatgagagcgccttcctcgccatggccgcctcccacctgccccccgcagccaccctcgtcaagaagtacccaactctcctccacccgttcggcgccaaaccacacgcccagaggctgatcttcaggtgccgcgcgaccagcagcgagggtgcggacgatggctgggcgtcctttgtggacgagctcaagaggtcgctgcaggtggacccgtccgacgcggtgattagcaacgccggcgcgggtctcacatcaaataacgacctcgtcaccgcgctgccactggaaccctccgctggtccggctgcgggagacgcgaccactgccgctgccggcgcggtgagcgagctcctgggcgtggacgcgtcaggcgcggtggccacccccgaccgcctcctgagctccctgctgcacctggacgcgtccaacccggtggcgagcgtggcgggcggcgcgctgtctcgcctggacgcgctcacgtcgggactgtcggacgcgcagcggtgggcgctgttcgggttcctggccgcgacgtggctgtacctgaccgcgcggcccggggtgctgagcggcgccgtggacatgtacgtgctggcgccgctgcagctggcgctggacagcgtgctgggccggcggagcctcaagatgagcgacttcgtcgtcggcgagcgcatcggggagggctccttcggggtggtgtatgccggcgccgtggtgccgaagaacggcgccgtcgtggaggagcggtccggcaaggccaagacgagcctccagaacgacgacaggtacaaggagaaggtcatactcaagaagatcaaggtcatgacggtgggggcgaaggagtgtggggactacgaggagtggttcaactaccgcgtgtcgagagcggcgccggagtcgtgcgccgacttcctcgggagcttcgtcgccgacaagaacaaggcggagttcgtcaagggcggcaagtggctcgtctggaagtttgagggcgacaggacgctggccaattacctgagcgagcgcggcttcccgtccaacctggagcgtctcatgttcgggcgcgtgctgcagggcctgggcccgctggagcgcgaggcgctggtggtgaagcaggtgatgcggcagctgatcacgtcgctgaagcgcatccacgccacgggcatcgtgcaccgcgacatcaagccgtccaacctcgtcgtgacccgccgcgggcaggtgaagctcatcgacttcggagccgccaccgacctccgcatcggcaagaactacgtgcccgaccgcgcgctgctcgacccggactactgcccgcccgagctctacgtcctccccgaggagacgcccgagcccccgccggagcccatcgccgccatcctctccccgatcctctggcagctgaacagcccggacctgttcgacatgtactcggcggggatagtgctgatgcagatggccataccgacgctgcggacgcagtcggggctcaagaacttcaacgccgagctcaggtccgccggctacgacctcaacaggtggcggcagagcgcgcggcggaggcccgacctgcagatcctggacctcgactccggccgaggctgggacctcgccaccaagctcatctcggagaggggcgccaacggcggtggccgcctgtctgccgcggccgcgttgcgccacccgtattttctcctgggtggcgaccaggccgcggcggtgctgtccaagttctcgctcagtaaatagcatccatccatggcccatggctgggtacctacgacctacgggatatatacacatcggcttattggaatcctccgatcgattcaccatccttgtatattgcgcattattgaatccttgggcataccataccggcagtgggaggcatcccaaattcaaaagggagtcatctggtaactgatgttacaacttttctgtatgggaatgctgtgaacaatgtggtgcagagtttcacacactaactaaccttacattatgctagacagagatcctacttcctttgcttcagttcctcgaatctatgcagatgcagacactcgcagagagagctcatcaactggctgcaaaattctgacctgctccttctttcagccaatcagatgtttggccatgctcgttctgatcctatactgacagacgaatccggccatggatcgcctctactgtcactggcagtacggatcgaacttcttctgga

SEQ ID NO: 20662 - DNA, 589 bp, Zea Mays
atccagagacgaatcccatcgtgttgtggccggagagacgagaggactccagagagattccgacaccgctgggctcagatgccgccgccgccgccgccgccgcagcagcagcagcagcagtccggcatgactctctgccgcctccccacggccactcttggccttcccctttctctcccctgtttgctacctcgttcccgcccccgcctgtgcttcgccgcacgtcatgccagggccgtcgccgccagggcttcctcatcctctccatcaccggactcttcattcggttcgcggatggaggagtccgtcaagaagacggtggccgacaaccccgttgtcatctactccaagtcatggtgctcatattgcatggaggtgaaggcgctcttcaagcggatcggtgtgcagccccatgttatcgagcttgaccatctcggtgctcaaggaccacaaatacagaaggtattagagaggctgactggacagtctactgttcctaatgttttcatcggtggaaagcatgttggtggctgtacaggtagcgtttcaatcacatgactcgggcagtgtggttgaacatccccaagag

SEQ ID NO: 20663 - DNA, 875 bp, Zea Mays
tgcttatcctcaacctcaggctgcagctcgacgccaaaaatcaaatcccaaagctgaagaatgcaattttggctctggacacttccgttcttgataatgaccaagtggagaatctcattaagttttgccctacaaaggaagagatcgagatgttgaagggttataatggcaacaaagaaatgcttgggaaatgtgaacagttcttcctggagctgatgaaagttccacgtgtagaggccaagctaagagtttttgctttcagaattactttctcaacacaggtagatgaactaagaactaacctaaccaccataaacgatgcaacgaaggaggtcaaagaatctctgaagttacggcagataatgaagaccattctcacattggggaatgcattaaatcaagggacagcacgaggatctgctgttggcttcagattagacagcctccttaagctgtcggatactcgatctagaaacaataaaatgacgctgatgcattatttatgcaagcttcttgctgagaaaatgcccgaacttcttgattttgacaaagacctaatttatctggaagcagcttccaagatccaactgaaattgcttgcggaagaaatgcaagcaataaacaaaggtcttgagaaggtggagcaggagctagctgcttcagaaagtgatggtgcgatttcagttggctttcgtaaggcattgaaaagctttcttgatgcagcagaagctgaggttaggtccctcatttccttatacgctgaagtgggaaggaacgctgattcgctagctcagtattttggtgaggatcctgcacgctgcccgtttgaacaaggctgcaactcaatggctgaaagcatctcccatagctggagg

SEQ ID NO: 20664 - DNA, 2942 bp, Zea Mays
ctgacacccgcagagagctaaaatagctctcctggctaagcaagcttcccggggcatgtgccgataagtgttctacctggaagggcatgattctggagtttccttgagaaagggagtaagtgctcaaggatggcctcaagggctatcatcaggaggaggaatgacattctacggcacactcatgtgcctattttgtccccttcattcactagcacaattgggcaaggacaatttgattgtgaggttgatcatcaaagatctgtatgttacttttcaaaggaaagtttagcagattctaatcatgctatggcacattgtactttaaataagcgaaagctttgtcatctcagtagcggtttcgcatggcatccagcttgtgaggtttctcttcctacttatggttctagagcacagaactttgtattcccattgggagtcaggtgtttcctgcagtcagtccgcaccacatcaaacacaactgcacagggtcaagttcatattatggacaagaagagtgaggatgagaagcagaagcaacaaaaaaaggaggcatcccctgaagaatgtgatcaggcagtggaaggattaagcactgcaaaagcgaaagcaaaagctaagctggaggaagtgcaaaagactgaccaatcagtggtacagaaattatgggcaaagcttcttggtattggccctgctttacgaattattgcttcaatgagcagagctgattgggctgcaaagttgaagcattggaaggatgaatttatttctacactgcagcattattggttgggcactaagctactctgggcagatgttagaatctcatcaaggctgttagttaaacttgctagtggaaagagcctcacaagacgagagaggcagcagctcacacgcacaacagcagatctattcaggctagtaccttttgcagtttttattatcgttccattcatggagctcttgctgccagtgttcctcaagttgttcccaaacatgttgccatccactttccaggacaaaatgaaagaagaggaggccctaaaaaggaaactgaaagcaaggatggaatatgcaaagtttttacaagacactgctaaagaaatggcgaaggaagttcaaacatcacgcagtggagaaatgaaacagactgctgaagatctggatgagttcttgaataaggttaggaaaggtgggcatgcctccaatgacgaaattttgagctttgcaaagctatttaatgacgagctgactttggataacatgagcagaccacggcttgttaatatgtgtaaatacatggggatccaaccttttggcacagaccactacttgcgattcatgcttcggaagaaactacaagacattaagaatgatgataagatgattcaagctgagggtgtggagtctctttctgaatatgagcttcgacaagcatgtcgtgagcgtgggcaccttggtttgttgtcaacagaggagatgcgtcaacagctcagagactggctggatctatcactcaatcattctgtgccatcgtctcttctaatactctcaagagcttttactgtatctggtaaaatgaaacctgaggaggccgttgtagcaaccttatcttccctgccagatgaagttgtcgatacagttgggactgtactgccttctgaagattctgtttcagagaggaagagaaaattggaatttctggagatgcaggaagagcttatcaaggaagaggagaaaaggcaagagaaagatgacaaggcaaaactggaggagccaaaggctactgaagaagatttggctttgaaggaaatgactgagcctactgttagggagaaagaggaactaaagaaagcaaaaacccacgataagaaagagcagctttgtaatatcagtcaagcattggctgtgcttgcatctgtttcttctgttaccaaggagcgacaagagtttttaagccttgtcaacaaggagatagaactatataataacatgctcgcaaaggagggtacagatggtgaagaagaagccaggagagcgtacaaggctgctagggaggaatcagaccatgctgcagaggcagctgtgggagaaaaggtctcttcagctttgattgatagggttgatgctatgcttcaaaagttagaaaaggagattgatgatgttgatgctcgaattggcaatcgctggcagctgctggatagggactgcgatggcaaggtgactcctgaagaggtagctgcagctgcaaattatctcaaagacaccataggagcagaaggcgtccaggagcttatcagcaatctttctaaagacaacgaagggaatatccttgtggaagacattgtgaagctggcgtcacaaacagaggaaaacaacgaagctgaagaaactgcacgatgatttggaatagcagccacattcttggctcttaaaactcgacggtccattccttttttaaaaggaaccgcacataataaagctagttcctggcagtctcatgcaaaaatcaccaagcaggatggtcattctttttgttctgactggcggctgcagagaaaattgtatcctgctgttgaaagatattcatttatacagttaagtcccagcacaaccgatcgttaggttaggaattctgtccgaaatggcaacttgcatttcaaacgtctgccatgaaaatgagaataaattcggcgggctctacagatttttcatctattgtctgaacaaaagtataggcatcaaataagtatctgggtaagtttatactatttgaataagaatcagctggatttgtttaaattcttaacaagaccgttttagcagtttgactatatggtcaatcaaaacactattttgtattgtatattgtactatgtgcacttttgcagtgagatttaaatatgggtatagagatagataagctactagagatagcctaaatg

SEQ ID NO: 20665 - DNA, 2435 bp, Zea Mays
ctagatctctggcctccttgggacagaacctccgccccccatgccagattagttggcaccacttcgtatttgccacggttcgctcgttcatgttctaggtgctggacaccttttgcttcgcatggctcgggcgctgcacagtccctgtttcgtggctccgctgctgtggctgacgttgttactggttgccgtgtcaccggggggtgcgttctacttgcctggcagctacatgcacacatactcccaaggcgaggtgatacacgccaaggtgaactctctcacgtccatcgagacggagatgcctttcaactactacagcctaccatactgccgcccccagggcggcatcaagaagagtgccgagaatctgggtgagcttctgatgggtgaccagattgacaactccccctaccggttccatgtgaatgttaacgagtctgtcttcctctgcaccacaaaagggctcaatgagaatgacgccaagctccttaagcagcgcacccgtgatctttaccaggtcaacatgatgctagacaatctgcctgtcatgcgtttcactaagcagaacgatgtcacggtacagtggactggttttcctgttggttactctccacccggtgcctcggatgattatatcatcaaccacttgaagtttaaggtcttggtccatgagtatgagggtagaaatgtggaaatcattggcaccggagaagaaggatctgctgtcatctcagagacggacaagaatgggatgtctgggtatcagattgttggatttcaggttgtgccttgcagcgtgaagcgtaacgccgatgatttttctaagcttaatatgtacgacaacattgatccggtggactgccccgtggagcttaagaagtctcaagtgatcaggcaacaggagaggatcacgttcacttatgatgttgagtttgtcaagagcgacatcaggtggccatctaggtgggatgtctatctgaagatggaggctggcgccaaggtccactggttctctataatgaactccctcttggtgatcttgttcttggctggaattgtctttgttatattcctcagaactgttaggagggacctgactaggtatgaagagcttgacaaggaagcgcaagctcagatgaatgaggaactatctggttggaagctcgtcgtcggtgatgtattcagagagccatcttgctccaagctgttatgcataatgattggtgatggggttcagattttgggcatggcagtcgtaacaatcgtttttgccacacttgggttcatgtctccagcctcaagaggaatgctccttactgggatgattgttctatatcttttccttggtattgcaagtgggtatgtcagtgttcggttctggaggactattaagggcacatccgaaggatggagatcagtgtcctggttgactgcttgctttttccctggtgtcatgtttacggtccttactgtcctaaactttgtgttgtggaaaagtgagagcactggggctttacctatctcactatttttcaccctcctggctctatggttctgcatttctgtgccattgacgcttgttggtggttttcttggtacaagagcggagaaaatagaattcccggttcggaccaatcagatccccagagagatcccagcaaggaagtatccatcgtggcttcttgtccttggtgcaggaacactgccatttggtaccctgtttattgagctcttcttcattctatcgagcatatggcttggaaggttctactatgtgtttggtttcctgctgattgtcctgctgctgcttgttgctgtctgtgccgaggtgtccgttgtactaacatacatgaacctctgtgtggaggactggaggtggtggtggaaggctttcttcgcctctggttctgtcgctgtctacgtgtttctctactccatcaactacttggtctttgacctcagaagcctgagcgggcctgtctctgcaatgctttatgtttgctactcattcctcatggcatttgcaatcatgctgacaaccggaaccattggctttttgacatcattcgcctttgtgcactacctcttctcatccgtaaagattgattgatgtattccacagtctgcagacagattcgttcacagctgtgcgtacctgtgatgggcgtagtttacgagatgaggtggttttgggtaaactagtgacgtgtttagttccaagtaggagtgcagtatctgtttccagttccaattggtcagagttgtaagtgctccatctgatctagatactacagcctggctttgttagagtttaggagcaatggtactactgtgtttgttcggcaaattgtattggagtggaaatggcgtgcttattacaggctttgaatcatctctcagttgtatgttaccagctctgtgcacaaaatacggct

SEQ ID NO: 20666 - DNA, 304 bp, Zea Mays
cctcctgtttcatttccatataacaaaacgcgtgggagctattgagatcgtgcgtgctgtacgtgcatcctccatatgtcgcttagaactactgcttggctatcggccaggccagggcaccaccagccggtgcagtgtttgtcgtcgccggagaaaccacgccgccggtcggcgaactaccagcccacgtcttgggactacgacgctcttctgtcacttgattctggcagacctggtgatcagcatgtgcttggagtaggggtgttgatgatgacaaagaatggatccgttgatcttgtgcatt

SEQ ID NO: 20667 - DNA, 815 bp, Zea Mays
gatttttatttatctagatatggtgttaacaaaataagattttagacaaaaatcacgctctaataatttgttagaccaactgagcaactctagagtctgttagaccaactggtgggatttgtagctgcttgaacgcagcgtggctgatgacattcagtccagccccaccgtcgatcagcacatgatgcagcttgatgttggcaatgacaggggcgatgatgagaggcagtatgccgacccttgccatgttctcggggcagtcggatgccccaaaggagatggttgtgctccgccaccgctggtgtggggccgccttcgggacccctagggtcgtcgacaggacctcgcggcgcagtgacttcacgttcctacaggaggtgagctcccagcttccgtcgtacatcacgtacaacttcttgcggcggtcggtatcatcaccagagtcggagtctctagtgaggatgtccttgaggacctgctcgggggactgatacgcgaggtcccgttcccccgcggccacatcgtcgtcgtcgaccctctccttgccaggtcggtgacgaggtggggagccatccttggatgtctgctcgcgccgctcgctgacgcgcttcgcgagcttgatgatctcgcggcactctgtggcactgtggcgactgttggggtgcaaagggcatgagccgctgttgccttcctgtggccgtgggcgcttgttgcgctcgttccggcccccagtcgcggctgtaacgaccggagcagcagacgacggcctctcgtggccgcggttcttcttcttctttttgctattttgggtgacg

SEQ ID NO: 20668 - DNA, 1028 bp, Zea Mays
actccactgtacgccacgcacgattacgtgggcccgacatttgctccgtcccctctggtgcacaaagaccaggcgcacctgatcgtgcttcacctcgaaggaatcgaccccatcaccatcctcctcgttatctcgcagctaccgccgccgccgcaaaccctaacctgagttccgatccggttaatcgacgacgaggaagacgacggtgcgttgcagatctgaggggatctgacgacggcggcggagggggagatggtggtcaacggccggccgctgaagagggcgagggcgcgggtcgaggccagggacttcgcgaggttcccggcggccggagactgcggggcggccgggacgttcagggaggcggtgagagggttcctcgcaaagcatgcgaggctgctcccgttgccgtccatcttctctccggcggccgcggccgccccgccgcacctgctgatctggagggtgtccctaagggtcggggaggccggggaggaagagagcggcggcggggtagagctcaacgtcgttgaggaggatgtgctccgatcccgatctgtgtattgtgaccagtgcagagtcgtgggctggagtggacacccggtctgcgtgaagcggtaccatttcatcatcgagaacgacagtagccacctttctggccgccggcgcacctgctgcctccgctgcggaacacccatggccgctggagaatcaaggtgtgctctgtgcaatttcgatatggatggggaggagattgaagagtgtgcatacctgcatctggatgaccccacccacttgctgcacgctgtggtgcatgcaaatggttatgggcatcttctcagggtaaatgggcgtgaaggtggctcaagattcctcactggccgtgacataatgagcctgtgggatcgcctgtgcaaggtgttacatgtgaggaaggtaactgtcatggatatatccaagaaacatggaatggactacagacttcttcatgcagtcataagtgggcacccttggtacggccaatgggg

SEQ ID NO: 20669 - DNA, 3207 bp, Zea Mays
cttctccctacctttcccctcccataccctttcatccaagtaccctcttagggttggtcacatctaccttcgtcgatgtccgttttagttgttattataagttgtatctagttagtgcctaaggttggtggatgcatttttctcaatggaggtcgtttctgattggttacattggtagctggcatatttgtatgattattatcaagtgctcttctctggatttagtaagggaaaagaaagagaaaaggaacataaaatgtaatgcatcaataatagtaaataaatattcttgttttcactaacgccccgtttggatcctcggaattgaattccattctaataatagtaatttaggcaaatatcaattaagctagtatagttttatgcaaaatatatttgtatactattattactttattagcaatatgtgggagatatttatgtgctgcatttttactacagaggagtgagtagaagagtgtcttataagttgcagagtagaaacatattccactgatacacaaaatcattttctatcctccacccccatgaatttgagatagtcttatatctgaactgtggaaagtggcggaatatcaaattccaagccaaatagactactctattaagtaaatttcaattccttcaaaatgaatagatccaaatggcccataaggtaaatataatgaacttgattggcacaaatttgtcatttggttgcactgatttgtgtaacggtttaataccatctttcaagcaggattttagctccttattacagatctgcaagctaccaactcgagttatttgcatctgtatgttgattaaaagaattactttacaatcttctacatgatgattagattataattcttttgcaatcttttatgtgttaattacaagaactatcttgtgtttatcctccatagtgtcatttggttgacgcacctttaatacgctgttaaggcgagcttcaaaattggaacatgtggattatcagttcataaagaaacatctgtctgaacagtttaatgagtttcactcactttccactgtgaatattgtagatttgatcactttgttactggcgcatgaatgaatgcttgttagctgtgctcgtttctgatctctttctctagacaatccttacaaagcctagaaatgcattgattgatttgattctaatactttaataacagcttgatgtcacaattttacccaggagtgatgataaattcatctgcattatctgtactagcaggttgaaaggttttgaacatgtacagttgtgtgctagtctgctagtacccttgattcattgttattggttattgccgacaaaaactttattgtagttgtaagcttttctgtatgtttgtataaatattaattttgtttggcgtagagatcagacaacctttggctgccactttcaatttaagatcatttcactttccagatatattggtgcatgcatttggttttactataatgtttcacatgtggtattaacagttgacgtatgtgtgcacaggtattttctgctttcggatttgttcataagatcgctacctttgagaaagcatctggttatcaggctttgattcagttttctgatgctgaaactgcaacatctgcaaaagctgcactggatggtagatgcattcctagctatttgctaccagaactggatgtggcctgcactttgagaataacctattcagcacacagtgttctcaacgtcaagtatcagagccacaggagtagggacttcactaatccttaccttccttttctggactctgctaaagatggctctggaccggatggaaaaaaacaggaagcagagagcaatatactgcttgcttctattgagaacatgcaatatgttgttacaatagatgtgcttcatgagcttttggatttgtacagaagattgctatttttgagaagaatggctttcaagcattgatccagtatccagacattcaaactgcgtatgcagcaaaagaagcactagaagggcacagcatctatgaaggtggctactgcaaactgcacctcacattttcacgccatactgagcttaatgttaaggttaacaatgagcgaggtagagattataccaaggggaatgccactccaagcagtgatcaaccttccattcttggtcctcagccaataccaagcgttggtgctgctattccaccagcacagggtagtgttccttctgcagccaccaattcagtaatgccaccaggggatccatcagttgctctaccttctaatccttccagtgagccactcctgcaagcacctgttgtttcctctggagggcctccgcattaccctaatcaggccatcctacaaggcccacttggtgttgttgcacggttcccaggctatggtgccctgcagtttgctcagggctcagctcaagctcaaatggtgcagccttcaggccaaggaagtcaacatatgtcaggtcatgtaaattatcagctacctccaggttcagcccaattcatgcagtatctcagcaacggaagccatccacttccaaacgcacctgggccacagacaatgccttaccctgccctcagtgggcagcagctacctccgggtcttcagatgatgcaagctcaaggttttggaggcctgccgttttcacagggtcctggacaaccaatgccacagttcccaatgtatggcacccagcagtttcctccgggtatggagcccaagatgatgcgcttctctgagcagggaggccagcagtttacatttgcgccgcggggtccaaatagtcgttagcaaatttgaacttagcaacgttagatcgttgatggtgatgaatggatgtcaagccttctatgttgctgttttctaaggtgaataccgatgctgttccattactaggatctatacttggtttatctctcgtactgtggccaaaacaaatgtctaatctgaggtttcgtagccttgtatttgtatcgatttcctcacgcccgcagcttctgcctgcactgtgttacattacggttatactgcagtagtggaagcaaatgtaaaagaaacctagagacctgatgtgccaggttgaaagcccgtagctgcaaactgtaggctcacatcgcgtccagttataaatttgtttgtgctatgttaagagtacaattgtacaaaccaaggtttaggagaacc

SEQ ID NO: 20670 - DNA, 2662 bp, Zea Mays
  misc_feature (1)..(1): n is a, c, g, or t
  misc_feature (2662)..(2662): n is a, c, g, or t
ntccaaaccctaactctaggtccatcccatcgcagagaaaaccttcggtgcccggctgatggggaggaggaaggagcgacgcctagcggccatggccgcggcgggccgcagggtcaagctcgacctcttcctcgattcctcccccggggaggcatcacataataatggaataggaggtgaaaaccgtgaccaacagactgtggttcccacttctccatcttcttcaggtgggtttcatcaattttcttccaagggatatgtaaagaagacatgcctatggattatggaacataaatatggtggaaatttggatttgtgtacaagcatgtataccttcgcatatctggttccgagatacatgtaggattaccggcctgcaaggaacattgagtaaattcttcagactgagctaccactgtcaaaatttagtgaatgcctatgggtaacctcactcagttggcagcatctaagcgtggggatttcaggatgtgattgttccctcctcgataaaaaggagaatcctctagcattgcttgggcaatatagtgatgatgaagtggaagatgaggaagcagcagatcaacccactggtgaagctaaggggagtccaggagatgctagtgctcagttaactagtcagcgtgcggatatagctggtgataacagtgaggcaaaaattgaaccatcggcttctgtcggtgatcaacaagaagcagcacctcaagctggtgacgttaagaactacacccaaagtgttactgaagaaaacactatagctcctgagccaactgtacaagaagagagtgtgaaagcaactgaatctcttcccgattcatctggcatgcagattgttggtgatgtcggtggaaattggaaagcagtaatgcatgaacagagtaatcagtgttattactggaacacagttactggagaaacttcttgggatataccaaatggattagcttcaggagttgcaactgcatttgttccttctgatgtggactattcaaatgaagctcaaacccatgtccttccccacagcacactggaagcatatccaagtgatatgtctgttgggaacggcacaacttatcctaatttgggaatggcatgtggaagtgcacatgttactcaagatgcttatgcttatgctgctcctatcgccagtaatgagcctttggacattgatcccttgtatcttgcaaaatatggtgatggtttgctgcaaagattggacctgctggaaaggctctgtggctcgaacaaaggtcttgaattgataagaagagaaattgagatacggatgtcggacttaaatgcactttcatcttatggatcttctttgctcccattgtggttgcatgctgaggtgcacctgaagcaactagactcttctatttccaagctggaaatgaactatcatgcagattcagaacctaggaattcaaagacagaggttgctgaacacagggcacctgatgatgctgacttgataacaccctccaatggcgaggctttgaagtatgaagtttgtgctgggattactatcgatgcaaatatgaagattggtaagccagcttcaacgtctcagaattcacaaggtagggataatgcagctgttcctccaaaaattgaatctgacaatgatgaagatatggatgtggaaatggaagttgatgaagataatgtcgaagagcaggcacagtgcagttctgtacctgaaaaggagcatcctccttcagaacagttgagttcatctaatttgccatcatttgaagatcctacacctcctgaggataattctgttcctccacctccgccagaagaggaatggattccacctccaccacctgaacacgaacacgaaccagctcctccagcttccccagaagagccggctgcatcatatgttcaggtggatacaattcctcagccatatatagctcaagaaaatgttggctatacaatttcaggaatggagtattatagtactgaaggtacaaatgccaattactatatgcaagtgagtgagcctcatgtccttcaagcacaacattcttattatgcaccagtatctgggagtggcatatctgtttctgttgatggcacatctattgccccagaatcttattatacctatccttcagtcactgtggctgcaagcgctgtagcagctgaacattctggatactacgcttcatcagtctctgccatttatagcagtgcagcagatatcaaaacaagctcagcttctcttgtttctgcaattagcaattcggatctaaaaaatcatgataatgttatatccaatgatgcaagtattgtgcctttcacccaagctgtagtagcaacatcagctgcaggaacgacatctgttcctgaaagttctacacagccttctagcagtactacaaaccagatcaaagttattcgcaacaagaagcgggttgttggtattacatcgtctctgaggtctaataagaaggtttcaagtttggtagataaggttgctctctacaacgaatctctgtattctgttattattgcatattaggtgcctgaaatttacatttttagcatgttcctgtatattcatggaattaacaaatcctagtttcttactctcgatttgagacgttctctcaactctcaaccatctaan

SEQ ID NO: 20671 - DNA, 6802 bp, Zea Mays
gacaaagtttcagggggtttctcgacctgcgtgaggtcttctcaatgcaatatcaggggctgtcttatccccagcagggttgtgagccaagtagagtatccgtcattggttgatttacgaggtctactcttagatcttgttgcacagcttttaggagctttatcacgcataagattcagttctgtgactgaaaggtttttcatagagcttaatgtgcggcgtattgattcacttgctcttagaagtgagacactcagcataatcaacgggatgcgctaccttaaattgggggtgaagacagagggtgggctgaatgcttctgtatcctttattgcaaaagcaaatcctctaaatcgtcctcccaacaaaagaaagagtgaattgcaacatgctttgtgtaacatgctctcaagtatacttgccccacttgcggagggtggaaaaaaccattggcctccacttggtgtcgaacctgcactgtcactttggtatgatgctgttgcacgaataagagtccagctcatgtattggatggataagcagagcaaacatgttgctgttggctttccacttgtcacccttctactttgtcttggtgatgccaatgcattcaactctagtttttcccagcatatggaaatcctgtataagtatctcaaggataagaaccatcgatcaatggctttggattgtcttcatcggctagtaaaattctatttgaatatttatgccgattaccaacctcgaaatcatgtttgggactatttagacagtgtaacctctcaattactgactgttctgaagaaaggcttgctgacccaagatgtgcagcatgataaacttgttgagttctgtgtgaccttagctcagagcaatctggattttgcaatgaatcatatgatactggaattattgaaaccagatagtttgagtgaagcaaaggttgttggtcttagggctttgctcgagatagttgtttctccatcaaatcaacaaattggcttggatgttttgcaagtatttggtattgggcactatattcctaaggtgaagtcagcaattgagtcaatactaaggtcttgcaacaaggcatatagcctggcacttctcacatcatcaaagactacaatagataatgtaaccaaggataaatctcagggatcactcttcaggtctgtgcttaaatgtatcccatacttgatagaagaggcgggccgtaatgataaaatgactgagattatacctcagcatggcataagtattgaccctggtgttcgtgaagaagcagtgcaagtgttgaacaggatcgtacgttgcctaccaaatcgtaggtttgctgtgttgaaaggaatggccaatttcatcctaaaacttcctgatgaatttcctctcttaattcaaacatcacttggacgcctggtggagctaatgcgtttgtggagagtatgcctatctgaggaggccttggcaaaagacatgcaaagtggtaggcgtttgagtataggaggggatgcactacagaggtctccttttcataggtccagggatgtatctgaatttcgcgcctcagaaatggatgcagttggccttgtctttctcagttctgctgatgttcaaataaggctcactgccctggagttactgcgatgtgttcgagcactgcaaaataatctcagggattactcagcaaatgaatggggtgacaataagctgaaacttgaaccagagccaatatttatcatagatatcatagaggagaatggggaagacattgttcaaagctgttattgggatccgggacgaccttatgatctaagacgtgaaatggaccctattcctttggatgtgactcttcaatccattttggagagtgtagataaaaacagatgggcgcgctacctcagtgaaattgtgaaatatgcagctgaactttgcccgagttctgtgcaggatgcaagattagaggttattagaaggcttgaacagattactcctgccgatctcggtgggaaggctcagcaaccacaagattctgaaactaaacttgaccaatggttgatatatgccatgtttgcatgctcttgtccacctgatattagagaagaattttccatcaaatcagcaagagaagtcttccatatgatttttccatcattgcgtcatggttcagaagcatatgcacttgctgctacatctgcccttggtcactcacatttagaagtatgtgaaatcatgtttggagatctggcattatttgttgaggaggtgtcatcagaaactgaaggaaaacctaaatggaagcagaatcctaggtcccgccgtgaggatctgcgcactcatgttgctaatatacaccgaattctagctgagaaggtttggcctgggatgcttagtcggaaacctgtcctctgccagcattttttgaagttcattgaagaaacataccgccaaattactatttccttggctgatagctttcaagacttgcagcctctgcgatacgcattagcatctgttctgagatacctagctccagaatttgttgatgcgaaagctgagcgatttgacaacagaatacgtaagaagctttttgatcttctccttacttggagtgaggattctggtagttcatggggacaggaaagcagcagcgactatcgtcgtgaaattgaacgatataaaagtaatcaacatacgaggtcaagggaatcatttgacaaacttgcatttgacagggaaatggctgaacagctagaagctattaattgggcttccatgaatgctattgcttcattgctttatgggccttgttttgatgataatgcgagaaagatgtctggccgggtgatatcatggattaatagtttattcatggaaccatctgcaagagcaccttttgggcattcaccagttgatccacgaacaccatcatattcaaagcatactgatggacgttttggtgggagggacaaacagaaaactagccacttgcgactcctcttagcaaaaactgcgctgaagaatattttgcagacaaatctggacttgtttcctgcttgcatagatcagtgctactctccagaccctcaaatagcagatggctatttcagtgttctggctgaagtctacatgcgccaggagattccaaaatgtgaaatccagagacttgtgagcttgatcctctacaaggtggttgatcagacaaaactaatccgtgacagtgccctccagatgttggagactctctctcttcgcgaatgggctgaagacgatactgatggtgttgggcattaccgggcttctgtcgttggcaacctccccgattcctaccaacaattccagtataagttgtcttcaaagcttgccaaggaccatcctgagctcagtgagcatctgtgcgaggaaataatgcaacgtcagcttgatgcagtggacattattgcacaacatcaggtccttacatgcatggctccttggatagaaaatctcaactttgtgagactgaaggaatctggctggagcgagaggttactgaaaagtctttattatgtgacatggaaacatggtgatcagtttcctgatgagattgagaaactttggagcactgtggcaagcaatactcgcaatatcatcccagttttgaacttcttgatcaccagagggattgaggactgcgatgccaatccatcggcagagatcactggtgcatttgcaacttatttttctgttgcaaagcgtgttagtctatatcttgctcggatctgcccacagcagaccatcgatcacttggtcttcgagctatctcagagaatgctcgaggacgacgaagaaccagtcaggcttgggaaggttgatgtctctgcaaatgttgtattggagttttctcaagggcctactgcctctcaggttgcaacagttgtggatagccagcctcacatgtccccccttcttgttcgtggttcacttgatggtgcagttagaaatgtcagtggaaacctgagctggcggacatctgcagttaccggccgaagtgtatctggcccattgagtccgttggctcatgaggtaagcattccaaacccaacggcaggccgatcaggacagctacttccagcgttaattactatgtcggggccattgagtggtgttcgaagctctgctggtaatctgaggagccgccatgtttccagagatagtggtgactactactttgataccccaaactcaacagatgatattttgcatcaagggggcagtggaattcacgggatcaatgccaatgagctccagtcagcactacaagggcaccaacacttgctttcacgtgctgacatagctttgattcttctggctgaaattgcttatgaaaatgatgaagactttcgtgaaaatttacctctgttgttccacgtcacatgtgtttcgatggatagctcagaagacattgtgctcgagcattgccaagatttgctcgtgaatctcctctactcgttggctggacgtcatcttgaactgtatgagatcgaaagtagtgaaagagagaataagcatcatgtggtgagcttgatcaaatacatccagtctaagaggggcagcttgatgtgggagaacgaggaccctacccttttccggatcgaacttcccagcgcttcactcttatcagcacttgtgcaaagcatggttagtgctattttcttccagggggaccttcgtgagacttggggttctgaagctcttaagtgggccatggagtgcacatctcgtcacctggcttgccggtcgcaccagatataccgtgccttgcgtcccagtgttaaaagtgatagctgcgtattgcttctgagatgcatccatagatgcttggggaatcctgttccagccgttctgggctttgcaatggagatactgctgactttacaggtcatggttgaaaacatggagcctgagaaggttatactttacccgcagctcttttggggctgcgttgcactgatgcataccgactttgtgcacatctactgccaggtgcttgagttgttttgtagagtaatcgatcgcttgacattccgtgaccggacaacagaaaacgtgttgctctcaagcatgccacgtgatgagtttgacatcaatgggtatgcaagtgacctccacaggctggagtctagaactacttcagagagattgctatctgtgactgggaccgggaaggtgcctgcttttgaaggggtgcagccgctggtgctgaaggggctcatgtccacagttagccatggatctgcaatcgagttgctatctaggatcacgatacctacgtgcgactctatatttgggagccccgatacaaggttactgatgcacatcacaggccttcttccatggctcggattgcagctcacgagggaagcaccaccttcccttgggtcagcttcgccactgcaagagcagaaccagaaagcttactatgtgtcatccaatatttcggcatggtgccgtgccaagtctctggacgatttggccgaagtgttcagagcgtattccttcggggaaatcatgtcgttggaagatctgtttgcacgagcttcaccaccaatctgtgcggagtggttccctaggcactcatctttggcctttgggcacctgctgaggctcctggagagaggccctctggattaccagcgggtggttcttctgatgcttaaatcgctgctgcagcaaacccctgtggatccgtcacagataccccaggtgtacaacttcgtgtcgcagctggtggagagcacattatgctcggaggcgctgaatgtgctggaggcgctgctgcggagctgcggcggcggcgggcaaggcgaggaggctgggtttggtgataacggcgggcatgggagcggggagaaggtcctccagagcatgctgcttcctcagtcgtctttcaaggcaaggagtgggccgctgcagtacgctgcggggtcggggttggggtccttgatggggcaaggcggcggtggcagcagcagcgccgcagatagcgggttggtggcacgggatgtagcgctgcagaacacccggctgctgcttgggcgagttcttgatacctgcgcgcttgggcgcaagagggatcacaagcggctggtgccatttgtggcgaacgtcgggtagaccttgccaacatatagcagcacaattttgagtgggcagggcagcagccgccagcagagcgcacgcagagtgcgtgcgtgcgtttgtgaccgggtcagtgtcgtgcaaaggtggccacgcacatagacgtagctgcagttcttgaaactatttatttatttgtttatttattttattgttttgttttgatgagtgaggccgtgtgtgatgtatgtatgcatgtaattcgaaaccaactatggccgtggatggcatttgtattgtggaaaggagagtagaaattgatgatgaaacacaacaaacaggtttggaggcgtccttgtgtggtgtgtggatatgatcagccagtcacagtgtggggatgagagtgaaagttgctttcttgagtttcttccgtcgtgtgtccgggcaccaaggttgtcttcagtggaccgtataaagcaagagatttgcacttagatgatactatttgtatagtaaagtttaaaatagggaatgagataggatacatggtgaggatagccaaagatgataggtgattcaaagtctcctacatagcatcctgactgtgactttgaatcatgacacaacatagcacaagattagttggttaaggctgtctccagtagatcctcgattttatccc

SEQ ID NO: 20672 - DNA, 1544 bp, Zea Mays
ctggcctcggcgtgctgagtgacgagacgacaattcacaatcccagcaacatctttgactgactgactgcatacacccccatccattattccagcagcagcagctgtcgccagtcgcccaagctccgctgctcctcgcgctgctgtgcgcgtgcgccgccgccgccggctccgccaatgcggcggggaggaagatggtcggcgtgtacgagctcaaggcgggcgatttctccgtcggcgtcaccaactggggcgccaccatcacctccgttgtgctgccggactccaaaggggattttgctgacgtcgtgcttggctacgacaccattggaggatacgtgagtggtaaaagctacttcggagcgcttgtcggacgagtggccaacaggatcgccaacgcgcgcttcgtgctcgacggaaaggcttaccatcttttcaagaacgatggcaacaacacgcttcatggtggccatagggggttcagtcaggttgtatggacggttaaagagttcgtcggtggcggtgactcgccctacatcacgttgtactaccacagcttcgatggagaacaaggtttcccaggcgacctggacgtgtacgtgacgtaccagctggcggccccctacgtgctgcgggtgcacatgaacgcgacggccgtgaacaaggcgaccccggtgaacctggcgcagcacacgtactggaacctgggcgggcagggcagcggcgacgtcctccgcaacacggtgcagctgttcgcgtcccggtacacgcccgtgggcggcggcctcatcccgacgggcgcggtggcgcccgtggccggcacgccctacgacttcctcgcgccggccgcggtgggctcgcgcatccgccaggtctccggcggcaaggccggcgtctacggctacgacaccaactacgccgtggacggggagcccggggcgctgcggaaggtggccgtcgtccgggacggcgcgtccggccgggcgctggagctgtgggccaaccagcctggggtgcagttctacacgggcaacttcctccaggacgtcaaggggaagggcggcaaggtgtaccagcagtacggcgcgctgtgcctcgagacgcaggggttcccggacgccgtcaaccaccccaatttcccctcccagatcgtcaggccggggcaggtgtacaagcacgacatggtgttcaagttctccttctagccgctctctgtataggcaacaacaccctggtccctggctaatcaatctactagtacctgttatgattgtcactggcaaagtggcaactgggccttattgggactggagacacacgttacatgatttcaagtcaatttgttttgcggaccgtaattaatgtttatcgcaaagattatgtactaaccaatccaatcaaatcatgcacgaaccgaagtcaatttcataagtcacttcacttcgctggtcctattttataaattataagttattctaattttgtttaaaacgcaagtcatctcaaatctaataaaaattataaaaaatgatatcaaatacataa

SEQ ID NO: 20673 - DNA, 1175 bp, Zea Mays
atttggactcgggctgaggagctggatgcagacggggatgtgcttagcctattttaatttgaggtttgtgaatgttacattttggagaaccccagaagctgcggaatcacacgcaaaaatggcacatagtacaggcttggtacaggctatcctatttgaagttgtggacagggataacatcgggggatctgcctatggcggacagaggtccatatgttgtaccccagatcttgctaaactagagggctgcaagcaaggggaagtaatcaggaggccatcctctgatgatccagattggcccttcgtgctagacacacacttcagtgctaatcacctttcagtgaagttagaagatgagccagtgcgcattacaaagacaggcatgtacaacttgttcttcatatcctgtgatccaaaactgagaggccttactatgagtggcaagactatctggaagaatcctggtgggtatctaccgggacgaatggcgcctttgatgaaattttatgttctcatgtcgctggcgtatctgttggtaatgattgtttggtttagccagtacgtaaggttctggagggatatattgccaatacagaattggatcactctaatcattgcacttggtctgtttgagatgacactatggtactttgagtacttgaacttcaacagcagtggtgtgaggccagttggaatcacaacttgggtggtcactgttggagctatcagaaaaacagtttcacgtctactcatcctttctatctcaatgggttatggtgttgttcgtccaactttgggaggtctcacttccaaggtgttgctactcggacttacatatttcctggcgtctgagttgctggacattgcagaaaatgttggaacaattaatgatatatcaggcaaagcaaggcttttcctggtccttcctgatgcatttttggatgcttttctcatactctggattttcacttctctttcccgcacactagagaagctacaggcaaggaggagttctgtgaaattggatatatacagaaagttcacaaatgcattggctgtttctgtgatagcttcagttgcctggattggttatgagctatatcccattgaaagtattcggaagacacggaaaatactacatctcatgatctatatttataattgccatttaagat

SEQ ID NO: 20674 - DNA, 765 bp, Zea Mays
caatggctcgcaccaatgtttccggtgaggatggagaagtaaccgccaatcatttgctactggggatatggtcagataaagagtcggctggtcataaaatcctgtattcgcttggatttgacgatgagaaagccagtttactggccaaaacggctggtgaagaggctgcaatgagtcttagagagcaaggagagcacctaatttattcgtcaacttaagttggtattgtgcactagcttttatgcacttcttggtgcctcgagacgttgacctggagaggctgcctctacaaactttagaacttattatggagatatgttaggtcagatacgatatttgtactctcacgattgccgatgcctgtgaaaacgttgcgctttgtttgtcacggtgaatgcttgtgttcctttatcagctggatttgggaactgctcgtagaaaacaagtcaacaacaacaaaacttgtagggtccagtgggcctgacgagtccttaaaaaaatttgttcacttgcagcctaaatcctgacagtcgagaatttcatctgaagtcactgatatccgcaaattctgaaggaagctattgggacacattcataggatgcaaatgacataccacatggaagtctttttttaggctagtttgggaacaccattttcccaagggattcttattttctcaagagagttatgtgccatttgtcagggaaaagaatatattactactgccttttctttatcaggctccaggcaggaaaagctgcacg

SEQ ID NO: 20675 - DNA, 492 bp, Zea Mays
gtggtggtgcagacatgtccttagtgacatcaggatagcattctgcacccatgatccaaaaatggaacaagagaagctggagaagctcgcacgcaagggccccagctcaggagagcaaccttcgtcgactacagtctctgcagcaagtgatgtgaagactggggctgggccaacagagtcagcgtctgcaaacgtgtctaccgacaagaacaggaactacgctgtcctggcaggcacaattgctgctctgagtggcctgggttggtatctattgtcaaagcctaagaagtcggaggaggttgtggactgaagagggggttacgaatgcgagctgtggatggttggccttatatttcaccatggtttactttctgcgcacaccttctggaaataattgttgaaacatacgctgcagtctgcattacttgttctgaggcctgttgcaacaccgaacattgaagtctgtactcgagacgttccgtaaaaaaaaaa

SEQ ID NO: 20676 - DNA, 892 bp, Zea Mays
ttttcacataatttcaaatttgatatatacatctattccaaaaatagaaactaatacaaggaaaagtaaaggcaaataattctttctagataatttcaaatatgatatatacatgcattccaaaaatagaaactaatacaaggaaaagtatcacgacagtgtaagaaatgttcgacactttccaaacatcgtcacatatatagaaccagcggcctccaaaagtaatgtacaaatagcagccaagccgcctaccaggaactgctccaaaagcgtggtgtacaactaaaggcctcaggtacacacacaggtaattaacactctccaacgcacaccaggaactgctctcctctggccacccctcgtgccttcttctatagccgccaccagcacctgctcaatttattttccaacaacagtaggacctgctgtcctcttactgcccctcatgtgccttttctcagtgctctttgcagacgtcaggacccctcactgtttagtttaccttccaacacagccaggacctactctgctaccgtcaagacccctcactgctcagtttatctgccaacacatagaaagcttcactgcaagagaaaacatgatacatgaccatcaggtgacaggtaatgatcaaatcaataattagcaggataaggatagcaacaaataagcaagtgatagcagaccttgtaacaaatatatggaattagatagtattacattgcgttattaaacatcacaggacttgtcaccaattgtaatgttttctatggcttcagtttccctagctagcagataatgaaccaatcccaagtgatgccagcagtgccagctactaaaaatcaccctaatgccattatacacctcattgagttgtttggtgaagacatga

SEQ ID NO: 20677 - DNA, 271 bp, Zea Mays
ttagcctacaacgacggaaaggaagttggcaccttcaagggtcctcaaacattgctgcaccggacgttgtgtcgtgtatcattggttcaaaacgtgaaacgttccaagttgctacattattatcgctgatccaaaatgaaacatgttattccaaacatcataaagaagaggaaacaaatcagtacatgttgcgccccatcgtctgtacctcctgtggaagctcgtcgcatacgtagacaattgttgaatgagcgaaggttaacatcctcag

SEQ ID NO: 20678 - DNA, 1775 bp, Zea Mays
ctgccactgccacctcataagccctaccactaccgggctaccatagagagaaggcgcgcgaagcgcgagcagaatccgcgcagaaaagcaactacctccggtcctccgctggcccgcaacgcatcactctcgccctcgcgagatccccaatctcgccgcaggtgtctcgccggagtgacccccattgcggcgcgggttatcgattccgcggccagcagttcttccccttctgctgtgggtcccgcgactcgattcgagctgttctgccgcggaggcggccgccccagccgcggccaaggcgcgcgcattgcgagggttagttacctctaggatattttatagatgacgaaggcagcaactctttatgggagcaagacacagagcgatgccctacggccagggccattgcgcccagcaaatattatcagaaataaattccccacatacaagaatggttcaaatggtatagtgatcaagctggctgatggtccagaaatgccacctctcaaggagatcgttgcaaaggaaactgcagatctacttgatcgtcgtcagcgtctctctgttcgtgaacttgcgatgaagtttgagaagggtctcaacactgccacgctgttgtcgaatgaggttaaatggagacaagtagctttgctggagcgggatatccttttgaaaaatctaaagtgtgtattagaatcattgagaggccgggtgacaggcaaaactaaggatgaaatcgaggagtctatatctatggtggagatccttgcggttcagctctccaaaagagaagccgagttgcttcaacaaaaagaagaggtcacaaaattagcaaaatcattaaagcaggcttctgaagatgcaaagagaattgttgaagaagaaagagctaatgctcatacagaaatagaaactgctaagagttctgtccaaagagttcagcaagcagttcaggagcatgagaagatgtcccaaaataccgggaagcaagacatggaagaactaaagaaagaagttagagaagcccggaggatcaaaatgttgcatcagcccagcaaggcaatggatctggaaaatgaaatacgaattttacgtaacacattcgctgagaagtccaaggattgtgttaatcttttgaaagagttggaaatgcataaaaggttaaaagaaaatggtaccatcccttctttcgatctggagggtctccaatgcttaggatcaatgctacgtatagttggtttgagtggcactcacatggatttgtcaaatatttcaatccagtggttccggatacatccaaaagaaagcaacaaagagatcatttcaggcgccacaagaccagtatatgctctggagccacatgatgttgggcgctatttgcaagctgaaatcgatgtcggcggtgaaattgcagttgcaaagacagctgggccagtagaccctgatgctggattggttgattatgtggagacactcgtaaggaaacctgaaactgaattcaatgttgttgtgcttcaattgaatggcattgacctgccaaaagagtcagttcatgttctcaatgtcggaaggctgcggatgagacttactaaagggaattcagtagttgccaaggaattctattcctcatcaatgcagatcatccttgctgggccaggcgacaaaactccctggtgatggcacctgtgctgctctgccaatccccaccactcttaacaatccgcgattcgcacagcttgcttgcaccagttcctctgattttccttcctcgtcag

SEQ ID NO: 20679 - DNA, 996 bp, Zea Mays
ttgtttcccgttccacctcttctgatcatggaagaacttcgaactggagcgaagaaaatgtttacatgttatgtaacgagcttattagaaccggagtggctgatcctgcgggcactgatctttatgttgttttcatatccaacgaggaaaaaaaggttcctctctggcatcagaaagcaggccattctgatgatggatttatttgctgggattatcacgtgatatgcatccagtctaggcgaagcaaagaagttcttgattttgtttgggatctggactccgatcttcctttcccttccccattgatccaatatgtttctgaggcgattcaaccactatcattcggcaattccagatatgcaagactcttccgtgtggttcatgctcctgtgtttcttcaatcgtttgcctcagacagaagccatatgaaggatcctgaggggaactggattcagttacccccaaaatatgaaccgatcgtggctgaagatggaaccaccaataacctcaatgagtacatcatgatgtctgtgggggacgtggcagacagagaaaggatggctaatgatgtttactgcaacaagcatggtgtggtgctaaatgaaacgatcttccctgaattcttcgcccagctgcctgctccacatacttagcaagcgatctttctgttgtgatgggttactctgtacacttcaatagtgcactcacaagattatgaattaaaatatatgggcactattggacacatggtgcctctaagtagcgtttcagatagatcctggcctgttttggaaagcaaaatgtggggatctcatagttctgttagcctagacatctgaaagcttcatcttgtcccaaataatgatgactaggtcatgtttaacggctttagctttctttggtcattgttcgtcgaaacttatatgaacataacacttctatgtgctcgttgttaccttacaagtaaatatgcaacccataaactttaaacttgca

SEQ ID NO: 20680 - DNA, 1636 bp, Zea Mays
gttccacgcgcgccttagcgcctaagcgacgctaaggtaccggcatctgggccaattcgccccactaggagggaaacaaactgctgcacaacttcccggggactggatctccattggccacagcacccagtggctctggtactccgtgtacgcaacctgcttccattaagaattggtcatcatggcgtgggagctcattgaagttccgggcaacttgaatccctctctcaaagactcttcagttgatgtggtggccgccaagattgatcccaagttagccaatactctcattaggcagttaagccaggtgtgccctttggagaatctgaggcatgtaaagcgtgtacgtcgacgtactgaatgtggtggaaaatctgagttatcaataatcctatgtgtttctactgggtctgaaacttgtaacatacagttctctgaagatctacagaagatagtggatacttatcagctgagtcctttcaccgcaaaagttgccaggtgttgtgctacatcaaaagaggagtgggaggaacagtgcaaactttggccaacatcttaccatcctgcacatgaccttggtattgtccgtggatttcaagaggaggaattaccatcaatatttaattgcatgaaggctgctattcagttatcaaaggcaggcaatgctgcaatcattgttgatccatcaagcatgcaaatagttgcaaaggccactgaccatacacacaagcatgatacggctgaagaagggaacacattttctgaagcgaatgcagatgttacctgcccttggaatacatcgactgatgatgacaacaatctgtcacttccaggatcctttcttcctaaactcaacagtttgaacatggaaatcccatgtataaatccttggggatggatgaaaaaaaggacttgtgagcagaagccatcgccatgggatggctgttctgcatggcatcctctgagacatgctcccatggctgccattgaaaatgctgctgagagggacagaacgatgtttccttcttcgatttcaataaccaagccagattcagatggcagtcccgagaactgctgcgacaatgaaccagcaaaaaggctgaagacggatacaaaagataatgagaaaccggcatctgaatcatctggtggcgacctgtttgagaccagcagaccatatctctgcacagggtttgatatctaccttgtttgggaaccatgcacaatgtgtgcgatggcgcttgtgcatcataggttcaagcgcgtgttctacgccttccccaatcctgtggccggagcactcggtggagtctacaggttgcatggggagaggagtctaaaccatcactataatgtgtttagggtttcagtacctgaggcgtacttgaatgggttgaactgttattcgaaggaatgctgatccaacacctttccgtttttatttagaaaaaaagaggatccaagactgttttccttttttttttatttttggcacaagggcttcatattaggcctaaacttgcccatctgtattattaaatgttttggtaacaaatgtgtttatggatgtaaacgttggtgctatttttttattagtttacttaaatttaatgaaatatgatcggtttcaaacatg

SEQ ID NO: 20681 - DNA, 2533 bp, Zea Mays
atccagtcgaaacccactcacttgatggcaaagtagcgaatcccacgtttcataatggctcggttccaaatttctcccttcccaagcatggcgtccctgccgcagcccccgcgatccccttctcaagcctggcgtccctgccccccgcgatcgcgcctgccaagcatggcgtcgtcgcggccgttgcccccgcgatccccttccatcgacctgccaagcatggcatcgccccggccgttgccacgcccgccgcacacgccgcgatgagatcctggaccccccgcgacatcctcctccaccgcgccatggccgcccccgacgtcctcgcgcgccgctccccgaggtgggcatggtgcgcacgaccatcgcgggggtcacgacggcggcgcggttccaggagctggtggactggatggaggagtggaaggcggcgttcagggacaacagcaagtggacggagacggtgaacctggggctcgggagcctcgcgctcatcatgtccgggctgcttccgttcgccatcgacggggacctcgggttcgggaagcccagcctcgtgctaccctgggtgcgccatggccggctgggatccgcgtccgtgatggtggtgccctgccccagcggcgacatgtcgtggttcttcggcggcaccaggatgtggctgcggctcatggaggtggtcgaatccgaccctttgatgaagcagacaacgaacctgggaatggcgacagaggcgggatcccgtctgtgactgtgagctcgcgctggcggtacctgccattacggtgtacgggtatcatcgccatcatcatccagatccaggacatttccggatagatgacataatctgttcatctcaaatgccacaacattcgtgggcacatgttgccttgttggcttcatttagctcgcccgacatcatattttagcaactatctgtcatatataatctactaaaatggtttattttttcatttactcttatactctcatttttccaaccaggacttctgagcacatggaagatgaaggagacgttgcaactcctttacactttccaaatttttattaaatataccaatatcacgaggtgaaccttcgagtttagtgatttttcatatccatggtttgcagtgccacaaaggcaagcgaacctttgatttggtccatgttctggtctaaccttgttgggtccacactccatgggtcactttcacattactactaccatatctgtgaggtaaccattgttacatgacctactcatatatcttttgcttgtacattcaagtaaagattgtctatttcaaccacaccaaaagtaaagaaaattattaagttggtgaattgacaaaagaaatgaagcaagtttttaggtgttgaagtataagtgattcgcccaacttttcccatcagcttgacttttagtttgggggtaaactaacctacacatagcaggcatcagatatagcatattacaataagctaggtatgtgtttgtattcttagttcttttagtatattacataagctacatccctcgtgatgccttaatctaggttatatctcaatgatgatttctttataacatgctgatcataaagcatttgtagacagtgcattcaagtaacggtacaatacaaagggtggcaaatgataatagcctgaagaatgatggcacaaaatgatctagagtattctttatcttacttagattttgtcaacattccatcatcatataatctcgaatattttcataaactggttgtgtaaaatggggggatctttctccatgaatctcaatggatctgttgtgcactgcatagctgcggagaagaaaaaggtatcaaatatcaagcagctttacggcagcgaaggatcattcactatgagtggatattaaactgttgcaaggaaaacatcttcattttcatcctaggaagttgaacgatcattctctttttgggcactgctgaaggtgatgttgttcacccaactgagtgtatgccccagctgcttgagcaagttcggcatcacaaagcgaatatcgattgcaatgattatattgtcatggtgactacattggttcttgaggttgaggatttgtctacacaacaagtgaatgataagctcctagaagctgtacaaccttaagcactcgagcaatggagcaatgtggtatgatgagagcataggaggtttgtcgagatgaggtcgaaacatggccccaatgtaactagaccagagcaattgacaatctaggcaatatccgctatctggtccattgtttctctcgtgggtccattgtttctgtcgtgggtcagacgtcttcgacgtgaagagaggttgttttgtcatttccacattctgaagcgtaatgtagtgcagtggacgcatatagctactacgtatgttaaagttgtattttttatatctcatattagatgtatttactattttacaagccttatgaaaatagcaatatgagtggtactaaattattgatatgtattaaagcagcttcttaaaaaaa

SEQ ID NO: 20682 - DNA, 1050 bp, Zea Mays
cttgggagttcagctccaagccgttcgacgagagagacgaccgaacccggccggaaggggaggagcgggaggaccgcctgcgccgtcggtgagcgcagttgctcaagtcagcaaactgaacccgtccggattcgtgcgccgccgagcacccctcgacgccagcggcgatggcagccgacgacgtgcgcgagctcctcctctccaccacagccgacgcctctgacccgtccacgcccctctcagcgcccgacctccgcctcctcatcgaccgcctacgcttttgctccgaccgcctgaacgcctcggccctctccttcgctgcctctaaccgcggggtcctcgctaatgctctcctccgcgcagcctccgccgccgattcctccgcctccctcgagtcttccctcgactccgcgcttgccccgctcgcctcctggcccgacctctccgacctcagggcccttgccgaccgcctcctcgctgcccgccgcgagctcgctgagcgccaggagcacctagccgctgcctccatgattgcctcgctttcctcccgcctccgcgaggcccgtgccgcagcgagcccccttgacgcggccgctgccatcgctgaactcaagaccctcctgatcgatctcgagcgatctggatctggtcaagacgacccggtcgtatttaggctcctcaggagcgactgggagcaacttgtcgatgagctgcaagttaggctttcaaagaatgtggaggagtgtgtggactttgcgccagagggaggtaaggtggtggtgagtgctactccaaaaggccactccgatggaagtcatggtgttgagcttcctgttgctctgcaggcattggagattattgatgccctagactatgggatggcaaaaattgcagattcgatgatgaagcatattctggttccagcaatcagtaacatacatgtgtcagtgcttgtggaatgtggtccagaacacactgtatcagtcttgagtgtagtccattccgaggaaaacaaaattaagtaagcttgcttcttgtttgccttatgta

SEQ ID NO: 20683 - DNA, 126 bp, Zea Mays
tggctccacaaaactgcgagccggcagcgcgggagacgatggggctgctgcgccaacggggaaaatagaggggctgcgcgttgacggacaacgagcaacgacaatgtggctgcgcaatacatcgag

SEQ ID NO: 20684 - DNA, 1104 bp, Zea Mays
acatatttaagctagctctactccactagagctagcaatatggtgctattggtttcacctatccctttgccatccacttatatgggcttttgagattttcctgggatttattagaaattcttaattgggccaagcccataaatcctaacaagtttttccagctacccactatttttccagggttgtgcttcttatagtgctgatccatattatggcggggtgtgggcaggatacgcttcaaatggaattgtccatccccaaattagtggtgcagcaaacactagggtaccattgccagttgggcctgcagcagaggaacccatatttgtcaatgcaaagcaatacaatgctatcctccggaggaggcaaaaacgcgcaaaactggaggcccaaaataaactggtgaaagccatatctccatgaatctcggcatcgtcatgcaatgaagcgagtccgtggaccagggggcgtttcctcaacaaaaaggagctccaggagcagcagctgaaggcactgccttcacttcagactccaacaggtggggtcagcaaaatggcctttggcaggaacctatgccctgaaagcagcacatctcactcgccttcgacgagctctacaatctcgagtgcttcaaactggagtggcacgctagctcatcaagagcacgttagcttcgcatctgctaataaattcctccccagcatgaacttccacgcggagaatggaggtgaaaagatggccatcaatggcgtccgccaccacacccctgtcctgaggtgaacaacctcaactgtgggggtgctgtgctggtaccatcactggcgcgctccggtgtgcccgtggcaattcatccttggcttatgatgtatcttatagtaatttgctttcactttcatatggaacttgtctcagattaaactcggtgatatttattgcaactggatgactgaaataatctcatgtttcttacaagtgtgtgagccaagacccgtttatcttgtaaaagtttacataggtcaatgcccatttatgttgctagaaggctatctccagtagcttactcatccacatacttatattcaaacctcactctatgaatgatgc

SEQ ID NO: 20685 - DNA, 1112 bp, Zea Mays
atgccgccgccctccctcgtctccatcctccccgccgcgtccatctcgccacgaagacgccaagcaaagcaccccaagacccccaccgcgagccatcccttcttctcccgaagacttgtgtcccaaccgccgcgccacgcctcgatctccccctccgctgccggcgggagcgggagcgacgagctccaccttctcgagaagccgttacctgccgtcgcagaggataacgaggccgaggaggagctcgagtctgctccggtgtcatcaacagaagaagcgctcgcgccttttctcaagttcttccagataaaacagctaaatgtacccatcaagatcaaaatttatgagtggaatgctagtggcttgctatctagaattgagggccttcgggcattccttcccaaacctgagatgatgactagaccaagaaatttcactgacctaaagaacaaagttgatcaagaaatgcatgtctgcattacgaggattgatgaagagaccaacgaattgataattagtgaaaaagaggcatgggcggtgacatgccttagagaagggactctcttgcaaggcacagtacgcaagttgtttccatacggtgcacaaattaggattggcgagactaacagaggtggtttactacatatctcgaacatgacacatggcaagctgagatctgtggctgatgtgctgaaagtcggcgagacggtgaaagctcttgtcataaaatcaactccagacagaattgctctgagcacaaaggacctcgagagcgaacctggattgcttatcactaacaaagagaaggtgttttctgaggctgaagagatggcgcgaagataccgggagcaaattgcagagccacagccacctggatccattgccgcggaagactcctgtgacgatgctgtccccttcaacgacgaatcccggtcctatgctaactggaagtggctgaaatttagcaagtccgacgacgtggcaaaccccaaatctggcgtcgaatcgtaatcgtggtgcaggaactctgtagaaattttgatcaattcagatattcagtttccatgcttacttaattgtgcggcttggcgccttggccgcctgcacccggg

SEQ ID NO: 20686 - DNA, 1751 bp, Zea Mays
ctagtgccaaattgcttctgcattctcttcccttcctgcatttcctcctctgtctcatcggggacccctgtccctcgtggcgacggccggtcgaccgccgctgccgaggacttcgccggcgacgaccacccccacgcccactacattatatgttgaagaatggcttggagctaacagtactgacaccaacttttggttatgatcagaagcgactggagtgcaaaaaacacacaacagtaatgggtcacgaccatatgtctcgtataaagatgcatatggcagaaggttcttttggtgacaggatccggtgccagcaacctgggtgcaatgaggttgtcgatagaagggtagtgtactgcaaaattcacagtggagagttgtcatgccaacagttcagttacctccagagcggactggagagctcaggtttatctgtgcgccctgttaacgacagccaatttaagggatctgtttccattgcagcagtgccatgcactgagcaagagttacatgtcaagcatgaaggtggtgatcgaggtaaactaaaggatagttctgggtacactttgggtcaggctgcacaatttatcttctctggggcaagcatgctttgcaagaacgataactgcagcaagcaagcacacgagaactcaatccactgtaagttgcatagcggcggcgttaacaagggctgcatggcacggggctgtacaagaggtgcgcatggaggcacgcctttgtgcattgggcacggaggtgggaggcggtgtgtggtccctggatgcccaaatgcagcatgtggccaaggccgtagcgaccgctgcgtgaggcacggtggcggcaagagatgtaaattcgaagggtgcgcgaagggcgcgcaagggaacaccgatcactgcataaggcacggtgggggaaggcggtgcaggttccaaggatgtacaaagagtgcgcagggacgcacagatttctgcatcaagcatggtgggggcagccggtgcaggttccaagggtgtggcgcgagcgcaaaatggggaacggatttgtgctctgtgcacaggaagagcctgttgggcggtgacaatgccatccctgaagctttggccgccccttcagaaaaacgacgccgggccaagacgccccaaagggaagcgaagccgtccgaggtcttccaagagaatgtcacaacagcagctactgctggtaacagcacacagcacacgggcttccttctcgtagctgcccctgttgctaaccgtgacatactgaccaatggtatggcagtgacggggcaagctgcaatagccccccaacggatagtggcaccgatgttcatgagatcaccaacgccatctggatcagtggctgcctcggcacagaggtgggaggcgggagcaagcaggggtatgctgggtctgtagaaaggtggtataatttgggaaggcttggagacaccttgcccaagatagttctctgattattggctttcagactgagaaacctctgaaacttgacagccttgtgccgtcaacggactctagtgatgtcctgtgcagctgtgctctctcatttgtattgtaaattgtaatgcaaatctctagttgttcttgtgtatgttctcttgtcgccttgtagtagcgtggaaaccggtcgggggaccatctggaactttggatgataagcaataatattgtggcatggcctagctttgcaggtccagttggacttttttaagtagtggacattttaca

SEQ ID NO: 20687 - DNA, 107 bp, Zea Mays
taaaagataaatataaaacgaaataaggatcgtccttggcgtagaagtcaactgggaaaacgccacctagatcagatcaaactcctcgctttgtggctcctcctgaa

SEQ ID NO: 20688 - DNA, 1980 bp, Zea Mays
ggggcagagctggcaagtggcaaggctgcgcagagggactttttgtgtaaaatgcggtgggaaggtgcgctgcacctgcaagcagaggtgtgctctactgacagagtttgaactcaagaggaggcgaggcagaaccgcaatcgcgaccgcgacccgcaggtgacatacatacggtgcgagcgccggaagccggaagcaccggtgacgaagccttccgtgtcatcactcatcaggatctcagggttttgtttcgtttcgcgggcgttgggaatccatccatggcgaggaagatgctcatcgacggggaggtggcggccgtcgcggatggtgggcactatgactacgatctcttcgtcatcggggcgggcagcggcggcgttcgcggctctcgcaccgccgcctccttcggagctaaggttgcgatttgtgagctcccattccaccccatcagctcagagtggctaggaggacatggtgggacttgcgtgatacgtggttgcgtacctaaaaagatactcgtgtatggtgcatcattccgtggagaatttgaggattcgaagaattttgggtgggagattaacggagatattaacttcaattggaaaacgctattggaaaataaggtcatgtttaaatctctaccatgactgtgagcatgttctccgcaactgctgaccctgaaggaatatcatattgcccaaggggcaggcagtctagttgatgctcatactgttgaagttagccagcctgatggttcaaagcaaaggtatacagcgaagcacattttgatcgcgactggtagccgtgctcaacgtgtcaacatacctggaaaggatctggctattacttctgatgaggccttgagcttggaggagcttccaaagcgcgctgtaatcctgggtggcggatatattgctgttgaatttgcttctatctggagggggatgggtgctgaagtagatttgttttatcgaagagatcttcctctaagaggttttgatgatgagatgagagctattgttgcaagcaaccttgagggaaggggaatcaagttgcatccagggacaaatctctctgagttgagtaaaacggctgacggaataaaagttgtaactgataaaggagaagagctcattgcagatgttgtcctatttgcgacagggcgcacaccaaactcccagagactgaacttgcaagctgcaggcgttgagattgaccgggttggagccatcaaggttgacgaatattctcgtacttctgctcctagtgtatgggctgtgggtgatgtaacaaaccggattaatttaacacctgttgcattgatggaggcaacttgctttgctaaaactgtgtttggtggccagcaagttaagcctgatcacagagatgttccttgtgctgttttctccattccaccactatctgtagtgggcctcagcgaagaacaggccttggaggaagctaatggtgatattcttgttttcatctcatcattcaacccaatgaagaacagcatatccaagcgccaggagaagactatcatgaaactggtagttgatgctgaaactgacaaagtacttggtgcatccatgtgtggaccagacgcacctgaaattatccagggcatcgctattgcggttaaatgtggagccaccaaagcagacttcgacagcactgtcggaatccacccttccgctgctgaagagttcgtgaccatgcgcaccgtgacgaggcgcttgagcccgacatccaagccaaagacgaacttgtaagcaagaaattggtattctggggaaatgttacaccggacaaatactctggtttcatcacgttggtaatttttacgtcattggaactggaaccatgtatattgaaggaataagttgtttttttcatggcaacacaccgaaaataatgagaccgtggactttcttgatacaaataatgagctcaagcagagaacgtttatggttggttctc

SEQ ID NO: 20689 - DNA, 2571 bp, Zea Mays
gcctgacctcccaccctccctcttgaatccgctcaagttcccgatctcccacctcgtcctccagctcgatcgcgttcgcggcaccccactccgtgctccagaaataagtagccggcggtttcctcgccccaggttttgcggtcgctggggagtgggaattcgttcggctccggtctggccaatgctcctgcggtttcttggagaggccgctgagattgggatccaagctgcgttaggcgagcagcagcagtagccgcatcgagattcgccgtcgttgtccgagggattctccgtttcttgggcggggatttcggttgcggcgggaaaaaaaaaagaattctttcaccggacttggcccaactccgctgtatgttagggtagccttttcgacgcgtttctttcgtcgccccagatccgtctccccgcccgattctttcggagtaatcggcggcggatcggaggcagaggggtttggaggcctgagctccgatggagatgcacgccgacgtcgacgggtgcagcgtgcccctggccgtgctcctcaagcgggagctgtgcaaccagaaggtggagaggccggacatcctgttcggggaggccaacaagagcaagaaaggggaggacttcacgctcctcgtgcccaggtgccaccgcaccccgggcggcagtggcggcggcgagaatgccggcgacgacgacaccatttccgtatttgcgatttttgacggacacaatggctctgcagctgccatatacacccgggagaatctaataagcagtgtgttggctgctattcctccaaatctcacaagtgaggagtggaaagctgcgctgccaagggcactagttgctggttttgtaaaaacagataaagacttccaaggaaaagctgcacgctcagggaccactgtgacttttgttataatagatggatgggttgtcactgtagcatcagttggcgattcacgatgcattctagaatctgctgagggttcaatatattttttatcagcagatcatcgcctggatgctaatgaagaggaggtggagcgtgtaacagcaagtggtggtgaagttgggagaataaatatcgctgggggtgccgggattggtccactcagatgctggccaggtggattgtgtttatcaaggtcaataggtgatatcgacgtcggggaatttatagttcctgtcccacacgtgaagcaagtaaagttgtccaatgctggtgggcggcttgtcattgccagtgatggtgtgtgggatgcactgcactttcaagaggctctgaactacaccaggggcctgccagctgaagctgctgctaatcgaattgtcaaggaagctgtcacttcgaagggattaagagatgatactacttgcatagtagttgatatactacctccagagaagttaagccccccactaaagagacctggaaaaggagtcatcaaagctctgttccggcggaggccctctgatgaaatgtctgaagatcagatggacagaggatgcttagaaactgatgttgtggaggaaatatacgaggagggctctgcaatgcttgctcgaaggttgaatataaattacccagaaggaaatatgttcaagctgcatgattgtgctgtctgccaattggagatgaaacctggtgagggcacctctgttcatggtaacatgcccaaacattcgagagttgacccctggggtggtccttttctctgttcctcctgtcaattgaaaaaggaggccatggaagggaagctacattcaagaaattcccaatctgctgttcaacctgtacctaagtaggccttccttgacgggttcaatacattggttcatacacactaactaccactaacaacagcattagcaaataaagtagactcgtcaatgccatcttattcatcaatcaatgtttgacagagtcatgaattttcacctactacattcttatcaaatggcgatcggtacagattttagagatttatggtgtcatttatatgatgcactacagttgttcggtagtagaaggttcaagtctgagccttatcaagtctatattcagagagaccacaactgacctctaggatcaaatgaactggtagccttaaggtgtgctgctttctgtagttctttcattgattatcaagtctgcacgacttgtctacttgtgaataccagtcgttggttgaaccccatttagtcctaagtcccaacgtagattccttttttttcttcacatgacatactgcttgatgggtggccataaagaccatgttttttccactctcagtcacatgtgatgcttccttattaatcctctcaccacgtggatttccctttctttttcattctttaccatgtgtatagtcacgaggcacatcattacatcacattgactattttttttgtatttgcaccataattctgcagttgtaccattgtactctcaattttctaacattttttttattctttttgttattggaactttcgcttcctatgtacttgaaatggtgttgctgaatttgaatatatttctaagctttatggatgtaatttggt

SEQ ID NO: 20690 - DNA, 1031 bp, Zea Mays
atgcatatcttggggcagatgggtttatctgaggagcagcagaagcaagctctcgagcttcggagcatgacaaatggtggcaaagaatcccttgaagaaaccgaaacagacggtgcttcttgtaaccctgcagcaactggtggatgctgccaaggcaatggtggcttcactcgagctttggagcagcagaagcaagctctcgagcttcggagcatgacaaatggtggcaaagaatcccttgaagaaaccgaaacagacggtgcttcttgtaaccctgcagcaactggtggatgctgccaaggcaatggtagcttcacttgctgccatcctgacctgccaaaggaaaaacgggacaagagcatcgcaattgagcagaaccctaagagctgtgaggagaatggcaaggaggggggtggtgctggcagcaagaaggggaattcaaagacttgcccgatgcccacctggtttgagacctgggagagagctgacacctatgctgctcttgctgttgtcgcagctgccgcagctgtgtttatctctttcagaatctacaagaacctcaactgaagagcttgagagatctttgaagaggtgcccgaaacaagtctaggtgaatcagcgtactggtggtaaaacaatccgggacgagaataatctttacctgtgtatagtaatgtgaggtttagaacctcaaagtagcttatctggagatggtgataaaaaggtgttgtggctacggtgttttcgcgtgtgaacgtccactgctatcgaagtttggatgccttagctgctggtaatcgtaaggcatcaagtaagcaacattcactgtgatgatgttgtcttttgtttgggttttggatgttctggagattctaggttttgaaacaatatcaggttgattgaaaaacataaacatctggaaaaggttaacgcctttcttgtgacatttgaaaatttgaacttcctcgtttatctgcaacctgcgcgcgcatgtttctatggtgaacccggcgagacgccaatggacttcg

SEQ ID NO: 20691 - DNA, 138 bp, Zea Mays
agattaaaacttcttaagcaactgcacctcttccttagataaacttatctcctttccaaagcattaacccacacttgatagtgattaactattctattttgaggcttacaaagtttctagagaaaaaagcttccaaat

SEQ ID NO: 20692 - DNA, 610 bp, Zea Mays
aagaaatctgaaagtttcttgtgttgggagaggactaatgggttacattagggataaggttaatcaggggcaagttttacttgataatgtggacatcaagacgttgcaattaaagcgacttagagaccagatcggattggtgaatcaggaacctactctttttgcaactacaattcttgagaatattctttttggcaaacctgaggcgacaaaggcagaggttgggtctacgactacttccgcagttttctcctaaacacatttgctctgatgttgtttgtcaccataactgtagattaaaggagccctagctttcggaggacaacccagatgccttcaaagttcaaaatgacggtgatgaaggtggacaagaaacaaaattttggatggttcaaaattttgctataggtcctagcaacgcttatgtgttgctataggggggttattttgtagtgaactcccaggccatatgctagcttactttgaggagtgcccactatttgtgcatgctacaggcgctatcattacatttccatgacctgtaaagtggtgacatctttaaatacagaatggccacattagcgaaccagaggtttcacacgagtattcc

SEQ ID NO: 20693 - DNA, 4063 bp, Zea Mays
gcgcgcgtgttttgcagtcgatggccgaggctccgtgcaccgtcgcggggggcggtttgcgcggacgcggtggtacgctgtgatgccggtcagcagctggcgacggtgcccgtgcgtctcttggctgctggtgcgcgcgcgcggaaagctgaacaggttttgatcggtgtgtgagaaggtggaattgcaggtagcgacggcgtgagaagggtccgtttgagtgtttgacaaaggggaagtggtggtcggaggcggagaggacgggtgcgtggtggagttttgctttcggtgctggtcggtggccgtgcaacgatggcagcagccgtagcgatgcggagcgggagcagcgatggcggcggcgggtacgagaagagcgggatggacacgggcaagtacgtgcggtacacgccggagcaggtggaggcgctggagcgggtgtacgccgagtgccccaagcccagctccgcgcgcaggcagcagctgctacgcgagtgccccatcctctcaaacatcgaggccaagcagattaaagtctggttccagaaccggaggtgccgtgacaagcaacgcaatgagtcttcgaggctccagtccgtgaacagaaagttgactgcaatgaacaagcttctcatggaggagaatgagcgattgcagaagcaggtttcccagctggttcacgagaatgcgtacatgaagcagcagctgcagaatccgtcactggcaactgatgcgagctgtgagtcaaatgcgaccactcctgcaaacctaagggatgcgagtaacccatcagggctccttgcaattgcagaggagaccttgacagagttcctctcaaaggctacagggactgctattgattgggtccagatgcctgggatgaagcctggtccggattcttttggtattgtgaccatttcacatggtggccgtggtgtcgctgcccgtgcctgtggtctggtgaacctagaaccaacaaagatagtggaaatcttgaaagatcgtccatcttggtttcgtgattgtcggagtcttgaagtctatacaatgttaccagctggaaatggtggaaccattgaacttgtttacatgcagatgtatgctcctactactttagttcctgcacgtgacttttggacactgagatacacaaccactatggaggacggcagtcttgtggtctgtgagagatccttaagtggttcaggagatggtcaaagtgctgccacaacacaacaatttgtaagagctgagatgcttcctagtggctatttagttcgccaatgtgagggtgggggctcgattgtgcgaatagtggaccatctggatcttgacgcttggagtgttcctgaagttcttcgtcccctctacgagtcgtctcgggtggttgcccagaagatgacaaccacagcgctacggcaccttagacaaattgctcaagaaacaagtggagaggttgtatatgcgctaggaaggcagccagctgttctacggacatttagtcagaggctgagtagaggctttaatgatgctataagtggtttcaatgatgatggttggtccgttatgtgtggagatggcatggaagatgttatcattgcttgcaactcgaagaagatcaggagcagtagcaatcctgctactggttttggagcccctggacctggaggtatcatatgcgctaaagcatcaatgttgctgcagagtgttccaccagcagtccttgttaggttcctgagggaacatcgatctgagtgggcagattataactttgatgcgtattcagcttcagcattgaaaacaagcccttgttcccttcctgggttgcggcctatgaggttttctgggagtcagatcatcatgccccttgctcacacggtggagaatgaggagatcttagaagttgttcgtcttgaaggacagactcttacacatgacgagggccttttgtctagagatatacatctgcttcagctttgcactggaatggacgagaaatcaatgggatcctgcttccagcttgtctttgcaccaatcgatgagcttttccctgatgatgctccattggtatcttcaggctttcgcgtgatcccgttggacataaaaacagacggaccaccctctggaagaacgttggatttggcctctagccttgaagttggcgcaaccacgcaacaagtggcagggaatggatctcaggacgtttgcaacctgagatctgtgctgacaattgcctttcagtttccctatgaaacacatctccaggacaccgttgcagctatggcccggcaatatgttcgaagcatcgtttctgcggttcaaagagtatcaatggccatttctccctcccattctggcttgaatactgctgggcagaagttaatttctggctcccccgaagctgctacacttgttcgctggatttgccaaagctaccggtatcacttgggggtggatttggtcagccactcggatcaagctggggaatcacttttgagaatgttctgggaccatcaagacgctgtcttgtgctgctctttcaaggaaaagcctgtgtttactttcggcaaccagatgggagttgacatgttagaaacgactttagtcgctctgcaagatctcacccttgacaagatctttgacgagcctggtagaaaggcactacatgcggaggttccgaaactgatggaacagggctatgcgtacctgccggctggggtgtgcctgtctgggatgggccgccatgtctcctacgagcaagctgttgcttggaaagttctcggtgaggacggcaacgtgcattgcctcgctttctgtttcgtcaactggtccttcatctgatgtgatccaagtgcgccgcggaaactttacgatcagcgtccatttttgcattctctgtagacgagaatggtgcggtgttgctgctactgttagctagacaacggcatgttcaggtagtcttggggaaagccagtattgtgaagatgtaaatttgcgcccgtttccgctaatttaacccgctggacttgctgttgtttgttaaggccaggggcactcgtacgtgagataaaatgttgtgaaattgtatgtgctgaaacataggtttacattgaaattggcatatagaatgttgtgcatgtgtgctaaactgctaataaatagtttcgatattaattaaggggtgtttgaaagcactagagctaaggtgttattttttagataatggaaaaccatcattggagactttctctaccatgcagagtatgaccaacattacatcaccatataacaaatatcaccgaactgaatttaacagagaacaaaacaactaggagaaacaaaacagactttgacgatatctaaacagtagtgatcctattcataaatcttcagccaaaatgagcgaatatttggacagacgtcgtcttcaatcgccaacataccacctttattaaattctcttcgtccttacgaagtttagtccaaagtctaagccaaagcgtcatttgaaacatcatctgcaaataagtaaccataggggatttgtcaaaaactaaattattcctactagtctagatagtccaacataatgctacgataagccaagatccaaaaacatgtttcactgatctaggtatactgaggccaaaacaacagtgagcgagcctccaacagaatcgagcaaaatggcacttaaaaaacaagtgttgtatatactcatctgaatcacaaaacacatattttttattgtcataccaattacgcctagctaggttatctttttgtgaaaataacccctttgagtaagtaacacataaaaacctttatcttcaatggtactttaagattccacaaaggtttgtgataaaaaccttggcattattcattaaaaaactatacatggacttaacagaaaatattcctgaaggtaataaattccatttgaaaatatcattctcttcactaagttgaatatgagcaatactggcaaccagcctattccatttccttaaattttccccaccaaagatctttagaaagaaatttgtaaaggaacactagcaaa

SEQ ID NO: 20694 - DNA, 2279 bp, Zea Mays
ccgatgtgtttctggcagttgaatttactgttgcattcctttttttattaagaatgctgctcgcttggacagtgaaataatttatgatagggatttcgactatgactactttggcttcaaaactctggagaggtcttacctcttgaagcttggtgggaaggtcgttgaaaggcctcagcacatgctgatgagggtttcagtgggaatacacaaggaagacattgagtctgccattaggacgtaccatctgatgtcccagcgctggtttacacatgcatcaccaacacttttcaacgctggcacaccgaggccccaattaagcagctgttttcttatatgcatgaaagatgacagcattgagggaatctatgaaaccctgaaggagtgtgctgtaataagcaaatcagctggaggaattggtgtctcagttcataatattcgtgctactgggagttacatacgaggaacaaatggaacatcaaatggaattgtgcctatgttacgagtctttaatgatactgctcgttatgttgatcagggtggtgggaaaagaaagggtgcatttgctgtatacttggagccttggcatgctgatattttcgagttccttgatctaagaaagaaccatgggaaggaggaaaatcgtgcaagggatcttttctatgcgctatgggttcctgatctattcatgcaaagagtccagagtaatggagaatggtcattgttttgccctaatgaagctccagggttggctgattgctggggtgaggagtttgataatttgtacaagaaatatgagagccaaggcaaggcaaagaaagttgttcctgcacagaccctctggtttgacattttgaaggcacaaatagagactggtacaccttatatgctttacaaggatacttgcaataggaaaagtaaccagcagaatctgggcacaattaaatcgtcaaacttgtgcactgagataattgagtttacaagccctactgaaactgctgtctgcaacctagcatctattgctttacctcgttttgttcgggaaaagggtgttccattagagtcccatccatctaagcttgtgggtagcagtgattcgaaaaatagatattttgattttgagaagctggctgaggttacctcaactgttacttacaatcttaacaaaattatcgatattaattactatcctgttgagacagcaaagagatcaaatatgcgtcacaggccaattggcataggtgttcaaggcctggccgatactttcatattattgggcatgccatttgattcactagaggctcatcagttgaataaggatatatttgaaactatctactatcatgctctgaaatcttctgctgaacttgctgttaaagaaggtccctatgaaacatatgaagggagccctgttagcaagggcattcttcaacctgacatgtggaatgtagtgccatctaccaggtggaattggccatctctaagggagaccatttctaaagctgggataagaaattctcttcttgttgctccaatgcccactgcttccactagtcagattcttggcaacaatgagtgctttgaaccctacacatctaatatttacagtcgacgggttctaagtggggaatttgttgtggttaacaagcatcttcttcatgatttgactgaaatgggcatttggactcctactctgaaaaaccagataatatatgatgatggttctgtccaaaagatagcagaaatcccagatgatctgaaagcaatctacaagactgtttgggagatcaagcagaaaactttagttgatatggcggttgaccgtggatgctatattgaccagagccagagcctcaacgtccacatggagcaagcaaactttgggaagctaacatcacttcacttccatgcttggtccaagggcctgaaaactggaatgtactatctacgcacacgagctgctgctgatgcaatcaagtttaccgtcgataccacacttctaaaggagaatgggaatgggatgaatgatggaaagcccacagaggaagacgtagaagctaaaatggcacaaatggtctgttcttttaacaaccgggaagagtgcctggcgtgtggaagctagattggagctccatctggacactgcaattatttgtgacctcaggccacagcattatatgccgccggctgatgactggagcccaataatcagaacgaaatctgatgtaggatgagacgagcaagccatagaggatccagggcttcagctggttgagact

SEQ ID NO: 20695 - DNA, 3099 bp, Zea Mays
tcccactccaggatcatcccaatatacaaaggatcggagcagcagatgcaggaagggcttagcccaggcatcacgatagaccaagtagacaaagattacggcctcaactagacagacttgagaacctgagttggatgctctgatattccagcaacgagctcaggtctgtacaagtacaacacttcagagtgctccttagcctatgtttgtcaggcgttagctgccaaatgctaacatcacgttcgaggcgtacgagaccattccagagttgtgcagctgcagctaactgctggcgcgcccctgctccgttacttacgagggagtggaaaaaagcaattataaaatgtacggtttcagagcagctggctgaagcctggatccgatctgaatctgccgggcgttcgttcagttggaaaacagcaggaatcctacacacgtgagtcccgtgcgggacggtctgctagatcgcggagtgcatcaaacggtgctgccggcaatggaatatcccgtcccagccagcctgcgtgcttccaccaactttggaagcgatttccttgcgtaccatgccgtctcgtcgttgccaagaagctttcaagtacgggcagtatagatctgtcaactgtcgtacccaaatctgtcgatcgaacgtgtcgacaaatcttctgttgcttaacctcaaagcaaaattgcgaaggttgccatgccagcagcttcctgccaacggtcgtacctaaaactgtcgatgacatctcgtatgtatgcagtctcatcaaaattgtgctgcattcccacccgaaatttctagaacctggtttcgacgctcgacatcatcgtttatggcccaccagcggcagtgccctccaatttgaaccactagcacacagatcgatccgcgctattcgagaaaaaaagagacacaggccggttacgccgttggcgacgtgcccatcacggagcggctacgtgtcggtcccgctccagagtgttcttgcacagcctggacggtgccgatggagagtgccacaaatcggacggcccgacgatgccgcccgccccctatatagccctctttcccggcccttccgtctcctcgttcttccagcgaagcaagcagcctaaaaaaaccgtatcgtctcgcctgttcagtttccttctcctcttcccgcagcccggtttgccgaccaggttccaccgttccagagtagccaagcgaatcccgtgtctggttcgcgcgatggcggaggagcagtccaacccccagcaccagcaagcggaggagagggaggttatggtggagcagcagcagccgaggagggccccgaagctgaggtacctggacttcgtccaggtggcggctgcccaggccgcggtgtgcctcgctgggctctacggcctcgccaaggaccacgccggcccgctccgccccagcgttgacgccgtcgagtctgccgtcaagggcgtcgttagccccgtctacgaccgcttcggcggcctgccgctcgacgtcctcgccttcgtcgaccgcaaggtgagttgcgtcacgcgccctatgtaccgatctcccccttctcctgctctttgttggccgggtagcgtcgcgtggtagcacggcggcgtggttctgcgcccgtttcgcgggggcggttccacgaacctcgccggcggccggactaacttcaccccgccgtgtggtgcacggcaatcggcgcagcacggtgggttatgctgctgctgcgcctacctatatggatggaggattgttgtggttgtggtcaccccgactagatattttccttctgtggtgtatgattgctatggcgggcccgcgctcgagcggtgtgcggctcatctcagctgcgggggccctacttgggtgggtgtgccgtgtgcggtggtggtgagtggtgacttcgtagtccttgtgcgggccattcgcccgtgtctagtggctcctctatgagtatgccagatttccttagattccggcgcatgtagccgcgcccggcggagactccgatgccactgtcgtgaactaaattaccaagggttgttcgatcgaggaatgcaattagcaagtgtggacgacacggtgcacgaggtggacaagcacctcccgggcgcgctgaaggcggcgtcggcgcatgtctacgcggtggttcggggcgtgccggaggtggcgcgcgagctggcggccgaggcgcagcggtcgggcgtgaggggcgcagcccgtgcggcgctcgcgatgacggagccggtggcgcgggacgtgtacggccgcgtggagcccgtggccaaggacctctacgtgcggtacgagcccgcggcggagcacctggccgtctccgcctggcgctcgctgaacggcctgccggtgttcccgcacgtcgcggagatcgtcgtgcccaccgccgcgcactgggccgacaagtacaacagggcggtcgcagccgccgcggagcacggctacgcgggggccaagtacctccccgccatccccaccgaacgcatcgccaaggtgttttcgtcggcgccagaggccgagccgctggcagagggccagtagtgtgtgtgtgtgtgcgcgcgcgcgcgagctcgtctttgccggtggtgactctggatttggatcaccttccgaactgaactgaaaataaggaagcgtgaatccgggggccagttaaagatggtggtatggtatggtagcggcgttgtactagatgcgtgatgggacgatggttacggaccatgatgatgacgctgtgttccatttagctctctgctgcgtgcttttgtataaaagaagtggttcgatgtcgcaatccctgtgtttatctgacgatgcggttttttggctgttttagtttttgtttggtcagttcaggttagggcgaaaacgataagcttgcgtcaatgctatgcttttagagcatcttttgaagactctttatttttgaccctatttaactctttatttgtcattctaaatgttaaaactttaaatataacatctcatttcaaccgactctctaacaggtaaattagcttggctagcgagatctgctagctaaatttggctagtgagagagtcaatttagagagccg

SEQ ID NO: 20696 - DNA, 3872 bp, Zea Mays
caataatctactggtgcgacgcaatggccggccatgtggtgggctgccgtaacactgtagccctgctgcgctccgctcgtcgcattccattccacaagcaggcaaagcagagcgaagcaagagggagaagaagagaagaggagaaaagaagaaagaaaagcgaaagcaaaggtgaccggcacctggattagtttgtctagctaaccgcggaagaacaaagggtaacatccgattccttccttcccctgatcccctcccctcctcgccgaaagggagggagaaggatggacagctcagggctgcgggctccggcgccgattcacatggccgggggatgctgtgaggactgaggaccttggatgggcgttcgtcccgccggccgagcgcccgcgcgagagagaaggggacagaaacgagtcagaaaggccggccggtgaagctccgtccgtgattgctcaggtccaactgctgctgatctccctcatgaactgagcaatcaacagaagaaacaaaagggccgtttccgctacagagagaacgaataaatcaccggaaatgggaaggcgaggccacggggggtcagcgtcacaagacgacgacggtgtgggctgtgcatggggcctcatgcgcatgctctacttccgccgagaccccaagctcttgctggatgcaaagcagttgagtgggaggcatgcgttccgtgaggtcagtgagagggggcattcagcaaagaggtccaaggattttgacgagatagaagaagatggtaacatagaagaatgcacttcgcagaaaccaacagtcaaaaaccttatggaggatgaattgggaaaagtaaagctgctgaagaaaaatccaaatgatgagattcagagaagattagtggacctgggaaatgatgtctctcttggtaggagttcagagcatacaaataaatcaatagatagatcatatcaccaggcaggaatctctacaccttcaattccaccaatggattctggggttttgaattatgctgaagaatatgatcttgaatctgtcctgatgaatttcctaggtgaaatttatagttgtcacgatgaatgcccacacagtgattgcaagaataagaatgaattgtgtccttcactgaagtccctaatccataaaaaggtcaatgaattgaataatcttcctcgcaatattggctgcgcgcaatctcaagagggtaatgatgctaagctatctgaccagaataatctttctaacaccatggcagcccgatccaaacaattcaaggatgcattggaaatactgggttcaaacaatgaacttttcatgaagctgcttcagaagccaaaccaacatatagttgacagtatccaaaagcatgaaaacagtaaggtggctgccggattagagcccaataaaattcatggacagaccaattttctggtaggaagaggaggctcaagacagcatcctttggctacaaaggagcaggctaaagagagaaaatatatgttcttctggaggaagggtaaatcaaatagaaggcagatgcttgaggcaactgacacagatcagactgttaccaaaattgttattctgaagccaaatccagaaagagggtttaatcagaaagcagctactgcaagaactttacatcaacagccatgtacatcgcatgctcctgaatgtggtggaattgataactcaaagttttcaattaaggaagttaagacaagattcagatttgtgaatagtgagagtagaagagaaagcaatttagcacctgcagaggaccttcaaggatacccacggaagttcaaagattcttttgttgcaattaataaagattttagacatttcccagaagggagcttggcaaacaagtctggatcagacatcaagaatgcaatcaaacctttcatcagcagtaagcaaaatgggagcataagcggaaacagtggtcatatagtagcaccaaaaggtgcatctatcttctatgaagaggccaggaggcatttatcagagatgctaaaggataatgactgttctgtaaactatccagcagttcaaatctcaaaatccttggaaggcatactttctctgcctcatggcaatgtgtcaacccctaggagtagcctgtggggaaaggattaccttggcccctcacctggagaaacagatgtttttgttgcatgtgaggttcagagagaagaatgcacacaagagagaagccaatcacaagaggattttggaagcattgctcgatgtactagtgcagcagttgatgatcaggtgacagttcgagatggatattacacgaatgaagcacaagaaggatcaaggcatgctcagaatgagccaggccttctgtatactgaaggaattcacaaattcatttgcggcaaaaacatttgcgacgaacagtccgttccagcagaacaaagtagacacgatgtatgtcaggaaatactagaagaaataaaacaaggaaaagaacatatcaaaatgtccccaacctctgctgaggggatagttgaaacgttggggcagcaagagccagaaacaccagaaccaagagcatcaaccgaactaatctcagatggttctcccgagcaaagcgatgaaaagcaagagaggcccagtccagtatctgttcttgagtcattctttgaagatattgacaatccagactgcataaacaagaaagaatgtgagctgcatggtctccaaaggaccctgtattttccagataatgaaccagatgttagcctccttggggaggacaggagtgtcagagtggattacataaagttggtgctagaactctcggagttgtgtgcagaacaaaatttagaggtatggtacctagaggacgaattaatcagcccctgcttgtttgaagaactacagagtcagggcgatcaaacggatgatctaaagctcctatttgactgtatctgtgaggctctaacagagatccaagagagatattttagactctcttggctaactttcctaaagcaagacataaggacacctccgattggagaaaacctcatcacagaagttgatagatatgtttacgggtatatccaacatagtcttccaatcactctagagcagataatcaagagggacctggaagttcagacgtggatgaacattagatcgaaaactgaagggattattatggagatgtgggagtttgtattggatgagttgatagatgagactgtctttgatttgtggatttgaagttctgattagatctcgtccatggtgccttgtggcgagtatagtgagtaggatacgtgagttttcgtgctgacaataaccagttgtatgcggcagaataacatgatgggctactactagtcaagtgtgtaactacagtggaaatggttctcgtggatgaaaacaaaagtttaggttcagcaaatctccagaattgtgcagtttgtgtggatgaagttggttggggacggtctgtcaccagaactctcagccatgcctctcaacagcgaattgtacagcagatttgagagtttgtctgtgcatgtgtgatgcgtacacttttcagcgtgatcagatcacgcttatcgtataggtttgttttgtgtgtaaatgtgcaaaaaagtaatcatacatgttaatcaaatggcatgttttgagtatgcttgagcattatttgaaggaccaaattcgttaatcagaggaagggaaatggtataggtttgtttttgtgtctaaatgtgcaaaaaaaaagtaatcatacatgttaatcaaatgacagatttcagtatgcttgagcattatttgaaggaccaaattaggtaaccagagaaaggtaaatgagaggtaataaaaaattttggtctagg

SEQ ID NO: 20697 - DNA, 4800 bp, Zea Mays
atggagtcctccgacgacgggggctccgggccgctgctgctggcggcggggatggggagtcccggccattcgttggtccccgcggccgtcggcggtgcgagtagcgcacctggcgcctccggatccggggggaagccgccggtgaagcgcgtcatgaagacgccctaccagctggaggttctggagaggacgtatgcagaggattcgtacccaaacgagacgaagcgggcggagctatcggtgcagttaaacctcacggacaggcagctgcagatgtggttctgccaccgccggctcaaggaccggaaaccgctggccaagaggcaactgagggacgacgaggttagcgccccagtcatagcgccatcacctgtgcttccgcctccatcgccgcccagcgagatgatagcggggactgttggaacctatcgtgagcagctgccaccctattccaggagagggcctgaccggccatccgtgcctaggctatctgtgcccgagattgggaggagatactacgaacctccacaagttatgctgcctcacatggcaccagtgcaccttacacaagcggagcatcgggtgatcaattctgtagaagcacttataggggagcctttgagggatgatgggccagtgcttggtattgaatttgatccacttcctcctggtgcatttggcacacctatagttcctgagccaccaaggcagcccttccgatcatatgataccaagatgttttttgggcatgattccaaacccatgaaggctttggcatttttgcctgccacagaccctttacttccaaatagagggaaacagaagtccttggttgggtcttctcatcttggctcacaggcagtacatgaatatcaatttcttcctgagcagccaagtgacacatatgagagggcaagccagtcacacttctataatgctccagcagaggcatcaaacttgagggtagctcctctgtctacaggttcacgctttctacatggacttgagcaggcacctagctatacgtttcacagtcaatcatctggttctagccattcggctcatcgtggcagatcgccgattgcattggcattgacagatcatgagggggctttgtcaaatattaatgttagcccaactccaatccatggcaaatttagcatccctcaagttgctggatttgaaagctccctcgcatcctctgaaagaatgggatatcatgatgatgatacatatcgtgtggacagaaagcgcaagcataatgaggaagctaagactgttagggaggttgaggctcatgaaaagagaatcagaaaggagcttgagaagcaagatctgctgaatagaaagagagaagaacaaatgcagagggaaacagagagacttggtcgtgagagacgaaaggaagaggagaggttgatgcgtgaaaggcagagggaagaagagaaattccaaagggaacaaagacgtgcacacaagcgtatggaaaagtttatgcagaaacaatctataagagctgaaaaactaagacaaaaagaggagcttcgacgagagaaagaagcagcgaagcagaaggctgctaatgagagggctacagcacgtagaatcgcgcgggagagtatggaactgatggaagatgagcgcttagaattattagaactggcctctcgtagtaaagggctcctctcaatggtttctcttgatagtgacacattacagcagcttgattcatttagaggaatgctgggaaagtttcctcctgaaactgtgagactgaaggtgcctttttcaataaaaccatgggcagattccgaggatattattggaaaccttttgatggtttggaagttctttgttacctttggtgatgttcttgggcttccatcattcacattggatgagttcgtgcaggctcttcatgattatgattcaaggctcttaggtgaattgcatattgctctgttgaaatctatcattaaagatattgaggatgttgcccggactccttcagttgctttaggtgtaaatcagagcagttctgccaatcctggaggaacgcctagaagcagcaagtgctttgaaaaaacaaatgtgggctgaggcacaacttgataagaggcgttcaagggatgactttactagtaaggtgcagtatgattcttgtgtgggtataaaggttgatacagatcaaaaaaataatgctgctgaaagtacacttgtgccagtggataaccctattagaaacaacaacggaaattccagtttgacgaacaacgatttacttgttgataagcagaaccagcttattactggtgatgtatttcaacaatggaatggtgtaagccaagaattgagtactaaccccgaaagcttgtctgttcagcaatatgcttcatctgagaaaactagatctcagttgaaatctttcataggtcacaaggcagaacagctatacgtgtacagatcgctaccccttggacaagatcggagacggaaccggtattggcagttttctgcatcttcatcatcctatgaccctggttcgggaagagtcttttttgaatctagagatggatattggagggtcattgattcatctgaggcgtttgaagctttggtatcttcccttgatactcgtggcatccgtgagtcacatctacactcaatgttgcaaagtatcgagccaacttttagggaagctgttgagaggaagaagtgtgttagtttagaacacacaactgggtggactgacaatggaagtaatgaaagtccaaactgcaacaatgagtttggaagtccatgcagtaccctttctggtgttgcttctgataatcttatggcatattcagatactttcaagatagaaattgggcacaacgaagctgagaaaagttctatctcgaaaagggcttctgtgtttctgaaatggatgtggagagagtgctactgtcaccaatccacgtacaccatgaaatatggaaagaagcggtgccctgagttgattcaatcttgtgaccattgctaccagatatacttagctgaagaacaacactgttcttcttgtcacaagtcattcaaacccattcacaatttcttggagcacttatcacaatgcgaagataatcagagaacaaatcctagttggaagacacaaattgtgggcctttctgtacccgtaggattgagattgctgaggttgctcttagctaccattgaggcttcagtaccggcagaagctctcctacctttttggacggatttgtatcgaaaatcttggggtgtgaagttgtattctgcatcatctgctgaagaagtcttgcagatgcttagtgtgctggaaagtgcaataaagcgagattacttatcatctaattttgaaacgacaactgagttgcttaattcaaacacacaagatgctacccagaattcagttggaggttctggatctgccactatacttccatgggttcctgacaccaccgctgctgtcgccttaagattgttagacttggatacttccatctcatacaaacttcattcaaagttggtttcaaataaggagcaagaagctggagatttcatgaagcttccactgagatacccttctattaataagaacaaacaagaaatagaacagttcatacctattggttttgatcaacaggatggaacattgctaactaacagcaatggccgtagaggtcgtggacggggaggtagaggtggaaggggaagtagaggaggtagcaggggaggtagttctcgtggtggtggtggtagggttcccaggggtattggtagctcatccaggattcagttcagggatgacaatagtgtgccctatgggagagcccctcgaaagaatgtacgtggtgggcgtacccgtggccgcggccgcggccgtggacttcgaactgtcagacctcggcaaccatctgaattcagtgccacatcaattccaaagttaaacctattgggcagctttagcatgttaagtaaggcaaatcacactggcaatatgcattctccagagagcttgggtgcagaagagtgggtcttggagagaagggaatatgtcaaggatgatgatgacaatttggtctctcgatatgatgagtcagaggaggaaaatggtgagcctatgaatgaggaatatgatgagcagatctcaggctatccaagggacaattctgagttcagccccatacagatgatgggtgatgtgagccacgatgaggatgctgaaggggatgagggcgaggaggatggagaggactatgaaactgaagatcctgctggtgatgaggatgatgacgttgagatggattgggatgatgacattcgggacaacgatgatggtaatggagcagccaacgcagatgaggatgaaggtggtacatcatcatattcttcagagtatagtgagtgatgagagtggattgaagttgtgcaggtttgtggtttgccaactatgtaagaggctgccagttctaaactgtgctgtggctatggccctatttctattcatttttaactaaaatttatttagggtcttatcattttgttaagaatcatttggatggtgacccattaccatctctagttgtggctcgttattgcatagaagctagccgacagtggaagatcggctttgtacagggatgttcgaaacttcgaatcaggttatttgtggtgtatatataatgccaaattaccaatcacaagaagtaaaaaaaaagtcattcactgtctgtttttttgttcttcagctacatttttcattgctatatatagggagag

SEQ ID NO: 20698 - DNA, 199 bp, Zea Mays
acaggacatgtcttttataaaaggtatagaaaatatttcttgcaatataagttcgtgatatatggcaatcaacaaaatcaatcgtgatcccatctacttccacctctctcctaccaccaatttgtccttccttgaaacaaagccaagccagaatatggattgcaagtacaccatcaacctgtttatttaagaactaatc

SEQ ID NO: 20699 - DNA, 921 bp, Zea Mays
ctcgaacctaacttaatctgtttggctaggtttaattgatctacaagcttcagaacatgttcaagaatacatttcagtctgggttcctgtccattctttatagcctcgggaccaagccattgcagatatgggataaggaagttgtgaatgggcacattaaacgaccccaagatgaagatatccaatctaatgtacttgaaattgttggaacaaattctgtcacaagggtgaagccatatatctgcacgatgccgttgaaactcgacgatggctggaacaacatccagttgaaccttgctgatctgacaaaaagggcgtacggcacaaattacgtcgagacgctgcgggtgcaagttcatgcgaactgccggctccgcagaatctacttctctgaccgcctctactcggaggaggagctgccgcctgagttcaagctctaccttccaatccagaaatcataggatcccgagggcgtggagagactctggtgaccgggagacttatatcgtaccattgtgaggataacctagctgcacatctgcgccttcctgagatacagaaaaaaaatgtaccagaatgtttctgttagttttctgattgttgtgcgatgaatgattaggctgttctgttttcatagcaagggcgagtagccttagttggggctgttacccagtgacccctttgtgtgaacgagtagtcaatgttattagtccggaccctttggctactggtccttctggtccaaagcaaaacgtaccgttactgctcactgcctggtcatttaacgtgcttcttccatggttgtaccgtctctatgatagtatcatgtggccgctgatctattggatacatgttacgcgtgactcgcattaaaagcttcacttctctttagcgtcagccgtgccgagtgctgcagtccag

SEQ ID NO: 20700 - DNA, 320 bp, Zea Mays
agccaatgcatcaaagggtttccaagcaactcctataaacctaatgcacatttcgctagacttaaagtgtgtaaaaatcatttaaaaacacaaggaaaggggttgcatgcaccggggcttgtctgggataacactaggttagtgttagttagacgacgaccacttggcgatcagcttttgttctgatatttgctccgtctgtccatcttcaggttcgtccatccgcattaccttgcgaattagtccactcattacgtcatcttggggtcgacttggcttgtcttccgcatcacgtgattaattgtcttacctaattgaaa

SEQ ID NO: 20701 - DNA, 2055 bp, Zea Mays
cttttggtggtaccagatcagatgaattgttgtcgctctattcgaagtatcgcataggattccactggattcagctgctgagcagggtactggaaggtggatttgatactagctctgaacagccagtagaatttctcaaatactgtccaggatcatggcttctctctgtgatttctgtgggaaacaaaggtcaatgatctactgcagatcagatgcggcatcattgtgcttatcatgcgaccgtaatgttcattcagctaatgcactgtctcgacgtcatacaaggacccttctttgtgatcgttgtggttcacagcctgcatcagtccgatgtcttgaggacaacgcatcactttgccaaaactgtgactggaatgggcatgatgcagaatcaggggcttctggacataaaaggcaagccataaactgctactcagggtgcccatcatctgcagagctttcgagaatctggtcatttattactgatatcccgactgtagcagctgagcccgactatgaggatggactaagcatgatgacaattgatggcagtgatgttactaatcgtcacgatacttcagatgataaaagattgttggaaatagctaacacaacactcatgagcgatccaccttcagccgacaagcttaaatctccgacaggctcttcttctggagatgggtttgatgttatgactctagccacagatcagcctgctggaccagtttcagcaacgcctaaggtacctaatgccagagatgatgataagttcaatgatggcatgtacgaagacttgtgtgtagatgatgctgaccttacattcgaggattatgaagagctatttggtacctctcacattcgaacagaggaactctttgatgacgctggaattgacggttacttcgaattgaaagagacaccacctttttatttcaacgagcagcccaaagctatgcagatagaatgtggcaacgtggtatcagctgattgtgcgatgtcaaacccaggggcaagggctgattccagcctttgtattcccgtcaggcaggtcagatctagtatatcccactccttatctggtctgactggtgagagcagcgctggagatcaccacgactgtggggtgtcaccgatgctcctcatgggtgagccaccctggcattctcctggtggtccagaaggctcagtcgctggaggcagcagagatagcgctctcacacggtacaaggagaagaagaagaggagaaagtttgacaagaagatcagatatgcttctcgcaaggctagggcggacgtgaggaagcgggtcaagggacggttcataaaggccggtgaagcgtacgactatgatccgctaagccagactagaagctactgagccttgggagtgtgactgttgttgtcgtccagtgtcagcctcgcaatctccagccgctcgtcggttgcaggctgcgctacaggcaagatcactggagagcacaacgatcgcattgcatcagagcctgcaactgaaaaacgttaagaagagataccaagtgttaggatgaatgaaaaaaaaatacaaaaaagaaagatgcagacttgccggactcatatccattattcagtttctctgcggatgagtggcttggatcgcactgtgccatctgcgcgtcgaacagatgcagtgatggatgggcgctcgtcgtcctccagctgtaccgctgtgcgctaggacctgcgtcggctatatacggctgttcggcagtgagctgccaggttgtacagtctgggtaacagcctaacagggtatgcttatacctctcggttttcgttctgtaatacgtacgtattatttgcgcttgccaggagactgttcttcggccgtgtgtatgtttgtagatggttgcaacattggtaaaaaaaaaagtagccgtcgtgaatgtaaatttgtattcttgttaggtcgcatatagcgttggcgatgagcaggagaatcacacgtatctggacactgaacgtctgaacccttgtaactatttttgcgccagaataaccttcttgtgccttgtcgtt

SEQ ID NO: 20702 - DNA, 572 bp, Zea Mays
gagaggcaagcacatgtgttgttgtttgtgctaactgctaagcagtcatcagtttcatcgaacgattccgcagcggtgccggtccggacattgccttgttgtccgagctatcgcattggtcgccagacgatggttccggagatcattcgtttggttactagcgactgctagtacgtactaatttcccacgtaatgatgccgtggcccgggcatgaccgcagtccgcatacacccttccccgcgcagcctcgtgtcgtgcctcccgcgcgcggatcgctgggtccgccctcggcccctctccatcgccatcgtgctgccaacgccgacgtccacccgggcgggacccgtgcgcacgtctcttgaagcccccgccggccgacaattacatggagaccggccgaccgggcttatagctggcctgcgtgctccgtcacgattcgtgcctggctacatgttcgatctcagtcgccaccccctcgcaccgtgcgagggagtggcgactagggctggaaaattagctggctcgtgagccggctcgagctcggagcggctcgacttggctcggagcggct

SEQ ID NO: 20703 - DNA, 358 bp, Zea Mays
cttcgattatcctgagaaaggatgccatatttgtgatggtactggatagaataatttcaggcgtggaagaatttggattctgcaataagggttggatcgaatctcctataaagggtgcagaagggaataaggagtttcttgcttgcttcaacaggatccaatatcagagtcacagccagaggcaaaggaacctgtaacctaggatgtcagcagaacctattctactggtcaacatgttcaattgcaggtgttaaaaattttgtgtatcccttattactttatgaggccactaatttcgaaattaaattactaaattataatttattaaatatgtacttaatttacaatagggaaacaa

SEQ ID NO: 20704 - DNA, 2597 bp, Zea Mays
ctcgggtgggcgcgcgcaccgccggggtccccaccacacagagatgcccctcgattcaccgcaccgacacgcgacactactcattgatgaggcgacgtgaccagcaacaaataggacacgccggctagtactgcgccagcccactccagcgctgaaggcctgcagcgccagcgcagcgcctctctgctactgtgctggctgacgccggtggggtgtgagcgaactgcgagctgctgccacccctgctgccgcggtcgaccgccggccccggaccgagatggacgctcggtgggcggtgctgctcgcgctgctggtcgccagcggcggcgtccgtgtctgcgccgccgctggggccaagggcgccaactggctgggcgggctgagccgcgcgtcgttccccaaggggttcgtgttcgggacggcgacgtcggcgtaccaggtcgagggcgccgcgtccaccaacggccggggcccctccatctgggattcattcgcgcacgtcccaggaaatattgcagggaatcaaaatggagacgttgcagtggatcaataccatcgctacaaggaagacgtcgatctcatgaaaagtttgaactttgatgcctaccggttctcaatctcatggtccaggatcttcccggatggcgaagggaaagtcaatccagaaggtgtagcgtattacaataatttgataaactatctgcttcagcaaggcatgactccttacatcaacctttaccactatgatcttcctcttgcgcttgagaagaaatatggagggtggttaagcgcgaagatggcggacttgtttacagactatgctgacttctgttttaagacctacggcgatcgcgtaaagcactggtttacattcaatgagccaaggatagtagcgctacttggctatgacacagggtcaaatcctcctcaaaggtgcaccagatgcgctgctggtgggaattcagcaaccgaaccttacatagttgctcataattttctcttggcacatgctactgcagttgcaagataccgtacgaaatatcaggtatttccatcttgagaacctcagaagttcctctgaaaaataacatcactctagcactcctaggagtggtaaactgatgttattttattcaatgaagtgtgtggtccaagattttatttttaaatgaaatgtgggcagggtctatatatgcttggaagttggaacaatggtcagcatactttcacattaataactctactgttcatgaaatgcattagcttgttctcctaaacgattggacatgtgcctgtcgaatttcattagtttcttggactgaaaactgctgatggaagagtgacatgatgttttaaaaacataggctgctcagaagggtaaggtcggaatagtcctggacttcaactggtacgaggctcttacaaactcacctgatgaccaagcagcagcccaaagagccagggacttccacattggctggtttgttgatccattgataaacggacactatccacagataatgcaagatctcgtgaaggagaggctgcccaggttcactcctgagcaggctaaactggtgaagggctcggcagactacatcggtatcaacgagtacacatccagctacatgaaggggcagaagctggtccagctggcgcccagtagctactctgccgattggcaggttcaatatgtttttgcacgcaatggcaaaccgattggaccacaggcgaattctaagtggctctacatcgccccgacggggatgtacgggtgcgtgaactacctcaaggagaagtatgggaatccaacgatctacataacggagaacggaatggaccagcctggaaacttgacccgagaccagtacctgcgcgacgccacgagggtgcggttctacaggagctacatcggccagctgaagaaggccatagaccagggagcgaacgtggctggctacttcgcctggtctctcctcgacaacttcgagtggctggcagggtactcgtccaagttcggcatcgtctacgtggacttcaacacgctcgaacgccacccgaaggcgtcggcctactggttcagggacatgcttcagaagcattgagatctccagagccgagcctgagcacggaaggtaccattttgttcagcttcgcctagtgtttgggatggcccaatggttcaaatccggctcagtgcctggctaccaaaatgggaacaaaggacagctaccccgatcaattgtgatgttgtgtgtttgtgggtatgttctctctggagtttgagctgtggttattttatcgtgttggttgatcgtgtttgaaatgcttaattcaggactgtgacatctcgagttgttttaactaaatcttataagaactaccctgatcgagcgctgggtaattggataaaatgaaaccaagagcccacaagtagagtttgaaataaaaatttcaaaaaatgtgatgagtaacgttatagtagagtttgaaataaaaaatgtgatgaagatagtcttaagaacttatttggatagtcttgcatcatctcattgttggaacttgctctcccgagcaagatgatccaacggggaagt

SEQ ID NO: 20705 - DNA, 967 bp, Zea Mays
gcaccttacaagagagaagtcggcccaagtagcgtgcgcgcagaagctactcccgaagagtcgctctcctgcgtccacgcctcgcttgcggcgactagggcgactgccgccgccgcccttcgcccagctgcccaggtcttcgtcgggcgctttaccggtgaagagcgcccaccataccagttatcgggaaagtgaaggatttcttgggggagattgcaagggccaaccagaagttgcagcttgatgcacagaacaagcctcctgtggagtacgatattgaagcccttactgggaacgaggaggaatacattgagatggatctgcttctaggtgtcgctgatcttcattcagagcaggctgtggaggcagctgaagcaacaataaacggacgccagacttcagaaatgtcatttgctttgcagctcatctgactcggaagatgatagtgatgacagcgatgaagatgctgatgacaaacctctcacgtctgacaaagataataaatgtaaaagtcctgatgatgcggagatgggtccagcgaaaggaaagaagcccaataaaagacagaaaattgttgttctcaactagtacccttgtcttctgtacacctaagaacaagggctggagcgcaagtggtgaatgtgttggcctggtattatcagaagttacggagggactctctctgttcttttttatttgtcacggtttagtttaaaaatgaacaggggacaaatattcgagaagggaggttgtatttttttcagtgttgtgcaatgttcaggccagctagggcaacgtgcacgggggctaaaagaagtaatgcatattccagtttatacaatgcgttccaatgttctggcctctgtatggtttccttgtgattttttaggtagagaggaagtttccttacagcgtgccataaataaatcctgcaaagcgtcaatggtgtttctttcatggattcaaa

SEQ ID NO: 20706 - DNA, 3156 bp, Zea Mays
cggtgagcatctctggaggctcgagtcttgactgagttctatcttaacggtgctgctagttatgcttgggtgttagtgctatggctactcattaccaagctgctaccttgattgcctctccgtcttacccaaatgccattgcttggtcaagtgacaatctcgtggctgtcgcatctggtcatattgtaactattctgaacccagctgcgcttgatggaccccgtggattggttggacttcgtcacagtgacccttttcctataggagtggttaagagagaagatctcttggagccatgtttattgcccacttccttagcgcgtgaaactgaaccatgtgcccgatcgatttcatggtctcaacaaggatttgcacctaactatgggtgtttgctggctgtttgcactgtgaatgatcatgtgaagctttaccgatcaccaatttgggagttatgtgatgaatgggtagaggtcgcagatatatcacagttgctgtttaactattataaaattataaacttcggagaggataatggttctcatttgacttcttcgaagaatacaaattctggggaggcagaagttttaggatctacttgtcgatcggaagaatctctttatttcaggggtcctggacagagaaaaataaagccagcaagagttggtggttttatttatgacggcaatgaagttgatttagatgcttcaaaggatgcagacttctcgatggaaccatgctcaaaatcaaagaagaaatctttgaaaaagactgtaaaacccagggatgaagtggttgctgtaaatggacgaaacagcacagggaatgttaaagcatcattgtcctccaatgaacaaaacaaatctcttcctcttatcacggcaaaacagtatgcctgtcgtgctgcacatttgtcttcccttgtagtttcatggtctccagttgtgtcattaagtgatagaacttcttgtttattgaggcattggtgcattcttgctgttggctctaaatctggaaatatttctttttggaaactatataagccagaatattacacaatagatgctggtgtggttaccagtgatccgatgctcatcggggttttgcatgctcatgaatcatgggtcaatgccataacttggcaagttctttctgcgggctcttcaaaatcctcgttgcttttagctactggatgctcagatggaagtgttaagatatggttagggaatattgaagggttaaatcaatgtgcaattggagaagaagtgccatttgtgttagttgctgaggttgccgctaatttatcagctccagtgtcgtcaatctcattgggcatacctgcccggtctcaacatgaggttagtttggcaattggaagagtatccgggttactagaaatatggatatggaatgcatctaccaacaaaattgagagttccagtgcatggcatgcacatgatcaagtggtgacaggtttacgatgggctatcgatggcaattgtttattcagctgcagtcaggacaattctacacgttgttggatatctcacgaaaaccaccttgaagaattttttttgcattcagaattttcagagctaagggagtcagaagatgtaagagtagtagacacttaaatgttagttattcttgatgtccaattattttcctccatatggttgggttttcaatatgcatgcagctatcaaaagtttctgatcgatgctatggtcttacgctatcacctggagaagagataattgctgtggtccgcagtttggatctgaaccttttgaaccagatgtatcaagtcaggacacaaaaggcggtggtcgagttcatttggatcggtggccaatttgttggtattccactggacgggagtatcgatatttgcagtccgcagtctgcggacttatcctcaagtaaccttatgtggtggggatccaacatcttgtggtcgctgaagaaatacgaaaatgtcgaaaagaggcttgtgttgtgggacgttgtagctgcgctgcaagagctgaagaaaaccgcgcccgcctttctggagactctagtgcacagttgggcctcagctttatttgcgggcgactcacagtgtgtttctatcactgcccagtcatcacgctcgatgcatgacatgatgccccatgtcagctcgcggaagctgcacttactgaacataatctgcagaaaagtgatgctcggcaatcatgcgcggcatggtcctggtgctggaaacaacagtaatgatggaacaactgatttctggagcactcttttggtagcgagtgaaacggagctgcgagagaggctggtgggtttcacctttgccgcggtcgtgaaacggacagcgtgtctgttcaacggcacctccaccgcaaattgctggttccctgtcggcgtcgcccagatggattcttgggtatccatgaactacgaaaaggtgcacggtcagctgcagtcgatcagatcgaagatcaaagagctaggaagcaggatcgacggatactccgacgtagaaagctgcccctactgctcttcgccggtccgtttcgagtcgcctgacgtggccatctgcggagaaaggcacacgctgtcgcggtgcaggacatccatgaccctgtgctccgtcgcgcagccagtgtggcactgctcgtgctgcgggggcacggtcgacaagctgctgccggagtcgttcttcaccatgcctttggacgccgtccgtgacgacaaaggatcgctcgatctgtcggcagcctccgccccgctttgccccttctgcggcgtcctgctgcagaggtcgatgccggcgttcctgctctccacctcgccggtatagtcttcggatgcccccaggtgttacatgcagtagcaatgcaatgggaatatcgtagtggagccaactaccaagtttgttgtagctgatgctgtatggctgcagagtggcagtgccgtcattggggctcgaaatgtttgtgataggttttgtgacttctttctgcttagcccctctaatatatctcgagatacctattttttatttaccgtaccctgcctctggaccaaagcctatgtggcggtggccgccaggctgagtgcggggcgaggggcttgggccagctcctgcactcagcctgatgaccatgtccg

SEQ ID NO: 20707 - DNA, 2485 bp, Zea Mays
tggaacatgtgtggtccaggctcaggcctaaagatttgtggatttttctaatgctgtcgcatgattcctcaagcaagaggaacaacatcacgcgggccgaacctgcaatttcacgcagagacgtgtcatcttctcctccgttacgaacccgtgggatctcaagtccgtttcacacttggctccctcgctcgctcgctcgctcgcactgacaacctgggtggccggctggccgccaccgcacacctctgctgtggtctaccgcccctcttcgctcccgctcccgtcgtcggtgagccgcgcccgtccaccctctcaccgatggcttcggcggccgcgaggggcgccgcggtgcgctcccctctcctcgtccaccaccgcgtccccctggtacatcccagcgggggaggctcgctccgggtcggctggcccggaattgggcccggacgggaggggcggcggcggggcgccccggttggggctagggttttcgcgcgctactcccaggcccaggacttctccacacgcctccaagatagagctggtgagctgcctaagttagtcgaggaccttatccagacatcgattagcacagggcctcgaggtgctttcaggatggcccaagggatccaagctgtgcttggggttggtggggagtggctgaatgacctctcaaagacagccaacacatcagcaggaattccatctcagatgcagcttggtttgctttctccactttaccttcgaaggctttttgagcgcatgggtgccacttatatcaagttaggccagtttgtagcatctgcgccaactttgtttcctgcagaatatgttgaggaattccagaaatgctttgaccaagcaccagctgtcccatatgacgtgattgaatcaatattacgtgaggagctgcagcggccattagatagtgtgtatgaatacattgatccggtgccaatagcctctgcctcaatagcacaggttcatggggctaggttgaagagctctcagaaagatgtggtgattaaagttctaaagcctggtattgaagatactttggttgctgatctgaattttatctatgttgttgcacgtgttttagagttcttgaaccctgaactacaaaggacatcactggtaggcattgtaaaggatataaaggaatcaatgcttgaggaagttgactttagaaaagaggctgcaaatattcaggcatttcagggatacattgatgcaatggggtttgacaggcaggcaaaagccccatttgtgtatcagcactgtagtacaaaacgtgtattgactatggaaagattgtatggagttccgcttactgatcttgattctataagatctcttgttcctgatcctgagttgactttagtcactgcccttaatgtctggtttggaagcttaatttcatgtgaatccttccatgctgatgtacatgctggaaacctatggttgctccgtgatgggcgaattggttttattgattttgggattgttggtcgaatatctccaagaacttgggcagctatggaggtctttttggcttcttttgcaactgaggattatgatgctatggcctctgccctctctgaaatgggtgctacagggaatgatataaatactaatgaatttgcaaaggacctgcgaaagatattctcatcgatacaggacctggatactgaaatcatagtggcaacagcaaggacccctgatgctacagcagtatctgctaatgttgtccttgatgagaggcagatgaatgctctttttcttgatctggtcagggtgagcgagtcttacgggctgaaatttcctcgggagtttgctcttctcatgaagcagctgctgtattttgatcgctacacaagactgctggctcccagcatgaacatgctgcgagacgagaggatcaacatctccaccaatcgacaaccaagaagaactgatagatttcagtgaagccacgtcgttagtcaccggccacgtactagaggagtcgtgatgggcgataatagcaagctcatgtgacccaatactgtatatagttttgccagaccagcatagaaatgaaccacacgctagaaattgtacactccgtcgtattctgggattgagcgttatatcgtactagtaggtaacatgtaaaggctgtatcccacgaccaaagtaaatttcagatgaactgcttttgtctcatcttttttctggtactagtagcgtgaatctggttaagatgcaactgcactacacttcagctgccatcagaaaaaagtgatcttgcagcagcttaacgaggtgctgaacaaaactggctagagagatggttgcattctctcgtggtcaccacgaacttgtagagttacgggattccactatatggcggcatttcagctttcattactcgttggagcttacacaacagggttcatagtggatattaacttggaaaatatcccgcagctcaggttcgtgtgcg

SEQ ID NO: 20708 - DNA, 2917 bp, Zea Mays
cattccccttcaacaacaggtagccaccccctcgcccaccacatcttcaccgcaatccacgattgagtcggacgcactctgccatgacgaaacgggagaggaaggatccaggtcgcatgacaagcttgggatccctgaccaagcagccgaatctatcatgggttccgcccggctgatttgcgagcagagattgccttagaaactgcgcgaaagctatcactccattattgggacaagattgaagctagatacaaggaggtagattgcgatgcaacattacttcatgccctttccatgtattgggagtttaggagactcaagctagctgctactgtgttggacgagccatgcattgaaagtcaacatagtgcagtaacatatacacaacagaatgagatgccaatttcccttgtttctaatgctaatgagaatgaggtagcagttccttccagctctattcatgtagaaaaagaacaatttgctgctgggacctctgatcaggttgcttctaacctgattcatgctgcgaactcagaaggtgctgctaacttagaaggtgctgctaactcagaaggtgctgctaactcagaaggtgttgctaactcagaggatgttgctaactcagagggaggtaatgcatggggacaatatgatgaagatgagtatgttggcgcagacgatgagaaggcaacctacaaggagctattttctgatatagaagagagtggatcagagtacatccctgactctgatgatgaagaccacgatgattgtgttgtagatgacaatggagatcctctgtttgtcacaacaactgacttagagaaccctaatattgcagtaggtgttagatttgaggatgggcctactttcaaaaaggctattaggcagtgggctatcttacatgaggttgaaattggggctcactatagtgaatcttctaggtatagaggattctgcaaagcaaagaagtgcaattggaggatccatgcatcacaattgcctgatggtaaaacttggcaggtaaagaagatgtcaaagaggcactactgcaggagcagaagcaagatggagaagaattgcatggccaatcagtattgggttagagacaaggtagtgccgatgcttagggaaaatcctaacctaggtgctggagctctggtgaaaaagctacaagagaaatatctcatccaggtttcatattgtgttgcatggaaaggaaaggagctagcacttgatgagctgatgggcaaatgggaagacagctttgaccatatctatgctttcaaggctgcaatagagaaggagtctcctggtagtgtagtggagatacaaacagagaaggttggggaaaagatcagattctgcaaaatgtttgttgcattcaaggcttgtattgatggttttttgcaagggtgcaggccctatttaggcattgactcaactgtgctcacaggtaggtggaaaggccaacttgcttctgcagttgcaatagatggccacaattggatgtttcctgtggcacttgggctgtttgaatctgaaagtaaggatagttggaaatggttcatggagaagttgcagacagctataggatcaccccatggtctagtaatatccacagatgcaggaaaaggcatagacagtgcattaaccaatgccttcaacaatggtgttgagcaccgagaatgtgtgagacatctatttaagaattttcagaaaaggtttcatggtgaagtgtttgaaagaaacctttggccagcagcaagagcatataggaggacagtccatgataagcactataatatcatgaaaatagcatcacctgcagccattaagtggttggaagacactcacaaacatttgtgggccagatgttatttttctacagcaagcaagtgtgactatgtaaccaataatattgctgaaacgtttaactgttggattaaagatgagaagtctttaccaccagtggagctaattgatagaatcaggcaaaagattttggagaagttttttgtgaggaagaaccttgcagataagttgactggcacaattttaccatctgtcatgaaacaacttcatgatgctggcagaggtttggttggttatgtggttcacaagggtcctgatcatacagctgaagtgtctggtgttcataaggatttgactccatggagacacactattgatctggtaaatagggagtgcagctgcaagaaatggcagctaactggtttgccttgcactcatgcattgagcgttataggttgtttcaggaacctgaaattggaagattatgttgactcctactactctgtggaaaaattcaagactgcttatgttgggaagatacctactttgacagataagactgagtgggagcaaccagaggtaggttacaaggtatggcctcccatactaaagagagctgctggtagccaaggacaagaaggttcattggagtagaatgagggtcggggaaaaagaggcacaaatgcaagagatgtggtcagtttggtcaccaaatgaggacatgtaatgaaccagtatatgactcagatgcaccaccaccaactgctccaaagcctaagagggtgagacagaagaaaaagaaggtggtggtggtagaagatgatcctctgtcattgcctgcaccatcaagtccagtgtagaagaaaaagaaccagaggggaaccaagagcaagtagtgttacttatgttactcattatactacgttctgtaatgtgccatgaagtggtactatgttctgttagtcatgtttcttatgtaagacatgtgcaatttgttttctgttgaacatgtgtaatgtgtcctctgttggacatgtgcaatatgtcattgaactacgttctataatatctaagtttcatggagtttcatctacttcgatca

SEQ ID NO: 20709 - DNA, 1145 bp, Zea Mays
ctccagcttgggctagctgcctagctccagctccagacgcgggcgagcatgtggagggatgcgatgcatcggtgctgatacaaggtaacggtaccgagaggacggatcctgcaaacctctcgcttggtgggttcaatgtcatcgatgcagcaaagaggttgcttgaagctgtgtgccctgcgactgtttcttgcagcgacattgtcgtcctcgccgcaagagatgctgttgtgtttactggaggaccggctgtgcctgtcgcgctgggaagacgagacggcctcgtctcgttggcatccaacgtccgaagaaacatcatcgacacgggcttctccgtggacgccatggcggccagcttcaccgccaaggggctcaccttggacgacctcgtcactctctcaggggggcacaccatcgggtcggcgcactgcaacacgttccgggagcggttccagcaggtggcgaacgggagcatgacgccggtcgacgggtcgatgaacgccgactacgcgaacgagctgatccaggcgtgctcggcgaacggcaccgtgccggcgggcacggccgccgtgggctgcgactccggctcggcgtccgtcttcgacaacacctacttcgcgaacctgctgggcgggcggggcctgctgcgcacggacgccgcgctggtgcagaacgcgacgacgagggccaaggtggcggagttcgcgcagagccaggacggcttcttcgcgagctgggccagctcgtacgccaggctcaccagcctcggcgtgaaggtcggcgccgacggcgaggtccggcggacctgctccagcgtcaacggctgacgagggggcgggggaggctgcagaaacttatgttgtagttgtagagcaaggaaaggtgaggtgaggtgtggtgtcggctagttcttgttcttggcccggcgatgcttcggtgggtgagcgaggtgttgccgtgtagccggcgtcaccgtttttagtgaaaggagcgaaaagaaaatgcagaaacctgtgtagatgacgtgcctgatctgcgtctgcaaccaagggcatagttcactcatgacgatggacactgtactttgacctgataaatgacatagcaagcgaggcgaacgtgcttacgcggttcactcggcagta

SEQ ID NO: 20710 - DNA, 1826 bp, Zea Mays
gttccgtatacataatttggttccaaatggaataacccaatgcagcagtagccgtctgcctcctcgctttccctttcgtccgtacgccgccgcctcgcaccgccgacagtcctcagtccagaactccagatcgagcctccctctccccagatcgggtcctaggctacagcagccgccgcatccgtcaccttcacaccgcgtgcgtgctctctctccccctccccctctccgtgcgacgactgggtgggctaccgccgccctacgcaaggtgccgagaacttcgccgatatctgcgccggagaagagcgcccaccagatcaggcgcttagaaggcgcgctggccggtggatgacgatggcgggtggcgggggactgaaccggtcttcatcgagggggcagctgccgccgcaagagctgcttgacgatctctgcagccggttccttctgaatgtgcccaaggaggagctggagtcgttcgagcggatcctgttcctgctggagcaggcgcactggttctatgaggacaactccgttgagcacaaccccaacctcaagtccctctccttcaaggacttcacttccctcatgttcaagagctgcactgctctccggccctacatcgcgcacctggatgatatctacaaggacttcaacaactacaagtttcgtgtgcctgtgtccggcgccatcatcctagacgacacttatgagagggatggaaggctggggccagctggagctttcctcgtggaaagaggaataaagatgaggaagaccacacatgtgctgttagagaagttctagaggaaactgggtgtgatgtttctagactattaaatctggatgattacattgaagtttcaattggacaacaaagggttcggctctacatcataacaggggttaaaagagacactgtgtttgcacctcaaaccaagaaggaaattagtgaaatttcatggcacagaattgatgacctcttaccagctagtgatgatgcagtatctcgtgcagtgaatggaatgaagctgtacatggttgcgccatttttgacgggtcttaaggcttggattgccacacatcctccaccactgcatcagaaaccagagacatctgctagaggtactgtgtggagggcgaagggttcgtcgagcggcacaaccccagtggagaatcctgttgctaaagcaggatctgacgtgcagcacgctgccgaccgccctggttgcagcttcagaaacttcaggtttgacaccgcaagcatcctgcaggccatggaggcttccttcctacgcacctagaatcctgacgaagcatcaacacctgcacccttgatgtgtatagaccgcggaccagcgctatctgtgttgtcaatctgtctttgtttcgtctttctcgccttgtatctgtactcttcacagcaatcctgtcagacgcttgaacctgattttgctgctgccccgtttggtggtggttgtccataaagttctaacgatggtgctgcaaagtctggaaagggccgacttgcgatcttcgtgctgatggctcggatggggccaatccattgggccgctggagccactgcccgcgttgttctacaagagttagttatcctcgcggttgacacagaaaggataaaattgcaagttgtgtctcagtttggcactcgaagggagcttgtgtgggtgttgttgttttttttttgtcatggcagcgtcgtctctaactctaaaggataccgcagtttctccaggtattttgtttaatagcgttatgtacctactcagttgctgtgccatgatagtgtagcctctcaaaaaaaaaga

SEQ ID NO: 20711 - DNA, 1272 bp, Zea Mays
ctcaattggagctgcgccttttgtagcaacacaacagtagagggtgaaaaaaatttgaaaaatgcaaagctgacggactttaataattttctgaacacgccacgtctatcggtatcacaaactccaagctttccaactgtggcttccttccctgaagtgaaaaataactcagcatttggggtttctcaaaataatggaccaccagtgtttagtagtttcagtcaaattggagtaacaactaatatgggacctgggtccagaactacaccaggagtcccaaccaatactctttttggtcaatctacccaaccaagccatccaacatttcctgcacctacttttggtcgttctgatatgaaatttggagtttcaggtccatttggaagccagatatcacaacaatcatctgggacttttcaaggctcaaacatgtccagttttggcaatttctcaaagcctcatgccagctaccagcagtccccttcctcctctagccatcacagagacattgataggcagtcacaagatttacttagtggaattgtggttcctacaagtgccacaaatgaagctcctgttgaggacaataaaaatgaaaatcaggatgatagtatctggttgaaggaaaaatggtcaattggagagattccgctgggtgaaccgccacagaggcacgttagtcacgtgttttagcaacattcttgtatttctgtgtcgtggaaccactgtcaagtcagcttcactgtctccttccatattgtcgggacaccatcttacaatttctcctccaggttcataaccataacacgtcaaattgggggcataaaatgcacctgaaatgctgattgggcagcgtagaaacttcttgtatcctgcatcacatactctgtctctattgttttcttgttagctccatgtacttcgtcacattcagggctcgtaatatcccgatttcttgttttagggtttgttgagtttagctgtgggttttaaaaagccgttgcagctgtttttttttttgcggaaattgtaccatacatggaagcagtagtttttgaagaagcggaatttggttctatctgtgtgtttttttttgaaaagggggaggggggcttggcgatttgtttgtttctcttttttgtagaagagacggtttctaaaagttaaactgtacgtccactaggtcaatcttgcagggtttgtgattctagggtcctttgcgcatgcaagacgattttgtttctagaagttggtcgattaattgttgagaaa

SEQ ID NO: 20712 - DNA, 1395 bp, Zea Mays
gcgctactgtaggatgacagggcagaaaggatcttatagactactacaattcttccaccgtaagagattgggctggaagggctacagcctttaaagcaacagccggtattgcagatggtttggcaccaacactatacaattcagctccccaggttgcgctgttctcttctcgaggacctgatgtgaaagattttagctttcaagatgctgatgtccttaaaccagacatacttgctcctggcaatctcatatgggctgcatgggcgcctaatggaacagatgaatcaaattatgctggtgaaggatttgcaatggtttctggaactagcatggctgcgccgcatattgctggcattgcagcactgataaagcagaagaacccaaagtggagcccctcagcaataaaatctgccctgatgacaacggccaatacactggacaaagggagccatcctcttagagcgcagcagtacaccgcatcagaaatgatgacactttcacgggccacaccgttcgattgtggcagtggcgctgttaacccaaaaggcgccctcgatcctggccttgttctagacgcaagccatgaagactacatcacgtttctgtgctcgatccccgacgtcaaccagagcgaagtatcaaacatagccggctcggcttgcaactccaactccaagggacaacgccccttcgacctcaacatcccctcgatcgccgtctctcagcttcgaggcacggtggtagtgaagcggaccgtcacgagcgtgtccgacgaaaccgagacctacaccatcatgacaaggatgccgccagaggtcgccctggaggtgacgcctccggcggtgaccgtggtccccggagcatcacgagagataactgtgaccctgacggcgaggtccgtgaccggcacctacagtttcggtgagattgccatgaaaggtgaccgcggtcacctcgtcagaatcccagtcgtagctatgggattcaagtaggtagaagacgactgtgacatctcctagggagtagaggataggaagagcgagttgtgcctctgtaatctgaggtcttgagctgcagaggaacgttgtataattttttcataggttgtagagaataagagttggcacaatgctgtaagtgttatgcatgccccctccaggttgtaaaatatatttgggtgccctaaatcctctgacatggtgactagaggacctcttgtattgtagtccagccttgttctgattctctaatgcatgaaggtttgaatctcatctggttttcttctatgtcgtttcatccagaattttaattcgtattgtgggcttaatattaaaattccccaaatatgggagatgtgaaatttcttgtcaggatggcacaatttttgggactttg

SEQ ID NO: 20713 - DNA, 2599 bp, Zea Mays
tgcacgttctgcctccggcaacccgccccgcccgcggccgcatccctcccgcatcccgcggccgcaccatcaacggcgcaacagccgcatccagtccctcccgcatcaacagcgtcgcagccagtccctcccgattcgcgcttaatccccgcatccagtccctcccgcatccagtccctcccgcggtgcaatccagacgcaaacaactccattgaccccgattcgcgtacatgctctctcacagcaatccctgctctctcctcgccaacgcctctcgataaactccatggaaggttcacactgatgcgctctgattccttgctccacgctctctcctgctctcgcgctctacatggaaggtgaggccgacgcccaaatcgacggaatccctgctctgcgctctcccctgctcccgcgctctacatggaaggcgaggccggcgcccaaatcgacgggatcactgctcggacaggattgcggcctcgatccgcgctctccagattcgcctagattgacagcgtccgcgccgcgcttgcccagatcgatggaatctaggtctccagatgcaagtccggggctcgctacccgtggaaggcgaggagagacgacgcatcggctctcgatccgtgctctacatggaaggtgaggcagatcggggggagtgtgtagagaaatccaagcgaaaccccgcgagagcgaggcgacggcggacggaggcgagtgggtgagccgcgggcgagagacgaggtagcgggctagcgcgatgccgtcgccggttgtagtggccgcgacgctgctggtggtagcactggcggcattctgcggcacggacccgctccggacggacagcatggtggacttcccggggtttgagtcccacctcgtcgacctccccaatcccgccgagatgccgacgcacgcggatgaatgggagcggctctgtggagccgatgtgcggttctgcggcgaggtgcaggggcccgagagcatcaccttcgaccagcagggccatacacgggcgtcgccgacggccgggtcgtcttctgggacggcgagcggtgggtcccattcgcgatggccttcccgtgctggacgcaggagctccacggagggccgaaggcctcgccgctggagtatctcccagcgagcatatctgcaaccgcccgctcgggctctgtttcgataagactggggacctgtacatcgccgacgcctacttcggcttgctcaaagtccgccgcgaggccgggctggccacgctgctcgcaacggaggccgagggcgtgcgcttcaacttcaccaacgacctcgacctcgacctcgacgacgagggcaacatctacttcactgactctagcattcactaccaaagacgtctgtgatgccatgccctcgctctcttccctctgctttgcgcgcttggttggatgctcacttgattcctactgaccacggggatggtgatcgactgattgttaacatcacttgattcctctgctttatattgattcctactgaagatggacaatataaaaacctaaaatggaccaattctttctttgagggatacaaccctactctggtgtaacttatacttgttctagcacttggccctctgatctggtgaataagttatgcagaagaaaaattatgttttattttatatttaactgtactttgttgtagcttgtaggtactgatcagagggccaggtgctatccacgaatgatagtgtaatgtctaggaacgatagctgatttggaaaacctgcaaagtctattcacaacagtgatatataatggtcacctattatgaagaaatagtgaatgggagaagggttgagttttggagccggtgcatgcaaatcatataccagaggggaacacgttccaaaaccggagcgtttcatcaccagccccagtaactatggtctgttggtatgacctcgctgaggttgttgccctcaccgagagcatcggcaagccgctcgccgaggtgctcaaggagctcgggaagagggttccagactcccttgtgaagacccgcatcgaggatgatggcttcactatcaagtacattcctaggattacccggactagatttagctcttgtgattttgcattctactacattttacttgttctgctgcattgacagctcgagaagagggttccagactcccttgtgaagacccacaactagagaaataggatggagagggaaatttactaagagaggacgtgtaacaaataaggccaggaattattagaatgaatggaaaatgtcctcatacacctttggagattttatttcgcttgtgggcaagtggtgatcagagtttgtctctatcggcaactgtttggatcactgtttaactaaatcctacaatacataccttgccagtaccaatcttgtgaatgacagaaacacaaagcatatttattttctgatggactgcctgtagagctgtattctcttgatgttcagaaatcatatgagagggcaataatctccgtggagcaactgaatgctattcttagacaggcttctaaaaccaaggaaaagtgtcatagggcctcattaggtatatatattatat

SEQ ID NO: 20714 - DNA, 3373 bp, Zea Mays
atgtccggattcagtgccgcggccaacgcagcggcggctgagcggtgcgcgctcgcgttccgcgcacggcccgcggcctcctcgccagcgaagcggcagcagcagccgcagccagcgtccctccgacgcagcgggggccagcgccgccccacgacgctctccgcctctagccgcggccccgtcgtgccgcgcgccgtcgccacgtccgcggaccgcgcgtcccccgaccttatcggaaagttcacgctggattccaactccgagctccaggtcgcagtgaacccagcgccgcagggtttggtgtcagagattagcctggaggtgaccaacacaagcggttccctgattttgcattggggagcccttcgcccggacaagagagattggatcctcccgtccagaaaacctgatggaacgacagtgtacaagaacagggctctcaggacaccttttgtaaagtcaggtgataactccactctaaggattgagatagatgatcctggggtgcacgccattgagttcctcatctttgacgagacacagaacaaatggtttaaaaacaatggccagaattttcaggttcagttccagtcgagccgccatcagggtactggtgcatctggtgcctcctcttctgctacttctaccttggtgccagaggatcttgtgcagatccaagcttaccttcggtgggaaagaaggggaaagcagtcatacacaccagagcaagaaaaggaggagtatgaagctgcacgagctgagttaatagaggaagtaaacagaggtgtttctttagagaagcttcgagctaaattgacaaaagcacctgaagcacctgagtcggatgaaagtaaatcttctgcatctcgaatgcccatcggtaaacttccagaggatcttgtacaggtgcaggcttatataaggtgggagcaagcgggcaagccaaactatcctcctgagaagcaactggtagaatttgaggaagcaaggaaggaactgcaggctgaggtggacaagggaatctctattgatcagttgaggcagaaaattttgaaaggaaacattgagagtaaagtttccaagcagctgaagaacaagaagtacttctctgtagaaaggattcagcgcaaaaagagagatatcacacaacttctcagtaaacataagcatacacttgtggaagataaagtagaggttgtaccaaaacaaccaactgttcttgatctcttcaccaagtctttacatgagaaggatggctgtgaagttctaagcagaaagctcttcaagttcggcgataaagagatactggcaatttctaccaaggttcaaaataaaacagaagttcacttggcaacaaaccataccgacccacttattcttcactggtctttggcaaaaaatgctggagaatggaaggcaccttctccaaatatattgccatctggttccacattgctggacaaggcgtgtgaaactgaatttactaaatctgaattggatggtttgcattaccaggttgttgagatagagcttgatgatggaggatacaaaggaatgccatttgttcttcggtctggtgaaacatggataaaaaataatggttctgattttttcctagatttcagcacccatgatgtcagaaatattaagttaaagggcaatggtgatgctggtaaaggtactgctaaggcattgctggagagaatagcagatctggaggaagatgcccagcgatctcttatgcacagattcaatattgcagcagatctagctgaccaagccagagatgctggacttttgggtattgttgggctttttgtttggattagattcatggctaccaggcaactaacatggaataagaactataatgtgaagccacgtgagataagcaaagcacaggataggtttacagatgatcttgagaatatgtacaaagcttatccacagtacagagagatattaagaatgataatggctgctgttggtcgcggaggtgaaggtgatgttggtcaacgcattcgtgatgagatattagtaatacagagaaataatgactgcaaaggtggaatgatggaagaatggcaccagaaattgcacaacaatacaagcccagatgatgtagtgatatgccaggccttaattgattatatcaagagtgactttgatataagcgtttactgggacaccttgaacaaaaatggcataaccaaagagcgtctcttgagctatgatcgtgctattcattcagaaccaaatttcagaagtgaacagaaggcgggtttactccgtgacctgggaaattacatgagaagcctaaaggctgtgcattctggtgctgatcttgaatctgctatagcaagttgtatgggatacaaatcagagggtgaaggtttcatggttggtgttcagatcaatccagtgaagggtttaccatctggatttccggagttgcttgaatttgtgcttgaacatgttgaggataaatcagcggaaccacttcttgaggggctattggaagctcgagttgaactgcgccctttgcttcttgattcgcgtgaacgcatgaaagatcttatatttttggacattgctcttgattctaccttcaggacagcaattgaaaggtcatatgaggagctgaatgatgcagccccagagaaaataatgtacttcatcagtcttgtccttgaaaatcttgcgctttcaattgacgacaatgaagacatcctgtattgtttaaagggatggaaccaagccttggaaatggctaagcaaaaagacgaccaatgggcgctctatgctaaagcatttcttgacagaaacagacttgcccttgcgagcaagggagaacaataccataatatgatgcagccctctgctgagtatcttggctcgttactcagcatagaccaatgggcagtcaatatcttcacagaagaaattatacgcggtggatcagctgctactctgtctgctcttctgaaccgatttgatcctgttttaaggaatgttgctcacctcggaagttggcaggttataagcccggttgaagtatcaggttatgtggttgtggttgatgagttacttgctgtccagaacaaatcttatgataaaccaaccatccttgtggcaaagagtgtcaagggagaggaagaaataccagatggagtagttggtgtaattacacctgatatgccagatgttctgtctcatgtgtcagtccgagcaaggaatagcaaggtactgtttgcgacctgttttgaccacaccactctatctgaacttgaaggatatgatcagaaactgttttccttcaagcctacttctgcagatataacctatagcccatctggaataatctgttagatgc

SEQ ID NO: 20715 - DNA, 2434 bp, Zea Mays
ggagaactcatgatactcacatctatagatgattttgcaaattcagacagtaactgtagcaccgacgtatactgtatacacacacaaaaaaaaaactttccgtttctgatttccgtacaaggggtacaacgacattccaatccgaatactccgacactgccctactttttgtggttagcgcaagggtcagtgttctaggttggttgcttcagtatcactacttttcctagagctgggccacatagccatgtgcaggcaggagtgttgctagtagccctgccagtgtactacagactcgataggtggccataaaagaggagagccaataagcacaatggcgcctgaagagaggatgaagacagaggccagtcacaaggcgatagcagcaggtggtggcaagatgacggtgctccactctccggttggagttaggagcatcgtgacctccttggtggctttcttcatcctagccagctccatcgtgttcctcctcgacagaggccaggaagagcaagtgcaagtggcagtcgagcatggacgccaagaagtgcaggtgaagctggaatccgggctgcaagaaccggcgataagagggacaacccaagagggggacgccagcaacgaggagtgcaactggtccaggggaaggtgggtgtacgacaacgtgtcccgcccattgtacagcgggctcaagtgctccttcatcttccccgaggtggcctgtgacaagtatggcaggaaggatgccatgtaccagcactggagatggcagcctcatggtcatggatgcgacctcccaagatttgatgccatcaagctgcttgaaaatctgagaaacaagagaatggtgtttgtgggcgactcagtcaacaggaaccaatgggtctctctcgtgtgcatggtggaggcctcaatacctgacgacaggctcaagatacgcaccttcaatggctcactcatctccttcaaggcattggaatacaacgcaacgatagatttctactggtcaccactactggtggaatctaacagcgacaaccccattatccaccgggtggagtaccggatcataagggcagacagaattgagaagcatgccagtgtctggagggatgccgacatcattgtcttcaattcttacctgtggtggaggaagcagaaggatgacatgaggatgaaggtcatgtatggttcattcgaagatggtgatgcaaagttagacgagatggaaatggtcgatggtttcgagatagctctcaagaaactaaccgaatggctgggggagaatattgacaagaacaagactaggatatttttcgcaggatcgtcaccaacacattcctgggctagcaactggggtggagaagacaagaacaagtgccttaacgaaacagagccgatctacaaaaccggatacaaagctgcaactacagactacagcttgatggccaaagctaagcactactttcgaacattggagccgaaaggcatacatgttcagatactgaacatcaccgagctgtctgactaccgcaaggacgggcatcctacggtgtacaggaaacagtttgctcctctgacgaaagagcaaatcgcagacccagccagttacgcggattgcacgcactggtgcctccccggagttccagatgtctggaacgagtttttatatggctacctcgtgcaaaaatgatgtacaaaactgtcagtcaggttagggagagaggagcaacctgaatctgctatcgccacaggttccagttgtcgtcggcccgccgcaccgcgtgcaggaccaccccgccatggccaccggacaccctcgccggcgcgtcgcgcagttacaggctacagctactacctggaaggccaggccagccccagcccatgcagtaacacttggatgatgtggcccgacaacggcccaagtttaacggtctcaaagcttagaggcctcacattgccaaaattatgaataaccgaaatggtacaagtttcttatatatgaaacgcggttcaaaacacggcttctagggctatccacgtcgacttttattttttcagccgttagattcacaatcgaaggacaagcaaacgcgatgtcgtttctatcctccacagatgacacgatgtttccagaaatcgcttcttctttccttcctctgggcatctctctcccgaggctacgggcctacggcttcgatgttaagccagtggagttcctccgcagctgacggcgatggcggagaccacctgcttctccgtgttacgccacagatcttggctgccacggtctcgcgcttgccgactgtaatacccaatttgtaaattgtaagaaataatacaaatggagaaaacaatttctccttatgtgagtttaacctttgtgcatcatcacatgtgtacaccctaggtataaacaaataattaataccct

SEQ ID NO: 20716 - DNA, 1753 bp, Zea Mays
acgacgaaactccaactttaaaggttcacaaattggatccgctagttcagcgtgctttagctgctgctttacgatccaaagatcttcgaggtttgtatgacaggattccccctcatctcgagtcaaagcttatgccatttcagcgtgaaggcatcaggtttgttttacagcatggtggcagagccctgattgcagatgaaatgggtcttggaaagacactacaggcaattgctgttgcttcttgccttcgtgatgcctggccagtccttgcgattcagagttggcttaacatccctgtggaagatatcttggtggtattgccacatactggaggatcacataaagcaggattcagagtggcttactcaaactcgaaaggagattttcacttggatggggtgttcaatgtgatatcttatgatgtagttcccaagatacaaagcacacttctggatttggatttcaagattgttatagctgatgaatcacattttatgaagaatggccaagcaaagagaacagttgcttcacttcctgttttgcagaaagctcaatatgttgttttgcttagtggaactcctgctttgtctcgcccgattgagctctttactcagatccaggccttgtatcctacagtgtacaagagtgttagtgagtatggcaatatatattgcaagggtggttttttcgggttgtatcaaggtgctagcaatcatgaggagctgcataatttgatgaaagcaactgtcatgattcgtaggttgaagaaagatgtcctttcacagttgcctgttaaacgtagacaacaggtctttctagatttaagtgagaaagatgtgaaaaatgtccgcgctctgtttattgagttggagactttgaaggtcaaaattgagtcctctgactccaaagagatgatcgactctctcagatttgcttaccagaatattgtcaataagatctatactgattcagctgtagccaaaattccagctgtgttggatttcctgggtactatgattgaggaaggttgcaagttcttaatatttgctcatcaccaacccatgattgatgccattgagaaacatctcttgttatccatcaaagccggaggctacgggataactttgacagcagcgagcacggtaatctttgccgagttatcatggactcctggggacatcattcaagctgaagatcgcgcgcacaggatcggtcaggtctcgtccgtgaacgtgtattatcttctctcgaacggtactatagatgatcttatgtgggacgttgttcagggcaaacttgagaacctggggcagatgctggacgggcaggagaagacgctggaggtttcccagagggactgcaggccaagcccctcgaagaagcagaagacactggtcggcttcctcaagcggcccagcgcgtccacgtccgcggaggagggtatgcccagcacttaatgaagcagcctcggatctgaggcgcggtcgtggcttgtgagcgaaccagatcaggtcataggcagccagcagccacaatggtgttcggctctatcacgttgtaacacttctccctccgtatttgctcgctctttcgtttcctgagagatgacagatgtatgcgtttggctgacgaagggaagaaaaatgagcaaaacttgaagtatttgttagggaaggatcctaaacactgaattatatgataaatttaacataattgcgtttgctaaatcagaatttggtgtaagccagccaat

SEQ ID NO: 20717 - DNA, 77 bp, Zea Mays
agggtgaggagggtgagcaggaggctcctcagcaagatgctcatgtgcagggtgaggagggtgagcaagaggctcat

SEQ ID NO: 20718 - DNA, 1303 bp, Zea Mays
caatagagtaccaaaaaagctaaaaggttgatgaagtaggtcttgagcagatgaagattataatgcagtatggtgttgggttagaaggtgttgatgtaaatgctgctacagaacacaaaatcaaagttgcacgaatacctggaagtacgacaggaaatgctgtctcttgcgcagaaatggcaatctatcttactctaggcattctgcgtaagcaaaaggagatggatactgctgtgaaccggaaagaccttggtgttccagttggagatacattatttggcaaaacaatccttatccttggatttggggccattggcatcgaggttgccaagaggctaagaccctttggggtaaaaattcttgctaccaaaagaaattggtcatcggacacattgccatcttatgttgatgagctagttgacaagaaaggtgggccggaagatatgtatgagtttgctggtgaagctaacattgttatagcatgcatgaccttaaccagcgagacaattggaattgtggatcataagtttgtttcatcaatgaaaaaggggtcatatctggtcaacattgctcggggacgcctgctggactacaaggctgtgtttgatcacctggaatcgggccatctagctggtctggggattgatgttgcttggatggagccatttgatcctgaggaccctgttctgaaattcccaaacgtcattctaacgccccatgtggccggcgtcaccgagtattcctacagaactatggcaaagtctgttggtgacaccgcccttcagcttcatttaggcgaggcgttcacggaggtagagttcgtcaactaaaaaaccgtccaggcggcagccgtagacgcatgccattcgtgggctatcggaaccgctgatgcgatcatttgtagagaataatggatccgcgacttgtaagaataaacatgtagccagatgtttgatggtgatctccatgagaactctgccactggctgccttagctggtagtggtagcaagtcattttctcaaacattgccttctctttctctgtatcactgttgtcgtcatgatcacaactttctttgttagccgggttggttaggtgctctaggtaacactccttaagtttgagttcagttcaattcttaattcgactgaatttcaggctgagttttaaaaataatacctttttttttggtgttgttcacgcactagcctcagctagccgtcgtagtctcggacggcgattaggaggtcagatcgtgaacactgtcatttccatcatgtacgacgaatgaggttttcgcga

SEQ ID NO: 20719 - DNA, 664 bp, Zea Mays
ggagggagtatattcaaagttttcaagttagtgcttctaaagctttcagagtaggcatattcttcgacacgtacggggaatactacgaggacatgagagagttccaccagcaccttcctaagctactgaagcccggaggcatctactcgtacttcaacggcctctgcggcgacaacgcgttcttccacgccgtgtattgccagctcgtcgcgctggagctcgcgaaccttgggtactcgacgcagttcatccctctgccggtcaaagattgcctggcggaggaggtctggaagggcgtgaagcggaagtactggcaactggacacctactacctccctgcttgccagtcagaatcagaatctactatcaagtagtgatgagttatttctagtctgcgttctgaagttggttgtctgttttgagctacgtacatttttgttctgtgttacgaatgttaaccctttcactttcgggagctgaattttctttgggcgtgtggtgatttgccctctctcgtatgctcctgacgcgtgcgtgcattcgtggttcgaaaaatagaattgtcatggaaaaatttggttccctgacgatcattttccttgccatgttggaccgcgtggctctattcagaataggcttccaaatcactcacctactgccgcct

SEQ ID NO: 20720 - DNA, 462 bp, Zea Mays
aacttgggtagcacaaacccttgggcctagccgccacggcgcctgatgagtgaacgaaacgggagacgataacgagacagcaagagccaagaggtgagagaaggagtgaaggaccgaggagggaaacagagaagatggcgacgaagcgcgacaccgagtcggacggcgaaggctccaaccccgtcggtggtggcgcgactccgccgcccctagccgccgcccctgtcgtatgcctcctccgctccgccggggacttcggtggcggcgccttcgttggatccatcttcggatatggacaaggcttgatcaccaagaagggttttaagggctcattcagcaatgcagggtcctctgccaagacttttgcaattctctctggcgttcagagtttggttttgtgcttgttgcgaaggctacgtggcaaggatgacagggcgccacaggcattgctccaaagctgtg

SEQ ID NO: 20721 - DNA, 187 bp, Zea Mays
gccagggccacctcctccgcgaccgcgcgccgcccctctccgccttctctgcggccgcgccacctcctctctgctacatcgaccaacagctcagaaagcaacgagcgttccagtggtatgacatgatcccacagaacgctttgaggtggatcctctttcccaccaagtcaaggtttgtgaattcggg

SEQ ID NO: 20722 - DNA, 2093 bp, Zea Mays
ctcttctcagccgggacatcttagaaggttggaggaaaacatgaagtgcattgtttttgtgaaaagaatcattgtcgcaagagtagtagttcaaattctccaaaatctgaagtgccttgatttttggagatgtgagtttcttgtgggatgccactcggggttaaggaatatgtcaagggataagatgagttctatcattgaaaagttctcttcgggtgaggtaaaccttttggttgctactagtgtaggtgaggagggacttgatattcagacttgctgccttgttgtgcggtttgatctccctgaaactgttaatagctttatccaatcaagggggcgtgcccggatgagtaaatcgaaatatgtttttctcttggagaggggaaatcattctcaggagaagttacttgatgattatattactggtgaaatcattatggataaagagattaacttgagaacatcaaatgatatgttcaattgccttgaggagaacatctatcgagtcaatgatactggtgcttccattagcactgcttgcagtgtatctctattacatcgctactgtgataaccttcctagagatattttttttgttccttccccatcattcttctttgttgatgacgtcgatggaatagtatgcaaattaattcttccaccaaatgctgctttccgtcaagtgaatggtcaaccctgtccatcgaaagatgaagctaagagagatgcatgcttgaaagcatgcatcaaacttcatgaactcggtgctttgacagattttcttctacctggccaaggctctagaaagattaaggtatcaacaacaaataattcagaaagcaacaaagacgatgatgaaagttttagggaagagctttatgagatgttaatccctgcagttctgagaccttcaagatgcaaactagactcctcgtttaagttgcatttctattacatagaatttattcccataccagcagatagacgatatcagatgtttggtctttttgtgatcaatcgccttccagaggaatctgaaaagttggatgttgaattgcatcttgctcgtgcgaggattgtgaaagcaggaattaaatatttgggaaagattgagtttaacaaagaagagatgatactcgcacacaattttcaagaaatgtttttgaaagttctcctggatagatctgagttcacaccatcttatattttgttggggaatgatggtgcattggacatggattcaacattttaccttttacttcccatcaagcagaaattctatggtgataatatgattgattggccagcagtaaagcggtgtttatcatcacctgcatttcaagatccaatgggtttgtctctgcatgattcatatttaccaaatgagtctttgaagcttcttggtggaacatacaacaaagctgatgtgattggcagtttggtctatactccccacaccgacctgtttttcttcgttgatgccattctggatggaacaaatgctaaaagtgagttgaacggtgcaacgtatgcagaacattttaaacaaaggttacatatcaagctttcccatcctgagcagccgcttttgaaagctaagcaactcttctgtctgcgtaatctgcttcataaccgacaactagagagcacagaatctgaggctcgtgaattgatggagcactttgtggagttacctccagagctatgctctttgaagataattgggttctcaaaagatatgggcagttctttgtccttgctaccatctctaatgtatcgcttggagaatttgttggtggctattgagttgaaggatgtcatgtcatcttatttcccagaggcttctcaaattagtgcctcgggtatccttgaatcattgactactgaaaggtgtttagagaggatctctttggagcgattagaagtcctaggtgatgctttcttgaagtatgtagttgggcgtcataactttatttcatatgagggacttgatgaaggtcagttgaccaggagacgttctgatatagtgagtaattcgaatttgtatgagttatcaattagaagaaatttgcaggtgagttgattgtatcgat

SEQ ID NO: 20723 - DNA, 913 bp, Zea Mays
cttcaacatcctgtctcaaaatttgagataggaaaagtcttactgcaagcacaatcagcttccctctggaagtagcaaggaagcggttgatggccggcgccctgcaggggaagtgcccgcctaacatgattgccgccttgtcggaggtgatccaggaggagggcgtcatggggctttaccgcgggtggggggcgagctgcctgaaggtgatgccgaattctggcatcacctgggtgttgtacgaggcatggaaggatgttcttctggctgacaggaacaagccacgctctttagcgaactaaacaggccgtccttgagcaatggaggcgttgctgggattcctgatctattttcagttttggaatcccggctgcggcgagtggggtacatagggcgcgtttctctcttttttgattgactgatgagtggtaagcgttttgttgtgtcatcggcacacagacaaacatcattaatgtgtcaaaaaactaagcgaaaagacaaacccttctgtatttcctgagtggaaagatggggaacctaaccctacctggagcctctgcaggaaccttttccttcatctaccaatcagatacagggagcttcaggttgacagatcgcaccaactgaaggacgaacctgttctgcgacaacaagcaggataagctgaggaacctgttttgcaagctaagttgagatgtaatttttgtcttgggctgggtggttatagtgttttctttcggcttttcttttctttctgcctcaagtctgaagcgaagtttataaattatttttcctcggctaatataatttgggtggcaaagcttttgccgcttccttaaaaaaagagtggtaagcattttgttgtgtcatcaattctgaattcttgtgctgttataagaaaaaaggatttggg

SEQ ID NO: 20724 - DNA, 3449 bp, Zea Mays
ggttttctcacggtcacggcttgcttcgtctcccttccgtcgccgaccgagaaggagtgggaagaaatggattggaaaagctagggttttcgccatggccatcgcccacctccagctccccgttgtcgaatccattctccccacgctctcctcctagctgcggcatctcacatcgccgaaaaaaggggcccgcccgcttctactccgctccccaattggagggtttccctccccttcccccaaatcgaatcgcagcattacccgccgagcaagcaacccacacccactcacccgcctttcaaggttcctactgcgctggcgatccagctgggggcgagcgcagcggtggcggccggataatccaatgtgtatgctctgcgccgtgcagcgctggtcgcggcgcgtcgccaccatgctcccgtggctcgtcgtcccgctcattgccatctgggctgctacccagctactcctcccggccgcctaccgcttggaggtcacctccccgcgcctcgcctgtgtctccgtcctcctcctcaccctcttctggtatgagatcctcctcccgcggctctccctctggcgcgctcgtcgctccgcgcgcctccgggaggagcgccgcgcccacgccctcgagctccacaagctccgcaagattgccacccgacgctgccgcaactgcagcaacccctacagggagcagaaccccggcggcggcaagttcatgtgctcctactgcggccacgtctccaagcgccccgtgctcgaccttaattcgaccgggaaggcctcctccaggtggccctgcgctcaagattgtggagactggctcgacctgcgctgctctgccagccccagtacctccttctgggggttctcatggcacctactgttgtcgttttttacaacaacagtgaggtggctcttgaggaagacattcagatttacatcgtcaggtgacggtgagggcttgggcccagatggtaagaggttggcaaaggcaggggataatggaggaaaagctgaggagagcagggtcgagaaggcgaggaggaaggcagaggagaagaggctggcaaggctggagagggaaatgctggaggaggaagaaaggaagcagcgggaagagatgacaaagctggtggaggaacgcaggagactgagggatgagaaagctgcggcagaggagcggtccaaaagcgctacccctgttggggagaaggatgctaggaaggaggcagagaggcggcgccaggagaggaggaagaaagaggacaaggggccaagcaagagtaattcagattgtgaggacattgatagacggttgggccgagaaggcgacatgaagcgggccttcgatagaaagattgagtctgacagacgtgagggttacaagcctcattactttgaagctaacaatcgtagtaataagacagtggagagcagggcaaagtactttggccgtatgacgggtggtttcttatcttcgtcaagagggtttggtggtggttccttctttggcagaagtatccaggcccctgcccctcaagttaacaaggttagtagacccatagttcctgcaactgaccagggcaatgcagccaaaagggatgtccaacatgcatccacacaagctgcagccaaatctacttcagctggggaaaccagaaattcatggactaattttaatcgaccgcccaaatgtgcagccagcccctaccagctttaaaaagtcatggcatcagctgtttagtcgttcagcatcagtctccccttgtcctgatgctacaacttcagctcgtgatacgaatcagaagccagagccaaatggagcgcaactaagcaatgcttatacattcctctttcagtaccctcctcttgacagcaagccaagttcgagccagtccatgcaatttccaggttttccaccgcttaatggagcacctcccaataagccactacctcattttcctgctggacatatgccattctatgatgatgcagaatctgtggtatttgaagatccagaacagtttgaggacccatgctatgatcccgatgcaatcgcattgcttgggccagtttcagagtctttagataatttccctccagacttggattgtggattcatctcgagtgatgttgtcaaggaatcacatgggaggccttcaccaattgagtctcctctctctaggtctcgtatggttgaagaaaatcctatcaagcccctgcacttgttagttgcaaaaaggcctggtggtcctattcagcctgaggctagcagtgagcaacgcacatggcaaatgtggagcacaccattggttcatgaaagtttaggtctccaaggtcatcaaagtcagtggcttcaacagacaaatcaattaaactatagtgccaatgttttcaatggcagaacaaacgcccccctgggtactggtttgaatgacagtgatccttggctgcagaaagcacctttcaagcaattgccacctgatactccaagcctgttccttccacatgaaataccagggaaattacacaacgacttggtttttgggtctccaaacaaatcagcacgtgaacacccctttggatcacctggtccttcttggcccaaggaggaactgtcgttgagtggagcccaggaaggtggtggccatttttcattgctgtcgggcgcacatgttggcggcagcggagacttattttgctccacaagtcctgatgtgcagtccttggtgtggtctttcaacgaaaaggagacagcatagcagggacggactttgttgtggaaggaaatggaggatgtctgactgagccaaaacctccttgcctcctctgagtgtcacagggcggggttaatcggcgaggagataagtagtctccctccatgtcccttggcgcaaagaagatttgggggggggggggggggggcattttgtttagtatcgactcctctcacctgacctgttaccacgcgccatcttactttcacctgatgggtcgttgtatgaactctgggattcaatgaaaaatggggctgatttgtttcaaggtggctgttgggctgtagtaagtattccttggttgctggatgtagatgctaaggttttcagttagtttctccgtgacatacagtacaaagctctgctacatttccagtacaaacaagccaccacccaagatgtgcagtgaacctctctggtcggcctacaaggcaccgacgacggtggcggcgcgcatccatgacggcggcaaactctccctctctgttcgtttctcgcagtggcggttctcctgtccaaggcgctccagatcacacggaggatcccaataaacgcctgacggctacggaatcccgaatccgtaaccacccaagagcgcaattttcttcttttcaattttcctttctattccttattccaatttaaatttccaatttcaagtacaaa

SEQ ID NO: 20725 - DNA, 1191 bp, Zea Mays
aagcatggggccaatgctgatcttgtgaatgctctgaagctggtccaacctatcaaggacaagttttcaagtgttacctatgcagatctgtttcagcttgccagcgccacagctattgaggaagtaggtgtccctaaaatccctatgatctatggaagggttggcgttattgcccttgacaatgcgcgccaaagtagcctgcttccgacccgcacatctccctccggttctcgccatgggcgccggcgccaacaaccacgaggagtcgagccccctcatcccagctgcggtcgccgcccccgcgtacgagaagcccccgcaggctccggcgccggaggccgccaattactatgccgacggggtcccggtcgtgatgggcgagcccgtgtcggcccacgccttcggcggcgtcccgcgggagagctggaactccgggatcctctcctgcctcggccgcaacgacgagttctgcagcagcgacgtcgaagtgtgtcttcttggaacggtagcaccatgtgtgctctatggtagcaatgttgagaggcttgctgctggacaaggcacatttgcaaacagctgtttgccttacactgggctgtatttgcttgggaactctctctttgggtggaactgccttgccccatggttctctcatcccactcgtactgcgccgcagggttccccaccctggattcaacaatgggcactccgtctttgtcatgatgccgcccatggagcagaccatggggcgtggcatgtgagctattccaccaccttccctaccctagttttatctgtgcttcccgtggtttatcatctgctgctgttggccttgatgtgtgatgtgtcgccgtcagtaaatacgagtttgtgatatgaggtcgtgctgggaactttggattgtttgcttcttatcgactgcagtttggattctggacagtcacttatctcctgtgttactgtgtttgtacggtggtcctcgatgggcctgtcaatgtgaaatgcatttcgtcgtaccttattctgaatgtttttccctccaaaatatgagccccatacactaatatggcggtagctctcgtcacaaaccctcggatacagcagcgtttgtgcgtggaaagaaaaatcgggtgtcttaggtatgttcggttatgtctggattaaagtagattgagggtccgttcgttaaac

SEQ ID NO: 20726 - DNA, 1718 bp, Zea Mays
taatactgggatctatggatttacctatccttcttgatgtctggaatttttttgcatgattttcacgacacccaaggaggaggaaatccaagcaaagaagaaaaggctgcacatgaagaggctcaagaagcagaggcttttggctgaagtcaagttcctgcggaagagatacaaatccatgtctgagaacccttctcagacaattgtctgtagagtgaggaatccagcaatgtcgtctgcatcctggacagctggttcggcaggtgatacctggcaccagtcggttcgtgctgccgggagctccagtagaagccagctggtgcagagaacacacggtggttctccaagggcatctccagtgattgacctcaatgaggcctgtgagccgggttatgaggagatggaaatcgaagggcaacatggttacatgtctcctctaggcgtaaacaagtcaaagaggtaccctatggaaggtgctgctgccagcccaagccagatgagaatgcatgtgttctgggatgtccagaatccagcagggcgatctggaaagaggaagatctcatggcaggatcagttggccctgagagtataggtaaatgacaatgtttagctctagtacagcagtagtattctagtaggatcagtatgtgtcattgctagcctggtaaatgtaaagggatggctgggacaatctcgatggttatctgttcatgtttagtgatgctggaaacataggctgtctcacgatgaagtaaagtaggtgggcgtgtgtgtgatcaatcaccaaaatcttatggttcatactgttatggagtgctaatggttcaatgagagatgtagcttccaaggaagtaatctcctgttcatgtagagttggaaaaaatgtgtgcctgctctcttgacataaagttctagaaggaaacaatttttgcaatcttggtaaggtgttgtgaactatctgttgtcgttattgtacatatagccataatcaacgaacatcattatcacgtttaaatttatagaataaaataacttacttaaatttatagaataaaataacttaaataggaaggagagcaggtggcagagaaactgtaccttcagaaaagttggtggagcacttcagaaaagttggtggagcaggtcattagatgcttcagaaaatcgtgaaactgaagctataaatttttagaagacatttttcattttgataagtcattttgtttattatttagattaaaaatatttttaaaactgttgggggccttcggcttccgaaggtcctcaaaaacatgatttaacaatgtttttggagtataatgtgtgaacaggtatcttcggactcgaatcggtaccacagtgggagaagcccaaagaatacgaaggttgacacagcgccaaagctgtgagcaggaaagcttcggcgtgatagcagaaaaggaaaccgacttaaagatgaaaaggctgttcagacctcggtggattactatagaattactaccaaatgtaaagggcatggatgtaattttacatgagctatgtcccgtgcctataaataggtgaacagtgcccccgtactgttcacgcggactgggcatttacttttgcgtcacgcttgtgtttttaccttctttcaagccgaaggtacatttgtaatttaatatcatttctattttttcataataataatatagaaatgagttgataattatacataa

SEQ ID NO: 20727 - DNA, 1798 bp, Zea Mays
caggagttggctgaacttgttcacaaggtccatttgctttgcctaatagcaaggggtagagtagttgacaaggcttgctatgatacactcattcaggcctcagttctttctcttgtaccatgccacttactatggagtcttgttgatgttccaaacctgaaagctgttaacctacgtagtcttgtgagctggttccatcgtactttttgtgtaactgcacaatccactgacaggggatcttttgaatcaaatttggctttcactattcaagatcatgtagggactgctgaagagatttgtgcactctctgtggcattattcagggcactcaacttaccagctaggtttgttacaaatctggatgttgctggactcaagaccgatactaaagtgaagggaacattcagtcaagatgcatctaggctttgtacaagggcactaccatgtggttctccattatctggtgataatgtgattagttctcctgctctactgaaagataattctcaaggtattgcttgcagtggcacagaattgcacaaggcagagtgaattcagagtggtgggataatgttttggcgccactaaaacagatggaactggcagcaacaaacaactatgaagacatggaacttcaaaccagagccctaacagagcctcttcctaccagtcaacaggcctataaggaccatcacctttatgctctcgagaagtggcttcacaagaaccaaatttttcatcccaaaggtccagttctcggtttctgtaaaggacatcctgtttatccaagatcctgtgttcaaacactgcagtcaagacatggatggttgcgggagggcctgcaagtccgagaaaacgagttgcctgcaaaggtggttacacgtccaaagaggactttcaatgcccagtcagttcaatcaagtggcaacgaagatggtctaaaaccaaccttggaactatatggtgaatggcaactggaaccactgcaacttcctcatgctgtgaatggcgttgtgccaaagaatgaacgaggccaagttgatttatggtcagataagtgccttccgcctggtactgtacacttgaggttaccaagattattccaggttgcaaagagacttggcatcgactacgctcctgctatggtcggatttgattatcgcagtggtcggtgccttccagtctttgatgggattgttgtctgtaccgagttcagaagtgctatcctggaggcatatgcagaagaagaggagcagagacgagctgtggagaagaagcaggaggaggctcaagcactctccagatggtatcagctgctctgctccattgtaacaaggcagaggttgaaggactcctacaaaacaccttcacacgggattggtaacgaaggcctgcccgaaaatgataatgtccatagaagcactctcagcagccgatcctcagaaagggaacctagttcaagcaaactgcagacagatcatgaccatgaccatgaatttccaaaggaagaccagagctttgatgaggagaccttcgtgaggacgaaacgctgcccgtgtggtttttctatccaagtagaggagttgtaactttgataccaggaatgcacaagtgcacatgtttaactgtgttaacatatggcccctttcgtccatttgaaagtcggaatccaaaacgtagttttgaatctacttacccatttggatccttgcaattgaattccagtctaataatcataatttaggcacaaattaattaagctaaatgtagttttatgtggaatatatttgtatactac

SEQ ID NO: 20728 - DNA, 1378 bp, Zea Mays
tttttcattaaatttggttgctttgagaacagccgttgctccacttgagaggctaaagttggagtatatagttcgtggtgagcagaggaatctatttgagcttatgcatgctattgcaacaacacaaggattgaaaggcttttggaaaggaaactttgtgaatatcctccgcactgctccattcaaggcagtcaacttctatgcatatgacagttacagaaagcaactggtcaaatgggctggtaatgaagaagctacgaactttgagagatttattgctggtgcttttgctggtgttacagcaacaattatgtgcatacctatggatacaatcaggacaaagatggtagctcctggcggtgaagctttaggtggggtcattggtgttgcccgccacatgatccaaactgaaggattcttctcgctgtacaagggattggtgccttctcttatcagcatggcaccctctggtgctgtattctatggagtgtatgacatactgaagatggcttatctgcattcccctgaaggaaagaaaagagtatcgatgatgaagcaacagaaacaagaggcaaatgcattggatcaacttgaattgggtactgtgaggaccttactctatggggctattgctggttgctgtgctgaagcagctacatacccgtttgaagtggtccgtaggcagctacagatgcaagtaaaagcaacaagaatgaatgcatttgcaacatgccttaagattgttgatcaaggtggggtaccagcactgtatgccggtctgatccccagcatgttacaggttctaccatcagcatcgatcagctattttgtttatgagttgatgaagatagtcctgaaagtggagtgaatacaaattaattggtgagcctacgaaccacgttcaaatggtgatcacataccttgataaaattgccgaaaaaaaagtatgtaagggctagtttggaaactctattttttaagggatttagggaaaatgggatttccaaactagccctaacttgtgaaattttctcgtagacttgtttgacgaaagctcctgatgctgagggtagcttcaggttggtaccgtaaaacattgttcagctgaggcttttcacactagttgaccaaattgtacacgaggatatattcaagacctaattcagtggcttagtagaagattgttctctgcaactctgccccagcgaaataatctcggccttgcccaatttctgttgacaatttttttcatactttgtcgttgatgtatttgacacattgacagcagtccagagcgacatttgggacattctatctgtgaccctgtctaatgcggttatacctatacttcgatcggctttccagcggccgcatgtag

SEQ ID NO: 20729 - DNA, 1838 bp, Zea Mays
tagttcattgtatttcgccattcgtttttccattctttttgacgtccctgtgtgagacgatgctgtttgttcggccccggcgagcggagcggtgggagagaggacacagattatcagctgattgtcacggaagatgtcgctagccaagaaagaagaggtttgcagtcaccgacttgtaccgcgcttggacgagcctgcggttggtgtgcctattaagaagaggccatttttcttgtctgaccgatcggttgcatctgccataccgctctcgacaaagcccccatctccaacgaatacaatgcctgttgctgctacagggtcaggctgccgcgaggaacccttcttcaacatcgctaactcagacagaaaagtcatcaccaaaggtaagggaatccctgacactcagatccaagaccatgtcaacacgtcgcttactgcgctatccatgaccaacggcaacggggtgctatttaatgcatcaagtgagatcccttctattgcagacagtgctacaaggacgtctgcacccgatgatgaattgcaacttcaaaattttttggctctggatttacagttaccatctcgtcaaagtggcaaaaataataactatagctctcttaggaaggatgagaaactgggccagagtcgttcggaacactacaataacgttcctgttgcaaatgaaatcaatgcttctgggaatagtattgttgggagattgcctaacttggatctgaatatacctccggacccagctgattcacttgaaggtttgcctaaaatgcatgaaagtgggagtgggttctatcatcatagaacaattcaacatcagaaagctcaggtgaccccagccgcagccatttctacgataaacagtgggataggtcgaaatatgtgcagtactctgaacatgtctaattcatatgggctttctcataagtctggaccagctgatgttaccttagatttacaacttaaaccaccaactagacctgagctagggataaactggaaaggacttgctcctgctccagaactgagtctctctctatttggtaagcctatggacgagcctgagtttcctagcacccccaatgccttatttcattctggaactgctggaagttccaaaaaggtcagtggggaggctgctgctacacttgggtcagataaggcaccagttgagaagattgtaacacctgttccctgcaatgtaaatcctctgaatactacatcagcaactgtttctggaattgatcagctgccatctaataatttggtgaagaaagaacctgaagaaatatcccagcagcatattattgacggcgctaaaaagccaaatccattagaacgacaaagtgttggacaagttatcggttgtgctgaatctgaaaagacggacagtgcaccccaaggtgctcgtaaaattgggtttgatttgaattctgacatctttgcaaatagtagtatccataatgagtctgatgtagcagcagttgatgccccaataccagctaaaactttacctgatacttgccatgatacgagcatgcctgctgttcctgaagtagacaaatttgtgaagcatgaagaatccacaagtgccaccctcagtcctgttgtggaaacaggaaatggtcatactacactgttggtggaagcaaaatcacagcgttcgcaaggtaatgttgctagccctgctgttgggttatctgaatcctccagccagcccaccgtttctactgtttgcaagccaacagccggccatattcgtgctgatgaggatacgaggcagaggtcttgtgatactaatgaatcttgcggtgcattaccaagtt

SEQ ID NO: 20730 - DNA, 299 bp, Zea Mays
atataacaggaaaataacttcatacagctgcaagcttggccctaacatgaaaaaacattaacttgttaccaggtagttattgtcttaaaaatttaattacatgcattctgaaataactcatatttgtacttattgtatcaaaattgcaattccatgcattctgaaataactcatgttttaccaataagtaattaaatatagtagtcctcgattcatattatattatgaacagaaaacctcaattaccatggcagcatacagtgtccaaactctagactattgttgctccgcagatagag

SEQ ID NO: 20731 - DNA, 2409 bp, Zea Mays
ctgccttccgtgtctcccttccattctacggccacctcggcagggagcgttaaaagcgtcgcccgcgaagaacgtgggccagcgtcggctcgccgtctccctccctccttccagatctcggcgcgagttcacccttcagatttccatttccaacacgacggcgaagaagagctgcgatccggaggagtaaaccctacccgccggttgcccggtgcgcgggcgagatccgggcggagatctagggcgcggcgccggccatggcgagctccggactcgcttaccccgaccgcttctacgctgccgcggcttacgctgggttcggagccggcggggccacctcctccgcagctatctcccgcttccagaacgacgtcgccctcctcctctacggcctgcaccagcaggccacggttgggccatgcaatgtgcccaagccaagggcgtggaaccccgtggagcagagcaaatggactagctggcatgggcttggaagcatgccttcagcggaggcgatgcgtctttttgtcaaaatcctagaggaagaagatcctggatggtactctagggtccctgagttcaaccctgagcctgttgtagatattcagatgcataaaccaaaagacgagccacaaagtgtaccggcttcaacaaatggaacatcaatttcagaaccaaaaatcatttctgaaaatggaagttctgtggagactcaggacaaagatgttattctggaaggccttagtactgttatttctcatgatgagtggactccattatctgtcagtggtctccgtccgaagcctcgttatgagcatggagcaactgtgttgcaaaataagatgtatatatttggtggaaaccataatggacgttaccttagtgaccttcaggctttggatctgaagagtttgatctggtccaaggttgataccaaatttcaagcagaacctgctgactccactataaccacacaaattgctccatgtgctggtcattctttgatttcttggggtaacaaatttttatctattgctgggcatacaaaagatccatctgaaggcattacagtgaaggaatttgatccgcatacttgtacctggtcaattgtcaagacttatgggaaaccaccggtgtctcgtggaggtcaaacagtgactcttgttggaacgacactagttttgtttggtggtgaagatgcaaaacggtgtctcttgaatgacttgcacatccttgatcttgaaaccatgacatgggatgatgtggatgcaatatggaatggtcaagacccaaacaacaaggcctgactccaagcccaagagctggacatgcaggtgcaactgtcggtgagaactggtacatagttgggggtggcaataataaaagtggtgtttctgaaacactagtgctcaatatgtcaactctgacatggtcagttgttagcactgtggaaggacgtgttcctcttgccagtgagggcatgactttagtgcatagcaattacaatggttatgattatctcgtctcttttggaggatacaatggacgatacagcaacgaggtttacactcttaaactcagcctcaaatcagattcacagccaattgtagaagaagaaactgtctcagatactatatctagggtcagagaacctgagaccgaaatttctcaagatgggaggatacgcgagattgccatggacagtgccgattcagacctgaataacagaaatgatgaagcaagtgaacagcttgtagcagatcttaaagctcagaaagaggaactagaagcaacaattaacagggaacagctgcaaactgtgcaacttaaagaagacattgctcaagcagagaccagaaatgcagagctgacaaaggaacttcaagctgtccgtggccaacttgcttctgagcaatcaagatgtttcaaacttgaggttgacgttgcggaacttcgacaaaagcttcagagtatggacgccctggaaaaggaggtcgagctgcttcggcgacagaaagccgcttcggagcaagcggcgctggacgcaaagcagaggcaaggttcgggtggtatgtggggttggctcgctggaagcccgccaccatcacagtagttcgtacaggccgtggttcatatattttacttgtaacattacatatcatttgacatttgtctacattttttttttgtcacatggcattcgtgtttcgttttgaccacacaaagaacaacgtgctctggcgagagttatattgtgctcatagagaatcgttaggttgccccctcacaatcactcaaatgtatcattaggttttaacaatgtactgatcatgtatgaacttccatttgacgttgtgctggttgcctataggtagtttatttttcaaggttgccttgtttttttttcgtgaa

SEQ ID NO: 20732 - DNA, 974 bp, Zea Mays
gaataccagcaaattttgtaactaccattcctaattggagttgatggtgctggatgtaaattagctattgtctactgaatatttggaacaaaagcatgaaacttcacatagaataagccacattgtggatcttgtaaggaaagctatgccccttgcactgacacctgagaatgatccggggaaggaagagctcaagcagctccaggtgcagttggaagacatcaacaagcttgcacacaagcaggtccggcgcatcctctggtctggtctgggtttcttgatcacccaggtgggcctcttcttcaggctcacgttctgggagttctcctgggacgtcatggagcccatcacgttcttcacgaccacgacaggcctggttgtgggatacgcatacttcctcatcacatcaagggacccgacctaccgagacttcatggagaggatgtttgagtctcggcagaggaagctgatccagaggcagaacttcaacctggacaagtaccttgagctccagaggcgctgcaaggatcccctggagaaggcctgcggcacgaccaaccctgacacggctcatcttcatgagctctccgttcacaaatgacaaagaattcaccattgcttcactactcattccattctatgggagaaatggtccctgctagcaatagtaagcggtgtttcagataccttttccacggtcttctcctatgcaaatgtgtaggtcagtataatttttttgggggtaaatttgtagcgatgctgaaacacaagctagttaaaagccaaactcatccgcatggctggatgcttactcactacccagaaccgcgcgattctgtggtctctactaatatactgtttcattgtgcctaattagctttattatgaaaactcatttgttggtggctaatattgtcctaattagagacttgtatttgatcacgatcacgtgcctttagaaatgtatacttgga

SEQ ID NO: 20733 - DNA, 4430 bp, Zea Mays
tccgcagagaccattaaccaaagaatcccttcgtcccggagacccggacctccctggttgcgggttgcggcgcctgcctcctccgcccatgcgacgcgcgcccgcgcaaactacccgccttcgcagtcgtccgcgcgggaaacgtgaagctaatccaactccaacatttcctcccgatgcgctgtgctgtgctgtactccttcgcagggagctctcgaaacccaaaccctagctctgacccaccgcgattccccatttgatttctcgtacccatgggtggatccgctgatcccgaggcgccgtcgccgtctccgacgaagccatcgccctcgtcggctgacgggaagccgccgaggcggtgcgtgcagtcgaaactctcgtgggggcttgtcaaaccagccggcggcggccgcgaaggtggaggaaaaggaggcggcggtgaagcaggaagaggagatgccgaggctgttcctcctgtgcctgcggccggggaggcggcggcgacggaagttagagaggggctggagaaggggaagaagaagagaaagccgcggaaatcagaggatggcaagaagggctcttcaagcaaacagaaacaatggcaggatcaatcgaacaaagatggagtcattttggttgatgaaagccctcagaaaaagcaacgtaaaggtagaaagcaagatgcaatactgaaggagcctaatgctagcagaaagcgttgcaagacatcggaagctcctgatggtcctggaagctgtcagcaattgcatatcagccagattgaagccagctcgcctgcagcagcgccagtaataattgacgttgatttgatgagtacgccttctaaagcaggacatgctaattcaatcgatcaggatatatcaccgttgaaagttgacctaaggtcagaggcgaagatagctgcagaggaaattcgaaggttatcatctggaaagaaaattcaccctttctttcattctcggaaattgaacaaatgtgctagccaagatcaagatgtcatcaatattgaaaacatgcatgggctttgtgattctgaaagggatccaccattttatcctattcatgttgtgtaccaatcagaggccagcatgccaatccactggagtaattggataatcactgatatgtcatcatttgacactgatactgccgttcctcttaaaaaatctgtgtcatactttgagggcttggttaagccactgacaatagaaactaattgcaagaggcattctaatcaattgtcagatccgattcttgctgagtgtacaacttcaggaatgccttttccaagtttttctggcaagcaaagtgaacacagctgtttttcagatgcgatcaacgtggacacacagaacttgttgaggcctggtgctagttgccaagcttctcttcttgatctgaatgtagagccagaagatccacagaatggttgtcagcctgcctgttacctatggactgacaagtaccgacctgaaactgtggcccaggtatgtggaaatagtgagcacgtaaagtttcttgctgaatggcttaaaagctgggatgaaaaaggccacaagattggagttgctaacggggacactaatgataactcatatcaagatatatctgattcagattattcagagagtgcttctgattgtgaaaatacacttctaatcactggacctgttgggtgtggaaaatcagctgcagtttttgcatgcgccagagaacaaggcttcaatgtgatagaggtaaatacatctgacatgagaaatggagcttatgtaaggcagaagtttgaggaagcaactaaatcacatggccttgaaaaatggtcacaggaggaggttatcaatccactaagggatgattccttggatccagattcaggaactcctgataggactgaataccaatgtttgatgtcctgtgctacaagagtaatgattgactgtgatcaacagaaatcacctgtaggatactactcaggtttgaaggcctgtgatgaacctcctaaacaagttgctaacaagacactcatactatttgaggatgtggatactgtctttgatgaggatcgtgggtttatttcaactattcttaagatggcagagactacaaaatggccaatcatactaactagcaacaagaaggatccgtctttgccgaatctcttggatcaacttgttttggatttcaaatacccatcgacctcagagctactttcacacgttgccatgatttgtaaatctgagggagtgaatgtcactgttcctcagttaaaacatgtaattgatgtttgtctaggtgacattaggagggtggtgatgtttttgcagttttggtaccaagggcatcaattcacagagaggccaaaggaatgtttgtgtggtcctttctcacttgatttagatgcagtacattctacagtgccaaaaatgttgccatgggagttcccttgtaagttatctgaaacattatgcatggaggtagacaaaactatccttttggctgaagaaaagaaaaaacagatggaaatatcagatcttgaaggcctgcagttacatgtaacagcacctttgatcaagggaagaacttctaaaacaagaagggctaagaaatccaaattaaagcgtgctcactcgactgagcataatgatatttcaccttgtaagaatgaacttgatgatttccatgatcttccagatatatctcttccatctgataaacaaataaaaagaaatcggcatcgttcgctgctattatctgagtccgatgatgatccagctgatgtaggtactgaaaaacataacatatttactgttactgaagttggtttcttcccacaaccttcagaggtgcctcctatgcatgggcaagggatttctgatcagttccattttcccgttgaatcacgagagacatgtgaaattgctgattctttccaaaatccacctgaaagcaacatgtatgggtccatttcacaagtttgtgatacatttatgtcacaggacgtgtcatgtgtacccgagtcatccttaattttggacggcacatctgcatccataagtggtgatgaatttttgtcaagggcagtgtccaatggtttttctgccttttgtgagggtacatacactacctccagaatggtattagaagacagtgactgtgtgaagaatctaatggctgaacgacaaaaagatgttgaagatgtagttggtgagacaagtgagacttatatggaatcatttcggagaaatgaacaggcaagctgttcagctgctgggtttcaattaatggatgaatgtagtcgtgctgaaagcatctggctgctctctggcaaaaaatctaatgactcttgcaaggtggaactagtacaggacacttggaacaggctacggagttgtcgtcttgaatttaccagtgaggctaatcacaacagagcaacttctggagctttgaagcttgtctcagaagtgtctgatttaatatcagaatcagatcttatgcttttccgttgctaccctcttactaaggatacgttggatccgtctttaactccttgtgatgagccagttgattcttcttggtacagcaatcaggttgagatgggatctgtatatgcccagcatgctcttcgtattttatcgaggaattcccaaaaaatagatggtggttctgtcgatttgtcacaagagttgtttgccagtacagctgctgtatcctttggtaaaattacctgttcaggattcaggaatgattatggatctacggacctttctcatatgaaaaatccaactacctgtatttttaaaagaagggagcggcatgttcatctttgtgaaaccctgtctccagtggttcctccaaagttgttgcagtcattgagaggccctgcttttgttgattatttgtcttcaatcagccagatttccaaattagaaaacttgcgactctctgaaaataaagtcataaacaagcgaagaaggtcccgtcaggcaagacattacttgagttctggcgcacttcaactttcacatgaggatgttgtattattagaagaaagcggctgtttcagtagcagacgcgagagggttgaggttgtagagcaagcaccagtcagtacataagttaatgaactggtgctgatcatgagcggcagcattttgattttttttattagaaggcaatgtgactgggttggccgagccatttttatagttgcgtccgtgatcacggagcccggcggtggaggaaccggaatgtgtgcagttgattgctgtatctgttagataactagacattttaaagtttatttaaattttaaaattatttatagcaatcatgaatatggattaatcttagtatgtttacatgttcatgtttatcatctttataatcataaatagtataaaaataagaag

SEQ ID NO: 20734 - DNA, 2182 bp, Zea Mays
ttcctgttctatccccgtcaccctttttcaccccaccccattctccttcttcctccagagtccagacggcgtgcttccgcctgccgccgccggcgagctgcttgcccgcagcatgactccgcatcctggccgcctcgtcctaccaccggcggctccttctccctgaaccccgccgcgcgccaggcaccacgcctccctccgcagtcacacgagcacgcggccgtcctctgccgcaccgcgccgcctccagacgcctcgctcgtcaggtctctccacctccgcctgcgaacgttcggcccagctccggcgagttcctccgcaattccggatctgctggagcgccagcaaggcggtctctccaaccctccggagtccggaccagcaagggttctgatctcccatgccacagtttataacgttgaaggattcaaaaatctacagaactagatgatacttgcataatgcagtcctcagggacctgggggtgtgtggtgtgatgttgatgttgttgaattttcttattatggtgcaccagccccaacaccaaaggaacaactttatgatgagcttgttgatggattgcgtggtagcgaccctattgtaggctcaggttcacaggcatgttgcggttgatctggattatcccaaccagaagatgttccatccgctacctcctaatcttgggcctggagtttacctaggtgccgttgagagagcaacatcatttataacagatgatgtttggtacgggatttacgcaggaacaaacccagaaacttttgtccgagctgatggtgcatttataccgtttgctgatgactttgacattacaagtgtcagcacatcggttaaaggagttggagtcattggtgatgtaaaggcaattgatttgcaatcctcaattggcagtctcattgggagacaagttgtcaaagttggaagaagttctggtctgacaacaggaactgttgtcgcatacgcacttgagtacaatgatgagaagggaatatgcttcttcactgactttcttgtcgttggggagaaccaacaaacatttgatcttgaaggggacagcggaagcctcataatcttgacaggacaagacggtgagaagccacagcctatagggattatttggggtggtacagctaatcggggaaggttgaaacttaaaagtggccagggtccggagaactggaccagtggagttgaccttggccgccttcttgatctcttggagctagatctgatcacaacaagtgaagggctacaagctgccttggaagaacaaaggattactctagccgccgctgctgctgcggcaactaattcaactgccacagaatcgtcacctgttgctggccctcaagagaatgataaaatcgacaaaatctatgaacctctcggcatcaacatcattcctcgggacagttcttccatatcaacagaccaacccaacgagaatgtggaagagctaaacctgatgtctccgatgcgcaacggtcaagaaggcaacggtgacttgaataacttgatggacttggaactggaaaattcacctgatggtatttgtattgccctgaacctgggagagcgggagccaaaaagactccgctcagattttgattcgaccctggacatggacttgcagaaatgaggctgttatgctgcagacttgttgcaggaggctctgcactattcagcttttgtgttgatcattgaaggtatggccataaaggaaataatatgtttctggacgactggacctgttgtcctgcttggagccggtctgggttaagctgtgaagctcctgctgcagttttgcgtctagtgtcaagtgctctagtatatctagtgttgcgtaagatgtcggcacctcaatttgacagaggcgccatacttcttgcccatgtaatgttgtcatttgttgtatgctcgtgtatatgtactacatgaagcattgtaaaattgagcaacagcaaccggagctcgagaatcttaggcgcatgcgcaaccatccaccaaccccgtacctgatgaattgacaataaagctggatattttaggtgtttggaaagtgtgttgctcttggaattttggggagagatttgggtactaactttggtaaaggcaggccactggtgttgtccttgcctgcctgatcaaacaacatgctggctag

SEQ ID NO: 20735 - DNA, 1821 bp, Zea Mays
ttggagcctagggccagtgccagtggcacatagattttcgagtttgtcatccaaaagttctatgccttgagaaaaccaaagactaatattcagattctacagcagagtgttcttcttaaatacaagtacacgataaatttccttaaggaacatgctaaggagatatatgcagaagttcgtacggcgtatattgacaccatgaataaggtgctaagtgcacatttccgggcttacatacaagcattggagaaactacagatggacatagcaacttccactgatttgcttggtgttgaaaccagaagcacaggcttcattttctccattggaaaagaacctctgaaaacccgtccttcagtgtttgctctgggtgaacgaataaacattttgaaggaaatcgaccagccagcattgatacctcatatagctgaagcgaagtcacagaaatactcgtatgaagttcttttcagaagcttgcagaaacttcttattgatactgccacttcagaatacctgtttactgatgatttctttggcgaagaatccatattccatgatatatttgcaggaccgattcaagttgttgatgaacatttcaatactgtactcctgaactgttatgatgcaattggcataatgcttatgatcagaataattcatcagcaccagctcatcatgtttaagcggcgaatcccatgtttggactcttacctagacaaagttaatatgtcactctggcctcgcttcaagatggtgttcgacttgcatttgaacagcttgcgaaatgcaaatattaaaacactttgggaggatgatgtccatccacactatgttacaaggagatatgctgaatttacagcttctctagttcatctcaatgttgagcatggggacggtcagcttgatctaaatttggagcgattgcggatggccattgaggatttgcttgttaagttggccaagatgttttccaaaccgaagctacaaactgtctttctgataaacaactatgatttaacaatttccattttgaaggaagctggaactgagggtgggaaagcacaacaacacttcgaggaggttcttaagagcaacatcgcaatatatgtggaagagttgctcctggagcagttcagtagtttgatcagattcgtcaaatctcgtccagacggctgcaaattccgagaaagccagcattgccgaagttgagccactggtaaaggatttcgcgagccggtataaggccgcgatcgagctgatgcactatgatgtgatcacatctttcagcaactttctttgcgggatggagatcttgagagcgacgctcgcacagctcctgctatactacaccaggctctccgagtgtgtcaagagaatcaacggcggctctgctctcaacaaggaccttgtctccatatcctccatcctgttcgaaatcaagaagtattctaggacgttttagttgtttcacccccttccatgtacactaggacggctagctgaggggtagctgtgtatccttactttgtaactggtatgtgcgactgcaggggaaacaagggcattttgtcgtggtttgtatcttcgtctgtgttacccgacttgacccctgcccctttccagcacagaactatgatctctaggctgtctccacagttatcctattctatcttctgtcctatcatctattttaaacttcattttgtaaacagtatcgattatagtgcaaatctacaattttatacgatccgctgtggataaccatatgctgcatactaatgaatgcgtaccaaacgcttgccttaatgttatttttatgac

SEQ ID NO: 20736 - DNA, 1114 bp, Zea Mays
ctttttttgtgagacggagggagtattcatgacttgacatcactcatggagctgtgcattatgcttcttgagtgttgcagtcaggagagaacatatcttcgttattatgggctgctaggacagcgtttttgcatgatcaataaagtgtaccaagagaacttcgaaaaatgctttgtgcaacaatattcgatgattcatcgtcttgaaacaaacaagttgaggaatgttgccaagttctttgcacatttgttggggactgatgcactcccttggcatgttttggcttacatcaggttgacagaggaagacacaacatcatcttctcgtattttcataaaaatattgttccaagaattatcggagcacctgggcatacgcctactcaatgagaggctgaatgatcctaacatgcaaggttcctttgagtctatcttcccaaaggatcatccgaagaatacaaggttctcgatcaacttcttcacgtccattggtcttggtggtatcacggaaagcctgagggagtacttgaagaacatgccacgtctaataatgcagcagcagaagccagaatcatcagagtcagattcaagtggatccgaatctggttcggaaagctctagttcagggtccagttctgagcctgagtcagaatcaagccctgatgagcgtgacagaaggcgaagtaataagaggaggaagaggacttgagagcacttccaactatgctttttggaattcatgtatttggttttgtttaaatgtgcttcttcagtatacatgtgcagtatgtgatctagctcttgatgtgttagtggtaatcagaaagccgtaacagtaagatactattcgaacttgtacgtggcaggttggtagtccagcaacaaagggccaacagagatcttgtttatttttcataacttccaatgcagaacaagttctgtacgtgggtatttgtaccattgcgacatcacactgctagccatgttctgtatcctgtagtgtggtaactggtaagcatcaaatatggacatcggttttgatttttttctgctcgttttttccccagtatatagacagtcaaagctataggcttctgtggccttcacaatttttg

SEQ ID NO: 20737 - DNA, 2140 bp, Zea Mays
caaggcttgcgtgttctcaccccttgcgttctcttctgttctctctctctcacacaaggtctcaccctccctgtatccctctgaccctctcggcggcgactgggcgacagccgctgtctcactacgcctggtgcccaggtatctctgccggcgacgagcacctgccaggggtatgggaatggaggtcgttggtgctgaagcagcaccagcagagatcaaagtatctgatgatgtgaatctattccaagagaaggaaagcaaagcaactgctaaagaacgtgaggaggcagctgtttttggttcagagacaactaccaatgtcactgatctggcacctccaacggatgtgaaggatgagtggcctgaacctaagcaaacttatgccttctacttcatcaaggtccgctcatttgaggatcctaaactgagggcaaaactcgagcaagctgacaaagaattccagaagaagatccaagctcgttctaaacttatcgaggcagtaagagccaagaaggcagagcgctccagtattatcgcggagctgaagccattgagcgctgagaacaagcaatataatggagttgtgaatgagaagataaaggagatggagcctcttcggaacagcttgggcaagtttcgtgaggaaaacaatgccatgagagcacagagtgcaggtttatgctcttctatcgaagaccttgacctaacgatcaagatgctgaatgatcgcatcgtacatgagagcatacctttatctgaggagaagcgtctggtgaaagaaattaaagaccttgaaaaaaccagatcgaaagtcatctctaatgctgctaacagggctaaactgcaaggtacagtggttgaaaaagaggctatacaggaccaggtcaaaatcattggggagggcattgatgaaataaagaaagaaagacaggctgtaagatctaagattaaggtcctggaggatgagctaaaacttgttgatgctgagattgcatcgcttcaagaagatttagatgcagcaactgccagaaaggacaaggcatatgaattgttgcaagaattgagagcaggtcgcgatgcgaaaaacgcacccttcatgcaaaatcgtacagttttagccaaagctagggattattctttgaggaatatgctatcagaactgcaagagctccacaaggctgaggtcgacaaattcatgagccaatggtgtgaaagtaaggccttcagagaggactacgagaagagaatcctcacctccctaaacagccgacagctgactcgagatggtcggatgaggaatcctgatgagaagcccatatttatcgagtcacaggcgccagctccagagccagagccgttccctgtaaaattgcctgcaaaacaagtcaaggaagtgcctgctcctcaggcagataatgcttccaagattgaagctccttcaaaaggacctgtccagttgcacaaggcaaaagctgctctcgatgctgatgatgattatgaggccgagcccccgaaggagaaggcaaagcctacgggggctgatgtggcgaagttgaaagagatgaagaggcaggaggagattgagaagaacaagcttgccttggagaggaagaagaggcaggctgagaagcaggcagcaaaagctgtggcccgagcacagaaggaagctgagaagaagctgaagaaagaggagaagaaagccaagaagaaatctggtgcagctgacactgatgagccctcagaatcggatgccaagtctgacgaagccatggaagccccagcggaacaagaagtggccccagcttccaccacggtaaagaaagaacagaaggagagtgcccggtacaggaatgtggtgagccggagcaaggccccgctacccaaggcgatcctgaagaggaagaaggctcagtcctactggtcatgggctggcccagctgccatggtggctgctgtgctagttgccctccttgcggtgctgggatactaccagtactactacctcccagcgaataccagcaactgagtggatgaggcccgtgtactcccccccgccaggccatttgatgatgtggagaccaattttgcagataatcaagcaacaaaaacaggtgaacccgactcaattgcaacgttttat

SEQ ID NO: 20738 - DNA, 1244 bp, Zea Mays
aacgatagtaatgcagagagaagcaagagaaggcataaataggtagtgtagaccaggcgcttttagtagaagagagcattaagcatgcaaaagaagctattatgctggatattagagatggcaattcttggtataatatgggcaatgcttatctcactagcttctttgtgggaggagcctgggatcacactaagcttcatcattcagtgaaagcatatcaaaatgctgagaaggataaaactatgaatttaaatccagacctctactataattgggccacagcagacaaatatttagagaattatgaaagggcccttcgtggttttgaagttgcagctttaaaagatcccgggcttggtgctaatacagaagttcagaagatcatcagtctccttgataagcttgataatgcaatgaagggacaattacgatccaaaagattagcatcatttgtgtcatccttgagtggagtcaaattgaaatcatcgcacaagaaagccaccataagcactctatcagtgggtttgaacaaagccgttgctgttttgggaaaagtaattctgttcataagacatgacaatgttgctccgctgtattatttaatatgtgacttggaacggtcatattttatactgtcagtgtatgggctacataatgatgcaattaaagacggtgatcaagtggtattatttgaaccatactaccgaatccttgatgcatcatgtaaagacaagcactatcagttcaaatcaatacgagtggactttccagaacaaattctagttaacgagagagttccagcacctcatcatgttgcacgggcatcaatccatgcacacaacaaatcttgaccggtgaaaatttggtattgtgatttagttggtagccagtacttattttgtttttgatgtttattagacttattacaggaaaaccattctgcaagtttttatcagggtactgtgtggcgtcaataccgtgagcaactgccagctgggcatatcatgtgtactcgcgtaaatgtgtagtgacatgttaccctatggctcaaaatgtgtaaggaagacttgggaacatattaaccatctcatttctccaattttcgttagttgttttcatcaaccttagaccatgatgacacctcaagccgtaagaatcacaagtagtttgcgtgcgtccatgcacgtgtgaagtttttacaattccacataataattgattccagacaaaaaaatgtagagctc

SEQ ID NO: 20739 - DNA, 3249 bp, Zea Mays
gccagcgggacccaacggacagccagccgaacatatcccccctacgctggcgccgtcgcacgcgccgccactaggtgtcacccgtccttgcgccgccgccgcatccttcgactttcgatctgcgagctagcgattctccgctgaggagtggggcccatccctccggagcccaaccccagggcatccgcccgcccccgccgccgtggctcaggccccacgcgtcatccccgcgacggacaacgtagtcacgcaggtggagcgcggtccactcccccccccccccccccccccgcgcttcgcctccgctgagaccgcgccctgctggtgcgagtacccgggagcttccaaaccctagggccgggcatcgagcgagcgagggggtgagcgcggagcccaggcatgccttgccgcccgcggggatccaggcagtgatgcgcggatcggcgcggcgggggcggcccggaagctcggccgcatgaggtgcctcgtcggcggcggcgtccaggacagcccgcgcgcagcggccaaaagagtatcgccggcgtcgtggcggctggacgccgccacagcggaggcggacgcggggagagctgaggccaagggggtcaggttctgcgtcaggccgccggacgtcatggagacggtgcacgaggtggccatttacatccaccgcttccacaacctcgatctgtttcagcaaggatggtatcagatgaagattagtgcaatgtgggaggaaggtggcaacaaaacaccggcttcacctgccagggtcgtgcaatatgaagcttctgatgttggtgcggatgatgcattaggcatttggaaaatagatgacgtcgacaatagcttccacacacagccgtttcggatcaagtatgccagacaagatatctatctgtcagttatggtgtcgttcaacatattcaacattgaagaggagggtccagcagcctcggcggtgatgttgaagtttgagctgatgtatgccccaacactagagaacgggtctgagcttcaagcttctagtgtcacatcttcagcagctgtgcatgaatttaggatcccccacagagcactcctgggtctacactcctactgtccagttcattttgatgcgttccactctgtgcttgttgatctgacattacacatagtgtacctgaaagctggtgcaactaaaccatcattgaaggtaccggaccaaggtttaggtcctacatcatatcatattgtcaaggcattattaacttctagaaagttgttgctggaagaactgaagaaaatcagtggtgctattggtaagacagtagaggaattagatgttgctgacttgaatcttggtagatatgagtcatttaatccatcaaaatctggattaccaaattctagtaaagtgttccctgcaactggcaagggtgtgggacagttgactggagttttacatgatttcttggagaaaaacaacgatatggttaatggtacagatgattctatgctgtatactcttccccaggaagagttgtttgaactatttctaactctgagcggacaacttttcacttatatggaatgcatttttgaaatttcatagggtaaataaaacaaagatattggagtacttgcacgatgcttgggctattgacaggaaggcagaatggtcaatatggactgttcactcaaaaattgagatccctcatcgctatttgcggagtatgaatgatgaatcatctcaccgtcattcacttcttagagtttctggatcaaggaagttccatgacgatcctgcacagaactctgcttcacgggctgaactacaccggaaaagcatagcacaaatgaagaacaacatgtcatggttgttccacagcatagttccagcaaggatttggcttcgaatgcttctgaacaaaaggatactattgtgctacctaaactacaaggagagcctctggtacccaaaagtagtgttgggccaccatttggatttacgtcttgttagaaaccaatggcttctattggaccctggagctgattgcctaatgtctgaggctaatgaagataaaacatctggagacttcaaagaaatgggtagcaggttggccggggaggtaattgccttcctgaagaagaaaatggataagctttctagatatggaggctgcaaagagctgaagttaagttttgtcggccattccatcgggaacatcatcattagaagtgccctggcagaacctgcattgcagccatacttgaagaacctctacacttacatgtcaatatcagggcctcacttgggttactgtgatgatcaagacccccacaatacatacttctataagctttgcaagttgaaaacattggagaacttcaaaaatatcatattgttatcatcaccacaggatggctatgtaccatatcactcagcgagaatggagctctgcccagccgcatcatcggacacctcaaagaagggtcaagtcttcacagaaatgctcaacaattgcttggatcagatccgtgcgccctcatctgacacccggacgttcatgcgctgcgatgtgaattttgaccagtccaaccacggacggagcctgaacaccatgattggcagggcagcccacatcgagttccttgagaccgacatctacgccaagttcatcatgtggtccttccctgacctgttccgatgacagacaacgccgctcgtctctgtaatgtctctgtaatactgctgcataccaaacctacaaaccgatagcgcacactactgagtactgaccaggcaaggaaaagtaagcttgcataaaggctcccccagaatccaacaccgccacaggcagagtagcgctgtaaagatcctagaagcaacggtttttccagcttgctagatctgattctgtataaatagttgattctttcgtcattccattcatagtgctgtagatgtgcacctttgctgtgaatttataatcctttgtcggcttgtgtatctaacgcttcggtttaggatgtgctgacaatcagtgagcttatgtccaaataagccccctttcttaatgtttggttttagtcaccttggtctttgtgctgctgtaaatccagggtgttgtttctgtttggtgaaatgactgctacatgaatatctggttctggcatcttgccatagccggatcttgcttctgctaaggttattcctatcagggatatataggattggaaaaaaatatgaaagattttgatttattt

SEQ ID NO: 20740 - DNA, 1851 bp, Zea Mays
tccgattgttaagcttcaactgttacctattgtcccttgatctgtttctgccgcctacactggacgacgcttcatgcatacgagatgatgagttggccgcaagttttctttgatcccagcataggatccaccagctcacgcgcacacaaaaactattgactttttaactcgctttggttttattggatctgttgtttcggttgcgcaggggaggaaggaagaggctgaaagggcggtggagagagaaagactataagggcgagctgagtcccttgaggatgccgtcaagaaaccgcgtggagaggagggcgatgagatgagggatgctggccgcggtgatggactacttcagctcctgctggggcccgcgatcgggcgccgggcaccggggcaagggctccgacgccgccggccggcaggacggtctcctctggtacaaggacgccggccagctcgtcactggggagttctccatggccgtggtgcaggccaaccagctcctcgaggaccagagccaagtagagtccggatcgctctccctggctgacccgggcccacagggcaccttcgtcggcgtctatgatggccatggcggcccggagacgtcccggttcatcaatgaccacctcttcaaccatctcagaaggtttgcaactgagcacaagtttatgtcagcggacgtgatccggaaagctttccaagcaactgaggagggctttctttctctagtcagcaaggaatggtctttgaagcctcagattgcttcagtgggctcctgctgccttgttggtgtaatctgtgctgggactctctatgttgcaaacgtgggcgactcacgtgcagttcttggaaggcttgttaaggcaactggagaggttgtggccatgcagttgtcatcggagcacaatgcgtgctatgaggaagttagacaagaactgcagtcatcacatcctgacgatccacatattgtggttctcaaacacaatgtttggcgagtgaagggtctcatccagatctcaagatctattggagatgtatatctaaagaaaccagagtacaacagagaaccacttcacagcaagtttcggcttcgagaaaccttccagaggccgatccttagttctgaacctcaaattactgaacatcgaatacagccgaacgatcaatttgttatatttgcttctgatggtctatgggagcacctcagcaataaggaagcagttgaccttgtccaaagtagtccccgaaatggaatcgctcggaggctagtgaaagccgcgatgcaagaagctgccaagaagagggagatgagatactcagacctcaagaagatcgaccgtggtgtgagaaggcatttccacgacgatataactgtcgtcgtggtattcctcgattcggatgccatgagcaaagctagctggagcaaaagcccctcggtttctctccgagggggcggtgtcgccctccctgcgaagtccctcgcacctttctcagctccggcacggctgaacagcacctactgaagttgctaccactcttgaaaggaagaacacagtgcagatctgcagtggtgagagagagagaaaacagcaaccaagtgtagcgttacagttacacctgctgtgttgttgctctttgcaaaactactgtctagactccgcctggtaattagtgtactgatagcgaggtaaaaaagttagattatttgttagcgacacacatcctttcaccttctcttctctccctcgattcctatcccttttctcttcatccttgagagaacaggtggttgtaaattgttcagaacatgttttcccttatagtccatcatatcccgcttttttcgtgttg

SEQ ID NO: 20741 - DNA, 2262 bp, Zea Mays
gttacagagtattactgatgggcttacctgcagactgcagatgttgttgcaaatgagttgtggagaaccgtagattcaaatggttggagagcatcttctgcaccacgcatctgttggcctcccccaccagctgaatctgagagcaatgggtacttgcgtgtctggtgcaacggcggcttgacccaacaacgcagtgcaatatgtaatgctgttgtcgtagcacgaatcatgaatgctacactagtgctgccagagttagacacaaattcattttggcacgatgagagtggttttgtagatatatatgatgttccccacttcatcaacacattgaaatatgatgttcgaattgtcatgagcattccaaaaatcactgcacaaggaaagaccaagaagctcaaagcatataagattttacctcctagagatgcacccgttacttggtacagaacaactgctttggagagactaaggaagtatggtgcaatatatttaactccattttcacaccgtttggcagaaaaaattgatgatccagagttccagagattgagatgcagggtgaattatcacgcactacgatttaagccaagtatcatgaaaacaagtagtgatatagcgaataagctccattcagaaggccatttcatgtcaattcatcttcggtttgagctggatgtgcttgcatatgctgggtgcttcgacatattcacacctgaagaacaggaaatcctgttgaggcatcggaacaaatattttccattgctgttgaggtattggggcaaatattttccaggaaacacacctgactacagggaaagaaggctcattggaaagtgccctttaactccagaagaggtaggtcttattctacgtgctacgggatttgataactcaacatggatttaccttgctcctggcaagctctttggtgggaaacacttcatgaagccattcaaggctatgtttccacgtcttaaaaaccatagtatgatcagaagtggaaagctggaagaaaatatccgagggctagcagggtcagcagttgattacatggtctgtctcctgtcggacatttttatatatgatggtccgagcaacttcgcagacaatctcatgggtcatcgtctatactatggtttccgaaccacgatcacaccaaacaagaaggcccttgctcggatattcatggacagggaggaagggcacacatctgcatttgaggagagggtcaggcaggtcatgctcacccattttggcgccccccacaagcgcatccatccagagtctttctacacaaacccatggccagagtgcttctgccagacgaaagctaggaatcatgctgaccggtgcccacacaacagtgtaaatgatgtccttgaaagttggttccataataaagaagatgtagaagtggaagctactaatcaaactgactccaccagctaaaccgagagttggctggtggaactgagttatcaaaggtttattgattgagaacagattgtttgtcacagacctgcgaatgacatcattggaggaaggattgatggctccagatctctgtaggcgattatgttcgactcaagatttagttgttgagattcttagtctgggagggtcagaaccagattttggataggtttacattgtcatgtagagttctgtggaagaaaaatcatacgaacgtcatgaactatgtggctactacaattggagatctttaccccatatgctatagctgagtgtttggtggcttcagttctgttggagttatttgctgttcctcactatacatatctggttgaattcatgcgttcctggtcctggaactggaacttccccagttttgatttttgcaattcaccgtaatgctaaaaagtcgactatctccaggctccctatcccactccctatttcaaagttctctctgcaacaatacatctatagtgcaaaacagtgttatacacgcctgcatgcacgacgttgctggagttggcctaattccgggttgctggagttggcctaattccgggctccttcgaggtccatggcagcatgtaactgtattgatttgttctccttgtttgtagcctcacacttggttgaatatttcgaaaaatctagaattccaatattttttcttatttttattttgtttttttagtttctttagaaagagataacagtcctttgtacttgtatatatgtacacaacacatattaatgcaaaccatgtattgtgtcagtcgtttgaac

SEQ ID NO: 20742 - DNA, 1372 bp, Zea Mays
acaccgcgcacggcatacccaccactcgatccaccacacgagggcacgagagaagaaccacttccatggccggcgcctcatcgtgagctcctcgcagcatcgctaccgcgcccttgcgttagctctgtcttcctgtcgcacgtacgcttgtgagacaagcgagaagggaagagggagcgggactgcaagaacccgatgcggcggacgacgagcatgacggagttcgcgccgcccgacgcgctcgcggcggtgatggaggacgaggagggcccccagctgtccgacgacagcagccgtgacggcgggcagcaggactggctgtccgcgctcggcggcggcggcggcggcgtcgggggcgccgcggcgcaggaggactggctcgcggcgtaccacgcccgcgcggcgccggcgcgggcggggctccgccggaactcggccgactactccgccgtcgagaccgccgcgttcctgcgcgcctgcgggctctgccggcgccgcctcgggcccggccgagacaccttcatgtacaagggcgaggcggcgttctgcagcctggagtgcagggagcggcacatgacgcaggaggagtggaaggacaagtgcgcggtgacgtcgatcaaggacgctgccgcgggctcggccaaggtcaagggccgccgcgccggctccggcaaggctgggggcacggtggccgcagcatgacgacgatgctgatttgctgaacctacacctagctacctagctaccaccagcttctcctcaactagccagctgcaagctccgattattcacccgtgcaaccatctatatactaaccatgcatcatatatgatatatccccagctagctcaatcgattattaattatttgttatccggatccatcgctcatcgctgcatgcaagccatactgatagatataatactataccattagcttgattccatcatcgatcatccgcgcacgcatgcttggtaaaagaaattcttcaagctttgttgctatatatgctactggagtactatagatgttgctatacactttagtgtagcgatacagcagcatgagtagacgtccttgtgtacaagtggaaaaaagaaaggtgaagggaggaaattgatgtggcttcggcactactagcttggcagatgcactgggccacggatgatccctgtcactgccactagccctgagaacaagacggtgtgaatttcagtgtttcattattacctcaaattgactctgggcatatcgttgtccctccgtagggggagttttattattttactaattttctgtttggatttttattattcaccgatgcaaatcatcatttgttcaataaaactcgaatcaacttattatttgcaag

SEQ ID NO: 20743 - DNA, 1855 bp, Zea Mays
gcagatgcttatttgtgctattggctattgactggctctttctatgcaagcaatgcagttgtagtttagatgaatatgcttcttagtttggctggtttacatgaaacaattcatattgctgcttattttaaatatatttgtgtgttgacctacttttgcttgtgatttcgggtgggtttgagtgtccatttcatctgcttggttgtttgaagatttaggcggtggtgaccaatctgaacggcgcacactcgacatggccattgctatggcactaagggagagcaagcccgtgtacctcagcatcagttgcaacctccctgggctacctcattctacctttagttttatgttcaagtacatgattatcgggagaaaccaagatatggtgcttacactatttttgtaaatccttttgtagcaatgtatgcattgctcttacgtttcctccagttatatttatgagttcccttgtatattgatggactttaggtgcaaaatatttattagttatgtgagaatttatggccaatatctggtttgtttaatggttttacacactaacttcaaatacagcatgaattcctgtcactagcccctataaggctattggagatcgatattcaaataaaaactcttaccgcacagtgcacattgtatagttgaagaagtgcacactctttatgtttttaaaaggaaaaacatttcaagggtgtttagtagccatggtactgtaaacctgtgcattctcttgcaaattaatgcacaaaggttgtgctaacttgcccctaatttttttttatcccacttggcctgttatacttatacaagctaaagtagacttctaagttaaggcacacatgcagaattgttgccactttctcattttgcccttaattttttaccctccatagcatccatttattgctctgatgatcaaactattggtatgatataattaagtactgaagaaaaaaagtttcaaccattttagaaataatatctctgacccgaattttcgtctccccaggtctgtgcgctgggctgaaggcggacgcgcttgctcatcaaccgcgtgcggtcgagtgctagagccaccgattcaccgtcgagtgcatcacccgctacatcgctgggctacagcagaagtatacacaaagtggtggagtccgctccctttggcttcgaacccgacaccaataagccagcgctgtaccagaccgatccatcgggtaccatctctgcttggaaggccaatgccatgggaaggaactccaactctatgtgtgagtttctgaagaactacaaagacctccggcaaggagaccatcaagtttgctatctgtgcacttctagagattgtgaactgaacttaaatcatgcattcagtattggtctctagagaggaagctctgccaagcattactaagaactgatcaggtatacttatccatggtggaaagaaaaggtgattgactcagacttgaaaagaaaagatggcctttgcccattgacgcctgaggagactactcttgtcctcagagcacttgacatcgatagaagtatgcaaatatacattgctgctggggaaatatacggtggaaagcacaggatggcttctctaacttcagcatacctaaatgttgtatgtgcacaaatatattatgcatctattgtagcgtacttgttacacagtactcttccatctctcctttttttccttgttgatgccaaaatcaagtttacaagtatggttgcccctcacccacagcctgttacatattttagtatcatttatttatggaaaaacgaattctcttgtttagtatcatttatttatagaaaaacgatgtgtacg

SEQ ID NO: 20744 - DNA, 481 bp, Zea Mays
cggtcgacctggagcaaaagcggcgggtgtgcgctgcttggattgcagccattaagagagagaaacaagggtagaaggacgtgggtccattcgcgggtgagaattgagctcgtccgcaaccttcacgcagtgccagacaatggtgcatccttgcactacgcgaggactcgcccacggggtcactgtgtcggagaccgggtgcctcgttgtcgacgtcaagagatccggcgcgccaccagtctccgtggacaactacactggtgcctcgaaaacgaataagtgaagaccagtcgaacaactttcttatagggtggtggacctgatcccatacaaaaagtgcagaaatagttgctcaaagattggattgtcaggttggttaataactgaattttaattcagttctgaaccctgaatggcagcaagttgcccagtttggatctctatgataattaatctatggagattttgaaacaaaaaaaag

SEQ ID NO: 20745 - DNA, 1514 bp, Zea Mays
ttcaaaagcccttattttctaaatgcagatgatccaaatagaagcatcttcgcactagatttaatgccgatgctcacaaagttgagaccatttgtccgagaatttctgaaagaagcaagcaatatgtttgagatgtatatatacacgatgggtgacaaagcctatgcaattgaaattgcaaagcttcttgaccctagtaacatatattttccttcaaaagtgatttcaaactcagattgcactcagcgacatcagaaaggtcttgatgtgattcttggagctgaaagtgttgcagtgattcttgatgacactgagtatgtatggcagaagcataaagagaacctgattctgatggagagatatcatttctttgcttcaagctgccgccaatttggttttggtgttaggtctttgtcagaatcgttgcaagatgaaagggagagtgatggtgctttggctaccgttttagatgtcttgaagcgcatacacgctactttctttgacatggctgctgaaactgatctttcttcacgggatataagacaggtgatcaagacgttacggaaggaaatactgcaaggatgcaaaatagtcttcagtcgggtgttcccaaacaatacacgcccacaggagcagatggtctggaagatggccgagtatctgggtgccgtttgcgttaaagatgtggatcccagtgtcacccatgttgtaactgtggatctgggaacagagaaggcccgctggggtcttaacaacaagaagttcttggtccacccacgctggattgaagcagcaaatttccggtggcataggcaaccggaggaagattttcctgtcactgcccctaaggaaaagagcaaagagaaagatagtgataatgatgtggctggcaagaaggaaacgagcgaggataaagagaatactgcagctggcatgaaggaaacgaggaacgatgaaggaaatgtaaccggtaaagacaaagctgatgccaaagaaaacgttgtgaccacatctgctacgtgtcctgcagactcgtagtctgtgttgggctccaaaggctttagatctgtccataaaaaaaagacgttacatctgctccattgcaaattttgctgctgacctgaagctgattgggcctccggccatataacttacgctacgatgaaactataggagttgaagcaaactgatgtctttatgggacaatttttggtgaatccgtgcgactatgtgcgcagatgtacttaagtttgtgcctgcttcggtaggtactgccccctgatgtaagcattcgtgatcgctagtggaactacgttattctagttgaaaaaaaatgttccacacattaattcttgcactggaaaaggcataggcaaggtcgctatgatgttgccatacattgagtacgaagtgatatgttttccggcggagctgtaggggttttcgttatagtgatgaattgatgatgacaaaaataaattccgtcatttcttttatcgtcgaagaagcaggaa

SEQ ID NO: 20746 - DNA, 3777 bp, Zea Mays
cactttcccttctgtctggctccgcatcccagtcccagacccggcaagcgccggccatcgccatttcggatccgggcccgctcagcgcgcgggttcccgaacccggccggccggccgcgctcctcgccaccgccgccgccggccatgaagcgcgcgcgcagctccgaggtattcatcggcgtaggccggctgcgcgcacgcaggggcctggcgccgcttctcgcagcggcggctttcgcctacctactgttcgtgtccgtcaagctcacttacctcggcagcgctgggcccgcgcctgccgtcggccgcctggccaccaccggcgcgggcgagccagctgcgcgcgcgcgctcgagcggcggcggggccgtgtccgggtacggccgcatcaccggcgagatcctccggcggcacgaagccttcgaggagcggcggaagcggtgggggcagctggggaacttcacggagctcgagcgcgtggcggccgaagcgtgggcgctcggggccgccgcgtgggaggaggcctctgcgttcgacggcgacgtcgactacatcgcctcccgcgacgtcgccggggagggcacggccaagtgcccaggctcgctcgcgctcggcgccggggagaccacggcgttcctgccgtgcgggctggccgccgggtcggcagttaccgtggttgggacagcgcggacggcgcggccggagtacgtcgaggcgctggagcggagcggcacgggcaacgggacggtgctggtggcgcagttcgcggtggagctgcgcggcctgcgcgctaccgacggcgaggagccgcctaggatactgcacctcaacccgcgcctgcgcggcgactggagcagccgccccgtgctagagatgaacacctgcttccgaatgcagtggggcagggcacagcgctgcgacagtaccccttccggagacgatgacctggtcgatggactaagaaaatgtgagaaatgggactggcaggacgtagttgaatcgaaagaaacaaagacaagctcatggttcaacagattcatcgggcgagcaaagaaaccagaaatgagatggccattcccattttcagaggggaagatgtttgttctcactatccaagctggagtcgaaggataccatatcaatgtgggaggccgccacgttgcctcatttcctcataggatgggattcgccctcgaagacgcaacaggtttagccgtgacagggggcatagatgttcactctgtgtacgcaacagcgcttccaaaggcacatcctagcttttctctccagcaagtcttggaaatgtctgaaaggtggaaggctcgccctgtgccagaggaaccaatccatcttttcatcggcatcctctccgccacaaaccatttcgccgagcgcatggctattaggaaaacttggatgcagtttccggctatccaatcggggaatgcggttgctcggttctttgttgcgctgagccacagaaaggagataaatgcagcactgaagaaggaagcagagtattttggagacatagtcattctgccgttcatcgaccggtatgagctagtggttctgaaaacggttgcgatatgtcaatacggggtgcacaatgtcactgcagattacatcatgaagtgcgacgatgacacctttgtgcggctggatatagtactgcaccaaatcagtacctacaacaaaacctcacctctgtatctgggcaacctgaatctcttgcacaggcctctaagaaggggcaaatgggccgtcacctacgaggaatggccagaagcggtgtatcccccgtacgccaatggacctgggtacgttatctcggccggcattgcgagagacgtagcatcccggcatacaaaccactccctacggctgttcaagatggaggacgtgagcatgggcatgtgggtggaggactacaacgccagcgcccccgtgcagtatgtccacagctggaggttctgccagttcggctgcgtggacaactacttcacggcgcactaccagtcccccaggcagatgctgtgcctctgggagaagctgtcagcggggagagcgcactgcttcggcgcacagcgcacagctgctggaccagtggaccggcgggacaaggaaacccgcgcggtatccggtggttttgccaagaccctcccccgtttacaagccagaaggcaagctataggcgaaacttcgggggtcgtcgagggttctcgaccctcccttcccctctctcgcccgctcgctccctcaccgccggcgttctcgccgccagctacggacggggcacactgcgcagggtcccagccccgcctctcacccgaacgtcttcgctcccctcaccgggtaggcgtcgcgctctactggcaccaccccggccctcgcgctctactggcaccggaccggcgcggggtggcgcggagacctgtcccggccaggagaccgttccgtgctataccggtgaagatgctctttgcatagctcaagctccaaactgatggattctgatgacaagaagtttggaaatgggccaagggagcttactggtgctgttgatttgattaaccactacaaactgctgccacaccatgatttcttttgcaagaaacctttgccactggcaatatcagatacacattatcttcacaatattgtgggagacactgaaattcgaaaaggagaaggaatggagttagatcaacttgttcagaatgcatatatgagggataaacctgcttatattcagcccttcgatatggaaacactggggcaagcgttccaacttcgagaaacagctcctgtggttttgccctctactgaaaagggtataccgactatttcgggtaaaccaaaaagcgagtccaaggacaaagagaagaagcataaaaagcacaaagacagagagagggacaaagacaaggaacataagaagcacaaacatcggcataaggatcggagtaaggacaaagataaagacaaagacaaggataagaaaaaagataagagtggtcatcatgattctgattcaaagaaacatcatgaaaagaagaggaagcacgagggaactgaagattcagcagatgtgcataagcacaagaagagtaagcacaagagttccaaaaccgatgagatggggaatggacttattagttaacacttcctagttctagcttcaatccttgtaatttgctgttaaaaggagactgatggtctctgccatcaaaaccctgtgcagaatagtgatgacaacataagttggagatcttgataagaacgcgataaagaagtatttttgcagagtccattccgaggaaaattaaattacttaatacaggactaatccttcgaactgtgcaaccttctgttcctccctgacgaattggttgtaggagcggttgaaaggatatgccatgagattgtttcgattgcagggccagcgcacttattgatactaggcttcttatttaactcctaatttcggatgtagcgtgcatgagtatcctgttgagtagctgtggatggttttacagttggtctagagatgtagttgagggcagggaattggaaagaatttcgtgttcccgtcgtactgaccttggttgatagagagtttaaccagtagctaaaattaaatgttgctagtcagttccaagttttattctgcgtggaatgaattggagtcaaattagcacactgcttatttaaccatgataaagatcttgttattacaaagtataattattggttcgtggtcggaccttttgcgtg

SEQ ID NO: 20747 - DNA, 667 bp, Zea Mays
aaaaaaaaaaaaaactggaaccgagcatatgttcagatggacggagagccgtggaaacaaccgctgctacaggagcactcaaccatcgtggaaataaacaaagttccgtatcattctctcatgataaacggggagtaatgagatttttactccgtcaaccagatcgttaggatcgtgtacagttcaggagcagcgggcactagatccttagaactgggtcggacggactgcagcgaggatggcatgcatgttcgttggccttttgtcgtgctatggtcgaagccatggccggagcgtgatgtggcaccatgcattgttgtattcgtaccataatatgtgcgttgttgtatcctaagttctttttgaaggaaacatgattgatttgtttgtattgtaacgttgtgtcattgcaaaagaataacctggtgtaaaactgtaaaatgtgacagtctgccgtttgcacagccctgtagcattttttttttgttcttgttaactttttttttatgaaagcattaactgatttgacttgtcagagttttctattaggaatgccagggagcaatttccctctaccaacttgtacgtagaaactaggaagtactagtgtggtagtaatttatgaggccgttgatcctggcatctccaccgatacagagtgtggcgc

SEQ ID NO: 20748 - DNA, 1297 bp, Zea Mays
actaacgacacgagtagtactgatcagggtcagggaccgtccgtagtttcagtcccgctcccgcagtctggttcgtcttctcttctccccacctgtctccacaattccccataggaggagggggaggtagagaagcgcgaatggagagcaggaacgtagtggtgtgcgacaatggtaccgggtatgtgaagtgtggctttgctggtgagaacttccctacatctgtgttcccttgtgttgtcggacgaccgctacttcgctatgaggagtcacttcaggaacaagaattgacggatattgttgttggagcagcttgtgctgacttgagacatcaacttgatgtatcatatcctgttaccaatggcattgttcaaaattgggatgacatgggccatatctgggatcatgccttctacagtgagctcaaggtgcctgtagttgatggatactcttatccacatctgacaaagagaatgaatgtagctggaaggcatataacatcttatcttgttgacctactctcaaggagagggtatgctatgaataaatctgctgactttgagactgtcagagaaataaaagagaagctatgttatataagttatgattacaaacgagaataccagctaggacttgagaccacaatccttgtgaaaagttacactcttccagatggaagagttattaaagtaggcactgaacgatttcaagctcctgaagctcttttcactcctgaactgatagatgttgaaggtgatgggatggcggatatggcattccgttgcattcaggaaatggatattgacaacaggatgacgctctatcaacatattgtcttaagtggaggaagtaccatgtaccctggtctgccaagtcggttggagaaagaaattcttgaccgttatcttgatgtagttttgaagggaaacaaagatggcctaaagaaattacggctgaggatagaggatcctcctcggagaaagcacatggtgtatctgggaggtgcagtgcttgctgggatcatgaaggatgcacctgagttctggataaccaggcaggagtaccaggaagaaggtgtagcgtgcctaaggaagtgcgggcagtcataagtcttgccacatatcatccacagaagaaatggaggttgcatgtgtaaagaagagctctgttgttggtgttgtgtattgtagtgagctatagctgtcctgaacatgcttggggataaaccatgtttgtattggcctactcaatttgacctctgttattgatcatcctttttagatatggaacatgacgg

SEQ ID NO: 20749 - DNA, 2196 bp, Zea Mays
gtcgggcggtaccccggatacacgcggcgcggcgcgtcgctttcagttcgtgctccagccttttcgtatagtttaatggttttctagtcgtccgtcctcctcggttctggctgccaaccccaagaactgccttgcctagtgcctactgcctagggaaggaccgaaggagaggtgcgcggctggtggcgtgcgagtggcagcggcgccgcgggactcttctcctcgccgctcgcctgctgggtgcgccatccctcgacggtgacaccgtgatattgctgtgaagttttgtggcacttcctgcatcccttatatggtattaacaaaaattttaattgtctgggtgatccatttgagcaaatggaaggcaacgatgtaccccttggaaacatgttgcaaggggttccctatgaaagtttagacttacgtggcagctctatgcaaaattatgctccaaactcaggaaaacatatcttcagcagctcccagatgccaggtactttcacaatgtctatgaccagggctacagagcctgatgactttcctgggtttcagttcaaagaacagggaaagagtgatgaccaccaccaccaacaccatagtcatcactcaaagaactgcaagagtgatggtgaggaacatgttgtggctgaagatgctactgataccccaagtggcaaaggcaagaagggctctgcatggcatcggatgaagtggacagattcaatggtaaaacttttgataacagcagtgtcttacactggagatgatcatggtgctgattccggcggtggcaggaggaacttcacaataatgcagaagaagggcaaatggaaggcgatatcgaaagttatgggagagagaggctgccatgtgtcaccgcaacagtgcgaggacaagttcaatgaccttaacaagagatacaaaaggctgacagacatccttggtaggggcactgcatgcaatgttgtggctaatccagcacttcttgatagcatgactcatctttcagataagatgaaagacgatgcaaaaaagatacttagctcaaagcacctattttatgaggagatgtgttcctaccacaacaacaaccgtgtaaatttgcctgaagatcatgcacttcagcattcactactgcttgcccttagatgtaaagaggagcatgatcctcagagggatccaagtggagatgctgatgaatacgatcaaagtgctgattctgattatgaggagaatgacgacgatcaacatcctgtgcatataaacatgagggagccctcaatgcacaaaaggaagcgccacagtgatgtggctttggtcacatcaagttctcatgaaggcagtgagaggtctgatccccatgctgtcacagtggacatcaacaaggctttcacagatgcaaccaacatggttttgttgcaacaagacttggcttcacaagccatagagattcagaaacgtcgcttgcagattgaagcaaaggaactggaactcacaaagcaacgtcttaagtgggagcggttcaggaagaagaaggacagagagatagaaaggattgcattggagaatgaacatatgatgattgagaacaaacgcttggagcttgagctgagacataaggagttagagctagagctgaagctgaaagacaaggggaaccatccgtaacttttgcttgaccaacactacagtatgtaagatggtaaacaagttgcggttgagcttctggaagagagctggtagattagagtagactctgacaaccattcctcatgtatgtcatggtgatgtggctatggccaactctgaagctctcatggaggatttggtttcacaagcactagagattcaggaaccttaacatgcagtgaagcgacctaactggaactccggaaagcgacgtctcaagtggaagccagaatggacatatcaatatttattgagtgaggaatgagaacaaacgatttgacttgagctgagagcctgagacgtgcaagcagctagagtggcaaaaaggccaagcgaaccactgcataagggtaggtatggtaatggattacaattcaaatgtttcttcataactaattaggagtcttcaataattttagtttaaaaataaatagaaatagagctatattcgattcttaaaatttatagtatattaccatccctatccgaggttgatcaacccttcca

SEQ ID NO: 20750 - DNA, 1391 bp, Zea Mays
cacgaagtcacaaacttgtagttactggttaagtatccgaaggaaccaccacatatttatgctgtggaaagtaagggccttgatgagaaccgacagatatatcttatcaccagcatccagaacaaggcaaacgaactttcaaactgtccaatgcttgtgacgttatgtgaggaagctggagagatcctctcgaacatgaatcatccagcaggggattgtccattgtgtctatatcctttaatgggagaggataaggttggctcggagttgccatttatgaagttgatgtcatgctaccattgcttccacagtgactgcattatgagatggtgggaatggctccaacatggtgacacaaacccaaaggagcccaatactggagctcagacaagcattataatgtgaatcagccaagaggattttgtcctgtttgccgcaaagtgttcgatgagaaggatattgagcatgttcgtgatttgttgggtgacaatacttccaggctggcatcactaacagttgaccttggtgaagatgaaaaggaattgctccattccgaggctgagcaaaacaggagaaaaagaatcgagtcacttgttaatctgcagcaagaactaaacggcctgattgaaccaaagaaagaccttgccatacaaccaggaatgtacgtttccgttcctcccagcacgccagacacagctgaagaagagaatgctgatcccagccaaggcacggctacttcgacctcagaaactgagcaacgtggccaggcaagcaacgccagcagcaacaagccgaagaatccaggccatcgaaggagaaacagagctaatgcatcaagacgacagcctcacggccagggccagccagctaggcagcagtggcagaggaaagaagcaggcacttcacaccaataaaacaacatcgaagcaacgaggaggatgtgacctgtgagttgtttttgtcggctatgtacatcaatgtcgtgccttgctttcgtctcataataattgcgagccatggtatgacaatgttttggcgctgctatggaagttccatgcaagtgatactctggaaagaaccctgcaccggattctatgggagtagtataaagcacatgcatgcttggctagtacatacaatatctgattttttgtgtgtgtgtcattgccaggtactatgttcaaactgattgtccatagtcagaaaagcaactgattacactgtttgttactctttgagttgcatcatgtgtttgaaatacatacattacagcttaggtcatgtgggacattacaatataaagcactgcatgcagaatttgcaggggtcggctatgttggtaacccaataacaatgcatacctgtaaggtgctattgttttgtccgctact

SEQ ID NO: 20751 - DNA, 1072 bp, Zea Mays
gcagccgagcaagcaagcccacttcaggcgagtccatgaggaccatgaccacgaggcggaccagcccaagcccatgaacgcgaaaacaaaccctagccacgaggtcggcagtcggctcctcgaccggacgacgtggctgcgaatctgcaggaggaggaagaggtgaaatggtgaaggccgcgacgtggctcctcgatcggctcctctacgtactcaagcaggacaagggcaacgacgccaacaccgcgcgtgaccgacggcgaaggaggcgtgctccggccggtggcgccgccaacgccgttggaaacgatgatggcgaggagcagcacctcaacacctttctcgacgctgcgaatgcgtcgtccgcctcctcaagggtgcagttcaggtgcgtgcttcgtttctcttgcagatgctttgctttttttctgtccgtgttggctcgtcctggtgggattgtgaccacgctgggttctgcggatctcggaacaggaatatggcgtcgcgcgcgcggtgggtggaggaagccggcgctgcggaggtggtggagaacaggggcaagctgtggctgaccaccggtgtcactcgggccggcaagctgtactacaacgttgaggagaccgggttcttggccgaaatgggtgccttgattcttctcaatgataaggatgagacgataggaattgaagatatctatgggaagcttgctggaggaaattatgggtgctcctgggataccttccaggcatataagcacttgaaatcacttggatatattgttggaagatttggtgttccctggacaatgaagcatggtggtactcatcacaccattgctccccagatcaatatacttgagactgatcagagcttaaatagagttgacggagcctccaatgacataaccaaattgctcaaggaaatacagattgacgggatatgtccatcttttgaagtttatctgccaaatagcaagttcaaaaagtcatccccagggtgccctagtttcctcttatgtctattaagttaaaaacggaccggaatcttttcctcgactagtagcgaaaatgaa

SEQ ID NO: 20752 - DNA, 1212 bp, Zea Mays
tacctctctcaagaaggcacatacggagtgctcagtgggcgaggactgcttcaggtccaatatttggtagggatgtccgacacataaacttgcaatttcatatttctgcgaggacacgatgatccagctgccattctttctgtcgggaaggaacgtcctgatagagtcccactctgccatggtgggcaggtcttccaagacaacaaggtacctgttcttgtcaactagctgaacgaactcgctgaggagatccccctgggtggcagtcgcatccatgctagttaggacatcaacaccgatgatccctccttgtctttcttggcaactgtttgcataaaagtgagccatcaaagaccgcacaaactcatgggggttgaatggatggctgaggttgacccaggctcggcatatgaaattttggatgatctctggatcactgtagcacttccttatgatggatgtcgtcccggtgcctccacctgcaccccacattgaaatcaattgaagatcagcatcgtccttgttggtgataagctgggtgagatcccctaagatgtgtttccttcttgtgtcgttttcgtatgccacagcaccaggaggcaccggctgttgcctcacgaggccgggctttgagccggcgtcgctgatgaggttataccgagtgttcctgtggctaacgtcctcgacccttgcctttagatgcttgagttccacggccagagatgtcactgacatgtatggagaccccggtggtgccaggcatgctcggaacaagcgggaccaccattttctggtcttgtccaggcaggagaaggcatccatgtagtcttccaggtcataggccagaccacgcgtctgcatcacccagatcctcactaccgcgttgttgatacgctcctcatcagtgatgctaaggaatgaatagatcatctgaaactcatcggtgatgaagtggaggtcatgctgcatgctaataagtagcatattttcttcctccatcaccgactgggccttgctgatcaccccctccaccaccgacttggttatcccaattaccaggtcccgcattgtgctctgtacgtactctctcggtcccagtctgctaactccctttgtgttgcttgtttcttctgtgctgtggctagaatcaggaaggggtggtggttgtgtttgtgctggagtcgagcatatatccactgaaaatacctggag

SEQ ID NO: 20753 - DNA, 2784 bp, Zea Mays
gttttctcgctcaactaggatatattttccctgtaggatttatattttaagtacccagaatattagtcgcgaaaaaagtgaagatgatctgcctgagggtgtgctagcagtacctctgcttagacatcagaaaatggcattggcttggatggtttcaaaggagaatagctcacattgtgctggtggaattcttgccgatgatcagggccttgggaagacagtgtctactattgcccttatacaaaaacagaggatggaacagtcgaaatttatgtttgttgattcagatcgtttgaaatctgaagcactaaaccttgatgaagatgatgagggagaacaaactgttagcaatgaacctaaaaaggaccaaggcgcttgttcattgtcaacatctgctggtactagtgctgaactttttgttaatcaaccgaataatgttgtgaataaaatggttgaaaccaaagcagaacgcaagaaaaaagctaaagtttccacatcatctgcatccacctcacgttccatgacaaggccagctgcaggtactctagtagtgtgccctgctagtgttcttaagcagtggtctaacgaattaactgacaaggttagcgaaagtgctaaattatctgttttagtctaccatggtggtgcaaggaccaaagatccacgtgagctggcaaaatacgatgtagttgttactacatatacaattgtggccaatgaagtacctaaacagatggctgatgatgacgcagatcaaaagaacagtgaagaaccctctgctagcaataaaagaaagccatcggcgaatatgcaaaacaaggctaagaaaaagaagaagaaacttaaggactcaaactttgaccttgacagtggtccaattgcaagagtgcgatggtttagggttgtgcttgatgaagctcagacaataaaaaacttccgaactgtagtggccagagcctgttgtgggctaagagcaaagcggagatggtgcttatcaggaacacctatacaaaatgcaattgatgatctgtttagctatttccgtttcttgaaatatgatccgtattgcacgtataactcgttttgcacaatgattaagcacccaattgctagagatgcaattaatggatacaagaaacttcaggctgtgctgaaggtagttctcctgcgtcgtacgaaagaaactgtgatcaatggcaaaccaataataaatttacctcctaagacaattaatctgaataaagtagatttcacacaagaggagcggtcgttttatttgatgctggaagaacgctctcggcaacaattcaaggcatttgctgcggctgggacactcaaacaaaactatgccaacatccttttaatgttgctgcgacttcggcaagcctgtgatcatcctattcttgtaaagggcaatcagtcagaatatggaggtgatggttctatagaaatggcaaagaaacttcctaaggaagtggtgatagatttgcttgcaaaactggaagtggggtcaacactttgtggcttatgcaatgatacacctgaggatgctattgtgacaatttgtggtcatgttttctgctatcaatgtatacatgaacgaataacgactgatgagaatatgtgccctgcccctaattgcagtagaacattaggtcttgaattgttattttcgtcaggagctttaaagatttgcatctctggcaaatcgagttctgcagtagctagttcatcatcagataacgagtcatcttcaatcagtcaaagcagctttgtctcatccaagatacaagcagccattgatatactgaattcaatcattgtcatggatcctcttactgaaagttatacaatggaatcaagcagaagtggactaggccctgtgaaagccattgtcttttcccaatggactggcatgctggatttgctggagctttcactgaatatcaactgtatacagtacaggagactagatggaacaatgtctctcaatttaagagaaaaaaatgtgaaggattttaacactgacccagaggttagagttatgattatgtcactgaaagctggtaatcttggtctcaacatggtttctgcttgccatgtaattctccttgatctctggtggaacccttatgctgaggaccaggcagttgatagggcacacaggattgggcagactaggcctgttactgtatctcgcttgaccgttaaagacactgtggaagatcgtattttagctctgcaggaggaaaagagaaccatggtgaactctgctttcggtgatgacaaagccggcggccatgcgacccggctcaccgtggaagacctgcggtacctatttaggatatgattgcgagggaactctctcaatgcctcggtcaacttgtcaggtcatgatgcgttgtaccttgtaatcgtagtccggcaaaagggcggtgtaccattgcgagggtaggctcattggtccatgtccgccacgccttgctgcagctccagttttgtggtgctcagatttctagatgggtaatctagggctagatagcatgtgtaattataaccccccaaccccccctccccggggcatggaggagagttccgcagtgccaatgctttatgatttagtgtatgtatatacatgatcaccatgtctaacttgcaatgagttgttttagctcgagatgtgagactgatactgccagcgggtcagcattttgtaccttctgtgttatgtccctttgcccgtcatcagaaaatccaaaaaatcaaaacttttgttggtgtcca

SEQ ID NO: 20754 - DNA, 2423 bp, Zea Mays
ggcacagagatggcgagatgccaggcgagcacgagcaaggcaagactgcatgagcacaacgggggggccgggccagacggacgggacgggaagcagcacgcgccacgcaacaacaatggcagttggcacagaggcgcaacgcaaaaaccccccaccgccaccgctctataaaaaccccgtcctcctcctcctcctcctcctcccccgcctcgccgccagtcagattcaccaccggctcccctgcacaaccgcgtccgcgctgcaccaccaccgttcatcgaggaggaggggggacggagaccacggacatggagagatctcaacggcagtctcctccgccaccgtcgccgtcctcctcctcgtcctccgtctccgcggacaccgtcctcgtccctcccggaaagaggcggagggcggcgacggccaaggccggcgccgagcctaataagaggatccgcaaggaccccgccgccgccgccgcggggaagaggagctccgtctacaggggagtcaccaggcacaggtggacgggcaggttcgaggcgcatctctgggacaagcactgcctcgccgcgctccacaacaagaagaaaggcaggcaaggtgtgtacttctttccgagtatcatcatcatcaagaatccatccgttttcatcctgttcggtattctctcccaaaagaggaacaaaaccagtcttaaatcttaatacgaggattaagcagcaatggtggtactacgaccataaacaaaacccaatactaggaacccaactgaggtcctttgtgtcctatgcaaggatgctgaattcctgatgcatctgcccagtaccacagtacagcgatcctttttttctctctctttgaaagtgcgccgaatttctttaaggctgacatactgatcaggctttgtttatctccattttttttcttcaatctttggcgatggtggtccccttggcgccggtgatctgcatgtgcctgtgatctactgctggctgcatcacctcaatagtctacctgggggcgtatgacagcgaggaggcagctgctcgtgcctatgacctcgcagctctcaagtactggggtcctgagactctgctcaacttccctgtggaggattactccagcgagatgccggagatggaggccgtgtcccgggaggagtacctggcctccctccgccgcaggagcagcggcttctccaggggcgtctccaagtacagaggcgtcgccaggcatcaccacaacgggaggtgggaggcacggattgggcgagtctttgggaacaagtacctctacttgggaacatttgacactcaagaagaggcagccaaggcctatgaccttgcggccattgaataccgtggcgtcaatgctgtaaccaacttcgacatcagctgctacctggaccacccgctgttcctggcacagctccaacaggagccacaggtggtgccggcactcaaccaagaacctcaacctgatcagagcgaaaccggaactacagagcaagagccggagtcaagcgaagccaagacaccggatggcagtgcagaacccgatgagaacgcggtgcctgacgacaccgcggagcccctcaccacagtcgacgacagcatcgaagagggcttgtggagcccttgcatggattacgagctagacaccatgtcgagaccaaactttggcagctcaatcaatctgagcgagtggttcgctgacgcagacttcgactgcaacatcggatgcctgttcgatgggtgttctgcggctgacgaaggaagcaaggatggtgtaggtctggcagatttcagtctgtttgaggcaggtgatgtccagctgaaggatgttctttcggatatggaagaggggatacaacctccagcgatgatcagtgtgtgcaactaattctggaacccgaggaggttttcgctttccaggtgtcctgtcttgggtaatccttgatctgtctaatgccacagtgccactgcaccagagcagctgagaactttcttgtagaaagcccatggcagtttggcgttagacaagtgtgtcgatgttctttaattctttgaatttgcccctaggctgcttggctaacgttaagggtttgtcattgtctcacttagcctagattcaactaatcacatcctgaatctgaagtggttgtgcttgtgcagtttatcactgagtttacatggcatgatcatggtaacgcagccagtgcagcatagatttgttcgtttgaacagtttaccaaggctgtaaccctagtaagctccagattaaggaacctttgttttcaccattctatatttactagatgaatgcccgtatgttgcaacgggaatatataatattagtatactacaataacttatatacaaaatgtgtgttataccattatgagaaaatgtttcaaaatc

SEQ ID NO: 20755 - DNA, 348 bp, Zea Mays
gctttaacctctattgttgatcagccttacacttcataaactcccaccttttgtgagttcatgtcacattattccccacaacttgttgagcgatgaacatgtgtgagctcacccttgctgtctcacaccccccacaggagaagaacaggtgattcaggaggagccacgtatcgaggagtatgatctgatctaggtggcgtttctcagttgacattggcgccgacgatccttagttcattttatatttattcttttattttgtaataagtcttccgctatgtattaaatactctgattattgtgacatttatctctatgcactctgttattgcatatgttgtcttcttg

SEQ ID NO: 20756 - DNA, 3508 bp, Zea Mays
ccgcagtgcgttcgccccttacctttttcttgtccctttcacggtttcaccccgcgttcgctctctctcccgtggcgacgactgggcggccgccgcagccgccctagcccggtgcggctcttcgtcgggtccttcgccggcgacgggcacctaccaggatgaagacgaggatagtgtactccagggagtttctgctgtcgcttggcgagttggagcattgcaagaagctgccccctgactttgatgcagcgctgcttagtgagctgcaggagctgtcagcgggtgtgcttgagagaaacaagggctactacaacacatcccagggacggccagatgggtcggtgggatatacttactcttctcgtggtgggaacactggagggaggtgggatactcgctcatctggatcaagtgatcgggatggggaacctgatcgtgagtctcagacacaggcagggcgtggtgcaaaccagtacagacgcaattggcagaacacggagcatgatggcctacttggccgtggtggtttccctaggccatcaggatatactgggcagttgtcatcaaaggatcatggcaatgcgcctcagctaaacaggacatcagaacgctaccagccaccacgtccttacaaggctgctcctttttcacggaaagacattgactcgattaatgatgagacattcgggtcttctgaattatcaaatgaggatagagcagaagaagaaaggaagcggagggcatcttttgagttgatgagaaaagagcaacataaagcagtgctaggaaagaagagtggtcctgatatcctgaaggagaatcccagtgatgatatattttcaaagttacagacatctactgcaaaggcaaatgccaaaactaaaaacgagaagttagatggttctgtagtatcctcatatcaggaagataccactaaaccatcttcagttctactagctcctgcagccaggccgcttgtcccgccgggttttgcaaatgcattcgctgacaagaagcttcagtcacagtcgtctaacatcacacatgagccgaagctagaggatgaccagtcagcaacagggttcacatctgaaagtaaagagaagggagtttctggtaacgatgctactatgggtccaaagcacacgcttccacctggtagtgttacctcttcagctgaattggcttctagcgttctgaaagggagcgaggattgggatgctgatgtaatggataagtattctattggaaaagaaggcaaatctaaaaatattgatccagttaggaaggatgattcagtagcaatcttagaacagttctttggcaatgttttatcgaaaagcggcagcaacctaccaacttatgttgagaaccagccattgaaaactgatgatgacatgatcacttctgtgccagaatcatccaaatttgctcattggtttcttgatgaagacttgaaacctgcagaagacttatcttcaaagagcctgctctccatgattgtcaaaaatgaaaatccaggtctagaaaatttaaaccatactcctttatctgatgctgctgcccagaatttatccccaagagcacctattgataaacttgattctgcatcagagcttatctcatttacatcctctacgcctgccaatggagttcttgaacaatgcatccattctgatgttccagaggcagttcctattatgacatgtgaggatcttgagcagacgatgttagcacaggttagcaatagcagctcaactcagataaatgctacaaaggagcaactgactgttatggatgaaccagttgccatgcagaaagtaactgtagataatcatgcatcacaacatcttctttcattgttgcaaaaaggaacagataataagggagcaccttccctgggtttccagagagaatcaactgatgaacctctgagtgttgacacaaatttaatggcaaatggtggaatatctggaagtgatccggttaacagtgttgaaaatgttcctacttctgggaaggacttgacattggaagcgttattcggggctgcatttatgaatgagctccactcgaaagatgcaccagtttctattcgaggagccacaactggtggtcctactgagtttgcagagatgggtaaaactctgttgtcatctagccatgaaggatactaccctgttgaacagaccgtacacttcaacaatactaaagatgctgctgtccgtagagaaccaggtattgagcattcagcagtacctggtctaagtcaggggagtgctagttttgacaagaaaggaatggaaattcatctgcctgaagaagataatttgtttaccatgagtgattctctgcttggtcaaaattctgatattttggcatcagtaggatccagcagggttgaagggctattgcctgaaaaggcacttgataacctcagctataggtttcaaagtcttgtgcctggtgatgcagaacacattcaagtatatggtcctgatgcacttggatctcatcctcgtgattctcagaatatgtatcatcttctacagggtaggcctcctatgatagcacctcaccctatgatggatcacattgttaataggaaacagccagctccatttgatatggcacagtcgatacaccatgattctcaccgttctttcccatctaatgtgaatcatatgcaacataatcttcatgggccaggggtccctcacttggaccctgctggacatattatgcgacaacacatgtccatgcctggaagatttcctccagaaggcttgccaagaggtgtccctccatctcagcctgtgcatcacatggctggttatagacctgaaatgggtaatgtaaataatttccatatgcaccctcgccagcccaactatggagaatttggattgatgatgccaggcccatcaggtccagaggtgaggggcaatcatccagaggcgttcgaaaggttgatccagatggagatgtcagccagatcgaagcaacagcaggtgcaccaccctgcaatggccgctggccgtgtgcctagtgggatgtacgggcacgagcttgatgcgaaattgagatacagatgatggatgcctggatgcttcactccgtacagaggacctggaggtgtggtttgttgtatggttgtagcatgtacatctgaacgggtgatggaacggagtgggtctaagatctgtaggagcggaagtctaccgggaaaaggggttatggtgtgctgaatggaagacgtggcgtcgacgtcttagcagccacatgtgtaatgacgttttctgtctactgtttctgacgactatgcagtttccattttgtataagctctgttatgcaaaaggaaaaaaaaagaagaaaaaaaactgagtcagattaacagattggcgacagtgtccgcttgaccctatatcttcaacttgtttgaaaggaaatgaccacgcgtcatgccgagacgtttgtagctgatagcactgtttgagacgttttgc

SEQ ID NO: 20757 - DNA, 3983 bp, Zea Mays
tttttaaactttgttgttaaagcttgtttcggagtgagttccgtcttctccttcttcttgttcccttccacggttccacccccgcacgaccgcaccactccaccaccaccctctcctcctcccttcgcctcggtgtggggcccgactcccgagccagcattccgtcaacgccgctccgtcccgctcgactcgaccactcaaaccttctggtggggcgctccttcggagcgaggggaaggagctcatgaaagccaagcgaggaggtccatgacgaccggaggccgccgatggaatggcagatcccgtcgacatcgacaaggcacttgttgctctaaagaaaggcactcaactccttaaatatggtcgcaaaggaaagcctaaattcattcccttcagactatcgaatgatgaatcgactcttgtttgggtttcaaataacaaagataaaagtttgaaactagcttctgtgtctaggattctctcaggccaaagaacgctggtttttcaacgttttctgctccccgagaaggaccatttatccttctccctcatatataatgatggcaagcggtctctcgatctgatctgcaagaataaagtcgaggcggaggcttggtttactggtcttagtgccttgatatgtcgaggacagcatggatcccaggtccaacatatagatggaatccggatcgctggacttccttttgatctatatacggcattcaataattagaaccagaatgatctcgacaaatgcctgatcagtaaccaaagtggagccatggtggtgcaagagaaagtagcctaagtggtagctctactttcacttcggattcctttgagaataagctgagctcggtaaactcttccaaggatcgttcttcgggagaatatacatattcagaaaggactgatgtgtcggatatgcaagtgaaaagtgtttcttcttcagacattcgaatcagtgtttccagtgcccttagcacatccagccatggctctggaggtgaagattccgaatcgtttggagatatttatgtatggggggaagtcatctgtgataccatctcaagatcagggtctgatagaagtgcttactctcctggcacaactacagatgttcttgtaccaaagcccctagagtcaaatgtaatgctcgatgtgagttatgtggcttgtggcgtgaaacacgctgcccttgttacaagacaggcagaggtatttacgtggggagaagaatgcagcggtcgtctcggtcatggcattggaacaaatgttttccagccacgtcttgttgagtcactatcgacctgcaatgtcgaactaattgcctgtggtgaattccacacttgcgctgtcactgcaactggtgatctctacacctggggagatggcacacataatgctggattgcttggtcatggtagtaacgtgagccactggatcccaaaaagagtgtcaggtccactggatggtcttccggtatcagctgtatcttgcggcacatggcatacagccttgataactagctctgggcagttatacacatttggtgatggcacatttggagtcttaggtcatggaaacagagcatcatgctcatatccaaaggaagtggagtctttgaagggtctgaggacaatttctgtttcgtgtggtgtgtggcatactgctgctgttgttgaggttatcatttcacagtcaaatgcttcatctggaaagttgttcacttggggtgatggagacaaatatcgcctgggtcatggtgataggtcttcaaaactgaaaccaacatgcgtcccctcgttgatagattacaacttccataaggctgcatgtggccatactcttacgattgggttgactacctcagggcacatttttactgttggaagccctgtgtatggacagcttggcaatccaaataatgatggaaggtatcctcgcctggtcgaagagcagcttgggggtggcggtgttgtggaggttgcttgtgggtcttatcatgtcgcggttttgacaaatgctggtgaagtttacacatggggtaagggtacaaatggaagattaggccatggtgatattgcggatcgtaaagtgcctacactcgttgaggcattgaaggataggtctgtaaaacgtgttgcttgtggatcaagctttacagcagccatctgtcagcacaaatgggtgtctgggatggagcagtctcagtgctcggcatgcaggcagccatttggtttcactcgaaaaaggcacaactgttacaattgtggtttagtacactgccattcgtgcagttcaaagaaggctctgagagcagcattgtctccaaacccgggtaagccataccgtgtctgtgattcatgttacgtgaagctaagtaaagttttggattctggtgttagttatagcagaaatactatcccccgcttacctggtgatacaaaggccgagagaatagacacaaaggcaaccagagttgcacagtctaatagttcagatatgattaggaatttggatgtgaaggcagccaagcagacgaagaagtctgagtattcgtcgcaagttccagcgacgttgcagctgaaagacatccctttcatcagcgcacctgacctgcagaacctgtctacagtggctaatcagtacccttatgaccccagatctactttaccatccttgagaatgccatatctgaactactccagctccatgtcctcggaaagctccgagagtcttaaggatgcaaatgaactcctgaagcaagaggttcaaaaactacaagcggaggttaatagtttgagacaggaacgtgaacagcaagatgctgagctgcagaaagcagatgctaaagcccgtgaagcgatgaaccttgccaccgaggaagcatccaaactgaagacagcgaaggatgtcataaattcactaacagcccagctaaaagaaatgtctgaaaggcttcctcctggagcatgtgacgtgaagaacaatggacgcgttatgggcgatttagcgcccgaaatggggagagagaagcagatgcgatatggtgatcggttcagtggattgcctgctcaagtttaccaaacaagcaactacagtgaaacagccatggttcctccacaagggagcagcaggagcgagcacgtcgacggtgtccgagagttcttctcccctgtgcagcagatggccaatggaggagggtctacgactattgggtatcgttacaggtcagatgaccacgaccgaagggagacagacaggttccagataaatctgcagagcttgaatacgagaagctctaattctcccagtaaccaagtcgacgcggagtggatagaacagtatgagccaggagtgtacctgactctagtttctcttcgtgatggaaccaaagagctgaaacgcgtacggttcagccgaaggagatttggtgaacaccaagcagaatcatggtggaaagacaactgtgagaaagtgtacgacaagtacaatgtctgcggaacagatcgtctctcttcggtaacgacagcctagcgtaggccctgcatgcatgacatccaaaaaggagggcaaagccagtgcgcctgtagcatcgttgtgccctctttctttctctccatcatttgaagagcgggaggcatccagcttggttttggaacgtgcgctgcttaatcgacttgtttatctttttctgtcacctgcttggattcccctctctctcgttgtcgttgtatagaggagatgatggaaccaaagcagttgttgctcctttgactgagatatactatatacacgtagctgggcgtaaatcgtaatgcaagccccgttatcgtcgccttgtgatgtatctcttctgtcagtcgtcatgcatactctgtctgtaacacctggtacactctcgtattgatggtacatatttctgacagtcctttttaaaaccatagctcatccttagatcaacactagtcttttgtgcg

SEQ ID NO: 20758 - DNA, 1156 bp, Zea Mays
cactccgcacggccggctcacccgatctccgtccatcaaacccactgccctggtccccgtccgtcccgggtcccgccgcctgaacagccacttcccctgtccggtgccccggttgctttatttcctctctgccgtctccgtccccgggtcaaatcgaatcgagcccatccatctccatttccgccgccgccgccgccgagagaccccaaccccacccatccaccaccatgtggcgccgcctccacaccctagcccccgccttgcgcagggctaccgccgccgccgccggggcccctgcggcgtccgcctcctctgcagcccgcgccgccccgctctcctcggcggccgccgctttccgccgcaccagcccgctcctctcaggggacaagccggcgagtgtggaggacgtcatgcccatcgccacggggctcgagcgggaggagctggaggccgagggaagaagcggtttgacatggatcccctggtcggccccttcggtaccaaggaggaaccatctgtagttgagtcctactataacaagcggatagtcggctgccctggtggtgagggagaggatgaacacgatgttgtatggttctggttgaaaaaagatgagccgcatgagtgtccagtctgctcgcaatactttgtgcttaaggtcattggtgatggtggtgatccagatggtcatgacgatgaagatgatggacatcactaaggatgccttgtggttctgaaaataagaatttggtgaggcagatgaatccaatacacttctttttctagaaccagactgctccacggcatccttgtttatgaaaagacagttggccatcaagcaggtggtagttttcacctaggtattttgtccaaacaaaagctgtttgagatttgacccttgcgtttctttaagagcatcgtcgaataaaagatgactgcagtcagattgctttcttttgatacctcatattggcccatcgggtgtgatggacatgtaatattcagtaatggaacagccccatttctatgcttagcgtgctgggaattttgcaaaaggcctcctatatcattgacgagttttaagccagagtttgatgatccaacatgtttatgaccattgttttaatagtcatgctattctgtgacaatctccatg

SEQ ID NO: 20759 - DNA, 2004 bp, Zea Mays
cttcacggcaccgagaaaagtgaagcccaacaaaggtggccagcgaatcgcctctcccttccctccctcgcattccgtgccgtgcgtgtgcgtgtgcgtccccgcgttgccgcttccctccttcctcccgtcctcggcgaatcgaagccgctagcccccgacatccatggccgccggtttagcccgtctccgatccgctgtcgagcggctcgggtcctcccgcgcccgcgcccgtgcccgccccttctccgcagccgttgctgaggccgcggccgcggtgaccgccagctcggggctggggatctggctgctgtcgtcgaacccgcactcgctggcggattccggccaggcggaggatgccgccaccgcaggcggcggaggcaacattgccttccccgctgctgtcggcggtgtcggagccaccggggagcgggagggcaggttcctgttcggagattcatatcgccgaagggtgttcttcaagtacgagaaaaggattaggacgcgcagccctccagagaagatctttgagtacttcgcatccgtccacagcccggaaggtgagatgcacatgttacctacggacctgatgagggcagtcgttcccattttccccccatcagagtccaaaattgtcagggaagggagattgaggggggagcgccaccctggcgagctacaatgtgccccgtctgactttttcatgttattcgatacaaatgctgatggagtcatctcctttgccgagtatatcttctttgtaacattacttagcatccctgaatcaagtttcaatgtggctttcaagatgtttgaccttgaccacaatggggaaattgacaaagatgagtttaggaaggtgatgacactgatgcgatcctataatagacaaggagctgcccacagggatggtttacgctttgggcgtaaggttggtcagccagtggaaaatggtggactcgtcgagtacttctttggcaaggatgggaatgaacatctacactatgataagttctctagttttttgaaacaattgcatgatgagattgtccgcttggagttcagtcactacgatttgaaatcatcgaacacaatatctgcaaaggactttgcgttatctatggttgcttctgctgatatgaatcacatagacaagttattggatagagttgatgatttggatgacaatcttgacctcaaggatctgcgcattacctttgaggagttcaaggcatttgctgatcttcgaagaaggttggaaccatttgcaatggctatcttcagctatggcaaagtaaatggtttgttgacgaagcaggatctaaaacgtgctgcatcacatgtttgtggagtggacttgactgacaaagtagtggacataattttccatgtatttgatgctaactgcgatggtaacctgagctcagaggagttcttgaggtcattacaaagaagagaaaatgacattcgccagccagcaacttctggttttctaggggtgatcgcctgctggctgaactgtacaaagtgttctcttcaacaaatgctgccccagtagattcttttgacagtcgtgacactgttccattgtccttggttgctctgtattaaatgagctggagaacgtgatcgacaaccgatagagttctgaagtgtgaagaggacttttggtgtaaatattaccctgcggccccttcttaatactgattagagttggtcataccacatagcagctgtaaggaataccttccgttcttgtccaagggctccgataacatacatcttctcgcttgtttgggagcaaggataccaaataggattggagaggctaaaatgcttttgctattcaaacaaaccctaaatgtccatcgacttagctggagccttgctaacgatcttgcttttaagctcatccctgatgctaatattctgtggattgtggccggacaatcaaacttgtaatgactaaggtcttgtttgaaatcaatctagttttgaaaaaac

SEQ ID NO: 20760 - DNA, 4787 bp, Zea Mays
ctttttctcattcccttttctctcgcgctcgcaacggcggcgggcggcggctgcttctccgtctcctacttccccgcaaacttgtctcgtattcctagcgcagccggggaacactcccggcctccgcccgagcggagcggagcgtttcgtccgcgccgctgactccgaggagttcgtttcgccgcgctgtctccctgaatcctaatcgtccttttcgcgtttggctcgactgacgcgttgattcctgcttctttcgttggtctcccattctttttttacaagaactaaaaaaataaaaattctttgggttgggatggcatcacctggccaaatgacagcaagcaatctgttacggactgaaggctttcctggaaatatggtaaaaatatgtggtttaaatcctgcgagaagtcttggatcaagaagattgcggatgactcaacactccttccatcaacagcatctttgttgcccacgtctgcaaagagtaatgactcataatatccgattgttgtcatctcctggggccgtggcatccaaggggtttgacagcccattagttgagaaacctgatactgcatcggatgttaaaattattcacttgtaccgtataccatttcttcaagaaagtgaaaccatggagctgctcaggaaagtgaaggcgaaggtttctgctaatattgttgatatactgacagagcagtgcttcaacattcaattggacaattcactcactcctgagaaacttacaatgcttcattggctcttagcagaaacttatgaacctgagaagttgcagactaggagctttctggaggatgaagtatctagaaattcttgtactgtcattgttgaggttggtccccggatgacattttcaacggcgttctcgaccaatgctgtctcaatctgtaaatctctctcattagtagaagtgacacgattggagagatcaagaagataccttttgtgcctagagcctggtagtgacccacttgatgaagtcattgaaaggggagaagaagcattgaaagaaataaatgtgaagatgggacttgcttttgataaacaagatattgactattatacacacctttttagagatgatatcaaacgcaatccaactactgtggaactttttgatattgcacaatccaacagcgaacatagcagacattggttttttaatggaaagcttgtaatagacggagagaccatgccaaccactttgttccagttagtgaagagtcccctaaaagccaacctcaataactctgtcattggttttaaggataactcgagtgcaataaaaggattcccagtaaatcagctacgcccaacaattccggggttcacttcaccattatccattatcatgcgtgagctagatattttattcacagcagaaacccataatttcccatgtgctgttgcaccataccctggagccgagacaggtgcaggtggccgtataagggacacacatgccactggaaagggttcttttgtcgttgcttccactgctggttactgtgttggtaatctgcgaattgacaattcaaatgcaccctgggaagatccttcattttcttacccagtgaatctggcttctccattgcaaattcttgttgacgctagtgatggtgcatctgactatgggaacaagtttggtgagcctctaattcagggatataccagaacatttgggatgaggttgctaaatggggagcggcgtgaatggttgaagcctataatgttcagtggagctatagggcaaattgaccatgcacacatatcaaagggtgacccagaaattggcatgctagttgtgaagattggtggtccagcatacagaattggtatgggcggtggtgctgcctcgagtatggttagtggccagaatgatgcagaacttgatttcaacgcagtacagcgtggagatgctgagatggcacagaaattgtatcgcgtagtcagggcatgtgcagaaatgggagagagcaatcctatcatcagcattcatgatcagggcgcaggaggaaattgtaatgttgtgaaggaaataatatatcccaagggagctgaaattgatatccgttcaattgttgttggtgatcatacattgtcggtcttagagatatggggtgctgagtaccaggaacaggatgcactacttgtaaaacttgagagcagaagcctcttagaatcgctttgtgagagggaaagagtttcgatggctgtcattgggaaaattgatggcagtggaaaaattgtgttgattgatagcgctgctgtggagtattccaagctgaatgacctccctcctccaacccctgttgaagaacttgagcttgaaaaggttttaggagatatgcctcagaagaccttcgagtttaggcgtgtttctcaagtcacagagcccttggacattgcacctggggtaacactattagatgctctgaagcgagtattaaggctcccatctgtgtgttcaaaacgtttcttgaccactaaggttgataggtgtgtgacaggtcttgttgcacaacagcagacagttggtcctctccaactcccgcttgctgatgtggctgtgattgcacagacgtacacagacctaacaggtggtgcttgcagcattggagaacaaccaataaaggggttgcttaatcctaaggccatggccagacttgctgttggggaggccttgactaatcttgtttgggctaaggttacatcacttgctgatgtgaaagcaagcgggaactggatgtatgctgcaaagcttgatggtgaaggtgcagatatgtatgatgcagctgttgcattggctgactgtatgattgaacttggtattgcaatagatgggggaaaggacagtctttccatggcagctcaatgtgatggtgaagtcatcaaggctcctggaaatctggttatcagtacatacgtgacatgtcctgatataacattgacagtaacccctgatttgaagcttggtgaggatgggattcttctacatattgatctcgctaaaggaaatcgccgtcttggtggttctgctcttgcacaagcatttgatcaaattggaaatgactgcccggacattgatgatgttctgtacttgaagaaggtatttgaggccattcaagaattgctcagtcaacgtcttatttcagcaggccatgacataagtgatggtggccttattgtttgtgttcttgagatggcatttgctggtaactgtggttttaagcttgacatagacttagaagataggagccttattgaaggactttttgcagaggagcttggcctcattattgaagtacactcgaaatatctcaacattgtgaagcaaaagcttgaaatagcaggcatttctgctaatgttattggagaagttactaactcaccagaaatagaagtttttattgatggcaatctgcatctcaaggaaaaaacttcagatctcagggatctgtgggaggaaacaagcttccagcttgaggagttacaacgtctgaaatcttgtgtaaaacttgagaaagaaggattaaaatgcaggacatcaccatcatggtctctgtcttttaccccaaaattcacagatgggaaactgttgactgcttccttgaaaccaaaggttgccatcattcgtgaggaagggagcaatggggacagggaaatggctgctgcattccacgctgctggatttgaaccatgggatattacaatgtcagacctcttggctgggaagtcttctctcaaggagttccgtgggattgcatttgttggtggtttcagctatgcagatgtgctggattcagcgaaaggctgggctgcatcaatcaggtttaaccaacccctcattcagcaattccaggacttctaccataggccagacacgtttagccttggagtgtgcaatggttgtcagcttatggctcttcttggctgggtgccaggatcaggtgttggaggttctcttggtacaggtggagatatgtcccagccgaggtttattcacaatgaatctggtcgttttgagtgccggtttaccagtgtgtccattggcgattctcctgctattatgttcaaagggatggaaggttccaccttaggtgtttggagtgctcatggtgagggaagagcttttttcccagatgaaaatgttctagctactgttgtgaagtcaaatctggctcctgtgcggtattgtgatgattctaacaatattactgagacctatcccttcaaccctaatggttctccactgggtatagcagccctttgctcacctgacgggaggcacctggctatgatgccgcatccagagcgttgcttcatgatgtggcaatatccatggtatcccaaggaatggcaggttgagaagagtggccccagcccttggctgcgaatgttccagaatgctagagaatggtgttcatagtgcagggaagcttcctgctgcaaggatgtagtcatccaggcaccggctgctacgagtatatggatgattggtggttgtatggcccaattgatgacccctttttggcagaataaatgtgttttgaccatcaatacattatcttgtaataatgtatcgaatttggaattttgaaaatggagaaccgtctggtttccgaagtcggaaggcctcagatatgactccactagtttaaaacatttactagtggaaaagaaatgagtgggttaattaataatgcaaaaggtacattgggaagacactgtacctagggatgaaaacggacggaaacggacgg

SEQ ID NO: 20761 - DNA, 315 bp, Zea Mays
attttctatttttctttttctgaatggcgaagttaactccgaaagcctgtcaaaggtatgaagcgtgccaagttctcaatcaagtacacaggcagaatatgaattatgaagtgctttcagttattcagaagttgaaagcaatctctatcagctacacgtatacgtaaaatcatctgccttgctctacagggtagtaaacacctgtgggagcctggagccttgtcatcttcctgtacctgcggtggtcgcaaccacgcacaaataacaaattcacggcagctccacacgctgttaaataaaaaaaaaggacgacga

SEQ ID NO: 20762 - DNA, 1396 bp, Zea Mays
ctctctgtgtcatcaccctcattccgacagttccgctagaaggaaaagaagaaaaaaaaactctctttctctctctttcccagccctctctctccctctccacccggccgccaccatgtcaggcctctacagccagggcttctcccctgcaagaaccctctccccccagattaggagcaaccccgacgctgacagccagtacttggccgagcttctcgcggagcatcagaagctggggcccttcatgcaggtgctgccgatatgcagccggctgctcaatcaagaaatcatgcgggtatcaagcatggttcatgaccatggatttagtgatcttgacaggcgccggtttagaagtcctagccctatgtcctcaccaattgtccggcctaatctacatggcaatggatttggtccttggaatgggatgcaccaagagagattgggctttcctcctcctggaacaagtatggactggcaaggagcaccaccaagccctggctcttatattgtcaagaagatcgttcgcttggaagttcccgtcgactcttaccctaatttcaactttgtggggcgcattctagggccaaggggtaattctctaaagcgagttgaagcatcaactggctgccgtgtttttattagagggaagggttccatcaaagacacagaaaaggaggagaagcttaaaggaaaacctggctatgaacatctgaatgagccactgcatatattgatcgaggctgaattaccagcgaatatcgttgacacaagactgagacaggcacaagaagtcatggaagaattgctaaagccagtggacgagtcacaagatttctacaagaggcaacagctgagggaactggctatgctgaactcaaccctgagagaagacagtcctcatcctggaagcgtatcccccttcagtaacggcagcatgaagcgcgcgaagccaagccagtagagggaagcttctggctctcctccaacccttgagtcgtccacggcgcggcaccgacaaggatagtctgggtaccaggtgcgtcgtcgtctcaaggagacgaggagggatcggtggccgatgaactgcctttgatcttggtgggtggatccggccgtgctgttgttgtaactgcttgtaagggtgatggacattattcgttttattcgttgttggctgttaaccctgagtagattatggtgctgaggagatagtggtttcagtgggagactagttaaaccctgatagtagtgtgagctgttcgtttaggtgtttaattagcttgtactattctcgaatatttgtcgtccgctagttcattttttgaactaagccgcgacaaataaaaaagaactcagggatagtattattattcgcgttacattcaaaaaaaaaaaa

SEQ ID NO: 20763 - DNA, 3532 bp, Zea Mays
cgggccagcagcgagcgagcagtcgagcacgcggggcgcaccacaaggccacaaagcgcgccgcgcggcggcacccgccacctacctggtcgcccaacctactgcctatacgaggggagggggatagggagtagcagtagccagtaggcagcgtagcactgcggctcctactaccaagtaccaaccacacctccaacccccgccgtataccaatccgccggaggtctctattcagtccacttgcctttttccctcaccggtcactgcatcgagctatcggagtggtagatctgccggtgcggtccccagtttggatcttgatgatttggtgacttgagtggccgattttcttcgagcaaactggtttttgggaagtgcggtttcctcaatgtctatttgaatcacagcatactgaactgaatcaagtgataattgtgttctggtcatacactaagatatacctgaaacttctgcttcatatgttcacacatcataaatattccaacaaaggtcagatgaacagcgaaaggaatgtgaagatcatatcaggtcgtgatgggcaaaagaagggaaattcacagtatggccaaattgtacacatgccaaaggacatggtcacaacagtcaatggaaacgtagatgcaaaatttgaagatgaagttagagttgtgaagaatgataggttccaaaggcaacgagagtcttggggtggggaatgcaagaagggctcaaaaccatggcctggtcgaaaggcagctactgttgatgaacttgttaaacatatgtcaaatgttccttcatatttacagcgtaaagaaacttctgaccatcttcaagacaaggcactgaatgttggagttcttgagtgggggcttcttgctaactggtctcagcaagaaaagcataagctcactagaagctatggaccatctccacccaatactagcaggtctgtactattcccatctccatcacattcttctccaagccccagcagcagatctcttgagagtaatcaatctaccccaatgagtggccatcatcattcatccatcagagcacagcagaataggctcacagataaacaccatgagagggccagatgtccacctagcccaaattctgcagtactgagcttattgtcaggtcatggcacacatccctgtccagagaacggtcataattatgttgggttgggtctcagcaatgtttctttagcctcagactctctaggttcttcctctagaagttgtggaagacatgaaatggttggagatgaagagactagacggaagactgaagacgttgtccatcattgttctcgtaggctttttgcagacagcgataacattgggaaacatttcttcgcatcaaataccaatgactccatgtgtaatgatcctgaacagagtattggcttgaatggggaaaattttgagtcactaacgtctgatgctgtaatggacacagctagaaatgacagtaagtcgtctgactatttactggaggatattgagccatcccttgaatttcctcgaatcccatattcatgtccacttcccatcatagattcagcagccaaagagattggcatcactagcactgaggctggagatgcaaaagtgagtaaaaattctaaccggaaccaatctgccatgaatgtcactgagaatcctccccaatactcagcaaagtttagtgataagatgccttattgtcatctaggttctgggatgaatcgagggagctgcagctctagcctcaaggagtcaccacatattcgacaacccaatatagttcctcctgtcgataagacaggagacaggtcatcacccaacagcaaaggtaggcgaagcccattgaggaggatgttagatccaatattaaagccaagacattctagtccagtacgtccttcatttgttcctaagtgtcaacttccagtcaataccaccaagcagtctctggacttggggaaatcagtgccacataatgttcagcgaaggtcggttgatttggtagtcaattcgaattatctgatcgaagaaaatagaaatcagcctcctccccgtgtgctattgaacagtgcaagatacatacaaaaaggaaatgattcagcaacaacaaggcaagcacttctgcagctagcatggaagaacggcttgcctttattcatactctcttatggtgattctgacatcctggcagccactgttagaaggaagggcatccctgaaaaggatggtctggaaagcacatatgctgtattcactgttgaagaaccgaagaaaaaaagtggagcttggatcaagacagggggcaagaacaaaaaacatcaccttttatctagcatagttggggaaataaaggttgcgcgtcgaaaatcaagatgccaccatacaaccgatgttcatgtacacagggaatttgtgttggttggttccaaatttctaccatcgtctgaagaatcaggtgattcaaatgttagtggagagcttgcagcttttatcagcacacttcctcagcaagaagcagaaacctcgaagcaatcatcttcacagaataccaggcaaagaaattcaatgccaattggctgtggttgccccccactgggaaatttccatcctagcacgagaagtgctaattctgcttcagccaatgttgttgcagtacttcctgatggcttccatggcacaataacatctggacagccattgcctttgattgagaggtggaggtcaggaggagcttgtgactgtggcggatgggatgaaggttgtatgctaagcgtcctcactgatgcgtccgaagaaaatgatgccattcaggctaaccaggcaaaggatggcagccagagatttgagcttctagatcagggtcgatcacgagaagagaggcatgccttcagtatgacttccttcaaagaggggctttatacagtggaattcagatcatccattgcattacttcaggcttttgcaatgtgtatagtgatgctccatggaaggtacccaagaagaacgcaagttggctcgcaagcagagcaggagcatgatctccttgctggtcatgagctcaaggcaatggcagccagtcaaggaagaaggcctccgacaagctatgtgccccaccggccacctctttctcctgtaggccgagcctagcttatcacgatttagtgtatgttctttctgtgtctgtcctctttcttcagctgcgtagtgccggtgggattgatataccatggtccaatggtccatatgtaatacgcatgtccaaagtgacaatctctgcgcaagtctttagagatagctccctgtacatgctgtgatgttgttgatggtgtatgactgtaccagtaccgtgatgtggctgcaaggtccatctcagtgcttagttacccttttatatgtccgcttatctgttgcttctgtatatgctgaaatgcgcctgcaatctgttgcaacccttgtttaaattgtgcgttgcatcgcagcagcatttgtgcagctgctgaagttatgttttctgg

SEQ ID NO: 20764 - DNA, 281 bp, Zea Mays
tgcacatccaccatgaaatccccacagctccgcacaccgtatctgcgccgcagcttctatcgctcacgcccacgcggagctcccttcctcaatcgcctattcccccacgccgccctcaaaatcgggaggatccatagcacgccgtagttcctctcaaacaggcccgatgccctcctccccattcctccctctcgcccaaccggagttcgcaacgtcgttcatgctggacctgccccttcgctcgttcatgccgaacaaagcccctccccaggcgaagcccg

SEQ ID NO: 20765 - DNA, 2201 bp, Zea Mays
ccattctaaaaaaaatccccgatctactacctttctcctcctctctcacggtctcacctctagtttccaggatgacaaaatatgggatcagattcgattcgtgagcctgtagaacaaggatgctcctccaatccatactaaattgaacccacgcagcagacatccgcgcgcagtacgtccccttcgcgaagcaccgccatcctcaccacgccgccgagtcgggcggcgcatgcgccatggcgttcctattcggcgcattcctgggcctggtggtgggcgtggccgtcgtgatggcgttcgcgcgattcgagaacagccgcgccgagcagcgccgtgagctggctgctacagctgcagctttctcgaagttgactgtacaggatttgaggaagctcatcccacccgagttttatccatcatgggtttcattcacacaaaagcagaagcttaaatggctgaatcaagagctgacaaaaatctggccatttgtcaatgaggctgcatcagagttgatcaaaacttctgtggagcctatttttgagcagtacaagtcattcatcctggcctccctccatttctcaaagttgacacttggtactgttgctcctcagtttactggtgtttcaatcttggagagtgatgattctgccatcatcatggaacttgagttgcaatgggatggcaatcccaatatagtacttgacatccaaacaacacttggaatttctcttcctgtacaggtgaaaaatattggattcacaggagtacttcggctcatatttaaaccgctggtgtctgaattcccctgttttggagctgtttgctgttctttaagggagaagagcaaggtggaatttaccctcaaggttattggtggcgaaatgactgctattccaggaatttctgatgcaattgaggggacaatacgtgatactattgaggatacactgacatggccgaatcgcataattgttcccattgtacctggagactatagtgacttggagttgaaacctactggggtattagaagtaaaactggtggaagctagggacctaaagaacaaggatcttgtgggaaagtcggacccttttgcattgatatacatacgtccattgcatgataaaacaaagaaaagcaaaacaattaacaatgatttgaatcccatctggaatgagcactatgaatttgtggttgaggacatatctacgcagcacttgactgtaaaaatttatgatgatgaaggactccaatcatcagagatcattgggtgtgctcgagtagacttagctgatatacagccaggaaaagtgaaggatttatggttagatcttgtgaaggacctggaaattcaacgagacaagaaacctcgtggttcacctggagctcctctactacccttacgcgaagcatgaaggggttcctaatccttttgctaatcagattcaactaacttcattggagaaggttctcaaaaccgagtctaatggatatgatattaatcagaggaaaaatgttattatgagaggagtcctttcggtgacggtcatatctgcagaggagttgccacctatggacattggtggcaaggctgacccatttgtggtcctgtacttaaagaagggagaaaccaaaaagaagacaagggttgtgacagacacgctaaatccaatatggaaccagacatttgatttcatggtagaagatgcactgcatgatttgctcatggtggaagtatgggaccatgatacatttggaaaggattacatagggaggtgcatcttgacactgacgagagttatactcgaaggtgaattccaagatacctttgtcttgcaaggtgccaaatcgggaaaactaaacttgcatttcaagtggacgccacagccaatctatcgtgatcgtgacagggatcagtgagacttgtaaacgaaaaaggccgataaacacttatccccaacggtgctatgtatattagtcgttctgtatttacaaaatcccacggttcttatagccacgtgaccaaaaagagatcaacccaccgacctgtattttctcctttgtgatgcaagtcagcaagtgcatggacctgtatatttgagtcgttaatgaataggaaatgctgttactatgctgcaagcacatatatgcttagtggtgccgtggtggtggttgcttctgtgctgctgtttgttcttccg

SEQ ID NO: 20766 - DNA, 1921 bp, Zea Mays
ataaggataaaaaaaagattgtcccaatactttactagccggcggcggccgcatcccaattcccacatccccttctgcaatcaaaaaccgagctagggttttagggggagacagagaagcagagggaggctccatggacaaccccgagatgcagcgattcattcaggaattcttcttgcagggaagattcatatttgggcctgatgtgagatctgtgtttctcactatgttcctcatcatcgcaccagtggttgtcttctgtgtgttcgtcgcaaggcatctcataaatgatttccccgatagctggggaatctcagtgatggtagtagtggttgtcttcactgtttatgatttgacgctgcttctttgtacctctggtagagatcctggtataatacctcggaatactcatcctcctgaacctgaatccattgatgggatcaatgatacaggtgttcagactccacaacaatttcgtttgcctcgcacaaaggaagttgttgtaaatgggatcagtgtacgggtaaaatactgtgatacttgcatgttgtaccgaccacctcgatgctcacactgttccatttgcaataactgtgtggaacggtttgatcatcactgtccatgggtcggccagtgcataggactgcgtaattatcggttcttctatatgtttgtatcctcgacaacattgctctgcctgtatgtatttgccttctgttgggtgtatgtgatcaagattagagcagctgagcacttgtcaatttggaaggccttgttgaagacaccagcatcaattgttctgattatctactgttttctttgtgtatggtttgtgggtggtttatctgtcttccatttgtacctgatgggcactaaccaggtaggtccaacattgattccagttcttaatttcttatgtcattgatgctgcaactgcagttcagtagcttaatccttcacccatttttccttgtagacaacatacgagaatttcaggtatcgctatgaccggcgcgataatccatataacagaggtactctgaacaattttctagagatattctgcaccgctatccccccttcgaagaacaatttccgggcaagggtgacagtagagcaagggctgcagcaaacacgctcacagtctaggggtttcatgagccccagcatgggcaagccaaccatcggagagcttgagatgggcaggaagccagtagtaccttgggacgagccaaggacggcagctgatatcagggacttggaagcagggttcgggggcatgtttgacgagaaagagggcagagtagcccacgcatccccagatctgagcagagatctcccagcagagtttgtggaagggcgaactggcatgcactcgaggcagtcaagttgggttcagagaggaggcgatgcgagtgaagcgtcggcgctgcaaatggctactgtccataccgccgaagatagcaaccatgtcccctggagtggcacacgttagcctgacaaaaaggcgggggaaaaaaaaaaggagaggaactacggtgtgtttcggttgtgtctcgaggtgggtgctggtggcgatgtcgtctcgaagtgaactgccatgtgtttattaccacgtgtgccagggcaaggccctggatcattttgtaatccgaaacacaagcttgctgctgtagtctcatctcatgcctggtagatcaccagatccctgctgtggttgttttttttttgtttttggtttggcttgttttgttttgcttgtttgtctgtttgggtgtgtgtttcaacaaaatgaagtagccgacgagcctaagctcccgacaggtctggataatgtatatgtatataactatattattagcaggttgcgacgaatgctgtgcttggtttgccacaacgctgctgtgctttgggtgaaagc

SEQ ID NO: 20767 - DNA, 1941 bp, Zea Mays
ctcacggcattttatttcatgtctcagcagtcgcagtccatttctttactagaagaaactgacaggcagatacgagaaaaatcatgctcagagcaagtaaggcgtttgaaagaagcccggaatagctatcacgaggatttggtagattgtgtacggcattgtgtttggtaccgggccacccttttctcccagtggaagcaaaggggaatgtacgcaacttgcatgtgggtcgtggagcttcttttggtccttagtaactcaaatagcatgttccactatgttcctgagttctatgtggaatcactggtggattgtttccatgcactgcgaaggagcgatcctccttttgtttcccctgcattatttctcatgcaagggttggcctcgtttgtcactttggttgtcaagcacttcgatgatacaaggatatataaagaattcatgcttgttttcgagaacaatcgggaggctataaataaaatgcctagatcactgttatcagcttttgacaacagatcatggattcctgttacaaacatactttcccggttctgcaaaggctcaggatttgcttcctataagaatggtgaatccgcatcatctgcaacttttcaggttctactgagggagacatgtattcatgaacaagagctgttcttttcctttcttaatcgacttttcaatacactcagctggacaatgaccgagttctctatgtccatccgggagatgcaagataaaaaccaggttgctgatttgcagcagaggaagtgcagtgtaatttttgatatctcatgtagccttgcgagaatcttggaattctgtacccgagagattccttgtgcttttctcatgggaccagatatgaatttgcggaggttgactgaattggttgtctttattctcaaccacatcatatcagtagctgatgcagagttctttgacatgacactaagacggccagggcagcatcaagagaaaacaaatcgtactatgatcttggctcctcttgtgggcattatcctcagtcttatggaatgtagcagcacatcagaacgaagggagctaaatgatgtgattgcagtgttcgccagcatggattgccctgccacaatccattttgggctgcagtacctactgagctacaactggagcaatgttcttcgaggggattcatcccttgcaaagctagcgcagcttaaagagttctcccattacttccgacgcattacagcgtccgtggatggtgaagaagaagaccatagcctaaacgcgggcgatgaagacgacgaccacacttgttgcatttgctacaactgtgattccgatgcaacattccagccatgccatcaccggtcctgctttggctgcataagcaggcatctcctgaacaaccagaggtgtttcttctgcaatgcagtggtaacatcggttactagatagccgattcgcgagcgatgcgctgctctactcattgcctctttcggtatcgtgatccgaaggaagatggtgccactgatttgtcttatctattttgcttgacctgagggctggggcgctggcgtcccagagatctttccattgcttttccaggaagaacgcgttacctttgtgcacgagggtcagaagcggttcttcgttttccttgctgtatatgtaaaggccagggggagattccacgactgtaaatatgatgagatatgaaacagaaaagggggtggcagatcaacatcgaccttctgtaattagccagaataaaagaactagatgctttatattgagcagagctctcgtctttttgatcctccccacggtgtagtatcaagaatgaataaatcttctgtttcttgtctggttgtagcatgccagcatctgtaagttgtaacaattcagtgaatttatttaccttcagcaaaaagggtaaaaaggttgcctcttcaa

SEQ ID NO: 20768 - DNA, 1969 bp, Zea Mays
gccgcgtgcgtgcaagcctagaagactcggcagcttttgcggccccgttctcttccccatcccctcttccctctctagccttccacccttcatccaccagccgctcctcgagcacccccgtcccgcgccgcctccggctccggcgagatgtcacgcttcggtcgatccggcccgccgccgccgatccgcgacacgtactcactcctcgtcctcaacatcaccttccgcacaactgctgatgacctcttccctctcttcgacaagtacggcgagattgtcgacatctacatcccaagggaccgccggactggtgactcgcgcggattcgcgttcgtgaggtacaagtacgaggacgaggcacagaaggcagttgaaaggctcgatgggagattggtagacgggagggagatcatggtgcagtttgccaagtacggcccaaatgctgaacggattaataaagggagaatagtggagccagttccaagaccaggggggcgttccaggagtcacagtccaagacggaggtaccgtgatgattatcgagatgaccatgatagagattatagaaggcgaagtcgtagccggagtagagatagatacacccgtgacaggtacagggatagggattaccgccatcgtagcccgagtcgcagctacagtcctgatgattacaagaagcgtgggagagacagtttgtcacctgagcgaagaagccctcgtcgtagccgcagtcctgatgattacaagaggcgtggcagagacagtgcatcaccagcaagtaagagccctagtcgctccccacctcgcaagatgtcaccttctcctgagagatctcccgtcaggcgcaacaatgaccgatctccacgctctcggagcccatcgacataagcgcaattcacttgcaaagcatcttgagtagctcaggatgaatggacttgctctgatcctatgtgtacgcatttgctcgatggtggcctcttctcagctaaagttgtgtagtgccgtctttcagttgctgcttcaaccttggaatactacttctgtttggcacctgaactgcttatcaaaaactttatttacatgatgcagtgaagatgtgctggctgatatgcggtcaacatgcacgtagcttactgttgaagttgatattatctgtgctgtttgcgttgttgatgatggctgatgagatgattgatgatgatggcactgcagctgcctgcaccatttgctgtctgcacctattatgctgacaaatgtcgaaagcttgtgggcacgtgcacggtgcagtacctgtaccattgtattgtgacagtggtgctggtgcgataaatttctcagtatggacactggagaggctactggtagatgggctcgtggctcgcaatctgcaaattggtatccacatccgtgtacgacgaagacgaggtgtttgttgaacagaattgctggcctatgaacttgtcttggtcatgtgtctgacatttgtgctaatgttttatgccatcttggctaaaaaacccattcgtagcacgaaagggttaattaggggtcctgattagcactcagatacaacaaagcagggcagttcgcttggcaacaagcacatgcaccattttatataagctaaattattcatactgcttcaggagctctagacatcgcttgggtggcacatactacacgttgttgtcttggcaaatcccctgcagtgatgaacaacgacgtgtctcgagtagtgcattaaatcgtagagtgtgtttctaaaggcagtgacaaatatgcaagccgtgcaagtagccctctttgtccgttctaagatccaaccgtatgtgcaatcgtggtttattaggagctttggtttattaggagcttttttataaagttaaggcggtagtgagaggatttaaatgctaaatatgacatatggttagatctatatctaacggaaagagatctacttgcacgcttg

SEQ ID NO: 20769 - DNA, 984 bp, Zea Mays
caactctcaccattgcaccaggaatggtgacacctacgcgggagagtactttgctgataggatgcacggctttggaatctacagctttgccaatggtcatagatacgagggagcatggcatgagggtagaagacagggtttaggtatgtatagtttcaggaatggagagacacaagctgggcactggcaaaatggagttcttgatactttatgcacccagaactttatccctggatcacctattgctgtgaaccattccaaggtcctcaacgcagtgcaggaagcgagaagagctgcagagaaggcctatgacatcccaagagtagatgatagggtgaacagggccgttgcagcagctaataaagcagccaatgcagccagggttgctgccgtgaaggctgcacaaaagcgcaaccccaataatggtgatgatctaccactgtcagtagtgtgacaatgaaggaaatatatgttggcatgaagctgcttcgctatgccatcgcatcacccattgcccggcataaccttcagcttcccagtaggggaagccactgctcgtccatcaggccttggccagtggcgacacctgagtcattgccggcagcattcaagcttgcgggagaagaccaaattttcatacatatacatatttgtggtgtcttttgcgatgcagcagaactactgctctgaggactttccattgttcaaggtaactgggcgcgaggccagcagtaggtttctcctgcattttctgcagtgtaatactcacccaatgttagcgatacgacgaatgcacaccccaacatcaggagacaaaaacctactccctccgtttccgtttcaaactatgaatcattttaactttttttgagtcaaagcatcttaaatttaactaaaattatagagaaataaaaaaatgtgatatcaaacaggtatactatgaaaatatgattaatgaagaatatggaaatataattaatgaag

SEQ ID NO: 20770 - DNA, 1034 bp, Zea Mays
caaatggattatggaatgtaataatgtaccctacttatggttgcaattatgagaagtttgcgacatccgaacattgttcttcttatgggtgctgtcactcagccacctaacctttcaattgtgactgaatacctatcaagaggtagcttatacagacttttacacaggcatgctgcaagggaaaatctggaggagcgccgccgcttgagtatggctttcgacgtggcaaaagggatgaactatcttcataagcgtaatcctccaatagtccaccgggatcttaagtcaccaaacctgttggttgacaaaaagtacactgtgaaagtctgtgactttggtctctccagattgaaggcaaacacatttctgtcttccaagactgcagcagggactcctgagtggatggcaccagaagttctacgagacgagccctcaaatgagaagtctgatgtttacagcttcggtgtaatcttatgggagcttatgacattgcagcagccatggagtaatttaaatccagctcaggtcgttgcagcggttggtttcaagggacaaaggcttgagatcccaagcagcgttgatccgaaagtggcggcagtaatcgagtcctgctgggtcagggagccctggagacgaccctcttttgccagtatcatggaatccctgaaacttctcatcaagacattaccacccaatcagctcctcgaagaaaattagttaccacccaagcaacttgcaaattatgtcacctctagagttttctcgatttgtttagatccgatatgcgccaggcctctcaaaccattcgtcttcggcgccacgtattccctgatgagaaatattcaaaactacacctgtcacaaaaggggaaaaactatggttggacaataagattcatgaaaaaaatatgtgatccaaattaagtgtacatctcttttatcaaggaaccaaatgtaagttggtcaaatatatacatataagtactaatatttatggaatatatacttttacaataaaattattaaagatataaa

SEQ ID NO: 20771 - DNA, 1508 bp, Zea Mays
cgccaagaaactgagccatccggtcccaaaagtagaaaagggcaagcgacgagcacagcacagcacagcacaagcacgccttccgttttgggaaggcgaggagaggggaaccccggcccagggagagttgtggggaggggatcggcggcggaggagatggaggagcgggagaagctcgtgtgcctggccaagcttgccgagcaggcggagcggtacgacgatatggtggaattcatgaagaatcttgctaggatggacgtggatatgagtgctgaagaaaggcatttgttctcagttggtttcaagaacactattggagcaaagagagcatcatggagaatcatttgttcacatgagcaaaaggtcgcagctgatcgtcagactggtgtgatgatagatgcctataagaagaaagtagaagaggaactaaggaaggtttgcaatgaagtattgtcagtcattgctattcactgccttcccttggccagtacgggtgaaaatatcgtattcttttataagatgaaaggtgactactaccgttacttggctgaatttagcactggaactgaaaagaaagctgcctctgatcagtcacttatggcctatcagtgagctctcacctgctcaccaaatccggcttggccttgccctcaatttgtcggtcttcttttatgagataatgaactctcatgagagagcttgccaagtggcaaaacaagcatttgatgaggctcttactgagataaattctggtgagggagtttacaaggatagcacacttatgatgcagcttctgaaggacaacttagcattgtggacatcagaactaactgggggtgaagcatccaagggtaacggcgatgtcgacatggagggttgatacattctccatgttttaaggaaacacagaacgcacgcaaaaatatccaggctgtgatgctagcgaacctgggtcctcaagttttttctgcatcggaactaagaagagccttgtgtatttttctgaagtttctgtccgtctcggggttttttttttgaggtctgtttgttcctctcttttggccatcgtttggtcctggagtcagtcactcactaccaagtgtttcagaggtctgaactggtgagcatccagatctgttgttgcttttttttccttctgtgcttcagaggcatctttgtacaccgatggaaaactgtttctcttatcaacgcatagactgtcagtgctgttactgatcatgttcggtgactgaagcgtctctgtagtgttgagatcgagcataaacttctccacgaaattatgtacctgcaaagtgtcggtatgatcttacacgccgatgcagcagttgcttccacgccgccggaaaaaatattggccgtccagcaccgtcgtaaaaataacttggccgtacgtgtattggctgctgcttctttcactttaccgtgagtccgtgagtccgtgacccgcagcttcagcttctgagtaaaagataaaaaaaaaggtgacg

SEQ ID NO: 20772 - DNA, 1219 bp, Zea Mays
caataatttacctattactcgatcttgatttcagggaattggaacatggaagagcatacaaccaggctctgatgtcagatattttggagaaaagcgaggaactcgctacgctcacatattattctaacctgcttgagtcagagaagacatatctagaaaaccaagtcgaccatcttaacgaggagttgaagtgtactaggaaagagcatgcagcatatgtccgtaaggtcttggacgcagcaagagccatccctaacgacttggagccgatcaactcggcaactccgatgctctgccgagatcgcggtgcacgtcggggatctgttagccagccacaggctggccatggctaacggccagcccccacaggcagctgatccttaagagtttggacctaatcttatttctgatagccctttaggacttctttgactgaacctgtgggcggtgttgagcgacttcccagctcgctgtccaggtggtgataattggcgttttattttgtctagcttcaggtgatgttttggactgtttcttcctcaggttgcagcagtacagtatagtgtcgcttccttctgttcagttgtagcttgcttcttagaaggtggtcggttcgtccgttctgttgtgtactctgctccgttgggcgtatcaagataaatgtaaattccattctgcttgaacctgatgcaacacaaggtccgatgtggaatcaggattctcctttatgagacctgtgaagataaaaatatcttagttttggaagctcaaaagaaagactggcagctttgtttcataagatggttacatgaatagctgagaagtggaatgaggtcttagtaaaaaggagcttcaagatctcgtgcaggagggcgcaaagttgttgatgaaagctgcttgtgctaagctgggaaatggagatgaagaccgcgatgaagatgatgacgaggaaagggatcgtcagcatgaataaggaaaacatgtcttgcctgggtgtccctctgtcctgtatctcaagtggatttgcattttgtcaaaactagtgtgttagctcgtttgtgatttgtgattttaggtcattgctgatcttggttcttgtttgttcctgggtcctgaatcaggcctgcatgcctagctggaaaactgttgttagtccagtaggtctcgttttgcggtgatcatgttcatctgcatgtttctctgattcctgggttgcaat

SEQ ID NO: 20773 - DNA, 1886 bp, Zea Mays
gtgtttggcccatccagcggtcgacttggacttctccgcgactgtgctgttctgtgcagccgtgcagggacgccaacgactccgagctctcctccatccaactctcatggcgggctaccgcgggggctcctccgtctccgcctccaccggcggcgggggcagcgcggtggccgcagccttctccacccggctgctgctactcctcacgctgctgccgctcgcgctcgccgccttcgccttcgcgctccagtggcgcggcggtatgcgggacccggcaggtgcagcctggcccgccgacgcgcagcgcttcccgggcatggagaacagccccctctcctcctcccacggaggagcaggctcctacttcgccgtctcctcctcctcctcctccccgggagccgactgcgccgagatccttggccggagcgccgcgtcctccaatggaatctcgctctaccgcgggtggagcttcgactccgaatctgctataacccccaagatctgtatcacgggaagcacatctgctagcctacaccagattcttccatggttgtattatcacaaggtcattggtgtttcccatttctttctttttgttgaaggagaggctgcaaagccagctgtcacctctgttcttgaatctattcggggtgtaaaaattatttacagaactaaagaactgaaagagaaacaggagaaaagccgcatttggaatgagacgtggctagcaggtttcttttacaagccgtgtaattacgaactatttgtcaagcaatcactaaacatggaaatggctattattatggcaaggctggtgcccgagagtactccctgaggcgattgcttttagatgttcctgacaatgttgacatggttatcttccccaattatgagagcagcattgaacgtgatgacattaaggatccttttactgaggtttccatgtttaagaaaaattatgaccatcttccaaaggatacatactttggcctgtacaaagaagcaacacgtggtaatccaaactacttccttacttatggtaatgggaaatcagctgcaagggttcaggagcatttgcgaccgaacggtgctcatagatggcataattacatgaaatccccaaatgaaatcaaattggaggaggctgctattctgcattacacctacacaaagttctcagacctaacctcaaggagggatagatgcggctgcaaaccaactaaagaagatgtgaagcgatgttttatcttggaatttgaccgtttggcctttataattgcatcaacagctactgaggaggagatgaggaactggtacaaggaacatgttgtatggaccgatagagacaccaatttgaaacttttaaggaagagtgtcttgacacgcatatatgcgcccatggctattatccgtggcctcaaggaatctggcgtctttaccaatgcagtaacatcagcgaaagcacagtcaaaaacgaagtcatcaaacatgggtctcggaaacaaggatcctatccagccaaacggaactgctggtcagtccacactggaaggcagtcatggaaagttgcaggcaaccgtgagaaagatcctggaaatggttgacacacaggaagaagcagcgatgccaccaatgtcgcccccgggttttcttgagctgactgaaagtgtcactgccttttcatgacgctttggtttaaccatgcgtgatgcatgcagccttgagcatacgaatagcattggcttgtttggtcgtcgtcgtatcttgcaaccccagaatgaccagatgtatcgtgctgatgtaaaattgctagttatcaccatgcaaagagctttaaatcaacttcagaaggtattataaagttggtgcaaattataacaaatcca

SEQ ID NO: 20774 - DNA, 289 bp, Zea Mays
caccacggattacaaggtttcaagctccagcagtgacaagaggcggattcaccgcgcaggaccaacgccggcgagaattgcccgcggtggctccccttctctccccatcgtgcttcctcttgcccacaacacgtcggtttctggcgatggtgagatgagagaagggatacgacatggttgggatttatatactgcggtagagtctggtcagggggaaacattttgcgagtggatcggaattgctccgccaagctcgcgcgccattgaggacgaacgaactacagtgggg

SEQ ID NO: 20775 - DNA, 359 bp, Zea Mays
agctcacccttactgtactcacatcccccaggtcaaggacaggtaccctaggatgaggaacatgaaggatggcgtgatgtgttcgtgagaggtctaggtcgtcgtctcccagtcaactttgggttgctggattgttgtcttcgtatgatgtaattatttattattttgtacagaactccattatatagtaatgttgtgacattcgtttttgtaccatgagtcatcatatgtgtaagacttggtcctagcacacttggtggttatttcacgcccgggttttggtgccccaagaactcatgtgtgacaactaatgagactgcttgaccgctatgctgcatcgagtaagaagtgaaatgagg

SEQ ID NO: 20776 - DNA, 344 bp, Zea Mays
gtagtcagtttgtttagttcacttgtgacatgatctgttgctcctgtgtcggtgtaccagttggtgtcgacattgtaggcgttcatggcgatggcagcattgacgtggcgctcttctgggacgtagttttcatcgaaccgatgccagcaccgggacgccctgtggcctgtcttgaagcagatctgacagagcagtaggtcatcagacccactcgctgcatcagatcgttgtggccgccctccattgcgttgcttcggtgggccgtttcctcggccacgcacctggacgcgtccacgctgaccacggccacgggaattgcccgagccacggctgccattgccacg

SEQ ID NO: 20777 - DNA, 765 bp, Zea Mays
atgtctttgtattggtgcagcgttagacctggcttttcttccttcagcttagggagctctgcctcttcaaatgccttaaaggtcgacttgaggcgacgctcaggatgcttgtcagcgggcagggacgcctgcggatccacgaccgacatccgcgcgatagcctcctcaaccgacctggcctcgatgagggaatcatccctgttagtgttttcgacgaggactacgcgctcgtactcctcctcctcggcgacccgcgcggcgcgcttcttggcggcctctgcctcccgctcgaggcggagccgctcctcctcgcggaggcgcacgagctcggcctcggtaaccttggacggcgccgatgcggaagcggcgacggcggcggcctctgcctcggcgaggcggcggttctcggccttgcgagccgcggcctcggcgcgcttctcggcgtcctcctcacggcggcgcgcagcgcgggacttggggccctcagcctcggcccagtactgctcctccttggcgcgctcctggcggtcgcggcggtcggcctccgcggcggagcggcggtcgcgggccgcctccgccttggagttcacgcccatcttcttcggcatcacgggccccctcgtgcggcgactggcgcggcggcgtgtggctgatgtgacggccggatgggccgaagcaactgcaatccggactccgctttgcggttcggggggaatggaggtcggcgaggtgtccttctgtagaaattggccagcggtggggtag

SEQ ID NO: 20778 - DNA, 409 bp, Zea Mays
ctacggaaaccttgttacgacttctccttcctctaaatgataaggttcaatggacttctcgcgacgtcaggggcggcgaaccgcccccgtcgccactatccgaacacttcactggaccattcaatcggtaggagcgacgggcggtgtgtacaaagggcagggacgtagtcaaagcgagctgatgactcgcgcttactaggcattcctcgttgaagaccaacaattgtaatgatctatccccatcacgatgaaatttcccaagattacccgggcctgtcggccaaggctatatactcgttggatacatcagtgtagcgcgcgtgcgacccagaacatctaagggcatcacagacctgttattgcctcaaacttccgtggcctaaacggccatagtccctttaagaagcta

SEQ ID NO: 20779 - DNA, 531 bp, Zea Mays
cttcttctccatttgcttttttccctaaagtttctccgtcctggcggctgagggctgctgcttcgtccctggtggcggctgagggctgctgcttcgtccctgatggcgcctgattgcctgggcgcgatccgcccgtgcttcccatagcgtactccgtccctggcgcccccagtgaggtccgtccgtggcgctccgcctcccgtcgtcttccgtcaccacgctctggtcgtatccccgccgtagcgtcgtccagtgctgccctgcagaccgcacatctgtccacctgctgtgtggtttggttccctccatggattctaccaatccgaaccataaagatgacgagttcccatagaattcgaccgcgaacgggacaaattttggttccaatatgtacaaccagctgaagaaaccggttatattatggcaattgagaccttagatttaactagtatgatatgaacgtgaaccatatgcagcgtaaaccagctggtgcatcatcagtcgctagctgatattactaatataatgaaa

SEQ ID NO: 20780 - DNA, 1049 bp, Zea Mays
gtggtccaaacaaccaaacagccgctatatagcggactaggggctcgttggagagaaaacttattacaaccgaccaacgcgctttgtaacgcctccgctgcaatcagcccccgcggcgagcttgccctgcccctgattgctagttctcgccgttacgtaaggcttcttggccttgcgtcctccgtctttcgttgctgatacatcgaggcatggcgatttatcggtccaacggtgacgccggctccgtcgctttcgtcgtggtatcttatctcgacctggtggccctgttcgcctgcttgcgctactacgagcagttggatcagcagcactcccaaaagcgcgcgagggtcaaggctggggtttggagcctcacgaccctccttactatcatgttcagttacaaggtggctgagattatgcccctgccagtcaaacttgttgtctggtcgatggcagccgctaccacctgtggcggcttctacgctttcttcgtccacagcgagaagcctgtcatgccagcggtggcgccacggcccgccgcggccaaggatgcagcctccaactaggttcgtttgccaccacaaggcgcatactgccggccttggttcggcaccgcgcgttagatcccatatgtaacgcgcggtagctttaagattattatgtccagcagcttattcatatattatacatatattcaaatttcactctgtgaatagtagtctaaaatacagtagtgttttgagtaaactatggataaactgctggacaaggtctaagataagtgctgcgtggtggcaacaaacgacacttagtcttgtttggtggcaatgatattggaggggctaaagttttttcgctcctaaacaagctcctaaacaagctcctaagaatcttacgtgttatgttgcattatggaatatctatgtatctgcaaactctctgtagtctgtatgtacctcggatgtgctctatgtggctttgtaattctgaacggaggaagtaataataagataaatggatggcgtaacaagataagttgctttgtgcaa

SEQ ID NO: 20781 - DNA, 1034 bp, Zea Mays
tgcaggctgcggcttccggagctgaggaaccgagagactacctcccactaccaatccaaatcgcctgatcggccagacagataccgaaccgagaccgagagtgcaaaccttccttccaccttccaattccagtagtcccacgcacaaactttccccagctgcctgcgcccgcccaactaccccgcgcgcggcagccggcagcaggtcgtgccatggacgacgacgccacggtcggatcgcggcagcgccagcagcagccggcctcgccggcggcggctgattccagggccatgatggcggagctggacgcgccgctgcacgccctcgggttcgagatggaggagctctccccgtcgcggctcaccggccgcctccccatcactcccatctgctgccaggtttgggaggtgaagctctggaagatggatccgtccacaggagcgaagggacctcagatcgccgaatccagagtcacgctgctgtctaacctgccgttgccggaggagcacaagagggcaggagacgctctgaagaaatattcatcaaaactgtagagaagaaacttcatgctcatgaaagcccttgcatcttgcaggtttcacggatctgatggatgttgtaattaaaaagcattgcctataataaatatttcttatttaccaccagtttcttctgtacgcctgtaccatgtgtcccgttgagccttcatcacactaaacaaacaaagaaacagaagacctttcctgttgaaaataacgtcaggagcaagagcaagaggcgtgaggctggcactattcaccatccggcaacaaatcggaaggaggcggtcggtcattccatgcggagtgctatgtggctgagagatgggaccagcgatatgaatctgggagcgtcttatgagtgggccagtgttggcttatgtccgtgtgcgtgtctgactgtgccggtatagagaccggttgtaagggtaatttgccggcatgatggaacaaccctgaactcaaactcttctgaaaccacctatctgaatactc

SEQ ID NO: 20782 - DNA, 806 bp, Zea Mays
aggagctggaaatggagtcaatggtttttttccctgcagtacctataagcttaacatgtagtgggtgcacttttaggacacgagcaagaagtcgccaatggaactgatcaacgaggtacctccaatcaaggttgatggtcgcattgccgtctgtgaaggggcttctgaaggtgttggacttggccacccaatcgagtacatctgccttgatctggaggcacctaatgtgtgcaagtactgtggtctccgttatgttcaagttcaccatcactaaattgagaagataatgctgtctaccgctgcagaagctgagttgaggagtttatgtgcacacacatttgttccacaatgttctgtagcgtactttgaactatgcttgcgggcaaaatattacctttgatgatcatcctcttctcgggcgatcttttattaatcctgtcttagtatggttcatttttctacagatgaattgtgctcctttttcagaatctatacaagctgtgtgtattgaagttttactctgaataagcatggaactaactctaaggcaatttaatctcagaagttctagttttctggagttccatgatccagacgttttccttgttgagcctatttaactttctggaatccatgtgcttcagttccgtgcttcctttaattcagaattttttcaagtcttccggggagttcatgagcattttatctgctttcttggttgtttacccttctgcatcttcatgtcctcacaagatcaatgtgttcttaatgacttcggaagttcaaatgattaaaatattctccct

SEQ ID NO: 20783 - DNA, 4045 bp, Zea Mays
caacatcgcgacctctctcccctcccctgcccctgcccctcccacctccctgcaccgccaaacccctcgctcccgcctcctcctccgccgctctaagatctggtctctcgcggccctgcggcgcgccccgagctcgtcgcctcgcgcgcacgcgagcttccctgcccacccggacacgagccgacgagcgagccccccattgcggcgccccgtttcccccgcacgcggcggcagggcgcggagagcgagtccggcagtccgcgcgcgcctgttcgtgatggggcggtgctggcgccggggctgatgcggaggccgctgccatgtcggacgtctcgttggatctcggcggcatccgggcggggcccgtggagcgtgacatcgagcaggccatcactgctctcaagaaaggagcatacttgctgaagtacggacgtagaggaaaaccaaagttttgtccatttaggttatccaatgatgaatctgtactgatatggttctcagggaaagaagagaaacatctaagtcaatttttcagaggtatccacggcctgagaaagaatgccagtctttttctctaatttcacatgataggtcattggatgtaatatgcaaagataaagatgaagctgaagtatggttcgctgggctgaaaacactgatttcacgttgtcaccaaagaaaatggagaactgaatctagaagtgatttgctttcctctggtgcaactagtccgaggacttacacacgacggagttctcctttgagttcacctttcagcagcaatgacagcatccacaaggatggcagtgacaattatcgactccgtactccatatggaagcccaccaaagaatggattggagaaggcattttctgatgtcatgctgtatgcagttcctccccgtggtttctttccatcagattctaatgctggatctgtccattctatgtcttctggacactcggataacacaaatgggcaccctagaggcgttccaatggatgctttccgagccagttattcaagtgcagttagttcatctagtcatggttctggtcatgacgatggtgatgctttaggcgatgtttttatatggggagaaggaaccggggaaggaattcttggtggtggtggttcaagagttggaagctcctcaggtgcaaaaatggactgccttgtaccaaaaccgttagaatttgccgtgcgacttgatgtgcagaacatatcttgtggaggaaggcatgctgcacttgttactaaacaaggcgagatatactcatggggtgaggaatcagggggacggcttggtcatggtgttgattgtgatgtgtctcagccaaaacttattgatgctctttctcatatgaacattgagcttgtagcatgtggtgaatatcacacttgtgctgttacactatctggagatctttacacatggggggatggcacatttaaatttgggcttttaggtcatggaaatgatatcagtcactgggtaccaaagcacgtgaatggaccattagagggcatacatgtttcatcaatttcatgtggaccttggcatacagccgtagtaacttccgctggacagcttttcacatttggtgatggatcttttggggttctgggccatggagatcgtgagagtatctcggtccccagggaagttgaatctctcaaagggctacgcacggtgcgggcagcttgtggtgtttggcacactgctgcagttgtagaagtcatggctgggaattcaagttctagcaattgttcttctggtaagatatttacatggggtgatggtgataaaggtcgcttaggtcatggtgacaagggaccaaaacttgtcccaacttgtgtggctgctttggtggagcccaatttttgtcaggttgcttgtgggcattgcttgacagtagccctaacaacttctgggcatgtgtatacaatgggcagtgctgtctatggtcaacttgggaatgcacaagctgatggtatgcttcctgtgcgtgttgaagggaagctacacaaaaactttgtggaggagatttcatgtggcgcttatcatgtggctgtattgacttctaagaccgaggtgtacacatggggaaaaggtgcaaatgggcggttaggtcatggcgatactgatgataagaatactcctacattggtcgaagcactgaaagataagcaagtcagaattgttgtttgtggaattaatttcactgcagcaatatgcattcacaaatgggtatctggagttgatcaatcgatgtgctcaggttgccgtcagccattcaacttgaggagaaaacgccataattgttacaactgtgctctagtattttgtcattcctgcagcagtaaaaaatccctgaaggcttcattagcacctaatacaaacaagccctaccgtgtctgcgatacctgctacagcaaactgacaaagggacttgagacggatatgcattcttcagcgaagcgagctgctactgtaccgggagtcagtgatgcaaatgaggaggatctggaaacaaggtcaaatgctcaactatcaaggttgtcttcaatggaatcttttaagcatttggatagcagatattccaagaaaaataagaagtttgaatttaatagcactcgtgtttcccctgtgcctaatggaagttcacattggagtggactaaacatttcaagatctttcaatcctgtatttggatcttcaaagaagttcttctcagcatcagttcctggatctagaattgtttctagggcaacatcaccgatttcaagaagagcaagccctccacgatctacaacaccaacacctactctgggtggtctaacatctccaagagttgttcccaatgatggcaagccaacaaatgatgcattaagccaagaggttctgaatttgaggtctcaggtggagagtcttgctaggaagtctcaactcctggaagtggagctggaaagaactaccaaacaactgaaggaagctatttctattgctggtgaggaaactgcaaagtgcaaggcagcaaaggaagtaatcaagtcactcactgcacaattgaaggggatggcagagagattacctggaggagcagccaagaacactaagttgccacctcttcctggaattttcattccaagtgacattccgtctatgcctacggagagtgagggcagcccaagcagctctggagaacaaatcataaatggtcataatggattgcttacttctaatggacaaagttctattaggaataaaacgagccatccagaagttggcaagaatggaggtaggctgcctgatgctgaatcttgccacgatgctgaatgggtagagcaagatgaaccaggtgtttacattactctcactgcgttgcctggaggcgccagagatctcaagcgggttcggttcagccggaagagattcagtgagacacaagcagaacagtggtggcaacagaaccgggcgagggtataccagcagtacaatgtccgcgtgattgacaaatcgaccgccagtgtcaacagtgacattgcggctaactgacactagattgacctggagaaacatacctgattacaagcggagctgaggccatgtaacctgaagggctctctcgtcagtcaagctgggttgctaacgtggctaccattttacctacccccctgagaagaggtggtttctgctcccaggaaaacaggaagttttttttatcttcagttttacataattctttactcttaccccgacccccccccctttttttttctcattgtgtgaaaagtagagtgcttgagcagaggtaatgtaaatgcttagtagaagcaggctaatctatcttgtaaatgcataagcaagcatcggttttagaatgccttgggaatcttccaatatgattgcaaatgcaaatggcaaatctgggccaagtattgatggtctctgaagtttgtagtagagcctgtatgcatataaatctgaagcaatcccgaggtcggaagtcgtacaagtgattaagtactccctctactgaac

SEQ ID NO: 20784 - DNA, 2270 bp, Zea Mays
ggcctccggtctccagtcgcccccggcttctggtctctgcccccgcagtggtcgtgccccactgggctgaggaggaacagcttccggttcctggtgctgatcttgaacggcgcggcgctcaggtcggaggaggcgttgccggcgagactgaggtcgcagaaggagccataccaaaaaaaatcgtcctccgctactgcctacgtgacaaaaaatcctgcggagacctggcagaagtcgcccggtctcccccgcctctggcttggcctcgccatttacgctacaccttgagatttttattcactccatccaatctggccctgcgtttctagattttgcgagggaagacgccaattaggagcctgagggtgcgacggcctagggtttgtagctactggtgtcgtcgcggcctgtggaggcggtaggggacagcgacatctgcagccatggacgacagcgagctccatgaagaggagaacccaaccaatagtgccgtagatgacgatgacgacgaggattatgaggagcctggtggaggaaatcacttattggggtttatgttcggcaatgtagatgattctggtgatttagatgctgactatcttgatgaggatgcaaaggaacacctttttgcactggcagataagcttggtccatctctcaaagacattgacctaatgaagtcttctccagcaccaactgatccttccgaacaagactatgatgagaaggcagaagatgctgttgattatgaagatattgatgaagaatatgatggacctgaagttgaggcaactacagaggaagacaatgtgttgtcaaaaaaggattacttctcttcatctacagtgtatgcatcagtcaacagtacagtttcagtgtttgacgatgaaaactacgatgaggaagaagaaccacccaatgataatgagcctcctggtgatagtgctgcccaaaatttatcttcagtttctatcgagcaggcagatacgacaacctcaagcgataaccttgccatggaaaagattggcttgttatcacatccagaggaaaacatggactttgaatatgaagatttggagaatgaaaagggcactggggaaggccagcttgagcctgaaagtgcaacttcccttcctgttttatgcatagaggatgggaacgctatcctgagattctctgaaatttttggtatccaagagcctgtaagaaaagtgaagacagatcaccacaaacgaccagtggataaagagcttcagatcgcaaatgttgctgacaatgttgaagaagatgaggaactaattctccggagcactatgcaaaatttctcaactttgaagcacattcatgtgaatgaagattttgttgagagtgacagtgatgagtctatttctgatgtcactttaaggctaaaggattcatgtctttcagaacaaccaatgaaagatgtgcatatggatattcgtattgtccagcgatctccaacttgtcctgatttttatccacttgagcattatgattgggaaagtgatatcatttggaacaattcaccagcaactgatcagcaggcttatgcaaaaatctgtgaatctgaagagagtgaggacactcatggtgaagaccagggtaaggattatggccaggcctccaggtgttgggatgtacagagtaaaaccaatggttctccagtaattaaagagactttttgttgtacagaaatgcctgctccagctaactactgcccccctgggaaaagttaccctccattgacaaacgaagataacttagatcacataatgccaaataacttagatgatgcagttaaaattgacaccatggtgcgtttaaataaccttagtgtactaaacagggaattattagaaggatcatggttggacaacataatttgggatcctaatgaggttaccccaaagcctaaactgatctttgacctcaaagatgatcatatgctttttgagatcctagatgaaaagaatgtggaccatctccagtctcatgctcgtgctatgattgttagccagtcaactaagacttcaacaccaacagttgacaattttggcgatcaaccaaagccattgagtggcaggttcaacatctccaatgacaagttttattcaaataggaagactccacaacaagctaaatctcatactaaaaaacgcgctttaatgggcataaaggtggtgcattctgctccagctcataagctgcaaaccatgaagccagtgttgagcaatgaagagaacaactag

SEQ ID NO: 20785 - DNA, 2485 bp, Zea Mays
agttagccaggagccagggcccaggaggccagaagccgcacacgcggtcacgcggaccgcggacgactgccgccgccgtcgtcgtcgattggctcgtgagtcctgctcgctgctccttcctacgccgtgccaccgcctgctgtttcgctcgctcgtgcttggctgctcctgactgcaccgcgccgccgccgccgcagttctgctctccatcccgacacatcgcgccgcttcaagctaaagtgccactgcgccaccatccatcccggcatctcgcgccgtttcagtctcaagagcagatacgcaggtatggagccacgcactgagggagatgcttccaggaacttgcgccaaggtcgattgctagagccgccaccggtacctgctgtgaggacttctccagaaggagtgcagaggcacacaggtcaggatgtgattgctagtagaagtcaaagtgcagcagcatctgagacgggctcttctttgccatgtgaagatggaaatgcaacggctgaaactattggcagcagcacccatcctgtgcacattggtgtgcaaaaccaagacattgaacaagagcaagttcatgagactggaaagagatacaagaggttgacatctgatgtatggaattactttaccaagaaaaaagagataatagaggagaatgggaagaagcgtgagcaaatttggggttattgcaacttcccaaattgtaagcggcgatatagagcagagggccgccaaggtacaactgcatttaagaatcatttgaggtccgcacacagcatagttcgaggccaacaacaacttaaatttgagaaggaccttggtaataacattacccatatccagcctttcatgtatgatcaagaagttagcgtgaagaaacttatcatggcaataattatgcatgattatcctttcaatatagtagagcatggatatttcgttgatttcattaaatcacttcatcctagctttccaatcaagagttgtaatgctgttggtaaagaagtaatggatacatatttggaagagaaggagaaattatatgcacatttaaaaactgtgcattgtcgctttagtgtaaccatggatatgtggacatcatgctcgaataaatcatacatgtgtgttactgttcattggataaatgatgattggtgtattcagaagaggattattggtttcttcaatgtcaaaggacgacacactggtaaaaagttgtcagagacctttactgaagctatggttagatggaatcttgataagaagctattttccttgaccttggataatgctagtgcgaatgaattggcagtcaaagatataatttcagatctaaaagatggccaggcttccttagtttgtgatggtctgttttttcatgtaagatgtgcatgtcatatactaaatttagttgctagagatggcctgaaagtaatttcgaaaacaattgacaagatcaaagctcttgtactagctgtgaagggatctccattgcagtggaaggaacttatgaagtgtgctagcgagtcagaattagatacaaagaggggcatctcacttgatgtttcagcaagatggaattcaacttatttaatgctgcgggatgccttgtactacaaggatgcttttgcaaggcttaagtcttcaaatcgtcatatgtatgtaaaaaattatccatctccggatgagtgggacatggcactaaaaatctttcaatgcttgaaaaaagtttatagtctcgctgaaattctctctggcacttcatatccaacagcaaacttgttctatagaggtttttgtgacataaaagtattgctagatgactggtgttctagtgatgatgccaccatcagtgaaatggcaattgccatgagtcaaaaaattgagaaatattgggaacattctaacttggctcttgctgtggcatgctttcttgatcctcgatacaagaaaaaagttatagagtattacatgaagaaattccacggtgatgggtaccatgtggaacttgaaaaaattgttaatgtggtaagagggctctattgtttttattctagctctacacctgcaccagcaaagagtacatcaccggaaccagctaatagtgcatcagatattttaatggcaagtgtatctgatgaactggacagttttctgtatggtacaaatgaacctactctagttcggtccaatgagttggaaaagtacatggcagatccacttttgcgtcttggtggtccatttgatggcccatttgatattttagcgtggtggaagagcaagagggaagtgtatcctattctttcacaaattgttcgagatgtgatggccatacaagtatcaacggttgcatctgaatctgtttttaatgctgctggccgttttgttgatccttatcgtaatcgtcttgagccggagatggtagaggcattgatatgcaccaaagattggatagctgcagaaagaaaagattcta

SEQ ID NO: 20786 - DNA, 161 bp, Zea Mays
cctcggtaacgatatttttagaaaacaaaatgggttaccgaaatcagtatcttttaccgatcatttcctttgattaatcaaaatttactggatttagatttcagaattttccaaaaatgaaaacatggctcaaggcccaatagccctcagtccggtccagg

SEQ ID NO: 20787 - DNA, 3132 bp, Zea Mays
cgcgcacacactccacggcccaagctcggcacctcgccggcggcaaaccaatccaaaaagcggcggcacaaacaagattatgcaaacgggggttaaaattcccccgtcgcagttgcccgccctcctctagtctagataaaaaaactcgccacctcacgcccttcccatccatcccatcgccactccactcgcactcggccaagaaagaagcggcaggtcactgcccactgctgctccaggagcgagaaaggccagccaaggagggagctttgctttcaggaggagaggagcggcgaggtgggcggcgggcgccatggccgcagcgccgcgtagtcttgtcacctgcagcggcgggggcagtagcagtagtcgcatcctgctcgccgtcttcctggcggccgccctcttggcgtccgcggccaatgcggccgtctcgtacgaccaccgctccctcgtcatcaacggccgccgccgcatcctcatctccggctctatccactacccgagaagcgcccccgagatgtggcccgggctgatccagaaggccaaggacggcggcctcgacgtcgtccagacctacgtcttctggaacgggcacgagccggcgcaggggcagtactacttcgccgaccgctacgacctcgtccgcttcgtcaagctcgtcaggcaggccggcctctacgtccacctccgcgtcggcccctacgtctgcgcggagtggaacttcggtttggctcaagtatgtgccgggcatcaggttcaggacagacaatggcccattcaaggcggcaatgcagaagttcgtggagaagatagtgtccatgatgaagtcggaggggctgttcgagtggcagggaggcccgatcatcatggctcaggtggagaacgagttcgggccaatggagtccgtcgtgggcagtggcggcaagccatacgctcactgggcggcccagatggctgtcgggaccaacgccggcgtgccgtgggtgatgtgcaagcaggatgacgccccggaccccgtgatcaacacttgcaatggcttctactgcgactacttcacgccaaacaacaagcacaagccgaccatgtggaccgaagcctggactggatggttcaccaagttcggcggcgcggcgcctcaccggccggtggaggacctggccttcgccgtggcacggttcgttcagaaaggaggctccttcgtgaactactacatgtaccatggaggaacgaactttgggcgcaccgccggtggccccttcatcgcgaccagctacgactacgatgcccccattgacgagtttggtctgctcaggcaaccgaaatggggtcacttgaggaacatgcacagagctatcaagcaggccgagcctgcgttggtttctggcgatccaacgatacgatctattggaaactacgaaaaggcatatgtcttcaagtcaaagaatggagcctgtgctgcgttcctgtcgaactaccacgttaaatctgctgtgaggatcaggtttgacgggcgtcactatgacctcccggcttggtccatcagcattctgcccgactgcaaaaccgcagtcttcaacaccgcgacggtgaaggagccgactctgctgccgaagatgagcccggtgatgcatcgcttcgcttggcagtcctacagcgaggacacgaactcgctggatgacagcgcgtttgcaagggatggcctgatcgagcagctcagcttgacatgggacaagtcggactacctgtggtacaccacccatgtcaacattggttccaacgaacgattcctcaagtctggccagtggcctcagctcagtgtgtactctgctggacactccatgcaggtgttcgtcaatgggaggtcatatggatctgtttacggcggctacgacaacccgaagctaacattcagtgggtatgtgaagatgtggcagggcagcaacaagatctccattctaagctcagcagtgggccttcctaacaacggtgaccatttcgagctgtggaacgtcggcgtcctcgggccagtgaccctctccggcctgaacgaggggaagagggacctgagccatcagagatggatataccaggtcggcctgaaaggcgagtcgctcggcctccacaccgtgaccggaagctccgccgtggaatgggccggccccggcggcggcacgcagccgctgacttggcacaaggttcttccatccatccgtcagcgatctgaagagatgcatggcaaggcagcgtggcagtgatatacatcctttttgtttggtgtgacgaattaagcaggccctgttcaacgcgccggcggggagcgatccggtggccctggacatgggcagcatgggcaagggccaggtgtgggtgaacgggcgccacgccgggcgctactggtcgtacagggctcactcccgcggctgcgggcggtgcagctacgccgggacgtaccgcgaggaccagtgcacgtccaactgcggcgacctctcccagagatggtaccacgtgccgcggtcgtggctgaagccgagcgggaacctgctggtggtgctggaggagtacggcggcgacctcgccggcgtcagtctcgcgacacggactacgtgaacaaggcaggcgaacgacacgcgttgcatctaactcgtacatgtatactatactccgacgtgcgagtatatacatcgattggtatttgtttagtgaggtgaggccatggcgaggaggagcaagcataccgaccatgccgtattcgcggaccgtatttatacacacgacaccgtacattacactcgcgtgatagcaatggttatactgcaaggggaaggtaaggatggcatttaagtgcagagcggagagggtgggtgcctgggtggtctccggccatcagtgcggcggcaggaccggcagctagctagctgcgccggcgcggcacacacttcgaggccaattcaattcaactgtttcaattcatgtaactggcactctggcagcgggtgtttgctgctgcttgctgtgtttttttgaagacgtgaacatgaaatacaaaactgagcttgttttgtccatggctatattttgctgtcgtaatgttgttggcatttggaaaaaaaaaaccaaatcttggactgg

SEQ ID NO: 20788 - DNA, 626 bp, Zea Mays
cgagcatgcacgtggagcaaaagccttcccattttaagcacaacgctactgccctcgtttcgtctcgtctctcccaccaagccgcaacacagcgcagacggcggcggctgctagcctgcaacgaacaaaccagcgagcgagcgggcggaggaggagatgccgggaaaggggcagcggcggagggagaagaacttccgggcggcgcacggcggggtaccgtgcctgcccccgccgccaaagcagagggagctcgaggccatcccgactaaactccgccgcctcatcgccttccagaacaagcacaacgccaatgctgacgcgtcctcaggaggtgctcccaagaagcaagacgatgggttaaggaagaacaagctagcaacagacaaggcaaaggacaagaaaaccaagaagcaggcattggtggttcctgctgatagcaaagcatcagatattaaaggtaatgataaacgttcagctgccaatgaggatgtgaatgcagagggaagtaaggggaagagaaagaggggaaatgttaaggaccttcgtttcgaggaactggacaagaacatctcagcctcgaagaagcagaggaggaagcagagatgtaaacaatagtgacatgccct

SEQ ID NO: 20789 - DNA, 118 bp, Zea Mays
gaaggatacaagtggccagatacagtgcaccacaccacggtcgcgcgtcgcaagtcacacgtcacatgtcatgtggaacatgcgaatgcacacacacgtgtgtgtatagacatgctct

SEQ ID NO: 20790 - DNA, 2660 bp, Zea Mays
cgctcgcccgcccgcctgacgcctcggcgctgcggggcccacgcacaatcccaggcagcgctcaccagcatctctctgctccatttctcctcgtccctccggcatcgcatcgcgtcaccgccgcctctcgctttctcccctctcccccctactgcgtctccgaggcgcggacgacggcgacgaagcgaacggccccgccgcctagagattcagtcattcggctggatgagagttgttgctggagacttacgagtgtagcactgttgtcggcttgtgattaaatagcatcacttcacatacagcactggataatggatcgtagggatacttcagggtttgttagtggagggtgcaaaaataatgaagcctactgatttctgtagatcttctaaattggtagctttgttgacaattatttaacccagaagtgaggccagctggtacttcccataaagcttggttactctaggagcaatggatcccaggcacgggcgttcagcattcactataagtttctcaaatccaaatggctttgcgtatcagtgcactcccattccagccgtcagttatccagcaactggttctagccagcttgatgtgctagctcctagaggttgcaagagaaagtggactgagttggccctaggtctgggtgactcatcaagctcagacagcagcaagaggagcatgggtactggctgcactgtatcttctgccaagggaagcgatgacgtctcatgtatggactacgacataggttttgagctatctctcggcaatgaaggtacttcgaggctgtgtaaacaggcctgtgactctacaaggaccatggagaagcctgggttggatcttaagttatctttggctccatctcaatctgatgtaactgatgcagatgtaattagaagcagtgcacctcaggacatgtttgtgcatcatcagtacttaatgtcgtcagcgccaacagttgatgaaggatctacatccgctcgacgcttatctggaggcatggtgggttcgtttcttaaccaggatgggatttctctggaccaagcgctcccggttaaccctaatcaggttcaagtcccagctccttcagcaccaaaaagttcagctgcctcttcttctgggtttgtccatccacagcagcgcagcagtatcacaaaaatctgttcgcacccaggctgtgcaaaaggagcgaggggttcatctgggcggtgcattgcgcacggtgggggcagaaggtgccagaaaggaggctgcagcaaaggagctgagggaaagaccatcttctgtaaagcccatggaggggggaagcggtgtgaacaccttggatgcaccaaaagtgcggaaggccggactgatttctgcatagcccatggcggcgggcggcgctgcagccatgaagggtgcaagagggcagcacgaggcaaatcgggcctctgtatcaagcacggtggtgggaagaggtgcgaaaagccaaactgcacaaagagcgccgaagggcgttcaggcatgtgcattgcccacggtggcgggcgccgctgccagtacgctggctgcgggaagggagctcagggcagcaccagtttctgcaaagcccacggtggcggcaagagatgcacacgccccgactgttccaagggcgcagagggaagcacggcgttctgcaaagcgcacgggggcggcaagcgatgctcggctgacgggtgcacgaagagcgtgcatggtgggacccagttctgcgtcgcgcatggaggcgggaagaggtgcgtggtggaaggatgcaggaagagcgcgagaggccggagcgaccgctgcgtcgggcacggcgggggcaagcggtgccactccgctggctgtgggaagagcgcacagggaagcaccgatttctgcaagtcgcacggtggaggcaggcgctgttggtggggacatctcgggtcgggtggcgctccttgcgaccgtctggcgagaggcagaaaggggctatgcgatcgacacaacccgctggtggacgacaacagcgtccacgggggtgtatcgtttggtggtttttccaccctttctgagggaggcgccgaaacaagcttcttcatgcacacggtggaggatcctcgccacgtggcgccatcggcccgtgaaggccgggtgcatgggggcaactttatgcctttcatgctggatggtggtgtgggactcggcaagaagccagccaacaacgctgactctagtacctctgcccctcgcagctgcaaaaatatggagaagcctggtgcctctgcgcagcgcagctggctgtgatgccagaagtccgtggcccgcccgcccttccccatctcggtgtgctctgctcgattcaagtatctcccctgccctctggtgtggtgtgaaactgaaatctattatgcgtggactgtcggtgtgtagactggttggtcaggacatgtttggtagtgtggacgttgtggtttgtttgtgcttttttgcatcagtcaatcagtctggtcgaacatacctggtagcaagagtagtgtgtgaatggcctgtaaaaggaacccatcatcatgatgtatgtatatatctaaataataaaaggaggaaggctgcatcagtcggtgtaattaatcgaagtgttaatggtacgtactgcttccatgggc

SEQ ID NO: 20791 - DNA, 972 bp, Zea Mays
attcgacgaggaggctcatgcacggtggctcttacaatgcatatacaagctcagagacaacaaacttctttttcgatgtcaatgtggacaattttgaagaagccttagatagatttgctcagttcttcattaagccactgatgtcacaggatgctgttcttagagagataaaagctgttgattctgaacacaagaaaaatttgttgtccgatggctggagaatgtatcagcttcaaaagcatctggcttcaaaggatcacccttaccacaaattcagtacaggaagttgggaaacactagaaactaaaccaaaagcgaggggcgtggacatcagacttgaacttctgaagttttacaagaattattcagcaaaccttatgcaccttgttgtttatggaaaggagagcctcgattacattcagggcttggttgagcgtatgtttagtgacataaaaaacactgatcagagatgcttcaaatgtccaagtcatcctctttcagaggaacatttgcagcttcttgtcaaagcactaccaatagaagaaggggactatctaagaattatatggccaattactcctagcatccagttttacaaagaaggtccttgccattatctaagtcacctcattgggcatgaaggcgaggggtccgtcttccatattataaaggaactaggatgggccatgaacttaatggctggagagagcactgacagtaatgaatattcctttttctcagtaagcatcaggctcaccgatgctggtcatgaacacatggaggatattgttgggttgatctttaaatatcttcatctattaaaagtagacggagtccacgagtggatatttaatgagcttgaagcgataaatgaaatggagttccattatcaagacaaagttgatccaataagctatgtgatgcgtactgtctcaactatgcgggtaatatattgtcttgtggtattctctt

SEQ ID NO: 20792 - DNA, 1228 bp, Zea Mays
gtccaaacagcaccagggaacagggtcccatggggtggtggtctggaggggaactgatttggtcaccagcctgagcccctgactgtgcagtgtccacaaagatcccgggctgctccttcctcccagaggaagcgtacaaacctggaggggaactgcccgtctcctcggctgacccgtccacctccttcttttcccctcgtgtccgccgctacacgcgccgccggaaccctagcctccaccgccacaggcagcagggatggagaaaggagcctcggaggcgtcgcccccttgcgctcgctgcggcaagcccgctcagcttcaatgccccaagtgtgtcgaacttaagttaccgcgtgagaatgcagctttctggaaacttgaggatggtgacattgtaaatgttgatgtaactgtatactataaaggtgttcatggtgatttgaatgagacatattttgttggaaatgttgatgaagcttccaaacaccttgtacgttgtacctatgagtgcttggagaaagctattgcgatagttaaacctggagttcggttccgagaggtcggagaagtcataaacagacatgtttcaatgtcaggtttatctgtggtgaaatcttattgtggccatggcataggggaactgtttcactgcgccccaaacattcctcattattcaagaaacaaggccgttggtatcatgaaagctgggcagacatttacaattgaaccaatggtcaatgcaggggtttggaatgatcgtctgtggcctgacgattggactgcagtgactgcagatggtaaacggagtgctcaatttgaacatacacttttggtgacagaaacaggatgtgaagttttgacggcacggttaccctcatcaccggacgtttttccatggttgaagaagccgtgatggggaacgccaccaacagcaagtgatactgttacactgggtcagcaaaaagttttgttctgctctatcagtcggccaaagctgaaattttcaaatattctagatcagagtgattagcatgctactgctgaacagtcgcagcaattgtctatcgtgcggaactatttctgggagtgtgtattgttaagtcggttttcttcgagttatacgagacgtatggcttcttgagatgtgtcaccaatatgattatgccatcagtttacttttgatttcacagaacacaatttccatcatttcgagtaggttattttttat

SEQ ID NO: 20793 - DNA, 1147 bp, Zea Mays
cttagttaacaagcattccttgttgatgctggtttacgagtatatgcccaatggaaatctgcgtgatcatctttcagctagagctaaggtgcctctagatttccccatgaggctacggatcgcgctgggatcgtcacgtggtatcctgtatttgcacacggaagcagatcctccaatataccatcgtgacatcaaagccagcaatattctactggactcgaagtttgtcgcaaaggttgctgatttcggtctctcacgccttgctccgctgccagaaacagaggggagtgcccctggtcatgtctccacagtcgtaaaaggcaccccgggttatcttgacccagagtattttctcacccataagctcacggacaagagcgacgtgtacagcctgggcgttgtgttcttggagctgctgactgggatgcagccaatctctcatggaaggaatattgtcagagaggttttggcagccaatcagtcagggatgatattctcggtggtggataaccggatgggctcgtaccctgctgagtgcgtggagaagtttgctgcgctggcgctgcggtgttgccaggacgagacggactcgaggccatccatggtggaggtggttcgggagctggacatgatatggcgcatgacgccggggacggagaacattgcatcgtcagagtctggcgtcatggggatgggctccaacagcaccagcacacccacagcatcggggtctcggatggatgatcactacatttcgtccatggaggtctccggtagcaacctgctcagtggcgttatgcccagcatcaatccgcgctgacctgctagtatatgttgctgttctagcggtgtgtattatagtttggactcaccacgacgaggatgtaggctacttgtgagcaaccaaacatgtattcattctcttatcgggttcaattttattgttgtcacacttagactgtgaaagtttcattccttagacggtctctagcaacgttctctaaatttcatccattaaaaaatatatataattgcactctaaaagattacgtcatttatatcttcatcatccccggtagtctcttttaaatttcatcatctatatcctatcttccatattatcacaaatcctgttattagaaatttt

SEQ ID NO: 20794 - DNA, 737 bp, Zea Mays
ggcgacgtccccttcttccatggctgttgctcgtggtgataacactggggaatcaattcctatgctcctaaggataccccgcttctttgatccatggggtggttatgatatgataggctttggtgacattatcttccctggattgcttgttggattcagctatagatttgacagagcaaacagaaagggtgtcttgagtggatattttctctggctaattgtgggatatgcagttggccttttcattacgtatcttgcgctgttcttgatggacgggcatggtcaacctgcgttgttgtaccttgtgccatgtacattgggggttattgttattcttggttggttaagaggtgagctttatgaattatggaacttcggaaaaagtccaggagaaaattttgtcaatgaaccatgacaacaaaatccagggaagatgtattcttcagcgtagtagatagcttgaggatgtttattaggaggcaccgtgtattgcaagatgttatgtttagcattatttcaaagaaggatgctattgtgtttgaaaaaaatgatatacatgtaagatgcaagcatgtactcccacagtcgtaaaataatccaatataagtgccgctatatagttccaaaataagtgtcactagggttggaaacgagttgagcctgacttggctcggtcaatttggatatgtttggttgcctggtctagtgcacgaccaggcccatttgaaaaggtcgac

SEQ ID NO: 20795 - DNA, 1960 bp, Zea Mays
ctcggtcgcgtctccctccctcgtgtcacccacccattttcgtcggcctcctcttccccccgcctcgccagcccgaattaggagctacgacgaatctaccgggccgagctcgccagctggcctccccgagggcgaggccctatcggctgccgttcccccattgacagggagctcagccccgccaccgccgcggctgcggcgtgtggacgtaaccggagctcctcgcagccgctgataagatccgaagggttcctaggctttttgtggcgggaggcgactggttccgtcgggtggtccggtgagcatggcggggcccaagtttgggtcgttcaaggcagaaaagggggactcagcggcggctgcaggcgcggcggcgcagaggagggacccatacgaggtgctcggggtggggcgtaatgctactgagcaggagatcaagagtgccttccgccgcatggcactcaagtaccatccagataagaattcagacgaccctgttgcctcagagaagtttcaagaggccacattctcctataatatcctgtcagatccagacaagaggcgccagtatgacgcatcagggtttgaggccattgaagcagatagtcaggaactggagctggacctatcaagtctcaatactgtaaatacagtgtttgctgctctgtttagcaaactaggtgttccaatcaagaccactgtctcggcaacagttttagaggaggcattgaacgggtcagtagagatttctcagcttcagctgggcaaatctctatgtaggaagttgctgtattttgagcttgaggacaatggtggattaagccttgctttacaggaagatagtgcaaaaactggaaaagttacttctgcgggcatgttctttctaggctttcctgtgtatcggtttgaacaaaataattcagctgctgctgcgaaggatcctgacagtgctttctttaaaagattggatggctttcaaccttgtgaagtaaatgaactgaaagcaggaagccattattttgctgtatatggtgacaatttctttaaaagtgcaagctatactattgaggttgtatctgctgaacccttctctgctcaaaaagagaagctacgaagtgtggaggcaaagataattgcaaaacgatctgagctgtctaaatttgagtctgagtatcgcgaggttttggcaaagtttactgagatgactagcagatatgctcaagaaatgcaaacgattgatgaccttctaaaggaaaggaatgcaattcatgcatcctataccaacaacccaactctgcagcggagttccagtagcagcaaagggaaatcaccctctaaagggtccagaagtgaggatgaccaaactgtaaagaaggaaaagaaatccaagagccagccaatggagggatccaaaagcgatgatgagggtcccgaaaacaaaaaggaagaaacgcctaaagatcggattcgaaggaagaagtggttcaacattcatttgaaagtggacaagagaaggccctgctgataactgcgatatatcatgtactcctcaagatctctgctccaagtacaaggaaaaaattcccatttgacgtccaggaagatgcatcttgtcgatcattcccatgatcaagcccattctatttcctgaaaagtcaggaacctcgccagcttcaaaaatggtgtatgtaccacttagttttggacccctagtcggatactgttgtatttatatcaagttggacggttatgtacaatagataccttaatagtgtgatgtccagaatggcagaatccaattcagatttgttcaatttgtttgatgttgtccgtgtcaaactttactacccaacttgactcagccatccgatctgaactactgatcctgtattccatgaggcaatctagcaatgtgcgatgctggttaaaacttgtgcgtcgtacttcatgaaggaacaag

SEQ ID NO: 20796 - DNA, 2121 bp, Zea Mays
gtagtactggaaaatatttcgagttctatgattgttgcacggtctactatctctgcagcatatcgcactgctcaaatagttgcatcattgccaaacttgtcacatcagagcaaagcatttcctgaggcgttgtttcatcaacttcttttagcaatgctctatccagattgtgagacacatttaggagcacatcggattttctctgttgttcttgttccctcttccgttgctccgttttcatttgcagacacttcacagacaaggaagattgatctccgaaggacattatctagaacaacatcagtgttttcatcttctgctgctttgtttgggaaacttaaaagagatatgctttcatttcgtgaaagtgcactccaggataacacaaagctactgcccatcagtgagaatgcaaatgagatcagtgcaaatgatgcaaaattattcaagtcacagactattcaaaggatggttagtacaagagatatttctctcccctcttccacagatacaagtacttcgagtgaaccaacttcatatcaggaaaaggatgctgtcaccctcatgctcagtgttcgtcaggcaaatcttcttctttcctccttatggactcaggcactgtcacctgaaaatgttccacggaattatgaagcaatttctcatacttacagcttgatgctattgttttctagagccaagggctcaggtgctgaagttttggttggtagctttcagcttgctttttcattaagaagtgtttcattacaagcaggctttcttccaccttcacgcaggcgttctctttttactttggcaacttcaatgctcgtgtttttttcgaaagcttttaacgttcttgcgctcattccagttgtgaagcaagtgttgacagaaagtacagttgatccatttctttgtttaatagaagactgtagattgcaggctcttgatagtgctaatgagtcctgcacgaaactctatggttcaaaagaagatgatgagctagctctgaaatcactgtcgaacattgacatgaatgaaaatcagtcaaaagaaacatcagtgcctcttatacttgacagcttggaagatatgtcggagtcagaattgtctgctattaggaaacagttgcttgaggaattttcagcagatgacagctgtctgggatctcattttactgaaacaccttcacagtatccagcacaaaatgggaaactgcaccataagtctatggaggttattccattgggatttgtttttgaagatgatactctcgctgaagcatctgacagctcagtagaacctcacttgcaacatccgccatgtaacaacattcttgatgtcaatcggcttcttgattcagttttggaaacatctcagcatgttggaaggtcgtcagtgtcaacaaaccaggatctgcctttcaaggacgtagccaaccaatgtgaagcacttctgattgggaagcagcaaaagctatctgcgtgcatgagtgtctgtgaaaaagaggctggtgaatcttccgtcgagcagtcatctcggcaggatcctcaagcagatacgtttctctgcacagctgatgaacaatggcaccccaattcctgtaagctgccagcgctgtgtccctacgaccggttccttgcaacgtctgggtgctaagatgatctcttctgcgatgtggatctctataaccaagaacgtgttcagtggacgcctaaaaattggtggttccagagctcatgcatgctaaaatatgtgctgtcgtgtgtgagtgccagatgacatgatttccctgttttgtaaatggttctcgtctaccatgcatgggaaatatagggggtgcatcattgagtttatttcattgcttttgacagaaccattctatctctctctcatgctttgtactaattattagcaaacgacggatgatgaggggcagagaatcaacccattttatttctcaaaatataaacaaaaaagagtgaaaaatgatgaatcgcttcagggcctgcctgcaggtgcgttttcaatcctaaacccggtgtaatgaaggtttcatggaccgaactgaaaaatagtctttacaagcctgaagacctcgttatgtctcaccagggatga

SEQ ID NO: 20797 - DNA, 4202 bp, Zea Mays
cgccacgttagcaaccagcgcgtctgccacaggtcgtggctcgcttctcccctgcttttccgcatcgccgcagcgccgacgacgactgggtgcgcagcgcggcgccgccgttctacgccgggcgcccaagtcctcgacgggaccttctctggcgacgagcgccccaccaggccctaagctcatatgagcacggagcatcaatgcaagctaataaaccaccaaaggtcaattggccgcaccacgaaaacgctgtccaaggctactctagcagagacgactttctgagttcaagctttctcttctccttgccgacacagaggccgaaccctgaagctcgtgagaggatgctttcgctaaggtcttctgcctgtaaaattcaaggcccagagcgtcttcaggctccgttgatcgagaaggcctggcgttccctatgcaacactcaggctgcctgcaagagctatttaagacctggtttatctgcaaaagcgagagactgtgatagaggtcatgctcgtacctatggagaaggctcatacaacaccaacaaaatgtctactgtgccaggaaacaggattctttccatggaaagcacaggccaacccagtgaaagagtttctctgcagaacaacagcagccatcaaacagttggcatctgctcctctatgagaagtcaccagaacaaccatgttgtgcaggaagatatgagagcaacaaatcaatacaattttgcaagaacaaacgctgcattacaccaatctatggctgctgataacatgtgctcttatgataaatttgatgccatggatgatgatattctagcgactattgacgtggaccaaatagttatggaacattatcaagcaacaaatgcacccagaggatcagcatcccataacatgtcaactccaccaggaaacaagtgtagcgtcaatggcatggatgaggctaatttaccacgagaactatctgaattatgtaaccatcaatgcaagctagctttttgcagagaggcaatgactcatctgcaggagatgaaggatgagctgcttgcagtagccaatgagcttcttgatgatgatggtgaactcaatcctcaacattcacaagaacttcataaaagacgattgcatcttaaaaaactggttcagctacttgaggaccatatgacaaggtcagcccaagatgaggagagacaaatatcacactctatggcatccacaacatctacacagcagcatctgccacctatgaccccaggaagcacttttacaatggatagcaatagattccaatctcaggtttacgttggaaatggacctagggatagtgatttatgctattctcctgccccatattcctgttcagataatttaagcacaccattaaattctgtatggaagagctataccccaaaggttatcgatattaactacactgaaggatctggtgatagaaagtggagtagtacaaatttcccatggactaaggaacttgaggccaagaacagaaataagtttggaaaccattctttccgccccaaccaacgagaaataatcaatgccacaatgagtgggcatgatgtttttgttttgatgccaactggtggtgggaaaagtttgacatatcagcttccagcacttataagttctggcttaacattagtagtttgccctcttgtctcactgatccaagaccagatcatgcacttgtcacaggctaatattcctgcaacttatttgagtggcaacttggactggtctgaacagcaagagataatgaaagatttaatgtcatgccgctacaagttgctatacgtcactccagagaaaatagctaagagtggtgctttatcgagactattggacaatttaaattcacaagggcacctttctagaattgttattgatgaagctcattgtgtaagccagtggggtcatgacttccgtcctgattacaagagcttaggtgttctaaaacaaaacttccccaagacaccagtcctggccttgactgcaacagcaactgctagggttaaggaagatgtcgtgcaagctttagcccttgaaaactgcattgttttcaaacaaagttttaatcgtgcaaatctgaggtactacttaagacccaagacaaagaaatgcgttgaggacattgatttatttatccgcacaaatcattctaaagaatgtggcattatatattgcctttcaagaatggattgtgaaaaagtggcagaaaaactaagggactgtgggcacaaagtatcacactaccatggtagcatggatcctatggatagaacacatatacagaagctttggagcaaggataagatcaacataatctgtgctacagttgcatttgggatgggtatcaataaacctgatgttcgctttgttattcatcattcactgcccaagtcaattgaaggatatcatcaggagtgtggacgtgcgggtagagatgggcaaccttcatcttgtgtgctatattaccagtattctgactatattcgggtccgacatatgattacacaaggagttacggagcaaacaggagcaccacgtgatttatcttcacatgagcaagcactgaagacacataaggacaatctcctgaggatggtcagttactgtgaaaatgacgtggactgcagacgcctacttcaactgatccactttggagagaagtttgacccttcgctttgtgcaagaacatgtgataattgcttgaaagagtcaggatgggtcgaaaaagatgttaccaacattgccaggcaattggttgagctagtcacaaggacagggcactcacattcatctacttacattcttgaagtttacagagggtctatgagccaaaatgtcaagaagcagcgtcatgatgctttagctcttcatggagctgggaggcatctagctaaaggtgaggcagcaaggataatgcgacatttagtaactgaggaaatacttaatgaggatgtgaaaaagagcgatatgtatggatcaatatcatctgtcctcaaggtaaatcatttgaaagctagtggtcttctctctggcaagcacaacatcgtcctgaagtttcctgcttctgacaaggcctccaagatgaggaatcttgatgcctcgttgcttccgcaaaccaacaagaatgttcagcagcaaagtgaagtcgatgtgaagcttgcatcaatgctctatgaagctttacttagccttagagaacagataatggaggagtgtaacgaaggattcaatgcgtatcacatattcaaaacagacacgttgaaggaaatgagtatccgagtaccgagaacaaaagaagagcttttggatataaacggcctcggcaagacaaaggtcaagaagtacggggaccgcttgcttgcaaccatcgaggacttcctcagcaaacacccaaatccaaggagaaacagcggcggaggtggcggcggcaacgagcactccgatgcggcaaagaagcgaaggggctccaccgccatctctgcagcgagttacggcgactatgacttcgacgaacgcacgggccagcagtccaagaagcgcgcggccaagacgcgaactgtctctgcccacggcccccgctgcacggacgccgatctcgatgggcctgaggtggtggaggtggacggcgagctgcgcagcgtccggaagcccgtggcgtatggcaatggcagggttcttcccaagtgggcacccctctaacttattccaggaatttgggtacgtcaagtagagtagagtaccgctagggaataggaatgtaggcttgcacatatgtaatctcccaggttggctcgtgcacatgcagcgatgcagtgatgtcaagggttttctgtgatgcagttgtacattggaactgtggcgtcgaatgtacgtccagctggtacacgcgtcaaggacatacgagaccaggagcaagagttccgttgcttgcttccgtgggcagcatcgcgatcgcagtgtcggccacctgttgcccgaaacatcttggatgcaggtacatcttcgcacgcgtgtaccatcaagcgaccaaacttgaattaacatcatcgccatcatcatccgatggctactgtagtaatgtatgcatgtatgctgacgttggactgaccttaaacatttctcttgcatccagttgtcctaggctgtatataggtctagcaagtcttaagggtc

SEQ ID NO: 20798 - DNA, 2207 bp, Zea Mays
tgataagactgttaaattttgggaccttgaaacttttgagttgatcggttcttctggacccgagaacaaccgagaatactttgagctggctagtgcaatccgttctatgaagttcaacagtgatggtaaaacaattttttgtggattgcatgaaagcttaaaggctctttcctgggaacccaccatatgtcatgatgtgattgatgtaggctggtccacattagcagatctaactgttgacgaagggaaacttcttggctgctcatataaccaaaattgtgtcggtgtgtgggttgtggatttgatgagaaatgagccttatgttgatagtagtgctggatcacacttaaatggaagtataaataggccaattcaatcagatgatagcatgtcatcagtgtttgggaggctatcgatttccagaagcccagccaatgaaattggatcggatactctgcttggatgctcaatgtctggttcaaaagaaagtcctgtctcaacttctgcatcaatgaggggattgtcaaagccacctggaaaaggggacctccggctctcaagatctatttctacacctcttctttctcctagagttagattgaacccaaatttcattgacagacagaagaatcaggcagctactgctgtaccattaccagaaccaatagtccgctttaaagcgaatctctcttcagatgctggaatgttgtctcgcaagtcacatgcatcagcagctcccatgtatagatcaaggtccaatagttctcggtatggtattatggaatcatcttccatacctgttctggccttgaggcatagctctagaaaggatgctggtcccgttcacagtgaagctgccacaggtgagttagcagatattgagcctcaaaatatagaaaaggaaggtttagttgccaatcatggcaaagaagatggcaagttggtacctgtaattgcttcaaggagctcaaagatagtcgaagaagttggctatagaagaatcaccaatgatgtaggatgtaagagagtaaccctagaaagtggtttgagagttaattcagatatggactatagaagcagagctccagaaagccacgaggtgcagcagcttatacatctgtcagaacctgctggtttacatgggaaatttataagagaatcttcaggtgctggggacaataactgttctggttcaatatgcactgagagtgctgagtttaatgaagttgatatctggtacagggtatctggttttgataaatggaaccctgctgctgcaaggaatccagaatttgccagcatccacagaaatgaagtgattggaataagacagttgatggagtcaagtggaaagtatgttgttgacgatcgaccttcctcttctaattacgataacatccagtatgtgacaacactatacagctcggtggtttaccgttgctggcaaagaaatgatataaaaggatctattgatgctacatggagaatgttggattttgctgtcactaatgatattgttaatgctctaatggagaataggaactgtatcacattagatgtttgcgcttctctcttacgtcttaccaccagtcttcttgaaagcacatatgacaggcatatgagcattgccttgaggatgattctcagtttcgtgaagagctttggtcccacaatttcttcagccttgttggctataccacctgttggggtagaccttgaagcagagcagaggatggagtggtgcaatctatgtttccaagaactgaagaatgtgagcgtcagcctcaagtttctgacaaggcggcaaggcgaggttgggagattagctcaggagctcagcctttttcttcaggatctctttcaattgtcaagcgtgtaaacagtgaccataccacgacgtgcaaaatattcacgcactcaatttcctttggtcataacagatatagcgacatatagtaggatttacctctagaaagaaagaaatatacagaaactatagggtgaagcttacagggtattttctccgagctagtttgggagcatcatttttttcatagaattcctatttttctaaggtctcgtttgtttcctttcattttaaggaattagaatcttactaatataatatgctattttttttagaatatgacatttcactacttttcaaagttatcatataagcttatcttaaattcatggggtgagag

SEQ ID NO: 20799 - DNA, 445 bp, Zea Mays
accttcacgcccaatgggagagttaagcctccggagatgtgaaagtgtagaagcataggtcaggcgattgagcacctgagaaacccctgctctggttccagcttggttagcctgtccccagtttccagtagcaagggagtacttcaaaccactggtaatagtttttgcttttatagcaaattgcaaattaacttcctttccattatctacacactaggatcaaggaaaaggaagagttaataaccacaaggatcgaatgggtggggaaaatagaaaatttcacagtttagacagcagaaaaccttttgcacataagatctcacgtcccttgttaacttcctgaaaagctatagttgcagaagaagaaaaatcaggcaattaatccagtaaaaaaagggttgacaacatttaatattcttgtatatttaggcaaaccattctaaac

SEQ ID NO: 20800 - DNA, 724 bp, Zea Mays
acaggacaacgagacgtctgacggcgtgaggctgagaccaaaggagaacagagacggagaggagcgcggcggcccgggcgccggagcctggagggtaggggaagagaagagaagaggcgatggcgtcaatcgggtcctccaacatcggattccagctgctgaagaagtctggttggaaggagggcactggccttggagcgcaggagcagggaaggttggaacctgtagagactcgtgttaagaataacaagcgtggtataggttctaaagaaccaaaaccacaacctaaggttgaggatgacattgaaacacatcctcaaaagcccaaggaaatgcaatcaaagaaaagggcaaaattagctgcaaagaggataagaaaactgcaagaagaggagaagcgcttgaaagagaaggaattcgagatggcttttttcagggaattttggcctgataatgtgtaaggcagaaacttcaacacttgacaatgtagctgctgactttgcctgatatagtggatgtataggcttgcaaaacgcttggcctacaaaatgttaccccattcattccgtggatgatttcacacatgatttgtggctagggttggcacaaagctgttcatccatgtagtggacaaatctagtgtagaattgcccatgctatgtgatcttgtaatttttatacattataaatcttgtttttttttaagaaaaaaaaagaagaaaaa

SEQ ID NO: 20801 - DNA, 2909 bp, Zea Mays
ggcctaccgcacccgcaaaatttcccaaaccccgcacacaattgccggaaccctagctccactccatcctcccagcccgcaccaatgacggaccaacaaacccaggatctcgtcaaggagctcgtccaccgcctcctctccgccgccgaatccggcgggcgcggcggcgggcgcgacacgggcggtgcgctgcggttcgcgcaccgaatcctctccagccgcctcgcccccgcggtcctccccgatgagcacgcgctcgcggagtccatcaagcgccgcctcgccgcctcgggccgccccgatgatgcgctctcattcgctgacctccactccaagctctccgtccgtgcccgcccagcgtcgctgtggccgctcctctacctgctcgactctctctcctcgcagtaccgcgccgccgccgcggcttcgtgcctcccaaaccttcccatcgccgccctaccgcagaatgccacctcggggacggcgccgggcgccggtgtcaggccgggttcgcggacgcacggggcgccgccgggcggcctggtgctggtctccaaggatccggacaacatccgcgagatcgcgctgcgtgagtacaccgagctggtgatcgacgagacggaggtgtcggaggccgcgcttgtgcgggacgtgctgtacgcgtgccagggcatcgacggccgctacgtgcgctatgacaagtccgtggactcctacgaccttccagacggtgttcgagtgccgcgatccacgcgcaccctcgttcgcaagctatgcgagcttggctggctgttcagcaaggtgcggggcttcatttctgacaacataagccgctcgccctcagatgctgccactgaggtgggcactgttacccaggcattctgctcggcgctccaggaggagctgtctgattattataagctgctggctgttctggaatcgtactcattgaatccaattcccacacctggatctgattcaggtgtgtccagtaattacctctcactgcgccgtcttgcagtgtggcttgctgagcctgcagtgagaatgcgcctaatggctgttctggttgatggatgccggggactgaggggtggtgctatggctggtgtgatccatgggcacgcacaacacggagatcctatgtttcaggagtttatgggccgattactgcgccgggtgtgctcgccgttgtttgagatggtcaggagctgggtgctagaaggggaattggaggatgtatttgcagagttttttatcgttgggcagccagtgaaagcagaatctttgtggcgggagggctaccttattcaatctgatatgcttccagctttcatatctccagtgctcgcaaaacggattcttagaactggcaagtcaatcaactttcttagagtatgctgtgacgatagtggctgggctgatgctgctgccgaggctgctgcatatgttggcactacaacatctcggggtggccttggttatggggagactgatgctttggaggcattggtggttgaggcagccaagaggattgatcgacatttgatggatgtcattcataagcggtaccgatttaaggaccactgccttgctattaagcgttacttgcttcttgggcagggtgattttgtccagtatcttatggacgttgttggccccgagttatcagagccagcaaataggattagctccttccaattggctggcttgcttgagactgcaatccgagcatccaatgcacaatatgatgactgtgatatcttggaccggataaaggtaaagatgatggatcatggggatggtgatcgtggctgggatgtcttctctttggagtatgatgctagggtccccctggacactgtgttcacagcttcagttatgaagatgtatctcaaggttttcaacttcttgtggaagctcaaacgcgtagatcactcccttaccggagtgtggaagactatgaaacctaactgcattgtttcttctccattttacaaggaaggaacaagcatcagagctcaatttgtatcagttcttcgtaaatgtcaagttctattcaatgagatgaatcactttgtgaccaatttccaatactacattatgtttgaggtcctggaggtttcgtgggcccgtttttctgatgaaatggatgcagcaaaggatttagatgaccttctcttagcacacgataaatatctcaactcgatactggagaaggccctgcttggtgaacattcccaaggacttttgaggaatctgtttgaactgtttgacattattttacagtttcgaagccatgctgatcgatggtttgaaaggatatatgagttgcagctaaggggaaagggtaaatcaaaatcaaaggatacaggttcatggtttgatggcggcagaaaagctatgatccaactagctggagaacttttctggaaaatgggtgaagacctggatagcatcgcaaaggattatacagcttctcttgatgcttttattacgcagctgcccatgcaacagcacgtcgatttgaagttccttctcttccgccttgacttcactgaatattacagtcgtgtttcctccaacaaatgaatgtgagccgcttatgtgaaaaactaggagttagattgatcgtttggttgggacttggaaagcattatttttataccatatcccattaattgatcttggtcgcttgattggcaatggtcacttccattttccttgcacctcctgtagaagaggatctgaatacccttttactgaggattgccaatgctacaatctggtgattctgtcagctgtttgcatgctgatgcttatgtgccgattcaacgaggctaaagccacgcatttcatgcaactctgtacacaattttctgtgtatgtcgagaaattcagaaatctgg

SEQ ID NO: 20802 - DNA, 2029 bp, Zea Mays
gtggaggtgtcctgcgcgccgcacccccgcgttatcaggctccgatcccatccccgtcccgctctgcctggcctctgtcgcggggtcgcatcgcatgcctccatgccttggctggcagcatttactatttagccgaggtgtgggtgggggcgttggcggcaaccggcaacaccgtcctcccctccccctcctcctcccgcgtgctctcctctcctatcctctctgcccccggtaactacaactgttggagtaggcccgggttggccacggccgccacactgctccgctctgctctctgaaggcattgcctgcgcggcttcttcctccgccggcgtcggtccgcgagttgttggcatggccgccgcagggacgcagctaggccggcttctgggcggcctatggttcctggccgcgttgctaggacgaccgggcgccacggcggcggccgccgggcagccggcggcaccagcggtggccgccgtcgacgggcggcgcgccgtcgcggcgaccggggaggacttcgtgtgcgcgacgttggactggtggccgccggacaagtgcgactacggcacctgcgcctggggccgcgccggcctgctcaacctgggaacgaactgagcggcactggagtgggagctcgggttggcgcggaccagtacgccgcagacgtgatcgccctgaaagcgctagtcgacgacgtgtaccggagcgagccatcgaagccgctggtggttgctcccggaggattcttcgaccaagcctggtttactgagcttgtcgtcaagaccgggccggatctactgagcgtggtcacgcaccacgtctacaatctaggaccaggaagggacacgcacctgatcgacaagatcctcgacccgtcaaccctcgacgggatggtcagcacgttcagcgacctccagcggctgctcaagtccacggggacgtcggctgtggcgtgggtcggggaagccggaggcgcctacaacagcggccgccacctcgtcactgacgcgttcgtgttcagcttctggtttttagatcagcttgggatggcagcgaggttcgacaccaagagctactgcaggcagagtttggtcggcggcaactacggcctgctaaacaccacgacgttccagcctaaccctgactattacagtgctctactgtggcatcgcctcatggggaccaaagttctagcagtaacattcagcggcacgaacaagatccgcgcgtacgcgcactgcgcgagagattcagtaagcaattcagccgcccttttttttcatctcctagagaattcacgctctctcgatgttgcgtccagccaggaatcactctgctgctgatcaacctgagcggcaacgccaccgcgcgggtctcggtgacggcccaaggggctgccgcggcgcacgcgcacaggcacaggcacgacgcgaggaagcacggcggcggcaggaagttccggcacgtgcacgtccccggcttcgccggcggcggcgaggcggcggcgggcgccgtgagacacgagtaccacctcacccccaaggacggcgacctgacgagccaggtcgtgatgctgaacggcagggcgttggccaccgacgcggcggggaacatccccgccctggaggcggtcgaggtggacgcggcgcggcccatcgccgtcacgccctactccatcgtgttcgctcgcgttccgcatttcagtgccccggcgtgtagggtagaccggtagagtagcggtttagatgggtagattcataatgggtttggcgtgattggtgatgatggacagctaagctttccatctggtgagatgaggtgaagtgaggtgcaaggcatctgtcgaaagaaaagggatgcaatgcaatgggggtgagtttgttttctttttacgattggaattgtaaaaggtcgaagaaatttatgatgatcagcgatgggaaagggaaaaactcgttcccgtttgtctttctgttcatggttggaaacaccagtgaaatcgacgtaagagcggtactaacgaaat

SEQ ID NO: 20803 - DNA, 3195 bp, Zea Mays
gcagagtccacctccatgctctccactgtcgcctgcgagacgcccacctagcagcgacgccactggggccgcccgctccatcgcgtcgacgtcgaggacgccgcgccgccaatcaccgccccgctccctcctctccaccgcttacaatccccagaaggcggtcgccggtctccccctcgcgccctacccgcctccatcgcctgctagcgcgccaggccggactcttaaaccctagcgaggctcggccaatccccgcgtcaggatgccgtcagcgtcgggtccggtggccgtggcgtcggcgccggcgccggtgaagtccgcaccgtccctggccgtcgggatctcgccggacttgtacccaacggaggacgacctgccgtacgaggaggagatcctgcgggagcccttcaagctcaaggggtggtggcgctacctcgtggcccgcgcgaccgcgccgtttgccaagcgcgccgtcatctacgagcgcgcgctcaaggcgctcccgggaagctacaagctctggcacgcctacctccgcgaccgcctcgaccacgcgcgcccgcaccccatcgaccacccggcctactcctccctcaacaacacattcgagcgggcgctggccaccatgcacaagatgccgcgcgtctgggtcctctacctcacctcgctgctcgaccagcgcctgctcacgcgcgcgcgccgcgccttcgaccgcgcgctccgggcgctccccgtcacgcagcatgaccgcatctggccgctgtaccttcgcctcgcttcgcttccggcctgccccgtcgagacgtcgctccgagtcttccgccgatacctccaatttgacccctcccacgctgaggacttcatcaatttcctcatatcagccaaccactggcaggaggccgccaaccgtctagcttctgtgctcaacgacgacgggttccgctcagttaaggggaaaacgaggcaccagctctggcttgagctctgtgagatcctcaccaagcacgctgatgaggttgctggcctcaaggtggacgccatcttgcgtggtgggatacgcaagttcactgatgaggtcggcaagctgtggacctcactggctgattactatgtcaggagaggcctttttgaaaaagctagggatgtgtttgaggagggtgtttcttcagtggttaccgtcaaggagttcagtgtggtgtttgaggcatatacacagtttgagcagagtatgcttgcggcaaagcttgaggctgctgaggaagaaggggctgaggatgagaacgagggagggggcaggaagagtgggatggataagttatcgaagaaattcctcaatgaattctggttgaacgatgaggatgatactgatttgaggatggcaaggtttgagcggctgttggatcgcagaccagagcttcttagcagtgtgctgctgcgacagaatccacacaatgtggaggaatggcacaggagggtgaaactctttgaaaaggatcctgcaaggcaagtagcgacatatgttgaggccgtgaaaactgtagacccaatgaaggcagttgggaaaccacatactctgtgggtggcatttgcaaagatgtatgagaaacacagtcgtctagatagtgctgaagatatcttcaaacgggctactcaagttaattataaggcagttgaccatttagctagtatctggtgtgagtgggcagagatggagttgcgccacaacaattttgacaaggctattgaactgatgaggcaagcaacatcagaaccctctgttgaggttaagaggcgggctgctgctgagggggatgagcctgtccaaatgaaagtgcacaaatctttgaaactgtggagcttttatgttgatctggaggagagcctcggaaccttagactctacccgtgcggtttatgagagaatattggatttacgaattgccactccacagataattctcaattatgcatatctcctcgaggagcacaagtatttcgaagatgcatttaaagtgtatgaaaggggcgtgaaaatattcaagtatccccacgttaaggccatctgggtgacctaccttacaaagtttgtacatagatacaagcgaagcaagttagagcgagcaagagagcttttccatgaagctgtccaacaggctcctgcagaggaaaagaagcccctatatttacaatgggcaaaactggaggaagactatggtcttgcaaaacgtgctatgaatgtatatgatgaggctgtaagagctgttcctaactctgaaaaaatggccatgtacgaaatctatatagcacgcgctgccgaactctttggtgttccaaggacaagacaaatatatgagcaagcaattgaatctggcctcccagacagagatgtgctgacaatgtgcatgaaattcgctgagctagagagaagtcttggggaaatcgatcgttcgcgtgccatctatgtgcatgcatccaactatgctgatccaaacaatcctgacttttggaagaagtggaatgattttgagattcagcacggtaacgaagatacattcagggagatgcttcgtatcaaacgcacagtggctgctagccgcagtcagagggatcagaagttaaacctggacgaagcagttgacactctgaagcgtgctggcgtccctgaggacgagatggcagctttggaaaggcaactggctaccggaccatctactgccccaccagcagcaccaagcactgccccagcctctgctaacaggatgatgaactttgtcagtgctggagtagaggcccaggtcgagagcagcaggcaacaggctgctaacaatgaggacattgagctgcccgatgagagtgacgatgaggaacccgatgtccaaattgcggagaagagcgttcctgctgcggtatttggtgagctcggcaagagagctgccgagaacaatgaggaaagctcaggtgcccaagggaatgagcagctgggcgccctcgagaggataaagagacgacgccaatagtctgcctctgctaagatgagagcccatgtgtgcaccatgacatccgtacgatctttagcgatgttgtacttgtaaacattttttcgagtggaattttactcctgtgcaaagcatttacgtaagttgttcgggggtatacccgctgctaatatgatgccgaaacgttattatctttggtc

SEQ ID NO: 20804 - DNA, 209 bp, Zea Mays
cagaaacgaatgccacaactttaatatataatggagttctgtacaaaatagttaaataattacatcatatgaagacaacgatccagcaaccaaagttgattgggagacgacggcctagaccactcacgaactcatcacagtatccttcatactccttatccaatggtacctgtccttgacctggggggatgtgagtacaacaaggtgag

SEQ ID NO: 20805 - DNA, 1324 bp, Zea Mays
tcaactccttggcgacggctcaaaaaccatgcgatggagaaacgttcatatcagcagatgatctgcgaataaacctttggaatttagaaattagcaatcagagctttaacattgttgatgtgaaacctgcaaacatggaggatctaactgatttgaggagcatgaagcacctggatcaagatccttttttacagagataatagcatcagtttcagatataaaatttgcaagggatggaagacacattcttagtcgtgattatatgacactcaagttgtgggatctaaacatggattcaggcccagttgcaacttttcaggttcatgaatacttacgtcctaagctttgtgatttatacgagaacgattcaatttttgacaaatttgagtgctgcctcagcggcgatggactccatgttgcaactggttcttatagtaatttgtttcgtgtttttggttgttctcctgaaagcgtggaggcatcaacgttggaagccagcagaaatcccatgaggcgacaggttgctgatccagcaaggcctgcacggactctgaccggtgctgtgaggagaggtggagagaacacaagcgttgacgccagcggaaactcttgcgacctctcaacaaagctgctccatcttgcgtggcacccaactgagaactccatcgcgtgcgctgccgcaaacagcttgtacatgtactacgcataggggaacgtgctagagagaactggcgcaggaaactgttgtcggttcgatggctggggagcccccgaaaagcggcagtcggtgattccacaagatcagtcctggcacaagctgacttcctcctcgggattttccttggtggatgtgaagctgaagcatgtgttactggtttattattaccgaagctttttggcacccaaggtatgacgacggctgtagctgcctgccttgtagcgaaattggctgcggaaggataaaaggaagcggtaagaagacagacagacaggtcacaggaatacctgctcacgtatcacaaaggctgtaagatttttccccccttctcttttacgacgtgtaatgcaacctagtcagagctaaccatcagttgtcgtgaactctgatagtttctgtcatagatactgtagattttatctatgcagctgctgttgtattcattagattgttcggataagtgtaccagtgggctgtgatttgctggttgtggccgtgatgtggctacgcggaggaattcgaccgaagttaaatctctttctatttaaaattaaatataaaaggatgtaacccaacaagaaggcctcgcaggttccactcttctaa

SEQ ID NO: 20806 - DNA, 4844 bp, Zea Mays
tcggattcctgcgttagtacttcgttgcttactcatgggttgcatggaaatgagaacatcccacttgaggaagtttttgagaatctgagatgcagtcgtggggggctcacttccgagcaggcgcagcaacgcctgcaattatttggccccaacaagctcgaagagaaggaggagagcaaatttctcaagtttctgggattcatgtggaacccactgtcatgggtcatggaggctgcagctatcatggccatcgcactggccaatggtgggggaaagccaccagactggcaggatttcgttggtatcatcacactgctgcttatcaactcaactatcagtttcatagaggaaaataatgctgggaatgctgctgctgcgcttatggcccgccttgcgccgaaagccaaggtgcttcgtgatggccgttgggccgaggaagaggcagccgtccttgtgcctggggatgtaatcagcattaaacttggagatatcatccctgcagatgctcggctccttgatggagatcccttgaagatcgatcagtcttcgctaactggagaatcgttgccagtcaccaaaggtcctggtgatggtgcctactctggttcgactgtcaagcagggtgaaattgaggctgttgtgatagcaactggtgtccacactttctttgggaaggctgcgcatcttgttgactccacgaatcaagttggccatttccagaaggtattgacagccattgggaacttttgtatttgttcaattgctgtggggatgtttgttgagataattgtcatgtaccctatccagcatagggcgtatcgtcctgggattgacaatcttttggtgctacttattggaggcattcccatagcaatgcctacagttttgtctgtgaccatggcaattgggtcccatcgcttggctcaacagggagctataacaaaaagaatgactgcaattgaagagatggctggtatggatgtactttgtagtgacaaaactggaactctgactctgaataaactcacagtggacaagaacctcattgaggtttttgaaagggaagtgactcaagaccaagtaattctgatggctgctagagcctcccgaatagaaaatcaagatgctattgatactgctatagttggcatgctagctgatccaaaagaggcccgtgctggtattcaagaggttcatttccttccatttaatcctaccgacaaaagaactgccttgacatacattgatagtgatgggaagatgtaccgtgttagtaaaggtgcgccagagcagattctcaacctcgtctacaataagttggagatagaacgaagagttcatgctgtaattgacaagtttgctgagcgtggacttagatcacttgctgtagcgtatcaggtagtgccagatggaaggaaagagagtcccggtgggccatggcattttgttgctcttatgccactctttgatcctccaaggcatgacagtgcagaaacaatacgaagggcattgaaccttggtgttagtgtaaaaatgatcacaggtgatcagctagcaattgggaaggaaacaggacgtcgcttaggcatgggtactaacatgtacccttcctctgctttgctgggacagaataaggatgagtctattgctgttttacctgttgacgatttaattgagaaagcggatggttttgctggcgtattccctgagcacaaatatgagattgtaaaacgtctgcaagcacgaaaacacatttgtggaatgactggcgatggagtaaatgatgcccctgccctaaagaaagctgatattggtatagcagttgctgatgccactgatgcagccaggagtgcttctgacattgtcctgacagaacctggcttgagtgtgataattagtgccgttcttaccagccgggcgattttccagaggatgaagaactacactatctatgctgtttccattacaatacgtattgtgctaggatttatgctacttgccctcatatgggagttcgatttcccaccatttatggtacttattattgcaattctaaatgacggtaccataatgaccatatcgaaggatcgagtgaagccttcgcctctaccggacagctggaagctggccgagattttcacaactggaattgtgcttggtggatacctggcagtgatgactgtcatcttcttctgggctgcatataagacaaactttttccctaggatcttccacgttgaaagccttgagaagacagctcaagatgattaccagaaactcgcctctgccgtatatctccaagttagcaccatcagccaagctctcatcttcgtgacgaggtctcgcagctggtcattcgctgagcgcccgggctttctactagtgtttgccttcctggtcgcgcagctgatagctacactggtagctgtatacgcggactgggggttcacttcgatcgaaggcattggatggggctgggctggtgtggtgtggctctacaacctcgtcttctacttcccgctcgacctcctcaagttcctcatccgatacgctctgagtggcaaagcgtgggatcttgtcattgagcaaaggattgcgtttacaaggaagaaggacttcgggaaggaggagagggcgctcaagtgggcacacgcgcagaggacgctccacgggctgcagccaccggatgccaagctgttccctgacagggtgaacgagctgaatcagatggccgaagaggccaaacggagggccgagattgcaaggctgagggagcttcacacgctgaaggggcatgtggagtcggttgtgaagctcaagggcctagacatcgacaccatccagcagtcgtacacagtctgatgaccctggattaagtacatacatgtatatctagttctggcaggtggcagtcgcctgcttgtttgtatttgccatataccataacacatcatgagaactggtagttggtgccgtcggttgtcttcgcgtgctccttgcgatgttattgtgttacgccggtttcaagcaacataggtcacggatcataaatcagatatccgacggatatcaaatccgtgtgtcatctccccgcgtcctggttgccccgcgtcgggcgactcggacgctccccataatccctagtagccgccgccgccccttcgtgggcctctccctgccgcgccgctgcctgagctggccgccggaaggttcggctgcttgcggggagggcggcggcggggcatctccgtctccctctggtggatctgggcgggcacagccgccaaggtcaccgtgagttgctcgtcggcgtggtcggccccggcttcgccccctcgcgactcgggtggctgccaactcccctccctccccatctctttgccttgccgccgccggagctagctggtgggttgctcgcacggctaggggtgaaggcgtcgggcgggtgcttgctgccttgtcgtgcgtccaacccacggtggcggcgtccgcccactcaggcaacgggcctgtggctgggtgcgcgcccgcgaggctagcccggtggcggcgcctgcgtgccgcgacggcaatcgctgctgctcgggggttggaggtgtgcctggactgtgtgctcgcgtacctgatgcgcggagggctggatctggcgcccccagggggagcggcgttggcgcgcggaaggctggatctggcgcgcgaggttggcggcctccgcatgccatccgtcggaggcggcggcaggctggtcccgggctagcgcatgagccggggtggaggtcggcgttggtgcgccggcaggcctgcgcagtcggccggaattgcagtggcgggacctcctctcgtctggggcagcatcggctagtcgatcgggctagcgcagggtggtggtggcggcaggcccaaaatcttcatcatttgtgtggtacgtcggggtaccggcgacggcggaggcagcttgctgtgtctcgaggtttcggccagacgttgtgctgggggctcttgggcgaaagtctcggcgacggtgacgcccatgggcgtcgcttcccctgttaagggcgtcacaccccagtgctatcttccttgggtgaaagctcggtccatcacggacaggtgacggtggcgtcacagtgacgtcactcccttcctgaaggcgtcgcttctgaagttcgtctcggccaggactttgccttcggctgttgcttcgcttctcggtgcctggtatgcgagtggaggtgggggttttgcaacgtgaagtcggagctgctacatcagtggatgtggctcggcaacgataacacgaggcgaacctcccttcttcgtggtccagaatgtttcgaaggtcgggcaaaaaccggaggcagggcagagggtcaagattggaagtcgaagctgctttgtgcctgagcccggcaacgatgacttgttgagacctttcgcttcgggttgtctatctgctttttgtttggttcgcctgttggctgctttggaaagtcggagttgttggatgctctgcatctttgcttgataacgatgacctttagcagttttgtgctctcgtgtggggttgccgctgcctgtgttgtttgggcactctatgtcgacggtgagtgtggtgtcgtgttgatgtcctaatccaaccgacgagttgagttgtatggtgttggcgtgttgatgtctcaatccaaccgcatgttgtttgttgtttagtccggtccggaccacttcttaattaatataatcggcagctctcatgtctggttcgtttcaaaaaaaaaaagtgtgtcaaattgtcatccctagctagacagagtagccatgggctgctatttggagctggtctggcc

SEQ ID NO: 20807 - DNA, 3114 bp, Zea Mays
cgcttcgttatataaaccctagactaaagcccccgagtccctccgcccccgctcgccacaaccactgcgcgtgatcccatttcgaaacaaaaaaggaggagcgcgctcgcactcaactccgcggagccccaatcccagcgtcgcctgcggtttagatggaggcgcacggcgaccagcggtggctggtggattgcctgacggctacgctcgacaccgcgcgcgatgtccgcgccttcgccgaggagtcgctccgccaggcctcgcttctccctggatatggagctgcccttacaaaagttacaatcaacaaagagatctcgtttggtttacgacagcttgctgctgtcttactaaagcagtttatcaagcagcattggcaggaagacgaagagaattttgtgccccctgttgtttctgcttcagaaaaggtggtcatacgacagctcctgcttacctcattggatgattctaatgggaaaattcgcactgctattagcatggctgtagcagctattggacagcaagattggcctgaagactggcctgagttacttccggttctcttaaagttaattggcgatcaaagcaatgggaatgaagttcgtggagcattaagatgcctagcccttctatcggatgatctagatgatatgtgtgttccaaagctagtgccagagctattcccatcactgtatagaataatatcatctcctcatctgtatgaaaattctcttcgtgcaaaggcttttgcaatagtccattcatgtatttctatgcttggatcaatgagtggtgtctataagagagatacagctagtctgatgacttcagtgcttgatccactaatagagcaattctccatagttctaaattatccggtgcagtcccaaaatcctgatgactggagcatgcagatggaggtgctcaaatgtttacttcagcttgtccagaactttcctagattacctgaagctaaaatttctgccattcttccagcactgtggcagacatttgtttcgtcattcaagacctatcacctgtcatacattcaaggtgcagaaactttggattctattagttatgattctgatggcagtgaaaaaagtcttgagtcattcgagattcagttatttgagctatggacaacaattgtggggaattctagattagcaaaggttattgggggaaacattaaggagctagcatactatactatagccttgcaacagataactgaagaacaggtgcaaaactggtcacgcgatgctaaccagtatgttgctgatgaggatgacctaacctatagctgtcgtgtgtctggatctcttttgctggaagagctagtaacagcttatgaagattatggaattgactcaattgtggaagcttcacaaatgcgttttcatgaatcacgagaattgaaggaagcgggttctgctgactggtggagactgcatgaagcatcactttttgctttaggttcactgtcagaacagttgtgtgaagcacaggattctggtttgacaaaatacaatgtgcgggatttacttgagcaaatgctaattgacattatgggaacaggggtgcatcagtacccatttctccatgcgcgtgcattttctagtgtggctaaattttcttcactgataagtaaaggggtcagtgaacagtatctatgcaatgcggcccatgcgattgcctcagatgtgccacccccggttaaagttggtgcttgtagggcactggcccaacttttaccagaatctaatcagaatctgattcagccaaacattatgggcatactttcatctcttgttgaccttctgcggcaggcatctgatgaaaccctgcatcttgttctagaaaccctgcaatcagcaatcaaatctggtggagaacaatcaactttaattgagcctgtcatttcccccatcatactggatgtttgggcacagcacattgctgacccgttcatcagcattgatgctgtcgaagtgttagaggctatcaagaatgctcctggatgcttacagccacttgtgtctcgaatccttccaacaattggatccattttagtgaaacccaaggtccagccggatggactggttgcaggttcactggaccttttgacgatggtactcaaaaatgctccagttgctgtggttaaagcagtcttcgacacatgctttgtttctactgttcaaattgttcttgaaagtgatgaccatggagagatgcagaatgcgacagaatgcttggcagcattcatatcaggtggccggcaggagttgcttgtctggggtggtgaacaaggacaaacactcaagatgctacttgatgcagcttcaaggcttttagatccagcgttagaaagttcagtatcactatttgttggaagctttgttttgcaactcattttacaaatacctctacacctgtctcctcacataccggaccttattgctgctattatgagacgtatgcaaacgagcagcattgcaggattgaaaagctcccttattgttataatagccagattagtacatatgagtgcaccaaatgttgatgggttcatcaatctattgctttctatccctgcacaggggtatgacaattcacttgtttatattatgtcagaatggtcacaactacaaggtgaaattcagggagcctaccagataaaggttacaacgactgcattagctcttctcatatcaactcgtcatcctgagctatccaaggttgaagttcaagggcatcttattaagactagtgcaggtataacgacacgttcaaaagctcgagtgactcctgatcaatggaccaagattcctctcccagttaagatcttctcattgctggcagatactttaactgaaattcaggaacaaattggtgctggtgatgacgatgactccgaagaggataatgactgggaagaagttcagaatggtgatgctagtatatcagatgatatcatacactcagcatcggttccttcaatgactaatccatcagttgaacatttaaatgcaatggccaaggtttttgatgagaaaagatcttccatttgaattagatgacgtcaaagtcaaataacccatattcatgcag

SEQ ID NO: 20808 - DNA, 1889 bp, Zea Mays
gcagagttgagcagctcgttagcaagctggtgaaatacattgctagtgctggaagcttgcaaggggggcacagtttatcagagccgtctgccagacattacagctctgaaccttcacttcaggcgacagaagaaaatgggtttaaggggcacagcatgctggctccattcacagcgggatggcagagcactgatgtacacccattggttatagagagatcagagggttcttatgtctatgacagcaatgggaagaagtatattgatgctcttgcaggactgtggtgcacagctttaggtggtaatgagcctcgactagtcaaagcggcaactgagcaattaaacaaattaccgttctaccattccttttggaaccgtacaaccaaaccctcattggatctcgcaaatgatattctcagcatgttcaccgcaagggagatgggaaaggtgttcttcacaaatagtggttcagaagcaaatgactcccaggttaaactagtgtggtattataataatgcactgggaaggccagacaagaagaaatttattgctcgctcaaaatcgtaccatggatcaaccttgattgcagctagtctatcaggtctgccagcgcttcatcagaagtttgatctaccagcaccttttgtcctgcacacagactgccctcactactggcgattccgtcttcctgatgagacagaagaagagttttcaactagacttgccaataatttggagaatcttgtcctcaaagaaggacctgaaacaattgctgctttcattgctgaacctgtgatgggcgctggtggtgttatccttcctccaaagacctattttgagaagattcaggcagttctgaagaagtatgacatcttgttaattgcggatgaggtcattactgcatttggaagactagggacaatgtttggatgtgatatgtataatattaaaccagatcttgtttccatagccaaggctctttcttctgcatatatgccaattggagcaattctcgttagcccagaaataacggatgtaatctattctcagagcaataaacttggttcttttgctcatggctttacatactcgggacatcctgtttcttgtgccgttgctgtagaaaccttgaagatatataaggaaaggaatattgtagaacacgtcaacaaaattgctccaaggttccaggagggaatcaaggccttctcaggcagcccaattgttggggagatacgcggtctgggactgatacttggaactgaatttgtcgacaacaaatctccaaatgatccatttccagctgaatggggtgttggttcgatatttggcgcggagtgcgagaagcgtgggatgctcatcagggtggctggggacagcatcatgctgtcacccccgctgatcatgactcccaatgaagtcgaagaagtaagaccattttacagtcactttttgccttactgatacaatcatcttagatcatctaaccatcatgagactgacagaagcctgattgccctcttagatcataagcaaattcggcgatgctctgaaggctacagaggaacggattgtagaactgaaatccaggaagaattagccgatgctgctggttgtaacgacagtgaggatggtgatggcagtgtccaatatacagtgtattttcaaactttatttcagtaaagtgctgggctggaatcttgtagtcggttgcatagcgacagttgttccttgttatggagcaataagtaatgcatctgcttaatcagagtagcatacccttgggtttgtgctggtacaggtttttcaaatgaacatagcttggtataatgtagggccatagtacccccccacccccccccccccccccccacacacacacacaaaacg

SEQ ID NO: 20809 - DNA, 2690 bp, Zea Mays
gcgcccagtccgagtaattggtcttggtgagtgtgggatatccactccctgcactcacctcacgaattactcgctggaccactgctccatctttggaggtgtcgtcgccgggcttcctgaatgtcgcactgctatcaacagttttcgacatcttgctcctcctcagctccgataccaattgttggaaactgcgccggagagacaaccctgcaggttgccggcgagttcctacctcccaggttatcaccaaacgggacagactgctgactctgaagcttggtgtttctgaacataacttgccaaatcctaataattttggtgagctaactgttcaggctgaagaaagttcaggttcaaaagcaataatggagatgatattccgctgttcggatcttgaaatcaaggatcttctaacaaagagtgatacttttttgctaatatctggaatatcagatagtggaatgcctgttccaatttgcaagacagaagtaagaaagaatgatctcaatcctaggtggaggccagtgagtctgaatctgcaacagattggaagtaaggagaaccctctaattgtagagtgctttaacttcagtagcaatggcaaacatgacctagtcggcaagatagtcaagtcagttgcagaattggaaaatatgtaccataggaagaatggtgaaaatttctttgttcctgccagcaatgcacatgaatgtcacagtaaggaggtgttgaagagccagctatatgtagagaaatatgttgagagtaacagacatactttcctagattatatttctgttgggtgccagttgaattttatggtaggcgtagatttcacagcttcaaatggaaatccacggcttccagattctttgcattatattgacccctcaggtcggccaaatgtatatcagaaggcaatactggaaattggtgatgttctacaatattatgacccaccgaagcgtttccccgcttggggctttggagcaagacctattgacggtcctgtttctcattgttttaatttgaatggcagcacttatcaacctgaggttgacggaatacaaggaattatgtcagcttatatcagcgctcttcgtaatgtatcattagctggtcctaccctctttggtcagttgataagcaccgccatggcgatagctagccaatctcttgctgagaatcaacataaatacttcattttgttaatagtcactgatggcgtggtaactgattttcaagagactattgatgcgatcataaaggcatcagattttcctatatccataattgttgttggagttggaggggctgatttcaaggaaatggagtttctagatccaaacaaaggagagaaactggaaagctcaaccgggagagttgcatcaagggatatgatacagtttgccccgatgaaggatatgcacggcactgggatatccacacttcaatcacttcttgctgaggtaccagggcaattcatgacatacatgaggacaagagaaacccaaacagacagttagtacatgcatgctgccttcaatcagtacaagatgcaccttggaatattctttgttaatatcattttcgtccttcccgttacatagtggtgcaagtttcaagtcatgggtgtgagatagatagtatggacgtgtcaagtgtaggtgagacatcgatctcctggagacgccaacatcaaattggttagctgagcttgtttaaaatcgtcgccgttaaaaaaaaatgctgcttgttaagagaaatgaggacctccaccagcccaccttaattccatggcatctttttttttattattattctgtgtcaagttggattcctaggctgtaccgcccatctttctctacctgtttgtaagatatgactttaggggtttcggcctttattatccctagtaggcccattggaataggaacttttttggcattgcacattagaattttcaagtgttggcatggctgtttagttctatggtggtgactcgtgacctgtataatataatttagacaatggaatatacagcatttgtggtacagccatgtgacaatgtcagattaagatttgaggcatctggttgcaatacgtttatgtatcgttttctcttttaactatgtatagcaccgatggaacctggagtctgaactagaaattggcagtggctgttctcggacagtttccggaagagaaacccctagctactatgcaagacggtaggactacaaaggaacaactagacccccggcccaaattgcatcctggggaatgccgagggcggagggagatcgatcgatgctccggttccacgactatgtgcgtggtccttgtagaaaagaaaagaaaaagtatgcgtaatctgggtgaaagcaccagcagagtagttaatttggttcagacgttcagtggacaatcgaatcgagcaagcagtggaaggaatccatttcgatacgctgtggaggcaaaggcgccactccaacgatcccagcgatatctacgagaggaacttttcagaagatcttacgtggacaaacatgccaataagccaatcaggcttcggttacggtctcactcaggacatttccctgtgtccacccaacatccctagttagggcttgttcggttattcctgtcgcatatggattggatgagattggaaaaaaatatgaaggatt

SEQ ID NO: 20810 - DNA, 1793 bp, Zea Mays
cttgtaccaaatcatgaaattgccaataatgccacaagtgggggaacatctggatctggtcaggttgctgagtttaaaagggataaaattgtcatattgaaaggaagaggaaggattgattctaatacacctaatggagcaactcagcactcatcaacccctatcaagaatgtgccaccatcgcgttctagacaagaccagcgacttgaagccagtggaaaaattattaagactatactatcaaacaaggaagcccgcagttcaaatccttctgaacatgagcaggaaggtcacatgtttaatactgagaaggataagcggccaccacgggctttcaaccctcgtaccattgtgaaagatcaggtagttgaaaatgctgagaggagccattttgatgagaaggctaatcatctccatggctccgttcccattggtgagaaggttgaaaggcatgctagaaacagagatagacccgatcgtggtgtatgggcagctcgccgctatgacaaatctacatctgcagtctcaaaacttgaactcaacacaggtcatggagacagaaagacagacacaaggggtcaaggtggtagccgtggtgttcctgttgaaaatggtttgtatgcaaaaataagatgtgtagcttttctagatcagtttcatgacacagtttttaatccaggacataggcacgccaaccgtcgtggccttccacgtggaccaaaggaaactgaaatatctgcaagtgtgcctgatgcgaagaattcaaagaggggctctgctagctatggtgctcatgagagacaagtatgggttcagaagtcaagttcaggctcgtgagtttgttcattgatgatactcccatcgaaacaggtattgccagtcgtggtgaagtcttggattctgcagtgcattcttctttgttagctgttgatcctgtgaagtatgttaacaaaatgtccaacggtcaaatgctgctatgaagtgcaacctcagatttgtcaatcgaggtcttgctgctatagctgaaaagagagcttgctgatttgattcacagaaatagtgaagtaacataacccggcatgtaggtagctctcgaccacttttgggcaagatttgattcggtcccaaggttgatatttctggagcaatgggtggagattagtttggcaccagtacctcactacctcgtgacagtggtcacatatttccaagacccctggaggctacacgcaccctcgtcagagatggatgtaaatatctctagagaaagaagaggtctggttctgattgctgtttacaggttagaggtgcagcgtatttacaaagagatataagagttatcacttatcatcagactgcttggtttgctaaataaaggtgaatttagttactagattatgagaccccgtgttttgactgccgcaatcgtggttcgcggcagcagaaaggttacctagagtctaaaagtggcatctcattttggtattatggttctgaccaaatgggatatgatgtgacttgtgcggttgttttggacgcctggtgtgttttgctaccatgttccaccagacgacccgggggttctgtagtgtcagggatggatgatgtgtttggtgtacagcatcactggtgcttactgttttaaatcttaaaagtgatgttgccttgccttaatggttgatggtgtctgttctcttgtccattccgtcatgaaagttaaaaaaacatgcttgaaaacggaactctccagtattttggagtggttggacacctctaagctgattctcttgttt

SEQ ID NO: 20811 - DNA, 921 bp, Zea Mays
aaaacacttccgcagtcagttggcccagttccagcagctgctgcttctgcttctgtggccgtctgcctcctcacatgtcactgtagcgtcgaactagcagcggctgatacaagcagccagctggtcaagagtcattcagatccataactagatcatactacagaggagctgctggtgctcttttggtctatgatatcactaggagggagactttcaatcaccttgcaagctggctggaggatgcaaggcagcacgcgaatgctaacatgacgataatgcttgttgggaataagtgtgatctgtctcacaggcgtgcagtgagctatgaggaaggcgagcagttcgcaaaggaacatggtcttatcttcatggaggcctctgcaaagaccgcgcagaatgtcgaggaggcatttgttaagactgctggagcaatctacaagaaaatccaagatggcgttttcgatgtatctaatgagtcttatgggatcaaagttggatatgtagtccctggccaatctggaggtgctggtagctcttctcaaggtggtggctgctgcagctaatctgctaacgcccttatgtacaaaggcatatctgcggtgtagctgcgttatctctatgttgctgagcgtaaaatagttactgctccagggtgctttgttatttgatgcaccaacgggtggcagtgcctgaacgatttgagacattcagttttatttatgtcaggtgttcataaacattctgtaaatcactagattcttcaccgtcattcgtcattaagcgctcacaaattctgtccgtttgcgcgtgtaaataagatacctcgatgcatcgtttggtgcgatgttagtttgtcttttttgaatatgttggaacttggaactccatgttttgacaaatactctgctttcagagggacaa

SEQ ID NO: 20812 - DNA, 4417 bp, Zea Mays
cggaattccatgttagcaaactgcgttgtcgagagggcttcaggcttctgcttcaccgtgctcctcccagcccagcgccgacgccgagctccccttccttgaaccgccggccgtgccaacccgcgactcgctggagtaggcggtacgattaattcgaccagacgcggccgcggatcctaaacgagttctgggtttttgctctgaagaacaaaatggacaatgctcagagtgacaaccgaactgataccaagcaagatgatgatgcgcgccaaagcaaacaggatgatgaggaggcccgccttgaagaatataaaaagatcattgatcaaaagatttccctccgccggagcaaccaaaaccctgaaaggcctgatgcaaactacctgagaaccctggactctagtattaagcgcaatacaaccgttataaagaagttgaagacaataaatgatgaacagaaggatgtgataatggatgagttaaaaagtgtgaatttgagtaaatttgtcagcgaagcagtttcttacatttgtgaggccaaacttcgctccgctgatatacaagctgctgttcaggtttgctcgctccttcatcaaagatacaaggacttctctccttgtcttatagaaggtctactgaagatcttctttcctggaaaatctggagatgatttggatgcagataaaaattcgagagccatgaagaagagaagcacattgaaacttttgattgaactatattttgttggaattgtcgaagatgctagcatatttgtaaatattataaaagatcttacatcagcagaacatttgaaggaccgtgaaggaactcaaacaaacctatctcttctatctacctttgctcgtcaagggaagttttttgtagggctacaacctcatggtcaagaagcttatgacgagttctttaaggacctaaatgttactgctgagcagaagaagttctttaagaaagccttgaactcttactatgatgctgtagctgaactactacaatcagaacatgcgtctcttcgtctaatggaggcggagaatgcaaaagttttaagtgccaaaggtgaactaagtgatgagaacacatcctcatatgagaaactcaggaagtcttttgatcagttactacgtggtgtttcctcgttggctgaatctcttgacatgcaacctccagtgatgccagatgatggaaatacaacaagagttactacaggaaccgatgcgttgccttcttctggaaaagaatcatctgcattggaacctatctgggatgatgaagataccaaagctttttatgaatctttacctgatctcagagcatttgtgccagctgtattactgggagaggttgaaccaaaatcaaatgagcaacatgttaagggccgtgagctatctggtgagtccacttcagaacaagagactgaactacatgacaatgttccaacttctgccactgaacgtcaactagaagttaaagtagatgatctagtgaaagagagtgaagacagagataaagagaaggggaaggatggagaaaaggaaaaatccaaggagaaggatctggataagaaaaatgaaagagagaaggagaaaggaagagtcttggatggcgcaagtctggataacctcctgcagaggctgccaggatgtgtcagtcgtgatctcattgatcaattgacggttgagttttgctacctaaattctaaagcaaatcgaaagaaacttgtgcgtgccttattcaatgttaataggacttcactggaactgttgccatactattctcgtttggttgcaacactctcaacctgtatgaaagatgttccaagtatgcttctgtctatgcttgaagaggagttcaactttttaataaataagaaggaccagatcaacatagaaacaaaaataaaaaatatacggtttatcggggagttgtgcaagttcaaaatggctcctccagctcttgtttttagctgtttgaaggcctgccttgatgatttcagtcatcataatattgatgtggcttgcaaccttcttgagacttgtggtcgttttttgtatcgctcacctgaaactaccattcgcatggctaacatgctggagatactgatgagattgaaaaatgtcaagaatttggattcacgccacagtacacttgtagaaaacgcctactacctttgtaaaccgcccgaaagatctgcgcggatatcgaaagttcggccaccgttgcatcaatacataagaaagttgcttttctcagatcttgacaaatcaagtgttgaacatgttttgcgccaactacgcaaattaccttgggcagagtgtcaacaataccttctgaagtgctttctaaaggttcacaaaggaaagtacagccaagttcatctgattgctcttctcactgctagtctcagccgctatcacgatgactttgctgtctcagtggtagatgaggttttagaagagataagggttggattggagttgaatgactatgggatgcaacaaaggaggcttgcccacatgcggttccttggagagctatacagctacaagcatatagattcatcagttgtttttgatacactgtaccttatcattgtgtttggtcatggaactccggaacaagatgtgctggatccaccagaagattgtttcagaatcaggttgatcattacacttctacagacctgtggtcactatttcagtaaggggtcttcaaaaaggaagctcgacaaattcttgctacactttcaaagatacattattagtaaagggcccttaccactcgacatagagtttgacattcaggatttatttggtgagctacgaccaaccatgtctaggtattcgtcaattgaggaacttgttgccgcgttagttgagtttgaagaaaatgaacgttcagccccagtagaaaaggttgaaaatgaaagacactccgacaatgaatctcagaaaagacactcgcgagatgctggtccatctgtgaatggtgaaagcgctgcaaatggaaccgaggaaaatggcaaggctcatgaagtagcagatagtgagagctattcagatactggcagcattgatggacgggaagaagaggaggatatattatctgaggataaatcaaatgatggctcagataacgaaggcgacgatgaagatgatggcattcctgttgtttctgatgaagatgaaaatgttgaggttagacagaaagtcatgaatgttgatcctaaggagcaagaagacttcgatcgagagctcaaagcccttcttcaggagagcttggagtctcgtaaatcagaggcccgttcaaggctccctttgaatatgatggtgccgatgaacgtcctcgagggttcaaaagactcaagggccacagaatctgagagtggagaagaaacagtagacgaagagggtgggaatgctgggggtagcagcaaggtgcgtgtgaaggtgctaatgaagaaaggacacaagcaacagacaagacaaatgttaattccggccgatagttcaattgtgcaaagcacgaagcagcaggaagctgctgagcttgaggagaagcagagcatcaagcggaggatccttgagtacaatgagagggaggaagaattgaatggagcatcccaaatggggaactggggccaaggagctaccagtaccagcagtatcagatcaggtggccggggcagctgggatggttcagcacggggaggtggtcgacaacggcaccacataacgggttctggtggtttctaccacagttatggcaggagaagataagttcgcctgtgtgagctatttcgccctgagccttttggcaggtagaaagcatcctagtctgacaaattgcctctagcaaatgagattagcgtttaacacagcttgatggacaattgcctctagcaccctagtctgaaaataagacaattctaccactggtcatgggagatagcaatgccttgagaaggagctgcaaatctgatggtcctaatggcttgagttgctacggtgtttggtaaagctggttgtgatggctgtacccggatacatgcgcatactgtttcgacgccatgtagggggtatctggtcaaagttcgctgtctgatgcctgttctaatttagtggagtattactggcaatgtggtacaagcatcttgtcttgaaaatcgaaaactgcacggtatgtgtgcgccattttttgtctgatgaggtgtgttccatgcgtgtatttcatatgtagctacaccaatcgcgtgtccaccgaacgatgctaacttgctatgccgatggagcatgctttctacccgcatcgcaacccgcaaatccttgtccagtcgtttgtcttccatccaggaatgataccgagttctcatgtcacgcttgacgcttctttccgtcctgct

SEQ ID NO: 20813 - DNA, 865 bp, Zea Mays
atgacagccggggtcgggatcttacttgtcacaaatgttgaggatagtgccaatagattcatctgcgcttgtgtggtagtgttctacacatcactttaacatattgagaaagtggagtttttgaggggccagaattggagcgttacactgactaggagcagggcttcaccctcctcaagccagcctcctggcccaaggtggagaagatgggcgtgacagcgttgtttcaacaggagggtgaagggagcaacaatattgggtttgtcgtcaaccttcggcttaattcgctgacggagttcgggacgccgccagttcatcgcgggcaaacttctgcaagcagagaagaaaaaggatgttctcagtgggagagagatcaggtcatggcggcctggcagtgtatgaaattgagtacacactggatagcactaggtgagggatgaaacagatcttctcgggtgcatttgttgcttcaaggaagctttatctgctcaacatagcctattcagacacccggacagtgagtcaagaattgttctggacaaagcattccattcttttgattatgtatagtttatattttctatggcagaaaatatagtcgtgagtatttgtttgtttgtaaaaagagtgctaatcaaaaggttgcattgtcgtcttgtccagtactattgcacctttatcagtgatgtcaggctataagtaatttcagtttagataatgaacttcatcttgcacatattggtaacattatttgtgtcgaaagcagtaaaatgtcgtgatcttaattcctagcctaacactactgcatttgtaatatcttggacttgaaattttatacagtggagtacatctatatttttttgag

SEQ ID NO: 20814 - DNA, 757 bp, Zea Mays
tgtaggtgacttttaataatattcccattgccggtcacaaaactcaagtattgtcacagatctttttattagggacataaagtatgtgtatttctgttatcaccacaacatatagttactgcattgatttactcgacactcttcaatactgcttttatcatcacgtatttttttcttaaatctactacattgtatgcatgatacaccaacatcttctttagtaccaaacgaaaaacctagctacaattaacattttttaagtctcacaggaatctattttgtgtggctacaaaggttacccatgctggcagaagcaatctactttcgttgaaagttgcaggacctgtgttgctggctggtgaaggtagccagcccactgaagactgggtccactgaagaccatcttggtggccacgctcggcgctcggcaggtcgctggaggagaacggaggcatgtaccgcgtcgtctccaaggagtgggaccatgaagatcgagaagatgaccatggcaaggctcagggacgacgacgccgtgcgtcgcgaccttcgcgacatcttcatcttttggttttgaagcacaagagaattggaaatcaacaactggtgtcactggttattcttaagaaccatttgctaccgaatgtagtccaaaggctccttaactcacaaacacatgagacacaaaaatatagaaagaccaaatattctcattcatctattctgttcactggttataataaatggtggtgtcctctct

SEQ ID NO: 20815 - DNA, 1027 bp, Zea Mays
gcttccggtgctggagatggtcggcgaggcggcggcgtcgcagtacaaggagcccatggctctaaaccagatcgacgtacttccgacaaatcgaagaggacgcggagaagtatgcagcggtgatcctggagctgaaggacgccatcggctcgttccagtccaaggacatgtccgagctggtgaggttccgtcagcacgtcgagcggcagctggtgtgcctgaccgacgagacacaggttagtttcatctggacctcctcagccatcagccgtgctccggcgaagcctaagcctttatggtcgacgcgccgtcgaactgcatgctgcactgcaggtgttagccaggttcgagggcttcccttccaagaagctggaggcgttgaggacggcggccgcgctctactccaagctggacggcaccgcctcgaggctccagtgctggaagcacaccgccggccccgtatcggcgcagctcgacagattggagagctacttcaacaaggtcaaagacgaggtggacatggtagagcggaacagagacgaggagatgaagcggctgcagtcccagggcgttcacttcgacttcggcgtgctggtccggatcaaggagggcatggtagacctgtcgtccgcctgcatggagctcgccttgaaggagagccaggacgccagagagacgccgacgccgacgcgtgcgaagtgggcgagcagccacggcgatggagagtcgaggatgctgtggcgggtgttccagctggccttccgggtgtacaacttcgccggaggccaggacgagcgggcggacaggctgacgagcatcctggcgcacgagatcgaggagcgagcgctcctgtaagcctttccgtgcgacgtgtacggtttttttttttttggtgtgtccgtgtgtgaaagcgagaaagtgtacgcatcatgtcatgtgcaatctccgagaggtgcaacttgcaagttctatatgtctccttcgaactttaaatagatttatttatggtatagttcaagtgaaaaaa

SEQ ID NO: 20816 - DNA, 2111 bp, Zea Mays
gctaccagtggcatcctacgcggcagaggaatagccacgccaccacgtcccccgcgcccgccgacccacccgcaaacgcaacgcaataataataggctaggcagccagcagccaccatccccaccagcccagcaccaggaaggaaatagcggcgagcaagagctggcggaaagaagaggaaagccaggcacgccgctcacccaccgcgccaccaaccgcagatcctaaatccgatctctctctccctccctccctccctcccgctcgaggttttcggtttcgatccggcaagcgggcgagatcttcatggcgacgtcgttcgaccgctgggagaaggaccccttcttcctcgccgccgaggaggtccaggaatccgccgatcggatggaatcggtttatcgggtatgggtgcaggagaggagcgggggcgattccgaggcggcaagcgtcactggaggccctacagctgcgcagcttcgccgcgagctgcacacggcgcttggtaccgccaagtggcagcttgatgaactggcgcgggcagtcagatcgaacgatctggttatgtcagcaggaaaagacacaagggctaggcatgatgattttgttacagcaatcggctatcgcatattagaggtcgagaactacttgaaagaatccaatcttgcggacgggagggggccattgagctgggttcacttggatgaggatgaaagggacgaccttgcagcttttctatctgccagtccttttcaacagaaagacaaagtggtcacaattccttcagcaggtgacattgaagtgggcagcaatgcagcaaggatgaaaaatgatatatcaactgacagctccaaggattcagctggttccacggatttgatttcaggcacagcaaagcaagatttgcatcgtgggcacagaagagcagctagtgccagtgctgatataggctcatggagcatgtcaatccctaatgaatgtgaaggaactacagaacagttatctgatggctcagacaaattgcctttgcataagatagtgaaaacatgtgctttgacaagtaccttgcaatctaagactagaacgaagtggaaaaatggagctgttaggtgggcaggcagtaaccaacaggatgttgaagaggctatccctctgaatacttctcagttgagtcagggcttagaggaatgctttgaaaggaacaagagttgcttaagtacatgtgatgagcatacatacaataagaaacttcatggttggctcggagcccttcgtagacaacttcaaaggtctcagtaccaaattcaatatgggcatcatattcaattgattgttttggcacttgctgcccttgtaatcattgtatgcatagtgaggacaatctggtgactatatttatttgctcatgattggatttctagcctcacaagatcagcagcttgtatggtaaattcactggcagctgcctcgtccttggaagaacatctacaggacaatccttgcagcacggttgcttcgccacacttggatatgctcccgaatggtgccttgaacaattgatgcacctcgagaactcaatcctccgtggtgagttggtgactgggtggcacctatgcaatggcccagtataaattagtggtgcagtgggctggcgatcatgctgctagcaaccgaaattgcaagacttgtatcatacatcaacgctattgcttttaccgcctgacacggaagggtggtgatcatgcatcaatgctattgcttttactgcctgacacagaagggtgtcattttttttttgtaggagttgccatctgaactgtagagctccataggggataggttctgatcggaatgtgaatggcactagaaaattacttttactgtatctgcttgtgttgtcaagaaccgaatgaggtgcctggcagccttgtctgtaccctgtacactaaaattggagaatgttgaagccctcggcagtaatcggctggacttgtaaggtgccagtgtgtgttgagcctgcatattacggctaaattcggtgaagattatagcactttactgtgcatcctaatgtcaaagcccccaaccaatctttggtattccaaaccccgaag

SEQ ID NO: 20817 - DNA, 1731 bp, Zea Mays
agtaacatcagactttcccaagtggaatattgcttagggcaagctccctccatcggtccgtctctctcagcttcttcgtcttctctcttaggttgacctctttgcctcaactgcgccgcccgctcaccaagccaggcagaggctgcaggggtcgtagagttggagggcccagtccatctgggaggtcccagtgccgcccgctcaccagttaccagccaggccgtcgggaggggagagagagagagagagacgaaaagatcgagacccatacgctcagatcgaagttcgacttctcctctccccctcccccaacctaacagattcgtgtagcacagatccatccgactttgggttgatttcttcctttgctgctgatcagaaagttacagatggatcatgctgaggtctctggtttgttgtgtattggtacacgtgaaacagatgggggtgaagaatcatatgcggctgagtaccctaaaatggatcaggataccaatgcaacgaccaaatttgatgtagtaatggagacttcagcaatgtatactgatcaaatcaacaccaatgcttgcttagatgaatatcacatgtctggaaaacagcctatggaagaaatgggatttggcagtgcacatccctttgaacttccatcagaaggaatggtagctgattctggggaagaaagcatgccatctagccctgacacatctaccagtaattatgatgcgcctggttacacggagcaaaatctgcagcatatctataattcgtatgatgcactggttgacaaagacggagttgtgcttactcctgccttcatgatatgtgacaaaactttgtatcttgaacctcacctcactttctcattggacgggatcaagattgagtatttggatttagattcctttgaagacgagaagctgtcagctctacaatgggaaatatctaatattatttccatcagttgtaaatggactcgtagtgttggatctgccttaataacactccttgttggatctacagcagaaacaggaaatgcaggtcctgttagagcacgattttctcttgatgattcgcaatggccaaggagacaacagaggatttgggaactgggaccaagatatcaagaaatatggaaagacatcccatcagatgattttgcattggagaattggagcatcgaaccctgtctgtttttccctaggcaatacttttccagcactgaggactttgaagatgttatttatccccaaggagatcctgatgctgtttctattagcaaaagagatgttgagctcctgcttcctgaaacctttgtcaatgatacaataattgacttttatatcaagtacttgagcacaagaattgaatctaccaagaagcgcaggtgccacttctttaatagcttcttttttcgcaagctggcagatcttgacaaagatcaggggagagctccagaaggtagagcagccttcttgcgtgttcgcaaatggacccgcaaaataaatgtatttgacaaagattttctgttcattccagtcaacttcaacttgcattggagtttaattgttatttgctatcctggcgaagtggcgacatttgaagatggtgatgccaagctctcagctaaactcccatgcattttacacatggattcacttaaaggaagtcacactggactcaaggatatcattcaaaggggaggaaagcagtttcagcaggggaggaaagcag

SEQ ID NO: 20818 - DNA, 4336 bp, Zea Mays
gtattgtacttgagtgttttaatttgttcctgaatatggagactagtgaaatcagtcttgatttgtttaacttatatggattagaaaagtatgttatctcttgctgtatatgagttaagaaatatgtttagtttttgcactggacactcttagatgctagcttacttctaagacctgatattgttctgttattctggcttctgaaacaaggactcagggtttatttgatcttatttactttactgccagggtggcacatttgtagcaactgtcagaaacctgcccgccatatgtgctacacctgcaccttttcattatgcaaggcatgcatgaaagatgcaaagtttagctgtgtcagagaaaacaagggcttttgtgctacgtgcatgaacactgtgatgttgatagagaacagagaggaggctgcagacccaatggaggtggattttgatgacaaaagcagctggtggtatttgttcaaggactattggttaaatttgaagacaaacttgtcattgacagttgaggaaatatcagcagccaagtctcaaaagagtggagaattacctgatactaatgacgaaattaattcagagagttcatcagggcgtcatctagaaaacaatacatcgaaaaagaggggcaggaaccgatctaaacaagctgccatcgagcagggctctgaaggaaaagagaccactgggaaatctgccaaactaggtctgtcaggcattcgtgatgctcagacttcttcagggaaaaaggttagaaaattatccaggcgttctttgagcagccagcattcaccaaaagattctgaaagtgttgggacatcaacatcctcagctgacgaggtcagctgggcttctaaggagctcataaactttgtagctcatgcgagaaatggtgataaatctgtgatcaatcagtatgacgtccaaccccttttacttgactatatcaaacgcaacaatctgcgcgatcctcgtcggaaaagccagataatttgtgattctttgctccaaagtctcttcgggaaagaccgtgttgggcattttgagatgcttaagcttcttgaatcacattttcccacgagtgaggtttcaccaattgatgctgatgaaaatcatggtggtgtagtagaccctgatcctagtcaggatgctgatggtaacagtgaagcttcagttgttatgagttcagaaaaaagaagaaaatcacgtaagtatgacctgaaacatcagcctaatatcgatgactatgcggcaatagataaccataacattggcttgatgtacttacgtcgcaacctaatggaagaattgattgatgacgttgacacttttgatgagaaagttgttggatcgtttgtgagaataagaattcctggtacagggcaaagacaggacatttatagacttgtacaaattgttggcactggaagatctgcagaaaaatataaatctgggaaaaggactactgatataacgctagtgatactaaacttagacaagcgggaggcagtaactattgacataatctcaaaccaggagttcactgaagaggagtgcaaacgcttgcgtcagagcataaagtatggattcattccaaggctgacagtgggagaggttcaggagaaggcaaaggttctccaaactctgaaagtcaatgattggattgaaagcgaaaagatgcgacttgggcatcttcgtgaccgtgcaagtgatatgggacgtagaaaagagcttagggaatgtgtagagaagctgaaattgctaagcactcctgaggagcgtgctcgtaggctcaatgaagaacctgaaatacatgctgaccctgcaatggatccatattatgaatctccggaagaacaggagcaggagattgaaagaagtagcttcaataagtccagaagttctttcttgaggaaagatggtagtcttgtgtctccaggtaaaggagatggtagaaatgctgcacagcgagatccaaaaactaactgggaatctaatcgaaacacaagggctgaatcgagttctcatatggaatcacccctttcacggaggtccacatattcttctcaaggagaaagtgttggttatacaaataagccagagggcttgaacattgatgcacaaaccgttagactggaaggcaccacgcgcagtgctccacaagggtcacctggtgcctcatctggaagtctagctactaacataggttcaggggcaaaaactgcatctcaatcagccattaacgagtctgagaagatctggctgtacatggatccttctaataaaatccaaggtcctttctcaatcatacagctgcggaaatggaacagcaatgggtacttccctcctagtttgaaaatatggaaagctagtgagaagcaggatgattccattctattgactgatgctttggcagggaagtttgagaaagaccttcctccatgggaaccaccacatgttagtttgtctcaaattaacaaaacccctcttgagcaaagcacaatagctgatgaacaaactccaaaatcagtaattgcaaagtctttctcaagcagtgatcaaagacatgattatagttcaacgaaccttggaacaaccatgatccattctggctcacaaggttattatggaatgcaaaattcccatgcagcatacacaagccagcaatctcttactgggagttggaatgccacgtcaagtcagtttggggttgcaataagtcctttgacacctacccagcctgccatgcaaagcctttcaggacaaaatattgtggctgcagaaaatatgggtcatttaactactggaatggctcctgcaactgcaaatgcagaaatggttaattcagatttgacttcccagaaccaaatgttgtcttctttaccgcaaacggatgacagattagctgatggaattgaatccaaatcaggagaagatgtttcacatggaagagtgaggtcttcggctgaagctatcggaccacaggatgcacagcttggaccagtgcaactaaacgctcagcaacttgaaaacacaagaaaccatatgtcatcaattgatctctccaagtcaatgatgccatcacagatgatgtcagcaccatctgctgcatcagtacagccttcattgacaaccactgctcgcagtgataatcaaagcagtgggtgggctgtacctgcacaaatggcgaacacacctggccagtctcagataactggaaatctaacctggggaaatacacctcagggtgacgcaagcttaggttggggaatggtgggacagagcaatatgaatatgccttgggtagcatcagctcaaggtgcttcaggctacaacatgggtgtagccatgccgacgcagccaaatgcagttccaaacatgggctggttaccaaatccaggaaacaccagcatgaacatgatctgggctgcaactcaaggccaggggactccaaatgcggctcctatgatgggaggtcagatgcaaggagtcccaatggccccttggggtggtgttgcagcaggaagtgcaaattcttatcctgcctggggaaaccaacaagctggaaacatgaaccaaaatgttggctggagtgctcctgtgcagggaaatccaggtcaggcaaataacaacatgaactggaacgcaccaaatggtaatcctaattggaataatcaacagagagagaatgggggcaggcactctggacaccgcggtgcttttagtggtggtgactcaggcggaaggtcatggaagtcacgctctggtggcgatggggggtcaaggggacatagcagattctcccattcaacaaacacagagggatatccatccaggactgatcggcattacgataggcagaattcaggcaacgagaggcgatatgagaatcacaatgagagaaatggtcgacagtttgataggcagccttcggataatgaaaggaaccatgataggcctgatggcagacatggtggcagggatgacgataggcaggctgataggtccgagtcaagagagctgcgttagaactggtttctgtttcttacattcgtttccttgtatgtgcagtagcaaactagcatagtagcttccgtgcatgttttgaactttatgctctgtagcgatctgcatacatgtgcagatcaccgtgtataacatttgtagtttaatgctgtgtgcatcctagttccgaatttgtaatttacttgaataaatcgtcttgtctgatttctgatgtaaagcaggggctacacgcccaggttcttggactagggttgttggagcatcaatggaagacaagggagagccagtggtggttg

SEQ ID NO: 20819 - DNA, 3463 bp, Zea Mays
gccccctccccctttcctattgctacgatttagcttcatatatgtgattttgctgcaactattatgtacgtaagctatctcggaccgattgaattaagctatctcggaccgattgaattaagctatctcggaccgattgccccctccccctttcctattgctacgatttagcttcatatatgtgattttgctgcaactattatgtacgtaagctatctcggaccgattgaattaagctatctcggaccgattgaattaaggaattctgtccgtgccatatagacgatcttttagtgctcattacatgtattagactctgtttgaatgtactagagctaatagttagctactaaaattagcttaaagatatccaaataatctagctaatagttcagctattagctacttttagcaaattagctaatagttagttatctatttgttagccacctatttccactaataattttttagtcaactaactattagctttagtgcattcaaacacggccttattgtcgccttggtggagtttctattgggttgtcatatactagtcgcttcttgtttccgcatacataccctattttcacctgtcatgagtcgtcatgctttgcgtttggtgcctcatggtaggctcaacaacattctaggccgatttattttgatgtacaaacaaagcaaaaggaaagcgatttttgcccccagtgatgagttatgaacgattctagtgtacttgttatcgtcctaggcgtgactctagcagtgccgatttatcatacatcatctcgccaatattatgcaatagcgttccacgatactatatttgtcaagtgcacaactgatttgaaactggtctttaacaaaaagaagatcggacaggtgatctgtaactgagtgcagtatttcttttctatttactataagtaccagcgacactctggtcatcagcgttcaactgttaattagaaaactattttagtacatgttctagagaagtgtttgtaaagtttattgttaaatgctacaattctggcctaacgagcataacaagctttgcacgtcagggaccccagggtcgtcgtcatctatctatatttgaggtttttgcgtcaacatgacaagggttggcttctgtctgttatggtgttctgctgcctccccgtgtggctgtggcagccatcagctctaccaggagcagctgtatccagagatggtgtgaagcacacacaattctactctgcgcagggtctgtttcacttgccattttggataggatcgctcgttttggaattaactttatgctaacagaatctaggtgtcattaagctagattaagcttgctgcttgacttagtagtgtaaatctgtaaagaaaattacctggtttgggtttagtctctataaaagaaatggaacagaggaatgttctggcattgggtgaacatgttctaaaagctactgtttggaagcggaagcataagactgctatggagcaccctgaaggcaatgatgtgatggtgttctctcagcatgatcaaagaaagcaccctgtgatatttgacgacagagctaaatgtaagaagtctaaattaatttcctgtgggagtggagttatattggagtcatattggaactttaagacaagtgggctgcctgtgcgcgtgcttttctaccaacatggtgactggagtgattttccagaggatgttgtaaatctagcacaacaggacttccagttgaagaagccaattacaactgctgtgttccagaacaagcacatcctgttggacttcattcacatgatttgcatagattatgagatgaccatagacaaaccactagcatgggttgatgataatggcaaacgcttctttccagatttatctgctgggctctacacatctaaaccatctcagcatgagaatggtgaagctgatgagtgtgatggaacgcctacaagtgtagctgaaagttctagttcggtatctgttggtgaagtagtttctcatggtccttcattccatttgaatgaatattctagtggaaccatacaagctactggcaagccaaacgattgtcgacgtattgattcagctgtgcggaatttgttgctcaaaggattaggtcagccgtttagtgaggaagatattattggtatctatagaacaccactgctagatcagcgagggcaagttcgttgtggtctcttccagaaggagatcgaagagaccaggagtcgtcgggggaatgcaaatgtacgttatgcttggcttccttgctcaagatataccatggagcagatggcaatgcggggtgctctggaaatcgcgaagcctcataaggggtccatttgtggtgttgggacttgtcttgctcctgcaaactgtacaaattcatgtgccagatattctgattttcatgaagatggcatcatcagaatgatgttgtgccgtgtaataatgggtaatgttgaggttgttttgcctggatcaaagcaatttcagccatccaatggaagttttgataatggtgtggatgatcttcaaaatccacagaattacatcgtatgggatgctaatgtgcataaacacatatatgctgaatatgctgttattgtccaagcacctctcgtgaccaatgaatgttcgggcttgaaggatagcgtgcccaacatatctgagatcataagttctggttctcgagacaatctaaccaaggaggataggttcgcgccttgtggtgtcgaacaagaagcacctaggctggggcgtgctccaagggccccctcctcaccatggatgcccttttcgatgctttttgctgctatttccacgaaagtgcctcgttcggacatggagttggtcatcagatactatgaagaattcaagaggaagaggatgagccggagcgacctggtggtacggatgaggcaaatagtcggtgataagatattggtttctacaataatgaggcttcaccaccagaagaagcccccatcgatggcagcagcagcagctgggctagcaagagcactcgcaaggggggaagagggagggggagtagccgagtaagattagtttaagccgccttgtcttttgagaaatttatggagcacatatgctttgtcgacatggccagacccaaggtgtcaaaagggagggagatgagctgagcaactgttgtagtgtagtctcaaactcaaagcgtttaggtcttgacatttgacaaactaaaactcagaaacattatcatgagtagtgtttttttttcgtttctctttcctggatttaactattgttattgctatttcgtggatatctgggcactgaaggccgtgctattgttggttaatgatggtatgattaagggtgcgcttgccattttaaccctttgaccacatccaaacaatcacggctccttgtgccagctcaaaggcaacatctatcatgtgaaaatttaag

SEQ ID NO: 20820 - DNA, 3096 bp, Zea Mays
ccctggacattttgatgtcgataccattaactaaaataaatagtttttcttcgatgtaaatgtccgtaaaatatttagttcctgaatttctttcttcctttctagtgtgactgtcccatctaatattctgaaggtgacatgtcattgttgggttgaaaatcacaaggggagagaaggaaaaaggcagggaatgggaggggaaagtacctaagccagctaggaagcaagcagctggaggcagagatgccaaccgcaatgtcctgtcatctttgctcatgaccaaatcggtcaaggtcgcccatggatggagatcacaggaggcaagccgccgccgcggtcaccgtcacgcaagtcagcccggcgcggcgcctgatcgcctggctgaggcttctcttccgggcgttcgttcatagatacggcaaggtcgcgagctggaacgcggcggggcgccctgtcttcgtcgtcctcgcggtcttcttcctccagaggagcctgcgccgccggtacctgtcatggaaggagtcgtcgcgtcttccgctgatggccgccgccgccgtcaccgtgcagacgaccgtcagggcgatggcggcgcagcgcgagctctctgtccggaagcagaccagagctgccacacgcatccaggcgcaatggcgtgcgcacagggcggtgtggagctacctgacgacgaagagagccgccgtcatctgccaacgtgcttggaggcaaagcgttgcacgcaaggagctcaggaagctcagactgtgtgtgcaggagaatctggagagggaaatgctggaggaggtgtgcaggctgcgtgagatggtggacgtgctccagcaggctgtcaatgacgccgagacgagggccgtcaacgagagggaggcggcgaaggatgcgatggcgcagttggaagcagcctcggcgatcgaagagaccgtggtgatggttgaggacactgagaaggtcaagtcgctgagtgccgaagttgaccgcctcaaggatttgctgggagctgaaatgagtgaaacttttgccgccaagaaggcgctttctgaagccgagctgaggaacgagaagctggccaggctgcttggagttgaggaagttaagaacaaacggcttcaagacaccctgaaaaggatggaggagaaggcttctagtctggacgaggaaaacagaatgctgcgacaggctgtggcgtcaaaccctgctattgtcaggtcgccatcgggcgaaaaccatgaagcacctggaattcaggcagctcctgataatgagaaatcaaggaatggtacagtgaagcctatagcagtggatcgggaggctaatgtccatgagaagggcgctgaacagcccagctcaaatggtcaagaagctgggaagcaacagcaagagcttctgatcaagtgcctatccgaagacctgggtttctcggtcggcaggcctatcgctgcatacctcatctacaggtgtctggtgcattggagatcatttgaagaagagaggagcgtggtctttgaccggattatccagaagattactgctgcgcttgaggcgcgagacaacaacgatgcactagcatactggctgtccaattcatgcgcgctcctggttcttcttcaaaggacactgaaaatcaacggggtagctgccttggctcgtcagaggcgaagaacgtcgtcacctctcaaggtgccacagcaggaaaaccaagatccagctcccgacggacagttgatctgtggactagcccaagtctaccaggttgaggccaagtacccagctatcgcgttcaagcagcagctcaccgcactgctggagaaggtctatgggatgatccggcacaacctgaagaaggaactgtcgccgcttctgggcctctgcattcaggcgccacgcacattcgtcgtcagtcccagaggatcgtgttcccaaggaacagatctggcgcaacaagcctccatggcgcattggcagagcatcatcaagatcttgacaaattctctcgatgttctgaaatcaaattacgtgcctccgttcctgatctgcaagatgttcacgcaagtcttctcgtttatcaatgtgcagctttttaacagccttctgctgcggcgtgagtgctgctcgttcagtaacggagagtacgtgaaggctgggctggatgagctagagcattggtgcttttggctgactgaagagtacgcaggatctgcatgggacgagctgaagcatatcaggcaggcagttaccctcttgatacttgacgacaagcatagccggagtctcgcggagatcacagacgacttctgcccagtgctgagcatgcagcaactgtaccggatcagcacgatgtactgcgacgacaagtttgggaccctgggcattccatcagaagtcgtctccagcatgcggaccaagatgatcgagggctcgtcgagcagcccgtcggcgcacgacgacatcaactcgttcctgctagacgatgacttcagcataccgttctccgtggatgacttcacgaagctgatagtgcacgtcgacgtagcggacatggatttgccaccgctcattcaggagagcagcggcggcggctccaaaatgggacattgaggagtgacaatatgcacgccttttttgtgtgtgttgcggtgatgtgcatagtgcgtgacatattgctctgagaccagggttttgtttttttcttcgtcgactggtcttccatttttctcccatatgactactacctgagtgagtagtgcctgtttgggtttgcgcgtgtgtatgattgtacagaactgagctgtggcatataaggtaaggaaagaaagcctgtgtgattcaattttttttatcaaaagagtgagtgatgcttgcaagtcaagctttcctttgccaagtgtgatctcagattctaactgctgtgacacctgtacttttgttgtttgtttgttttttttttttttttgaaagaagcctggcgctgatggcctccatttaactgttgagcatctgtcactcgctcaatagttaatggtctagagaaacattgtcgaccatctgtgtcactagaattgatgacttgttgtctatccttat

SEQ ID NO: 20821 - DNA, 2444 bp, Zea Mays
ctaaattaaaaaagacggacagcccagcccatctcgtcttgtctcggcgataccggctaccgccggcgaccttccgtctatccaactcgcagcgtcccacgccggtgaccccgctgggcggcagaaggagacgtcgggtgccgcggagcgccgcggagcgccgccgccgtccaagctgcctccctcggctggtggactgtatcactgctcctcagacacccgctgttctgtccggcaacgtgcctccgccgcaaacccgctcgatcagcctgaggcatcgcacgatttctgactcatactttatcgccaattggctggggtggagcacatctctacccggacttgatagattccaatccttcccaactcaacgttgggcagatggcgcagatccccaatcttgacaacgcgccgctcaaccttgcggccctcagggagcagtcgcagaaggacttgttcggcatcctaaaaaatataaggggaaagaagtgcttggttatagatcccaagctcgctgggactctctcattggtcgtgcagacatcgctgctaaaggagtatggcgcggaagtgcggattctctctcccgaacccctgcagacggaatgccccaaaattgtatatcttgtgcgctctcagctgaggttcatgaagttcatcgcaagtcaaatcaagaacgatgaacctaaagggctccagagggaatacttcctttactttgtacctcgccgcactgttgcttgtgagaagatcctggaggaagagaaagttcatcagaaactgacattcggagaatatcccttatatctagttccattggatgatgatgtcttgtctcttgaacttgaccattctttgcaggaatgccttattgaaggagatacaagttctatctggcatgttgctaaagcgatccataaattagagtttgcctttggagttatcccgaatgttagggccaagggtgtggcgtcaaccaaagctgcagagttgttgaatagtatgcaactagaggatccagtcaacatggatgatatggggattccagagataaacactgttattctgttagacagagaggtggacatggtaacaccaatgtgctctcagttgacgtatgaaggcttgttggatgagatgctacaaattaataatggttcagtggaagttgatgcaagcatcattggagctcaacaagatgggaaaaaggttaaggttccactgaattcaagcgataagttgtacaaggagattcgagacctcaattttgaagttgtagttcaggttttacgtcaaaaagcaacatctattcagcaagattatgcagaagtgaaatccaccaacactcagtctgtttcggagctcaaggattttgtgaggaggttgcactcgctaccggagatagctaggcatgttcatttggcacaacacttgcaatcgttcacggggaaaccctcctttcatgcccgactagacatagaacaaacaatactggaggttcagaactttgaaatatgctttgagtacattgaggagatgatacataagcaggaagttattgaaaacgtccttcgccttttggtgttactttctcttacaaatgccgggcttccaaagaagaattttgattacatgaggcgggagatacttcatagttatggctttgagcacatgcacttattatacaatctggagaaggctggccttcttaagaggcaggaatcaagaagcaattgggttggtattacaagagcactgcagcttatagttgacgtaaatgatacagcaaaccctactgatatatcctacatcttttctggatacgcacctcttagtattcgccttgttcagcatgcagtgagatctggatggcggtctattgaagaactgttgaaactattgccaggcccacatctggatttgaaaagaggtggtttgacaattaattcatcaccggaggtacatccaggtttaggggctcaacagagtattgacagggttggtcatcgctctctggttttggttgtattcattggtggtgtcacatttgctgagattgctgcccttcgcttccttagtgcacaggaaggaatgggctacgactttcttgttgcaacaacaaagacaaacccaagcttgtgggttttcttgtttggctgtgagttcgtgtttggtcagcaactggacgataaggctaaccacgcttgttgatagatggaatccaacagtcccattttttgttctgttctgttctgtagtacatccgctaaactgtaaatcctgggtttcatgtgttcgtctgtctttttattcaataattgcttccttgaaggccgtttatgttgtttgtggaccaatattgtgaaaaaagaaagaatgtatggaacctgttgcaaatctgcatattcttattcctcttttttactgaaggaaaatattgtcca

SEQ ID NO: 20822 - DNA, 2122 bp, Zea Mays
gttcgggtctgcatttctcggtcttcaccactgattttagctgtgatgatgcaacaatatgctcatgaaggggccatcttcagatgttctcagagcaagcatttctagcgccccaagtacatctagccatggttctgcacaagatgaatgtgattcattaggggatgtgtatgtatggggtgaggttgtctgcgatacttcagtacgaactggttctgatactgttattagttcaactggcaggattgacattctcctcccgaagccattggagtccaatttagttcttgatgtgtatcatgtagattgtggggttaagcatgctgcattggtcatgaaaaatggtgaggtttttacatggggtgaagattctggaggccgccttggccatggaacacgagaagattgtgttcgtccacgtctggttgagtctttgacagtttccaatgtagattttgttgcctgtggtgaatttcatacatgtgctgttacaacaacgggtgagctttatacatggggagatggaacttacaatgttggccttctcggacatggcaatgatgtaggacactggatacctaagaggatttctggagcactggaaggtcttcaagttgcttatgtttcatgtgggacctggcatacagccttgataacatccatgggccagttatttacctttggggacggttcatttggtgtattaggtcacggagatctgaaaagtgtttcttacccaagggaggtagagtcactatcagggttgaaaacaattgctgtggcatgtggtgtgtggcacactgcagctatagtggaggttattgtcactcggtccagttcaagtgtaaagctatctgctggaaagctgttcacatggggagatggtgacaagcatcgacttggtcatggtgacaaagaaactcgacttaagccgacttgcgtggctacacttattgatcatgatttttatagggtggcatgtgggcacagccttactgtagccttgacaacttctggacaagtattgagcatgggtaatgctgtttatggtcagcttggaaatcctcattcagatggaaggataccatgtttagttgaagacaagattgtgggtgaacaagttctccaaattgcctgtggatcctaccacgtcgcagttttgacaaataggagtgaagtttttacatgggggaagggagctaatggaagattgggccatggagatacagaggatcggaaggtgcctacactggttgaagccttgaaagatagagctgttaggtacatagcctgtggtgcaaacttcactgctgctatttgtcaatataaatgggtttctggagctgaccaatcacagtgctcctcatgtcgacaaccatttgggtttacacgaaagaggcgcaactgctataattgtggacttgtccattgtaattcctgcacctcgcggaaggctttgagagcatcactggctcctagtcctgggaaaccctaccgtgtttgtgattcatgtttcttgaagttgaataatgcctcagatcctaatgcagctaaccggaggaaagatcctgttccctatcaacctgttgaaagcaatggcgatgctaaagtaggaaaggctagtttgcctagcaatatggaaatgattcgaaatttggatatcaaagcagcatggcaagggaagaaaactgatgggctatcgtttctccggaatcctcaagttagttcgctcctgcagctgagtgatattgctttatctggtggcttgggcatgaacagatcagctccgagagcggtacacatatctgcagctcgctcggttactacttcaagagctgtttcccctttctctcgcaagcccagtccaccgcgttctactacaccagttccaacagcccatggtctttctttctcaaaaagtgctactgataatattgtgaaagcaaatgagctcttaaatcaggaagttgaaagactgcgtgcacaggttgataacctgagaaatcgctgtgagcttcaagaacttgagcttcaaaaatcagcaaaaaaagtactagaggccatgacactggttgccgaagaatctgcaaaatccaaagctgcaaaagaagtgaatcaagct

SEQ ID NO: 20823 - DNA, 2752 bp, Zea Mays
aggactcactgtcatgctccgtggtgaatgctttattgtaccaaagttctagtgcatcacaaaggatactgaaatgggtgccaaagagaatggggaagagagagatgatcattcaagtgatgtggaaagagatggtaaacaagggaaggtaactgaatcagactatgaaccagctagaaattccctttcatcaccgggtgaggctaccagtaacgaagacactaaagtgaaaagagtctcaagggttccaaagaagctatcaaggaaagagtctaaagaaaacagcccacgctcagcaagaagcatttccaaaagtcaaatccacactaaactgcagtatatatcgtcaaacagtaaccagaacaaatcacccaaaacaaacaaagcggttaatggtgctaaaactgttgaaattaagaggccagagactccgaaagctccttcttgttcttcatctgagatgtctgaggaaacagatgacaaagctattgaggatagacccacagatgacaaagcaattgagggcagaatcaaggatgatagcgctgttgaaggcagagccaccaatgataaagccgttgatgacaaagcaaagaatgataaagacattgaggacggaatgaaggatgataatgccattgaatgtgaagtcactgatgataagcctattgacagcaaagtaactgatgatattaccattgagggaagagagattgaaggtaaagccattgaagaggcaaaggagattgatatattggatgaagctccaaaatctgatcagagtactggcactgatgatgaaattgttgatactgaagaaaacatagctgataatggcaactcagtttcttataaaattaacgaggaattatattcaaaaattgagaagttggagcaggagctacgtgaagttgctgccctcgaggtttctctctactctgtggtgccagagcacggttgttcatcacataagttgcatacaccagctcgccgtctatctagggtttacattcatgcatcaaaattttggtcctcagataagaaagcttcagttgcaagaaattcagtttctgggcttgtgcttgttgcaaagtcttgtggcaatgatgtttcaaggttgacattttggctatcgaacacagttgtcctgagagaaatcatcgcacaaacatttggtacttcacaacactcaagtccagttaaggttttcagctcaaatggcaatgcaaacaagcctgacaggagtttcacttcatcgcaatggaaaagtaactacaatggcaagtatgtgaaccccaatatcatgcagctgccagatgattggcagaaaactagcacattgctggatgcattggagaagattgaatcttggatcttttctcggattgttgagtctgtgtggtggcaggcaatgacaccccacatgcaaacccctgtagaagatttgtcaactccaaagatagggaggttgttagggcagtctttgggtgatcagcaacatgggagtttttctattgatctctggagaagtgcatttcaagatgcattcagcagaatctgtcctcttcgtgctggtgggcatgagtgtggatgtttaccagtcttggcaaaactggtgatggagcactgcatagcccggttagatattgctatgtttaatgccatccttcgtgaatcagagaatgagatacccactgatcctatatccgacccaattgtggactcaagagttctgccgattccagctggcaacttaagctttggatcaggcgcacagctgaagagctctgttgggaattggtccagatggttgactgatacatttggcatggatgctgctgaatctgaaaagggtggtcaagatgtggaagttaatggcgatgacagaagagacgcagccgaatcaacttgttttaagctacttaacgagttgagtgatcttctgatgctcccgaaggacatgcttctcgagaaagccattaggaaagaggtctgcccttccattggccttccactagtaacaagaatactctgtaacttcactccggacgagttctgccctgatcctgttcctggcatggttctagaggagctgaattctgagagatagacatggtgagcacgttcccagtgaccgctgctccagtggtgtactgggcccctacgctggaggacgttagggagaaagtggctgacacggcatgtggcaacccagagctggaccggaggggttcaatggtgcagaggaggggctacaccagcgatgacgatctggatgccctggagttcccgctggcgtccctgtacgacaagagcaaccccccgtccccgtgcaacaatggcgtcgcccatttcagcactcggcaggtagcctccatggagaacgtgaggcacgagctcctgcgagaagtatggtgcgagcggctatgatctcgataaatacggcctgtggagcctttttgatctatgtgaacagtggaaatggtgggaaagacgtgaagaaactgcaatcgaaaagcgatgacaaaaatgctattcaattcttcgtgtatatccatccgttccttgtcagcccgtgcattggttgtttccccttttttatatgatatagtagaactgtattgtacagtggctatgaatgaatgtgatgtgatcatgaaagattgggagacatagcatcattttaaccttcattattatacccgtcctcccattttttaccttttttcaaaaggaatattgtgtcagtcct

SEQ ID NO: 20824 - DNA, 1139 bp, Zea Mays
acttaattggacttcagtggcgctggttctccaactatcttccgatggaaatatatgttgatgatgaggcaaagttgaccctccatggtcttgtacagcactatataaaacttagcgaggcagagaagaaccggaaactgaatgatctcttggacgctcttgatttcaaccaagttgtgatattcgtgaagagtgttagcagagctgccgaactgaataagttactttgtgaatgcaacttcccatcaatctgcattcattctggaatgactcaggaagaaaggctaacaagatataagaacttcaaggaaggccacaagagaattcttgtggctacagatttagttggcaggggcattgacattgagcgtgtcaacattgtgataaactatgacatgccagactcagctgatacttatttgcacagggttggaagggctggacgttttggcacgaagggacttgcaattacctttgtttcctctgcttcggattctgatgttcttaaccaggtgcaagaaaggtttgaggtagacataaaggaactgcctgagcaaattgacacctcgacctacatgccatcataaatgggaaggacaactgagaagagaggaggataggggagtgagcagccgtctggagatggttacctttgaactatccgatctggaggatttgatttgcctcctttgtgtactttaaaaagggcagccaggatgatgatctgtattttaagacaatgctgtctgtttgggtttaggattttgctttgtcgaaaactagcacacttattgtactactgagcagcatatttgttttcatccctgggttaaatgatgcgtctaaacacttctgctggcctgaaaagagcaccaccgtcttggtctcccagcagcaggcagcattgactcgctaaaaggttacaattctcagatgcggatgagccagtcgtattcagcagcctgtagttacaattctcagatgccgatgagccagtcgtattcggcattctgtgttttgtttggttatcttttgctgagccttggaaacagtttctgtttttgcaaaagcgaaaaacaaacgcaaattaattgaagtggtgaaaaattaatggttccttttaccttattataaaaaaa

SEQ ID NO: 20825 - DNA, 1555 bp, Zea Mays
ctgtttgccgttttctccctttacacgctcgattccccccgccgtttccacgggggccaggtgcctgcattactgggtccgggcctagcgtcagcgcaaccgaacacgccggcgaccgctgccgcccttctcccagctgcccaggtcttcgtcgggccctttgcctgcggcgtcggcgacgagcgcctgccacaccagggtattttaggatcatcataaatttcattgcatttgcggtttgctattccaacaaggctctctttgctatcctgtacttcatcagctttgtccttgatggtgtggatggttggtttgcaaggaagttcaatcaagcatcaacctttggagctgtgttagacatggttacagatagggttagcactgcttgtttgttggcccttctctcccagttttacagacctggtttagtcttcttgatattgcttggattggatattacgagccactggtttcaaatgtacagttctttcttgtcaggtaagactagccacaaggatgtaaaacacacaggcaattggcttctgaaattatattatgggtacaggccattcatggccttctgctgtgtttcttgtgaggttttatatattttcctgtttctctttgctgatgaggagtcaacaagcttgcttagtgtatgcaaaggcatcctgaaccaaagtcccgtcgttatcttggtgtttgtttccactctagttggctgggcagtgaagcaagccaccaacgtcatccagatgaaaactgctgcggacgcatgcgtggtgtatgatctgaagcgcagcaaatgaagcatgaaggcagcttcacggtttagtatcgacatatccaagggaaaactctgcgagggggcgggctacgtcttgcgtgccttgacatctttctgatgatgcggtcatatgtgggaccaggggatgacatgccgtggccaatgcaaacaattgttttgtgaaagcagcggccgttaagttgttgtcagtgtgagagtggtgatgcgatcatgatcctttttacctagagtagctcccctttgtgttagcctgaacgatgttttgcaagccgcatgttccgaactctaggattatttggattacaaaacttacatattccatcctcaaggccagttccctcgagagttcgatagttacttatagtcgctggaataggcactagctactgttcgaatgatttcccttttgctccttaagcatcctttgggtcagctttatcgataaaatttctttttttatgtgacatccctttgcttagaaggggattgaatggaataggagaggattgaggaagaaataaactaatttatctctcaatctcttcgaatccctttctaactaaataaactgctttaaatgataaacaatacctctatcctaaaatataataattcgttttagattaattatataccaatggagtttgtatatatatctatattaattatcatttgaatgtatatgaacagaaaaaatgggctagaagtaactatattttaggagaacggaggaagtaccaagttaac

SEQ ID NO: 20826 - DNA, 226 bp, Zea Mays
  misc_feature (225)..(226): n is a, c, g, or t
ggccacgtcgtgcacgggggactggggcagcgatagcctgctctgctcccgccactataaaaggcctcgaggtagagtggactaggacgcgtcgatcgcagcaagtttgcaggtctctcactctcgcacatcacgagctatctcgagctccaattaatctgctagccaagccaatctccgctcccaccctagtccagcccttgccttcgctgcttgagatggaann

SEQ ID NO: 20827 - DNA, 1691 bp, Zea Mays
acaataactcaacaaacttatctctaatataaatactcctctcctcgcttcctacccggcgcatcctcgtactagcgaatcctctcttcgtccaggctagtcggctcactcggcctgcgattccaagcgccgccggttcgccgcttcgttacctccaccagggatcatattgtcgaaataagttggcctcattcgtgatggaaggggcgcaaggatcaagcattgtgacaaaacacaataaaaggcagtctcctgtgcagagatggaggccagtttcaacagaagcagttccccagcatcaccaagatgacattattgagacatcaaattctggaagcaagaaaattatagaggattgcatagcttctagtgagaatttgccaccagatggaacaaccaatgttgttgaagttaccgccaatgatgcttcatcgtcaaaaaataatttaagttttgggtacagttcaactaaagtagttatagaagaccatgcggagttatctggcttcaataaggatctagctgggtccaatgtcttcgggacacattcctcctctgttgaggcggttcaaagtcgacagcttgactactctcatttcatatcacttccattggctttacacccagatcttgtcaacaaactgaactacttccagagttcgatccttggggaagaaaacagtaacaaagatgggagccaaagtgaaggttctattggtgaaatggactatgaccacaagcaagcggaagcaaaaatgggtgccaaaggctcccaatcagattttggcattgacaagtcaatatttatcaaacccgaaacgtttcacctgacggttcttatgttgaagttgtggaacaaggaacgtatagataaggcctcggatgtgctccagtcagtatctacccaagtaaatgaagctttggaaaatcgacctatttccatacagcttaggggtctgacatgcatgaaaggctttccagctaaggctcgggtggtatatgttccagtgctggaagttggtagcgaagggcgcctagctcatgcttgcaaagtcataactgacgcgtttatcaaggcaggcctagtttttgaaagggacgtgagagaactgaagttgcacgcgaccgtaatgaacgtgcggcacaggaagagcagaaataaacggaacacatggacggattcgtttgatgcccggggcatattcgggagatttgggaaggcggagtggggtgcatatcccatccatgagatccacctttctcagaggttcaagtttgacagaagtgggtactactattgctgctcgtcgatccccttgcctgcggagatgcacacggagtgaggtgtgtagctgtgatcatgttgtaggtttttaaggggcgtttatagcatatacatatatatattttaccgcagttcatgaggcgtttaaccttgttattagcgttggcccttaggggccaggtgttaccatgtatctatctatcggtttgaatcaccgatgggcaggtgttaccgtgcatctagtgttttgaatctgaatcgccgatttgagccgttgttggatgctgttgtatgttacaagcaatggcaggcactggtagtgggttccctgttgtaaagttgtagttggtgttgaactgttggttgttattgcctttccatatggcccattccattgtgcagtcaa

SEQ ID NO: 20828 - DNA, 2066 bp, Zea Mays
cctcgctttgctctctctctctcacacgcacatgcgtaggaagggtaggctcgaggtcgagctactaccatccatctctccccattgcatgcgaaacaagaaagcaagaggccaagaggagcagagtgagtgagtggcgtttggtgtgaaatgtggacttggacctggaaggaggacgaagcgggtcatggaatgtgctgggaggagaaggacaaggtctctgatcagctcagcttgtctggtcaaagctgagagcctcgttgtgctgtgagtgcaagctcgaccgacaggacccctgccactgtgaagcacagcgtcagcggcgacaagacgaaggggcggaagctgccaagccgatagatctacgcaaatggagaccaaggacgtgtcgccgctcgccgccgccaccaccaccaccgcggcgcccgtgcctgcaccgacctctcaaccgcctccgccggccccttcttctatggcgccgccgcagcaccagcaccagcaccatccgccgccgccgttcgcgcagcaggcggccccggttccgtcgcctgccgcgtccatgcccggcggcatgcggctctcgttcgaccagatgtccgggaaggcgcccggggagcagcaccaccactccgcgcccatgctgtacacggtgccaccaccgcagtccgccgcgggcgcgggcgcaccgggggccaatgtgctgggcatgggcgagctgatgcgcaagaagcgcggccggccgcgcaagtacgcgcccgacgggagcatggctctggcgctggcccccatctcctccgcctcagccggcggcgccgcagcccccggacagcagcagcacggcggcgggttctccatcagcagccccccgtccgaccccaacgccaagcgccgcggccggcctcccggctctggcaagaagaagcagttcgaagccttgggctcctggggcatcgccttcacccctcacatcctcaccgtcaaggccggcgaggatgttgcttcaaaaataatgacattctcacagcaaggccctcgcacagtctgcatcctttccgcgaatggtgcaattagtaatgttacacttcggcagccagccacatctggtggactagttacttatgaggggcgctttgagataatctcgctatctggttctttcctgcttgcggaggatggtgatactcgcagcaggactggtggcttgagtgtcgcacttgcaggatctgatggccgagttcttggagggtgtgttgctggaatgcttatggctgcaactcctgttcaggttgtggtggctagctttatcgcagagggaaagaaatcaaagccagcggaagcacggaaggttgaaccgatggctgctcctccaccgcagatggctacctttgttccacctccgctggccaccagccctccatcggagggaacatccagcgcatcatctgatgactctggcagcccaatccaccacagtgcgatgccgttcagcaactccagccagcatcaacaccctcaccagcaccagcaccagcacatgccgcctgcctacgcatccgggggttggtccctctcagtgcaccagcagaataggcatgattctgacatgaagatgatgtcgaactaacagtgctcaacctaggcgtcccatttgttggttgggctggagaggaaggaagctgctgatggttggtactgccgctatgaaatggtcttcttgcgccgtctgtcctgatcagtgaccccgtgttgctctggtcaatgacggtgtgtctgctatagctaagatagctaggaaggattagagtttatgggctcacttgctgttgttcccctgggtaagattaatttaatttgaattagccgctgttgtaatgctgtagccagtgtcctgaagtcgcttatcagtcagtccctgacgcgagctgtgatggttgcctgatgagatcttcacctcctagtcctaggctagttaaaatatcatttctctagtactatgaatcatgaatttacttggatgcttcggtttgattcaggaatttgatcgtattatgtttcgttttgttctc

SEQ ID NO: 20829 - DNA, 178 bp, Zea Mays
cggagtttttcgagtcaactgaaataagttcataagataaattgcagtggataatcgatatcgtcgaaaggtgaggaatagggcaaggcctagcccactactcctcctgctcctctcctgctggagcagcatcccactcgaccgtccaacgtggtggcagggtggtaggccaagtcac

SEQ ID NO: 20830 - DNA, 1743 bp, Zea Mays
gacagagcgatgcagaggcaggggagacacctggagcggtccaactcgaagcgagccctcgaccatggcggcggtggtgacgacgacgaccgcccgtctaagcgcccgcgcgtccccgccctcgccagtgtcattgtagaagcactcaaggtagactgtttacaaaagctttgctcatcactggaaccaattctgcgcagaattgtcagtgaagaagtagagcgtgctttagccaaattgggccctgcaggtcctgctaggatccaaggaagtgtataagaagcattatcctcctgcactaaaggatgaggtatggagattagaaaagattggaaaggatggttcattccacaagagattaaactcaagtggaatctatacagttgaacactttcttcaattccttgttagagaccaacagaaattaagaagtattcttggcagtaacatgtcaaataggatgtgggaaagtcttattgagcatgcaaagacatgtgttttgagtggcaaccattatatatattactcaagtgatgcaagaaatgtgggtgcaatattcaacaacatatatgagttcactggtttgattgctgatgatcaatttatttcagctgaaaatctcactgaaaaccagagggtgtttgctgacacgttggttaagcaagcatatgctgattggatcaatgttctagaatatgatggcaaggcgctattaaagttcaaccagaaaaagaaatatgttacaactagaagtgaaacagcgaaagcttcagcaagctaccctgcatcaaacggtttagtgaactcacagaaagaactgcctggaggtcctgtgaatgctgagcaatcttccctgaacaatgctagccaagatagaactagaatcccatccatgtccatggggaaccaggtagcaagagagtatgcaggcaatcctcagcacatgacaccaagtattaccatgcaatgcgacacgaggtcattgatccccggaggccagttcagtggtggttcctccgtgcagactcaaacttcacgaagctccaacatgcttgcgctgcggccaacgcagcagcctcaaaacttggacttctctgggctaggtcagtccacacagccttcagggaccaaccctttcgccgactggtctcggttgcaggagagcagcgtcgatgagtacttgatggatgagataagggcgaggagccacgagctattggagaacgatgagatgcagcatatgctgcggttcctgagcgtgggcggggcgccgaccggcctgaacaacgttgacggctttctttcatacccgtctcctgccccagccttcggatttgatgaggacgaccgcgctcgctcgtccggcaaagctgttgtcgggtggctgaagatcaaggctgcgatgcggtggggtatctttgtcaggaggaaagctgccgagagacgggctcagcttgttgagctggaagactagcagtcgcaggtgcttgggctcggtgttgcacatatttatgcggaagggttactagaactgcaaaatattgtataatacgcttcccttttggctgatctttttaatttgcacaatagccccgttggtattgtatattactgggtacagacgtacagtacatgtacatgggaggacgatcaggatcggggcttttttacgaatgaagtcacgttggttgtatacgtgtctgatacgcttgaccttacttgtgctttgaaatattcttgtcg

SEQ ID NO: 20831 - DNA, 2588 bp, Zea Mays
aaaatcagggtaggagtgggacattcattctcacagccgtgcagtcctttctttttcaaatcttcaggggtggctcgtcagtcgtcatcactcatcaagatccaagaacaacgaaggagcgagcaagacgccgttgagaaaacacggggtggtattctgcagtaaaaaaaaaaaaaaacactcgaggcgaaagtgtccaaagccagaggagagaaagagaagacttgtacttggagggcagctgggcaggtgaaaggaagaggaaagagggcgagtgcgacgggaggcgcaatgcggtggagatctcccgccgtgctgcggctgcagctgtggctgctcgccgtctccgcgtcgttggctgccctcggtgttctcgcggctgatcttagcaaagaaccatttactatccgtataagctgtggaagctttgacgatgtccggacggagcctacgaacacattgtggtacagagactttggttatactggaggcaggttcgctaatgccacccggccaagctttatcgttcctcctcttaaaacgcttcgatatttcccgctatctgatggccctgaaaattgctacaacatcaacaatgttcccaatggccactatcaagttagacttttctttgcgttactggacaaccctaatcttgacagtgagccgattttcgatgtttctgttgagggtactctgttcagctctttgcttctgggctggagcagcgacgatgagaagacatttgcagaagctttggtttttgtccaggactcaagcttatcagtttgcttccatagtacagggcatggtgatccatcgattctttctattgaagttctacaaatagatgacgatgcctataactttggtccaccacgggaaaaggggacagtgcttagagcagtcaaaaggctgaaatgtggctcaggaaagcctgcttttgatgaagatctaaatgggattcactggggtggggacagattctggttaggattgcaaactttatcatccagttctgatgatcaatcaatatcatccgagaatgttatagcagagacattgcttgcaccaaatttttaccctcaaggcatataccaatcagctatcgtgggcactgataggcaaccgagtttgtctttcgaaatggatgttaccccaaacaagaactattcagtatggcttcactttgcagagattgataatggggtaactgcagaagaacaaagagtatttgatgtactcatcaatggagacactgcttttaaagatattgatataattcgcatgacaggagagcgttttactgcacttgtcctgaataaaactgttgctgtcagtggaataacactaaaaatcatcttgcaacctgtgaaaggaacccgtgccattattaatgccattgaggtgtttgagataatcccagctgaaaagaagactttgcctcaggaagtgagtgcattgcgaacgttgaagggttcacttggtcttcctcttcgatttggctggaatggtgacccctgtgttcctcagcagcatccatggagtggagttgattgccagtttgacagcaccaaagggaactggatcattgatggattaggtcttgacaaccaaggtttaaaaggggtcatacctagtgacatatctaagttgcaacatctacaaaacataaacttgagtggcaatagcataaaggggaacattccaatctccctgggtaccatctctgtggtgcaagtactggatctgtcatacaatgagcttaatggatctattccagagagcctcggcgagctgacatcattacagatactgaacctgaatggcaatcgtctttctggtcgtgttccagccagtttgggaggaaggcctctgcacagagctagatttaacttcacggacaatgccggactatgtggaatacctgggttacgtgagtgtggccctcatctatccgtggctgcaaagatcggcatggctttcggcgtgcttttagctattctattcctagttgtattcgctgcgtgctggtggaagagacgccagaacattctccgtgctaaaagattagctgcagcaagggaagctccttatgcaaaatcaaggacccagttcacccgcgatgtgcaaatggccaagcatcaacggacacatgaaaatgctcggagcagcaacagtgaaggctcgccacatttgctttcctagctcggtgagaatactgcgacagtgacttggcttccatctattcttcagttcctcctttgtatgctcctctgcagtcttgaaagacgaagctgctgtacatactagctaggtcacgaatggtgtatatacttgtattttttttggtgatctagaactcagtccaggagagggatcagtctatcagatgagagaaattacccatttcatcctacttactgttctgattactgctgttgatttccccttcactgttcaagtatgcttattgtcagttttgtactgtggtctgaagctctgcaaaactgcattttgccaggagctggagccccaggctgggctgtgttgagatatagagtgaattctacaccttttcctattag

SEQ ID NO: 20832 - DNA, 3307 bp, Zea Mays
taacacagagcccaacgcatatatgcagcaacgactgcgctgttacgcatggattcaggttccttccttcctcctcgcttcatgaagagatattacaaagacactaattaaggacacgtacgacgacgacctctgcatataatgcaggttacaaatttgacaatatacatatatattgggcttctgaaacctcaagtacagtagaagctgctgacgcgagtagtaggtacgtagtaattaatttgctgttaactaataatccggccggtagtagggcgtcatgcttctctcactaattaaattacactgcattacattacacgtacagagtgcaaaagaaagaaagagataaagaaaagaaaaactagttaacaacaaataatgttgggtcggaggagaagtgcgtgtggatgggttgttcccccttatccgtaactcagcttgatcacatcctctcttcgagatcgaggtcgaggccggccgcacacgtacggcatgcacagcacagctgcgcgcgcgacgagctggtggcggtatacatatacgtacgtacgttcttgactgcatgttgtggccagccggcacgtacggtcggttctgctagctagctagctaagctagctgctgacctcgtccaggtccgagctcgacgcatccgtgacgcagctgctgctagcggacggcggcggcgacgcttctcgctgcctcctcctcggcctgttgccgcccttctggaagacgcggcagacgacccactctccttgcgcctgagccaggctgcagccctgcgtggatatataagatgaccaagaccagtgaccagcgtcaacgacaagcgaaacaaaagcgcggggcacagttggtctgtcagtggatcggagcatcttgctattgtgcaagctgaagctgaagggagagactatactgtagactctgtagtctggtgtgtagcggtctactagctgcaggaggccggcgctgccgatcagagagcagctacagctactactaccacagtactgtgcggcggcatgcggcagatgcatgcagtagtatttgcaggctaatcaaggcgtcgtcgtcgtcgtcgtcagaattaaagtgccagcggttcaggcgctgctgcttcggttgattggttgttggttggccatggacctacctctacggtgtggtgtggtggtggggcgagggacaagcagagagagatcacggcggaatccggccggccgggcggccggtccatctgagctgcaagcagcagtacttactggttaagtacagctaccactcggtgtcggcataaatttgcaaccaccagggcatatatatgtgcgatgtgattcattatccgtcaccgtacgtacccaaaccagttttcttcatctttttttttccctggacaccgacaacgagctttctttttcgggttcttgaaataaacccattaaccaagcatgatttttcttcttttctttaacaagataaaagtctcatacaggagcacatacatagcttaattaacatcagcaggtttgctcattcattagtggaccaagtttattagggctaattgaaattaatataatggagagagagagagagagagagagagagagagagagagagagagagagagagatgcccatacatagcgtgatcatgccagaacgacatgtccgattagtaggtaggaagatgccaagatggatgtgtgccagaatgaaccaccgtctatctactcgcaggccggccggccgagctattctatcaatttctatccccagcatcgctaataaactcacctgctactgctagctgcttcatcccggcctcgctgtacatgcatctcatcatctctctaggcgctagcagctagctacatgttcgtgatatgatccctctcttctcgtatccctcaaaaaaaatcatcccttctcgtaatctcacaatcgatctcaggtagtcagcggcgcggcgaggcggtactcgtgcatgacccagccggtcttcagggccgccgacggcaacgccgccgtcttcttccggcggcggggcacgaacgtcatcgccctcttcacgcccaccaggaggctccctccgccacacgggcggggcagcaccaccggcttctccttccccgacggcttccaccgcccgcccgcggccgccctgctaccagtaccagcgccgctgctcttgccgccgctcgccggccgcaccgcgaagaagtatttctccccctcgctcctcgtatctgctggagacaggcagcgcaaaagaagaagaacaaaaagattggacctttagttctttctctcctagtccttcccagcatagcagtgacagacacaaacgatagatgttcgttggaggcgtcatcgcgtggtggcgtgtactagtaccaggggcagagacggcgacgacgtcccaggggtcgcggctgtagaggtcgcggaagacggggatgacggcggcggggagcggcacgccgatggccttgcgccggaggtactgcaccacgagctcctcgtccgtggggcggaaccggaaccccggcgggagctgccggagcgcctccacgccgccgccgccgtgcctcaccagcaccggggctctctccgccgacatgtccccaaagaaattccttttatcaccgactactgctactgtgctgctgctgctgctacacagctagtacacagctaacgagctagctagcacgcacctgcgcgtgcactgctagctagctctagctgccgctacgcaccacagcttagctctagctgctataagctacctacctcctgccagtttggcacaggggcaagcaactgtagcagcagagctcgagcttgttcggtcacttggcgcgcgcaggacgcgtgcagttgctcggagcgtccatggcgagccgagagattgaacagagagacagggagggagagactgagagcggttgggggaggtctgcgtgcgtgtgttttccagggtgaggagggaggctctggagaagagagaggggaaaagggcggctttatagggtgccctgttgcgtcgatcttactccatctatcctcctcccttcctcagcaggcagctgaacgtctgtacgccatcgatcaggcatccagcccggccggcgaagtccaccgtcgctcgcgcgccggtttcgtgaactccttccagaatctcccacgaagctagatgtgaattgcaaactactgttacttgctccatgtctttttttttattttacctgtagccagcgggttacaaattacaattcatccaccgatactgaaca

SEQ ID NO: 20833 - DNA, 415 bp, Zea Mays
catcagcaattctgccattgcaaagcatattgcagttgcaggtacgtcgaccagttttctcgaagcctgagtgtggaatacaaacaatacggcgtagacgtgcagtgccagatacccctgtacgtcgctaccaagatgtcgcccgtgaagggcgcgtctccgttcataccgtcgcccgaggagtacgccagggccgcccttcgctgcgttggctacgaggcgagattggattattatagccttccagacagtactcgcgatcgtgcacttatttatctgtcagctctattccgtacatacgcgaacccatgggggcggagtccagtttattaaaactgatctctgtttcaggataggaacacaggttgggttagcgactgtaatcttccatgtcagtattggattcgttttgacc

SEQ ID NO: 20834 - DNA, 2659 bp, Zea Mays
cgattccaatggcttaacccaaagaaacctaattcggcgacaggacaaacacgagaaaccggccccacccctgccctcacctcctctccaccactttccctctgcgcctcggcccccacgaaatctggaaagcctggacgccattgctcacctttttccgtccagcgcaaagacaccgcgcgccagagagggtgagggattgccgtgaccgattcgaaagccgcttcgggcgcgggtgggatcggcccgtggccggcggagatgtccggattcgtcggtgtcgtcgtgtccgacccctcgctgcaggggcagttcacgcaggtcgagctccgatcgctcaaggccaagttcgtgtctctgaagagagattccggccatgtcaccactaagaatctcccggtgatgatgaagaagctgagggggctcaatgaggtggtctctgtggaggagatcgcggccttcctgtccgagtcgtaccccgacagcgatcaggagattgaattcgaatccttcctccgggagtatctgaatctgcaggcgcgggtgagtgccaaggagggtggtgccggcggtggccggggtggcaagtcgtcgttcctcaagtccagcaccactacgctgctgcacaacctcaatcaggcagagaaatcttcgtatgtggcgcacatcaatacttacctccgtgaagacccattcctgaagaagtacttgcccatggacccgtctggaaaccagctgttcgatctcatccgggatggtgttctgctctgcaaactgatcaatgtagctgtacctgggaccattgatgagagggcaataaataagaaaagagttcttaacccatgggagagaaatgaaaatcacacgctctgcctcaattccgccaaggccattggatgcactgttgtcaacattggcacacaggatttggtggagggaaggcctcatttagttcttggattgatatcacaaatcataaagattcaacttttagctgatcttaacctcaagaagacaccacagctggtggagctatttgatgacagcaaggatatagacgaggttttgagtttgtcgccagaaaagatgctacttcggtggatgaaccatcatctgaaaaaagctggctacaagaaaactgttaacaatttctcttcagatgtgaaggatggtgaagcgtatgcttaccttctgaaagctcttgctccagagcattcccctgaaactacattggacaccaaggatccgaatgagagggcaaaactagtacttgaacaagcggcgaagttggactgtaagagatacttgaccccgaaggatatcactgagggatctgccaatttaaatcttgcatttgttgcacaaatattccagcataggaatggtctcaccagtgacaccaaacaagttactctcacacagaccgcaacacctgatgatgttctagtatctagagaagaaagagcctttcggatgtggatcaacagccttggggttgaatcatatgtaaacaatgtctttgaagatgttcgcaatggatgggtacttcttgaagtgcttgacaaggtgtctcctggatctgtcaattggaagctggcaacaaaacctccaattaaattgccatttagaaaactggagaattgcaatcaagttgtaaaaattgggaagcagttgaagttttctttagtaaatctggctggaaacgatattgttcagggaaataagaaattgattgttgcacttctgtggcaattgatgagattcaatatcctccagctgttaaacaaactgagattccactcccaaggagggtcccaaggaaaagaaatttctgatgctgatattctagactgggccaacagcaaagtgaaagcgtccggaagaacatctcgaatggaaagtttcaaggacaagagcttatcaaatggattgttcttcctcgagcttcttagcacagtacagccaagggttgtgaactggaaagttgttactaaaggggaaactgatgaggacaagaagctgaatgctacgtacatcattagtgttgcaaggaagattggatgctctgtgttcctgttgccagaggacatcgtcgaggtgaatcagaagatgattctaacacttaccgctagcattatgtattggagcctacagaatcagcatcagtcacagtctgaaatgccagagcaatcagaaccatctagcatggcttcagacgcagcctctgacattgcctcggaggacggtgcttcaacgacagcaccatctgagttggatgagggaacagtgcttttcatggtgctcaaagtcgtcgctaccagaagtggtttttttaatacttctgcttcatgagtatggtagcttgatagatacagcaagtgcagatagatatagatgccctttgttcatggaatctgcttagactatagggggcggggcgggaaagatagtatatgtcgctggccgggtagtttctgtatttgtggcacacgcacccatgcaaggttttacctctttatgtatcttgtcggtcaattcgttcatatgtttattggactggtcatcgcttgtaatgctgttgctgctctgaaccgtgcctgtacataacatacactcaaaagtgtttttgccttgtccctaagtttctttttaaaaaaaa

SEQ ID NO: 20835 - DNA, 345 bp, Zea Mays
cctctttggttagccttacacttcacatgagctccacctttggcgagttcatgcacattattctccacaacttgttgagcgatgaacgtatgtgagctcactcttgctgcctcacaccccccacaggttaagaacaggtaccgcaagatgaggcgcatggaggatgccatgacgaggtcgtgagaggtctaggtcgtcgtctcccagtcaactttggattgctggatcgttgtctccatatgatgtaattatttatttattttgtacagaactcctattatatagtaaagatgtgacattcgtttctgtaccgctattcatcatatgtgtgagacttggtcccag

SEQ ID NO: 20836 - DNA, 3486 bp, Zea Mays
atggcgttttggaggccgaaaattcgatcttggcgctggtctcagtgtttcgaggcctcgaggggttgctgtgaagaaccagaggaagataaaaaggtggttttctcgccggttttccttggttttggggtactgaattctgagattgttctgaggcaggggtctgtcttgctggagaatgaagatgtggaggtttgtgtgctctgcgcgtttgttttggtgaagacaactagctggagtaaaaggaagaaaaaaaagttccgcttcctttcttttgcgtgttctgatccttctgagatatcccttcctgccgcttcagagtttcatttgtttccgactcggcatcggcatctcgtataaaccgaggagacacggcaatttcaagggccttcgtttgggaccaacagaataacctgttcctgcctgcaattttttggttctgaagactcaaagattggattgagtgatctttgaaaccaaatcttccttcggtgttttttggcattttgggcactatctgtgaagtgtagcaggaccgcctctgcttttatgctcggtagacttctgtgatcaagtattcaagtactggtaaaagattataagcttgtctaaagcaagcccttagaaggaaagttatctgaccatgttctcagctatcatggcaaagaagaattacaaacagcattccaaatctgagaaaattcaggggggttgtatgtctgggctgattcgcatgcttgatttccgtcgcagtccaaaacttctttcagacgggagagtcaaaagagataaaaaaggtcttgacgatatccatggaaacatatctgctaatgtcaagtattagaactttgatggaagaagagatggccagcagcacacagcccttgaagcaagcacaaagcaatgtcgctgggatatgctctgaagatattgatctaaacttggctggaagtctcatggaaatctacagatctcatactgaaggccaagaaaccaggaggtcgattgagtcaggtcgcagttccatttcgactgacgaagagaagaatactgaccctcctgctcatcactatcagatcccatctagtatccagagagctctagaagatgttgctgaagcagttataagacatcaatctgcaaacaaaaaatacataaacagcggtgatgaaactaggtccagagaattcgttgatgccctacagctactgagctcaaacaaggaattgtttgtgatgcttatgcaagatccaagctctaggttgttagaatgtctccaaaacctttacatgtcactaggaagtaccaggttagactctgaagaatatgacgaaggaactgagttgcaaggtacgacagatagtctagagcagtcagcgacttctccaagtaaggtgaaaagaaggcataattctttcttgaaggaggatgggttggtcacgaggaagccaccaaagttaaatgatggttctcgtggccttagcagaatagtaatcttgaagcccagtcctgcaagaggtcatagcagtcttatctcaggtagcgcaacttcatcaccactatcaaatcatattgattggcaagttcaggaaggcagtgataaacatgattgccatttctcgcttagagagcttaaaaggaggctaagaattgccattagcaataatcagaaggatcaccagttaaactccacgagtagtgatattcatgaagctgaggctgattctggcaaactgcttccagtcacaagtatgtcggagacggagagtctggcaagtacagattcttctgacagggctaaggaaccatctattgttgacgagaaaatagtcccggaagatagtgaaagtgggatgagaaatgatgttgctcatggtgtcggagtcagctctttctcatatgaaaaagctaagatgtatataattgagagactaaatgatcaaggcgaagaaagttgtcaaattgtacagaaatctgaatcttttgagagattgatttcactgcccgagaatggtacattttctccaattgatttccctcaagaggagaaaattagcatagcgcatgaagctacaaaaccattgaacttgcatactgttgagcaagaggatggttcagcaagcccttactcaacaatgcagtacgaggagacagaatcagccgacactagcaacttaggtacagaaacgttgattgagcccacgatagatcatggtagttattcacaaaatgagggcgctatctcacaggagttggtccgtgaaggggttaagatcatgctagatataatggagaactcatcgctctgtgctgagactggaacttcgcaggaaggagtgggagtgaaaaatccagatgaatgttcattggaggaaccacaatccatgaatttgttgccagaaccggcactgtattctccagatgacttcgttaatgaacaagagaaccatagtccgtcagaaattgttgaattagtcaaaccatctgtattgacatttccttactcgccggaaaatactaatgacaaagaggagaaattgagtccacaatccgttcttgatcccattgcagaagttaccagtcctagacacaaaactccaaagcaagatgaattctccatgcctacttccagagtgctattcaaagaggttgacgccccttcagcatccccaactttgtggaatgggccacaggtagccattttggatgacagagccacaagggtgtccttcatcaaggccgtgctagaagcttcaggattgctgtctgaggaaaattcgcaaatttggtacacagaagagccactgcttgatgtatctgtattggctgaagtaggaaactcgtactgcctgacagacgatgcagtgctcttgtttgactacgtggaagaggttcttctcgagataagggacaagttctttggtagcgacccttgggttaattctctgaaacacaatgtacggccagctccagtaggaagacggctggttcgagaggtggctaagggaatcgattctcttgtaggtaaagaatttccacacactttagaacaggtaatgatgaaagacttggacagtgggtcgtggctggatcttggaggcgatactggaagtgttgtagttgagttgtgggatggtttacttgatgacttgctggaggaactggtttttgatttgtggctttgatactgtagtgctttgtagtaatacatgcagaggcatattcgactagtactgacatggggttaatagatacagaaaccttttgcgaaaggatagggaaaagtgagttcggcagactgccagatgttgtagagctaggcatttcatcaatatagttgatttccattttcttttgaatttgatttctttaagctccctttgttctctgtagaggcatggaaacataaaaaataagtgctcctgtatataaagtaccccagtatttatggtaaattttcattgtgaacataatattgtttccgtt

SEQ ID NO: 20837 - DNA, 1154 bp, Zea Mays
cttggacacagccatgagatgccatcatccgaatgcatgtcagagatataaaattcatgcagataagaaatgctcgctcctgctccatgtgtaccacgagaagtactcctaattcaaactcgatcacgacgagttgagatttctcgagatctcgatcgaacggatctcagaataaaaatggagacctcgttagttaatttgacttcctgtgccgcttcatcgcggtttctaactatttattaggacgagcagaggatccatcaactcagctttgcagagaagcagccgcaagcaggagcctttccgagtgtgtggagcagcagcagccgtaagaaaggggagtgcaaagtaagcttcatatattttccatggcaaagctcttcggaaaggtggcgatcgtcacgggcgccgccagcaaactgggcgaggccatcgccaggaagttcgtcgacaacggcgccaaggtcatcctcgccgacatcaaccgccactcctgcgagaacatagtagcggctctcaacaagaccaaccacggccccgcggtggctcacgcgatgcgcatcgacgtcagcgaacccgacagtatcctcgccaccgtcgaggaggcaaagaaggtctacaagcaagacgtcgacatcttctacaacaacgcgggggtcagcaacgtctcctccccggcctcctccatcgacatgatgagcttcaggaacaccatggccgtcaacgtcgagtccgtcatagccagcatcaaccacgccggcgccgtgatgcgcagcaacaagatcggcggcgggtgcatcctgtgcacgggcagtcccgtgggctcgctcggcgacgtggtgccctcggcgtacagcatctccaaggccgcggtcgtgggcgtcgtgcgcgccgccgcggccgagctggggggacacggcgtcagggtcaatgccatctcgccgtacggcgtcgccgccaggtttgacaagggcgtgctgaggcacatcttccctcacgcgactgaccagcagctggatactatgatcagcagctacggcacctacacggtgaccgaggacgacgtggccaacgcggcggtgtacctggcgtccgacgctggcaagaacatcaatggccaaaacatcgtcctcaatggcaagttcggtctttag

SEQ ID NO: 20838 - DNA, 647 bp, Zea Mays
gcccggcccaaggtccaactacgagctttttaactgcaacaactaaaatatacgctattggagctggaattaccgcggctgctggcaccagacttgccctccaatggatcctcgttaagggatttagattgtactcattccaattaccagacactaacgcgcccggtattgttatttattgtcactacctccacgtgtcaggattgggtaatttgcgcgcctgctgccttccttggatgtggtagccgtttctcaggctccctctccggaatcgaaccctaattctccgtcacccgtcaccaccatggtaggcccctatcctaccatcgaaagttgatagggcagaaatttgaatgatgcgtcgccggcacgaaggccgtgcgatccgtcaagttatcatgaatcatcggatcggcgggcagagcccgcttcagccttttatctaataaatgcgcccctcccagaagtcggggtttgttgcacgtattagctctagaattactacggttatccgagtagcacgtaccatcaaacaaactataactgatttaatgagccattcgcagtttcacagttcgaattagttcatacttgcacatgcatggcttaatctttgagacaagcatatgactactggcaggatcaac

SEQ ID NO: 20839 - DNA, 2640 bp, Zea Mays
ataagtgccagcttcctcttctatctccgatacagcaacatagaccggatgtcacagtgaccaccgccctctagctcgtcgcctcgtcggcgtgcccagcttctggtccagcgcgtcgcctccgctgctgctgggcccgacgcccaactaccgtgccgaggtcccaggcaggaagcatcttggcgtacgtgccgccggcgacaagcacccaccacaccagtcatgaagtcgttagccaagcaagagacacagccaaaatcgcggctcattgtgcgccttggtgtattccttgcatctcaccacattctgttcagtgttatatgctgctatgcaggcattatcgcgctactactccttccttcacttgcaaaaaacacatacctctcggagaatgctcttatacctggctctgcaaatccattattttctactgaagatgccattgaagcaaacagatttatgaaagcaattgaagctgtggctagagactcaagcagtgtaataggcatggcaaatttcatagcacaacaaatagaagatctaggtgcagaagtgtgttaccaaaagtttctccctcatggcaagaattttcaccctctgaagttcttcacctccatgacaaatgatattgcaattcaacctaatggcactgccaccaattttgggataaatactatcggcattttacgagctcctcgtggcgatggaaaagaagcaatagtgctggttactccttataattctcaaagagttcagtcgaatgaattattatcgctggctcttggtttctctgtcttctctctcttaagtcgagcagcatggctgtccaaggatgttgtgtggttatctgcagactcacagtttggagagtatgctgcagtctctgcatggctaaaccagtatcataatcccgtgtttttgagtcactcagtggtgtcacataccaagatgtacggtgcaaacaatatatatgatggtaattcagaaaaaacagaagccacggctttcaaacgtgctggaacaatggctgctgctctcatatttaaagttggggaaaccagaagatacagtgacagggatagtgttacgatttatgcagaggcatctaatggacaaatgccaaacttggaccttctgaatgtggtgcactatttggctgttcacagacaaggttttcgtgtgaacatcgctgcatttagttctttgttgagctctgcatggctcagggttattgctgaaattttgcatactattggtagtgtgttaagaaaaataaatcctgactggaagcttgatattgcagtccctgattatgtggaagggactgcaaatctagctaactctatgtacaaccaggctcttggagtgcccacagggtcccatggtgctttccgtgattatcaagttgatgcggtttctttagaattttcaccaacatttcatgtcaaaaatgagaatgctaaatctttgtttcttctgaagggtggaaggttaattgaaggagtggcacgttctgtgaacaatctgcttgagaagttccatcagtcctttttcctgtacttccttacaggtccaagcaagttcatttcggttggtgtgtatatgattccgtttgcattgcttttggcacctctcccaatagttgctgctgcccttgctgatggcagtagaagcatggaaaaaacagcggataagttgataggcgacggtaaaacagatggcattgctgatatttcgcagaacaagggtggatcatggaaatggcttcgagctgcaaaagtattgcttgttgtccaattatgggcagtacttgtttcactacttccatattacattactcagatacctgatgccacacctacgcaaagcacactcatttgggttgtgctctccatcgtcgtactgatctccctatctgtcttgtttggctcaccatactcaactggtgttgaatggaaacttctgaaggctaccatgatcacttccatctccatcggattggggcttatgtcgataataaatttcgccactgctcagcttggtgctctgatagtgatcccaatgtgtttgttttctcggcctctgaaggcatcagggatgaatttccttcctcgggcagttttgttggcttcaaatgtagcttttgctgtgttgggttttcctccagttgcgttgctgattatgaaaggagtgtccaagggatcgaggtcgtggacaatagatgttggagatttctgggtatggatggagttcctgtgggaaaggagcagcgcgacgtatctttacctatttcttgtacatcttccctgctggcttttgtgcgtccttgtgttcctgcacccatgtcaccaatcagaatataagctgaagcaggaatagctgtttggcatccatagtcttgtctttttggatggtaaatcttgtagactagtgtagaaatttctcactttcacaaacttttggttacccataattcggaaattattcacccagttggagacgacttgtagacgatgtatcctgcctaatgtactgtctgcaacattttcgaaggcatgtttttaaagctgcttgttgcagtaattgatttctaagttttttgttgatagcagccgagaaataaatcgaagttggaggtaa

SEQ ID NO: 20840 - DNA, 385 bp, Zea Mays
tttatgaatgcttttcattggtgacgccaaatcaaatggatgatttcatttttcatggatgcctgtggcgcgaaaacagccaaatcaaaaggcatgaaattcattagtggctccccgttcatggatggttcattttttatggataaatttaagagacgattcgtaacacactactaaaacaggaccttacacacatattatacattaattgtttttagaaaacagtaaatatatagtacagatattttagcttgcgtcacggagggtcggccgaagcgagccaaccctaacagtttccacaaattatgccggccatatgtcttgatagccatacagcacccatcaatcgaggatggatgtggcatatatagccaaccggcccttt

SEQ ID NO: 20841 - DNA, 1691 bp, Zea Mays
accatttcaccaaattggcaagaaagccgctagcaatccacagttgcgatttgcgggaacaactactactatcaaaaactttcgacattcgattatgctggcgatggaaatggagctcctggtccgatttcaatgagagccataggcctccaaaaatagggttcaaaaagggccagagagcaaggagtcatcccatttttagccgttgccgtagctggtcgtcgtcgtcgtcgctgctcccaatctgcggccgtcggtgttgccttcgactttaatccacaagggcgagcagcaccgaccgagccgatccgctcctcttcttggttcttcttcaataaatcagcagagcaggaaagatctgtgagcgttcttgcagccggcaggggtccaggattacgaaggaaaccaagaacgcaagaaacgtctaagaagaggggaggaaagatttgggtgtagattggtagatatattacacaggttttgttttggtgtaggttattagcaaataaatagctggagaagaagcctggcaaaaaaaaggtgaaatttgtggagaacatgtttgggatccaaaccagggatgtggcagaagatttcaactcctggaggaggacattaaggaacacacccaccgtctcaatgcccatgaacaaccacaacattatgtacaacacaggcaagagtttgttcaatgtacacctcatgtctgtcaagtttgaagacctgtatggattcatggtggagggcaatgtggacgatgtcaatgtgctgaatgaggtgcgggagaggatcagggagcaaggcagggtgtggtgggcgctggaggcaagcaagggtgcaaattggtatctccaaccaaagatttcttcaaacgagggggtgatcagtgtcacatcactcaagttgtcagtgctcactaatacaattacattgaggaggttgatcaggaaaggtgtccccccggtgttgaggccaaagatctggttatctgtgtcaggagcagccaagaagcggtcaacggtgccagaaacatactatgatgagctaattcgtgctacggaggggaaaaccacaccagccacaaggcaaatcgatcatgatcttcctcgcactttcccttgtcatccttggttgaacagtgacaaaggtcaggcatctctgcggcgagtacttgtggggtactcattccgtgattcagaagttgggtactgccagggtctaaactatgtagctgcactcttgttgcttgtgatgaagacagaggaggatgcattttggatgcttgctgtactccttgagaatgtacttgtcagtgattgctatactgacactctttctggatgtcatgtcgagcagagggtgttcaaagatctcctggctaagaagtgtccaaggattgctgctcaccttgaagcaatggggtttgatgtttcacttgttgctacagaatggtttttgtgcctcttctcaaagagcctgccttcagagacaacacttcgggtatgggatatattattcaatgaaggagccaatgttttgttccgtgttgctctcgcaattttcaagatgcgagaagatgatctactgcgcatccaacatatcggtgatgtgattgatattttgcaaacaaccacacatcatctatatgaccctgatgaactcctgacaataacttgttttgccaaacattg

SEQ ID NO: 20842 - DNA, 1307 bp, Zea Mays
cgggcgagatccattccagtcgcccccattcactccccttcctcgtccgtcctcttcctccctccgatccaccgctccccctacccgccgggccgccgctacctcgagcgagcggagatctctctcctcgaacggggggggaggaagatgctcaccaagttcgagaccaagagcaaccgggtcaagggcctcgccttccacccgcgccgcccatggatcctgtccagcctccatagcggagtcgttcagatgtgggactaccgcatgggcaccctcctcaaccgcttcgacgagcacgacgggcccgtcaggggcgtccactttcacgccacgcagccgctcttcgtgtccggaggtgacgattacaagattaaggtctggaattacaagactcaacgctgcctattcacacttcatgggcacctcgactacattcgcactgtgcaattccaccatgagtgcccatggatcgtaagtgctagcgacgatcagacaatccggatctggaattggcagtcacgcacatgtgtggccgtgctaactgggcataaccactatgtcatgtgtgcctccttccatcccaaagaggatctggttgtatcggcatcacttgatcagaccgtgcgtgtctgggatattggggctctgagaaagaagtcagcatcacctgccgatgacatcctccgcctcactcagatgaacacagatctatttggaggtattgatgctgtagtcaaatatgtcttggaaggccatgaccgcggggtcaactgggcctcatttcatcccactttgcctctcattgtttccggggcagatgaccggcaggtgaagatatggagaatgaacgatgttatcttacctcctgctgtccgcatcttcagcagcaccatctcgcaatgatgcctggatgtcttgatttggaggggatgaaacaattcaccgaacaccaaacttatcaacgccctccatgtcattccaaattttcgtctggaggggattcatcttggtcttgtctcaattatcgcagctgcgttttcagctctattttgtaaacatattgatgtacgatagctgatgtgagtgctggttcactgaaacgattttctgttatggcatatgccattttaatctctacagtttcagtatattgcacagtagattgtactcaaacatttaaaatttgattgtaccaaggattgagaccagtgttttaacactgaaaaattatgattgatacacaaccttttgtcactgaattgatgggtagtaattgcaatatcaatatattttttgtccactttata

SEQ ID NO: 20843 - DNA, 533 bp, Zea Mays
cctggctcgccgtcgtcgtcgccgcgcgcgtgcgcggccgcaagcgccgcactggaatcgtggacctccacaaggacgtgcagacctgcgggtaccacgacgttcaggtgatgtggggcatgctgggcctggaggccggcgcgcccagcgctccggagcgccggaagcggtcgccgttctggacctggacgccgtcgttctggcacttcgcttcgtcgcgccgcaccggcacggccgccgcgcggtgagcgcgcggcaccgacgcaccgccgtgcggtagaagatgactaggcagtgtctgttcgtgtcggtgaaaagctgaaagctccactgcgggggcctctggggtggggactggggcatactatcagtttgactaggaaacggtgctggtgtggtgtgtactacaatctcctttgtgctcggtgcacttctactgcacattgtcactgtagagagagcgagagagggaaaaaacaatgtacataaaaaaaaccagctctaattccccatgtttatttgctttgtgttcc

SEQ ID NO: 20844 - DNA, 2723 bp, Zea Mays
ggcgaacaaaacaaacgcagggagaaggtgccccgcggccgcacgccaggccatcccaagcgaggcgtggcgacgcggagctgaggggcgctactgcggggccgtccttggcgagaggaggggaggggcccccgagggatcggttttcggcgggggagccagcggccgcgggcgaatggctggcggcgaggtagcggtcgtggaggaaacggcggtgggggcgccgactgcgacggcgacgccgcctgacttggcggcgcatgccgcggccggtggcggggaggaggcgatgcggatggagggctggctgtacctgatccgatccaaccgatttgggatgcagtactcgcgcaagcgctacttcgtgctcgaggacgccgcgctccgctgcttcaagtccacgccatcctccaagcgcgaggatcctgtcagaagtgcaataattgactcttgtattcgtgtgacagacaatggcagagaaagtgtacataggagtgacttttacatattcacactatataattcttccaatcattatgatcaacttaagttgggtgcgagaagttcagaagaagcagctaggtggatcaggtgcttaatggagtctgccttaaagtcacctagaaaagatgagcacattgttgcttgttcacacagaagatggcaggctttcaggttgagccgccgcaatagccgtatgcactcaatagattggactttattttcatctgctcataacgatccaatggcatctgatgtcattgcaccttctccatggacaatatttggctgtacaaacgggttacgtttgtttaccgaggcaaacgatggtggctctcatgggaagtattgggatgatcatccggctataatggcagttggtgtggttgatgcgaattccgaggctgtctttcagactctaatgtcccttggccaatcaagatctgaatgggacttctgtttgcgggaaggaaaggtaatcgagcatcttgatgggcatacagacataatccaaaagaaattaagaagcgactggttaccatggggaatgagaaagagagatctattacttagacgatattggaggcgagaagatgatggaacttatgtaattctataccactctgttttccactacaaatgtcgtcccgagaaaggctacatccgtgcatgtcttaaaagtggaggttatgtaatatcaccagtcaatcaaggaagacaatcagttgtaaagcacatgcttgccatagattggaaattctggaagtcttatctgtttacatcatctgccaaatatatcactatacgaatgttaggcagagtagcagcactacgagaattcttccgagcgaaaaatggtaattgttcttgcatggagttctcatctggagagttgaccagggacacgggattacctcaaggtgaaaatcagcgaataaatttggaaatgcagcaagaaaatgagaacggaagacttgaaggtcctactgaaggatcactgggtggttctaacaggcacttaagcagtactggttcctttgttcaactcaatgatgcagcagatgagttctttgacgtgccagacgaatcagaatatgatcagagagaagttatgtttccttctgatgagagcttgcatgctgcggaccagcgtcacgctaaactgtccactgctgctgtttttgtaaaaaggttgcatgatcttgcagttcagaaaagaggatacattgacttacagggagctgcagatgctgataatgggccatgttgctatggatatactcttcccaaagattcgagctatacagtgccttctacttgggcaatgacagatcctacaacattcttaatccggggagagacttatttgcacgatcgtataaagatcaaggcaaatagtaccctgatgcaaatggtaggtgctgactggataaaatctgataagcgtgaggatgatctagctggtcgccctggggggctagtccagaaatgtgcagcacaagggggcacccgattcttcttcattgtaaacattcaggttcctggttcaaccacatacagcttagctttgtattatatgatggatacaccattagaaaaggtccctctgcttgaaagatttgtaaatggagatgatgcattcagaaattcaaggttcaagctcattccttacatctcaaagggatcttggattgttaaacagagtgtgggcaagaaagcttgcttggttggacaagcattagaaatcaattattttcgtggaagaaactatttggagcttggagttgatattggttcatcaacggtggcacgaggtgtggtgagcctagtgcttggctacttgaacaatcttgtgatcgaaatggccttcttggtacagggaaacacaaatgaagaactcccggaattcctcctaggtacctgccgactgaattacctggatgcctccaaggcagtgtccatagacgagtgctaggaccccaactgacctcattttttaaagccaagtacaccaaaagacaaaaaaaaaaggctgaatccccattccttgctgccgacacaatcggcaaccctagcccagatgcccattttattgcctcaccgcaaaagtgggggatccattgcaaccgttgtacattctcttcttgccgactgctcaggcgaggtgcgctcggcttgtggtggctactggctaggctcaacctttgcgcggtggggcggat

SEQ ID NO: 20845 - DNA, 984 bp, Zea Mays
cacagatccgtaatgtttttgatcagattcgtcaggggagaaatgcaagattggaggatttgcttctcattgatcggtcacttattatgagacgcgcaaatttgattgatagacatcgggatatgcggcttgatgtggataatatgtcctatgaggaattgctcgcactaggtgaacgcattgggtacgtaaacacaggacttagtgaggaaaaaatcctaagtaacttaaaacaacggaaatatgtcttaatatcattggaagatcctccaacaggtgttgaaccatgttgtatttgccagactacgcggaaggcgaggacttgggcagactggactgtggtcacgacttccacaccgcatgcatcaaacaatggctggttataaaaaatgtgtgcccaatctgcaagaaaacagcactggacgcctaagacatggctgcattttccctccctagggaaaatccggtagccggcactaagggcaagtggttgtcatctaaccacaccatgcacccaaagactagcaactggttacaagcatgttacaccttcccattatcaacacacatgtgggaatttatactataggtggtacatggcacttacctgaagccaatggctgtagaccccggagtttcatccttgttttgtttaaacctagatttgggatttataatttattgaatgacattcgatttacttgggcaatcagcaatacctgctatcatcattaatcgctaatcatctgtgtttttttattgcttgatttgggggtgaggctagcaagttgtagtcccttcaccttgattctgtattttacccctttggtcttgggttccttggtagtgtaactcgtttcgtagcaggaggaaaccattgtctactgtgcactgtaagcataaggtgcatcattttgtacccagaaatgtgctcgtttcttgttccataaatataataatagtggtcctgatacacagctttac

SEQ ID NO: 20846 - DNA, 1120 bp, Zea Mays
tgctgatcaaacactcggttcatcaaaatggagctgaaaatatattcttttgtctgtattcatcaatacaaggttttgttgaaggtctgagctgtgcaaagagagatggattccaaaaagaagaggaacaagaagaagaagggaaaccaagggaagaatgccgctgatgtcacatccattgctggggaagctgcttctcagaatcacaatcatgagttagccccaatagatcatcataaaggttctgatgcagatgatgtcatgtccagtgttggagaggaacttcctcagtacaagaatcatcagccaaatatacaggcagattataatggcacaagtgcttacgacactacatcctccattggagagtgtattgcatgctatcaaaacaacgaacctatgatgacacaggagaatcacaaggctagcaatgcagtccctgcagatcagaggagtgttggactgtcagagtctagtgtggagcttgacatgcatagacttcatgaagccaaactcgataaattacatgagacaataaagcagttggagaatgaaaagagtttgtggcttcaaaaagtgatcaccatggagggtgaacttgaaaagttgcataacgaagtgggttgtcatgctcaaaatgaggtccttttggaggaaaaactgaatagtctacagagtggttatgatgtgctgattaagaaggaggaagttgtggataacaaagtcaggtgcatagacaacatcaatgataccttaactcatcaagagtctttgcttaaagaaagattaagtgggctggaggaaacaaacaaatccctgctggtacaggtgaaggtgttggaggaagcttcaaacaatacttctgaggaaaatcagatgttggtaaaaaaaatatatgaacttgattcaagactacaagcacttgaagcaaaggctgctcctagtgaagccttaatgattgaaaagagtgtaacaaaaactgtaatgcagttccctgataataaggtgatggatcaagtgcattttgccaactcgccacttcagcaacagacaattgatttttcagagtatttattgtaccaaattatttcttactaccattggcatgggaggagtcgag

SEQ ID NO: 20847 - DNA, 1630 bp, Zea Mays
aaaaaaaaaactgaagaaccggaggagcagtccggcggattctccccagctaagctgcgagcgatgcttcgcgggctagagaaacaccagcgcaacagcggcgaggacacgtcgccggaggccaacgactccggcgagctcgacgaccggaggagcttggaatgctccacctccaccgagatgtcgagcaacagcggccacaggtcaaggaaccgggccccggacgacgacagcttcgactcggagagcagctcgtcggggccgcccacggtgaagaggtcggccgcggtggccgctttgctgccgcccttctctcgcccaacgccgtccaagtgggacgacgccgagaagtggatttccagccccacgtccaaccgtactggccgtgccgggcctaccgctggaactatgccaaagaagtccgcattggcatttcctgaacatggagcccgccagccagccgttgctaaggtggtcacggatgtgcctactatcgctggaccattggttaagaattcagatggtcttgcccatcctgatttgcttaaacttgcacacgatgcttcaatagttgatggaccagctcctgcagttaggtctgtctctatgagagacatggggaccgagatgactccaattgccagccaggagccttctcggaccgcgactcctatgattgcatccagtccaacctcctctcggacaccaactcctcaacgcaccacagaattcagtgtgagcaatatagattctaacaagatggcgatgtctgaagaggaggtccatataagtacaagacaggaaattatggatcttggcgaaaggttaggcaagactactatagctgcatgggcaagcaaggaggagaaagctgctgcacgttctacggatactgcagccgataatgctgttgatgtcaacagggagaatcgagcggcagattggcaggaggcagagaaggcaaagtatcttgcaaggtttcatagggaggaggcaaagatccaagcttgggaaaatctccagaaagcgaaaattgaagctgaaatgaaaaggatagaggccaagatcgagcggaaacgggcgcgcgagcaagacaggctcgccagcaaactggcagcggtgagccaccgagcggaggcgaagagggaggccgcggaggcgaggcgggaccaggaagccgcgagaacggaggagcaggcggctcagatccgagaaaccgggcacacgccttcctctttctcatgctggtgctggtgcctgtgactctgattccttcactgcatgaccagcacagcacgtcacccgactgtaacatagcatgacccgtgagactgtgatctccggccatggtagaaaaatttgctcactgtacgacttgtgtagtgccttggtctaatggtgtccagttttttggtacctcgcgattaatatgggctgttaggccggttgggctgtggacggtagataaggcccgtagaggatttttggagatgggctcggatcgtcagctcggcctaggaattggatcgcaggcaaatcccaacggctcctgtcgttccttcccatgaacaggaggaaaaccttctggttcttttttttcttcagaaaggaggatcccccatttcattat

SEQ ID NO: 20848 - DNA, 1369 bp, Zea Mays
gaggggggtatgtatctgagaaggtctcccctgagaagcaaatccgagctgcccttctgagaagccgctttgctgatacgattctgaaggctcgcgaaaaggctcttgatcagactaccaaaaaggatcctgagaagcttcgacgcgagagggaggaacttgagaggttacaaagacaagagagagctcggttgcaagctgaggctaaagctgcagaggatgcctgcaagagggctgaagaagcagcagctgctgaggctgctgcagaagctaaacgacaaagagatattgagagagaagcagctcggaaagctttgcaagagatggagagaactgttgacatcaacggagggagtcactttctgaaagaccttgaaatgcttagaggtatcacatgcgaagagatgcccaacttggttggtgaagggagccctgggtttcaactgggaagcagcaacgccctagcaaagctcgggctgtacatgaaagatgacgaagatgacgaggagggcgatttggcagatgcaccagtggtggttgatatcgaagagggagaaatagattaagcgtgcttcttctggaccattttttatacgcgacaggagacctgtgggcatcactgatctgcatagcttttctttggcatacaaagcgacctgacgaaaagatcgcctcgcaccagacctggaggtctggtattcgtttttgtaactgcccaagttttggagccaagtcactaggttcgtcgagcttatcgtttggattgagaatctctggacttctgatatccactttcgataaggacttgttcggttaagaggtgatcgaaggagattggagaggggattggagaggattaaatccctttctagtcaattgaacagaggtagcaactgaataagccctaaaatggaatggcgagtttactgcatatatgatgaggccataaaagcggatgaaaagggaggagaaggcacaaggagtgatatatatgatgaggccataaattcggatgaaatgggagaagagatggggtagtggggagaaggcacaaggagtgatggtgatggctcttgagctggtgccagccgtttttgaggggtagttttagagccatttccgtgtcgtgaatgtaatatcggaaactgtacaaaagttagctagttagacgatggaaatcattctttccttcaatttatgcagtgcctgttcttatgagacgttgcacatttctcgtattgctatgggatcctgttgcgtagtagtattgttttggcacagaaattttggtatgtagcttgtcatgtatgtgcaagagtacaagatcatttagcagtgacgtgtttaccaacatgtttatagtggttta

SEQ ID NO: 20849 - DNA, 1489 bp, Zea Mays
gattgtttaaccattctgccaacagcctgtggctttaaaaaggtcatcaaagaagatttggaaagagcttacaagaacactaacatgaagcctatgagccattctacctacttaaggctacaagtcttgcgtgaaatattctgggacgttgataaaaaactagaactacttatgaaactgacatttactgatctagtagcatttgtaccgaaaatcctttcccagctgcacattgagggactttgtcatggcaacttgtcagaagacgagacaattaatatatcaaaaatatttctcaatactctctctgctcagacactgccagaggaagcaaggcatgaggaaagagttatttgcattcctaatggtgcaaatttggttagaagtgtccgcgtgaaaaatgatcttgaagaaaattctgtggttgaggtttatttcccaattgaacaagacgttggaaaggaggcaacaaggctcagagctattacagatctttttagcaacattattgaagaaccatgctttgatcagctaagaaccaaggagcaacttggttatactgtggactctagcccaaggatgacttaccggatgctggcctattgttttcgagttatgtcctccaaatacagtcctatttatctgcaaagtcggattgataacttcattgatggtctatctgctctgctggacgagctcaatgaagagacttttgagcaccatagaagtggtttaatagctgataaactggaaaaggaaccttcacttagctaccaaactagtgattattggtctcagatcgctgataaaaggtacatgtttgatatgtcaaaactggaagctgaagagcttaagacagttcagaaggctgatgttatagcttggtacaacacatacataagatcatcgtccccaaagcgaagacgtctagcaattcatgtgtatggttgcaactcagatattgctgaggctgctaaactccaggagcaatcttggactataattgatgacgttgaatcattgaaggcttcgtctcaattttattcaagcctttgttgagggaagttgggcatgatctgtcagtgtgtgcaaagcgcgtaacttggacattgccgaggcccgctaaggtgcaagaatttcgtggatcataatagatgatttaggccccttctgcagatcaaccgccatgttatctatggccggcttgaaattgaacagcatcgttgcacctgaccaacatcatcaacgagtatagtgctagttgggtaagaaaaataggattttgtcagtgcattatgtgattttcataacaaacacacatggctttattgttactttgcgccaagaaatgttgatcttccaatatggcgtagtaattgatggatgagtttttgaggaaacataattttgtacttggagatgtaaaatgtttctggaatctttactgaacaattttggaagtcttgtcttattatatactttaccctcc

SEQ ID NO: 20850 - DNA, 2513 bp, Zea Mays
tctctctctatcatttattctaccaattattattacttgtgtttattttattcattcaatctccatccggatgcgtcatgcgtgtgtgtgacttgtgagagagacagattccacagcaatttgctccccttccacgcacaggtcaagaaccgctccccagaaaagatcgtatttttcatcgattcaaccggtttctgtacgggaaatcgctgctggagatctcagagaaccggaagctcggagcttttgctccgtttgcgtcgaatctgccttgggagcggataaaggagcggcctttcgagctcgtcggagccgcccctgaggaggcgaaaggggacgcggcggcggcgccatcagctgtagggcgctcgtggaagtcggtgaagccggtggtttgaggacgaggtggcctcggtggtttcgaggaagccacccactgccgcggcggggatggactccagcggggaggaactcctgaagaagatccgggagctggaggttgggcaggcgcagctcaagcaggagatgtccaagctgatacccggcgccgtggagcggcggcgctcgcaatccgtctcgccgcggcgcggcgcgccggtgccaccgccgaccaaggcgaaggcggggccaccaggtaggctgctgtccgggggatttgagggcgggcagcgtgcgtgggcccgtgggtcggcgtctttcccgcactcatcgccgctgcatcgggagggccgggccacgggcgctggaaatggtagcaccagcgctaggctgcctgagaggcagtactccagggtgctgcagtcactggggcattccgtccacattcttgacctcgatgggaggatcatatactggaatcagtctgcggagaatctgtttggctatcctgcatcagaagcccttggtcaggacgccctcatgcttctggttgattctggtgatcacaatgtggtgaatgacattttccgacgtatttctatgggtgaaagttggactgggaagtttccagttaagagcaaacaaggagatagattttcagctgttgccaccaacacacctttctatgatgaagatggaagtttggtgggtatcatttgtgtttcaagtgattcccgccacttggagcagatattttgtaagcctccaacctctgcaaggcctcaatcagaatcatctaggacatcttgtgatgggagttgcagcaacactagtcgcagaatcaatttgttgaacagaagtccttttgatcctcagatacccctgcaaagcacttttgcatccaggataacgaatttggctaccaaggtcacaaataaagttcgttctcgggtcagcacagacgattatggcatagaacgggaaggtggcagtggtgagagtcattgttcggatcgtggtgcaaaggaagaaccaacatctagcggaacaaatacacctagagggaatgcaccacatggtcccttttctacagatgagaactcccctgggaaatcaacgaacccaagcagtgatgaattagaaggaaaagtaggtctgcacaagtttttgagttcaaaggcagaggcactactgaacaagaaagggatatcatggccttggaaagtgcgcgagaatgacggacctgatgaaagaaatcatgtgatattgttgcatggagaccaagagaatgttatgaatcatcagaaggtttcagattctagcatagctccagattcccaaggcgctgaacacaacctacctagcaaaaatgaggcatcaggttcctggtcctcttacaacaataacagcacaagcagtgcaagcagcacaggaagcactaatagcagtgctctctacaaagtagatcatgaagcggattgtctggattatgagatcttatgggaagaccttgtcattggagaacaaatagggcaaggctcttgtgggacagtatatcatgctttgtggtatggttcggatgtggctgttaaagttttctccaggcaagaatattcagaagatgtgatactgtcctttcgacaagaggtgtcccttatgaaaaaactgcgccatcctaacatactgctcttcatgggtgcggttacgtctccacaacgcctttgtattgtaacagagtttctccctcgtggaagcttgtttcgcttacttcaaaggagtgctaccaagttgggtgtgagacgacatgttcacatggctttagatattgcaaggggcatgaactatcttcaccattccagcccacctatcattcaccgagatttgaagtcatctaatctgttagtcgacaagaactggactgtgaaggtggcggactttggcctttcacgtctcaagcgcgaaactttcttgacaacaaaaacgggaaaaggaacaccgcaatggatggcgccagaggtgctgcgcaacgaaccttccgatgaaaagtctgatgtgtatagctatggggtgatcctatgggagctcgttactcagaagataccctgggaaaacctgaactcgatgcagcttcgact

SEQ ID NO: 20851 - DNA, 682 bp, Zea Mays
tttcgattcaactgaaccggtttaatttgatggggttgtagtacctttttttttcttatcacaagagacagagcatgcatgcggcatgcctccatggccgtggctttttttcctgctttacacactgccgcctccttatctcctagatcttcacacccatggttttttttccctattttgttctgtggtcttttcagtcatgctggctgggactgctaccgatgctgctgctggtcatgagaagctagctattggccttgtagtaccggagtaaatgattggcgctactagttttttcccctatccccaaatttttcatcttgcagtggtacccttcgccttgggagctgaaagcatggggagatgctgccggccggccggccagtacactgcaacactgagaggttcccaaaggagtcatggacgaggacgactcatggtggtgggtggggtcgatcaagttcttgttgttgggtcgaaaatggagcacggagacgagccatatttagcaaggaaggtttaagtccatacccaagattgggcaaggtggcctatcatgaaaatgatgatgatggccgcaaaggtcaataagtactatgaaaggagaaaagcataatacgaaggcacgatgcaaaggtataagctaaggctagtacagacaagcaagatgtgtagaataagc

SEQ ID NO: 20852 - DNA, 1987 bp, Zea Mays
agccggtccagcccacagtccacgaggacacgatccccgacctcatatcaggttcccctccccatcccggagagcaaaagcgcttctctcgctagcgagttcggcagtagaaaccctaaaaaaagacaccgccctccccttcgctagcggaaccgccctcccctcgccggggtaggggtttcgggggtagacgcccgccatggacgcgttccggaaacagctggacgtgctcatgggcgccaaccgcaacggcgacgtcgaggaggtgagccgcaactactacgaccgcgacgtctgccgcctcttcctcgccggtctctgcccacacgacctctttcagctcacgaaaatggatctcggtccttgttctaagattcactctcttcaactgcggaaagattatgaagaagcgaaagcaaagggaacagaaaattttgatagagaactcgaggatatgatagaaaggctcattgtggagtgtgacaggaaaattcagagggccctaaaacggcttgcagatgatgatgccaatgctgctattgcgatatcggtctctgaggttactctgacggatgacatactgcagctgtcaaaacagataaaggagaaaatggcagaagttgatgcctttgattttgaagggagaactgatgacaaaataaaggcccaggaagtagtggaagagctaagagctaaaagagctgatatgcaggctaccctcttgcttgatgcttttaacaaggacagagcttcattaactcagcctgctccacctcaagtggcagcagttccaccaccagctccacctgatgctcgtactcaagaaattatcaacgaaaagcttaagaaagctgaagagcttggtgaacaaggcatggttgatgaagctcaaaaagctttggaagaggcagaagctctgaaaaagctggcgccacgttcagagccaccttcagacccttcgaaatatactgctgctgatgttcgaattactgatcaaaaattacgcctctgtgacatatgtggagcatttctgagtgtatatgacaatgatcgacgtcttgctgaccattttggtgggaaattacacctaggctacatgctgattcgtgagaaacagaaagaacttcaggtgctgaatgtaatgtaccattttctgctttaaagagttactctgttttggcccttttggcatatgaattagtccatgttgcgtgattggaatctcatgcgatcatcttcatacccatggatacaacagtcactgtctgttggcaaatgtaagcataggagggtgcagaccatggagcagagaaataaaaggagaccgggcaaagctgaagatgatagacgatcaagagagcacagcaaggatcgcaacggccggtcgtccagggatagagaaccagaaaggagagacagggttgagtctcgagatggtagaagagattatgaaagggatcgtgatagacgtcatgatagggacaggcgccatgaccgtgatcgggatagggattatgaccgctcccgtggacatgattcaaggaggagagagcgttcacgctccagggagcgcagcaggcgccacgagagatactaaatgttacaccatgcctgacagatttaggagtactggcggcgtctgttcaagatatggtttgagcttgtgcttcgtatcttctgaagaccggtctacttgacgctaaattcgcatggagtgttaagcatttattaaacgcatctggaatcaaatgaagttgtacttgcgaacggcttcacttaaaattcgcgccatttctaatattgtaataagctgtgcttgaaccttagctgtctctgtgtactcgacgtaccactcgctcccacaaatagcttcgaacatcctgtacctgaaacatgacgctgtttggtggaggtggagctgtaagtgttcttttgcacaattcattataaaaatcccaaatctgagtactaggaaatttttagtgag

SEQ ID NO: 20853 - DNA, 1429 bp, Zea Mays
aataccacaggtcgcactccaatggatgtaagtacaactgctcaggagatatctaacactgatgttactgttttggaaggacacagttcagaggtttttgcttgtgcatggagcccatctggttctcttctagcttctgggtcaggggactcaactgctagaatctggacaattccagatggtccatgtggttccaacatgcaatcatctcctcctggtgttcatgttttgaaacattttaaaggtcggaccaatgaaaagagtaaggatgtcaccacacttgactggaatggtgaaggtacactgctggctacaggctcctatgatggacaggcaagaatatggagtagagatggagacctgaagcagacattgttcaaacacaagggacccatattttcattgaaatggaataagaaaggagattttctcctaagtggaagtgttgataaaactgctattgtttgggatacaaagacatgggaatgcaaacagcagtttgaatttcattcagctccaacactagatgttgattggagaaataataactcttttgcaacatgttcaaccgataacatgatctatgtttgcaagattggggaacagcgtccggttaaagcattcagtggccatcagagtgaagttaatgctatcaagtgggatccgactggttctcttttggcttcatgttctgatgattggacagcaaagatatggagtatgaagcaagacaaatgtgtatttgatttcaaggagcataccaaggcccaggaacaaacaatcctaatcagcagttgcttttggccagcgcgtcttttgattcaactatcaagctttgggaagtcgagcaaggatgccttctgtacagcttgtctggtcataggcaaccagtgtattctgttgcatttagccccgacggcgaatacttagcgagcgggtccctggatcagtgcctacacatctggtctgtgaaagaaggcaggatcctgaagacgtacagaggtactgggggcatattcgaagtgtgctggaacaaagaaggcagcaagattgctgcctgtttctccaacaacacagtctgcgtgatggatttccggatgtagtccaaccagtagggtggtgcatatcaatcctaacacaaggctagatcataaatccgtcccatgcaaatttgtgaagagcggagttgttagcaaaatgtagatcctaggtggcttcaacttttgtccatgcacatttcgtttttcttggtcatacttaccttagagtagcaatgtagtagtggaaatgccttaacagggtttagtagcatggaaatgttttggtggtaaattaatgaattaatctgagatgtactagtttgtagtttgcacataccgtcgtgtcaatgtcttttatattgaactgctatagcgagcttggctgacca

SEQ ID NO: 20854 - DNA, 1721 bp, Zea Mays
cgcgcgttagtgcgagcttgatgaatcgaatcgctgatctctgttagcgctccgctcccacagacggacagcttgggctcgacggatgaacatgtgtgagaaagatcagaatttgccatggggatacgacctgttccgcgacccttttgctcctcccaacgggtactacgggcctcctcccggttactgtgatggccactgttgtgacctccatcattacggtagagcatcacatccagatgagactcagttgcattcttctcaactcgcatatgatatgtacaacccatcagtaggcatctaccatcctggaagcacccatgagcacgagcacgagcacgagacagtatatgtagaaccgtctagttcctctccagacacaggtggtgacggttgttttgagatggaggaggaagtagggaagaggttttaccccatggtcccagttccccatgtccccaaaattaatggagaaatcccatcaattgatgaagccactatggaccatgaaaggctgacagaaaggttgaggctgtatgagctggttgaaaacaaggtgaaaggagatggcaactgtcagttccgagcactatcagatcagctttaccaaagtccggatcaccatgaatttgtgaggtcgcagataattaaccagcttaaaactaaccgtgacgcctatgatggatacgttcccatggcatatgatgattacttggagaaagttgcacggaacggtgaatggggtgaccatgtgacgctgcaggctgctgctgacaagtatggagtaaaaatcttcgtgatgacatcgttcaaggatacttgctacatcgagatcctgcctaaggttcagaagtccaacaaagtgatactgttgagcttctgggcggaggtgcactacaactccatacatccgcagaacggtgagtaggcgtgccgttggcatgccgggccttcaccgccaacatgctccgaggtcgcagacgaccaagaggagaagatggtggccgttctcgcagcaccaccaccattgatggcgggttcagctctcttggggctggatggatgttcaggatcaggtggtggtcccggtcccggccatcgtccagatgatactacaagggacgtacgacattatgattaatatatatatacccagagcggagcagaaagacctgataagggaattagttgggatgaatgaaatggaataaacatgggatgggatgggaatcgtcgtcccgtatatagtttagagtggaggccggtgagcgccaactcaaactctttgtattgttgtttatatctacaaattttgccggaacgaggctagaattattggggaacaattatggtaataataaatcggttaagaattgagatgacccagctgttggcagagctcggatcatcatatgaccagaatcagaatggattccccagtgcatctagttttcctctggaagaacagaacaacataaaagaaaaacgttgaacactgaagtgggaagctgtaaccagaaatcttagatttgagcccaactgctctttttggaaggcaatatctagtttttggcccatgagtccaggacattttcagagggcccatgagtcatttcacaggtgaacaaccattgtagccattatacatacagagtaggctggtgtcttattttcgggttcaattgtaaatgattagtcaatgccatacagtcatttttggc

SEQ ID NO: 20855 - DNA, 943 bp, Zea Mays
tttccctgaacagataaagaaaaaaattcctgttcctgatgatattactgaacaaggtgttccagcaggacatgctccttttattccagatatcagtgaactgttgcgggaattgcccaatcttgagccaatttctaccaatgaattggtttctgagggcacagctggtcagttacaagttccccatctctacaataagatgtgtggagtgcttgaagagagtggtgcttatgcgctcagttccttctttggagacaagtccgcatcttctagtttggccaatagccttcgacagtttgaaactgtgtgcgagaatgtcgtcgaggccttgcgaccacaccaaaatggtactggcagtgccatcaaagaggaattggtagatgcagccaccaaagcagcagcagcagcagctcctcaacaagattcaggccatgatgcaccgcatgggcagtcttcgacagccaaggcggacatggaaatcgatggttgatttgtaggttccagagtggtaagaaagggaatccccctctaatcattatgtatactgtggtcagaatgtgcgctatatattgtaacatcaaagaaagcacctccaggcctgagggtgttactgctaatgcgtttggtttacttgttgtccttgtaatatgcatacacatttagaactcatgcagccattttgtgtgctcgaaccggtggatcgctgccctgttgtcttgtactgtgtttagggcctgtttggatacgaatggttaattataagacggggctaaagataagtacggataagtacggattagctatagttggctagcttgttggttaacaattagctaaactttggctagctagatggtaaacaattagttaaaagtttagcaaaagaattagttcacctattaactcagtttgttgcctcctttttattatgccaactaatttg

SEQ ID NO: 20856 - DNA, 1098 bp, Zea Mays
gtgcgtactgtcttcaggttcaggcccaaccgcccaggtaggcttccaggccgtgcgccgcgtgggcggcatgccggcatggcaaatcggttccgaaccgaatcttaaaaaaatgaatgcccagtctctactcagcctgcgttcgcgccttttccattttcaccccccgattccgatcgcttttcaccgccgcctctgttccttcgctagtcgacaggccccgcttccgctctcctcttccaccggccaccgccgcgcgccgagaagatggggaagcggtggatcccactggaggccaacccggacgtcatgaaccagttcatatggggtctgggagtctccgagagggctgtgcagttctgcgacgtctacggcctggacgacgagctgatcgccttggtgccccatcccgttctcgcagtcctcttcctctacccgttcacctccctggacgaggagaataaagaagaatcaagtgtttctgccaaatcgaccgcagggggcaaggatttgagcaagaaggtatactttacaaagcagactattggcaatgcttgtggaacaattggtgttattcatgcaataggaaatgcaacatctcaaatcaagctagttgagggttcctattttggaaagttctataagcaaacagctgatatggatccagtccagcgtgctgccttccttgaggaagatgatgagatggaggatgcacattctattgctgcatctgctggtgacactaatattaatcttgatgttaatgtacactttgtatgtttctcttgtgttgacggtgaactttacgagcttgatggactaaaatcacaacccacaccccatggcccatcatcacctgaaaccttgttgcaggatgctgcagaagtcatcaaagctagaattgcggagaaccctaactcgatgaacttcaatgtcatggccctttcaaagaagtgaagtatactgtgatgggtggatttcatttggcagaatacgggtcccttttcttttcagttctgctgagtactgcaccgagtggaaggtcctgaaaacaagaaaaacaaattgcaaacgcaaggaagaacgagcggatattag

SEQ ID NO: 20857 - DNA, 1888 bp, Zea Mays
gccatttctcacccttcaccttgattcatcattcacgccagtacgccacgcctccgcgttccacgttccttctcgtctctacgtcaccgtaacctcctccacccatccccgttctcacgcggctcgctcagggctcgagcgtctccccatcggaaccctaatcctctctttccctactcgcggaagccaactccaccggcaggggaagcggaagggaagcacctcggccccggcaagatggtgctcgcacagctgggcgggagcatctcccgcgccctggcgcagatgagcaacgccacggtgatcgatgagaaggtgctcaacgagtgcctcaacgagatctcgcgcgcgctcctacaggccgatgtccagttcaagatggtccgcgacatgcaggctaacatcaagcgcatcgtcaacctcgaggcgcttgccgcaggcaccaacaagcgccgcatcatgcagcaggctgtcttcacggaactctgcaccatgttagatcccgggaagccttctttcactcccaaaaagggcaagccaagcgtagtcatgttcgttggtctgcaaggttctggtaaaactactacttgtacaaaatatgcttattatcatcagaagaaaggattcaaaccagcactggtttgtgctgatacatttagggctggtgcttttgatcagttaaagcaaaatgcaacgaaggccaagattcccttttatggaagctacatggaatctgatccagtgaaaattgctgttgagggtgtggagaggttcaagaaagaaaactgtgatctcatcattgtggacacaagtggaaggcacaaacaagaagcagcactctttgaagaaatgcggcaagtttcggaagcaacaggtcgcagcaacaaaaagtcctgttatattcattggaactggcgagcacattgacgagtttgaagtttttgatgtgaagccatttgttagtcgcctgttaggaatgggagattgggcaggctttatggacaagattcatgaagtcgtacctacggatcaacaacctgagcttctgcagaaactgtctgaaggaagctttactctcaggcttatgtatgagcagttccaaaacattctgaaaatgggtcctattggacaggtcttctctatgttgcctgggtttagcgccgaactaatgccaaaaggacatgagaaggaaagccaggctaagattaagcgctacatgacaatgatggattccatgactgatgcagagcttgacagcacaaatcctaagctgatgactgaatcacggatcattcggattgcacgggggtctggtcgtcctgtcagggatgtcatcgacatgctggaagagtataagcggcttgctaaaatctggggcaagatgaagggtctcaagatcccaaagaaaggggagatgagtgcactgtcccgcaacatgaatgttcagcacatgagcaaggtccttcctccgcagatgcttaaacagattggtggcatgggcggtctgcagtctctgatgaaacagatgggatcgaaggagatgagcggaatgtttggaggcatgggtggcgagcggtaattttacgtcctgtttttggtggatcgtcgctgtgaacttgtgatgctaaattgagagggtttagtgctgcggtctgatcatcgtcagaggtttccatgaagatcagcctgcgccatgttatggaacaggcttgctgtagctccccatgcctgaaatttaatttatatgattatgaacagtacatttgtcctcgaaaaaatgtataagatataatatttgacaaatggaatatgcttatgtagtcttccagtcttgttatgccgttgggttggcaaggatgcgccatgaagcttcgtgccagggcgagcc

SEQ ID NO: 20858 - DNA, 500 bp, Zea Mays
ggccgggctgcgcaccgctcctccgcaccattttttactcctcttcttctcccccaaggccccaaccatcccactctctctatacaacagccacccccgcgcccttccgcccttgtcgagtccaaatccaggttatagatcctctcgcgccgccgctcgcagccgctcgccgcccggtacatctcccccgcgcctctccctgctcctggatttcaccgatctggcatgctttactgtcccgtcatacggtggcagcgggagccgcccccttcctgcctccacagctcatgccatgcatggccgatccattccctcagatcgggattgccgcatacatgccgttgcttccccgttagcttctcccttgttacaccccctcgcttcgttctgcgtagtttcggggtttgacaccgcttgtctatcccgttcctatagcttttagggtttcgagctcaaactccgcgccggcgtctcaggtggttctaaatgtggacttgtgg

SEQ ID NO: 20859 - DNA, 1800 bp, Zea Mays
ccagcggtatgacatgatcccacagaacgctttgaggtggatcctctttcccaccaagtcaaggtttgtgaattcgggagtgctagaatcttgatcttccacaagagaatgtctccagaagcaatggataggcttctagaaaaagataaagtgccaaacccatgctatagagtatagactgagtttcaacattggaaggctcaactaaatataccagttccggatacacactacaggacaaaggaaatggacaaatattcctgcaagcacaacgtgtgcacctacagcatcaggatgtctgggtactgcaatggcgggcatgtggataaggcgcgaacactatgggatgagatgattcaggaagggatccagcctgatataactgcgtacaacacaatgattagtgggtattgccattctggggaggtaggggtggcagaggagatgtttaaaaatatgttgatgggtgggattgattcaagtgccacgacgttcgaatggttggtcagagggcattgtatggcacgggatgtcgaggcagcaatgcttgtgcgtgcagacatgaaaaggaaggggtttgggttggcgccagaggttgttgaggaattgctggatggattatgtcaaaatgggagggttgaggatggcttgagtgttttgcgagaggagatgaagagggaagaatttgtgccaacccggaggagttacgaggtgttgattatggggttttgtgatggagggaaggtggaggtggcaatcagactccaagcagagatggctggaaaaggattcactgctggcagcgaggtgtactatgcatttattagtgcttatgagaagtctgaaaattatgagatggtcgagaagttgaggaaggaaatgtcggcgatgggcacttagagcatgtctagcagctcaccaataattcatccctaataaaatggtattggtggtcaccaatagtgctttttttggaatattggggagactctatagtagattaccaataatctttcccaatacatgggacccacatgtcagaatagaggatgtgggaggaagaagatgacgacagttgttgtggtcccaacacctatagagggagatgcaactccccttttatttgaggggagatgggagatttgttttggtgaccaccaaaaaaagggagagctattggggagctgttggagcaatggaattgcctcatctcccccaatatgacagttttatggggatgagggatggtattggagagctactggatgctctatcggatctgatatttggcttggatattgcacagtgatgcatggatatcaacctcacctaattgcagttgagaactatgagtggtgcaacaaattctgaattggttgaaggagttctctcctagcactatcctggagacggatgttggagaaatatgactgctggatctgcaataggataatgtcttttagtcgatcccttttgtgcttgtttggtgaacttgtgtccccaatctgttgaactctgtaaacatttgctttccataaaagcagagatattctccttaaaaactcagtccagaatggtgatatatgaatgatccctgagagtttataaggtacaaccgtacaagtccaggtgctagagacttctcaatttgctggaaaatgctgtagtattttgtgttgacttgctgtttgatatatgctcagtacctcactgtaaaatgtggttctcttgtttgcctcttaacaaaatcctgagaaatgacatgagaacaaattgagaattagtagatcagtacttaac

SEQ ID NO: 20860 - DNA, 147 bp, Zea Mays
cggcaacggatatctcagctctcgcatcgatgaagaacgtagcaaaatgcgatacctggtgtgaattgcagaatcccgcgaaccatcgagtttttgaatgcaagttgcgcccgaagccttcttgcggagggcacgtctgcctgggcg

SEQ ID NO: 20861 - DNA, 1672 bp, Zea Mays
gctcatgtttagtgaccagtgtgtgtttgttaactgcactatactactccctcccttctgaattgagctacaaggaattgatggtccagtgtaatgttttgggaagatcagagtctcgcatgcagcagaagcttgaaaaggccaaagaaattttaaagaagttaaaggcaagggtacaggaacttgagaaggaattagaagataaagaaaatggtctgttaagggacttgaggtcttcaaagaaatttaaagcagaccatataaaatctgggaatgtcacagctaatagtgctttcactagttcaagtcctggatatgaaaatcaaacaaacaagctcgatgaggtgatgcaagatccgtgcaacgacaagactcactttgaccggttaaaatctgaagctgggagtgttctgaatgcccaagacaacctggacaacaaggatgtagatgtgatagacctagaagccaatgattctgtttttggagatgaacagaaggctcagttttccgccaagccattcgggaccgatgatagcacaccgaattccgagaacaagtctagcctttgccaaaatgatgaccgacattccgtggcatctgaatgcacaaccgcacacgcagcaaatggaggacccttcctcaaacacagagaagcaactgtaaaatcaacctttatggcgaacattagggccaaactgcatattcctcgggagagtccttccgtgagaactaacgcgacaagttcaacgctggagagtgaaacattgacaattgatggcatctccaaacaagcaacgagattggcatctggcactggacctcagcagatccacaacttcaactctttttctgatgatttccaagcgccaggaattcctggcacggatggagcaaggagaagcattggcaaatggtgcaagggcccagcagatcccagttctgcgagtgggagcagaggcaacctgatcgccgtgggaccggatggccgaggaggcaaggtcaagatcctgagggaccttggccgaccccagcaagtcccaagcgctgtggcccaaggcgcagaaggttgcaggcagaggtggccagtcccagatccatcagttctttggcaagagatgatcctgctactgaatgaatatgttgtgccgcatggagcctggttagctgaacctaaatcctgcatgcagctgtgtcggtatgcaatgcgtgctgtcgaacaactgaacgtgtatctctgttgtgcttgagctgatctacgtgtggatagttgtagagcacacctctggctcagcttggacatagccctggtttcatcacatggcagctggatgcagcagaaaagggaaacaagtttgttgaagagtctgatggtaggttctgggaggtggtgtgggcttgggagagcctacctacactacacgtcagctgtgttggatctaaccatccaatcataacaggacaccgggcatgtatggcgcttctagtttgtttgtttgtgaagtagtgcaagtgttgagcttctcgagtccctgaaaaggatgtttagtggacagctacaccagctcccgtctttttcttcaaagattttagctgccataactgatgtacttgttttgtatagtcatcattttacatttaaatatagacataaaaatcaagagttaaaacgaat

SEQ ID NO: 20862 - DNA, 871 bp, Zea Mays
ccggtacaatacaacctgcgtaagtagccaggcccaatctcccagcccaaagtcccatcccattgctcgttctgtcccttcgttcacaacctcctccacgaccaaacgatccgggttccagcggcggcggcggcggcgaagatgatcataccggtgcgctgcttcacctgcggcaaggtgattgggaacaagtgggacctctacctcgacctcctccaggccgactactcggaaggggatgctctggatgctttggaattgttccgctactgctgcaggcgaatgctcatgacccatgttgacctcattgagaagttgctcaactacaacacactggagaagaccgagacaagttaagtgagcaagcatatcatgctctgaaagcactactgtttcgcagtatcatatatattgtaggcggtatgttgtctcttctctatcaggagaggattgttgtcagtgtgaacttgcttttgctcacgagcattcaaggactgacagtgcatgttgcatctatgccacgatgttggagattttaatcgatataataactgctaactaatactctctttgtctctgtcccaatttataattcgtttgacctttttacatcaagtttgattggctcgtattattgcatcggccgtatgcatactcatgtgcttcgaggtatacaacggccgaaaatggccactcggtccgtcgtcgtcgcgaggtatatacaatggccactcggtcatgtgcttcgagctaggctgtacctcatttcgcttcgttgacttccacaataggctgtacctgtacgtgctgctattattcatctgggactggcatatagaacaaaactgtgatcaaagaacaaagaatcaaa

SEQ ID NO: 20863 - DNA, 1569 bp, Zea Mays
gccagctactcctttgctttgctgaataaccataccaaacacgcccatattaatacccgctcggcggtggttctgcaatcaaacgcaggccgcagtcgcgtgcggaactagagctccttcagagaagtgccgtgccagtgccaccgccggccgcatcatcgttccgcccccctggtgttatcagtattgctcgtgatgcggtgaagcatgagctcaccaagcatattggagttgatgtttcgtatacacgagctcaagtctaggatgatgttatcttgctttgagtgttcagtaacttcttccgatccatattatggcttcaaagcagcagcagaaacagttcctggatgaagccatgatcaagcagccgacaccggaggaggaccgtgagggcgcatggccctcagtgctgacgatcatcggctttggattcctaaccttcaactcattcatggctgtgtacaggtcaaatggagatgttggatctatctcctttgtggtcttctcttacctggtcctcgttctgctgttctactgcctgcgccgattcgagacaactccaccagagtcgcctagccgggagcacataaaaatggccgtgtgggtactcaccacgatgctcactgctgcgttctcatacaaggtggcagcaattatgccactcccggtgcaggtgctggtgtgggcaatggcaggagcaactgtgttcggtggtttttatgctttcttcatccaccaggaaaaaaccgcccagctggaacccccaaaaccataacgagggtgcccgtcctgctagccggtgtgcttgctgtgcgatcgtttggcatgtgcttgttgaggggttgctaggggattggagaggattgaagggattaaatctcctcctattcaattttgaataggaggggatttaatccccttcaatccccctcaaaccactagtaaccgaacgtggcctgagggggcgggcgagtctttatattgaatgaaactacataaaatagcatgccgtctctgtcactggcaatggacggtggtgcctagcgcaactcagcgcacaactgtgtgtcttgatttttcttctgtttatcacggcattagtgccatgccgttttatgttacagtgttgtgtgctcgcaagcatccgaaaatatgcgtctgagtttagggttgggtcaaacttgtcgaatttggggttctgttataatatgttgagcatgaataaagatggatgctggtgactctgtcgccatcgccgtccatcatgagtgtcctgtaattcaacttatatctatcatgtatgtatgtatgtatgtatgtatgtatgtatatgctgtctactatgcttctttgttttaactgaaatgtgtgttacagtgttacttctctggggtccatttaaaacggcatttcgtttacgataggaaccagccattataatctttaaccaataatttcgctaaccaatttcaactattgcaatgcgaacttaatattatcagatttataaccgaatgcgctatcaaataatcataaggttgtaatcataataatataatataaaataaa

SEQ ID NO: 20864 - DNA, 2922 bp, Zea Mays
gtatgctagcatcacatgatatgatgtcattgtatatggaggttctagctcacatagggtactgccttcaacgtttgaggcaaccaattctaataacagtgaagttgctaagggctttgagacacacagtcgccttaatcctgaaaatagggtcttagattacgctgagagagcagtatatcaagaagccctgcagaatattagtcgcgaaaaaagtgaagatgatctgcctgagggtgtgctagcagtacctctgcttagacatcagaaaatggcattggcttggatggtttcaaaggagaatagctcacattgtgctggtggaattcttgccgatgatcagggccttgggaagacagtgtctactattgcccttatacaaaaacagaggatggaacagtcgaaatttatgtttgttgattcagatcgtttgaaatctgaagcactaaaccttgatgaagatgatgagggagaacaaactgttagcaatgaacctaaaaaggaccaaggcgcttgttcattgtcaacatctgctggtactagtgctgaactttttgttaatcaaccgaataatgttgtgaataaaatggttgaaaccaaagcagaacgcaagaaaaaagctaaagtttccacatcatctgcatccacctcacgttccatgacaaggccagctgcaggtactctagtagtgtgccctgctagtgttcttaagcagtggtctaacgaattaactgacaaggttagcgaaagtgctaaattatctgttttagtctaccatggtggtgcaaggaccaaagatccacgtgagctggcaaaatacgatgtagttgttactacatatacaattgtggccaatgaagtacctaaacagatggctgatgatgacgcagatcaaaagaacagtgaagaaccctctgctagcaataaaagaaagccatcggcgaatatgcaaaacaaggctaagaaaaagaagaagaaacttaaggactcaaactttgaccttgacagtggtccaattgcaagagtgcgatggtttagggttgtgcttgatgaagctcagacaataaaaaacttccgaactgtagtggccagagcctgttgtgggctaagagcaaagcggagatggtgcttatcaggaacacctatacaaaatgcaattgatgatctgtttagctatttccgtttcttgaaatatgatccgtattgcacgtataactcgttttgcacaatgattaagcacccaattgctagagatgcaattaatggatacaagaaacttcaggctgtgctgaaggtagttctcctgcgtcgtacgaaagaaactgtgatcaatggcaaaccaataataaatttacctcctaagacaattaatctgaataaagtagatttcacacaagaggagcggtcgttttatttgatgctggaagaacgctctcggcaacaattcaaggcatttgctgcggctgggacactcaaacaaaactatgccaacatccttttaatgttgctgcgacttcggcaagcctgtgatcatcctattcttgtaaagggcaatcagtcagaatatggaggtgatggttctatagaaatggcaaagaaacttcctaaggaagtggtgatagatttgcttgcaaaactggaagtggggtcaacactttgtggcttatgcaatgatacacctgaggatgctattgtgacaatttgtggtcatgttttctgctatcaatgtatacatgaacgaataacgactgatgagaatatgtgccctgcccctaattgcagtagaacattaggtcttgaattgttattttcgtcaggagctttaaagatttgcatctctggcaaatcgagttctgcagtagctagttcatcatcagataacgagtcatcttcaatcagtcaaagcagctttgtctcatccaagatacaagcagccattgatatactgaattcaatcattgtcatggatcctcttactgaaagttatacaatggaatcaagcagaagtggactaggccctgtgaaagccattgtcttttcccaatggactggcatgctggatttgctggagctttcactgaatatcaactgtatacagtacaggagactagatggaacaatgtctctcaatttaagagaaaaaaatgtgaaggattttaacactgacccagaggttagagttatgattatgtcactgaaagctggtaatcttggtctcaacatggtttctgcttgccatgtaattctccttgatctctggtggaacccttatgctgaggaccaggcagttgatagggcacacaggattgggcagactaggcctgttactgtatctcgcttgaccgttaaagacactgtggaagatcgtattttagctctgcaggaggaaaagagaaccatggtgaactctgctttcggtgatgacaaagccggcggccatgcgacccggctcaccgtggaagacctgcggtacctatttaggatatgattgcgagggaactctctcaatgcctcggtcaacttgtcaggtcatgatgcgttgtaccttgtaatcgtagtccggcaaaagggcggtgtaccattgcgagggtaggctcattggtccatgtccgccacgccttgctgcagctccagttttgtggtgctcagatttctagatgggtaatctagggctagatagcatgtgtaattataaccccccaaccccccctccccggggcatggaggagagttccgcagtgccaatgctttatgatttagtgtatgtatatacatgatcaccatgtctaacttgcaatgagttgttttagctcgagatgtgagactgatactgccagcgggtcagcattttgtaccttctgtgttatgtccctttgcccgtcatcagaaaatccaaaaaatcaaaacttttgttggtgtcca

SEQ ID NO: 20865 - DNA, 2528 bp, Zea Mays
gtttctctctcctctcttcgttcccgcgcggagagggagagggagaaacaggggagcggcggccccctcctcttccctgccacggtttcttgcggattatttctaccctattttattcaggatttccggttggatcctcctatgcctttttgcaggggaaattttaacttctgctgcaaccggtggtgcaattaatcagccattcacgcattgtgctgttcattgaggcattatcggtgtggttcattgagaaagcgcctgtatgcgaattttcatgtaaaaagagctgatcagacatggctgcgaaggacggctcagggtcacaggaccaggggcacaggttgtggcccatgctgtcctacgcttgcggcgagctatgtgtgatcatgctgctctacgtggctgcctttgcatcccatgcagccacaaggctggcgcgcatctgcgggctcaggccaccatgcatcctgtgcacgaggctggaccgcgccctccatggaaacttgccatggttctccgcggacctggtctgttccgtgcatcggtccgaggtctcgtctctggctcactgcaagagccatggccggcttgcacggtccggcgatctctgcaaatcatgcctcctttcatgcacggcggtaggtgcccgtgaggaggtggtgaactctcggcctacgacatccagcagcaggttgtgttcttgctgttctgatccgttcaagaataatactggcgacacgcagaggcattctggagcagccaatgctgtggtgtcttgggatagtgtacctgcagaccatccaaatgagaagacttctgtggtgggcattgaggaagtccaagaatctgacggtcctacaaaggacagcgccgccccttctgcgaatggtggggcagcgaagagcaaccacagatcggccgcgccgacacgcattgctgtggacagcaacggcagtgtaaaaaatgcctccgtcgttgcaagggccaacttgacgtcgcctcggccgtcagaaattatctctgccagggacagcagttcaacgacgcagcaagaggtgaaggcgctcctttctcagatgtcctatgcgcggggcggcctcgacagttcttcgattgaaggatctcctgacgctccgaacgaagaaagcaacgctacgagcaacaagagcccgtatctcgagaggaactattgtgtgctggaaccttcagacgggagcctcgctgacgatgtcgaagggggaagctctctcgagaacgtaaagagacagcttgagctcaacaggaaggccatggctgctctacacaaagagcttgaggaagaacggagcgcgtcggcagttgcggctagccagacgatggccatgatcaataggttgcaggaggagaaggccgcgatgcagatggaagcactgcagcacctgaggatgatggaacagcaggctgaccacgaccacctagcgatacaggatctgcatgatttgctcacagagagggagaaagaattgctcgacttggacgctgaacttgcacactgcaggaggctcctgcagaacgacgatccgttcaatggcgacagatttgatggcactgattatacaacgaacaacaacacggattttgtggggagcgccatgtcccattttgaagacgacaaggcatacattttggaatccttgagcagactggaggaaaatcttggcatttccacaatcagacttgcttctggtgacgccagaaattgtcaagaagacatactgtttgaagatcaggcaagagctgatgcatcgccttccagctgtgacgagtcgagtggtgtagcaagccttaaaattcagatttctctgttgaatataagactgagggcacttgaagaggatcaggagttcctcaatcaggttctcctttgtaacggcaaacctatttgcagtcatctagatagcaggctgctttcagacgaagaagaacaggagctgcagatccttcctgtgccttctgacatacacgtctgcatacatggatatgatcaccgtcatcttcgtagcaatgctcttctctggggacttcgtatcagtctgctgtgcagttgggttcttcaccctatggactttgtgctgcctgcaatggcacttatcaagacaaacgatgactgataacctagggttgcagtgtgctgtgaagatgctccgctctgctgtcgcaatcttcttcttggtcatagcaccaagttaccttgtgcgacatagcaacaaagtgtaccgatgcaacctcttgcaactgcaggttctcatcagacaatgcgcccttaagctcatcagcgtcaactaggacacaccacgaagctcatcaacaccaaggatgaaatcctcatgtctagtttgaaaacataaggggttgctcggccaccccattaaccaccgcctaagtccaggatgactccaattcaagtgggggatgatgaggacatcactcgcatacaaacaatgcatgaaccgataacacgagcacgtgcttaaaagctgaatctccag

SEQ ID NO: 20866 - DNA, 206 bp, Zea Mays
ggagaagaatgagggaacccccaagtcgtgagaggtcaactgatggctcagcgaaggatcaccaaccggaacaactcgcaacgaatcagcaggaaccaattcagtgtcatcagcagaacctagaactctgtcatcgggtgcgctggcctctaaagcgactccttgaccgaaggcttgggctatcgccatgcaaccagagtgtggag

SEQ ID NO: 20867 - DNA, 1715 bp, Zea Mays
cttgacttctaccatatattaggcatcacgacattggtgggtggtggaaccggaccagcacatggaacttgtgccacaacttgcactccagcaccatctcaattgaaattaatgttgcagtccactgatcaattgccaattaacatgggattcacaggcaagggaaatacttcaaaacctgaaggattggctgaaatcattaaagctggagcaatgggtttgaagctgcatgaagattggggaactaccccatccgcgatagataattgtttatctgttgcagaagattttgatattcaggtcaatatacacacagataccttaaatgaatcaggctgcgtggagcatacaatcgcagcttttaaaggtagagccatacatacatatcacagtgaaggtgctggtggcggtcatgctccagacatcatcaaagtttgtggggtaaaaaatgtgttgccctcttcaacaaatcctacccggccatttacttcgaacactgtagacgagcaccttgatatgctgatggtttgtcaccaccttgataaaaacattccagaagatgtagcatttgccgagtctagaattcgagctgaaacaattgctgctgaggacatattgcatgacatgggagccataagtattatatcatctgattcacaggccatggggcgcgttggagaggtgataacacgaacatggcaaactgcaaacaagatgaaggtacaaagaggtagtttacctggatctggtgacgctaatgccgccccggacagtgacaacctccgtataagaagatacatagcaaaatacacaataaatccagcaatagtgaatgggttttcagactttgttggttctgttgaggtgggaaaattagctgaccttgttctttggaaaccatctttcttcggcgctaaaccagaactggttgtaaagggaggtgcaattgcatgggctaacatgggtgatcccaatgctagcattccaacacctgaacctgttgtgatgcgacctatgtttggtgcatttggaaaggctggaagttccaattcaattgcatttgtgagcaaggctgctaaagaagctggtgtcgcaacggagtacagactagaaaagagggtggaagctgtaggccgtgttcgaggcctgacaaagcttgacatgaagctcaacgacgccctcccgaaaatagaggtcgacccggagacctacacagtgaccgctgatggagaggttttgacatgccaaccagcacccacactgccactgtctcggaattacttcctgttctagaaagccactgcatcagcaaaccaccaccactactcacgccctatgcatgcacatcgtcatatacgagtataaaagatgcaagttcaattctgtacgctaccctctttttaataatatggccaatgagcaaattctttggcagtagaacacttttgccctctgctatctgcagatgctcgcatatttgtgcggaataaaacttggaacggtgtagatttctgttccctgctccaaatgtggctatacatactgttgtatttgccgagttgttatcttctcccatgttgtcaaggttgccacgtatattattcagagtcttcgctccattggtttcaagctgatgctcagaggagtacacgctctcgactacactctcgcccctattgcttcggtgcacaacctgcaggcagcctataaccata

SEQ ID NO: 20868 - DNA, 2044 bp, Zea Mays
gtcaccgtcagcgcggaaacgaagcaagggcaaacgagccgttctctcccccgcgccgccgacgcaagcagccgccacggagatggaggccgaggcgtccgtccccgccacggactacgtctacgacgcgctcccgggcctgcacctggccttctcaccggaggagacgctcgatgacgccgccgcggggcaggacgaggacgatgcgaccgcgacatacgccgtcttccgcaacgagataacggaggctggagatgtgctcgcggacatccctgctgcggacttcttctcactcgacgtctccacctctgcctccgtcgagcccgagcccgagcccgagccgccatccccggcgcccacagctgccgcggcaacgccctctatctcccgtgctttggaggaccagccgccgcagggctcggagcgcgcgtggttcaggggagggaggcggttcaggagccccatgcttcagctacacaaggagatcctggacttctgtgattttatctcaccttctactgaagagcaatcttcacgagcagctgctgtgcaagatgtctctgatgttgtcaaacatatatggccacagtgcaaggtggaagtttttggatctttcaggacaggtctctatctaccaacaagtgatatagatgtaatagcaaaggcacgtgtgccaattgtgaagtttgtggaaagaaagagtggaatagcttttgacatcagctttgatatagatggtggcccacaggcagcagatttcatcaaggatgctgtgaagaagttgcctgctttaagacctttatgtatgattctgaaagtttttctgcatcagagagagctcaacgaggtctataccggtggaattggatcatatgctcttcttacgatgttgattacacatttacagttggtctggggaggaaaagatattctcgggtatcatcggtccaaggagcacaatctgggaattcttttggtcaggttttttgatttttatggacgcaagttgaacaactgggatgtcggagtatcatgcaattcttcaaggacctttttcttgaagagtgataaagactttatgaatcatgaccggccacatcttttagcgattcaggatcctatggcaccagataatgatatcggaaagaattcctttaactactttaaggtgaaatcagcattttccaaggcgtactctgtgttaactgatgcaaacttgtttattagtttgggacataataggagcattctgggtaccattgtgagaccagattcagttctccttgaccggaaaggctggaacaatgaagatatgttagcggaaccctgggagccgatcacccaacagtttgacaccgagaatgatgcagtatacaattggcatgtgatagacgaggatgaaccattgcccagaaatagtcaatccacatccgaggacactagttcgtcaccatctaaaaaacggaagtccccaaaatcaagacggaaatcgcgaaagaagtcgaaggctactgcctcaggcagtagtgatgttgcaaatgggttcagaaaggatagatcatccaagcgggaagcgggaagcagcaaacggaggaaagggccaaaggagtacgacagattcacgaatacactcccaaagtacacacatgttagcaagtggtaacttatagcatttatagtctggtcgcaaaggtccagcaatttgacagtgagaagagtatcatgtcacattatggcatgcgatgtgaatgacggaagtcatcagcagcaccagaagcgccatcgcatggtttgcttgttggtctgtttaattgctgtactttacgtaacagagatcacactagattaaatgatgttttggttattttatttatgctgcagcagttttggcgactagcttgtattctttttgtaacggtatgggttggtgacgatgagattatgtacgttcaaacatatttaattgatggtctgatggccttaatcactgaacaatgtgttcaaaacattatttttcaatcaaaaatgtagaactctgaaaaat

SEQ ID NO: 20869 - DNA, 1742 bp, Zea Mays
gaggcggcggaatgtcgagcatgcttctctccggctgctcaggatctttgcttcagttagcacttcttcatcgactagatggctattcagtgcatgcagatagtgatccagaggctgttcttcttcgccttggatatgtgaagcctgaagttatcagctggacgccaaggataattgttttccataattttcttagttcagaggagtgtgattacctaatggcaattgctagaccaagactccaaatatccactgtagtggatgttgcaacaggaaagggtgtaaaaagtgatgttcggacgagttctggtatgtttgtgaattctgaagaaagaaaatctccagtcgttcaggctatagagaagcgaatatctgtgttctctcaaatacctaaagaaaatggggagctcattcaagtattgaggtatgaagctagtcagtattatagaccacatcatgattacttctctgacacttttaaccttaagcgcggagggcagcgtgttgctacaatgcttatgtatttgacagatggcgttgtaggtggtgaaactcactttccgcaggcaggagatggagagtgcagctgtggaggaaacgtggtcaaaggattgtgtgttaagccaaacaaaggggacgctgttctcttctggagcatgggattggatggtaacacagacccaaacagtatccacagcgggtgccctgttctgaaaggagagaaatggtccgcgacgaaatggatgaggcagaagatgactttctgattagagctggtttggtgggtacagggagagttggtcccactccaggggtaacacctgcaagatgtctcattatagcaatgcatacagcaacacatggatttcgcagggtcagacctgtgcaatcgctgttaacgcttcgtcgttcaatcacagggttggcgaggtctttgatactgcccttcgattgccctttccactctcgactgtttggattccagagcatagacgttttccggcgcttgggttcgacagctaacacctgggattcctcacatgggctagtttggaacccgatttctattttctcaatgaaatttagtttattttctcttgagaaaatataaatcacttaaaaatagagtttctgaaaatagaagaaaattggaaaaaaaatccactcctactgggatttgcaaacttaacatcgtcatcgcaggcttcacaaaatcatcatccactggatggagtcttggcatcccatctcattccacaaattttcattaacccctcacaaggtatcgaggtcagagccaagctcggacgaggcgaaagtcttcccgaggatggttgagtccttcctgacgtgtgccacagttaacagagtggtcgtctgcggggttcgcggtggtgcaggtagccgaggcctagctcgagcaaggtggaggcggtgcccgagggcaagctcagcgtcgggcgaggcggagatggtgcccaagggcaagcccagcgttgggcgaggcggagttttgcgcctgaggcccggtctgctcttccgtcgtgtttgatgttccatccaggtatggcaggcggcgtgtacgcatagtggcgcatgcgtaatcatgatgttgcgcctgaacgcgactgctgtcttgttgttgttgttgtgctcatgtgtcactgtgtagggtaggtatgcacattaaatgcgagtgttcctcgctggccttcaggtgtgttttgtcctccttgtccgag

SEQ ID NO: 20870 - DNA, 2908 bp, Zea Mays
ctggacgcgctgtggcctgccctgccaacctcacactggccgctgctgagcagagctgacttttgctccgcttgccttgccccaaacctcatattcccctcctccttgctgtagctatagctgtagctttcaccccactccctccacggcaccgcgcctccctcccccccttccccaaatcctcctcccctccccaattgggccaatagcccgctccgcttccagtcgcggcgtcggtcggggaagaagcttcgctcccgtgccgcagatcgggagaggagctccccgctcccgcctcgtcgtccgcttccccgccgccggtctctccgggaggcgtctccgtcgccggcgatgagctgcttcgtctgcttcgggtcggcggcgcaggacgaggagcctaggaagcccgctgccgcgggcgccggcaaggacgccgcgccggatcgcgcagtggctcgcgtcggatcagataaatcaagatcacagggtggaccagactctaagaaggatctaattatccataaggatgggaatagtcaaaatattgcagcacagactttcacttttcgtgagctcgctgcagccactaagaacttcaggcaagattgccttttaggagagggaggttttggtcgtgtatataaaggacgcttggagaatgggcaggctgttgctgtgaaacaacttgatcgtaatggtctccaaggaaacagggaatttctggttgaggttctcatgctcagtctcttacatcacactaacctggtcaatctaattggctactgtgctgatggtgaccaacgccttcttgtttatgagtttatgccattggggtcactagaagatcatctgcatggtctgtgtatctcctctttgtcatatactcttccgaatattccatgagtgcctgtagcaatgtaatgaagcattgtcttattctataggaatgacatgcttcatctgattgttaaatctattttatgtctagcgtgactgtaactgtgtgcttaggttgatagatcataattcttgattcagcttaaactgatcagcatgcgtgttgttctactattggatgtaccttataggtagggtgctaatttttttgtatcgtgtgcctggccatgtaatttttcatatgctatctatacttaaaacaaaacaaagttgaccagagggagagatacccccccctgattttgtttataagaagtttgtgccacccttccaacctgaactggtgattagaggtttcttcaacctccagacttcaattgctaagtagtgtaactcaggaggagttggcttttcaattttcataggataaaatgaatctatagatgtttgcctggggcttcgtttgtatttagccagacctttggatgaagcttgctgtatatggacaatttcttctgactagaatctgccaccagataaagagcctcttgattggaacacacggatgaagatagctgcaggtgcagctaagggcttagaacaccttcatgacaaggcgagtcctcctgtgatttaccgggattttaagtcatcaaacattcttcttggagaaggatttcatccgaagctatcggactttggccttgcaaaacttggtccggttggtgacaagacccatgtttcaacacgtgtgatgggtacatatggctactgtgccccagaatatgcaatgactgggcagctgacggttaaatccgatgtgtatagctttggtgttgtgttccttgaacttatcacggggcgtaaagcaattgacaatactaagacccaaggggagcaaaatttagtggcatgggctcgtccactgttcaaggaccgaaggaaattccctaaaatggctgatccaatgcttcagggccgcttccctatgaggggtctataccaggccttagccgttgctgccatgtgcttgcaagagcaagctgctacacgtcctcacatcggggatgtcgtcactgctctctcatatcttgcttctcaggcatatgacccaaatgcccctgttcaacacgtccggagcaattcatccacccccagggccagaaaccctgctgggtggaacggcgaccagcgcagcgtgcgctcgcctaaccatcattctccagacccgcggcgcagagacgctgcgggggcatccaagtatggagcagaggttagcaggactagctctaccagcgactctggccggcgatcaggcctggatgacatggacctgaccgggtcgcaagtgggaagcccagcgcagaccggaagaagaagagaagctccaaggggcaccgacagacagcgtgctgtcgcagaggccaggacatggggggagaattcaagggagcgaacaaatggccatggcagcttcgacagcacccatgagtgaagccgtcaggttctgttccagtcatcattccagaacccccaccatgggttgagtccactcattcatcagcaccagtcagatccgatcttgggacatggcgtcggtccaagtgtctgtgaataaggcttttcttgccctcctgtggcgaatgcaattctcctggcgcccattccttgtcagtgaagaaagaggaggggcgcggagtcacattggcgagtgttttgttttttttggcggctaaatgctgagtatgttcagctgcatgtgtcctttttgtgtatgtgtacgtgtaagacgtgtaatagcaaccgtgtcaggtttggctacctgagaggcctttgaagcttctgctgctgcttccttccccttgggaattgggagttcagagttgaaatgtaggataggcgatgttgttgagtacatcaactgtttttacccttccatgttgtacggcgacgcttccctgaacaatatgaccatgatgtgcccccctgtccgccaatggccaatccgtgt

SEQ ID NO: 20871 - DNA, 1784 bp, Zea Mays
ggaaatactcctactcctcgtgctgctgctagcctagcctagcctgctactcgaacttctcgtctcgtctcctcctcgctcaggcaggggaacccaacggaactcctcctccccagcagacagccgagagtacataggagacgagaagatcccatccactaccgcccggtcgcggtcctccgccctccgccctccccgccgctcgttcggtgcaggtcgccctcgcgtggatcggaatgggcgcctgcgtgtccaaggccgcctgctgctgccgccagccgcacaacggggttaccaacgagaggactgatactgtgacggaggacgaggaggcatacgacctgcctgcgttccaggagttcaccttcgagcagttgcggctagctacatcggggtttgcggtggagaacatcgtgtccgagcaaggtgagaaggcgcccaatgtggtatacaaggggaagctcgatgcccagcgccgcattgctgtcaagcgctttaaccgctctgcctggcccgacccgcgccagttcctggaagaagctagatcagttggcctgctccgaagcaaaaggttggcaaatttgcttggttgttgctgtgaaggcgatgagagattgcttgttgcagaatacatgcccaatgatacgctagcgaagcaccttttccattgggagtcacaatcaatgaaatggaccatgagattaagggttgttctctgtctcgctgaggctttagaatattgcactaacaggggccgtgctctctaccatgatctcaatgcctatagagctctgtttgatgatgactgtaaccctagactttcctgtttcggtctcatgaagaacagccgggatggaaaaagttacagtaccaatttggcatttacgcctccagaatacatgaggactggacgtattactcctgaaagtgtcatatacagctttggaaccttgctgattgatgttcttagtgggaagcatattcctccgagccatgcccttgacctgattcgggaccgaaacttcaatatgctcttagactcatgtttagagggtcaattttcaaatgaggaaggaacagaaatggtccgattagcttcaagatgccttcactatgaaccccgtgagcgacctaatgtcagatcacttgtgcaagtattgactcctctacagagggatgtcgagactccatcttatgtgctcatgggcattccgcgtggtggggcatcttctaccgaaccactgaatctttcccctcttgccgaagcttgttccagaaaggatctgacagcaatacatgaaattctagaaaagacaggctacaaggatgatgagggaactgcaaatgagctctcttttcagatgtggacgaatcagatgcaagatacgttgaactcaaaaaagaagggtgacaatgcttttcgacagaaggattttactgctgccattgattgctattcccagtttattgaagttggtacaatggtttccccaaccatttatgctcgacgttgcctgtcatatctgatgaatggcatgccacaggaggcattgaatgatgcaatgaatgctttggtaatatctcccacatggtcaacagcattctatcttcaggcagcagcactattatcacaaggcatggagaatgaagcacaagaagcactcaaggatggttgtaacttagagcaaagtagcagcggtggacattgattgtgaacatatttgtagtccccaaaatgcacataatgtcagagaaagtatttaacaacatgggatcaaatggag

SEQ ID NO: 20872 - DNA, 1472 bp, Zea Mays
cgctcctcccactcctctcttgcccgcccgtccccggtccccgtcgtccctctccctagtccctcccctcgtccgtcgtccacctctgccactacgagctcgtccccgtcttgtttcgtctcctctcgtctcgtcacgcgagatatttctacgggacgggacccgcgttgcttccccgcctcgccgtcccgcgcgcgccagccgggcccggggaagccatgaactgcctccagaacctgctcaacgttgacatatagacatgaactcgggatgaactacaatttcatacgcccagacttgattgtaggatcctgcttacagagtccacttgatgttgataagcttcggaagattggtgtcaaaactgtattctgcttgcagcaagattcagatcttgaatattttggagtcgacatccgtgccattcaagattattctctacaattcaaagatattgtgcactgccgtgcggaaattagggattttgatgcttttgatttgcgattgaggcttcctgctgtggttagcaaattgcacaaacttatcaactgtaatggtggtgtaacatatatacattgtactgctggacttggaagagctcctgctgttgcattggcttatatgttctggattcttgggtacagtctcaatgaaggacatcggctgctacagagtaaaagggcttgctttccgaagttggaagccattaagttggcaactgctgacattctgacaggattatccaaaaacacaatcactttgaagtgggaagctgatggttcttcctctgttgaaatttctgggctcgacattggctggggtcagagaattcctttgacatatgatgaggagaaaggagcttggtttcttgagaaagagttgcctgaaggacggtatgaatacaaatacgtagtggatggcaaatggctatgcaacgagcatgagctgataacgaaaccgaatgctgacggccacgtgaacaactatgttcaggtctccagagacggcacgagcgatgaagagaaggagcttagggagcggttgactggtccggaccctgatctcacggaccaggagaggctgatgatcagagagtacttggaacagtacgcggatgccgccgagcgctaggagaagaatgatgatgactgaggaagagaagagacacaccatgagacgacggaccgaagccgacctgaccgcaccttcctttacggagaggtcgggcttcccctctcttgtcaatcaaatactcgtagcttaaccgtgcaaaagggcacgttctgctcgcatacttggagaatgatgatgaaggagcaaactgtacgtattgttgaacagcagctgtgcagaaataacaaaggtagtagcgtaaaactactgtactgaccataatgttactactgtatgctccttcttggctatgaataataataataataataaaagagtaaataaacctcatcgatccc

SEQ ID NO: 20873 - DNA, 1327 bp, Zea Mays
attttatcccaggagaggtcgctgcgggcgagctggctcgctcacccacccttgcccgccgtttacggtttagccgcgtgctctctctgtctccctccctccctgtcggggacaattcggctaccgctgccgccctacgccaggttcccagctcttcgccaggcccttctccggcgacgagcacccaccaggccaccagttgacacttaatactacctgaatctaatgcttatcaatatgcctaatatttgctggcggagctttactttgtgcaacacatattctccatctaatcaactacaaggaggttgtactcaaagaatggatttatggattacttcttgctcacaagcagcgagacatcatgcaaggataggttcagttgattttcctgttaagaagaacgtgaagtcatcccaagtgcaaaacgcgacatgttttgttggtttagtgcggcagttgcagtgcagacggtcagcaaaaagccatatcctgaatgtaaagtctgatacagtagcccaccaaaaggtttctggtgtaagctggagtttggaaaatatgccacgaagaataggatgtgtagtctctggactaggttttgcagcgtatgggctggcgagtgctgagggtcctgttaacaacaacatagatagcactgaatctgccatgtcatcaacaaatttatctcatgggaaagaagttcacacagactattctgttactggcattcctggtgatggaagatgcctgtttcgttctgtggttcacggtgcctacattaggtcaaggaagcccatacctaatgaggatcatcaaagaaggctagctgatgagttgagaacaaaggtcgcagatgaatttatcaagaggcgggcagagactgaatggtttgttgagggggacttcgacacgtacgtatctcagattaggaagccacatgtctggggaggcgagccagagctgttgatggcttcacatgttcttcagatgccaatcaccgtctacatgcacgataaagccgctggtggtctaatagcgatcgcggaatacggccaagagcacgggacggaagctcccgtccaagttctttaccatggctatggccattatgatgcgctgcagataccaggagagggtggtccgaggtcaagactgtaacgttagtggctctgaatctaaatgaaccgaatgtaagtaaaatacaaaagaagaaggaaggccgaattgaaagaatcgaaagtggaagaactggacgtgccttcaaacaattagaagacaatcctagcagatgcagaagcccccgttgctatagggaaaaactcctcat

SEQ ID NO: 20874 - DNA, 852 bp, Zea Mays
aaattctacatgggcctggccgtcttcagttcttcacccttcaccaccagaagcttctaggaagtaggaactcgaacggccggcagcattccgacgagacgagtcacgaatccggatagagcgccgccccccaacctgctgcgccgaccctgctcgccgccggcccgagtagagagagagagagaggagagaaggaagcatgacgacaatccgtcggttctgctgcgacgacctcctccgcttcgcctccgtcaacctggaccacctcaccgagacgtcatgggtaaagttgaaggccaaggtgaatcttggcatggacatgtcacagcggtttctgttgcctctgaatttcgtaggcagaagttagccaaaaaacttatgaacttactggaggaaatcagtgataagatggataaggcctacttcgtggatctctttgtaagggcatctaacatgccagcgataaggatgtatgaaaagcttggttatgtggtttatcgaagggtgctccggtactactcaggggaagaagatggcctcgatatgagaaaagcattatcacaagatgttgagaagaagtccatcataccactcaagaggccaattacgcctgatgaacttgaatatgattgatgttagctacctggtgcttacgttggatgctccggtggggaatttgacaggctttgaaaatctggtagtgagtgtattgttgtcgtttttacgcctgctaggggacaggttttgatggtgaattctgcagtttttgtatttgagaatagcaagaactatgacttggcatggaatcaaattgctttgttgtgatgtcgaattttcaaaaaaaaaaaaaaa

SEQ ID NO: 20875 - DNA, 2561 bp, Zea Mays
caggctccgtggcttttgcctgtcctgtggcagcgaatcggagagcggaggggaggggaaagcgcagcaacgccggcgagcgagcgggccgttcgaggatcgcaatgtgagcacgagcagggacacacaagatgcttcatcctagctgggtcggtgtctcggcacacgtctcggagtattggtctgtgataatcgccactgttgttttcgcatttgttggcgcggtgacaatttactatacagtcaatcagttgaacaagaacatcagcttgagcctgataagggctatcaaggccagggccaagaggtacaagaaatcgaaggacaaggtgcccgctgcatcccacatctggaggaaagaagttgtctcccgcagcaaaggcctgaaatgctgcgtgtgcttgaagtccgtttcacctcctcagtactctggggggaccatccatcagtgcgatatctgcggggccgctgcgcatccgagctgctcggggaatgcacacaaggattgcaagtgtgtatctatggctggtttgggccatgtgcttcaccagtgggctgtacaatggattgacagcgcggatcactctgaagaagactctttctgttgccactgtgatgaatcttgcaatggagctttccttgcaggctcaccagtttggtactgtatgtggtgtcagcgactggtgcatgttgattgtcacagcagcttggccaaggaaactggtgatatctgtgacttgggaccattgaaacgattgatattatcacctctttgtgttaaggagcttcattggacaggtgctgggattttgagttctatcacaaatggggctaatgaattggcttccagtgtccgagagacaattcggattcgtagtaaaaggtacaaaaggggtagcgcttctgctgattcagatagctctggggctattgagctaccatctgatgctgaaggagattcacaagaagtaaacagcaaagcaaaggtgagggatgatcatgccaattgcaaactcaatgaggtacaccaaagctctgaatcagagaaagataagcaacttgtaccagataacgcagcaacaaccaatatgtcagatgtacaacgtgaaaattctcatgtacagaacaatcagaagtacgaaattatcaatgtgccttctgattctaggccacttctagttttcattaacaagagaagtggggcacagagtggtgattcactgagacagcgtctgcaaattcttcttaatcctgtgcaggttttcgagttgagcaaacagcaaggtccagatgttggtttagctttatttcggaaggtaacccatttcagagttcttgtatgtggtggagatggcactgctggttgggttttggatgccattgagaaacagaagtttgaaaccccgcctcctgtagccatccttccagctggtactggtaatgatcttgcgagggttttatgttggggtggtggccttggtgttattgagaagcggggaggtctattctcagttttgcaagatgtagagcatgctgcagtcactgttcttgacagatggaagatcacaataaaggacaaccaagggaaacttatgagaccaccaaaatttatgaacaactactttggggttggctgtgatgcaaaggttgccttagatatacacaacctgagggaagagaaccctgaacggttttatagccagtttatgaacaaggtgctgtatgcaagagagggagcaaagaacataatggataacacatttgattgttttccttgggatgtcaagcttgagatagatggatccaaaattgatattcctcaggactccgaaggtatccttgttgccaatatcaggagttacatgggaggggttgacctttggaagaacgaggatgatgtctctgacacttacctccctcagtccatgcatgacaagaagctggaagttgttagcttcacaggaatgctgcatctcgggaaactgcaggttgggctttctcgtgcaaaaagattagcccaaggccatcatataaaggttgaagtcagtactacaatgccgatccaagttgatggagagccatggtcccaggagccgggaaccatagaggtttctcatcatagccaggccttcatgcttaagagagtctccgaagaaccgctgggtcatgccgcttcggtaatggccgacatcttggaaaacgctgagagcagtggcattatctcagccttgcagaagaggactttgctccaggagatagcgtctaggcttttgtaggacacagttctaacgccagtagttgtgtgtagctcaccctatagctctctcacgtcttcagcagccagaggcttgcttctgggctactagagaattgcgcctggtcgttgtacatacaccatcatggtattttaccctgattcggattgtgttgtgtatgattctgtaaaattttgtacaccctattgggtgagcacacactgacactgttgcggtcggaaattctggtaccagttgtctggattgctgaaacttagacaacagtctttctgctttgaaaataaa

SEQ ID NO: 20876 - DNA, 1401 bp, Zea Mays
gttagagcttcactcccatcttacatatacatggatctcgtctcgtgtgaactgctgcggatcagtcgggggccataagacccttgcgcgctgcgcagcggtgggcggtggccggtggcaatggcgcccacgacttgcctccggatccccttcctccccgcccgaggccgctccgctaacgtcaacgcccctccgtcctggctcccccgccgcctttctctcaaatccagcgcgaccaacgggccgttcactagcgcggacgtcatgggggcggattggaaggggctcaaggttgcttaccagggttgcgctggggcgtacagcgaagcggcagcaaagaaggcatacccaaattgtgaggctgtgccctgtgagcactttgacactgcatttcaggctgttcaaaactgggtagttgatagggcagtgctgccacttgagaattcattgggaggtagcatacatcggaactatgatctattggttcagcatagtttgcacattgtcggagaagttcgccttgaggttcaccattgcttgttagccaatcctggtgtgaagattgaaaatctgaaaagtgttatgagccatccccaggctcttgcgcaatgtgaacacacattaacaggactaggaattgaacatagagaggctgttgacgacactgctggtgcagcaaagattgttgcagaacatatggtccaggatactggtgctattgctagttcattggctgctaaactctatggattggatgttcttgctgagaatattcaggatggcaaaaataatgtcacccgttttatgatgctagctcgaaaacccaacattcttcgcaatgatagaccatttaagacaagcatagtcttttcactagaagaaggacatggacaactctttagggcgcttggtgtattcgcacagaggaaaatcaacctcacaaagatcgaaagtcgtccacacaaggagaggcctcttcgagtatctgatgactgttcctcactcttaaagaattttgattacctcttttacgttgaccttgaagcatcaatggctgatccaaagattcagaatgctcttggaaatctgaaggagtttgcaacctttttaagagtcctcggaagctatcctacaaatgtgaatgaaccttagaaaacactgcagattacatgatggattagcaggaatggacgaaatggtttgagttggttctctgagcaggttgacaagtgaggacctctatgaagctgatgctaacatttacagagcaaaaggatctatattagagcagtatagaagggtggatgtgaggcttacattggttgtgagcttgaaagggaatttgttgtttggctggtcaaattgggctgttcaagttgccgagtacctgactacagctta

SEQ ID NO: 20877 - DNA, 75 bp, Zea Mays
tttggaagctagtggaactttgtaaaggcctcatagtgttaccctgcctcgtctcctcggtagagatgaaaggga

SEQ ID NO: 20878 - DNA, 1108 bp, Zea Mays
gcatcctgtgttgcttcatgcacacgtcagtcagagacaaatgatgtgccatgtgccgtatctgggaaagcagcgacaaaatgtgatggatgtgtactgtacctacagaagttaggccaacagatttgttagatgtcttatggattctcagtgagaggagtaaacaacactttaatccaaagtatcgtctgaaagtgcagtttgtgaacaggttataaaagttgcaacatcactgataaatgccactgaaattccacttaacccgcttctgcatttcattgccacaattcctcgagagttctctgattatattggaccattgagagtagtagttcaaaaatggtttgttcagaaggaagaatgttctcctggtgacactttgttgagtaagctgattgatttctctgccaccttcgtaagtcaaaaacggaatgaaggttcgaatgtttttgatgacgaggatgtggatgcatgggaagctgaagcaaggtgggctagaacccttcttgtaacctcggaggaggaacatttgaaacgaatcttcaggtttttggaggcatatggctacaagctctctgagcaatgtcccagtggagatttcatacccataaaaaattttatcattgttttaagcttcattgaggaacttgaggtgagacagagagagcttgtttgccggagtataatacaatcttaagaggttcagatacagtaaatttattggtgctcgatgatctcaacaaaatgttcacagaatcacttttgctaattttggaaaatatggtggccttcagcaaactgtcttgccccgtattctggttttgagatgtggacgaacaggatttacccccaaagcttggaggaccaagccagcgtcgtttggctacctccattacttcttcagtattacagggtgtatgttccgtccttcttggagtggtggaagagggctgcagagacagtgcagggaatggtcaagaaagctggattctctcgtcattttgggagcctggaagatttggaaccactacaatagatatgtgtttgatggagagaccccagcctttctcgaaccctgaagcactctgaagcagactgatgatgagag

SEQ ID NO: 20879 - DNA, 5903 bp, Zea Mays
ggtattccatgtaatgccataatttgtgatggcatttttcagcaactccgggagcaaggccgattcagaagggtacaacttgaatgaaaaggccgatgatgatggcatacacgagtcaatccgggatgggaatgatggcctgaactctaggcagtggaacttaaatgagaaagcagaggatgcttaccacagcgaagcagagcaatatgagtctggccagtcaggtttgtacgcatcaaggcagcatgttcagagaggaggcagatcgtctggtggtccatggggcacaaattttctgaaggattccaggtccaaacagacggccaaggaagttgcatcaaatagcggtagaggaatggatgctgctaactcgcatgatgacatggatggtagcagagaggatgatgaactgaatagagcaaatggtgaggtgcctgctgaggaaatgctctcagatgactattacgagcaggacggagaggatcagattgaatcgttgcatcgtggcgggatgaagcagtcaagctgttccacttctggtggagcagcaaagtctggctcacgacaaatgaagaagatgtcaaagtacaatgcttatgataacgatgagtataatgatgagaatgatgatgacagcgatgcagatgaagatgatcctgctgacatggattttgagccagacggcgaaacagacaaggctactgataaggataagtttatggatagtgagaattctgacggcgacgacgatgatgaccttgaactctcagatgatgaagatgattttgttgagaatcggaggcaacctaaacgacttaagattgtagcaactaaaacttccaagggaggacagttgcccatgccagttcaaccaaaacgaggggtgtctcacagtgatgaagaatatttttcaggaaaagactcagatgttcccagcgattcggatttcaaacacataccgaaaaaacctgacaggttgcatcagaaacctgtgggccgcagtgatgttgccccaatcagttctcataatgagcttagaacttctggaaggaggaggacggtgaaaaagatctcatatgctgaaagcgaagaaagtgatgatagtgaggagaagtcaaataagcgacaaaaggaggaaccggaagaggaggatggagaaacaattgaaaaagttctgtggcatcaacccaagggtgtagcagaagaggcaataaggaatcaccggtcagctcaacctactgttgccagcctaacatcggactttgaccaacaatgggatgaattagagttctatataaaatggaaaggccagtcttacctgcattgtcaatggaagatactatcagagctccaaagtgttagtggattcaagaaggtaataaactacacgaaaagagtttctgaggaacagaggtacaagagggcactatcacgtgaagaggttgaggttgaacggatatttgctgatagggtcagcaaagctgatggagatgatctggttcccgaatatttagtaaaatggcaaggacttccttatgcagaatctacctgggaaaaagatacagatattgattttgctcaagatgcgattgatgaatataaggctcgtgaagctgcctcagctatacttgggaaaacagtagatttccaacgaaagaaaagcaaagctagtttgaggaggcttgatggtcagccagaatggctaaaagctggcaagcttcgtgattatcagctggaaggactaaactttctcgtcaatgggtggagaaacgatactaatgttatacttgctgatgaaatgggtctgggaaaaactatccaatctgtatccatgcttggcttccttcataatgctcaagaaatcaatggcccatttcttgtagtcgtgccactgtcaacattgtcgaactgggcaaaggaatttcggaagtggctgcccaacatgaatgttgttgtttatgttggcaaccgtgccagcagagagatgtgccagcagcatgaatttttttcagacaaaaaaggtgggcgtcatgtaaaattccacacgttgataactacgtacgaggtgattctcaaagacaaagcggttctttccaagataaaatggaactatcttatggttgatgaagcccaccggttgaaaaattgtgaagcgtcactgtatacaacccttttggaattcagcactaagaacaagctgcttatcacgggaacacctttgcagaacagtgtggaagagctttgggcattacttcatttccttgatccagtcaaattcaacagcaaggatagttttgttgagagatacaaaaatttgagttccttcaacgaaactgagctcgcgaatctgcataaggaattgaggcctcatattctacggcgggttataaaagatgttgagaagtctttacctcctaaaatcgagaggattctacgtgttgagatgtcacccctccagaaacagtactacaagtggattttagagcggaattttcagaatctgaataaaggtgttcgtgggaatcaggtatcacttcttaacattgttgttgaattgaagaaatgctgcaaccatccattcttgtttgaaagtgccgatcatggttatggtggagatagcatcggtgatcggaataaagttgaacgtattgttatgagtagtgggaaacttgtcttgttggacaaactattggtgagactgcgggagactaaccatcgtgtgcttatattctcacagatggttaagatgttggacatccttgcagaatacctctctcttcggggatttcagtttcagaggcttgatggtagtacaagagcagatcttcgtcatcaagccatggaacactttaatgctcctggaagtgatgatttctgttttcttttatccacacgtgccggaggacttggtattaatctagcaactgcagatacagtgataatttttgattcagattggaatccacaaaatgatttgcaggccatgagtagggcacataggattggccaacaggagacagttaatatctaccgcttcgtcacatgcaaaagtgttgaggaggatattttggaacgcgcaaagaaaaagatggttcttgatcacttggtcattcagaagctaaacgctgagggcaggcttgagaagaaagaatccaaaaaaggtggccccatatttgacaagaacgaactttcagctatcttgaggttcggtgcagaggaattgttcaaggaagacaagactgatgaagagaccaagaggaaccttgaaagtttggacattgatgaaattcttgagagagctgagaaagtcgagacaaagggtggtgaaggggaggaaggaaatgagcttcttagcgctttcaaggtcgcaaacttttccagtgtcgaagatgatgcaacgttctggagtaggttaatacagccagatcctgcagatatagttcaggaaactttggcacctcgtgctgcacgaaataaaaagagctatattgaagatcctcagcttgacaaaaataataacaggaaaagacgggcagttgaaacacaagaaaagccaaggaggctttctggcagaactgtggaaacagttaattcattaccattggttgatggagcagtagctcaagtacgagagtggtcttttggtaatgttccaaagaaggacgcttctcgttttgtacgagcggtcaaaaaatttgggaatgcaacccagattggattaattgtggatgatgttggtggtgtacttgcgaaggtaccgcatgaagcgcagatagaactatttgatttgctggttgatggttgtcaggaagcagttaaggagaatacagacattaagggcacagttttggattttttcggtgtagctgtaaaggcctatgaattgctagctcgtgttgaagagcttcagttcttggcaaagcgaattgcacgttacaaagatccaatcaagcagtaccgcatccagctaccttataaaaagcctcagtggtcagcaagctgtggatggactgaaactgatgacgctagattgatggttggaattcattggtatggctacgggaattgggagaaaataaggttggatccaaagcttggcctgacaacaaaaattgcgccagcaacacttggagaaagggagacatttttaccacgtgctcccaacttggataaccgcgctagtgctctcctgcaaaaggagtatgctaagtttagcggtaagagcttaaaagtcaaaggaaacacccgccagacagtcaataacgacagtaatagtggagttcgatcaatgaggggccggcaaaaggatgtaccagaaaaagatgataataagccgaacaaagatgacattcagaagcgtagggtaatagtggaagctgaagcaagagaagaaggtgaaatttctgaatcggaggcagagaccaggtatcgtcaggacaaagaggagaagtggcttgaatggtgctctgaagttttagatgaggagcaggaaactttgaagcgcctggataggctgcagaatacaagtgtaaacctcccaaaggaaaaggttctttcaaggattcgcaagtatctcctgataattggggacaaaattggagaagttgtccggcaacacagtgaatcttataggcaatcccgcatggtcatgaggttatggaattatgttgccaccttttcaaacatgtctggggagcaactgcatgatctctatatgaaacttagtcaagaccaactggaaggtggagttggcccatctcatggtggcaatttcacatccattcctcccaataagggaggtaactcaaatcaacttcatccttcgagaaaccaaaggccaactaggtctctccagtacaattctgagtctttccataatgagagctctggaagttctgaagcctggaagcgtcgacggagagctgacacagataatcaatttgacacccagcctttgtgtcaacctccaattatgacaaatggaaataggttgcaggaatctagtagttctgcaggtattcttggttggggtccagttgaaattagacggtatggtaatgagaggccaaaacgtgctgttcatcctagtcatttccctactgggcatggacctttgctgtagctgaaggaagtagatgatgcgaacaaccttgttcattttggcataaccgttcccagtgaatttcagcttccatatagttataaatggtggatctccgtaggaattgaaattctttttccaaaacaaaaaggaataaagagcaacctcacctggatcacagttttgaattatatgccttaaaaggtaatgccaggactctagaggcgacttatggaattgttaacagctacactgaatatccttctgacaccatcacagcaacacaaatacatggtggcttgtgaactgccaagaggatcaatcgaggaagttttgcctgttcagttttgtgatctctcaacaatgatctatagttaaatctcaatacataaattatgctttacattgtaatatattgaaatatggttccgttatgctccctccctctcgatgtgttttgtgccgtttttctaccgtgttgatgtaaaagatgaaagaaatgcatgttctcattttgaggcaacaaaaagttgcagccgggagcataatagtgaaatgcgatggaattatcggatacttatcgattccatagtgttttccctgagacaatgtactgaatgaggtacggttataagaaatggtgataattagcttagtaggtgctcagccattctacaagtcatctggtagtccgaagttgcatgaggcctactttcccctggttgccccacttatgctcagtaagtatgcttctagggttgtatgatgatggcccaattgaatttttaatcctgtgtatgaa

SEQ ID NO: 20880 - DNA, 1022 bp, Zea Mays
  misc_feature (1022)..(1022): n is a, c, g, or t
ccatcctgacctccctcgccttggcatctcgcctccttggtcgacggccgcggtcttgttgctcgcctggagcaagtagacccaacagttgtggagattgtggagagatctttggaattctgtctcttacatctagaaaaatcatcatatgtgtgtgatgactttggcttactgaatgaggttgcctgttttgtggaatctgtgttgcttaaaggtaccctcaataaggtatcctcattggaacccagcattataaatgacatcattgagcagtggacatctgtccaagctgaaactgagcgcatgagcccacaagggaaatatttctgctatctaaaaggcttcaactgctcgaaaagtgaagatgaccttaaacagtttcatttggccttattaccagaatacttgcagcgagattatgttattttagagaattcccaatcatgcagtgcagtatctccaaatgccatggtgccattagcacagcattttgcggttgctcacttatgttgtatgccacgccttcttacactggttcagaagctttgccagtctcccgctttggaaatggttgaagatgtaaacattggcttgaggttgtctttcgcccaaaggattttgaaattagtctgtggtctcactattgagtttcctcctgatgcctctgatgccatgatgttatcctcagtagcgagatgtgctgatagtcttccagccttgtttagactgaggttcaatttctctaatcatgacagagtcttttctgtagatggtgttggcactatcttgctgcagatactggaagaatttttacaggtagtgcaaaatattagtgtttgcaacagtgatatctgttgtacagttaaagcatgcattctttcatccatgctggaaatcttcagtcctaatatatggagatatgaaaaatcgggtgcttgcttggtgcctcctttatcttattctcctcacgttgttcaatttgtgctgcaactttttaaagacaccaaacgatggacaagtcn

SEQ ID NO: 20881 - DNA, 1228 bp, Zea Mays
ggatcatgtcttcatttaatctgttcagtcatcgcagaaatacttctaaactcgtttttggaaggggtggagaagagatggatttcttacagcaacagggaatcaaagttgaaattatcccaggaattgcagcagaactaggcattccgctaacccatcgaggtgttgctaccagtgtcagatttttaactggacactccagaaatggtgggacagacccactatatgtagctggaaatgcagccgatcctgacactactttggttgtgtacatgggtttgtcaacacttgcatcacttgcaccaaagttaatgaagcacggcctgccaccagatacccctgctgttgcagtagagcgcgggactacacctcaacaacgaatggtgtttgcgttgttaaaggatcttgtggatgaagtcaagtcagctgatcttgtttctccaactctaataattatcgggaaagtggtatccttgtcaccattttgggttgagtcatctgaacatgatgccctgaaaattgagagctcgtatgcaagtgaagccagatgataatacgttttcatgattttagtgattggacaatacatacttgagtaacgcaatatcccagatatgagcagttccagttgggatccatttaggacatgcgagcacaggttcgacctggtgtacacaacatttcaggaagcatggattctgaatgacggatgatagcttaagcccataacagcctttggggtttgggcagaagcgcacttgggagttgatgagggcatgtctggaggcttcagcttcagtaaatttacggctttcaattcggtgtcttcttcgtcaaagaagactcggtagatgtatggttttcaattcaatagcacctgcaaactcctttctgactggaggtccattcggagtgcagggattttacagaaattagacaaaaaaagttctgttttttggggggaattagaaaaatctctgcttcccaagcgtagataactgtaagatttttgttgtcatctttaaaataattgtattgtttttatgtgttatattcatctttaaaaactcttggtaaaacagagcctgaagaatgaacctttaagctgaattagtgtttggtgtttggttctagagtctatgaacggcgcaactctattccagattctggggatagaatgacttcataactatttttttttgtttcatagtgaggcataacggaacgg

SEQ ID NO: 20882 - DNA, 1440 bp, Zea Mays
cgcggcctgggcgtgcgaccgagactgcgcgaagggagcgatggagaggctggagagctacctgaaggagcacttcgacgtgccgcccaagaacccctctgaggaggcgcagcggcgatggcggtccgccgttggcgcgctcgtcaagaaccgccgccgccgcttccgcatggtgccggacctccaccgccgcagcctggacgaggcccagcggcggtccacccaggtcatggctcgttctttaccgttggacaagcatacccttgtgacgaacttgcgaggtatgtttcgcgaggtggttgctgtgacaggtgacggcacgaatgatgctccagcgttgcatgaagcagatatcggccttgctatgggcatagcaggaacagaggttgccaaggagagtgctgatgtgatagtgcttgatgacaatttcacaactataataaatgtcgcgaggtggggtcgtgcggtttacataaacatccaaaagttcgtgcagttccagctgactgtcaacattgttgctttggtcatcaacttcgtctcagcatgcattacagggagcgctccgctcacagcggtgcaactgttgtgggtgaatatgattatggatacattaggagctctagctctagcaacggagcctccaaacgatgacatgatgaagagaccacctgtcgggcgaggggaaagcttcatcaccaaggtcatgtggagaaatatcattgggcaaagtttgtaccagttggttgtgctcggagccctcatgtttggcggggaacagtttctgaacatcaagggcgcggattccaaatctgttgtcaatactctcatattcaactccttcgtgttctgccaggtgttcaacgaaataaacagcagagaaatggagaagatcaacgtgttccgcggcatggtcaccaactggatcttcatcgcgatcatagccgcgacggtcctgttccaagtggtgatcgtagagctgctcggcacctttgccagcaccgtcccactcgactggcggctttggctgcttagcgtcggcctcggatcggttagcttggtcgtcggtgccgtcctcaagtgcataccagttgccaaatcgaacggagctcctgcgagtcccaacggctacgccccgctccccagcggtcctgacgacatttagctgaagaagaggggatgcatggagaaaagaagttgcatccgatttttgcgtcttgtttggaataagtaatgaaccactggctaggctcagctttagcagattgttctatatatatatatatatatatattgtcctgcaattacacgatcttcctgtttgctgattgttctatatatgaatgaacgcaatgcaaggcaccattatttccacgagccatggccttaaggaaacgaagttcttggccaactctatggtctcattatataccaaatttt

SEQ ID NO: 20883 - DNA, 1323 bp, Zea Mays
caagaacattggataatggtaaatgagaatattgatggttgcaattagttttggtagcagaatgatgtttagattcattaattgcaggtaccagcaccttcttttcttgaatctgtgagaacttggatctttgttttcacaatttattagtgatgcttatgtatgacaagaattaggccatccctctttggtggtgctcgcccccgtgaacaagttctcaaagaacgtggagtggatgttttggccagtgatcttgagcggatttcaccagttggcaggtctaaaggtgaatttgcaaaggtcgagcagaaggttgaagctttgtccattaacccttctcttgaaagagctgatggtttttcagctggtcatagaggcccaaggagtgttgataagaaggattacaggcgggatactgagaaggctgatgcatataggccttctcgtcgggaggataacaggagggtcgctagagatatggagaagccacaggagcaaccacgcccagagcctgagacatggcgtaagccagtggagcctccaaagccagaggttgcaacacctcgttttgggaaagcagcaaccgcgttggagcttgcgcaggccttctcaacgtccatgtctgatactgcaccacagaaccggttgaccagcgttcccagcccaagagttcctcttagcccaggggctagggatcagtctggcttctcaaggctcactgacagcaggacgttacgctccagcccttcccagcgaaagataaatggctactgatcgcttggcacacatattacacgtgtcacgatgacagttggcctcgatgaagcgccccgctgtatcttcatactcaactgcccctgcgtggagaagtccaattgttgctctgtcagatggtggcacgtgagtggtgataatctcattggtagcaaacaaaaggctcctcttccataagtttctgccctgatttgttgctggggaataattgccacctgcgcatcttttagttggatgtgctctgccgtgcttggttttatgatgttgccagatcggtggtatgtagcctgcgtcataatgcaaaattgggattttactgcgagaacaaattattggtcttgtacggttaaatcaggattaaaggatgtaactttcaatcttggttgtctagtttatataagccgcgtttggatcactggattccaatttgaattttgaaccaagttacgttgaaaatcctgtgtaaattggtgtcacccaattggggttccgatgcttcgtttatttttcttccttaacttgatctcccgtttcgttgggtcgcagtta

SEQ ID NO: 20884 - DNA, 2771 bp, Zea Mays
aaagccgctcggttcgctcacctgcctgtgttgcctagttgccttgcgacttgcgagtgggcggcggagtgcccgagtcggtgcggccgtgcaggagcgtttgctgtctccgtttccgtcccgttccctttcgtggactgttttggaaggcgttgcgatgagacgctgctgcggcggcggcgaggagtgcatccctcggcgatgagcagaatcaccacgggatcttaatctcccttgcctcgtttgcggagagcctgcgctgtcggcggcggcgcacccccctccccttcccccggtgcttccgtctgctggctggactcagttcttccaactcggcccttaacaagagaacgacgaccatgccgatgcgtggcgtcgatttcaagtggtatgatgggttcttcctctccatgctcgccactagcgtaattatcgtttccattaattggaagaggtatcgcctgtgtgcccacccgctccacatttggatagtggtggactacaccactgtcttcatcttccgcctcctaatgtttgttgataatggtctcgctgcaggaatgggattgtaagtcattttaagccccaccccccatcttgctttttttttcctaattcagcaaagtatcgcaatacaaactaattgcactgcaatttagcattttgtatttacatatgcaaacacgtctttgctgacccttgctgcaattgagcatcatattcatgctctcactgctttatcagccaccaaaaaagctaaatagaaaagcaagttgtcagcagacatgctaacagcgcgatggtttagcacccaggtgtggcgctccgcacctgggtcaagccctggcgctgcgtgggtcgtgtgcccacctctctggtttgtaacagaacagatggttccgtgaccgccaaagaagcaagcacgtgtgaggttcctgcctgctttctagagttcagtgggcccctactttaaggtgaagtcaaggcgatgtccctccccttgattgagtctagattctagaaaacaagttgcgttctgaatgagtaaaatgacctcaccaacatgaattacaagcagccacctgattgcaacctggtcctatttgtgttaaactaatcaaattgttagttctatgacaactcttaatgaaaacaagattatcgagatgcatatgctagatggatacctatggctgtgtgatttaccacctgatgagttcatttaagaaaatggtgagtcaataaaaaatattgggtttgtagtctcgatttttctttgtccaaagtactccatttttaatcagctaatgaaaccgtctaattaggagatctcagtttttttatatatatatggaaagcatgattctaagatttgaatttcaatgtgactgactgactgtatccttatgatcaaaataatgatagctgtgccatttatgatttatcttggtgcatgggagtttcttgacacctgttttcctaccataatttttgctaccttatggttgtcgttcttatactgatgttttaggtttctaagctttgtcttgtttgtttgctccactaccaatgactaactgaactttgcaaaagtatggctgtcagtttattctattatgtatcttcttttttgaaaaaaaaatatagagatctcggatggcaacagagatatgctcgtttttgtggaagaataattgtcctctcagttcttgtgctacttctctacccctttctctgggtttggactgtgattggaacattgtggtttagcactgcaagaggctgcttgccagaggaaggacaaaagtggggcttcttgatatggctgcttttcagttactgtgggctcgcctgtattgcttgtgtagctattgggaagtggttacaccgaagacacgcacttcaacagagagcacaacaaggaattccagtctctgaacatggggttttagttgatatgatccgtgttcctgactgggcatttgaggctgttggcctggaaatgagagtgggtcaagatactgcatatcatcctggtctttatttaactgatgctcagagagaagcagttgaggcactgattcaagagcttccaaaattcaggctgaaagctgttccaacggactgcagtgaatgccccatctgccttgaagaatttcatgttggcaatgaggtccgtgggctcccatgcgcgcacaatttccatgtggagtgcatcgaccagtggcttcggctgaatgtcaagtgcccacggtgccggtgctccgtcttccccaacctggacctgagtgcgttgaacaatcttcggtcgaccagcgagccggaccatccatccgccagcgccagcaatgtaacgacggcaactgcagcgacgagatacgtgaggtcgcagccggcaggtcaaagctatttggtgcggttgcaggggctgctgctccgccctgtccggcacgatagcgtggagagtgacggtgagccggcggtgggcaacagtcgcttggttggcaccgaagagctgcctagcatacttgtagacgatggccatcagctgccagatcgctgactgatttgatgacctgatggatccagcatacttgtcagcataatttaggatacttgtcagcttttcttttacagttttcttttgcaaatgaaatgcgagttttgttgaaagaattttttttaactgaacactgaaataagcaaataaaattatttagctcaaaggaaataaaattacattacttaaagaaatcacacaatacatacaa

SEQ ID NO: 20885 - DNA, 2147 bp, Zea Mays
aaaccctggttctaccacgcgactaactgagccgccgacgccaggcctccacgccgcatccgcgtgaccgcgcctccgagctccatagccccgggccgccggcgccgggccatcgtgatctcgtccgcctcccagcatcgaccggacctgcccgcagcccgcgcccaggccatcgcgccgccgacccgagcttcgccaggcgcctaggccgctcgcccgcccggccggcaggacgactgggcgagctcctccccgcggaggcggggacggcggacccgcccccaggccgagtcgccgagctccgtcccgcgcgggcgcccccctgcccagtcccagccgccccgctcctgtcccggccaggctcagctccgccctgttccggcctctgtacagcatccagggctcatgctgggtcggtgggagtgtattctgtcgctgctggtgctggacttggcaataagataatcagccagggcagggatgggacttgtaaatgttgggcgattgaagaagctgggctttcaaggaagccactacttacaatcaaaacaagtacataccatttctgcaagatgtcactggtgaagtcttcttttacacatgccactgaatctggctctagcagctcagctagtgacgtggaaccacaaatagtgccaactgaaaatgcagaatgccatggtgtaaaccctacaataggcccccaagaacatgatcaatgcactacctctaatgggcataatatgctggcaattgctggtcaagaatcctctcaggttgagctttgggacattacaagtgctagaaagatcgtaaccttgccccaaacatgtagtgccaatgcgacagatcatcctactaagaaaaagggactatgcatggctgtgcaagctttcatcccccatgaatccgcaggctacgtaaatattttgtcaagttatgaagatggaagcactctttggtgggatgtacgaaagcctggattacctttatcttcagtgaagtatcattcagaatcagctttatccattgctattgatggattttgcaatggtggaatctcaggaggtgctgatgataaagtagtcatgttcacgctcgaccatccaaagggcacatttattcttaggaaagaaatagaactcgagcgaccgggtattgctggcacagcaattcgtccagacaacaagatcgctgcaaccgctggctgggatcacaggattcgagtgtacaactacaacaaaggaaatgctctagccgtgttgaagtatcacagtgcttcgtgcaatgcagtgaccttctcatctgactgcaagctcatggcttcctgctcggcggataccacggttgcgctgtgggacctctatcccccaaaaccccaaagcaaagcggacatcacagaaacagacgaggcctcctgctagctcatgtagtttgggccttcctgataccttctggcagaattttggagcttccgtgcaatgaaaatctgaacttgtcgcaacagtgcaagcgatttattctttttcgtcaaagaaaagagtaagttatgatgtgccttccacagggaaacgcaaacgtatgcatgcaactgttgttaggaacggttctcttgatttctttatttttcattgaaattctactcggtttcgtggaacagttgtagtgtctcaagagcatgaaattgatttaaaggcaaggcagttgaagaactgactctttgaatactcagatgattgatttgaacaaatttctgcaaatttccagtacactgtacacctacatttgctactgttcgatccaatggcagtactgaaccgggatgcagttcttgctgttgtgcatgtccaggaaagagggtatcgtatcccaatgttccatgtagttggggggttctattgctagaaaagaacattagtccttgctgactcggtgactccaatgcgatgcgagcccatgaacgacggtcctaaccttcacgcgcaacagccgcaatcgccgctcgttctagttctttggcgtcggccagccacggccgcctcaacgccgccgtatcttcaacgtcacttgcggcatccgacgacggagccgaggtgccatcgaaggtgccgtcgaacggcgcctcgcagaaggccatcgcggccacg

SEQ ID NO: 20886 - DNA, 1555 bp, Zea Mays
ttcaactgaacttgcaataaatcttgttcttattctacaatacatgtaccacgtttggaaatgactgtacctgctagtggcatctcaaaagtaatgggaaaacatggcacaaacttggacaacattagaaagatttctggagctcacattgaaattattgaaccaaaatcctctcgtcatgagcatattgcttacatatctggaacctctgaacagaggcattcggctgagaatttgatcaaagctttcataatgtctacctaagattccttctgtggtctgagaacaccatttcatcaatttgatctcttttgacttctgctatccatagtttccctgggtttgtgaacatcaaacgtagtgttttctcccacctgtccgagttcccaatgaatactgggcatatctgagcaaggtgtactccagtggtagacaaggcactctatgttccttagatcttcaactgttacctatttatgttggcatacttatcataattcgcgtgtcttactctaaattatctcaatgactggaccagttgctgcttactgatatctctttctattgtcctgccaatactgagttgattattccttcacaactacagtagaggggcctgtttctcaacctcaacgtctgattcactttctgcttagtgtagctcttataatttcatcccatcagactgctatctgattcattaggttagtagtaccaatgccctatttggaatttggaatgcgagaatgaacctttcacgaaaggcttgtccaaaactccttgagattcctgtgtttcaaacactctttggaattcccagtgaatgctgttggctgattcatttggtgcttattgagtttttgtatctctactctgcctatgctgctagctgtgaccttagagaggatcttgttccttgtcaatctgactagttcacccattgcttgcttcggtagttcggttcttatatctttgtcatgtcattaccttactctttcatcatcggttccaaagagttgcttgtttttctgctaactctgctgaggaaccataagttctttgtaaacttgcctgaaaaccctagaggcctagacttttaggagcaaccatgtacataagcttagtcacgttcttggatcacaatatgcagatcaattttttagcattctgcaagtgttttgtgatcatgattggtgggcgtctagaaaactattctaacgtttcagttgtctgaaaaactatcttatctttgttgtagccctgcctatgctactaccagcttggatggggcttcttcctgctcagtctgtgactggttcacccattgtgctttgtcctgtcagtaatcgtctaattctttggttattgggttccaaagagtttcatgtttttctgcagtaattaattctactgtggaaccatatattaataagttctttcggaacctggattatagccatacattattcagaagcatccatattccataatcttattcaagcccccctccgtaaaaatctcttaagccctctatcaaactaaatccactccatcc

SEQ ID NO: 20887 - DNA, 439 bp, Zea Mays
ggaaaaaaaatatttgtttggtgagccacgctcccatccggatccgcgggggaggacggcgatttcgtccccagcctcatgaggtcgggaaggggttcccgcacccacatttgtgaacctcgccggcgcccatcccctgccttcacgaacccgccgccgcccgtcccctactcttcctcgtgcacccaccgtcgctcgtcccctcgtcttccttgcgcactcgccgtcgcctcctcctcaccctcacgcacttgaggccagctgcagaacgaggtcggacggcggagacgaggtcgaggtctacgacctcctcaacttgcgcaagactgccgagactgcagggacaagctctttgctgcctcgtcagctgctagctgacttctccaaggcccaggagctagcaatgtaagtagggtagaacgttgagctacctgtgaag

SEQ ID NO: 20888 - DNA, 3539 bp, Zea Mays
cgcttccatattattgcatcttccgactccctcgattcaccagtcaacggcttcatttcttcgctgcaccattaggctccgttctacttctacctaataacagggtgtagttgtttaatttgaaatggactctgaagccagtatgttcgatcacattgagctcatgctacttgatgaaaagtgtggagccgtcagacatgccattatcatttttaacagcaatcaccaataatttctcagaggatcagacaattggccgtggtgggtttgctgtggtttacaagggactgctgcgaaatggactatccgttgcggtaaagaagttctatgataccattgaactatctgatgaaatgtaccgtaaagaggttcaatccatgatgaggttgaaacatgcaaatatagtacgtttttttggatactgtgctgacacacagtggaaaatgttcaaacacgatggaagacatgtgattgcagaagcacgccaacgattgctttgctttgaatttgtgcctaatggaagtcttgataaatatatatctgatatgtttcatggcctcgaatggagaaagcgctatcagataatcaggggaatttgtgagggcttgcgttatcttcatgatgagaatgttcttcacttagatcttaagccttcaaatatactgcttgatcataatcttgttcctaaaattactgattttggtctctcaagatgctttgatgataataaaactcgaaccgttacagcaaatctgattggatcggtgggatacctggcaccagaattttttagtggattgatctctttcaagtcagatgtatatagccttggtgttataatcatggaggtggtgacaggaataaaaggatactgcgaaattgaagatgaacctaaatctcacctcccggcagggacccagtatacaacaatatcttacactttgggacaccttgggtacttgaaagctggagaaaaagattgaaaatgccaatgggagatgcactggaacaaataagggtctgcgttgagattggcaccatgtgcattgagagtaacccattgaatcgtccagatctcaggcatataatcgagctgtttgatgaaatggaaaacatgcggctggttacaaaaactacaagttcattaggaacccagggaagtgatgaacatgattcagaagaaacgattgcttcagctatcactgatgaaaagagagagaaactttcagtactaagtacgttgcctaagtatttaccatttgcattcctcgaggatatcacagatggtttttctaaagaacggcagcttggcagaggtgggttcggagtggtttataagggaatccttagtgatggatataccattgctgtccgcagactccttagattccagggaattgagatgaaacaattcgacaatgaggttaatatactcatggagcttagacacaaaaatattgtcaatctcctgggatactgccacgaggttaggggtacgtacgtacagtacaaaggaaaacctgtattcgcagaaacctccgaacagttgctctgctacgagtatctgcactgtggaagcatcgacaagtacatttttggaaaaaaccatgaactagattggcacacgcgttacaaaatgattaaagggatctgtgagggtttacattacctccacgagaatgacagagctccaattattcatttgaacttgaagccagcaaatgttttgctagacgcagccatggaacctaggatcacagattttggtttatcaaggcttattggtgaagggaatactagaatagtcaacacacacactcctggaccaatagggtacatggcacctgaataccgttacatgggggaagtttcacgcaaggtagacatattcagcttgggtattcttatactagagattgtaactggtcaagacaatagtaccaaagttgactttatcgatcatgtatgtgaacactgcatggaagggccacaaataaaatttatgtatccctctctggaacctgaattacatgatcaggtagaactgtgcatcaaaattggcctagagtgtgtccagacagatcgaaaaaaaagacctactgcaggggacattatacgtaagctcgaggaaggaaccaaattgggccctacaccatcccgtgaaaatattactacagaaattggtaagccacagatgttttcgtttgaactcctgaatgacatcacagaaagcttcagtccgggacgcctgcgtgggacaggtggatttggatatgtttatgaggggataccacatggtaacgagggagcgatggccgtgaagaggcttaaagaaaaaataggtatatcaccgaaacagtttgagaatgaggttcataatctgagcagaatcgagcacaggaatattgtacggcttataggctactgcgatgaaatacgggaaatactatctcatggtaaaaacaagaatgatccacctattcgcgaacatattcaagaaaggttattgtgttacgagtatatgcctaagggaagccttgacaagataatttatgataacctcgattggcatacgcgatataaaataatagaaggtatttgccatggcttacattgtcttcacgagggtcaacaggatattcagattgcgcatttggacttaaaaccagcaaatatattacttgacagtgacatggttcctaaacttgctgattttggtatgtcaaggctcttcagtctcgaacaagtttatatccttgcttccaagcctatgggaacaattggctacatagcaccggaataccttgaccacaaaaaggtatcaacaaaggcagatatatatagtttcggcattgtagtactggaaatcgtaacacgaaaacagtgcccacgcagttacgcagacataaatgctcagcattttatccaccatctgcgtcaaaatttgacaaaagataactacgtcaaatccatgtacccggcccttgaagcggactgccttcagcaagtgaaactgtgcatagaaattgggctgaactgcgtggagaaggaacctacaaagagaccaactgccagggaaataatctctatgtttaatcaaaaaaaggattcgagcagatctggggtatctaactgcatcgttaatgtgatagaggcgtggctatcaaggcttccatggcatccttggcctctaactttgctccgtcagacttaagcttgatggcaacagcggtatttgaaagatttgcaagggtgtccgcttgagttcctgcgatgcagcggaaggaagaaaaaaactagcagattaaaaatgagaatggggatcttgtatatctatttatgttttatccttttcatagaaaaattacaagctatgattttgatggtatagtggcaatattatgtcaatgtaacattcaatgggcatcgaattaaaatataatctaagtattttttttcctagcattgtaaggcgtagaaatatatgtcaatactcctttcattttaaattggaagtcgttctggatttgtttttacat

SEQ ID NO: 20889 - DNA, 3006 bp, Zea Mays
gcaagggcgactgatgtgagctcgttcggtggtgccgtggtggagcccccgttctgtctcgctgttgcctttctcctccctcttcctctgcgcactgcagcagctgcagcgcagtgaagtgttgtgttgctcgaccacgagcataccagctgcttgctcacctttccctttctcgggtagttcgccatttttttaaaataatcagcagtaagcaagagctcggcgagctgagccgagcagcactgcggcaaagaactcccacttccattgcctgcttgcttctgctctgctgcacctgcgaccgttccagcggccgccgccggcccggccgacttggcggcgactggcgaccatgaagggcgtcgacgatgggttcctcggcgctggcgacaagccagggctggatatttggtgcatctttgggagcagtgtggtcccagttgcaaaatctcagcacggaaagttctacaccggcagcacctacatcatactaaacacaactcagctgaaatccggggttcgcagacacgatgtgcattactgggttggggaggaggctaaagaggaagattgtttcatggcctcggacaaggctgttgagttggacgcagcactgggctccagcacggtccagtacagggaaacacagggtgaagaatctgacaagttcttgtcatacttcaaaccgtgtgtcatcccaatacaaggccgcttcttttcacacctgaaaggatctggtgatagatccagcgcgaccacgatgtttaggtgccaaggagagcacgttgctcgtgtcacacaagttccgttttcacggtcctctctggatcacaaatcggtttttatagtggacacgccgtcaaagcttttccttttcagtggctgtaattctcgtatgcaaacaagggctaaagcgttggatgttgttaagcatctgaaggagaatcgacacttgggaagatgtgagatcgcgacaatagaggatggaaagcttgttggtgattctgatgctggagagttctggaacttgtttggaggctatgcgcctattcctcgtgatctacctgacgcaatcaaggaagagccactaactgcaccatctaagaaacttttttggatcaataagaaaaaccttgttccactcgaggcacacccgttggatagagaaatgctgaactcagacagaagttacatgctggactgcagcactgaaatattcttatggatggggatgacaacactggtttcagagaggaagtcatctgttgctgtcttggaagattatgtgcactcccaaggcaggaatgttgagctaaagttatatgaggctggccgagagaaagtggcagctattttcaagcatcagggctatgatgtcacagaaattcctgaggataaacctcagcagttcatcaattgtaatggcagtctgaaggtttggttggtggaccatggttgtacaaaccttcttagtactgaggaccaggaaaaattgtacactggagactgttatatcatacggtatagctattttgaaaatggaaaaaattaccatctgttctttgcatggtctggtaagaatagtgtaaaggatgatagaatggcggcaacatcgttaatgtctagcatggttgattcagtcaaagggcatccagttgtggcacaagtttttgagggcggagaaccagaattatttctctcggtgttcaagtcactaatcatattcaaggggggcaggagtgctgcatataagagttctgttctacagaaaagtccgagaaatggatgtcatgagagtgaaggagtcgccctattccgtgttcaagggcttaaacattattgtgtgcaggccattcaagttgatctggttgcaagttcacttaattcctcgcactgttatattttgcaagacaacggtttgttccttacttggttaggaggcctgtcttcaccaagcgatcataatatacttgacatgatcatgagcaagttgtgtccaatggaacagtccttgctagtcagagaaggctctgaaccagatcacttctggaaagctttgggaggacgatcggagtactcgaaagaaaagcgtgtgaaaggttggcctgcagatccacatctgtatgcttgtagatttgaacaaggtttactcaaggtcaaggaggtattcagcttctgtaaggatgacctggcaactgaagagacgttgattctggactgcaatgaagaaatctacgtctgggttggcctacactcagatattacatccaaggagcaagctctcaatgttggcaagatgttccttaaggatgctgttcacggtggaaggtcaatggaaacgacagtgtatgctgtcacagaaggggacgagcctggatttttcaccagcttcttcgactgggacaattcgaagcaatcatatatggttggcaactcatttgagaggaagctcgccgtcctgaaaggggtctccccaaaactagagacaccggacagaagcctgcgcaggccgtctaggaggcccggggtatcgtcggagccgaccacgccggagcaccagcaaccgaccgcgagaagggccttcggctccacgtctgccgggcggtttgccagggagcgctctccggctgttgcaccgccaacgttgtcgccatctcccaaaagccgctcgtcgtcgtcgacgcccaccacggtggcacgacggctctttcctgcctcggtgcacgcatcggaggctgtgcacgtggtctccacggcgacagctcgacgacggtgagaggagaggtggctgtgtatgcatgcgtaatcgtgcacgattgaaatcatgtagagttgtactagacgatggatttatatgtccggcctacgtacgtgtctgtatacagaatttacctctcaaactgtcaaaccccgaaagtttcttgttttggagaacttgggagtgtgaatagtcgctactcgctactaataaatacgactgtcgttcaaaaacaaaagagtaaagta

SEQ ID NO: 20890 - DNA, 574 bp, Zea Mays
cctcacgtgaggctcttcctctggttgtgggaccgctcggtcatatgtctctccccgggattgcggcgactggccttaagcgcaatagattctcacgcaaaccacgcgttttgttgacctggtgcgctcgctacatggttggatggcatcggggtataaagctgggactaccctcgtcggcccttgccgccgcgacgccagccggaccgtcgtccgccctaaccattgggaatcagacctctggggcttcctttcgagctcattgtcgcccggcgtttgtggaaggtctggggggatctccaccccgtgttgatcgcgcacgcactgctaattggtctctgagggttagcggtcgatggcaatcgctcgccgtgaatccagcgccgccgtctgaccgccaagtgccggggtcggcaacctctgcgtgcatgatttctgcgcgaggctacgagtcatgtgaagatcatcctggtacctggaatcttaagtcccaggcaagttgtgcccttgatcacttctttttactcaatcatgttcttattaatcataatgatatgcataggttaattttgat

SEQ ID NO: 20891 - DNA, 444 bp, Zea Mays
gccttgtctaccatctattgcttggctatcttttaccctcacctatcgaagatctaaaaaaagatgaacaacggatctagaagaagaatctgaaacaaagattctcatacacaaaaggtgcgctctcatctagtttaatttcacaagtgtttgtcaaatttgggaaaacaaaacggagagttggaacttggaaggaaaaaaatcattgtgatcacttgcatcacttgatattccacctcatctgtcatctctctcacacacacacacacacacgatgtgttgctattttttggagggagcgattcaagtgttatcgattattttccatttggatcaagaactcttccgcggaatgtagagtggccatgaatttagaatcggcatctcagtgtggcacgctctgtgatcgccttacaagtatgcggatacgcaaaaaccgcgcag

SEQ ID NO: 20892 - DNA, 556 bp, Zea Mays
cacggcccggccgcccaaccgcaccgagctgagcgggggctcccggtcacaagggtcattagccgcatgacgctgcaacagatccttgctcgagcagttggcgatgacgctatattgaatggaagccatgtagtcgattttacagatgatggcagtaaggttactgccatattggaggacggtaggatatttgaaggtgaccttttggttggtgccgatggaatatggtcaaaggtgaggaagacactattcgggcactcagatgccacctattcaggttacacctgctacactggaattgcagattttgtgccgcctgatatcgatacggttgggtaccgggtatttctgggccacaaacagtacttcgtctcttcggatgtcggtgccggtaaaatgcaatggtatgcttttcacaaggaagaggctggtggcactgaccctgagaacggtgagtgcttagagaagttttcaagcttaactagtgaaataggcactgcctcattgtaagttgtgatgaaaaatgagaacaaaacttctcaccccacaagttcac

SEQ ID NO: 20893 - DNA, 487 bp, Zea Mays
  misc_feature (487)..(487): n is a, c, g, or t
tcacagtcttctctctgatttcgtggtggtcttgtttgccccccttgcctttccggatcgaaatcttggtgtttagggttctctgtcaactcttacagcttcgtgcaccttcagaaatggattttttcacagagtacggcgaggggagcaggtacaagatagaagaggtcatagggaaaggcagttacggtgtggtttgctctgccttggacactcatactggtgaaaaggtcgccataaagaagataaatgacatctttgagcatgtgtctgatgcgacaaggatacttcgggaaatcaagttgcttagactcctgcggcatccggatatcgtggaaataaagcatattctacttcctccatcaaggagggaattcaggatatttacgttgtgtttgacttatggagtctgatttgcaccaagttataaaggctaatgatgacttgaccccagagcattatcagttcttcttgtatcagttgcttn

SEQ ID NO: 20894 - DNA, 3867 bp, Zea Mays
caccccttcttctttccctccacttgccgctccagttgcagttggtcgaaaaaaaaagtggaaaggaaaggggcaaaatatcctagggttctgcctccatggacatcgagacccacgccgccgccctggcccgcgacgagctgcggcggctcctggccgccaccctcagccccgacaaggcgtcggttgacgctgccgcggcggggctcgacgcgctctcttccgacccacgcttccccctcgccatcctcgccgtcgctgcaggggacggtgatcaggggatgagagtcgctgcagcgacatactttgaaaaattttacccgccgcaatttggaaacccgtctgtgttcatctgaggtttacaaggagttccgtgaccaacttgcccaggctttgcttcgagtggagcctgcaattcttcgagtgctgattgaagttttccgccaagttgttgaaaaagattttgtcaaggataacttgtggcctgagcttatccctcagttgaaactagtgatccagagcagcaatctaattagtccaggccagcatcctgagtgcaatactattaatgcactcacagtacttcaatctgttgtaaggcccttccagtatttcttgaatccaaaagttgtgaaagagcctgttccacaacagttggagcaaattgcagcagagattcttgtaccattgcaagtgacattccatcacttctctgacaaggttcttttgtcacctgatgggactaacttggaatatgagcagctcctactcatcacatgcaaatgcatgtatttcactgtgaggtcatacatgccatctagggtgaaacaaattttgccttccttttgcaaagacatgttccgtatactagattctttgaactttaatagtcttattgaagatggatctaccatgaagctcaagattgcaaagagatgtctcattatattttgtgcacttgttacacgtcaccggaaacatacagataaccagatgccacatattgtcaactgtgcaatcaaaatatcaaaacaaagcatccatttaagtaaactcgactctctccccaatcggattgtttcattggcatttgatgtgatttctcgagttttggaaacaggaccgggatggcgactagtttcaccacatttttcttcacttcttgattcagcaatttttccagcattagcattgaatgagaaggatatagaagaatgggaggaggatactgatgagtatatgcaaaagaatcttccttctgaacttgatgacatttctggatggactgaggatttgttcactgccagaaaaagtgcaatcaatttacttggtgttatagcgctatcaaaggttgtgattccttttttattatagtttgttgaacacgcatagtactgacttcaggctgagcaaaacattttaacggattgttttgctatattgtattccatgactttgtcattctatattaagtgatttcaatggctgcatgcagtctttcatattcgaatacacttgatatttttcacagaaccatgtagtttgttgaattaactcaaaaattgagatgttgctgtcatttgcttacactttttttggtttcagggtccaccagttgcatctgcagcatcgaagcgtaagaaaggtgataaaaataaagggaaatctgaaatgagctcaattggggagttattggtcaccccattcctttcaaagtttcctataccttcccatggtgaagatgcatcatcagtagcagtgcggaattatttcggtgttttgatggcatatggaggcctccaagattttctgactgaaaagaaagatttgacaattacattgatcaggaaccggattctcccattatattctttggatccttgcagcccatatttgatttcaacggctaattgggttattggtcagcttgcgatatgcctaccagaggacatgagttctagtatttatgagtccttaatgaaggcgttgaccatggagtatgtggaggacataacttgttatccggtttgtgcctctgcttctggtgctattgcagaactcattgagaatagttatgttccacctgactggctcattcttctgcaagtggttctgaaaagaataagtactggagatgaaaatgagtctgctcttctgttcaagcttctgggcacaatagttgagggtggacaggaaaaagttctgtctcatattcctgaaattgtatccaacattgccagtactgtaatggagctcctaccccctgtcccagatccttggcctcaggttgttgaacagggtttcgcagccctcgtagcaatggtgcaagcttgggagagctctgcaccagatgaaaacaagacacctgaaaagaggttctggcagtcaggccagtctgcaattgcccaaacaatttcattactgttacaaaaagcttggttgttgcaagctgacaatatggagggctctgcattaccacctccgtcatgcgtaaacgatgcttctgtgctacttgagtttgtcatgagttctgtcacttgcatggaagaaacggcaaatctgaaggtctttgaactggtagctacatgggctgacgctattgccaactgggactcctgggaggagatggaggatcagggtgttttcaacacaattaaagaagctgtcaatttccaccagagatttgacctcgacggtctcttcctgaaaacgcttccgtcgcagtctgaaaatggttcacagagttcagtcatcggccgtgtctctaattttgtgactagggcaattgcagcttacccatccgcaacgtggagggcatgctcgtgcgtccatacactgctgcacgctccaaaattctcccttggagcacaagacactagaaagactatttccgaatcctttgcacaagcagcgttttcccgcttcaaatctgtatccgacagtcctgctgggctatggaaaccactgctgttggcgatatcctcgtgctacatctgctatcccgatgccatcgaacaagtcctgaacaacgttgatggtaacggttttgcgatctgggcgtctgcattggcacaagtctcaagcagcttgttcaatcctggcctgtcatctgaatccgagatcaagttagctgtgctgacgctatctactgtgatcaaccatctcgtgtccctttccacgggtggcaccaaatttgttgcaagactgctatgcatcactgatggagtcttgcattcagctgaaggaagttcaggacgatggggacaatgacgatgatgatgatggtgctgaagatgttgatgacaacgatgaagaggaagacaccgaagatgatgatgaggattcggacgacgacgacgatgcgagagaagaaacagaagaggaatttctggaaagatatgcactagcggcggctgcgggcgagtcagtcgaggaaggagacattgatgaagagacccaagacatcgaattgggctctctggatgacgtggacatacagcaggtggttattcccctgatgcagaaacttcctgctctgcagcccgccggagcgtttccggacagcctggttgaaagaattgcagaaacattcccggaatacgaacagtttttgcaagcccttcgacgagcttagagtataggaaacatgtgcagatttttctctttttgttatatgtttatatttttttgtgtcatttttggtttgcttctaccttgagcgttgttccgagatgtgtttctttttgtcagatatggtgtttattttcccttgatgtgggtggcaagatatgggtgatgatgtacgtacgatggttacaagtatgttgtgagcataattgttatggcaacactatcctccaaaaaaaa

SEQ ID NO: 20895 - DNA, 1077 bp, Zea Mays
actgctctttttttcgaacagcagaggagagaaatggtgccatatttgtgacaatgtacaattttggctctcctagagtgggaaatagaagattcgccgaagtctacaatgcgaaagtaaaggacagttggagaattgtcaaccaccgggatatcattccaacagtgccacgtcttatgggctattgccatgtggaagcaccagtttatcttaaatttggggacgcaaaagatgcaccggtaaataacagcattctagatgatgaagaccaaggtgacgtgataggggagtacacacctgatgttcttgttactgaatttatgaaaggcgagaagcaacttgtggaaaaactactgcaaacagaaataaatttactccgctcaatcagggatggttcggctcttatgcagcacatggaagacttctactatgtcacccttcttgagaatgtgagatcaagttatcaagtggcagatactgccaatgatgaataccaattgacagcgtgatcctagtaaaactgcacagctgaacatcatggactgtgtttccctgcaaaaacttcatttctgaaggacactgaatggggctatgaaagtgtgcaatccttactcttagtggaaacatgaacaggcagaacagccttggacctcagtcaggatagaggaaatgaaactggtttcactggcggatatacttgtagcaccgtgtcaattggtagatatgttgtttgagctattttccgttgatgtagctagcacactttggaatatattgtatgatgtttgaaattctagaaaagttcatagacacctgggagaataactcaagaaatatccaagtccgttttggccaatattttttttcatggagaaacttgcacaccgtggtaggctaccggctacccaagggctgatagggtgtgttaatcgagtgtacgacctagataaaaatgttcaatgtgatggaactatatatcttgcatggaataaagtagcatcatgtaatttcggcattttttcttgaacatgcatgtgaaccgcgtcattatattaagatagaataagttatctggca

SEQ ID NO: 20896 - DNA, 1975 bp, Zea Mays
cttcaaccccctgtccgccctctgcttccactcccacgtcgttatccggaagagcaacggggaggagaaagatcctctccctcctcctctgtactcttctttcccgtcccctccacgtctcgtctcctccctcgctgcggtgcgggatacgggctagattcagtcagcgctcatgatccggaggatcgagggcaacaaccagcgcggagcggcacaagcctcacgtgtccgggatctcttctccgcccagtaggcttccttgccttcgggcggtttccaggttggtagcatgtgagagtgatggcagccttagctagggagcgcctcaactatgtaggtgcggaagccgctgagaagaaaacggagggtctagcgccagtacctaaacttgaggatgtccaagcaaacaaggccgcagatccttttgagcctccatggaccatttccgcggctgtcatgaagcaaacatctggaacgggtttggaagagttgaagaatctcgcttgctataccccagtgagcctcgactgcaaaggtagtgccaacagatgtgtttccgaggataacaagtttacagatttcaaagctttcgatcctctcttccctaagccacaaaaggaatactgcgaaatgcatgccccctggaaagaaaccagaaaatctcagccatggtggcaactagctgatgccgatggtttggcttcccttgtcgctgaaagagcaatggaaaacattgtcgacaatgatctgccaaggcccactcagacagtccgggttcatgggggtgaagtgaaggtccctgaaaacaaggatgattatgggctgtctgctctttgtgcggacaaagagctggatcctgcacatgacactatggagtgcagctacagtgtttcaagcaccaccaacaacgacacgaactcttctgatggggggcattggcaacaacatcaaagaaataaagagcccggggaggcacatgattcttatagttccaccgccaatacaccgggcggcaagccagcatatcagaatgcttccgagagggccaagctgttagatgctctccgccactcacaaacacgtgctagggaagctgagatagctgccaagaaagcctacgacgagaaagaccatgtcatcaagctattgttccgtcaggcctcgcacctttttgcatgcaagcagtggttgaaaatgttgcagctggaaaacatatgccttcagctcaggttcagagagcaccagatagcgaccatgttcccagagcttccatggatggtgacgaaagaaaaggtagcaccttctcaagagcacagtgacaggaagaaaggcagaaggctgaacaggaaaggtggcctacgcgatgccgttgcatttgctgttggtgttggtattgttggtgctggattgcttcttggctggactcttgggtggctactgccctaactggaagtttcattgtcgtagatgacaggacagatgccacctgtgcacgctgaattgaatggcaataggtaagctccaagtgcgtgctttcgtgaagagtgaaaaaggggcagatttttagagttcttccatggtagtctgttgatatggtgatgatagcttgatctcttatgttggttccgtatacataggaaggatctggtgtacatacttccagaaactggatataccttatgttggatgcgatccttagctgtgtgctgtacatatgggccagtgagggtctggtggaagatgaaatcagccgacttcaacaacgtatgcgctagtactgtaaatctatagattttatttgctttaatgtagcaggaattgtgataatccgtttgctgtaatgtgtgctagacttactagtttaaaataagttagattatataatctagacagattataattccaaacaaacagacccttatatgcatatgcatagcttgttttagacagattataatcccaaacaaacagatcc

SEQ ID NO: 20897 - DNA, 380 bp, Zea Mays
gcctttcggttcaactaattttctcaggtctcatcagttggatcttacggcacaactgtgtcagcgtcaccgaggcaaatccgagtacttaccgccgcaactgatggaagaaatggacctcccagcaatgatcaccagtgcccgctcgggacctaccccaattgttaagcaatggatgtatcaaaacactgaggaacagctcaaatacgttcacgaaaattacacccgtctgtgctgttaggggagcatgaatatcatgaacatggatagctgtattgccatcccacacagtacttgtttttattcttgtgtacacgtcactctcttatatatacttaagaaagatgtattaaatacattgaattcactactgtaatccg

SEQ ID NO: 20898 - DNA, 1084 bp, Zea Mays
ggtcgccacctaaacctaggcgcgccactctccctggcagccgccgtttgttgtcgcgagcgcgttcctgccccgccacagccgaagctcccagcgtcctcctgcaggccgagctgaaggttcagcgcgccggtggagttcgacgacgaaactccgtcacgtcatacctctccgcctcccgtcttccagacgtctccaatcagggctcccagcgtctcggagaagaggagcagcacggcacggcggctgtggcgaggaaggctcctgtcccatcccaacccagttagcagccgcccaaggaggaggagattcaatcggcgtgcgggcgtccgcggtccatccatcgatccaattccaatctgcagatacgcggtctgggactgatacttggaactgaatttgtcgacaacaaatctccaaatgatccatttccagctgaatggggttcattgttttattgatctcatgtccccttttcaaacatttcagaagtgttggttcgatatttggcacggagtgcgagaagcgtgggatgctcatcagggtggctggggacagcatcatgctgtcacccccgctgatcatgactcccaatgaagtcgaagaaatcataagcaaattcggcgatgctctaaaggctacagaggaacggattggagaactgaaatccaggaagaattagccgatgctgctggttgtaacgacgacatgcaattgaaaatgataattgatcttttttatgggcgaagtgttgaagatggctttggtgaaggaaatgtcttgttagcatcaagtaagtggcgacatcacaacccctacaagcttgtgccttaaaacaagaggatacaagaagttggagtgcttttgtgaaggcttttgcgaatcacttaaagcgttagtacttttgtgaatgattttgtaaagtgtttgcaaatatgtgcaaaacataataacatgtgtaggttttgtgaatgattttgttgtggtgtctgttgatggtttatgtatgtggatctatcattgtgcaatactaattaaatttgtatatctatgtgattatgtgtataaaaattggtgatttgtg

SEQ ID NO: 20899 - DNA, 313 bp, Zea Mays
accaaccttaccactaacataaacaagatccccttctttgtgctttgctgacattaagttaagaaaatgttgggaagaaaaacgtgcgccactgaaaaatctgttgaggtgcaagtgaattctcttttgctctgctccagagtgactactctcaactgaagagctcaattcagactcgattatggaacaaccaacaaccacctcaagaagacctaaagtggacttaaccttgattcccctgagaacagtcatcaacaaagtatttacaagaaagcatagtgaaatatcagcaatggtgtactgctttgtctag

SEQ ID NO: 20900 - DNA, 1144 bp, Zea Mays
tcttgcttgaattggtttcatctgctcggggagttcgatgaggtgaagcggagctgcaggaagcgcctcgatggacacaaccgccgccgccggaagccgcagccggaccctctcaaccccgccggcttgtttggcaatcaccacggagtgacaagattcacgtcttacccgcagctcttcgcggcgtccatggaacagcctaaatggtcggtggtcaagacggaggccgacgtgttccaagaccagtactacccggccgtccacctcaatggcgctggcggcggcgccatcggctcccacttccacggcaaggagcagaagcacttcccgttcctgaccagccacagcaacggcggcggcggcggcgacgtggcgaccgccgcggccctgggctgccagccattcaccatcaccaccacggcgtcctcagagagcgacagcaagcagagcaacggcaactgtgctctctctcttctgtcagacaacccgacatcagcacagacggccatgatccctactaccgcgcagtccctcgccgcggcgatgcagtacggcggcagactccctggcagcgtcagcgtcagcggcggcggcggcggcgacgtctccctcaccgggatgtcgtacatgagggtgggagacagcaggcaggcgtccattctgacggcgtcgtcacccggccacgctgcggtcgcttcccctgtcccggccaccaccgcagccgcaacgccgccgccgccgccgcagctgctgcagtaccaccatggctatggctactaccatgtgagcggcggcgagcagggcaacaaccccgacggcgccgccgttcacgcccttcccttctcgtcgtggtagacgagctctcctgatggaatcatgtgcgctaggcaagcagttgctctcctgtggttcaccaaacgtatcggttgtaatagtaggctcgatcatactggaaaccgtgacaagttgtccattttccaacttatcctgataggtctaatttatggaaattcttcctaagttattatgattcggaaccgtgtaaagattccaatcctgttttgtttgagttggcaatccgcttgctcattagagcatctccaacagaatgggtaaaagctccccaaaaccatttttagcacaa

SEQ ID NO: 20901 - DNA, 2512 bp, Zea Mays
aaccctaccctgccttttgttcttccgttccatcgccaccagcctgcgcggaaccccccaccctcacgactgggccggccgtcgctaacgccttcggtgccccttcgccggcgacgagcaccaccagtcatcatgtcatcatatcctgttctaaacaaccgaccaatcgatcagtggagagttactgatctgaaggatgagctccgtaaaaggaagcttcctgttaaaggtttgaaagaggaactcgtcaagagactctctgactccattcagagtgaaagagaagctgacgaagctgatgaggatgtgggagtgaatgtggatgatcagttgcctgatgccaatgctattgaggaaaatacagttactgttacagaagttcatcaggaaactgtggttgatgtcactcatcaagttgaagttcctacaaccgaagttggtcaagaatccataatttctcccactagaggcccccccagtgttgatgttgaagaggcctcaacaaccaaaggaaaagtacctgaatcagttgctcgaggaaatttgacatttgaagaagtgcaagtgcatactaaaagtactaatgagcctcttcatgagaagaccacagatgttgacaccaatgatgcagtcgatgtgaattcagacttgatccctgctgaagtcaagtttggtgctacagaagcaagcaaaattgaagaacaggattttcccccagcgcctgtagatgacttaacttcagattctactggtcctttgggtactgatgttgtcacagctgcaacttcaggtgctggccctatggatactgatgttttcatagctacaacatcagatgctggtcctatggatactgatgttgtcacagctgcaccagttagcgacgaaggggagaaactggcacccaaggatgcttcgggtaacaaggtgtcaatgcatgatgaagagcagaataattctgataccatgaacgaggactgcaagcccatcatatcacaatcaaataatcagaaccagacatctttggaagacatagattccacagataatgtggactcatacaagaaagatagtcctgaaggtggatctccagagaaattaaatctagacaggagttcaggtgatgaatcaatggaggaggatactgtggaaattaaacaagatgagtccaatatgaaatctgatgatctcggaggaaagaatgagtttaactcagaagatgtgaaagaggtgatcctccctgattctgttgttgaggcttccaaggaggctatggctgaagaaaagtcagcagcttcaacagaaaagaggaaacttgaagctgaagaaggtgttgcaagcactgaaccaatcaagcgacaacgtcggtggactgcagatattgccaaagtttcagggagacaagcattgagtcaaactggtcctgaaactcctaaggaaagttttcagcctgctttcaaacgatcttttgggaggtctgattcaacagccagtgtagattctcctaaggagcggattgtaccaccttccgagaaacctcccacaacttctttgagaattgaccgatttgtacgcccatttaccctgaaagctgtgcaggagtttcttggtaaaactggatctgtacaagacttctggatggaccatatcaagactcattgctatgttacattttcttcggtggatgaagctgtggctactagggatgctgtttacaacctacagtggcccccaaacaatggcaataagttggttgccgagtttgttgatcctcaggaagtgaagctcaaggtcgaccctcctcccccgccagctgctcctgttagcccagctgctgccacaagggcacctcctgttcaacatactcagacaaatcaaagtgtgccacgccaggctgctgcaccaaaggaggaactgccacctccacctccccctccccttgctaagccccctatggctgacctgacgcctttaggaagagagaggcttccacccactccaaaaaagccggagcctcctgtcgtgacacttgacgatctctttaagaagacacagtcctctccgaggatctattatcttcctttatcagaagaggaggtggcagccaagctcgccgcacagggcaaaggaaaaaagggataggaggtgttagcttccattttcggctagcttggagtttgttgcggaacatggcgtgcggtggtcacagcagctgacacgtgctactgctgtggcgaaagagttgtagccttgtagggctgttctgtggaaaaaggacactagtgtaggagcagcagcttgtatttcctaatgagattgttagttttgattgggtctccgagtagagtgtgtgctgaagttatttgatctacatgaagtgttgaggtacttagtttaatttatgctgccaggtactgtaaaactgaaagatactggttctagttttgagtctatggagaatactgttacaccgtctcttattttagtcttcgccttggttgctgaccgtgaa

SEQ ID NO: 20902 - DNA, 2039 bp, Zea Mays
gtgcgcttgtccctttctacggctccaaacaaatgcggagtctgcctgtacctattggctgaagcagagctgacccccactttatcaagagttgctcaacaatggacactggctgcctgtcatctatgaatattactggagctagccagacaagatcttttgcggggcaacttcctcctcagagatgttttgcgagtagtcactatacaagctttgccgtgaaaaaacttgtctcaaggaataaaggaaggagatcacaccgtagacatcctgccttgcaggttgtctgcaaggattttccaagacctccactagaaagcacaataaactatttggaagctggacagctctcttcattttttagaaacagcgaacgccccagtaagccgttgcaggtcgtggttgctggtgcaggattggctggtctatcaacagcgaagtatctggcagatgctggacataaacccatattgcttgaggcaagagatgttttgggtggaaaggtagctgcttggaaggatgaagatggagattggtacgagactgggcttcatatcttttttggagcttatcccaacatacagaatctgtttggcgagcttaggattgaggatcgtttacagtggaaagaacactctatgatattcgccatgccaaacaagccaggagaattcagccggtttgatttcccagaaactttgccagcacctataaatgggatatgggccatattgagaaacaatgaaatgcttacctggcccgagaaggtgaagtttgcaatcggacttctgccagcaatggttggtggtcaaccttatgttgaagctcaagatggcttaaccgtttcagaatggatgaaaaagcagggtgttcctgatcgggtgaacgatgaggtttttattgcaatgtccaaggcactcaatttcataaatcctgatgagctatctatgcagtgcattttgattgctttgaaccgatttcttcaggagaagcatggttctaaaatggcattcttggatggtaatccgcctgaaaggctatgcatgcctattgttgatcacattcggtctaggggtggagaggtccgcctgaattctcgtattaaaaagatagagctgaatcctgatggaactgtaaaacacttcgcacttagtgatggaactcagataactggagatgcttatgtttgtgcaacaccagtcgatatcttcaagcttcttgtacctcaagagtggagtgaaattacttatttcaagaaactggagaagttggtgggagttcctgttatcaatgttcatatatggtttgacagaaaactgaacaacacatatgaccaccttcttttcagcaggagttcacttttaagtgtctatgcagacatgtcagtaacctgcaaggaatactatgacccaaaccgttcaatgctggagttggtctttgctcctgcagacgaatggattggtcgaagtgacactgaaatcatcgatgcaactatggaagagctagccaagttatttcctgatgaaattgctgctgatcagagtaaagcaaagattcttaagtatcatattgtgaagacaccgagatcggtttacaaaactgtcccaaactgtgagccttgccggcctctccaaaggtcacctatcgaaggtttctatctagctggtgattacacaaagcagaaatacctggcttccatggaaggtgcagtcctatccgggaagctttgcgcccagtccattgtgcaggattatagcaggctcacactcaggagccagaaaagcctacaatcaggagaagttcccgtcccatcttagttgtagttggctttagctatcgtcatccccactgggtgctatcttatctcctatttcaatgggaacccacccaatggtcatgttggagacaacacctgttatggtcctttgaccatctcgtggtgactgtagttgatgtcatattcggatatatatgtaaaaggatctgcatagcaattgttagacctttgggaaagcaaaagcgataaagagatctcagat

SEQ ID NO: 20903 - DNA, 1518 bp, Zea Mays
tggtgtacttaaagctgaagggtcaggtcaacaactaaggaaaaagttggaggaaaagtaatacaccgccaagggggtgtcatatttctttttcgtggtagaaactacaattacaggacccgcccatgttttccgcttatgctctggaaacccgttgcacctgtgtacccgcgccttgtcacgaaggtcccaggtggcttaactccagatgaggccacagaaatgcgcacgagaggacatcagttaccaccaatttgtaaacttggaaaaaatggtgtttatgccaaccttgtgaaccaagtcagagaagcatttgaagcatgtgatcttgtccgtgttgattgctcaggtcttaacaaaagtgattgcagaaaaattggagctaaactaaaggatctagttccttgtatcttactgtcttttgagtttgagcatatactgatgtggagaggaagtgattggaaatcatctcttcctccattagaaaatagttatgaagtgacgaaggtgcaagaaagttttagtggcaaagaatctaatgaaaaggttacacattcaggaaatgttctggcccagattgagttggtcagtgctgcaacatctcacaagaactggaacttggatgaaggtcaagaaaaatttaaagattccactgacagtgatatggtactgaattctgcaaaggatgttcctgcattgttccattctactggtatatctagaactgaaccctcagcagacattccattggaatattccccattaaatccagtatgtgatattatggatccatccctgaactgccgaagtatcccaacaaacaactgtgaaagtagagctctggtagagaagtcagaacattgtccggatgattataatttggaaatgaagaggaaaagaaacgatggtacaaaaggtacagttgttctaaatagcggttctaaagtagagggattgttatgtcttttggaacaggccattcacagtggcagggcacttgttctgagtgaagatgagcttgctgattcagatctggtctatgaaaagtctgttgcttttacaaagtcaattccgcgaagactggtttttgagaatactcgaaggaagtccagtgccaggagaaatgtgccagacaatcatgcaagaactaaaacacatcttgtagaaaataaaatgttgagcagtcctgttgaaaataaatttatcgttaatggaggatctgcaatgcagacaattgaccatggacaagagtttctttctgatgttgttcatcaaggtaccttaagagtagatgaactagcaaagttactagcttgagaggtgattgctcttttattaaccacacagaccagtatcaacatcctttgaacacatatgcaagatttgcatgaactctgaatttggttaaaacaggtctcaggtctgttgcgtcgtggcgagtcctttttaaccttgaaatactgaactataatcctgtgcgatgtacaaacaaccttcagaatacatattctctgattt

SEQ ID NO: 20904 - DNA, 2521 bp, Zea Mays
aaatttttcttgaagttaatggagccgagctacatcacgtccgccctccccctctctctccctctccctctctcgacgacacaccaggccaccacgcacatgctttgtcccatggatgccgaccacctcatggtgttcaagaccatgctcgccgtcaggtggtagtcccggcgagcgagatctccccactccaggctctctcccatcgctcgctgccgcctcatgttgtttgcggccgtgctcgccaaccgcggcacggaggcgtcgatccgaccgggagcccttcgcaatggacaaagccttcctcctctccggcaatgagggcatcgtcggctcgtcgctaacgtgagcacgtggcagaccctgctgcccccatccttcttcatcttcactaagtgaggaactctctcgacccccttccccacccttcttgtcttcggagttcggatggctggagaacacggtgtttggtcatggcttctagaaggtggtgttttgcatttaaaaaggaaaaaattggagcataatccaaagctttgtttgcagatggggaagaggtaggagtagctcagcagtaggatggagtggccaggacagctcggtgcccacccgtcttcatcgatcgggaccctcttcccctctagcgagctattcccagtttcgagaacaagattaaaatagcttcgtaggcttttatgtggtttagatttgcatatctatctctcaccattaaagcacaaccagatctggtagcttcagctccaaacaacaagaaacactgagagctgtgaagagtctgagatggcttatgtaagccccgcgactgatgatacatcaacagatctagatactgacgagaagaaccaaatgggactcccttctggaaggtcatcagcttcaagtgcggcttcgctgcatcagcgccaaccgcaatcagacattcatagtcatgagtaccatcagctttctcttttgcttatgttagccagcctgacttctattttccacccccttgtatgtctggtggacacgcagatggccaaaccagagtaccaggctatggagaccggacgagcctccaaaagaaggtgcatgatagggtattttaacagaaacaataaatttcctcgaagcatcaaagtctccagcaacctgcacaggaaaacaaatatttataattatgtcatgttcccaacaatttagtgcaagagtccaaggagaccaccccgcgattcgtcaacgtctccgggatggcgaagccgcaacccgacgcctccctgtcctttttgttacctccggacgccgctgccgaggggctgcatgacatgattctgaatgctcgcgacgaccttgatgttttatctccgtggtcggtgggggcgtcggcgtgtggtgtaggcagatgagggaggcgacgatgttcttctgtggtgacccatcgacgccgcagtgggtcgaccaacaccatcaccacatggagattcacaggtatgtatcctggcatgcagattcaccggtatgtatcccatcatctctattctatgcaatggtttgttgaactttttttattcagggttgcaaatggatctacattattgaagagatttaggaaaccatcaccgaacaacaacctattagaggttcacagttagttatgcttcttttcaattgtgctgggaaatattgctgaaatattctatcctgaaaaaaggttcatcaccttatcagaatgtattgcccctaaatatcgtttagttggtgattgttaactcaattttcacaattaaatatgcttgtgtacaatgttactttgaaatcgtatgaacatgttctatcctattgtcattcagtgtactcaacatgcttacgatatctgcactgtggaccagggctctcttctgaagcagctagcaaacaagagtatcagtggtggtgtagctgttgttctagctgaaacgaacaagtaagagatggagatggacatagcaaagctagaagttggcttcatgggaacatctgtaatatgtaggagtgacgctcctctaattctagcagacttgaggaagcctcgacaaacctgaagtttgaacgtatgacagatgacatcttggttacttttgtggatggacatcttggtcgcttttgtggttggcttttgtggatgcgtgaagctacaattgtagttgtgtaagatttatgtgcataactatgtgggttgcatcagctctccgtactatgtatatacctcccgcgtagctgcctacctatccctaacttgcgacccataaacgtagacttcgatcctataatcttatttgggatcagtttcaggctgtaatagccctgaccgtcttactatggaacacgttaaagtatggtctaaaactttaatgcggattatgttcggtctatctatgtttggtctcatagttgctttgttgctccccgcgctaaacggttttattggagacttaatcatcctttgctgaattttaatatagcatatataattgtttgctca

SEQ ID NO: 20905 - DNA, 1338 bp, Zea Mays
tgtgttcattgttcaattgcaaagaaggaacaagtctattttggccatcaaactatagcccagatttatgtatttggtttcacaaatgaaaatccccacagaataaaaaagtgtgctgttggtaggacacgatttacaataacttgcctgaagacatttgcatcacgaattgctgttggtgattgtcgtgatggtgttctcttctattcttataatgagagtcataggaagttggaattggtctattctgatcctgctcatagattggtgggtgatattgctcttttaaattgtgaaactgctgtggtatcagatcgacgtgggagcatatctgtattatcatgcaccagattggaagtttcagaaagtccacagaagaacttagccgtgaattgttcattttatatgggtgaaacagccatgagcattcagaaggctgcattcaggtatcggcttccaattgatgatgatactgacccggtgcttgagacagtttacaactgtatcgtggcaagtaccatgttggggagtctctttgttatgattccactttcaagtgaggagcatcagcttttgcaagatgtccaagaaaaactctcagtacacccattaactgcaccggtcctgggaaatgatcatgcagagttccgtcagcgtgtcggtagtgcctcccattcttgacggtgatatgcttgtgcaattcttggagctcaccggtgaacaacagcaagccatccttactcatgctttgccagggaaggggcaacataggcccctctcggttttccaggttttgcaaacattagagcgcgtccattacgctcttaactgaggctttcttcaatcacagttactacaaggtttggatattagagctggttgaccttcattgtttgagatgccgtcagagctgaggttttagtgaccttcgcaatctagacggccgattccaagtctgccatgatatttatcagaacgtttgattgatgatgcaactggagcttgatactgggaagtctcatggtggcgagtatcccgtggaggcaccagattcgtcgaacctcctgtgtatatacagtcggccgcttttggtagactgttgtatggcgcattctgcatagaaacgaatattctttccgtttgtttcaatagataatgtaatgtttcttacgtcagctggtcggatgctcaacgagaaataagggaaacaatgaattgcattggccgtcctgctctatcacatgccattactgattagtgatgaatgcatgcaccagctgccgcagtgatgatcttgccgcggcagctcctggtcagggacggcgcccacggggacgc

SEQ ID NO: 20906 - DNA, 2867 bp, Zea Mays
ctggagactgctgttcccctcgaccctcgtccgtccgtccgtccgtcacctgacggctcccaaaccctaccccgcagatccctccccttcctctacccccgcctcgccgccggtcttcgtcacccgtcgccgtgcccgtcggcgcggtgttaagggtccgctacgctgcacctcgcggggagaaaggggtgggcctcggggacctccgccctccgcgcaaggtgcaagtccaaaagaactgactacatcatatatgtaggtcattgaatgaccttctatacgaatatggatttgaatgcatcaccggtgcctgacgatgatgagcaacagccttatgatgattcagttgaggttgggtatgctcagacggaacatgttgaatctgctgttgcaacattgcgccgggagcgtgaagagagacgcaagagactaaagagagagcagcaggatgatgggtcaaggctacattcccagcagattaggaatgattatgctcctcaacccaaaagacatagtcgcattaaagaggcacctcagggctggctggactgccctgcatttggggaaccaatagataaaatcataccatctaaagttcctcttgacgaaacattcaatgagtcagtgcctcctgggaagcggtactcctcaaagcaactagttaacaaacaaagaaaagctggccgcgaaataggtctggtgattgatttgacaaataccacccgatattattcaccagcagaatggacgaagcaaggtactaagtatgcgaagattgcatgcaaggggagagatgctgtacctgacaatgaatctgttaataagtttgtctatgaggcaatgatgttccttgatcgacaaaaacaatcaaagaatcctaaatatattctggttcactgtacccatggtcataatcgtacaggtttcatgattattcattaccttatgcgcacacacgtctcttgtgttgctgaggcgattagtatatttgctcaaaggcggccacctggcatatacaagagggactatattgaagcattgtattcattttaccatgaggttcctgacaatatgatgatagcatgccctccaacaccagaatggaagagaccagatgatctcgatttaaatggcgaagctaagcaggatgacgatgatgacaatggtgatcctggaccactgcataatgaatcagaggataaagtcatcaccaatgacgatgtgttaggggatgaagtgccatatgaccagcaagaagctttgcgtgtcctatgttatcggttgcttgaaatgcctcttggaagggggcatgcacactttcctggatcacatccagtttctcttaacagtgaaaatctgcaactacttagacagcgatactactatgctacatggaaagctgacggaacacgttatatgatgcttataatgagacatggttgtttcttgattgatcggaattttagctttagaagggttcagatgcgctttccccataggagcctccaaggtctgcaagatatgaccttgattgatggagagatgattatagacacagtaccagattcaggcttgaagagacggtacttggcatatgatcttatggcgcttggctcagtgtccaaaactaggttgccattttctgaaaggtggaaaatgctggaagatgaaataatacagccgcgtaataatgagaaaggccttgagcgtggtgctaagagcaatccgttgtacaaatatgacatggaactattttcggttaggagaaaggctttttgggtgctattaacagtaaaaaaggttcttaaggtgtttattccatcgctatgccatgatgctgatggccttatatttcagggctgggatgatccatatgtaactcgtactcatgaaggtcttctaaagtggaaataccctgagatgaattctgttgactttctgtttgagcttacaaatgataatcgtcagctggttttcctatatgagagaggaaaaaagaaacttatggatggtgctcggatatcatttactgatgatgtagatccatcttctgtcgctgggaggattgtcgagtgctcttggaacaaggaagaacagtgttgggcatgtatgcgtattagatctgataaatcaactccaaacgacatcaacacataccggaaggtgatgaggagtatcacagataacattaccgaggagaagcttctcgaagagactgatgagataacgctcctgccgatgtatgccgataggatgaatgttcgtgttcatacaaagatggcacaacacaggcgaagattgccaccacagtgctagtctcgttgctagagtgctgggtcgctctcctagccagcggctggcttctgtagctgtgtaattagtagaggtttcagtagcccccccccccccccccccctatgatgatggccagccaactaattctttgcacttcatttgtgtcttgtcccctgccctcacacctacctgtataggcttccctgtaaattgtgtgctctatgttcctccatattctcccctatggttttatttttcatgggtgtagaatagcgtttaacaaggcgggtggtgttctatgtaggcgttgccatctctcggtgctgcctcgtgctagaataatgtagggtgtactggcgataccatgtggttgcgatatatggcttggttttagtgttttggtttgtgcgcacctgatccgatcctttgtccaacgaagattttttccccttatttttgggtaaaaaaggacgtcaatgttaccactctatggtatagtgcttttttgttcacatggttagatcatgtactgcgtggtccattttttctctttagtgtccgccactttgtgg

SEQ ID NO: 20907 - DNA, 3048 bp, Zea Mays
cctcctcgtcgctcgttccgttccgcgcgtgcatttttctcctcgtatattcccgtcccaatctccaactgcttcctcaaatcccgccccgccccgccccgacataaatccgggcccctaatcccgatcccgccgccaaaatccaatcctgcgccgtcctctcctctcaattcgtgtgtcgctgggccggttcgggcgcggggatcgagtctcccgtggtgctcttgcagccgagctgggattctcgggggcaattgggttggagtttggatttccgctcggaggttggtggtggtgtggtcgccgggagcctttgacttttttttttgccggagtacggaggagcagggggcctgtttgacctccggtgcggtgatggtggcgcggatgatgcggtggcctcggccgccgccggcgcggaatatccgcgtccgcctggtggtgcggcgggcggagggcctgcccccgcctcctgcgcccctctcgcctgacgggtcccccggccccgaggccgaggcgaaggcgtttgtggaggtgagctggaagggcccgaagatgtcgccgctctcctcgctgcggcgcgcgcagcggcctcccaggaaccagacgcggaaggaggcgctgccggccgtcgccgcggccgctctcgaggatggcgccgccgccgcccctgctctagcggtgtcggcggtggcctgggacgaggagttcgagagggatgcggcgctcacggcgacgtcgcaccgtgagcccgctgcgttccacccctgggacgtcaccttctccgttgtcagcgaatcaaataaaatatcaaagagcaaacttgttttggggaccgcttcactgaacctagcagattatgcatctgctgctgaagaggaaatcgagataatcctaccattgtctgtgcctagtagtgcaacagacctggtcccatcactccatcttactttaagcctggcggaagtaagaacatctcaacaatcacctggcgcttcacaacgttctgttattgccccattgtcaccttcctctggtgactctcttgcttctggaaaagatgaggtttctgtcattaaggtgggtctgagaaatctgaaaatgctaagagatctagtgtctacacggaggttcaaaaagactaaccaagactttgacggcagtgagaagtattatgtccacagcgatggtgcagaattttcttgtgatactgactctcttgacgatgatctggatgatagagagcatgacgatgagtttgggggttcagccgttaggaagtccttcagctacggctcactgcagactatgaatgttggtgccctactttatgcgcctaggattgatggagacgatgagggttgggtacattacagtcaccgcaactctgatgttggttatcatgttgagcaagtgccaccccccacagctgaggagcatgcttccatccctttgcggcggaagaggagcatacttccagctcggtggagaaaggtaaaattaccaaaggctaaaggggagcctctgttgaagccgtatggagaggagggtggtgatgatattgactacgatcggcggctgttgaccccttctgatggatctgtttcagagggatcaaatggttctaacagtatggtgtcggtatttggtgatgacgattttgttgtggggaactgggagtcgaaggaagtatttagccgagatggccacttgaagctttctacacaggtgttctttgcatcgatagaccagagaagcgaacgggctgcaggggagagtgcatgcacagcacttgtggctgttgttgcagactggttccaaacaaaccaggacctgatgccaatcaggtcacagtttgacaacctgatccgagaaggatctctggaatggaggagactctgtgagaacgagacctacagagagcgctttcctgataagcactttgatcttgaaactgtccttcatgcaaagatccgtccactcacagttgctcacagtaagtcattcattgggtttttccatcctcaaggcactgaggatgtaactggattcgacttcctcgacggtgcaatgtcattcgataacatctgggacgagataagccgagcagcggagtgctcctccggaaagcctgccctctacattgtcagttggaacgaccacttctttgtcctcaaggttgacgccaatgctatttacatcattgacacgctcggtgagaggctgtctgaaggctgcaaccaggcatacatcttgaagtttgatgacaccaccaccatccacaaaacacctgctgaaaagaaggaaccaagtcctgatcaccgtggacgccgcaaggattcctcagagacctgctcaaccgagcagggcagcggatcggacactgaagagtgcgagcctgtgttgaagggcaaggatgcatgcaaggagtacatcaagagcttcttggccgccatcccgatccgggagctgcaggctgacatcaagaaaggtctcatggcatcaacgcccctgcaccaccgcctccagatcgagttccactacacggaaccccgccccgccgagatcgcggcgccttctccactgcccccattcgaagcccccttcgagttctgctggcccgagccaccgtcaccgccagctgccactgaatccaccgtgacccatccacctgccatggaggccggcataacccaggctgtcgccgttgtatagccggtcctggctgctgctgcggcctagcctagggcaacggttgcttagtttaacatatagagggcggcgcttcttttagcgagcgaattgtgaggtcgagaccagatcgaagatttggctggcttcggccctggtctgctccttttgctgtctaattaagatgaactgactagtatagcttgactgtcttttggtctcagctttcatcatcttgtaaagaaagaaaggatgattgctcctgcacatctttacctgtgaagcgagttcgctggaattgtaatcctttgctacattatctttatgtgaatcatgacctcgtcttttttggtaaca

SEQ ID NO: 20908 - DNA, 1110 bp, Zea Mays
ctcggttattccttccccatgccccactcatgtgggagccgcaagcactgggtctgtcctttaattcatgttgtggtatggttttaggaggaagcttctgtgtgggattgtaactagatgagtcatgaaaaaaatggtttcgtaatgatttgtgcaacaattgtaagcgtcctgggcattttgctagagagtgtcctagcgtggctgtctgccatacctgcgggcttcctgggcacattgcagccgaatgttcttccaaaggtgtttgctggaactgcaaagagcctggccacatggctaacagctgcccaaatgaagggatatgccgtaactgtggcaagtccggtcacattgcaagagactgcaccgctccaccagtgccgccaggagaagtgatcctttgcagcaactgctacaaaccagggcattttcgtgaggaatgcaccaatgagaaggcctgcaataattgccggcagagcggccaccttgcccgtaactgcaccaatgatcctgtttgcaacctgtgcaatgttgctggccatctggcccgtcagtgccccaagtctgatacattgggtgagaggggtgggcctcctcccttccgtggtgttggcgctcccttccatgatgttggcgctcccttccgtggtggcttcagtgacgtggtctgccgggcctgcaaccagattggccatacgagtcgtgattgcatggctggtgccttcatgatctgccacaactgtggcggccgtggccacatggcttatgagtgtccctctgccagtctcatggaccggttcccccctcgccgtttctgaaggaaggacatccaagggctgttcagatggctgttgttttcagcccattttgtcaggagcacctgttttgctttgctttatgtatttctaaacccgaatggattctagatatttcagattcataactcgtcagcgctatttgtaattctggatatgttacccgactccgatgttcttgatgataatgtttgaagacggggatacttgcccttacgaactcaaattcatctcatgagttttaaataatttgctccctgtgcaaattattattaaataatttgctccctgtgca

SEQ ID NO: 20909 - DNA, 2623 bp, Zea Mays
ggtaaagtatgaatcatatattttaaataatagatcaattatgccatttagtgataaagctttggagtctgctgtacggcattcgcctccagcgacggccgcgcttacacgtagtggtgccactgctagaatttgtcaggaacacaagcacacaagaatccgaaaatgaaaggcagcagccagcagggaacacgccgggcctggaactgggtcagtgccgtctacaggtggtggacgcagtcgtatgtgttgatgtcgtctgccgtgcacctgaggtccaagcgccgccgcccgcacgagtgctgctcgccgcgcgcctgagcgccatccgcagttcgttcaggccgcctaggccgcacgtccgactcccgagcgctgccaaccacacacctaaacgcgccgctcacgcccatcagcttcctcgagcgcaccacgctcgtctaccccgaccgcccctccatcgtcgccgctggacacgacgccgcgccgccgccccgcacctggcggcagacccgggactgctgcctccgcctcgccgccgcgctcgcggggctcggcgtcgcgcgccgtgacgtggttgcggtgttcgcgcagaacatcccggccttctgcgagctccacttcggcattcccatggcgggcgccgtgatctgcgcgctcaactcgcggctcgacgccggcatggcgtccgtgctgctgcagcactcggaggccaaggtcgtgttcgtggacgccgtgctgctgggcgtcgcccgggaagcgctccgcttcatctcccagcaggccggcggagcgagcagggtacccgccgtggtgctaatcaacggggcgctcgacgagccgccgccagcggcgacaggaaacaacaagatcccaggcgtcgatcgatgctacgagtacgaggccctcctcagcaacagcagaggcggcgatccagagttcttgatccggtggccggacgatgagaacgagccgatcgcgctggatctgcgtgcaggggcggtgaatcgcggggaggggcgctggatctgcgggcggtgaatcgcggggggggggggggggcggtgaatcgcggggaggggcgctggatctgcgggcggtgaatcgcggggggggggggggggcggtgaatcgtggggaggggcgctggatctgcgggcggtgggtgaatcgcggggggcggggggcgctggatccgcgtgcgggctgacgtgagcgctgagcgggattcgcggcgtggacgttgaggcgggggcagtctacgctccactcttaatagttgtagagatgttatcggctatgtgcactctagttgtgtagaggatggcttccatgttgtatctgcgtgatgctaactcttgagggcgtttagtttgtgaatgtgataatgcagtagcgccggatcttttcttcgcgcccgtgtcgcgagacggctccgctagcagttacgtgttcgcgcgcaagccgccaccaccaccagtctgtcccgttccccacctcaccctcttcttccctatactcgggctacacctgcgaccactgctcacctgtcgcggccatgactcccgcatccacctcccctctcgccgccgccgtcctgcccacgaacttatcttccttctctcgctgcccacctcgccgcctcccgcgcatctcctgcctggcagcgcccgaacgcgggggcaacaatgcgtcgaacgcctcgccggcaccgcagcagccgaggtggggtgccgcggtatccgccgcgctcgcggcggccgtggttgccgcctctatgccagcttacgcggacctgaacaagtttgaggccgagcagcggggcgaatttggcattggctctgccgcgcagttcggctcggccgatctcaagaaggctgtccacgttaacgagaacttcaggcgggccaacttcacatccgctgatatgagagagtcagatttcagtggttccacattcaatggtgcctatcttgaaaaggctgttgcttataaggcaaatttcactggtgctgatttgagtgatacattaatggaccgcatggttctgaatgaagctaaccttacaaatgctgttcttgtacggtcagtcctcacacgtagtgatcttggaggagccatcattgaaggtgctgacttcagtgatgctgttattgacctatcacagaaacaggcattatgcaaatatgcaagtgggaccaaccccatgacaggggtgagcactcgaaaaagcctaggatgtggcaatagccgtcgaaatgcatatgggagcccttcatcccctctgttgagtgccccgccacagaagatccttgaccgagatggtttctgtgatccagctactggtatgtgcgatgcaagctgagaggtttgatccaacatggaaactggtcaatggatggtgtacatacattggagattgagtaagagcagaacagtgcagagaaacaagtcgtttttcttttcctcttgccattgttgtaacattgcaacacggaatcaggtaaaattcaggatgtagatgagatatgcacgctgagtactgaatggcatgtatagcatagtatgtatacgaaaatagatcatatcaatcatgtgcttcatgcttgaaaggaaaaaacaa

SEQ ID NO: 20910 - DNA, 161 bp, Zea Mays
atagaaacgaatgtcacatctttactatataattggagttctgtacaaaatagttaaataattacatcataggaagacaacgatccagcaaccaaagttgactgggagacgacgatctagacctctcacgaacttatcgcggcatccatcaagctcctcat

SEQ ID NO: 20911 - DNA, 2614 bp, Zea Mays
tctttattggcccggagcagcggcagcgcttaactgtttccgccattgatccggcgacctcagctctggctttgcccttgtttgtggaaccggaaagccttttctcagcgctcaaaatcccgcatatgatctggtgctgggggttgccaccaacaggttgttgcccctgcccccgtaatccttgccccctttgctccttgctttcttctctgtgctgcctttgaagtgttgccagatcgctcttgggagatcactggttcgttagccggcccatagtttgtggacaaacaagggccagttcggtctatttcatttcacagaaggggaaaaaattaggcggcgggatcctgctctttcctgcatggtcccttttggagatactgtttgggttgggaggaagtaaaagcggacaagcttggaggttccgaggagggaggaacatatccctttgtagctgcatgaggaggcactgagacaatgagagatgacaactcaagcaagaacaagctgtcctggtccaagacccttgttaggaagtggttcaacatcaaaacaaaggcgaaggatttccattcggattatgcagccgaggaagccggagtgcagtggaggaccagcttctcggatagagacgcatgtaaatccaagaaaagcaggacagagaggttgactaagaggaacgtggagcgagatggtagagtagaaaacggatttgatggtgcttatattacaaacacgcaggactacagggtcttcgttgctacatggaatgtcggcggaaggtcaccatctagtcatttgaacctggaagactggcttcatacttctcctgctgctgatatatatgtgatagggtttcaggaaattgttcccttgaacgctggtaatgttctgttgaccgaagacaacggtccagcgaagaagtgggtttctctcgttagaaaaactctaaacaaccttgaccaacaaggctccggtgtctataattaccacactccctcgccggctccagacccaatcgtggagctcaatgttgacttcgagcgatcatcaaggaggcaacggaactcgtcgtttttccatcgccgttcgttccagtccttgaaccgcagctcaaggatcgacatgatggatccgcactcgttagtggaccgtcgattcagtgtctgcgaccggatcagcttcgggagcaggccaagtgacgttgacaccagcgtgaggtgtggtgggtcgtctgatgatgagactattgacgaggaatcgcctagcggtatgttcttcccaccgatgccgtgtgcgtatggtgctccactatgcgatggttctaggtattgcttagtcgccagcaagcaaatggttgggatttttctcatggtgtgggtacgaagtgacataagggagcatgtgaagaacctgaaggtttcatgtgtgggtagaggcctgatgggctaccttggaaacaagggatccatatcaatgagcatgtctctgcatcagacaagcttctgcttcgtttgcacccacttgacatcaggccaaaaggacggagaccagcttaggcgaaacgcagacgtagtggagatcctgaggaagaccaggttcccgcacgttcacggagcaggtgaagagaagtcaccggagacgatcctggatcacgatcgtgttatttggcttggggacctgaactaccggatcgcgctttcctaccgctcggtgaaggctttggttgagatgcacaactggaagcagttgctggaaaaggaccagcttcgcatagagcaaaggtttggccgggtcttcgcgggctggagagaagggaggatctacttcccgcccacctacaagtactcgtacaactccgacaggtacgccggcgacgacatgcggccaaacgagaagcggaggacaccggcatggtgtgatcggatcctatggtacgggcgaggcctgtcccagctgtgctacgtgcgtggcgagtctcggttctcggaccacaggcccgtgtacagcgtattcacggcggaggttcggattccgagccagcagcaggcagcggctcagttcggcggcggcggcggcggcattactcgttccgcgtccctcctggggctggcgctggacgagctgccttatccacgcagttacatggacatcaatttttactgatcgactgcgcgtgtctcgatggaggacgaaaggagccagccaagccaagggttcaccttctgatggctggctctggctgggtgaagttcatttctcccaaggttccatcggtcggcatgttttgtactagctaacagatagatattcgaggaggtgctttctgactgtaagattaggtatgatccgctgaacggcaaagaccatcagtgctagttttgaatgtaaacgtcgagtcccggttttcgggagagagaaaaaagggagtgttttgtgtcccaggcaccaccttggaagaaggccgtcctggtttcacctttctgtttgttttttttcttctttttggcgtcctgatgtagcaatagtaatgtaacaagagcagccagagccgcgccatgaaaatatttttcttactagtcggaatgaaatggcggcttgttgtacagcgagc

SEQ ID NO: 20912 - DNA, 1012 bp, Zea Mays
tgcctctttgcagcatttacaatctgaatttgctacttcagcaacattggtttcttttgcctgcttcacttattgtgatcaacgatatatttgcttatttatttgggttctttcttgggagaacaccattaatcaagttgtccccaaagaaaacatgggaaggttttattggtgcatccgtgacaactatcatctctgcatttctgttagcaaatgtaatgggccgtttccaatggttgacatgcccaagaaaggatctgtcaactgggtggctttattgtgatcctggtccaatgtttaagccagagcattactcattgggagagtcggtgccacattggttcccatggaaagatctagccattatgcctgtgcagtggcatgctttagccctaggtttatttgcgtcaataatagcaccattcggaggattttttgcgagtggcttcaagagggctttcaaaataaaggattttggtgacagcatacctgggcatggtggaattactgatagaatggattgccaaatggttatggcagtgtttgcatacatataccaccagtcattcattgcacctcagaacttctctgttgagataatcttggatcagattctaagaaacctgacctatgaggagcaaaaatacctatatgaacaacttggggaaatgttccatgagaggcaattagggcaaaactgagagttagcgtgcttatgaaatgcatgataatttcttgtgtatttaagcattctgctcattatgtagctatagtccttgtccaaacctttgtatagaatggtagaatggagagaatgattgggttttaggtgctttattcactcttcactgacgctgcttaattcactccccttgtcatgatttctgcactctttgtaaaaggggacctgggaagttttattgtttcttatcacttcgtggtgctgtcctcagatcatatattcgaggattcacagaatataagatgaagcagcagtgctagttcttatttg

SEQ ID NO: 20913 - DNA, 890 bp, Zea Mays
cgcagaagccacggccctccaccccctccacctcggtgatgagcggcgcctccacttccgtcatcgctccaccttgagggctcctttggttgcccgggatcccgggagtatccaggtcgattccctgggtctgaaatccacaggccgaatcgtcccagggaaaaataaaaagttgtttggtgacccacgctccccgatctgatccgcgggggaggacagtgctttggtccccggcctcccagggtcgggaagggcttccccgcgtcccctcccgtgcaagccgtcgcctcctcctctcgctcgtgaagcctcctctccctcgcgcacggtaccgccacccaccgcctccacctctccctcgcactcgcgcacccaccgtcgcccgccacccccgctcttcctcactccctcctctgcctcgcgcaaagcgcaccgctaccacaggcggtaggaccgcacaacttgccccagatccagaacagtctcctatctcctcaactcacgcatgacgacctcctcagctcccccatccgcatctcgcgaagagaacagaagctggtgagcgatccagaattcggtcgtgaactgaaggagacaagggatggaactcttgagcactaaacacaagttggtcgaaggaaaatcatgatgagcaaagtcattgttgtgttaacgttttgggcatgccaagaactatttttttggttatgagtttgtcaaacatatgttgagtttgtcgctcatttcttaagagctatttctgtgatcgaagaaatttgtttattttagtggcatgaataaaaaaaccaagcaaatccatggtagaaacttgtttgtgtgcatattttgagggctttgttttactggaactgtttgattttgctgatttt

SEQ ID NO: 20914 - DNA, 1565 bp, Zea Mays
aggggagggggcagctcgcgggatgcgctgcgcacagcctaatggactccagaagacattttttacgttttgtactaggttcgcttgcatctcctgacagcagtgatgaaatgtttctttaaaagacctccagagacacaaaaggcattaggagctacattatcagctggtctatctgacacccagcaggatgttcatgacagagcacttttctactacaggcttttgcaatacaatcctaatgtagcagaacgtgtagtaaaccctcccaaacaagctgtctctgtatttgcagatacacagagcagtgaaaccaaagatcggatatttgatgagttcaacagtctatcagttgtatatcagaagccatcttacatgtttacagatagggagcatcgtgagccatttgaatactcagaggatcttacaagcttgactgttggggcagaggatccagaaaatgtaatttctgcccaaagatatcaagaaaacgataatgatcttttgctaagtacttcagataaagaggacaatggtacaagagccagcaatggttcttctacctctgcatacaatgctccttctgatttgattagcccttcattgataagctcccaaacaccagctgaaacttcactagtaaatactggtgggccgacacattcctcacaatcaaacttcagtctcgatgaccttcttggcattggcgttactgaagctcctgctccaacaccaccagcactgacccttaactcgaagcctgtgctagatcctggtacgttccagaggaaatggggccagctagcattggcgctgtctcaggaatgctctttgagtccacaaggagcagcttcattgatgaatccccaatcactcatccgtcatatgcaaagcaattacatccaatgtattgcttcaggtggtcagcctccgaactacaagttctttttctatgctcagaaagatggggctactgctttcttccttgttgaatgtattgtcaacacagcatcagcgaaggcacagctcaaaattaaggctgatgatgggactgctgctgaggcattctcgactttgtttcagtcagccttgtccaaatttgggctttcttgatcctgagtattttgtctgagcgattcactggtccacaatttttttccggcgttcacagttttgcccccactctgccgcggtgccgcctaagcttgtccagtacttgatcaatttgttggagaatcagcgtagaaggtgcgattagagggcaatatattattatcactaaattcagcaagagagcaatggagttttgcggagtaaaatcttatttgtattaattgggtgaactgtgcatttgtacatgactacatgtcatctagataaatagctaggttatttaggattgtgctagtgtgatgccttgacttcttctgaagggccttctttttcttgaaggatgtagaaacaacacacacctccccctttcatgtatgctgtacttacctttctttcttgcacaggtgaccaataaagatgtttcttccattttgattcacattaagggcctg

SEQ ID NO: 20915 - DNA, 3639 bp, Zea Mays
ctccacaccttcgtcctccgtagcggctacttgctcatcgccgcagcccgctggtaccggcggtcgctcgccggccagaaacagaatgtttcgatcgatctacgagatggagtgcgtagctgcaacgacgatagagtttcgatgtcgcgtcggtccagtgcctgctccgggaccaggtcaagcggataccggatactttcacgtcatttgagagttacttggattcgtttacttggccgctgattgaagaagtacatgctgatgtattctcatcgctagatggttattctgaggcaaactttatagaagtaacacagcccgcggaagcggaaagttcccaatgctcccaaccatctcaatgttttgatggtaggttgattgaatggcttggccttgagaaattcggtctaaatgattcacagttgaatgcagtgtcagattgtgtatcattaatggatagcaactcttcatctataaagctattatggggtccccctgggacaggtaaaactaaaactatcagctctatattatgggccatgctcatcaagggcaggaggacacttgcctgtgcacctacgaatactgctgtgttagagattgcggctcggatcgtcagtctaactgtgaagtcttcggatggcaccgtcttcctgaatgacattgttctgtttggaaacaaaaagaagatgaagatagataatgactattatctttcaaaggtgtatcttaactttcgtgctgagcgcctgttgccatgcttcaagtcaaatacaggctggaggcattgtttatgcgtgctgatagatcttcttgtcaattctgtgaccaagtaccagttgaacaatgaggataaaacattcaaacaacatttgaaagatgattacaataaactttctcggaatttacatagttacataactatactatacaatgatcatccaagaaacctggaaacaggacagagctttcaatgtatgctggaggtccgtgagttgctcaaaattcttcacactttgataaatgctggtaatggtggtgatatatggagcgatgaactgctcagaagcactatagaagaggaggtcaaccctgagctttggccttcacagctagcctgcatacggaccaactcatgcaataaatccaagtttgtggctgcaagatctttgtgtctgcaagaattaatatatctttgtaagaacatggagctcccaaattgttacagtgcacaagatgttcgactatacctgctgtcaagaactagattgattatctgtacagtttgtagctcattcaagttgtacaatatacctatgagaaattcttctccaagtttacatcagctgctaaacaaacccaaaatattgattcctctggagttgctgataattgatgaggctgctcagctcaaagagtgtgaaaccttaattcctctgcagttgcctggcataaggcatgctgttctcatcggcgatgagtatcaattaccttcccttgtgaagagcaaaatatctgatagtgctaactttggacgaagtgtttttgagaggttgagttccctaggctatagtaagcaccttctcaatatccagtacaggatgcatccagacattagcaggtttccagttggtacattttatgatggcaagctatctgatggccccaatgtcagtcacaaggactataataagatgtttttagcaggaaaactgtttaggccatattcatttataaatattgatggcagccatgaaacaaatgaaatgcatggtcggagccttaaaaactcattagaagtcgatgcagttgtgatgatagtgcagagtttgttaaaagagacgctttctacacgaagcaagctttctattggtgttgtgtgtccatacaatgctcaagttagagctatacaggaaaaggttgggaagccctgcaggaagtatgattatttctcagtgaaagtaaaatctgtggatggtttccaaggcgcggaggaagatataattatcatatcaacagtcaggagtaatggagctggtacagttgggtttctatcaaacttacagaggactaacgtggctctaacaagggccaagcattgcttatggattgtggggaatggaaccactctgttcaacagcaattccgtttggcagaagatcgtcaaggacacaagagatagaggttgtttttttaatgccactgatgagaaagagttgctgaatgcaattttcaagcctgctgttgagtatcctcatgctgacaatttagctaaacatgagcaacacggacagaatatatccgacttatcagctactgacacaattcagcaacttgcatgtcagtttacccctggaagtgatctcccaccaaagttctctatcacactcaatgttggttatactacaagaaaattcagttcatcaagcaccctgcttaacagctctcctttgcaactcacagcaacagcggtaccaaacgcagaaccagcttctcatggctcttcagctactggagcagttgaattgcctgtaaccgaagatgggcgcttggttgatgggaaaatctcctttcagaatactgtgaggagcactttgatcagaatcgaccacgaccctagacttgcatttgactttctggcagtagcaactacacgggagcaagcagcacctcttacccgggagcagtttaagaagcatgacagaatggtcgaatctcctgctccagttaccgctgagggttcggaatgctgcatcagactcaatgaacaggagcaagtagcacctcctaccaagctgcaatcgaagaagcgtggtagaaatgttaaagatcctgctgcagctactacaggggctttgaaatgcagcatcggactcgatgaaatagctacccgccagcaagcagcacctcctactcctgagcaatctaagaagcgtggtagaaagagcgaacctcttcctcaagttatcacagagggtttgagacgcagcagccgacttagtgaaaaaggcaagcaccatcaagtagcgccgtctcaggagcaagccaagaagcatggtagaaagggagcgacactttctccagttaccacagaggccctgagacgcagcagcagactgaatgaaaagggcacgcatcagcagatagcgctttctatcccagagcaagctaagaagtgtggtagaaaggccaaaaggcttcctcgagtaaccatagagggtttgaaacgcagcaaaagaatgagtagaaacaacagcgaagaattggctgatgtggattgcaatccatgtgagtgctaccataaaaagcccttctagtttcttttgtcagcactagatgatcatgactataactcatattttttttatttcttgaatgactcttttcatgaaccacaagaaatggcaaggaagcgacgcctacctgccgagtgccgactacatcaaaggaggttacaacagaattgtataggttgggacatgtctgcagcaagcaacatgatcgacccttctcgcactacaggaaactggttaaagaacgtgggtgaaaaaccgtcaaacttaatgtaataggccgtcgaacttaccgtaagaacgtgggtttaccgacgaatatagccgacggcgatttttggacgaa

SEQ ID NO: 20916 - DNA, 251 bp, Zea Mays
gagaagtgcagtaatgcgacaaaccactccactgctttatccatgttgattattgtgtaaacactgataaatttgtacaagtaaatcaatatatcatgtgtaaatccttcatacatagtgtttgtttcatgtttgagttcccaaattttgcaaatatattttgtgcggttatctttatataaacaagttctatgatgacacatctcgattctgtgactactgacgttgtaatgaaacaacgaagttctcat

SEQ ID NO: 20917 - DNA, 2591 bp, Zea Mays
ctgctgcagcctgcaggcagccgcccgcgcggaggaggaggaggaggaggaggaaagcaacaagcgatcgtcatcagatctctcacacaagacgccggagtccaggcagatagatacacaccgcgccgcctgccgccatgtcgcctctctgctgtgactcggactggtcgtcggtcacctgagagcaagctaaacgacgacggacggacggagctagctgctggctgctgccagtcacgcctcctgctcatcgaccaagtgcgccaaataaaggatcggaggctgctagcttgttactaataagctgcggcggccggtccgcgtttttctttgcttccgatccgatggcggccgcctcgtccgcgcccttctttgggctcggcgacacgcagatgcagccacagcagggatccagctcctctctgcagcaaaactccacagctgctcctggcgccgcggcggtgccgccgccaaagaagaagaggaaccagccagatcctgacgcggaggtgatcgcgctgtctccgcggacgctgctggcgacgaaccgcttcgtgtgcgaggtgtgcaacaaggggttccagcgggagcagaacctgcagctgcaccggcgcggccacaacctgccgtggaagctgaagcagaagaaccccagggaggcccgccgccgggtgtacctgtgcccggagccgacgtgcgtgcaccacgacccgtcccgggcgctgggcgacctcacggggatcaagaagcactactgccgcaagcacggcgagaagaagtggaagtgcgacaagtgcagcaagcgctacgccgtgcagtccgactggaaggcgcactccaagacctgcggcacccgcgagtaccgatgcgactgcggcaccctcttctccaggagggacagcttcatcacccaccgcgccttctgcgacgcgctggctcgtgagagcgcgcagatgccgcccctgggcgccggcctctacgtcggtcccggcagcatgagcctggggctctcccagatccatggctttgcagatcaagcccagtcctcttcagcagcagcagccccgcagtttgaccacatcatgccatcgtcttcgggctccagctccatgttccgttctcaggcgtcggcctcctcgccatcttacttcctcggcggcagcgcccctcctgccgccgcccaggatttctccgaggacggctcccaaggcagccagggccctctgctccacggcaaggcgcacttccacggcctgatgatgcagctccccgagcagcagcaccagccgggcagcagcaacgccgccgtcggcgccaacggtagcaacatcctgaaccttgggttcttctcagccggcaacagcggtggcacgtccggcagcctgcaggacgcgcgcattgccatccaagaccagttcaacctcagcggcagcggcagtggaagcgcagagcacggcaacaacgtgatggtggcgtccatcggaagccacctcggcagaggcttcccttccctgtacagctcgtctccgtcggccgggatggcccagaactcggcgacggcgctcctgatgaaggcggcccagatgggctcgacgacgtcgagcaccacccacaacaaccacaacggccctactacgactagcacgctgctccgtgctacgggcttcagcggcgccaccggcagcgggcagctggggactactggcggcagggccgccgcgggagaagaaggggcggcgtcccacgaggcacacttccatgagctcatcatgaactctctggccggcggcggcttctccggcaccgcagggttcggcggcggcgtggacgacggcaagctgagcaccagagacttcctcggcgtcggcaggggcgccgcgacgatggcgccgcccgggctccacatgggcgccctggacccggcccagcagatgaaatgaggtatgacagtacgatcgagtatgatgggtcggtcagggaatgatatgatgaagagcagcaacgtacgataagcacatgacaagagatgcgagaagggaagtcaataataaaacagacgatcatgcacgtgaataagggtactagctttcgcgcgcatgcatgcatgggaaggtaagctagctagtgacgagggatcagaaggatggagtagtagtaaaagaaactgttttgttttaagttaatttccgtgttcatatgcatatgctggctgcatgcaacttgttggtttttcgccatttcccgtacgatttcgtggtgttaattcaagtggtttactactctatatatatatgagtatttaaatttggctggagatggcggcgcgcggtctcccccgatgtgaatgaaacgaagctcatgcatcatatgtggagctaggccgcgcgggccagagaccagaatctaagcaggatgctttggacgtttactgcttgttgcctcgtgctcttctggatatgccttttttttctcgctgcatgcatgcatgttgcatgatgatgcggctgtttatatttcatgttggttccttctctgggtcgcgctgctttcaaagctgaaagggggtcggcgggggtccgcgcagagaatgc

SEQ ID NO: 20918 - DNA, 3255 bp, Zea Mays
gggaccgggagccacgccacgcaggcacgcacgcggaggggagcgccggccgtccgcggcggattgggatctccctcgcccgcccgtccactcgagactcgacggcacccgccgcatttgagctgagctgaggaggcgtgggggacggcgcggggatgtggcgcctgcggatcgcggaggggggcggggacccctggctccgcacgaagaacgcccacgtcggccgccaggtctgggagttcgacgcctccgccgaccccgaccccgccgtcgacgccgcgcgccgcgccttcgccggcagcaggggccacctcaagcacagcgccgacctcctcatgcgcatccagatcataacattgtatgtgactggagcactaaacactgtcttgtcatcagaacaccagaaggagatccgtcggtatctttataatcatcagaatgaagatggtggctggggcttgcacattgagggtccaagcaccatgtttggctcagcactgacctacgttactttgagattgcttggagagggaccagatagtggagatggagcaatggagaaaggccgaaactggatcttagaccatggcggagcaacatatataacatcctgggggaagttttggctctcggtacttggtgtatttgaatggtctggtaacaacccggtaccaccagaagtatggctactgccatatctcctgccatttcacccagggaggatgtggtgtcattgtcgaatggtgtatttgccaatgtgctacatctatgggaagaggtttgttggtcgaatcacaccactcgtgttggaattaagaaaggaacttttcaaagacccttacagcaagattgattgggacaaggcccgcaatctatgtgctaaggaagatctgtactatccacatccatttgttcaagatgtcttatgggccactctccataaatttgttgaaccagttatgatgagttggcctggcagtaaattgagggagaaagctctggagacagccatgcaacatgttcactatgaggatgagaacactcggtacatttgcattggtcctgtaaacaaggtattaaatatgcttgcttgctggattgaagatccaaactcagaggccttcaaactccacatcccacgagtctatgactacttgtggcttgctgaagatggcatgaagatgcagggttataatggtagccaactttgggatacagctttcatagttcaagccattgtggctaccaaccttaccgaagagtttggtcccacccttaaactagcacacaactatatcaagaaatcacaggttcttgacgactgccctggtgatctgaatgactggtaccgccacacatctaaaggcgcatggccattctccaccgcggatcatggttggcctatatctgattgcactgctgaaggactaaaggcttcattattgttatcaaagatttctcctgaaattgttggtggaccgatagaagctaatagattttatgatgctgtcagttgtctgatgtcttatatgaatgataatggtggttttgcgacttatgaactcacaagatcctatgcctggctggagctgatcaatcctgctgagacctttggggatattgtgattgattacccgtatgttgaatgtacatcagcagcaatccaggccctgacatcattcagaaaactataccctgggcaccgcaggaaagaggtggacagctgtatcagcaaagctgctaatttcattgagagcattcagaaaagtgacggttcatggtatggctcttgggctgtttgtttcacgtacggcacttggtttggtgtgaagggactaattgctgctggtagaacatttgagagcagtcctgcaatcagaaaggcatgcggctttctgttatcaaaagagcttccttccggtggctggggagaaagctatttatcgtctcaagaccaggtttacaccaatctcaaaggcaaccgagctcatgcagcgaacactggttgggccatgctggcgctgattgatgcaggacaggcccagagagatcccgcgcctctacaccgagcagcaaaggttttgatcaacttgcagtcagaggacggagaatttccccagcaagagatcataggagtgttcaacaagaactgcatgatcagttactcccagtacaggaacaccttcccgatctgggctctgggagagtaccggtgccgagtcctgggagctggcaagcggtagtgacccggcctggccccgtcaacttgactgaaaggcgctttgttgtcttggtgttcttggtgttctatcttggcacgccgagggctgtcttgccggccgcctagctgtctcatgaatcaatcagcttttttgtgagtagctagctatgtgcggtggttggaataatgcagctatgcttttttttagggttgcgctcctagttctaataatgtactacgtatattggaagcagaataaatgttagattgaactaatggtgccattaaagatgacaatagaactcttccgaagcaaccaagttattacattgcacaaatcaatagaacttcaactgctagcgtcacaaaaccgtggattattcaagcgcgcgcagctctaccggcgacctccacgagttcccatggcgacaaggccttcttcttttttattattttctgttcgttcagaacacaagcaaaatcccgctcccgcgttgcagagacgacgccacagaagccacgtctgactgatttccacgcgccaaccgggggcacggcggcgctcccgctccatctccagttctccaccacaatccacaaggaaggaagcatcagcgcatcaggtcgtagtgggacgaggagccgccgtacgatggcggcggcctggggagctggaggagctcctgcgccgtcgccatggcggcgtcgagagcctggagccgcgcgtgcgcgtggtggcccagggccgcgctgccgccgccgtcctgccacagccccggcgacgaggcctcctgcagcacggagacggagccggcggcgaggcagctgctcggggcagcgcggtggtggtgcagctcagccgccggcggcggcggcgggtggttggtgttggtgccgccgccaccggccggactgtttgacagaagagagagagcacgctgaaggtccggggcgccgtccgggctggagacggccgcacaggcttcaacgcctgcgcctgaaaagatgcatctttttttcgatatcatctctga

SEQ ID NO: 20919 - DNA, 374 bp, Zea Mays
tagttcaaaggatgctcgggtgtgaacttagatgaaggcaaagaggtgatctagaagatcaacggctcaagaaagacactagaagacttattaaaaatctaaacaattatgcaagggtacaagataagacgaagacatatggagacagaaaaaaacaacttaacagcaccagatatgtctaaagaggcacaggataattaaactaaagatacgagtgttactgtactgaaaagtgtgaatgaaatagaatactttagacatgcaggtgtgcattagatacaacacccatacaagaatatgatgtgtttggaaaaatccacaagacaccagatgtatctagtgtgccaacggataccccaccagacgagtagttg

SEQ ID NO: 20920 - DNA, 1743 bp, Zea Mays
tccaaagacagaaaaaaaagaaagggaaaaaagggggtctgctgtggactgtgtggtcccgcagggcgcaccattcacccgtcttccgccgagacaccctgcacggctcgccgagacttcagtttactggagcacgcaccgcagcgtctcccccttctgctcatcctccgtccctccgtcggaagggctggcgctaagggacgatccctccgtccgcccgtccgttcgacgggacctcggttggtttcgtcggtcgctgggaggacaggtgacggaacggtgatatgaggcggtggttatgttgtaactgccactatgacgtcgaggaagatgaccacgccaaggaacaggccaaagctcagagcaataagaccgactccaagcagaagtcttcaaagcctcctggtagtcaacctgagccagagttctcccctcctacaattgatgtccctgaattgtctttggatgatttgaaactaaagactgatgattttggatcaagtgctctgattggtgaaggttcttatggacgagtatatcatgccactttggacgatgggagacaagcagcagttaaaaaacttgatgcatctgaaaatgagcctaatgatgagtttctcaaacaggtctcactggcatcaaagctaaaacatgaaaatcttgttgagatgttgggttactgtgtcgatgggaattaccgtatactcgcatatgaatttgcaaccatgggttcgcttcatgatgttttacatggaagaaaaggcgttcaaggtgcgcagcctggacctgtacttgactggatgcagagggtcaaaattgctattgaggctgcaaaagactttaatcttttgaaccaagcaccagatatggcagctcgtctccattcaactcgtgtattggggacttttggatatcatgctcctgagtatgctatgactggccagctgacacaaaaaagtgatgtctacagctttggtgtggttcttttggaacttttgactggaaggaaaccagtagatcacacaatgcctcgaggtcaacaaagtttagtcacatgggctactccaaggttaagtgaagacaaggtgaagcaatgtgtagatcccaggttgaagggagaatatcctccaaagggagtcgctaagcttgctgcagtggcagctctatgtgcacagtacgaagcagagttcaggcccaacatgagcatcgttgttaaggcgctttcgcctctccttcaacaaagacctgcaccaaccaccgaagagccagctccacaacctgggagctgaaaccagtcacatgtgatgggacccctaggcataagccatctccgcaaccattcaatcagcacattctataaatcattgagagtattttgggtatttgttctgtagcgttctcagttgggtatagcatacatgaacttgcccctgctgtttgtggccacctagttcgtggcttgatgttggcgccgcacaatggtatatgaagttggttcgaagtttttttttaccttctctataccaataccaagtgaccaactgtttgtaggttttcataattcgcggcttgaagaatagatgcaggatggtctggatttttttttgtccgtggcgtggtgttgctgcctgacctacgtgatgtacttcctctcttccaaatcccaattcaccttttcttgttctaagctagaattatcaaactttgacttgtttatataaatatatttatggacgtctacaa

SEQ ID NO: 20921 - DNA, 5289 bp, Zea Mays
gttcctcccagcccccgagccgtttccctttcatttcgtctctcctcctcgctcccttttctcttctggcgcccccacccccctggcgattagctcccgcccgcctcccgctccgctcccgctccccaccgcgctcgccgtgctgtctcggcgctgcgcccggcggcgccgtgagggttggagggtgctcgtggccggcagatccggcgtcggcgtcggcgtcggcggacaggctcggaggtgagatcggcggcggggaagggcagagcgcgcgaggtggtcgagggaggaatcggctgcgcgcggaggcggggaggaggtcgagctcgcctggtgctgcatgggggcatgaagcgcggcaccagggacgacgccctcatggggtcccagctcaaacgctcgaacgttgtccgatccgatccgtcggctcagccacagcatatgtctgtgcctggttcagcgtctgcggccgcaccgccgcctcaggctggcgctgctccgccggcgcagccgcagcagccgtccggtgcggcctttaccaaccagaagctgacgacaaatgatgcgctcgtctaccttaaggcagttaaggataagtttcaggacaaacgggagaagtacgaggagttcctcgaggtcatgcgcgacttcaagagcgagaggattgacaccaatggagtgattgtccgtgtcaaaacgctgttcaacgggtaccctgaactgatccttgggttcaacgccttcttgcctaagggctatgcgatcaagctacaagaagagaagaaacctgtcgattttgtggaagctatcaatttcgtgaacaagataaagcatgatgaacaagtttacaaggcattcttggacatcctcaacatgtaccgcaaggataataagtctatccaagatgtttaccatgaggttgctatgctgttcaaagaccataaagatttgcttgaagagttccagcacttcctgcctgatacttcagtggctccacaagcagtggcctcaaagggtggtttggttaagcgggaggacaggagctctttagtgcctcctgcaaataagatccttcacaatgataagagggacagagtttacctgtcacatgctgaccgtgattttagtgttgaccgtcctgatgtggagcatgatcgccagagaagacgtcttgataaagacaaagaacggaaggtggaaagggacagaagggattatgagagagaagacaaggatggtgaacatgacagcagagacctggagctaggacagcgtaagcgaaagcctttttcaaggaatatcgaggataatgtaggtgctgagacacaccaaggaggccccagtgagaatcatggaatccacagtgtatctgcttcatcatatgacgataaggatgcgctgaagagtgtatacacacatgagttccatttctgcgagaaggtgaaggaaaagctggagcatgaagcttaccaagagtttttgaaatgtctacacatctatagccaagagattatcacaagaagtgaactgaagaacttggtgaatgatatactccaacattatccagatcttatggaagggtttaacgaattcttggagcattgtgaaaatatagatggatttcttgccggtgtcttcaacaaaaggccaagcacgagggctgttaaaactgaggataaagaaaaggatagagatcgggacagggaggacaaggatagagatcgggaaaaggaaagagaaaaggaacgagaaaggctcgataaaggatcaacattcaattcaaaggaaggttctagtcacaaaccttctatgttctctggcaaagagaagtacaacctatccaaaccaatatcagagcttgatctctcaaactgtcaacgctgcactccgagttaccggcttctacctaaaaattatcccatgcccccagccagcaacaggactgatcttggagcttctgttctgaatgatcactgggtatcagtgacatcaggaagtgaagattattcatttaaacacatgcggaagaatcagtacgaggaaagcttatttagatgcgaggatgacaggtttgagttggatatgctgttggaatcagttaatgcagcgactaagcgtgttgaagagctgatagagaagatgcaggacaactcagtcaaacctgagagcccaatacgcatcgatgaacatttgactccgttgaacctgaggtgcattgagcgactgtacggtgatcatggtctggatgtgatggatgttctacgcaaaaatgctagtgttgcattgccagttattctaactaggctcaaacagaagcaggaggagtggtcaaggtgtcgatcagatttcaacaaagtttgggccgaaatatatgccaaaaattatcacaagtcacttgaccatcgtagtttctatttcaagcagcaagatacgaagaacctgagcacaaagtctctcctgacagagataaaagaaattaatgagaagaaaaggaaggaagatgatgtgctccttgccattgctgctggaaataggcggcctatagttcccaatatgtcattcgagtatatagactcggaaatccatgaagatctacataaaatcattaagtactcctgtgctgaagtctgcaactcttcagatcaattagataaagtgatgagagtatggacaacttttctggagccagttttgggtgttcagcaaaaacatgggtctgaggatcctgatctagttaagaccaagagccgaacaacaaaattgggtcttgcaaatgtgagagaaagcaataccatagctgggattgtctccaagcaaagcaatggcgatgaaagtgaacaaggtccgtcatctcgggctagattagcaaatggagttgcagcgggcactcaaaatggtttccatgatgcagatcgaattgcccgtaaaggtgaagaaccatcaaacgctatactaaatggaagagtgcatggtgctgtctctgcagatgaaacactttccctgatcacacaaaacattgcttctaccgagcgaccagcagaaaatgctgctgctgttaggactgagcaacataaggcgaacttggtacttacgccaggcatgaatgcttctagaagttctcatgatgcagttgaggtggctggtgaaggcaagactggcaatgaaacattgctttctgccgagggaggggagaggttgggaccatctttaaatggcaccagcgagggaattaaagggcgcctaaataatgatggttctgtgccccacacttcaaaagttgaaagagaagagggtgaattgtcgcctaacggagattttgaagaggaccattttgttcctttcgaagatggaacatctaaaggaaaggaagattctacaagcagaccattccatggtaggcctggggaagtggtaccctcttctgccgaggcagctggtgagaatgatgctgatgctgatgacgagggtgaggaaagtgctcagaggtctactgaggacagtgaaaatgcttcagaggcgggtgaagatgcatcgggtagtgaatctggtgatggtgaggaatgctctcgtgaagatcatgatgaggaagaagaggatatggatcacgatgatcaggatgcaaaagctgaaagtgagggtgaggcagaaggaacaactgaaacacatgatgtggaagggggaatatcactaccactttcagaacgctttctgtactcagttaaaccacttgccaagcatgtacctacagctttacatgatcgagagttctcacgtgtattttatggaaacgattcattttatgtgttgttcagactacatcagattttatatgagagactactttcagcaaaaactaattctttcactgctgaaaagaaatggaggaattctaaggatacaaaccctcctgatttatatgcaaagtttatgagcgcgctgtacaacttgcttgatggttcctctgacaacaccaaatttgaggatgactgccgagctattattgggactcaatcatatgtcctctttactttagataaactgatttataaagttgtgaagcagcttcaagctatagcaacagatgaaatggacaataagcttctgcaactatatttatatgaaaaatcaagatctcctgggaggttctttgacctagtttatcatgaaaatgcccgtgttctactccatgatgagagcatataccgatttgaatgttgctcgagtccgacaaggttgtctattcagctgatggaatatggtcacgaaaagccagaagtgactgcagtatcaattgaaccaaatttttcttcgtatctttttagcgagtacttgtgtagtacgccagacaagaaattatctgaaggcgtctaccttggaaggaataagcggaaatattcaaataatgatgaaccttcagattctttgaaggcaatggatggtatcaatgttgtgaatggtcttgaatgcaagatatcctgcaagacctcgaaagtttcatatgtccttgatactgaagatttcttgttccggcttcggaagagaaggaaaattttgcggggcgggaatgtgcccgaccgtttgcagatttcatcaatatctgctgcaaaagtgcagcgcttcaataggttcctatccaaaccataggatcatttggcatacaaatgtatcgaaacctgttgctggggtcccagctgcttggcttgaacaatgattccatcgacgtcgcggagtcccctttcggaataacagatgggaagacatagggtaaatacagcaaagcgaagcgagcatgtaggccacagtagtcagtctgttgttccgaaagatgtgtatatatgtattagcagcatgattgttctgattatctttttactgattttcgatggtaggtctattccatcaagtatttaactaatcatttgttgctgttggtataggtcttttgttcttttagccgtcgttttgcattgaagatatgtagccaaaattaaaaacctgtgtcgaacagttatgtagtcttggctccattaatcaaacggacaccgtaatttcttggagccttttggtgaggttgccagcaacctctcttgtgtatccaattcaattgaagtataggatgtgtgttacttcttgatgttgtgtaaggtggccgaaattagtggacgtgccatccactatttttactattagattagaacatatctataaaatctagagaatgtgtaaaccgtttagtcttgttcgccatattgattatcattttaatgtattggcatggatggatggaaa

SEQ ID NO: 20922 - DNA, 1847 bp, Zea Mays
atgcctatagtcctatacttacagctgaccaggcgatcaatcacgcacgccgctggtcagcagtcagcagcaagccgcctcgtcgcctcgtcgggagtcgggagtctggtgagcgagctggtgatcaggtaccttggaggcctggcttgcttggacgctccattgcttcgacttcgaggtcgtcgcgggtttggatcctgtgtggagggggtaacaccgtgtagctcaactgtcccctagcgccgccgcgcgaaactccctaccggtccattttgtttgtagccattaagctcttcggaggtggagatctgggctgtcgtttccaggaccctggccgcgtcggctgtgatgggtcgaagcgccttggcggttcggttggcttcccttcttgcgtttggtttggtgctcgtctccgtcgaggccagcctcggggatgttgatccgcgctacagactgtcgctatttttgcatgatgcagagagaaggggaacgacagtcacttggtctgagccctgttaaatatcatggaaagtggccattcttacgtgtttctgtgttccaggaacccctttcaactgcactatctgctgtcaacctactgatgcacttcactggctggctttcatttttccttctagtgaattacaaattgcctcttagaccccagaccaagagaacttattatgaatacactagcctgtggcatatctatgcaatcttatcaatgaacgcatggttttggagctcaattttccatactcgagacattgagttgactgagaaactggactattcttcagctgtggccttgcttggctactcgttgatcctttcattgctaagggctttcaatgtcaaggatgaggctagcagggtgatgtttgcagcccctattttggcattcgttacaacgcacatcttgtatcttaacttctacgagcttgactatggatggaacatgaaagtctgcgtggtgatggctgcggttcaacttctgacgtgggctgtttgggctggtgtaagccggcatccatcacggctgaaactctggacggttgtttttggaggagcactggtcatgcttcttgagctctacgacttccctccatacatggggtttgccgatgcccattcactgtggcatgcaagcaccattccactcacctatctctggtggagcttcatcaaggacgatgccaaattccgcacgtcaacactcagcaagaaggcaaagtagttaagcaaagcgcgacattcttagcatagggtcagagaggatcagattccgattccgtggtctgcacgggggacattttgggggcacacgtgttgtcggacatcatggaacctcggtacatttgccctccccaaaaaagacattcatcttcatccactcaggtttttggcccacaaaagtcaacatactctttagggcgcatgttctgcccttacgaattatctctttactgacctgaacgtgcatcctgtgattgaatcggcatcttatcattgtagtgttggtggggtttgggagattttgtcatcgccgaatcagttttgtgaaatcagacagaacaatgaacatcagtggtgtgtttcctattatgtgtggagttttgtaaattcctgaagcccattttgtatgagttttccaacgttacgaaaattcctgaacaatgaacacgtgctatgtttgaaacaagagggcacggtagctaactagctggcaggcagtggtgggctacgggtttaaactttaaaccgaggacagtcgaggatattttttttgatatgtcatattgtgtataattcgaccacatagatatatagttttcatcaattcggta

SEQ ID NO: 20923 - DNA, 2127 bp, Zea Mays
gtccacccggtggccggtgcggtgccgactgctcctcgcctgtcgcctcgcacaccggatctcgtcgccgccctcgcttctgtagtttgttcctcgcgagatctcgtgcgccgtccgtcctaccacgctgccctctgccgccaccgccaccgccaccgccaccatcaccacctgcgccggcgctcctctaggacgcagttcgcctccgaccccgactccagattttacatgcttctctagtagtccattggagtaattaacatcgattacacggtcatggaagagcaccaagtcaagccatcggatctgccacccactagtttgcacaaccaggattcagccgcaactcctgttaccagtgctgaccctgctcgtcctgctgcttcaaatgattctcccagtcaggttgccagtgcagctcctgctgctgtttctgcacctaccgctgctcctgcagaagatgctgcagggcgtgaggcgtcagcatctgtgttctctgcgtctggtttatcctcctgggctaagaacctaaaaattcctcagccttcaccaggtcaagaatcacctacaggaaagaatacctttgcccgtttaacaagtggccttggactgcgtttgtctccaaaagcggcacagcaagatgagggtgctgaaggaagcacctccccaacaacaggacagcctggtgtttttggttctttaacgaaaggcattgtggattcctctaagaatgctgtaaaggcagtgcaagtcaaggctcgccacatggtctcacagaataaaagacgataccaggaaggaggatttgatttagacatgacatatattactgagaacataattgctatgggttttcctgctggtgatttgagttcagggctttttggatattttgagggtttctaccgcaaccacatggaggaagtcatcaggttctttgaaatgcaccataaggggaagtataaggtgtacaatctttgttctgaaaggctatatgatgcatctctttttgaaggaaagccagaagatttctggtttagtgcaccaaagaaggggattatggtttttgcattgccgggagaacctggcttagccgaggtagctggtgatttcaagatccagtttcatgatcgacagggagatttttactgctggctaaacacaacaatgatggagaacagggtaaccttgaacccaactgatcttgatgattttgacaagagaaaactgccctcacctggattccagattgaggttgtcctggtagattacgatggctcgcaaccagcaaaaccaaaaccaggcgctggacctgctgctgataaatctcatgctgattcctcggctagcacggttgcaaaagaaaatagtgctgcacctgaagaatccaacaagggaactggaagcaataatgatagagatgaagtcttctctgacagcgacggggaggatggatcttctaacggaaggaaggagaagactgccggcggtggtcaaagcagtgtaaatgctgctaaaccatcccagacaggcaacatggaggaggcggcggcatctgctgctgctagcagactggacaaagtggctataagcagcgaacagggaaccacaaaggcacctgatggtacatctctcaaaactgaagtcagcagcaaggccagctccaccacagcaccacctcctccagctgctgactcttccagcatgagcgaattcaaggcgattgccgcagatgcctcggtgttctcgttcggagatgaagatgattatgaaagtgagtaatgattctatgggtgggtacggtgttgagtttccgctgtacagtttggtgcttctaggaccccccatcatagaatgccaaagtccagagatgttaattcattcttgcatttcgtctccactgtagcagtgtcatcggtctgatgttgtacccagatgatgaaacttgttgtaactcaaccaggtcttgaacctctcctgtttgtttacagaaatgccttgtacacgaactcacttaaacagcgcaactactttttattattgatagttaaaagtgtgggtaatgtgtgtgcagccttggaaattaacaacggaaactaacactttggttgttttcggataaaaaaa

SEQ ID NO: 20924 - DNA, 1349 bp, Zea Mays
tatgctgttcgttgtagtgcctgacctctgtctctgggattggacagtagagcattgtgaacccaacgattcaagtcatgcagatgctactaaattcgtgtgggattgcctcaatcaagatgacgatgagctaatgggattgcttggaaatcaaaccccgttgagagactgccgtgatttctttgctgaccttggtggtacaatttttttctaccaattatcattgctaccactcttaatgcatagcttaaagcgcctgttacttgagtagatttcacatgcaaggagaccttggacctggaggaatctcgggaatcaaagcggcggcgcacattagagtacccttcagagtctagtcagtcagaagttgggactcatgatgctgcttcaccttttgtcacatctgaggcagcagaaatttcattgctctgcactgataaaccacagagcttaaattgggatatgcaccacacttcaaataatttagatgaagcaccctaccggcaagaagatattctttctgaacattgctcttatggaactccagtgtacctcgagcctgatcaaacgccttgtagtcaggagagcattgcatgtataaatgatcaatctggtatttcaggaacaagtgagactggaccaatgacagaaagtttcataatgcaggaaactagaaagctttgtacactcaaagtgtccaaaggatcaagctcaacactagttaaggtgaaggaaaacttaactacctcagtagcatatccttttactcttatcaaaccatcttgggaggaaggcgatgttaccttgcaggatataaatcagcgaattcgtgctcctcctaagaaggcccccgagatccttggaacttcagcattctctggcaagccagtgattggcaagacaagaatcagaacagaaggggggaaaggaagcatcacaatactaagaacaaagggctgagaaccggaaaataccttcgatccttatttatctgctagtctctccatttatcagatgagaaaggggagaaggcagctccttggtggtcaattgtgcaagtctgagcacctgaaacttccattgattcacagttcaaggctgagcctgaggatgccattgattcttatttatctgccattctctcgattgcttttggcactttggtcaatgtgcagacctctgtagctttccatcatttttttgttttagttttgcaccgtgggtgtcttgtgaattaatgtagacgcaaaacaacaactttcggcattcttctggtgtatttatgacatgtggtcaatgatatatatacatcaaactgaagtcaatagaattaatgtgttatattccat

SEQ ID NO: 20925 - DNA, 2737 bp, Zea Mays
tacaattcgcccccttcccgcacaacgcatcccccttcctcctccccgtcgatggtgttgtcttctctctcaccctaggacaagggagacactatcgctcctctgccaacgatgtcgagtgctcccccacacgtacggagttgttccaaagactcctgtacttcccctgcaagcctcggcggtgaccatcatcgatctatggacctcggtgagtggaggtcacggatctactccaccggtgtcgacgaggtttgtttccccgtcctggagaagcgacgacgcaatagatcttcgtgcactgcagagtcgtctcccccaagccgcaaaggaatcactccactccatcctcgttctttgaatcgatctgtggcaaatgttttcggctgttggccatgaatttatttagtattttatttgatctcatgagattagaacatacatctctagaagctttgaaggacattccttagtcgatatgcccaaatgatggttttcttgaccaggtgacatttgctattcaaccattaattactaagtaaccttgaagtataatttatttagtatgctattcagcctttactaagtaatcttgaagtataatttatctgcactgattgatttttgttctgtgctaccagctaaccagggtcattaaaatgtagtgttggccatttttaactatgtcagctcacctagaaaattttccttaaccaagcatcccatatacaacacaatgtcctctagagaaaacatttgaattctttgtcttggaacaatgtctcggtctgcaggtctggttctcaaatacaatcgtcaagtcttgcgagcatttctttgagcctcattctctaccaatgaagcactttcctgtcactagaactgaactatagtcttcatagtttcactacactcaatttgggaattgtatatcataattgtacttttcttttctttttctatatactaaattttcttgtttttattaacacaattgtgaaggcttatcattacacgtccatgtgtcattgtgctcacttggatcttactaaagacaaagtatgggctgagaaagttcattggcatttgagtttgcatggctggccttattttggtcgtattttctgatgtgtgttcttcttatcgagcaagtatgaacaagcttcattttttatacatatggaattgcactattacagttctgatgtcatactgaatgcattttcttgaaaaaatgataatatgaatttacaacaacgaatgttcatctcacagtatttacatagatgagaataatgtccatattacctcactatgacatggttaaataaaatttatcacaggaaatgaaactgtcagctatgaaaacccaaagccaactgctggaatacattgccttgtctttgtagtctcctgctagtttatccagcaaacagtttatgcataagggtcttcttttggttaattagggttcttttggtcagttatcatatgatcacttgttgctttattaggatcctgtctggggaatcttcatccttttcacccttcacctgtttttgtttcgaatacaaatttgtatgttttgaatgggattgctaaagtgatattacagttactttctgtcggtttaaagtctgatgataaatggagtgtggagtatggactactaccatttattcctactgcaaaatcatttaaaatggatatagttttggccatgttactacaattgcaacgatggataagttatccctgcttgttctttatgggtatgtgttctagattctagaagattaatgcttgaacccatctaacaatgttgtggctttaaccgatttcaggtgtggatctgatttgtaatggcttattaggatttaggccaggtgtgatctggtttgtaaatgaatctctttgccatgcattgagttgttttttctgtgctgtctcatggttacactctattggcattgtacagttcatcagactaggtgcaagtttttttcctgataaaacatcaaaaaggtctaaattacatgtatgattcaggcatgttttcttaattttatgacagtcactgatgttctgaataaaatactactattttgtgacaatcttatagcatggccttcgagttgtgtatgaagtatgaactaccctcttgattaactagtcattactactccaagctactactatcaatttaagtattgtgatcattcatgcagattgaagaggactatagtctatagatcatatgctcatttcaacatcaagggcaatttgattcaattaagtctaggatgatgattttcagtacctaggatgaagtttcagagctgccacctaatttcaggccagatttattttccagagccgctagatttcagtttcagagctgcacgatgaatccacacttgattctattttctcttgactttcagagctgcaagatttctacagaattggaagactatgctaccaaaaaagctttcctaatttacctaagatgaagttcagtattgtttaggacgagtcatatgtttatgtctttgtgtctccaaaaatatttgtacacgtatcaagtggtgattattttaagtttcgctactctatatattggctattttatttcaatgagaaatggtttgtccattgcaaccgtgtggagtttctcatttttattaatggcaaatgctgatgtatattcatttttgttgaataaatggtttatttcttg

SEQ ID NO: 20926 - DNA, 133 bp, Zea Mays
ttcaacaagaacactctaggtttctcaaacctaaccacggtcaaccatagaattttaaatagatttttgattttcaaaaaatagcttttgaatttagaggtttgagctttggcaaacaccaaccttctttttg

SEQ ID NO: 20927 - DNA, 1824 bp, Zea Mays
tgcctgccaagggagaagttaaagtagtctttgttgcagtgcaccaatcactgcaacatactggcctgaggtcattgagttggtgaaagggaaggagggggtatcatgggcatctcatccaagtggattaaatccttggttggcataaggaagcaagaaaaagcgcagaatgcagaaaagcaagaaaaagggtggaacgctgagagcagtgaaactaagagctctgctaatcaatcactgcacaaacggaaacattctttggatcccggagctgcacttgcagtcgaagaaattacagtacaaagtgaagcattgactgataacaaaagcgcacaaatggtttcaaattcatttttttcagacagtacaccgcttgatgtgcacatttctcaggctgaacatcatagtaacgaagatttggccgcaactgttgtccagtctgcgtttcgagcgttcttggctaggcgtgctttacgagctttgaaaggaatagttctacttcaagcccttattaggggccattctgttagaaggcagacagcagagacgcttcagtgtatgcaagcgctggtaaaagcaaaagctcgtgtccgagcaagacaagttcgtgttgccttagaaaatcaagtggcacggaaaaagattcctgaacaagatgatcatgagaaccatgtccgagaagtcgagggaggctggtgtggcagtattggttccatggaggaaatgcaagctaaagcactgaaaagacgagaagctgctgctaagcgtgagagggcaatggcatatgctttgactcatcagcggcaagctggttccaagcaacaaaattctttgagcctgcaaggtcttgaacttggtgagaaccactgggagtcaaattggttagacaggtggatggctgtacgtccatgggagaacaggttacttgactgtaatgccaaagagagtctgccaacgcatgaagataaggatgaggaagcaaattctcagatcacaccaaagggtaaagtgtcaacttcaaatactcctggtctgagcaagaagaaaggtgttaaccacaaaaagtcatattcagatgttagttgtacttcatttgcacgaccagcaaatgtattaccatccacatctttaggatcatccaaacagaaggcaaaggctgtgggtgaagtttttgaggaagtcagctcccagccaacagatataggttctaaggatgtgcacaattcaaaagataagcttgtgcaagtgaatggaccagccaagaagcggttatccctcccaaataatgttggcagagaatcagggaagggaccaacccgcaggaattcgcttaacaggtctgctccaaaagcacgggcggactctcctaaccagggtgatgagttagaggcctgataacacattcctccaatttgacgtcggcaagccatcctaaagtgtgcttctccaggttgcccataacgtaacattcccaaacgatatcatgcagctagatttgggttgtgattcatatttctgttgtgtaatgctgtggtgtgttgtgccttgtgtggccttttattccgcatcgccaattttcttatgtttccagcttccctgtaagttgttctaactgctgaaactaaaagaaggaaatgtgctgtattgtgtttatgtgttgaagtttctcgggaacttcgatcctgcttttgcagttgcagaacaccatcctctgattgtataccttcgagtgcaatcattcaggtcaaatatgcatgatcctgatttgtttatgtatgattggtcgtaaaagtgagggtcatgtggtctgtaaactaccaaact

SEQ ID NO: 20928 - DNA, 944 bp, Zea Mays
gtgatttagcaacggttttcttccgttttggttcccacaaaccgccggatggaacatgaaagtctgcgtggtgatggctgcggttcaacttctgacgtgggctgtttgggctggtgtaagccggcatccatcacggctgaaactctggacggttgtttttggaggagcactggtcatgcttcttgagctctacgacttccctccatacatggggtttgccgatgcccattcactgtggcatgcaagcaccattccactcacctatctctggtggagcttcatcaaggacgatgccaaattccgcacgtcaacactcagcaagaaggcaaagtagttaagcaaagcgcgacattcttagcatagggtcagagaggatcagattccgattccgtggtctgcacgggggacattttgggggcacacgtgttgtcggacatcatggaacctcggtacatttgccctccccaaaaaagacattcatcttcatccactcaggtttttggcccacaaaagtcaacatactctttagggcgcatgttctgcccttacgaattatctctttactgacctgaacgtgcatcctgtgattgaatcggcatcttatcattgtagtgttggtggggtttgggagattttgtcatcgccgaatcagttttgtgaaatcagacagaacaatgaacatcagtggtgtgtttcctattatgtgtggagttttgtaaattcctgaagcccattttgtatgagttttccaacgttacgaaaattcctgaacaatgaacacgtgctatgtttgaaacaagagggcacggtagctaactagctggcaggcagtggtgggctacgggtttaaactttaaaccgaggacagtcgaggatattttttttgatatgtcatattgtgtataattcgaccacatagatatatagttttcatcaattcggta

SEQ ID NO: 20929 - DNA, 2323 bp, Zea Mays
gttcacctcggctctttctcgctttctttctcccgttcacgccggctctacctgcgataggttcgtctctctcgtggcaacgactggccgccgccctcgccctcgcccccgcccccgcgcaggttcccaggtcttcgccggtcccttcgccgccaaagagcacccactaggttaaatctgccagcaggacatctccatcaagtgactggtgctaattatgcgatcttcatgggctgactcagttgcgaacgccgaggaatcggcgcccgcgactgctgctgctaacggctctgttgcaaatcatagcaactcgcgccctacgcgcagctcctacgtgcctcctcatctccgtggccgctcagctggtgctgctgttggagctcaagcaggctcagtagcaccagcacaaggtggaccactgccattggctgctgcacaaccttctggccagggcgctgttgttggtggccctcgctgggctggcattgtgaatggtggtggtggtggcagcgttggtgctcctcgccagggttatggtggtggtggtgggggcggaggccgtggtgcttggaactcccgtcctggtggttgggaccgcagagaccgggagccagatccgtttgccaaagccgaggctgaagaagttgacttcgacggccaggagaatactggcatcaattttgatgcctatgaagacatccctgttgagaccagtggccatgatgtgcctgcaccagtcaatacatttgcagagattgatttgggtgatgcattgaatgaaaatatccggaggtgcaagtatgtgaaaccaacaccagtgcagcgttacgctatcccaatctccatcgctgggcgggatctcatggcctgcgcacagactggatccggaaaaaccgccgcattctgttttccaatcataagtgggatcttgaagtcaccaaagccacaccagaggtcacggagtacaaggaccgcttgtcctctagctctgatcttatcacccactcgagagctctcagtccaaatccatgaggaagcaaggaagtttgcataccagactggtgtcagagtcgtggttgcatatggtggtgcaccaataactaaccagctgagggagttagagagaggtgtggaaatcctggtggcaactcctggtcgcttgatggatctgttggagagggctagagtctcacttcaaatgataaagtatttagctcttgatgaagctgatcggatgcttgatatgggtttcgagccacagatacgtaaaattgttgagggcatggacatgcctcaacgtggtgagaggcagacaatgttgtttagtgcgacattcccaaaagagatacagaggatggctgcagatttccttgctgattacatctttcttgctgttgggagagttggttcaagcaccgatttaattgttcagagggtggagtttgtcctcgattcagacaaacgaagctacctcatggatcttattcatgcacaaaaggctaatggcacacatggaaagcacgctcttacattggtctttgtggagacaaagaggggggctgatgccctggaggactggctttttagaaatggtttccctgcaactagcattcatggagacaggacacaacagatgattatgttcatcggattggaaggaccggacgtgctgggaaatctggtcttgcgactgcattcttcaacgagagcaacactacgcttgcaaggccattgagtgatctcatgaaagaggcaaaccaggaggttcctaagtggcttgacgggtacgctgcccgctcagcctacggaggtggaggtggtagaaaccgcagacaaggtagtggtgccagatttggtggccgtgatttccggcgagataggggcagtggtggttcctacggaggaggtggtggtggtggtggaggatatggcggatcatcaggatacggtggtgcttatggcggcggcggcagcagtggctatggtggtggtcagagtacgagttcttgggactgaactgaattctggttagaagtgaaaaatgggtcaacctgttgggtgtgaaaaatgggtcaaccgttatcgattagtccctgttggatggagcgaatgcctgaaatttgttgcttgacttgcgagtacggtgtcaggaggtttcccagtgccttaatcttgcattttgtgttgtactagggattgcttatgttattatctgaattggtggtttcttttctacgcctcatgcttgtgctgtcttcttcacaaagtatcttgtgctaacttctgatcatagatataatttcatctaggtctcatttatatc

SEQ ID NO: 20930 - DNA, 291 bp, Zea Mays
cacaattcatcactcattaattcataattcacatacatgttcatcagtttaacccataattatatttgcataaaccaaattaacacatagacatagttcattaatcattagattaattcataggccatagacacctcacatatatataacatacatatatataacatgttcatcaattattttataaatgatatgcatatagtttcgttttgctggaatatgaaaaacttgacctacggggggtaagacagccctcgaagcccatgtgagaacgaccacgaccggggttga

SEQ ID NO: 20931 - DNA, 2328 bp, Zea Mays
atgaattcttatgtaaattccattaacttctcaggtgaggcggctctcgtcatgtgaaacaatgggatcagctactacaatatgcagtgataagacaggaacccttacattgaataagatgacagtcgtggaagcatattttgctggaacaaagttggatccatgtgatgatgttagccagatgtcagacagtgcagcgtcacttattattgaaggaattgcgcagaacacaacaggaactgtatttctgccagaggatgggggagcagctgaacttactggttcgcctactgaaaaggccattctttcttggggccttaagatagggatggatttcgacgatgtgaggacaaaatcttcagttattcatgtttttccatttaactcggagaagaaacgtggcgctgttgcagtacagttagatgatggtgttcacatccactggaaaggtgcagctgaaatagtgttatcatcttgcaaaagctggctttccgtcgatggctctgttcagtcaatgagtgctgagaagcacgatgaattcaagagatcaatcgaagacatgggagcgaattcattacgctgtgttgcttttgcatactgttcctttgacattgaaaagatcccaatggaagacataacaagctgggagttgcctgaggatgacctgactctgcttggcatcataggaataaaggacccctgtcgcccaggtgtaagggatgctgtacgcctgtgcactactgctggtgttaaggtgcgcatggttacaggagataatattgaaacagctaaagctatagctctggagtgtggaatactagatgcaaatagtgttatttcagagccagttgtaatcgagggaaaagtgttccgtgagatgtctgaaagtgcaagaggagaggccgccgacaagataattgtgatggggagatcctcgccaaatgataaacttttgcttgtccaagctttaaaacgaaaaggccatgttgtagctgttactggtgatggcacaaatgatgcccctgcattgcacgaggccgatataggtctttcaatgggcatttccgggacagaagttgctaaagaaagctctgacattataatcttggatgatgacttcacgtcagttgtcaaggttgttcgttggggacgatctgtctacgctaatatccagaaattcattcagttccagctcaccgtcaatgttgctgcacttgtcattaatgtggttgctgctgtgtcctctggtgatgtgcccctaaatgctgttgagcttctgtgggtgaacctcataatggacacacttggagctcttgcattagcaaccgagcctccaacagacaaccttatgaagagaaatcctgttggtcgaagggaacctcttgttacaaatatcatgtggagaaacttgtttgttcaggccctttaccaagtagcaattcttctgattttcgattttgatggagtaaggattctgcgtctgcagaatgaaagccgatctgatgctgagaagataacaaatactttcatcttcaacacatttgtattttgccagatcttcaatgagttcaatgcacgaaaacccgaggaaaagaatgtcttcaaaggggtcacgaagaatcacctgttcatgggaataatcggtataacgacagtatttcagatactgataattcagttcctggggaagttcttcaaaatagtgaggcttggttggagactatggttggtttcagttgctatcggccttgtgagttggcccctggcttatgtgggtaaatttattcctgtgcccgtaagacctcttccggactatttcaaaccccgctgttgttggaaaccgccgcgccgagacgaggaggaaggtgggcagagctaaagcgcaacgagtgggcagtgtaaataggcacgtgataaaaaaatggagataaattgcactggttgattccatggtagcagcatcctggggatgtacgcataagatggcaggtagtcggcctcgtcgttttcttctaggagaagcagtcggaagaaaagaagtactatacagaagccaaacttgtctacccctatccagctggtgtgtctgctatgcggcagcgaaacttgagtcattagattgtagcctgaatgaaagcagcgctagcttgcgatgtagcagtacctttttttccctggcgatatcatctgactgtaaatttgtaaatgctttcggactacgagttgttcttatttttcatccacctcttctctacggaacgtttttttctatataagaaaataaagtcaacagagcagttctaaaacgactgttttttttttcctgaa

SEQ ID NO: 20932 - DNA, 724 bp, Zea Mays
cgacaatgaagcgacgagggcctgtcggatgatgatgcagaaaacgatggtttccggaaatgtgaatgtgtgattcagtagatttcatctctgcacaacaagcctgacagaaacatctcatgggaagcctgccctgctgggaaagatgtgccacggagactactttgccgctgaaatgatcgacgacagtcgaaacaaaacaaacagccatgaatcgatatcgtgctagagtatttgttggttatatgcttaactagtctgctcagcagggttatagtttcgatgcccacctgtacaatatcaagatcccctttctttcttttctgtcacattttatttttctcgctttccattgtgttttcacgcccgctgtaccatatgaggctgccatgttacctcctccagggattttggatccctgacatcatgctgttttattttgttttgctcctgacgtatttagtgatggcttgttgatagtttcgtccaaattggtaacattcattcttcacttcataggagtgacgtacgagggacatttggttgtttagcccaggcgtactgtgttttcgatgagacgcttcttttccacggttcaataatgtcttctctgagaaaatgtactactgtattggttgcaaagtgcaaaagatcaattctgatttctgaatcttatacctttgacaagtttttatattattataatatagtagcaaatatgccc

SEQ ID NO: 20933 - DNA, 2984 bp, Zea Mays
gcccgatccgcagaactgcagaaggcagacccacgtgactctttctcccgtttctctcgtcagtttctccgctcgccccgcggttcccgcttcctacagccctccggtcgactcgggttcccacttcgccgccgctcccccgtttccttcacctcttctcctgcagtcctgcgcaccttcctccctcccagagtcccagtcaaaccctgctcggaagcaaacggacttcggatcctcggctttaccactcgcgtaccctgctggaggttgttttgtatcatggagagtacagacaagaatgacaaaagaaatgctgtcacagaagagtcttctaatcctggacaaaattgtgaagatgacggggatttttcaatgaaaactgaaatgttaaatgtagaagaagcaccaagtttctcgaatgacaaattaaacaacgaatcagaagtgcagattcaagagggaggtaatgattcagaagagggcttaaacggacaaatgaatgaaaggacaagctcagatgtcatggaatgtgcaagctcaaacgagatcacaaaagagaatctttctgaagataaaactgaagagccagtatttgatggaactgaggttcttgaaatagaagaaatgaggcgttcttccaatcaatctggggaacttgactcagaggctcaggggtctgtactcaatgaccgggctgttgcaataaaaaattttgttaaagaaaggagtgcaattgcagtttcaacatttatgcggcgcctttctggcaaaaaggatgagaatgaatttaaggctgaagctgacaagactattggttcagaatacatggactgcgagaaaaccaggacagatgctgaatccaatcctaaagaggtgcaacagaaatctgtggaaagaactgtctggaacccactgaacttcattaaaattggccgggattctgatacttttgtaactggggaagcgttgaatgaaaatgtgcctggtttgttggagataccaccattgaagggtaggataataatatacacaaaactgggatgtgaagattgcaaaaaggttcgtctattcttgcttcggaaaaggctcaagtatgttgagattaacattgacatcttccctggtagaaagttggaattggagaagaatactgggtcatccactgtaccaaaagtgtattttaatgacctactaattggagggttaattgagttgaggaaaatggaagattctggcatacttgatgagaatatcgatgttctgttcaatgaggaatccccatattctgctccattaccccccttacttggagaagatgatgaatcaggaagtgggaagattgatgagctggcaaccattgtcaaaaaaatgagagagtcaatcactcctaaggatagattctataagatgagaagatttagcaactgctttcttggtagtgaagctgtggatttcatatcagaagatcaatatttggagagagatgaggcagtggaatttgcaaggaagcttgcaagaaaatacttctttcgtcatgttctagatgaaaatgtcttcgaagatggaaaccacatatatcgtttcctggatcatgatcccatagttatgactcaatgttacaacatccctaggggcatcatcgatgttgcaccaaagcccattgctgaagtagcatcaaggctgaggttgctatcctgtgccatttttgaagcttatgtatcagccgatggtagacatgttgactaccaaagcatccaaggttctgaggaatttaaaagatatattagaacagttgaggagctccagagggtggaaattgattatttatcacgtgaagagaaacttgctttcttcataaatctctacaatatgatggctatccatgcattagtgacatgtggccatcctgctggaccattggacagaaaaaagttttttggagattttaagtatatcattggtggatgtgcttattcactgtcagcaatccaaaatggcattctacgtggcaaccaaaggccaccatacaacattgccaaacctttcgggcagaaagaccgaagatccaaggtggcccttccataccatgaacctcttgttcactttgctttgatatgtggcaccaaatctggacctgcacttaggtgttactcaccaggggatatcgataaagaattgatggaagctgcacgtgatttcgtgaggaatggaggactgattgttgatcctgaagccaaaattgcatctgcaagcaagattttgaaatggtatagcacagattttggtaagaacgagatggaagtgctaaagcatgctgcgaactatcttgagcccgcagagtcagagcagctcttggaactgctcgccagcactcaactgaaagtcatgtaccaaaattacgactggagcatcaacatttagaagtagcttgatgtctatccatatgttctttttacatttgcgtacctattacacaaagttccgtggattggaattctctttctgaagcaggacgaacgtctgacagggtggtgcttatcatttttctgaattccgttcagttaactaaatgagaatcgccgacgccgtcttccctaccggagctattaagatttacaaacggtggtgatgttatcagcacggccggtgatgtggagcgagcgagcatgcgtgaacgctgctgcagcgcgcatgattgcttggaacaattaacttctcgccattacgagcgagcgtttgagctgcacgtattttgttttgttgactggctcgatctgaaaaaaaagctgattctacgattttcctcttaccttttaaactctccaaacagtttaaattacctgtctcccatggtttataatggcattttgaactcaaaaccgttgaaattacctctactatggtttaaagtggccttgaagttgattttgtgctttttagttacaaaatccaactaagtatttggtgaggtttttaattcaaat

SEQ ID NO: 20934 - DNA, 5222 bp, Zea Mays
atcttcgacaggggtggtccatgcgtttgagctaaacgatacaggactggctgtagcggactcctgcagcttgagccgaaaaaatggtgtctgccggctaaatccactgtcctcttgcaaatcccatctccctctcgccgccgccgctgcctccgctccgctcccctccccgtcctactcccgctcccactgtcccacccaccacccgaaccttaaacccccacgaacttcgcccaaaccctaaacctcgtcgagccgcagccccgccatgccgaaggtctttggcaccggcgtcttcgagttccggcacccccgagcggccgagtacccactacccgcggacgccgcccccgctacggctgcggcgcccgacaaagttcccgcatccaccggcggcggctccatcacgctcctcgacatccagcgggaccgcctcacccgcgtcgccaccgagcattggggcacggccgccgctgcggcggccttcgacgcggaccttgtcaggaagatctatggcactgagctccgcgtcgaggggaggggccggaaaactgtgccgctgcagcgtgttatgatcctcgaggtcagccagtaccttgagaactacctgtggccgcacttcgacccggttgacgcttccttcgagcacgtaatgtccatcatcctcatggtcaacgagaagtttcgggagaatgtggcggcttggacatgtttccatgaccggaaggatgcattcaaggggttcctgtggcgggttctcaagctcaaggaagaggaaagggctcttaatatggcagagaaaacaaattacctcctgtttatgataaattcatttcagagtttggaggacgagcttgtccgggaaacaatacttcagttagtaagcctaaagctgtggaataccctttcgtttggacgacttcagatggaactctgcctaaaccctgaattgattaagaagtggaccaaaatcagaagaagagaggcaaaggaagcgaaaaaggctgaccaacctatcaacccttctgaaatgctcgagaataagttccttaggaatttaattgaagaattcgtggagattctcaattcaaaggtcatactatccaatcaagatggtgctgaagaatctgtattgaatgagtctttcagtgggcaaattgacgattcttgcgttctatattgtgagagatttatggaatttttgattgacatgttaagccagcttcctactagacgatttttgaggcccctggttgctgatgttgctgttgttgccaagtgccacttaagtgcactctacactcatgaaaagggacggctttttgcacagttggtcgacttgctgcagttttatgaaggttttgagattaatgatcactctgggacacagctcggtgatgatgatgtcctgcaggcgcattattcccgtttccaagcttttcagttgctagcatttaaacaagtgcctaagctgcgagattttgccttgtccagtattggttcactccataagcgagctgacttaacaaaaaagttgcttgtcttgtcagatgtggagctgcaagatctggtttgtaacaagcttaagttaatctcagagaaagatccatgcagtgaaagacgcgattttcttattgaagtcctagttgctttttttgagaagcggcaatcccaaaaagatgcagtaaatgcacttcctttgtatccaaatgagcagatcatgtgggatgaaagccttgttcctagcattaattactctggagaaggctgtcttgccctcccaaaactcaatctccaattcctgacgcttcatgattatttgttaagaaatttcaatctgtttcgtcttgaatcaacctatgaaattcgtgaagacattcaggaagctgttcctcatctacatgcttatatcaataatgagggagagacagccttccgtggatggtcaagaatggctgttccgatcaagggatttaagattacagaagtgaagcagccaaacattggagaagttaagccttctgctgtaactgctgatgttactttcagcatatcaagctacaggtatcagataaaatctgaatgggatgctctgaaggagcatgatgttctatttttgctgtcaatccgcccttcatttgaacctcttagccctgaagaggctgaaaaatcaactgtgccagaaaggttaggattgcaatatgtacgtggatgtgaggttattgaaattcgtgatgaggaaggagcactcatgaatgatttcacaggaaggataaaacgagaagagtggaaaccacccaaagctgatcctgggccgtatcctcaagataaacctaaacagaactcagtgaggttcacaccaactcagatcggtgctataatatctggtattcaacctgggttgacgatggttgttggtcctcctggtacgggaaaaacagatactgctgtgcagatattaaatgttctatatcacaactgtccttcacaaagaacactgattataacccactccaatcaggctttgaatgatttatttgagaagataatgcagagggatgtgcctgctaggtaccttctccgccttggtcagggtgagcaagaattggccactgatcttgattttagtcgtcaaggtcgtgtcaacgctatgctggtccggcggctagagctgctcggtgaagtttctaaattggcgagatctcttcgtcttccagaagatgtgggctacacatgtgaaactgctgcatatttttggctattacatgtttatgcccgttgggaacaattcttagctgcctgtgctcaaaatcaagacaaaccctcttttgtcaaagaccgcttccccttttcagagttcttttcagatactccgcagcctatttttaccggcgagtcatttgagatggatatgcatgcagcgaaaggttgtttcaaacatctttctacaatattccaagagttggaggagtgtagggcttttgagctacttaagtcaacagtggagcgagcaaactatctaatgactaaacaggccaagatagttgctatgacttgtactcatgcagcattgaagaggagggactttcttcaattaggtttcaaatttgacaatttgctgatggaagaaagtgcacaaatattggagatagaaacttttataccgatgctgctgcagcggcaggaagatggccatgctcgtcttaaacgttgcattttaattggtgaccaccatcagttaccccctgttgttaagaacatggcttttcagaagtatagccacatggaccagagtctctttacaaggtttgttcgacttggtgtcccttatattgagctcaatgcccagggtcgtgcaagacctagtattgctgaactttataactggagatacagggagctgggagatctgccttatgtccgtgagcaagcaatcttccataaagctaacgccggattctcttttgagtatcagttagttgatgttcctgattataagggaaaaggtgagtcagcgccttctccttggttttaccagaatgaaggggaggctgagtatattgttagtgtgtatatctatatgcgcctgattggctaccctgccaataagatttcaatattgaccacctacaatggtcagaagcttcttattcgtgatgttatcaacaaaagatgcaaaccatggaatattgagccccctaacaaggttaccactgtggacaagttccagggccagcaaaatgatttcattttactttctcttgtccgtacccgttttgtgggtcatcttcgtgatgtcagaagacttattgtagctatgtcccgtgctcgtctgggcttgtacgtgttctgccgtcgttcactgtttgaacaatgttacaaattgcaaccaacattccagctgctcctccaaagatctgataagcttgccttgaatcttgaggagtgcactccttttaccgagcgacctttggaggaaactggaaacatccattacattactggtattgaagacattaattcatctagtaaagttcaggctggaacatcttcgtcaagtgcaatacatgcagtattatgctcctccggcaaatgaactgcctcaagcagcaccagaaaatattgctgatgcaatcccttctgaaaatggcaatgctggaagggctctgaatgatggaaacgaggacatgacccgggaagaaaatggtggtgcaactgacacagtgatcagtaataggatagaggaagacagcgttgaggcaaaggatgacatgacacaggaaggggacaagggtgaagtgagtggcaagggtcacatggctacagaggataggaaaggggaagcacaaggtggcgcagatggcaagctggaggaagcaaatgtgatgtcggcggacaagatgatggaggaagcaaatgcgacgtcggcagacaagatggaggaagcaaatgccacgtcggcggataagatggaagaagcagatgccacgtcgtcggacaagatggaagaagcagatgccacattgccggacaagatggaagaagcagatgccacattgccggacaagatggaagaagcagatgccacattgccggacaagatggaggaagcaaatgccatgtcgccggacaggatggaggagaaaaattctgatccgaaggacaagatggatgaggagtgacgtggtggtgtaaccagttttgaaatagcggtagacttgttctgtcagccgcatatcttgatttggaacatcatgtattcacctgtgttaccgcagatgaagactgatacgtgctccccaagaggtgtagccttgtgggcagaatcaagatcgacatatgatgaccatgttcctgcggttaatggtggtgaaggctgttttccctaccatcttggccaggctatgctggaaaatgttccttctcttccagccaagggtatccatgtttccgcatgtgtttaatcgtgtaaactgtagaggattttttgggtagttttttctgaaacacccgttccatctatcgttgtctccgtaacataacacagctggaacgttgcttttgtatacttgactgactactataattttggcacaagcattagatttttgcagatttgataggccttatcggccattcaaaattttgatttgacagaccaactcacccagcctataaaagagaagcaaatgggagtaagaaataaatgtatgacactggca

SEQ ID NO: 20935 - DNA, 1260 bp, Zea Mays
tcccatgtcatcatagtatggctcatcaacttaattcctcggatgataatatagaagatcatgtaaaatcccagtcccattctatggcagacattccaattacaaatggagtgaggaaacactaccgagatggagcttttgttaaagcaagttccttttctgcatcttcaggtcatgatgcaatgcaaatgctcaagtcagagatgcaagatcatggatttcattatatgccacctaggaaaccaaggaaatcagatggttatcttcgttataggcggcggcggctaagtggtggctttatttttgttgcacatgctgattattacttgttgctacgtgcttttgcaaagcttgcagaaattgatattcgtatcatgcatattagaataccccctccattccttctggaaaaaaacatgtggtgccattgcgtaactgtggttttgaagaatatacgtagcttgatacctcaggaattgagggcttctttctgtggcctcttggcattggtaagcaacctgagcacaaggacagggcaggatgtgggtctgtatttgctgaagcaatatgtaccaagaattatgccccccttctttagaacggacataattatatcagggtcctaatcagtactgtggtagattcagcaacagttccagtagtagacctcagtgcttggcagcaatggcactggggatctgcaatcatgaggcagtttcagtttgggaactggagtggcaagaggaaaaaggctggaacctgggctttttaaagaggctaatcagtactgtggtggattcagcaacagttccagtagtagacctcactgcgcggcagcaatggcactaagggatctgggttctgcaatcatgcggcagtttcagtttgggaactggagtggcaagaggaaaaagcatggaatttaggctttttaaagaaatgctatcagtattgtggtcgattcagcaacagttccagtagtggattcagcaacagttcaaggttagtacaattggtcttgtcaaagctgccgacagaactaaaaagatatccagcatagtgtaatgcatcttgatgtactgccgacatttatttcgttccagcttctgcagcaagagctgatcgtttcaaaggtgtttatgttttatagttcacatgatgcaaagtggattggactaaagccctgagaatgcaacacctcaaagaagacttgaaaagactctaagaagaactaaaaatatccaacacaagtccaaaaga

SEQ ID NO: 20936 - DNA, 3334 bp, Zea Mays
catggccttattggctcccctcgccgccgccggagggaggcggtcaaacgatgctatcccttcccctacgccgccgccgccgcctccttcgcttctgcgctcgccggaaccctaccttcctgcgcctctccatcgctgcctccgcggctgccctctccaccgcccctaccgtcgcttccgccgtcgtcactcccatttccgaccgcctacgcgtcctccgctccctccacgctgtcgcccctgaccaccttctctcccacccgctcccctcatccgcccatatctgcctcgccgcccacctcgctgcccgcgctcgcctcttcgcgcactcccgccgcctcctctcccgcctgcttggtgctggccaccggccccacctcgccgcctccctcgtcgacattcttcaccgcgcggccctcgcgctggggcctcatcgcagcgcgctaccttccgtctttgacaccctcctctccctgctcgccgatcacggcctcctcgacgacgccgtccgcgcccttgcccgcgtgcggcagctgcgggtgccccccaacacccgtacctgcaaccacattctgctacgcctcgcccgcaaccgccaaggcgggctcgtcaggcggctcttcgaacatctgcccgcgcccaacgtgttcacgttcaatatcgtgattgattttctgtgcaagcagggagagcttgtggaagcgagggcattgttcgtgaggatgaaggcgatgggctgctcgccggacgttgtcacttacaattctttgattgatgggtacggtaagtgcggggagctggaagaggtggagttgttggtgtcagagatgaggaagtctggatgtgcagctgatgttgtgacgtacaatgcattgatcaattgcttttccaaatttgggtggatcgagaaggcctacagctactttggggagatgaagagactgggagtgatggcaaatgtggttacgttgagcacttttgtcgatgcattttgcaaagaagggttggtccgggaggcaatgaagctgtttgcacagatgagggtgaggggaatgatgccaaatgagttcacttatacttcattggtcgatggcacttgtaaggcagggaggctagatgatgccattgtattgcttgatgaaatggtgcaccaggggttggtgccaaatgtggtgacgtacactgttatggtcgatggcctttgcaaagagggtaaggttgctgtagcagatgatgttttgagtctgatggagagagctggtgttaaagccaatgagttgctctacactacacttatccatggacacttcatgaataagaacagtgagagggctctggatttgttgaatgagatgaagaataaaggaatggaacttgatgtctctctctatggcactcttatttggggtctctgtaaagttcaaaagctggatgaagctaagagtttgttgcataaaatggatgactgtggtttgagacctaatactgtcatttatacgacaataatggatgccttctttaaagcaggaaaagagtcagaggctgttgccttactccacaagattccggattctgggctccaacctaatgttgttacttattgtgcattaattgatggattgtgcaaagcaggatcaatctatgaggccatctctcattttgataaaatgagagagttaggtctggatccaaatgtacaagtttacaccaccttaattgatggtttttgcaagattggttccttgagtaaggctgtgcacttgatgaatgaaatggttgacaagggtatgtctcttgacaaagttgtgtacacatctctcattgatgggcacatgaagcagggagatctccagggtgcctttgcactcaaggccaagatgattgaaactggtttgcaacttgatctctattgctacacttgttttatctcgggcttctgtaatatgaatatgatgcaagaagctagaggggttctttcagaaatgattgggactggcattacacctgataagacggcttacaactgtctgataagaaaataccagaaactgggaaacatggaggaagcgtcaagtcttcagaacgaaatggaaagtgttttgagctcttgcacagaagaggatactgcttctggttctggttgtgaaacctgagtttgcagctgtacaaagagctggccggccttggagcatgtggcaagcacatctggagaatgggggcgccatgaagcacaagctgctgaaggatgtttccaaaatgttgttcgtgcctaatgggatttcgactgagagatctactagatcaaattgtaacaaggatcatgctatcaaatcaaaagcaacacttaagggtgctttgtctttaattgcactaaacattgtcagttacaacaggaagatggaaaataggtttcaaacactaagagagctgggatccaaaggaaaaagaagcaacccactggtgcttgaagagttcatgtgggaaaatgaatgggttgaagaaaatgaagatgatggtgacaacaacatatggtatgctgtggatgaggcattaggagcaactcaggctcttcgaggcagaaacgttccttaaatgaaggtttttgcgatgaagtggtcaaatgggccagagtcactgtacgttcttgaatcctgatgtcatcccggtcttagccaacaaagaagaattcaagggagagacatatcacatatgcaatagaggcgcgtgtagctaaaaacaagcccataacttgaagaccatgtagttttttttcagggacagcagcaacttgagagagaaccataacagtggatcttctcttgggtattggcaattccataccaagtggttatatacaggatttatgcaaagaatttgacaatgccaaacatctgccttttggagcttcttccagagaacagaacatttttgcgagagacatctgttgaaaaatcagcctcgaaggtgcctgtctcttctaggagcaaagagctgccgaacttcaagagaaaagtggaggaagaaagtctccttgtttaccaggaagaaacataggaaggaggcgtcaaaaacgcccgctggaaatgagaaaactgagggcacgtcctctgctgtagcaaaacagaaaccggggcacacgctctgcttcaaacgtctctaaactactttatgctatgaatttataatctttttaccattatgctcataaatcaatgaagtagtaagagaatacacacgtcgtcaatctatctccaattatttttttattatatataaagtatatggtgtctctgcccgcagcaacatatatctaatattagaatttagaacgctg

SEQ ID NO: 20937 - DNA, 680 bp, Zea Mays
gctgagctcacttattttgttcaacactctgccctctgtttgtgatttacagaacgaggattctctgtgatactgtcagacatgtgccccccagtttcagggatcacgactaaagatggagctatatcttagaagtatctgagctccactgagcctgagtctgacgaggatggcgttcttcgacgtggaggcaacctggtagtgaagtttcttgagaatgaggacatatcagggtttggcaaattctgcaaggtgaagttcaagaaagtatcgttgttgagacccaaggcgactcgacctagctcgagggagatctacatgatctgcgaaggtttgcggtagaaaggagggctcttcagaaggcaagcgaagactccaagaagctaggtcagttgagttgccctgaactgggcgctgttagttctagctgctggtgcaggtgctggctgattggcaatgtgatacagctgtttgatgctgatagcctcccagagcaagttaccacaaagctttgtgtgattgaaccatgctagtagttcgtctagatgttacctgtaataattttgttgaactgtgatactagttcgtctaggagaaacaagcatttgacttgagccctttctgagaacctgaaacacccttgctttttatgttgcaaatttccattatttcggccggat

SEQ ID NO: 20938 - DNA, 1439 bp, Zea Mays
gtcgtcaggcaggctgtcagccttgctcgtccgatcccgcaggtgaacagacagatggactgattgggtagctgttggcaagctagttacccattattcttccactccacctcgcccgtggcccgtacccgtcgtcgtcgtccacacagccacaagctgctgctgctgctgcgcgtgcttcctcttcagttcagctgaggtagcggcgcctcacccatcccccccgctacatacacatatctccttcttcgaagaactcggtcctttgggagcgagcaggagcaggagcaggacaggaccaggaagatcattatcaggagaagctaggcggggatatggcgaacgctggcggcggggcggccgaggaaggggagtggctcaaggtcgcccagctcagggccctcgtccaggaggaccaccgcgccaaggaggtggacaacctgacgctgcgtcggttcctgcgcgcgcgcggccacaacgtggacaaggcggccgccatgctgctcaagttcctcaggtggcgggcggaggcggcgcccggcggcggcaccgtgcgggaggagcaggtgcgcggggagctggagcaggacaagatctacatgggcggcgtcgacaggaccggccgccccatcatcgtcggcttgctcgccaagcactactccgccaaccgcgacatggcggagttcaagagtacgtcgacgacgtggcccttctttcttcatcaatcaaaatgcgtgtgtacgatccccagagggcaggagaagttcctcgccatcatggatctcaagggctggggctacgcaaactgcgacgtccgggcctacatcgcggccattgagatcatgcagaactactacccggagcggctgggcaaggcgctgatgatcaacgtgccctacatcttcctcaaggtgtggaagacgatgatctaccccttcatcgacgccaacaccagggacaagttcgtgttcgtggatgacaagagcctgcgggagacgctgcggcgggagatcgacgagagccagctcccggagttccttggcgggaagatgcctctcgtctccctcaaggactacgcccagcagcctcagcccgtttgcgagtgagtctgtcgtagcgatggtggccggccggtgacgtgagcgacccaaagccgaaagctgattcgatctagactaagctaatacagcctacaagagggaggaagagaggccctacccgtggaattaagtcattagtttgtggtccaattcaataagaaagtaaatgtggtgtgtgaagatggtatggcattatcagtctttaatcccatattatacatttagatagaagaaaatcaacttatatgtggtagtgttccctactttttatatgagataaataaagggatacggagaatgctgcacgcacgctctcgctcacgtttcatgtttttcgcg

SEQ ID NO: 20939 - DNA, 2868 bp, Zea Mays
tgctactcattcgccatccccaccctcccccagtaccagtagtaggccagtctcgttgtctctttctctataacaccaaagaaggagaaggagattaggagaaggtgaaggaagagggagggagccaaatcctagcgcgcgctagaaaatagagattgttgttaggagtgttggtggaggaagagatcctgcaaccataaaagaagaaagcaggcgaacccaaccaaacataccaaagcgaagcaaaagaaaggcactcatccaacacaaggacaccaaactcgtaaagtgatcgtcggcgtcatatatagggagcagccgggccgtcgagaaggacagtggagctaggcacgcagccgcagccgcagcaagcaagcaagagctgcgactgcgagcaggcttattaagctaagcgacgacctccgttccattgcgaacaggctacagatcagagtgaggaagaagaggaagccgaatttcttttcactctcccgactgacctttcgccggtgcgcacgccacctcgggtcgggagcgtcgatcgagtccgtggcggtggcggcgtgggacggtgaccggtaagtttgtacaatataaagcgcggcggccacacagtcacacacacacacaccagctgggagctgcggagatgcagcagcggcgcaagtcggtgttcgcgtccgcgccgttcgcgatgaagcaggcggcgctgggagccggcgtggcggcgcgcaagaacggcgcgccgctgtcgctggccgcggtggtgttcgcgctcttcgtcttcgcgacgttcctctacaacgaggacatcaagtccatcaccgacttccagttcagctccggcgccatccgcgccaagtcccccgacctgcacctcctgcaggaggccgaggccgcggcgcacgccgccgtgaacaccctggccaagcgcggggaggaggtgatcgtgcgcgtcctcgaggtcgaggcgccgcccgtcgtcaacactagcagcgtgctggcggccgccgcgaaggccagcgccaaggccaacgcggtggacgtggggcaggagaaggagcgggacgtgacgctcccgacggtgacggggggccgaggcggggccgacgaggcccagcggcgcgctgacgaggaggtcgctgagaaggccgcgtcggcgaaggcggcggcggccaccgccgcgctgcgcggcgtggtgagcgtgccgcagacgtgcgacctgtaccggggcagctgggtgtacgacgaggtgagcgcgccggtgtacaaggagggcgagtgcgagttcctgacggagcaggtgacctgcatgcgcaacgggcggcgcgacgactcgtaccagaagtggcggtggcagccggcgggctgcgacctgccgcggttcgacgcgcggctgctgctggagcggctgcggaacaagcggctgatgttcgtgggggactcgctgaaccggaaccagtgggagtcgatggtgtgcctggtgcagtcggtgatccccgacagggggcagaagacgctgacaaagttcgtcaacggcgggtccagcaacgtgttctacgcgcacgagtacaacgcgacggtggagttctactgggcgcccttcctggtggagtccaactccgacaaccccaaggtgcacagcgtccccgaccgggtcatccagtggcacgccatcgccaagcacgcgcgcaactggatcggcgtcgactacctcgtcttcaacacgtacatctggtggctcaacacgctcgacatcaaagtcctgggtcgtccttcgatgaccagggctccaccgagtacgtggaggtggaccggcccgtggcgtacaaggaggtgctgacgacgtgggcgaaatgggtggaccgcaacatcgaccccaacaggacgaccgtcttcttcatgggcatgtctcccaaccacatcacgcctgaggcttggggcaacaagggcgggatcaagtgcgccatggagacgctgccgatcgcgagcaaccgcagcgcggcgctggacgtgggcacggactggcgcctctacgcgggggcgcgggaggtgctgcccacgctgcgccgggtgcccgtccacttcgtcgacatcaccgcgctgtcggagctgcgcaaggacgcgcacacctcggtgcacacgctgcgccaggggaagctgctcaccccggagcagcaggccgaccccaagacctacgccgactgcatccactggtgcctcccgggcctgcccgacacctggaaccagttcctctacgcccgcatcgcatccagcccatggcccaacgacgcccaggcccagcagtagggaccctgcacctgctcctccttctatcttcctcattcgccgcgggccggcgcctcacgacacaaaagggaggcctgggctgcaacggcccgcccatcgacgagagctctggcgtttctgcttcaagctagctgatcagccaaaagggggcgaaagacggcgtttctgctcgccgtctttgttttctttccttttttttaaacgatttttctttctcttttcgttgcataaaaggaaactggtccgtgttgttcaccttcgattctttggtccaaacacaagtggatggtctggggtaaatgagggtgtgacgagcttagttgctcgctcatttggtttcttctcctaccaacgatgcctagggggaaagcaagagttgagcatgaagatgtgatgggggagaagcaaagctggggggagtacatgtaaagaagattttttgcgttgtatttttatatgctgctgcagtgcacccaaggttaagagaggtataaagagcatttgttcttcaatcatgacgaatcctgtgtcttatttttagcttagaaaagaaggcgc

SEQ ID NO: 20940 - DNA, 7899 bp, Zea Mays
ctggaagccaaaggctgcaatcgaacactccggtacttcgccacaccgcgaaagcacggcggctcctatcccgcgcgggcatcgccatgcccgctatccccctcgtgatccccaacgcactagctggctaggcgctcaccgacgttcctctccatggcggcgtcggagcgggaggccgcgctcctcacacgcgtggcagcgaaccacctctttctcgcgcagttcgagcccctgcgtgcggtgctcctcagcctccgccgccgtgacccggtgctatgtgcggacttcctccgcgcggtcgccgctgcgggcggccgcgtcccgggcgtgctctggtccgctccccctgcctgcccgtccccatcccacctcgcctggcttgccgtgctcgaactcgccgccctcccctccactcccaatcccgaggcgctgcgcctgaaggcagagttcctggtcctcctccagcccatcgctgacgaccccgccattggcgccgaggccagagaaatcctcacgaaactgctggatttgggggtgacgaggttgaagctcgaggtcgaaggcggaggggacgcaggtgctagtgccgaggaagcctccgtgaaggatctgagagggctatgggaagtgttcctcgacaacgcctttgtgtttgatgcgttgtgcataggcgtctcgaggcagatcgccttggacaggggtttcggtgtggatgtgctcctatggctgcggcggaacgtgcaacttgcccatttggatgccgtgaagactcttgtcacggaaggtgatctggatgctgctcctggccatcttcggtttctttgccttgaccatggactggagaaggatgagtacaaggttgtcatagcagagcttctcagaaagggatgggcaaaaacatccaattatggtggaacatggtctgagttgcagaataggataactaaattatatggagcagctcttcaatctactagtcccgagctcgtgcaacttgttcagctcattctggataacattctttctgaagaaattgaagatcatgatgtctctgatgctaatgggatgcctcttcctttcgaaaaatttctcgaaacattgttgttggagagggatactgactcagatgacaaggtcttgttggatgcggctataacgtcctgcaaaaaagatctgtaccattattgccgattgtctggaaagcacatgcttgaagtagtcttggaaactgctctatcatcaattaagagggagcagcttcttgaggctgttgatgttgtttcgttgttcccccttctccacccactggttgctgtcttgggatgggatattttgaagggtaaaacaggtctgcggagaaagctaatgcagctgttctggacaagcaaatcccaaggtctacgactacaggaatattcacattaccgtagcccgacagatgagacatcctgtgaagagtacttgtgtgatcttctatgcttccatctggaccttgcacgttttgtttcaagtgttaattctggctgtttgtggaatttgaggaattcattgttgtttacccaacaagagcaaggttcagatgttaacaatgcagaaatattagacccttttgtcgagaacttgatacttgagcggttagctgttcagagtcccatgagagtgctatttgacgtagtcccaggaataaaatttcaagatgcgatcgagcttgttggtatgcagccacttccttcaacaactgccgcttggaagaggatgcatgatattgaactgatgcacatgcgatattctcttcagtcagttgcgcttgctctaggagagatggaaaagtgtacaggtgatgagaatgagtgttattatcataaagcattgtcatatctcagggagatgcaaaattttatggaggctatcaaaagttctccaagaaagattttcatggttagcattattttatccttgttacacatggatgattgtgccaaattgtctcaatctgtcccttctgagtgctatgttagtcatgaatgccatgatataaatatcgaatctgagggaaagaacgtggtggtatattttgttgggcttttacttgatatacttcgtcataatctcgaatcaaaaggctctgatacggatcacctttcaagtactggtctgtcgcctgctggtagacaagcgttagaatggaggctcaaacatgccaaacattctattgaagacctggattggcgtctatctgttctaaaacgtcttccacctctgtctgagcggcaatggagttggaaggaggcattagttcttctacgtgctgctccttcgaaattactgaatctatgcatgcaaagggaaaactatgatataggagaagaagctgtgcaacgattttctttacctgctgaggataaagcttcccttgaactagctgaatgggtagctggtgcatataaaagagcactggttgaggatgctgttaatcgtgtcacagataatacaaatgcagcacatgaattggatattttgtcattacgcacgcagcttggttctttaactacaattctgctttgtgttgatgttgctgcaacatctgctaagtcagttcatatgtgccgatttcttctcgatgaggcaacaagcatgttatctgaaatatttccaggaaggtcccccaaagtaggaccaacttactgggatcagatccaagaacttgctaccatatcagtgataaagcgcatacttcagcgtctgcatgacatcttggatctggatactcttccatctcttcaagtgttctttactgagatgagcatctcttcgtcaacggaatgtagcagagttggacaaaagcaacgtcctcttgggcttctgcaccaaatgattgatgacgccttcaaaggaaagcgacagttcttgagtggtaagcttcacaatgttgctagagctattgttgatgaggactttgatactgtttattcgaaagaaggtgtcaacttagaaaagaaggatattttgagctctgaaaaaggcatactccttggtcacgggcttagaattctaaaacaagcatctaggagtgaccttgcatcttcaaatgttgtggatagtggtccagaacacaaaggttctgcaaacagatatctgggccctctatctaccaagccgtcaacatatttatcaaacttcataatatatactgcaaccattggtgacatagttgatggaactgacacaactcatgatttcaactatttctcgttagtctatgaatggccaaaagatctattaactcgtctggtttttgagcgtggaagcactgatgcagcagcaaaggttgctgacacaatgagtgttgattttgtgcatgagattatatcagcatgtgtgccacctgttttacctccacgaacaggacaaggatgggcttgcattcctgtcatacctaccatttgtaatattagttcagaaaacagactatgcaccaagtcttctcctgctcaaggatggagtgcacatgattcgtccttgtcttctcgtcaagaacccctctatcctctccaattaaatttagtgaagcatttagcccagttatcttcagtaagagcagttttggcctgtgtatttggaagcagcatactatctggggacaatgaatcatcttttactcatgtgaaagattcaacacaagctccagaaactgagagatcattttttgaatttgctcttgagcaatcagagagatatccaaccttgaaccggtggatacagatgcagtctaatcttcatcgagtatccgagtcttctataacagataaatccgaagtctctttgcatcaatccaagggaaagttttgtatgaagcgaacccgtgagtctgacagtgatggtgaatcagagcttgaagagaatgtcataagcgggaacaccagttcaagttcactagaatccactaaacatgaagacgctaggctagagccaacaacttttatttcatttgattgggagaatgaagcaccatatgaaaaagctgttgagaggttaattagtgaaggaaaattaagtgatgctcttgctgtgtctgatcgttgtttgcgcaatggagcatctgataatttgcttcagttgctcatcgaacagaaggaagaaaaaggtccaggcacaggacaaattcatccatatggatctcacagtcttgggaatgatacttctcagtactgcttgaggctgagagacaaaaaagttgcagctcagctcgctctaaagtacttgcacagctgggaccttgatgctgcaaccaatgttctaactatgtgcatgtgccacttacctgagaatgatcctatgcgcagtgaggtgttgcacatgaagcaatctttacagaggtatggccatatcatgagtgctgatgagcactacactagatggcaagaggtggaagctgattgtgaagatgacccagagggcttggcactccgtcttgctgccaaaggagctgtttccgctgctttggaggttgctgaaagtgcctctttatcaattgatttgcggagggagttgcaaggccgtcagcttgtcaaactgctaatcactgatccacttaatggcggaggcccagctgcagcttcaagatttctgtcaactttaagggattccaatgatgctcttcctgtagccattggtgctatgaatttattacctgacctgcgttcaaagcagcttcttgtgcatttcttcctcaagcgtacagttgggaatctatcagatgctgagattgcacggcttaatttgtgggcattaggtctccgtgttctttccttattgccattgccatcacaacagcgttgttcttctctgcacgaacaccctcagttgatcgtagaagtactgttgatgatgaaacaactccagtctgcttctttgattttgaaagaattttcttccttgagggatgataagttaattattgcgtatgctaaaaaagcaatctcaattaacagagaagcacgcaaagcattctcatgggtcccccgtgatagtggcactaaaacacccccaaaagatatccttcggaaaagaaagagttcaggctctggaggtgatagatcctcttgggaagcaatgcctggtttacaggaggagcggacacctgtatatccttctgaggcgcaagaaagacttccttttgtctctgctcctgatgagtgggtgctgacgggagatcctgacaaggatgatgcaactcgttcatcccataaatatgaaacctctcctgatatcacactgttcaaggcattgatatccttgtgcaccaatgagtcagtagctgcaaaaggtgcacttgaattgtgtatgactcagatgaaggttgtgctaagctcccaacagttgcctcttgatgcctctatggacaacatagcccgggcttatcatgcaacggaaacttatgtacaggcactctcttatgctaagaatctatttaaaaagctcgttggtagtagtgatttgtcaagtggctctgaaagaagtaaggaagttgatgatgtttctgtggacactggcagttcaagcactgggagccagtatctggatgagctgtctgatttcctaactcaagcagacatgtggttagggcgtgcagagcttcttcaaagcctgctgggatcaggtattattgcctcgctggatgatatagctgacaaagaatcttcaagtagactacgtgacagattggtcaacgatgaacggtacagcatggctgtatatacttgtagaaagtgcaagattgatgctgtaccagtatgggttgcatggggccatgcattagttcgaatggagcactatgctcaagctcgtgtgaagttcaagcaagcacttcaacaatacaaaggcgatgcaacttctgttgttactgaaataatcaacacaattgaaggagggcctccagttgatgtttcttctgtccgttccatgtatgagcatttggcaaagagtgcggcgaccatctttgatgattccctttctgctgatgcttatctgaatgttctgtacatgccatcgacatttccacgatctgagaggtcccgacagtccagaggtcatgtagacagccaattcaggactgctagttcctaccttgaagatggccctcgcagcaatcttgatagtgtccgatatgctgagtgtattcattacttgcaagattatgctcggccacaaatgcttgctttcatgttcaggcatggccattacactgaagcatgctctctgttcttcccattcagtcaaccaaccacggaaggggaaacatctttgtcttcagctccatggagtgatcctttaacaactgattatgggacaattgatgacttgtgtgatctctgtcttggatatggtgccatggctgttttggagaatacaatacggacaataacacaatcgcccacatatcatgaggcacacatgattcagtacatgaacactattatcacccgcatttgcaactattgtgaaacacacaggcattttaattatctctacaacttcctggttctaaaagatgaccatgttgcttctggcctttgttgtattcaattatttatgaattcaatgtctcaagaggaggctttgaggcatttgggacatgccaagacacatttcgaagaagccttatctgtacgagatagaacaatcgaggctactaagttggtattgcggtctgctcggaataagggtgcacctggaaaaatgaccagggaaacgataatgaaatattccactcgtgtttcctatcaggcgaaggtgcatggttgttgaaactctggctgaaaagcattttgatttagctttcagaatgcttcatgagtttgatctcccagctgttgatatttatgctggggtagctgcatccctcgcagaaaggaaaaaagggggccagttgacagagttcttgaagaatataagggggactatagatgatgatgaatgggatcaggttattggtgctgctataaatgtttatgccaacaagcataaagaaagaccagatcgccttatcgacatgctaatcagcaatcacaggaaagtacttgcttgtgttgtctgtggacgtctaaaaagtgcattccaaatagccgcacgaagtggaagtgtcgctgatgttcaatatgttgcccatcaggcattacatgcaaatgcattgacagtgcttgatatgtgtaagcaatggctcgcgcagtacatgtgataccatagatacttgctgagagagttctcacgtgaagacagaaaaactaaggggcatttggtttgaagagtcaatctattttagatgatgttgtgtatcataagtttattttataaatttggtggaataaattcgttctccatattattactaattatgagcttatgatgaatgaaatgctgatgaatcaatttattatattcaacaaactaaaaaagaaagtgagaggtgagaagatgatagactatcttaatccttaaaccaaacatgtcacaagtaatcaaagcaaggaaccatctgaaagctggtgttcaatcctcatatcccatttcaacttctttccgctttccacttcgtgcagcacaatgcctccatgtgtatatgcctctttaagggcatattcgttatactatcctattgcattctttggtctttgctgctccctcggtcctaaattataaaatattttctagatttatagctttttgttatgtatttaaatatacattgtatctaaatatatagtaaaaaataatgtacgtagaaaaatcaaaacgttttataatttagtgttgtaaagctttgtaatttcattacttgtccatccagtgagactgtttaattgtgagcgcttggcagcccacaaaacagtcagtgccagc

SEQ ID NO: 20941 - DNA, 1057 bp, Zea Mays
tgttttgtgaggatcatttcatttttctaggaaaatggagattcttccggttgatgatttggacattgcgttgcatgattttgtgaacaaggatgacaagatggcattttattcatgtttgcagagaaaccttgaagaaaccaggaataagttgagttctgaagcagataaatccaaatttgaggaagaagatataatagtcaaagttggcgagtgcatgcaggaacgcgttaaggaaaggtctctgcactctaaggacggcacacgtttgacaacaggctctcacaacttggatactggaggtaaatcttttacagctcaaagcaaccagaactccttcagtgatgatgaagacaccagggagatgcttcttggtgcaagatcaactgatgttggacgaaaatcatctggatttactagaccctccaaagatactgctgatgttgctaaacgtggtacttccaaaagaggcaggggaagaggcaccagttcaatgaagcagaccactcttagtttcagccagtcaaggtcagctaccgttattcgtagtgaggatgtggcttcctctgaggaggaagcagatgcaaatgaagttgttgaaaattcagtataggagagtgcgcaacaagttggacgtaaaagagcagctcctaggggtagaggtagaggtagaggcggaggttccactgcaaagagggggcgaaaaacagatattgcttccatgcaaaatatgatgagcaaagatgatgatgattcagaagatgaaccgccaaagaaaactcctcgggtcaccaggaactatggcgctgtcaggaggagatgaccctttaaggagttcttgctcatgagagttataggctaggtgttttgtcttgtaaagttggaagagccgacgtgtttttatcaaccttgacgtcgaccagtttgcgttgccgtgaactgactgtaccttgtacacgcccgaatgtaacggatttttgggatttatacatccttgtagctgcttaaattccagcgattgctgtcaaatgaacttcgagaagccacggtgttcgtc

SEQ ID NO: 20942 - DNA, 4420 bp, Zea Mays
ccccaagcgaagctgaaggcggcggaaggcacagccgcccgctgattaatcttggggggctaccggtccaccatacctcataagccaatagcaagcaaagcattcaagaaccggatttcccttgttgtttcggaagcagttaatggtcgagaggggccacaacctccagccgttgcagttcttgcgttgagttggattgggttgccaagccccgccaaataaaacaaaagggcttcctgtaatcctgcgctgcaccgatggtgatagcgtcgggagccgttgacaggggccacctgtccccgattgctcccctgtcagagtcgccgtcgtcctcatcattcttctcccaggatctcgtccccactgagaggcaagttggattctggaaatcgtcagagtcaatggtcgatcacaaagggagcaagcctattttcacttctccactcgataaggcccatcccataggctcaagtcctgcaggtggtctggaacatcaacgaggtcaagccttcaaggggaagctgggcatgcttaaccttggtaatttggtggaccaacaagaaaatgctcctggcataccttcgatttcttggggtgatgtcctcagtacctccaggtccagtcttggcttgtctacaggagggacggcttttgttgaaccacccagtgctgatcaacatgtgcaagactatggagactgcttttcatccagctccttcactgaagtcttcggtagaaaatcagcaagattgatggcaagtggcgtttatggccaatcagctggtgcaaatgattccggttatgacggagatgaacctctagggtccatgaaagaaatggaagctcaaactattggtgatctccttcctgatgacgatgacctgatgtcgggaattattgatggctttgaatacaccggcttgtctaaccaggatgatgccgatgaagatatattctacactggaggaggtttggagctagagcatgatgattccaacaacgtcgacaaatttcgtgatgtgtccttcaagattcaactttctgagaagcactctatcgataaacaccattccagagctcttattgtaaaaaatattaatccaggcatcgagggttctgatttaagggctctgtttcagcaatatggggacgtacagacattcgacacatcctgcaagagccatggaattgttacagtgtcttactatgacattagagctgcacaggacgcagtgagagcagtccataacaaacctctggggctgatgaaacttgatgttcaattttcccttcctaaggaaaatgttccaaacaaagatcccaacaatggaacactggtggtatctcttattgactcttccatctccagccatgatcttctccaaaaatttagtgtttatggcgatgtcaaggagatttacaagtctcctacaagctgcaataagaaatttgtagaattctatgatatcagagcagcacaagaagcactgaatgacctcaacaagggtgaaatatcatgctcacaaatcaaagttgagcatagcttttctggaggagcaggatcttgcttcgcagagcaatattcaggagaacagaagcaaaatgccgtagctcaccaacttaagaactctccacctgggaccattgggaagttagatactaagagttgggacagcagcactgttcataatttatattctccagttagaccgcaacacgataaatcacaacatggcttctctgtgaatcctcctcagaagttgtcatcgcctatcagaattgaatctacacagcagcatagtaatcaaactgcttttggtgaacatagtggatctcttggtcatggcaactttggaggtgggctgcaagccttccacccgcactcactgccagagtgtcacaatggtatttgcaatggctataactccatgacattaaatgcaaggaattctaacttcagatttactgaaggaatagactacaataatcacaaagttgaccacagtgaccttcatggtcattcctctgatcaaaatgaagcaattagagttgctggaattggaagttgcccccttcatggacatcactatacctggagtaactcaaatggttttcctcaaagcccctctgctccaatgatgtggcctaactttcagcaaccagtgcatatgcattgctaccctgctatgcctcctcacatccggcgcagtgctgcccatcctatggaccaacatcacttgggttcagctccaaacagtgttggtggttttgcaaatgcacactcttttcatccaggatcccttgaaagcgtagggtttcctggcagccctcagctgtatccatcagatctctctgtatttgcatctgccagaggaaattacagggagaccatgttctctgccataagtgccgggtttccatcaattcagcaaattcttcatgcgaccaacggaaggaatcctatgatgcacgtctccacctcatatgacgccactaatgatcgcataaggagccgcaggcatgatggaaatgctgcccagtctgaaaacaagaagcagtttgagctggaccttgaccgcatagctaagggtgaagactcgcgcaccacactgatgataaaaaacattcctaacaagtacaccagtaagctgcttttggctgtcattgatgagaatcaccgaggaacttatgatttcatctaccttccaattgattttaagaataaatgtaacgtgggatatgcattcatcaatatgacggatccacagcagatagttccattttacaagacattcaacggcaagaaatgggagaagttcaatagtgagaaagtggcatcacttgcgtacgccagaatccagggaaggaacgctttgattgctcatttccagaattctagcctgatgaatgaagagaaatggtgccgccctatgcttttccacaaagatggcccgaacgcaggagaccaggaaccattccctgtgggtaacaatgttcgttctcggtccgggaggaacagaccacttagcagtggttcggagactaccaaagaggcaagtccatcaacctctcctaactgaagagaagccggctcccgatattccaactcaggacaggcaggcggtatttgctcactaactggaggctgaagggcatgtaataaatcatccccagttttgctgcttctttttcttttggtcctcgtcagcaaggtgacctgacttgctgagtgtgactagctaacgagaattctgcactgcatgagcctgctgaagattcaccttaaagtaactatgccttggttttgccataccattgacgtcaacggctacaggtaatggagaagacctggagtggtagagggaggtgtgtttcaggcgggtgaaaattcaagttgtacagttgaactcaccaggattggaaaatggtcatcaattcaaatttgagttgtttttcttagggttcttcttgctatgtttgatctcgtttatgtgcgtgtcatgtgtccacggtgtgagcccaaatgtttgaatgccttgtctttgtgcaatttctctcaaacctcagattctggtgtgctggttcattccatgtcctcttttgtttttcaaattcaagatttattacatcataaacatgttacaaagatggggggtcatgttgccccgaacaatccaagtttcaaaacacatgctagatattacaggttggagaatgaagcccctagagaaaaggcatggatttggggtagttgcccgtcttgctttttttttgcaagaacatcagctatcttgtttctctctaggaacctgttgtgccaaaatcatggcgtaagccaacacctggctgccagttaacaaaattgcatctcgcagatcgagtgcagcagctaccttgaaattaaataggaattgcatcctggaagaaagaagcatggggaatacctgtagcaggtcggtctcccccaaaccaaaagaaatggctgcaacactgcgcacagcaaaggttccacacccaaaaaagagggcgcccagcacccactaccttcagcatgctctgccacggcttctggtcctcctcgctggactgtcatcagctcccgtggcattcacactgctccgagtcaccctgcggccgctgctcacagcagggctgccgttgccgtcatcatgcatatcaccactcttcctggtccgtttcataggagtgacgcacacatcaacctcttccactgcagcactgctcttcaccctcttgccaccagtctcagcatcagccttgtgcttcgtctgtttcgcagcagcatcttcatcagccgtgcgcttcttcggctgtttcgcagcagcatcttcaactaacacatccaccacttcagccgcgcccatctttgactttttatcatcttttgcaccctccattt

SEQ ID NO: 20943 - DNA, 999 bp, Zea Mays
gtgcaacccagcgtctcctggaggaaaataatcagttgcttaaccagatttctgcaaataatgaaacattcaagacagtggagaacacagatctttttctccgcacgagtaacaacatcaaaacaattttaagcagaatgagcgaaacgcctggtatcatgagtcagatgcccccattgcctttatccataaacgaagaccatataaattctcttattcaactgaacagactggttgcatcatatggcacaacaagcatttcccatcatacgaagcaagagccatgaagctagtctactaaacccagggaaaaatgagaggaccagatggccggacccctcctgcaattctgtaaacgtgctgctgaggaagtcttgcatgttatactctaaccaagtgccaggaacagtcactgctttccagataatgttttcgcagtgacctgattgtttccaacccgtctgccagcctgcctgcccaccaattcttgaagcatttggaagaagtctgcagttgtggttcgagagccgcaagctatttgctgctgtttctgtttccgttatccagcatgtagaccagagtatcagacagtggatcctggtctctgcaaatgacctgtaaatatcggacggctgctggcgttccatgttttgtttctctgatcgctcatgaatgtatttcttcttttctcccccacccccggtcaccggacagggttgcattgctcccaatatgtaactgtatacagtagcgactccattttctgactaattggacacggaaacccaaacatttgttgtccagatgttctactcttttttttcaccacttcaaaagtaatggtggacaacgagtcggctcgttcgagttcgagctgactcgttaagctaacgagccagctcggctcgttaaggtaacgagtcatagagtcggctcggctcgtttacgagctcgagctgtctcatttagctagcgagccagaacagaacaaaaataaaa

SEQ ID NO: 20944 - DNA, 675 bp, Zea Mays
tttcctctatcctctagattgatggaaaagctgctttgctaggatttgtgggggccccatggacaattgcaacttacattgttgaaggggggatgaccaacacgtacacaaatataaagagcatgtgccatacagctccagatgtcttgaagggtcttctctctcaccttgcacaagccatatctgactatatcatttaccaagttaactcgggggcccagtgtatacagatatttgattcatggggtggacagcttccacctcatgtgtgggagcagtggtcaaaaccatatatcaaacagattgtgagtaggattaagaaagagtgccctaatgtaccccttgtgttgtatataaatggaaatggaggtttacttgagcgcatgaagaacacaggagttgatgttattgggcttgactggacagtggacatgactgatggaaggaggcgccttggtaatggcattagtgtacaagggaatgtggatccagcatttttgttctcaccattaccagtactgactgatgaaattcatagatacggtgcactgggcaagacactcatagaggcttcaaatacttgtactcggttttcaaagactcggtattcaaagatgatgtaaattatcggatatgtttggtgcaccattggacaggttatcaaacatgttattt

SEQ ID NO: 20945 - DNA, 1127 bp, Zea Mays
ggtggaaccgtttcaagtggaatggaggaaagccttcgaggtgtgcgtgtgcctaccgttcagaacatgtcgtcggggggtgcaacaatcagaacccaaggaataacaagtgatcctgcaccgaacagggataatcccaacgagtcgttgctggtgggatcgtccactgtgcatgtggaggaaatgatgctagacaccactgtcactgtgcagacggatacaaggagctcaggtgccttttctgggttcgttgagctagacgacgtttcaacggagagtatcaagatctcagctccgctgttcctacgcccgttcggtccgagagcaatcgtccagcacaagggttccccgctccagctcatctgtccaggtctggaagtcctctgggtcaacacaaaggggttcccaaacagcccacatcgaccaaaggtgggcataaaggtcgacatacctgagaaccttagtaaggtactagggttttgcgacgatctagcgcagagctcgtcgtcgtcgccaggaccaggagcaatatgcagtaattccagatggaaatccctgattgagagagacgcggatcggcgtccaacggtctggctgaagattcctacctttggcagtggcgacaccgcagcctgccggacacatgtatacgaaaaggagtgcgacggtgtcgttccaaggcttgtttccgaaagggtcgatccatcggaactggcctcgatgcttcaagggaacaaggtggtggatgcgttcgtctcggtggaaacattcgaccactaccaaagcgctggcattcggttggttgccaataggctggatgtgcacttcaaaaggcaacagcaggcctagctagttccttatggtgctctccggtcaggccgaggctggattgaaggggattgacccatccaattctcctgtgattctcttgttaccgaatcgatccaggactatataaataagtaagtttatgtcgtctccgtatgtgcttgcaaaacttccgaccatattttatatgtgttcagacttcttatttgatgacgctagctaggagaatgctaccgttactatcgacatggcatttttttgtttgtagtcgacgatgtcaaacatctttgcagacttca

SEQ ID NO: 20946 - DNA, 6218 bp, Zea Mays
ccttctgagaggcaaccacaatccccaatcacaaaccctagggaagccggtaggcaggcaccggcggccgacaagcgcaacgctgcgacggtgcaaccgcgttgccatcgcccagcgcgaggctgcgacaagcggacggaggcgaatgcgcgccaccgcctagcgtgcgaactctgcagcgcgccaacggaagtagagcaggcgggcagcatccagcgtcccggcctcccggggccgagctcgagcgccgcgcacacacgtccgactgacggtgtgtagtagcggtggctgggaatactcaatcacccaaatcctggcgaggactacaaggatattgaggctattgagggtcagaaggattacgagacttgttatggtggaggtggcagtgttatagtggcaaatgagctcgtggggatttctgaagaccccaaccaacccgatattgctactgctgacgagccagaggagggtgctgatgtagaggggcaaactaatgacattagtgctgccgtgtcaacctccaagctggtggatgatcccatggaggttggcatgcaaacagaggttagtgctgctgcagatgatctcatagaggtcggtgctgctctggtatcatctgcagaggattgcacagcggtggctgcttgcctggttaatgatgactgcaatataattttccctggaggtgtgcataggtccgatgaccaaactgatcaggagtttggtggcaattcccttgacgctgatgaggtcgctctcttggtaaatgacatacaagatgacagtgcaaggatggatatggatgtttcagcccatggtgatgtgcatgctcaggatcgggaaagctcacagttggatgtggctacagctctgttaaatgaggtgggaacagagcttgtggaagctggtgaccatgctgtacaggaatgcacaaatatggatatgcggattcaagccggagataacaatgaggcagaacgtgttggcactattgctgacactgccacaaatgaggagcacagacacatgggtgaagttaccatgaccagagatgatagtgagaaacatgatgtggcaggtggtgttgatgtgcctgatgagaggatacaaatgggtaggggtggactgcctggagatgataatgagcaaaaggaagttgcaacagctgatgaagatcgtgtggaagatgaaggcatgcaggtagatgcagtaaacattactggagacatggttgaggaaggcagaattgctgttgaatacattgcaggtgaagctgtaattggcgagggtggtattgatgtccctgaagaaaaggctgctcagatagacagggcgggtaatgacattcccgaagaagagggtctccaaatgggggaagctggcttgattggcagtgataatgggctgaaagaggctgtgattgctgatcatgatggagtggaagtaaatgccataccgacggaggcaactggcacaactaacgatgatgatgaaaacaacacaattgttggtgaagatgttgcagaggctgtcaatgacataactggtgatgatgtccctgacgaagaggctgcacatatggaagatgatgacgacgacgaacctcctcctttagtggaaaagaaaggtggagggcgtcgtaagagaggccgtccatcttccaaggtccagggtgtggtcaagccatctgtaaagaggaaggatgaggaggaggtttgcttcatttgctttgatggtggtgatcttgtgatttgtgatcgtaggggttgccctaaagcctaccatccttcttgtgttaaccgggatgatgacttcttcaagtcaaagggtcggtggaactgtgggtggcacatttgtagcaactgtcagaaacctgcccgccatatgtgctacacatgcaccttttcattatgcaaggcatgcatgaaagatgcaaagtttagctgtgtcagagaaaataagggcttctgtgatacatgcatgaacactgtgatgttgatagagaatagagaggaggctgcggacccaatggaggtggattttgatgacaaaggcagctggtggtatttgttcaaggactattggttaaatttgaagacaaacttgtcgttgacagttgaggaaatatcagcagccaaatctcgaaagagtggagagttacctgatactaatgatgaagttaattcagagagttcatcagggcgcaatctagaaagcaatacatcaaaaaagaggggaaggaagcgatctaaacaagctgccatcaatgagggttctgaaggaaaagcgagcactaggaaatctgccaaacgagacctgtcaggcattcatgatgttcagacctcgtcagggaaaaaggttagaaaactatccaggcgttctttgagcagccagcattcatcaaaagactctgaaagtgttgggacatctacatcctcagctgaagaggacagctgggcttctaaggagctcattaactttgtagctcatgtgagaaatggcgataaatctgtgatcagccgatatgacgttcaaccccttttacttgactatatcaaacgcaacaaactgcgtgatcctcgtcggaaaagccagataatttgtgattctttgctccaaagtctcttcgcgaaagaacgtgttgggcattttgagatgcttaagcttcttgaatcacattttttcatgagtgaggtttcaccaattgatgctgatgaaaatcatggtggtgtagtagatcctgatcctagtcaggatgctgatggtaacagtgaagcttcagttgttatgagttcagaaaaaagaagaaaatcacgcaagtatgacctgaggcaccagcctaatcttgatgattatgcggcaatagataaccataacattggcttgatgtacttacgtcgcaacctaatggaagaattgattggcgatgttgacacatttgatgagaaagttgttggatcatttgtgaggataaaaatacctggtacagggcaaaggcaagacatttatagacttgtacaaattgttgggactggaagatctgcagaaaaatataaatatgggaaaaggactactgatataactctagagatactaaacttagacaagcgggaggcagtaactattgacataatctcaaaccaagagttcactgaggaggaatgcaaacgcttgcgtcaaagcataaagtatggattcattccaaggctgactgtgggagaggttcaggagaaggcaagggttctccaaactctgaaagtcaatgactggattgaaagcgaaaagatgcgacttgggcatcttcgtgaccgcgcaagtgatatgggctatagaaaagatcttagggaatgtgtagagaagcttagattgctaagcactcctgaggagcgtgctcgtaggctgaatgaagaacttgaaatacatgctgaccctgcgatggatccatattatgaatctccggaggaacaggagcaggaaattgaaaaaagtagcttcaacaagtccagaggttctttcttgaggaaagatggtaatcctgtgcctccaggtaaaggagatggtagaaatgctgcacagcgagattcaaaaactaattgggaatctaatcgaaatacatgggccgaatcgagttctcatatggaatcaccccttccacggaggtccacattttcttctcaaggtgaaagtgctggttatacaagtaaatcagagagcccaaacactggtgcacaaacagttaaactggaaggcaccacacgcagtgctccacaagggtcacctggtgcctcttctggaattttagctaataacatatgttcaggggcaaaaactgcacctcaatcagccattaacgagtctgagaagatctggctgtacatggatccttctaataaaatccaaggtcctttctcaatcatacagctgcggaaatggaacagcaatggctacttccctcctagtttgaaaatatggaaagctagtgagaagcaggacgattccattctattgactgatgctttggcagggaagtttgagaaagaccttcctccatgggaaccgccacatgttagtttgtttcaaattaacaaaacccctcttgagcaaagcacaatagctggtgaacaaactccaaaatcagtagttgcaaagtctttctcaagtagtaatcaaagacatggttatagttcaacaaaccttggaacaaccatgatccattctggcacacaaggttattatggaatgcaaaattcccatgcagcatacacaagccaacattctcttactggaagttggaatgccacgtcaagtcagtttggggttgcggtaaatcctgtgacacctactcagcctgccatggggagcttttcaggacaaaacatagtgtctgcagaaaatatgggtcatctaactcctggaacggctcctgcagctgcaaatgcagaaatggttaattcagatttgacctcccagaagcaaatatcgtatttaccgcaaacagacggcatattagctgatgacattgaatccaaatcaggagaagatgtttcacatggaaaagtgagctcttcagccaaagcaattggaccactgggtgcacagcttggacaaggacaactgaacactcagcaacatgaagacataaaaaaccagatgtcatcaactgatgtctccaactcgacgatgccatcgcagatgatgtcaacaccatccgctgcatcagtacaaccttcattgtcaaccattgctggcagtgataatcaaagcagtgggtgggctgtacctacacaagtggtgaacacatctggccagtctcagataactggaaatctgacctggggaaatacacctcagggtgatgcaagcttaggttggggaatgatgggacagaacaatatgaatatgccttgggtagcatcagctcaaggtgcttcgggctacaacatgggtgcagccatgccaacccagccaaatgcagttccaaacatgggttggttaccaaatccaggaaacaccaacatgaacatgatctgggccgcaactcaaggccaggggattccaaatgcagctgctatgatgggaggtcagatgcaaggagtcgcagtggccccttggggtggtgttgcagcaggaaatgcaaattcttatcctgcctggggaaaccaacaagttggaaacatgaaccaaaacgttcgatggagtgctcctgtgcagggaaacccgagtcaggaaaataacaacatgaactggaatgcaccaaatggtaatcctaataattggaataatcagcagagagagaatgagggcaggcactctggacaccgtggtgcttttagtgctggcgactcaggcagaaagtcatggaagccacgctctggtgccgatggggggtcatgggggacatagaggagtctgctatacatttcttgaacgcggggactgctttaaagttgactgcaaattcgcccattcaacaaacacagagggatatccatccatccaggattcgggcaacgagatgcgatatgagaatcacaatgagagaaatgatcgacagtttgataggcagccttcggataatgaaaggcatcatgttaggcctgatgacaggcatggtggcagggatgacgataggcaggctgataggtctcagtcaagagagccgcgttagaactgatttctgtttcgtaccttccctttgttgtatgtgcagtagcaaactagcataatagcttccgtgcatgttttgaactttatgccctgtagcaagctgcaaacatgtgcaaatcgtgtacagcagttgtagtttaatgctgtgtgcgtcctagccccatatttaataatttacttgaataaatcgtagttgtctgatatctgatgtatagcaggggctacacacccaggtcctttatggtgatgactattgagtgttttcttataagcctcatgattgtaagtgaaggtgtttttggaaatcctatgacctaatgtccgatctgtgttcttcgttgtgcaatgatgccattgagcctccgtgatcaaatagtacttcattttgtttgactgttgtgggtggctgggtgctgtgtatgtgtatccacccagctggtttacctgttaagcatgtgcatcatctttcggctgatgtgtttaaaaaaaaaacaccttccacactccctcgtgctcagctgtattttaacttatttttgtaaaaaaaa

SEQ ID NO: 20947 - DNA, 1057 bp, Zea Mays
accgataagcagctaggaaagaagaacgagagatatctgacaaatataactcagtcaagcaaaggaggtatgagctgtttatggaggccttcgatcacatatctaaaggcatcgacaaaatctataagcagctgacaaaaagccatacacatccactcggaggaacagcatatttaaatctagaaaatgaagacgaaccgtttcttaatggaatcaagtacacagctatgccacctaccaagcggtttagagatatggaacagttatccggtggggagaagactgttgcagcactggctttgctttttgccattcacagtacctcttgggtatttgggtatgccaagaccaataaattagcacatgaagttttcagaattagcatttactggccttcccaggagtttgataaggttttaggccatcaccgttcttcatattggacgaagtagatgctgctctggacaatttaaatgtggccaaggttgccgggtttatcagatcaaaatcatgtgaacgtgttggtgatgaacaaggcagcgatggcgagagtggttttcagagcatagttatatctctgaaggacagtttctatgacaaggccgaggcacttgttggtgtttatagggactcagaacgaagttgctcgaggactctcaccttcgacctgagaaagtatagggaatcgtgaagcagcttttgttgaatgtttgtactatgtgtgtagttgcctgctccatcagcttgctagatagctgtcgtgagccttcgatgttttaactatctgtatactcctagtcctacataagtgctagctgaacaaggaccctgaaatattcatttggtaggtggataactgatgtttcgaacacgcataaacttttttacctgttgtatgaagccatttctccgaattactataatctgtttaattatttcgtggtgttcaatttatctccacggttcgctcagtagtcacttgctgaagtgtgcagtgggctaatggcgtacgcatctgtttttgccgatactaaagcacaaatttatggacatttgc

SEQ ID NO: 20948 - DNA, 2864 bp, Zea Mays
cctcaccggctttcgggacgccgtcactgcctcctccgtcctcccacctcccgccatgagcataaaaataaagaaaaaaaataaaagaaaccccctcttcccctgaccgccgccgtcaccgccgagcacacctctagtcagcttccactggagcacgccaccccgaattttctcccggagtcgttgccctcctctcctacccccgtacactaaagctggttcgcagatccatccggacttgatcggttccttcttttatttcttgcccatagagcccaaacattattggatggactctgtcacttgctgcgacggcggcaaggaattggaataggacgaggtggggatcacgggctgcgacggcggcaagaaattggaaaaggacggcgtggggatcagggtattcgtcttgggaaaggggatggggggtctctgctcgaaggtctcagctgtagacaagtcaccgagcgacaccgcgcttggccggaaccaggtcgccgatcatgagccaggggcgtcgttggagttggagaagccaccggtgtcccgagagtcagctgcgccggcaaagcggctggacgagcagctgcagtctttctcgttccttgagagcgtcgtccctggggttgcttttcatgccggggctaacacgggcggcgaagcggggtccaggacctcgccgcagctgaccaggtcgctgtcccagagggctggtgtgggcaaggcaaaagccggcgctgccaaggtttcagaagtgagctcaattttaggtagagctagcactgctgggcttgaaaaggcagtggaggttctagatacacttggcagtagcatgacaagtttaaattccagcagtggttttgtgtcaagttctgcagcaaagggaaacaaaatatccatgctggcttttgaggtggcaaatactatagttaaaggctctaatctgatgcgttctctatcggaacctagcataaagcatctgaaggaggtggtgcttcattcagaaggtgttgaaaaccttatatccaaagattttgatgaactgctcaagatggcatctgctgacaaaagggaagagttagaagtattcacaagagaggttgttcgctttggaaaccgttgcaaggatcctcaatggcataacttggaccgctactttgaaaaactggcatctgaacgaaccccacaaagttatctgaaagaaaaggcagaatcagtgatgcagaaactggtcacctgcgttcaaaatacagttgaattatatcatgaattgcatgctttggatagatttgagcatgattgtcgtcttaaacagaaagaacaggatggcttgagttcaagaggagacaacctggatatactgaagcaggaattgaaggtccagagtaagcatgttaagagtctgaaaaagaaatcactttggtccaagaatttggaagaggtgatggtaaagcttgtagatattgtccacttcttatatttggagatatataatgccttcggtcgtcctgacagtgaagagccacaagaacctgccaaacaccataatagattgggaccagcaggccttgcattgcattatgctaatatcatcaatcagattgacaatcttgtttctcgatcatgtgcaatgcctccaaatgcaagggatacattatatcatagcttaccacctaccatcaaatctgctttccgttctaagctacaatcttttgaagtcaaggaagagcttacagcttctaggatcaaagcagaaatggaaaagactttgcgttggcttgtcccttttgctagtaacacaaatagggcacaccatggcttcggttgggttggagagtgggcaaatacaggatctgaattaaactgcaagatatcagggcagatggacatgtcccgaatggagaccttgtatcatgctgacaaggagaagaccgaagcacttatcctggagctagtcgtgtggcttcatcatcttatcagcaaatcaggaaacgccagtggaggtgtaaggtctcccatcaaatctccagtcagctcaccaacacaaaagggtgctgcaatcacactgttgtcgggcaaaacaaacaatttgccaccgattctcacccaagaggaccaggatatgctaaggggtgttaagtacaggaaatttgttccaggaataagcaaaagccaagagtttgacacaaagtcaagtcacagcaaacatagtaggttgagcaagagcaacagccactctccggccagtggcagcagaaaagacttgctcccagttaggaggtcttccatgcttccagttattgacttcgagattgacaggaccaaggctttggatctaattgacaggcttgacaacctaaaagtacaatgagcatgaagcttattgtggtcatccgcagttcttgaaaccccagccgcgatataaacagttatcgtgtatcagcagcaagaccgcccgttaggctctgcggttacaagataacaaacagtatgataagttggtgtctcagatcctgtaccgaatagaataggaaaaaatgttgtaaaaattacctgtcgtttctacctgtacaagaaatggaaagtgcagtttttaagaaaaaaaggagggtgaaagggatctaggtgttctatgttttcatggccattagactggaatggtgtgtatgaaccatagtactcccgtcccaaaatattagtcgttttagctcttgatttttatatatctatattcaaatggatgatgaatctagataaatatataaaacaaatacattgattattgtatgaatcaactaaaaagataaataaattttattttgagatgaagggagtatctttttttgcagaaaaaaataaaagca

SEQ ID NO: 20949 - DNA, 3918 bp, Zea Mays
cattactgtgcatgtgctggcaaggctgcacccgtcgctcgtgtcagcggctccggtcgaggtaggaggagcgtgttgcaatttgttgcgcgacggcgacggcaaaggatcactgcagctagcgccgggccgatggcagcggcaaccacggagggcggcggcgcgggcgaatctgaaccgagctaatctacacgacagcgcccccggcggcacgaccgcacgagtactaggcagtactagcctagcctagtactcctagtcctagtcctaagattaggtcccaggagatgaaggcacctacttggttggaagggtgaacggccgctccccctccctaagatccaaaccccggcacccgcggcgccggcgacgcagggaggaggcgatgcacggccggccgcggcgcccggccaagcctgaggacgacgaggcggcgtcagcgaaagccgccaagctccgggacctccaggcccaggtcctgcacaatcaccatgcccgcacgtacacaaaggagtcaattgggctgagcttcaagctgctcgagacaaatccagaggcctacacggcatggaactaccggaagcttgcgttgcagcacaatgtcaaggagctttctgacccacaggccatcaagtctgctattgatgatgagctgagagtggctgaggttgctttaaggcagaacccaaagtcctatggggcttggtatcaccggaagtggttgctaaaccaaaagctagcgcctgtggatttcaaatatgagcttggcctcttggataaactgttaaaggtggacgccaggaatttccatggatggaattaccgaaggttccttgcgagattcatgggtttgccagatgatgaggagcttaagtatacgatggataaaatcagtgacaacttcagtaattactcagcatggcataatcgtagtatacttctgtccaacctactaatccagcagagcaaaggttttgagtcaaagcagaagattttttccgaggagtttgaacttgttactcaagctctttttacagatccaagtgaccaaagtggatggttctatcacctctggcttttagctcaaacatctagtccagataacccacagctgattgcttcatggccttctaatgctgcaaagctcagtttctcttttatcaaggaaaaggctgagcagcacacactgtcatccgtctggtcaaggactgtacccattgttctttattttaatgagcctgtcaaaggattaaatcattcaagtgtgaacttaaagtctgatttggagttcggtaaggatatccaatggaggcccctcacaatggcagactctgggtactctaaatgttgggccacatatcttcaaattacaaatgaatgtagcagtttgcaggaatattctgttgaaatgagcataccctgctcggatgacattgtgtctagaagtggctctaactacaactgtcctgtgcattttacattttacattgaactgatcagcaacaacgcagcccagggtttagatacgtttgataagccagttgcctggaattgctcagactcattccagtctcatggaaaccgtgatcctatccctttggatctgctaaacattactagtgccttggtcgaacatgactcagattggcattttgaaaggctgtctgaggagatagatcttttcagagagttagctgatgacaatagcaagtttgggaagttgacattagcccggctattgcttgcttgtgctgctataaaatcccgtggaagatctctaattgaaaggaagggatactgtgaagaggcactggggctcttcactgacttgattcacctggatccatctcataagcagtactatgaggatgaacggagcttagccctgatggataagttaacatgtgacatggagactttcacgaagcattgttctgttcaggttcaaccaaattcagctcccctgcatcatgtgcagtttcgcagattgtctgtaacacgcatcggatttgctgagcgcctgttgtgggttcaaatgctggacctaagccataatagtcttagatcagtcgaaggtttggaggctttgcagcgccttgtgttcttgaacatcagcaacaaccagatcagtagtttcacagcacttgaaccccttacgaagataatctcactgaaagttctggatttgtcgttcaacgagattggagctcactcaattgacacagcacggtatatctgcccgtctccgttctcacacaaaactgaagcaagtgaagcttttgaagagtaccaggaggtaaataatatcaacgtgacggaatactgggacgccatattgttcttcagatctttgaagctggcacagcttgatatcagaggaaatgcagttgccagcaaggacggcttcagaactcttgtcgtgacgctcattccttgtctaaaatggtttgatggtgaaggtgtcagttaatcggtggagttccacttaggagttgggcaatcttggtagtgtcaaggctcactatgtgaactattttttgctagaagccattgatttgcttcatatgcagtgctgtatttgtttatgcgaatctgagacatgatcatgatgttacagagttctgaattttcaggattgaactgtcataggtcatacaagaaagaagatgttatctaattgcaagttgttctactttcagaattctttaataagtttatttattaaaatagaacagagctacactgctaccatttacatttttgttgtgagcgttgctctcttccagaggttatctgacgatgatgttgtaattgaactttgggagttttgaatgcagtttatgtactacagattttctcccgttctcttttcacaaggcctgaagctaaaatcccttgtcagaggctcttgattctagtgtcgcagtcccagacttaactagtccaacaatctgtagtttctatttagatgcattcttctaaacttctgtttttgttgatagctgtagctctggagctaactaaagactatgtaaaataaactctgcatcatagtagaaaatagaaaagcttatgtatgaactctgaagttttctaataaacaatccttcaaaaataggaaacaccaatcatgcctctcagtttcagatagcagagatgagccccagtaacttagtacatgcgtagtgtattccctttgaagcacgattcactcaaaacacaggagcgacatcttctcttcaacggagcaatcgacctggcacgacgaccggcaggcggccgggatcaggatgagccccaggcaccgctgctccgtcggaggcgagcagtggcgggcgctgcggtactctacggcgtcctggaggatgatgttgccctgcttgtcgatgcagtggaacaggccgtggaagtagcggccgtcgttgacgccgatgagcatccgccggaacagcagcttccggagcttcgcgacagacggtgagctgctgcccacgggcgcggtggagctgttgcggtacgtgtctccagaatccgggatggcttgcgacggccctggtgctccttcttccattgtgctaaggatcccctctggtagtggtagatgagcatgggcatgggcatgtaacagggttaaagaaaatttggatatgggttctggtacgcagaattactaggcaagattttatgcctggtacttaaggatctcgatggcaggggtggataattttcgcagaaaatttcgaaactggtaggtaactgggtcagatccgaatacagatagcttagctatggttttgggtgctctgtttcgagaagtaggaagggaggagaaggatcgggcgtaccttctacgcgctcgtcgccggggaagacctggaggagggctgggtgctcgcgttcggggccgggaagacctgg

SEQ ID NO: 20950 - DNA, 457 bp, Zea Mays
ttttctttctagtttctatagcgcaacactgaataatctgcttttgtatctttgggctagtcaaagtgcaattacctggagcgttgttaagaacatacttgttgacctcttcgctatttacagcaagaaatttcaagatttcaatatagtttcctctgttgctagactcttcactttcatcatgtccacggaatgacaatccttgatgcaaaagaaacttcaaacatcgaagtgaatatgtcaaccttatcttataaagattgcgatcatcatcactccacttctcaattttattatcaattgctgcattaggatttataaagctaagatatttctctttggctgtcttatgtgacatagaacccacatgttttagaagtgcttcagaccctttattccaattattccaaccatctgaagtaaatgcagaagtccctttgcccttatttgctttact

SEQ ID NO: 20951 - DNA, 2953 bp, Zea Mays
caagtacaaccagccggcgtctttttttaagcttcaaaacgaagaggaaaatgatacggatcgagaggcatagcacaacggaaagcaacccgaaagcctctacttttccgcccccagcaggccaggactcttcaatcgctcgcgccgtttcttcatcccctcgccatccttccttcgatccagcgttgcctgtcgtcttcgcctgcacggctgcacctaaagctctgacctttttccccactttcccttggcatctactgccttgtccggtgtagaaaacaacggatttcgttgtgttgttttgctgcggtttttgtcccctcccttctcactcggcgagctttgttgttcactttggattccacgggtttgtttcggattaggaaggctcggtttttggtctgggaaggccccccttccgaggcgatgaatttggtgcgggttgatggcgtcctgtcaggagtccgctatgcaatgatgggttctttgaagccgaggtgaatctttgacctgcctagtttgcgattccaaattccgagctcccaccgcttcttgatccgccgggcgccatgggcctctgctacggcaagtcggcggcggtccaggagccggcggtagcggaggagaacaacaaagccgatggcgcggcggcgggccgaggcgatggcccgccggcgtcgccggtgaaggtgcctcggacgcccaagcagcccaagttgtccttctacttgccgagcccgctcccgccctccagctacaagggctcgccggcaaactccagcgtcgcgtccacgccggcgcgcggcgggttcaagcgcccgttcctgccgccgtcgcctgccaagcacattcgtgcgctgctggcgcggcgccacggctcggtcaagcccaacgaggcgtccatctccgagggcggcgaaccagaccttgggctggacaagagcttcggctactccaggcactttgcggccaagtacgaccttggtcgagaggtggggcgcggccactttggcttcacctgcgctgccaagtgcaagaagggcgagctcaagggcgaggacgtcgccgtcaaggtcattcccaaggccaagatgactactgctattgccattgaagatgtcagacgggaagttagaatattgagttctttggcagaccacaacaacctagtgcagtttcatgatgcttttgaggatgaagaaaatgtatatgttgttatggagttatgcaaaggaggtgaactgctggacaggattttggctagaggtggaaaatattccgaggaagatgctaaggttgttattcaccaaattctaagtgttgcttcattttgccatcttcagggtgttgttcaccgggatctgaaaccagagaattttcttttcatgtcaaaggatgagaattctgccttgaaagtcatagactttggtttatctgactttgttaaaccagacggcagacttaatgacattgttggaagtgcatattatgttgctcctgaagttctccatcgatcttatggcactgaggcagatatgtggagcattggagtaattgcatatattttgctttgtggaagccgccctttctgggcaagaaccgagtcaggaatttttagagctgtcctaaaagcagatcctagttttgatgaaatcccatggcctaccctttctgctgaagcgaaagacttcgtaaggaggctgctcaataaggattaccgcaagcggatgactgctgcacaagccctctgtcatccatggatccgtggtacacaggaagttaagatttatctagacatgataatctacaggcttatgagggcttacataagttcatcttctctacggaagtctgctttgagggctcttgcaaaggcactgacgacagatcaactcttctacctaagagagcagtttacattgttagatccaaacaagagtggccatatatccttgcaaaatatgaaggcggccttgatgaaaaattcctcgggtgcaatgaacgattctagggttcttgactttgttaactcaatatgcaatatccaatatggaaatattgattttgaagagttttctgctgcggccattagtgtatatcaaatggaaggcctggagacctggcaacaacatgctcaacaagcatatgaattgtttgacagggagggcaaccgaccgattgtgatcgaagaacttgcatcggagctcggacttggcccttcggttccacttcatgttgttctccaagactggatcagacattcagacggaaacctcagtttcctcggcttcataaaactattgcatggagtttcttcacgcacaatccctaaagtccaagataaccgtttgcattgaccaatccctaatctcagggccagtgcatgccatgtctggctgtagaagttgcatgagaccatcagaccagtacaaagattaacagatcaggttagggtaagaggtaaaattctctcagtagttgtatatttgctccgcccttgtcctcaagatgttaagaggaatgtacagatttggtttgggaagaatggaaaggctaaaggatttggggctgttttttttttgcttgtttgttccagtaacacagctttgtaactttggaatccttaccacaagaaggattatgcgacctctaccgtataatgacgaggctatgggaggtgatttgaggaaaaggccagaagctgggacatcttaggaaacagattccatgagaagaaatccaaatatatggtgaaatgcagatttgctaaagtcgccgagcttttgtatgcgttcgagatttccagtgagcgtggatcctttgttagcctgtttggcaactcacttttcaataccatagcattacagtaccatggtttactaattgcaatgtacaatctaacatctgtttggcgacaaagtattttgacatgtatagttttgatcaaattccg

SEQ ID NO: 20952 - DNA, 560 bp, Zea Mays
cttaatttattttgttgaaaagataccattgccaacaattctggaccatcaccaaacgagaaatgcatatatcatggctgatatcatgggagcaatggtcatcactgaagatgaacttgattctagcagtctcacatctgcagttgatgaaatttttggtgatgaaaaattgatggcagacatgtctcagaaggcactaactgcagcccgaccaaatgcttcagctgatataatccgccacatatgttcattgattggttcaacctacccatcatgaaactggttttagacattgcaaagagttcatgtcatgaacacattttgtattgtttttttttgagcaaccgcatcatgtcatgtttttcttgaggtggaaactgatgtttaattccatcatgacagtgcagtttgcgcctgcttccaggtagcgttcaattggctattcttcacatccaatggacgactttttatttttttgatacaatgataatgtggagctgccgttggttcatgaatggtaatgtaaatggtaacaataatgatttagagtgtgcttgatt

SEQ ID NO: 20953 - DNA, 1196 bp, Zea Mays
aaaggtaatttcgatgaagcaaaacatgttaattgagtatgccttgcgtccagagacatctaatggtgaagactctgatgacaagataagggttttctccagtacagtcaatgttggaaccaatggagctgggagtagcgattcacacccaaaatcagttgaaaaggaatcttttgagttgagaaatgaggcacatgcaattgcaagcatggctgacgacgctgagcaaagtgcacttcagatgtctgatagcttctcatttttgaacaatagtgacccagcaaactacataaagaatcattcagcatacgatgaccttatagagcatattaatttgcagatgaaatcattggaatatgaaattgaacagttcatcaattcccaatcagttgaagaggtgggcagtgagaagcagagaagtgacaagtggcaaaggttatctgacatacagatgcttataaaggaaactagagaaaagattgcgaggattttgggtatgatagtagaagagactgaatctgggacttaagatgatagcaaactacaaaacagtgaattagtgtcatccatccaccatctttttcgtgggtaggtacccaagttgacaatggcttaccagtagttggatcttgcaagttggtcccagtgccatattccgcaggactactccgcctaacaactagagggaatgcggggtaaccttcttctctggatggaagcatttcgatttgttgctgtgctgagatcgcattgtcggctatggatatacagtacaggtcgcacttactgaaagcttctgaagccgaaaaatcttgaccggatgagcttggttgccgaccatatccaggtcatccctctgcgtgcatttgcatagagaaggctgcaggcctgcagcctagatatttcacgagcacttcataattttcaatgccatccaatgcttcaagctttctgacatgagtgtgcagatgatgaaaaactccaagatgggtctctgtacctactatacaacaagaagaatccatgtactaaatgagaatgcgagattgttaatttgttattatatgctccttgataatttttttctggttctattttgtttcctgaaccttgcataccgcatgtattatgttactagaaatagaacgtctatcagcacagcagacagcagctccctttcactggatttgatgtcg

SEQ ID NO: 20954 - DNA, 3273 bp, Zea Mays
agggaggggactgaccgagcgagaatcggagagccctttcggctttggctcttttagtagaagtagagatactcaggttcagttcagcacgcgtgcgctgtctccctctctcttcgcgacgactgtgcgaccgccgccgccgacctacgccaggttccccgatcttcgttgggcgcttcgccggcgacgagcacccatcaggtgtatatttgtaatcctatgccctttactgggtccgcccctggttgattctagccctgttcaggagtgatggggaagaacgagaaggctaagcgcaagaaccctcggaaagcgcatgaacgggatcttccagcctcgtcctcggaggttggacctggtgatgcagcatcgcaggatgcaagccactcagcagaggaagcagctgcttcggctaatggccgggagcattgcggccactatggccgtgacaatgcccacttagataaggtcctcctggagatcttgtcttccaagcacgttgcttcatgtgagcactgccgagaagatgcaccaagaaagaaagggggtgctggtagcagggagaaagggggtaagcagaagaagaaaggaggcgcctccaaaggcgctactgccaaggcacaggcaaaggcagacacaagtcatacatgggtctgcttggactgtggtcggcatttttgtggtggtgcagcagatgataccaagccctatggccatgccagacggcatgctaagcaggaccggcattggtgggccgcaaggtatgatgacccaacagttgcttattgtttgtcatgtgaaaaggaggtgtcagttgagatgcccaaattagagacagttgttgcaccagcagtggaagataaggtggccggtgcagcggatactgatttatgtggtttggttaacccggatgctaatgtgatcaaaggacttccaaatctgggaaatacatgcttcttcaatgcagtgctgcagagcatcctcgcggttgataggttgcgcaggaagatgttaggaccagatgttcctacaggagcccttgctatgtcactgaagaagctttttgcagagacaagtgcttcaaaccatgcaggaggcatgctaagcccgaagaacctcttctcaagcatttgctcaaaatatccacagttcaggggctaccagatgcaggatagccatgaattgctccgttgttttcttgatggtttacgcatggaggaaactgaagcacggaagctagcagaggaagcttcagatgcaggtgttcccacaattgtggactccatttttggtggtcagctatctagtactgtgtccagcacagaatgctcacacagttccgttaaacatgatcaattccttgacctctcactaccagttccatcaaggagacctccaaccaagagtgtttcatcaccaccagttaagaggaccaaacagtccatacgagataggaacaaaaaccgcagatacgggaaggttccagctcgagcatctccttcagtagagagtaacaaagaacaagttcattcaattgctgagcgcaattcccaaattcctggttcagaacttgaacaggtagtcagcgaaaaagatgctgagccctctggatgcagtgagtcatgtggttctgtgcctaatcaagaacaaaatgccactacaaatgtggagaatagcatctgctggttggattatgtcgctgatgcggatgaaacaaaatctgagattcttgattctgcagattctactgaaacaggacaaatttgggaatgcagggatgctgcacatggtcccttgcaccctcaggatgatgccctacccaaagagcagatcttgggttctgagcactcaggcgaaaacactgttgatgatgatgcctccttacagactgttatcttacttccttacaaagaatttggtactactgccaaggaaagggatgaagccatagaaaatccatataattcagagtgtacagttcctcctttagttgtttctccagtaagagaaaataatacacaacctgaatattgtggagatgtggagcaagatgactatgttggtcttggtgatatgttcaatgaaccagaagttacttctgaagtcaagaaagaagctggtaaagtagaagatattgatgtaatggcttggagtagtaacagtgctgatgatgaggtagatgatagtaatgctcctgtatcagttgagggatgcttggctgtgtatactgaaccagagctgctttctgaaccatggctttgtgagcactgtactaatgctgcacgcataaactctaatgaaagagaaaatgtcatggagatgaaggaccgagctaatgaaataaaggatggtgaggagatgatggcagatggcgatggaaaaaaagatggtgagaagttgatcgtgagctgcagcaaacaggtggacattgatcaggttatgggaactgatggttgcaaaaagcacattgaccagattatggcaactggtgattgctctgacaatatgcattctgatatgcattgcaaggaaggtgggtgtgttaatccttcttcggctgaccctgaacaaaaatgtgatggcaattttccagatatagaaaatacttctatgcagagaactgatgtagtcttcactatgaatgagactgaacaatcaagcagtcagactagccacaaggaacagtgtatggatttgaaaagcttagaaccggagtcctcatctttgaataaccaacaacatgattcatctgtccaatataatgattgtcataacgtggatataaccgttaaaggagcaagtgcaccactgagttgtggcgattctgtgtcttgcaatgcaactaacaatgttgaagctcaacctgttggtggtgctgaagaagttgtgtcgagtagccttccatcagatgcacaaaaaaccttgctgggtgcaaaagataatgaagatgccatcacaaagaatcagggcaggaggaagcgaatgaagatggttggtaaggcacagctagtgcaaggtaaccaaaataagcagaaagaggacgagacaaaggttttcagagctgcattgagaagaattcttataagcaaatctccacctgtattgacgattaacttgaacagattcagccaggattctcatggtcgatataagaaactgaaagggcatgtgcgctttaatgagatgcttgatatacaaccattcatggacccaaggccataagcctacttactgaaacagaagagtaaaaggaataaatgatacatcatgatg

SEQ ID NO: 20955 - DNA, 6360 bp, Zea Mays
gtggttcctctcacccagagtcgcagcgacccaaccacctcccccccccgtccctctctctctcccttctgctggtctagttttggtttccctctcgctttccttcgctcctaggcgcggctccggcgggcggaagaggagggagaggcaggcggcggcccccggcagttcctccgtccgcggagcccagagggaggagggggaggcctggtctggggctgtccgctgaatctgcttctccgaagatcgggtggaccacgggactcggcgggcgcgcccgatctgctccgccgtcgaggtgaagtcggctgatatgacgtacctcatttggataacaatttgatcggcaccataagttacagaaatatgcaggaggagctagggcaaaggatgcatgtacctcatggtatcaatctgtgtttctcaacttcttccgagctctttcaggtggaatcttccattgagctgggtactgcagaagtgaaccctgtaccatctgaaaagttatctgctaactcacaagctgttagagatgatgctggagcagttgaaggtattgacatgaatggaaaacctgtccaaaaacctaagaggaaaaaacataggccaaaggtcattaaagaaggacaatcagcaaagttgcagaagcctaaaactccaaagcctcccaaagaaaatgggaatcagcctactggaaagagaaagtatgtcaggaagaagggactaagcacaccagccaaacaaattccatcagaaggtgctgatacacacactagagctaaaccaggaatagcccaaagatgtttggactttgatgtggaggaccaacatggacatttggatctggtatcacaaacccaggaaacggagatacagactggtcctggggacacacagccatcaatatctggagttgaaagaagtaatgcccaggtatcatgccattggggttggggtggtacaagcagttctattatttcagctgacccaatagttgatatacaaggattacaggcagactgcatacctaaaagagtcaattttgatttgaacaattctatggcaagtcagatgccaaccaattattctagtcgaatggacagctctggacaatttttccagtttggtttaggagaaaaagttcaaacaaatcagttactggattataattgtaatctgccagctagacgtgtctctcatctcagcagctcggtcgatcatatgcgacaccccttagccaattttgaccaatacataagcacatctcaagtttgtacagaaaattcacgcagacattatcagatgcctagtagttctagaatttcagaaaataggacagcagcttctcagtatactgaaagggtgtcaatggggggcaatttcaatcccggagcttgtataggagaaggcacggtaatcaaacaaatggcccaatgttatagacttccagaaagtccacttgtacctcccaaacataatgaaagggatgtgatgaatggaaatctaaacgagttttctgtgtataatgattacttgaatttttctagcaatagtaactaccaaactggagcagcttttggttttcatgattctccagtctattcagatgttcttgcaatgggtaaaaaaagagaacacaatgctatcagtggtcaccagatttcttttgacatcgactttgttaactcaaatagtacaaggaagttctgtattgatgaccttctttccactagctctcaaacatcttattatcctgaagcatgcaaaaggatgagaccagagaatcatagcaatcagctcaatgtaactacgggaaagctttcttcttcatcagcattttctggtagtttgaatacaaataacgtttcaactataaaccctggaattggtaccttggctgatatacaaaggttgatggcccttgagaaatcacaagcttcacaacaaatgattgactttattacgtcgcaaaacaacatggccggtgaaagtactgaacttgctcagcaaaataattctgacaaaggatttgttgctttacataataaaaagttccaaagcctcactgcgcagaacataccattgcctgacagtactgtgaaccaatcgggagaaagtaatatcttgaggaatggaatacatcaaacacaaccttgggaaattacatctaggtcgcatcactctagcgacaattttgctttgccaaataaatggtctggttacttgacagcagggaacacacagttatcaagcatcacagtaaacccatccacagaaaactatattcaaagtaatgctatttatcaatatcaatgtttagaaaacgttgtggctaaggtgccagtattgtctggaacacacaatacttccagtcaggagggccataaccacagcactgctgctactaatgagcatatcagaactacaagtgaggaagttgttagatcctttacccaacgagcaagtgaaccaaccacacatgggaactacaatctcaactcttctagagtaactgcagaagcaaactccactgagaagccaagaaaaaggggccgtccaagaaaagtagtaaaacccaatggggagccaaaagaaagaggatggctattgtggagtcgaaaagctctgatcaagataaggaaattcatggaggtgtcattcctcaagctacagcaatatcagttgatcttttagatggcataattcaaaagattaagctcttaagcataagcagaccagacaatgttgtggcagagataccaaaagatgctcttgttccttatgaaggtgaatttggtgcactggttgcatttgaggggaagacaaagaaaaaccgttctcgggccaaagtgaacatcgatccagtcaccactatgatgtggaacttattaatgggaccagatatgggtgatggtgctgaagggttagacaaggataaagagaagtggcttgatgaagaaagaaaagtgttcagaggacgtgttgattcattcattgctcgtatgcatctagttcagggggacagacgtttctctcgatggaaaggatcagtcgtggactcagtcgtgggtgtatttcttacccagaatgtttcggatcatctttctagttctgctttcatggcggttgctgccaaatttcctgctaagccagaggtccctgaaaaacctgtggctgagatgtctcatactcctgaacagaaggatagttgctcttgctctggactgtttggtgattctatcaaattgcagggcaagatgttcattgaagagataagtgatgttagatcattaattactacagaagataatgaagaaagtaatagtaatgaattgattggaagctctgccgggtatggagtaaaccatgcaactggaggctgccatgtttcttataggaagtcactaactgaatcccatgaaaatgggctttcaggatctgtttttccaactaccggcttttcaagtgtagtagaaactgaagatggctcattagaggatgttatttcttctcaaaattctgctgtttcttcccagaattccccagattacctttttcacagaacggatccaataggttctagttcgttgcaaaatttcaccgaagagggctatatcatgagaaatatatccaacgggactggcagctcaactgactgctcagggtttctgccaattcaagatccaaaaggcacgcttggattgtcagaatattatggacataatcctcttctagtttcaggtgtgaacaagggtgtgttgcttgatctaaacagatcatatcagccattacatacttctatgccctatgttcagaatagcgagtctgatttcacaggtgtgtcatgtttcagccatatggataaatcattccacacaggccctaatagagtgaatctttctagtgttacacaatctgaggccagtctttaccctactgatcctttgcaacaagacgagttttcaccagtaattaaacaaaacttccaaccattatatagttcagacaaagtgtcattattcaaggagcactgttcctatggaaatgatttttcgaggaacaaaactgaagctgctattatggaaccacttgtctactcaaatcctcaagagctgtacactacctcaacagagcaaatgggtgttgaacaatttcaatcaggatgtggccaacaggacaatgatgtgagagttcagacaacatcatatgaaaggcatcagtcttcaaccttgtgtggaaaccagaactctcagttagagatcttgcaaggagttgcttcaggctcaacacagaagttcattgatactcaaaagagtccgtcagaagttcaacaaaacggatcaaaagctaagaaggtacggggtcgacctaaaacgaaaacttatgactgggacagtttacgaaaagaagtgttttctaatggtggggataaacaaagaaataatgatgcaagggatactgttgattgggaggcagttaggcaagcagaagtccgagaaatatctgaaactatcagagagagaggaatgaataacatgctagcagaacgaataaaggaattcctgaaccgattggtgacagaccatggaggtattgatcttgaatggctaagagatgttccaccggacaaagcaaaggacttccttctaagcattagagggcttggactcaaaagtgttgagtgcgttcgtctcttgacgctacatcatatggcttttccagtggacacaaatgttggtcggatatgtgtgaggcttggatgggtgccgcttcaaccattgccagagtctcttcagttgcacctattggaaatgtatgagcttcactaccaaatgattacttttggaaaggttttctgcacaaaaagtaagcctaattgcaattcatgtccattgagagctgaatgtaagcactttgctagtgcatttgcaagtgctaggcttgctcttcccgcacctgaagaaaaacgtttggctacatcggaggatccaaatgttgtagagttttgtcaccaaacatacataaattcaggggctgttggcgaacttgagtggagtgcgaactatcctaagcatgctgtttgtggtaacctgcagccgttcattgaggaaccactgagcccagaacctgaacctgaaaatgtagaggcgaaggacggtgcaatagaggatttctttaatgaagaccctgatgaaattcctactattaatcttaatattgaggagtttacacagaacttgaagaactatatgcaagcaaaccatgttgagattgagtatgctgacatgtcaaaggcattggttgccatcacccctgaagctgcttccattccaactccaaagctcaagaatgtcagtcgtcttaggacagaacaccaagtttatgaactgccagattcacaccctcttctggaaggatttgaacagagagaaccagatgatccctgtccatatcttctttccatatggaccccaggtgaaactgcacaatcaaccaatgcgcccaagacattctgtgattcaggggagactggtcaactatgtggaagtttaacatgctttagttgcaacagtttacgagaaatgcaggctcagaaagtcagaggaacactcttgataccatgccggacagcaatgagaggaagcttcccacttaatgggacatattttcaagttaatgaggtatttgctgaccattgttcaagccaaaatccaattgatgtcccacgaagttggatatgggacctcccaagacgaactgtttactttggaacctcagttcctacaatatttagaggtttaacgactgaagagatacaacaatgcttttggagaggattcgtttgtgtgaggggctttgataggacagtaagggcaccaaggcccctttatgcaaggttgcattttcctgccagcaaggttgttagaggcaaaaagcctggagcggcaagcgtcgaagaataataggtacatcgaagaaatatagaggagctaacaaaacggatggatagccctaaatgagatgctgacccaataagtcgccgaatcacctccaagttctaacccaatttttgaggcgacatgacctgttaaattatgttccatctatggtaacagcttagatgttcttgtgagtcgcatattctttactctgaaattcaatatagcaaatgaaaaaaaacacagtgcatagtctagttctaattgtacctgtgagtggaatcagttgttgtacaacatgaagatgggcctatttgtacaatggtcatacatgttctttgatcatatactataaacaatgtaacctcatcggccgttatttgattgtttcaaaacaaaggaaaagccttttcaattcatg

SEQ ID NO: 20956 - DNA, 1417 bp, Zea Mays
gtttgatgacgacgacgaagaatcaaagagggcttccttcgaacgccacccccgggcctgtggcaattaatcccctcgccttcgtaaccgccagtcctccgccacctctccacccaacaacaaaacaagcctaatgggacaagtggcgcaacttgagtgtcaccgcaggaggttatgggtctagagagaaggcaaggatggcgttgaagaaaggtagacgtgtggtgcctaagcttactgctgagccaatggatgtagatgtgaaggatatggacgatgctcatgacacagccattgatgtggaaccgttagcaatggctttcgagtccttgccaactgaggaaagtccagataagtcagttgctaggctcgatgatctcatattagaagctataaggaagcttaaggagccttctgggcccagtaaggcagccattgctgcatacattgaggaccaatactggccacctgctgattttcagcgcctgctatctacaaaactgaaggcattggttaattccggaaaattaatcaaggtaaaccaaaagtacagaattgcaccaagtccacccccctcgggcagaataggcactaaggtatcctctgctgaagggatgaaggcagaaaataataatgctaaacgtctaactaagcatcaagtgattgctgagctggagaagatgaaaggcatgaccaaggaagaggcagctgcctttgctgccaaggcagttgctgaggcagaagtagcaatagcagaagctgaggaagcagcaagagttgcagaggctgcagaaaatgatgctgaagctgcaaaggcttttcttgatgctgtcactttatcaatgagaaacaggaatgctgcttccatgatgcttcgagcttgctgatcctttacccatgcggtcatatggttttggccagcagcacaccggtgtttctgctgcaaagattttctggatatatgagtttcttgtatagccttatttatagatcacgacgcatcaactggaggggttttcaacatcttgctgttggtcctttgtcgttgcagcctttagacaatcgacaatatgataacaagaattatcgtgaaagtagtcttcatttatttttgttttcttcccattgtgttgctttgtaattaaactctagccttttcgtttagttagttgaaatggtgtcgtctagtagaactgtagtgaaaagaaaatgaagaaaatgttagatagccaccttagttattcaatttgctgtgatagtatgtttctagatatgattagctaatgacagcgtttaagattacattcctgctgtttcgtttttttctatagagattacctcttttaagaaaagcatgtaagatttacaaattcggctcgggacaccaacaaaagtacaaaaaagttcagcacaaatg

SEQ ID NO: 20957 - DNA, 4654 bp, Zea Mays
ctcgcttctctcttctctcttctctctcagccgagctccctctctccgcgattggcgacgactgaggagcgggcagaattcaaaaaaaaaaaaaaaaaagagtgggcgaccgccgccgccgcccaacgccaggtgcccgggccgctttcgccagcaacgagcacccaccagattattgcgcctgctgggtacgagatggggatagaggattaccatgtcatcgacctcgtcggggagggctccttcggcaaggtttacaagggcaggcgcaagtacactcggcagacggtcgccatgaagttcattcttaagcacgggaagaccgataaggatatccacaaccttaggcaggagattgagatcctaaggaaactcaaacatgagaacataattgaaatgatcgatgcctttgaaacccctcaggagttttgtgttgtcacagagtttgctcagggagaactgtttgaggtgctcgaggatgataaatgccttccagaagaacaagttcaggcaattgctaagcagctggtgaaagcattgtattacttgcattccaatagaattattcaccgggatatgaaacctcagaacatccttatcgggaaaggatctattgtaaagctttgtgacttcgggtttgctcgtgctatgtcagctaacactgttgtattacgctccattaaagggacacctttatatatggctccagaactggtgagggaacagccatataaccatacagcagatttatggtcccttggggtcattttatatgaattgtttgttggacagccccccttttatacaaattcggtctatgcacttatccggcacattgtcaaggatcctgtaaaatatccagataatatgagcacaaactttaagagcttcctgaagggtttactcaacaaggtgcctcaaagtagattaacctggccagcattgttggagcacccatttgtcaaagatgattcaatgggatcggcagctgagtctcgacccgcgccttttgaagctagagggtctgaagatactcagaaagcagaagaaacacaatcaaggaaccaaccttccccagccggcccccaaagtaggattactgctaccaatagggaaaatgcttctgataaaccaaaaggaaacagaaaactggatgaccctatgcaagcaactcaggaccgccatggttcacctactggtgctgttgctgaaagctgctctccctcagagtgtacggctttggataaactggaaaaagcctcacaaacagtagaaggtgcaagcagcattgttcaagatattgaagcactgtcaaccattctcacccctatcaaaatttggcttactaatactccaagttcaaccagggaactcaacattgatggagcaaatcagtcgctcagaattattaaaaatttgattgatgctggttcatgccaatcttatgctgcaattgatataagtctgcttcttgagtttacaaatctcattatcaaaactaagctttcaaatgcttatggacttgtggtgaagtgcctggcaattgcacggaaactacttgatacaagtgatgaagttattttaaattcttatgacagacactggttatccctatatgaactttattcacagatcctggtttctacagtggattcatctggaagaatatctcgtgagtcaactgcctgccttgctttgatgttatctcgggttatctctggcttgaaagctagcatgtcatctgaagacccaaagccagtggaagaaagtcttctcaagatcattgatcatgcgaggacatcacaactactagagctcttgtgtgaatgtctgatggcttcaggttcagacacactatctggttctacgaacatggtacctgctgcttgtgaggcatgcaaggctatttggtacctagctcatgctgttgacattatgtccattggtgcacaccatttttcatttcccttagctaattcatggcgacagatacattcaatgcaagagcaaagttcaaaggcagattcaaactctaccaatctgattaacatatttgtcaaatcatttctcgcctcacgaccaattcaggttgcagtttaccactgcttgcataatggtctagaatcagctattcatgcttgtcttcagcttatctcaagggcctgtcttcagaatgtgactttctgtgccattatgtgtcgtccatggaattcaccatctgatgttgacgtagtagaatatggtggagatggaacaatagtatctgacatgttttccttattgtcactgtgtggatcatatttaaataaggaatccaggcagaatagcaatcagaaatgcaaactatccaaccctcatgctcttgtagtgcactgctgccttgcactagcgacaatagctgcatgtttgaaatcagagggaggatcttcagcatcacttgtcctaacaagttcccagaaaaaacagcggtcccggctctcagttcttgcacacctctcatcagttgatgatacagtgaagagttgcctgcagccacactgtgcatcagcaatgcttgcgctctcatcacttgtttctcttgaaaatggtggacaaaccagatcgtctctttgtgaaactgcccttgctttgtttcctcgtatggcaacactgcacacactgctgaagctttggttatctgatggaagcgaggcactgtgtcgatataatgctggtcttctgaatctttttggactccgcgatggaagtattggactgctggagacaaggttgaaatggggcggaccattggccattgaacaagcctgctcagttggcatcccacagctcctaattcgcttgcttactgatggtttcataaaagaggtttctgacggaaaagatggttcgacgagccgcagtgggttgtctccattgggagttgtctggactctttctgctttatctcaatgccttcctggtggagtttttcgtgaaattttgtacagaagggaacagttaaagctcttaaccgacttgttgtctgatacacatcttaaggcattggccgcctggacgggtcttggtggtgggaagaggggagttcgggaactgataaactcagtcgttgatatcttggcatttccatttgttgcagtgcagagttctccaaacatgccgtcagcatctgcatccatcaatagtggtttcctgcttaatgttgcatcacccggtgggcgcattggtactgagaataaggaaatgctcaaaactatagagcaaaacatgcctcagtacattcaagttctactagaggttggaattcctggatgtatgctgcgttgtcttgactatgttgacatggaagatctaggtaggcccttggccattgtggccaaaatggcaggctacaggccacttgctttgcagcttcataaagaaggtcttctagatccaagtagagtagcagcattactcgagggtcctatagcaaaggagactttgcttgatttcctcatgattatttctgaccttgctcgcatgtcgaaggacttttatgtgcccattgataaagctggacttgttgttcttctgaagaacttcttatcaaatggagaccctgatataagggcaaaagcttgtagtgccattggcaacatgtgccgccatagctcctacttttatggcccacttgcagcaaataaggtgatccagctcgtggttgacaggtgttctgatcctgacaagcgcacacgaaagtttgcatgttttgccgttggcaatgctgcttatcataatgatatgctgtatgaagaattgagacggtccatacctcaactcaccactttacttcttggtcctgaggaggataaaaccaaaggcaacgctgcaggcgcgctcagtaatctagtgaggaactcagacatgctttgcgaagacattgtctcccaaggcgcaattcaggcgctgctgaagatggtcggcagttactctactgttgccctgagccccagcagacgagatgctctaaccgaatctccgctaagaatcgtgctcttcgccctgcgcaagatgtgcgaccacgccatctgcaggaacttcctacggtcttcggagctgctccccgtcatcgtccacctccggcagtcacctgatccaacgatctccgagtatgcttctgccatcgcgaccagagtgagccaggcctgagtgcctgacgtttctctggacaggcgcagcttaaggtgtgccaccctgggctgggcatgatcatgccacagcggcccaaatctacgatccatctgcagctgtaatgtagtgtatggtttacggatcaagcaagcttagcttgtgcatatgcataagacttctgaaaaaagagcgattccattcgctgtctgtacatacgctgatacgcaccaccagaactgaagctacatgtcatgtgtgttgatgtatgtatatgctgctagggtcgtggccatcgaatagattcatattttgcacggatgttagcactgtatcgtttttttttggctaccaacaaatacgatgatgtagcagaagcagcgttatcgtggagacatcggacgaccatgctatactgattaagtgcacgtttggatcacatgaattaaagcaaaataactaaagatttaaacaggaagagctaaaa

SEQ ID NO: 20958 - DNA, 2211 bp, Zea Mays
caacagccacccgcgaccccaagtcccgatcggccgccgatcccgatcccgatcccgaccccacctccctggctccacagcacccctgctccacacacacggccgccagcaagccgccggccctaggccctaccgtcgcagcgtcgcctgcttgactatctgcctccagccctccagcaagacttcagtcgcctgccccagcctggctgccgccgccctccagcaaggcagcaaacgccggcctccggccgcccgtccctaggccagaggccacccctaggccgctaggcttccaccgccgacgcccacagaaaccgtaggcgccaccaggccaccacgagatccctgccgtgacggagaatggaggccgccgcggccgtcctccccacgctggtgccctccgggagcgcggtggtgtctcgtcgctcatcgctcgcgaccgttgttcctctggtctgctgcgggttgctgcacatggatcgctcactgtgtacttgtgtgctcgctctttgctgcgcaggtggtggtgctcctcgcctacctcgggtatctcgccgccgctggagccatcctcccagggaagctcgtcgacggagccctactcccggactcctctcgcctccactatcgctgcaacggtttgctctcgctcctgctgctgctgggactctcggcgttcggtgtctacatggggtggatgtctcccacggttgtagctgacatgggactcgaacttctgtcagtgacctttatttttagtgtcattgtttcttttgcactctacattgccggcatcaagtccggccacaaaagttcttctttgagaccacatgttagtgggagcttcatgcaagattggtggtttggagtgcaacttaatcctcattttatggaagttgacctcaaattcttctttgtgagggcaggaatgatggcatggttatttattaacctctctttgtttgcaaagagctactttgctggttcagccaatctttcggtcattctctaccaatttttttgtgcgtggtatatcattgattacttcgtccatgaagaattcatgacctcaacgtgggacattattgctgaaagactgggtttcatgctggtgtttggtgatctagttttcatccctttcaccttcactattcaggtatcctacattcctgcaaatgttgacccatggtgctagctattgaataccttatttttgagaaaaaacatagaataccttattaccttaggcacactatcctaccctaacattgatttgattttggcgtttcctaattgtcagatttgtggctcagatcactgcttctcttacattaaaacagtaggctgagaattaagctaatcaacaagtatgatttgtttgtcaggggtggtggcttttgaagaacaaagtagagctgtcccttttgtctggtctagctaacttatgcatctttcttattggctacctagtgttccgaggagctaacaagcaaaaacatgtgttcaagaaggaccccaaagctcctatatggggaaaacctcccaaagttgtcgggggaaagctactagcatctggttactggggcatcgcaaggcactgcaattatctcggagacctgctgctagcactttcgttcagcttgccctgtggagtgagttccgtggtcccatacttctaccccacgtacctgctcattctactggtcttgagggaaaggcgcgatgaggcgaggtgctcgcagaagtacagggagatctgggcagagtactgcaagctcgtgccgtggaggatcctgccttatgtgtactgaagagacggtagaaaccaaggcagctcatggccctgggccagctgtaaaccttattttgtttgcccttaaccagttggtgaatgttgatgtagcactcggtaaactgtgaccgtgcaaacttttgttattgttggtccatacatgtttggaatcgtgaatcagaccgcctcacttggtggcatattattccctttagcgcttgcttgggagctaggacccgagaggattgaaggggttaaaattttcttgttattcaatattgaatattaaggaaattttagtgactttaatcctctccggtatccttgctctcaaataagcccttagttatgtataatctaaatattatgttattgttcttcaaacattagatacatctaagaaatttattcatacaatc

SEQ ID NO: 20959 - DNA, 3172 bp, Zea Mays
tctccacttcattacacatccccgcgaaatcccggacccgacgcgaccaaccaccttgttcagtgaccccctcccccgcgcgatccaccgccggcgcgcgtgtaccctaaccaccgtgcggatctgggagcagctggcggcgctccctcaaatggtccccggcggcgaggggccccccggaaggcagaacagctgagatgcgacgcgacgcggtgccgccacccaccgccccctcagcctcctcctcgtcatccctcttcagcggcggcggcggcgagcggctgttcgagtctgggcccagcccgctcgtcttccttcccctgctcctgatccagggcggtggcatggacctctctcgcgtcggcgagaaactcctcagctctgttcgctcggcccgctccctcggcctcccaccgatccccacggcgccccctccccgccctgaggttccagaacgagctgcggcggcagcagctgctgcacgtgcgatcgccgggttgccacctcacgagaggatcaacctgccatccaattcggaggacttggtctccatctatgggagcaacccccagggccaaccggtggaggagctcgaggaggtgttctatgaggaggagtttgatccaataaagtatattctgcaaagtattccggaggaaggaggtggcgatgccacctatttcgataagcagtctacattgagattagagcagcttgacaagattgcagaaagattagcacaccatgttatgggtcatcatgaagaaatggtgaaggggatgcagttagtgatggaattagaacatgacttaaaggttgcaaatgtaatctgcatgaatggacgaaggcatataacctcttcgaagaatgaggtgtcgagggatctggttgtcaatgtaaaatcaaaaaagaaacaagctttgctggatgttcttcctatccttacagagcttcgtcatgctctagacatgcagatggaacttgaaacttttgttgagaaagaaaattactttcaggcattccaattattgcctgaatatttgcaaattttggagaattattcaggcctttctgctgtacaagaaatgggacgtggtatagaggcatggttagttcggacaatccaaaaattggacacccatttacttggtgtttgtcatatctttgatgcagaaaactatctaactgttgttgatgcatatgcactaatgggtgatgtcagtggcatggctgaaaagatgcagagtttcttcttgcaggaagtgctgtctcgaacacactatgtcctgaaagaaatgttggaagaggaggttggaaataatacacagaaaaataggtttacatatagtgatctttgtgttcaaattcctgaacccaaacttcgcctctgcttgttgagaaccctagagtttttattttcattgatgtgctcatactatactattatgagcttttcttcaggagataagaatattgactccaagggccaagatgaagcatataaggatggcacatctcagaatagcagcgaaactttagttaatttaggaagaggtcattcaagtgcagcagtcactcaggatggttctgcagctgaaaaaattgacagagcatcatcatctgaggtcagcaaccctgatactagtacatcagaaacaggttctccattctatcagcttagaacagatgctacgaaacttgttgcacaaacatttcaaagagggcgaagaaatctttggcagctggcaacaagtcgcttatctgttctattatctagttcggctgtttgttcaactagcacataccaattcctgaagaattatgaagatcttgccatcttcattttggctggcgaagcattttgtggatttgaagctagtgagttccgccagaagttgaagactgtctgtttgaactacatggtgtcctttcaccggcaaaatgtatatgcacttaagatggtactggaaaaggagtcttggacaataatgtccgctgaagcttcacaaataattagtttagcaggtctaactggtgatggtgctgcactgtgctctcctaccagtagaagtcctaagttgccaataaattgttaccatgggacaactacagccaactcaggaaaggaaaagctcggatttgcttcttggcttgtgattgaaaatccattttcttttaagctagaaaatggctctgccgaatccccaaagtccaatatgcttgttgactcatcagctagcaataatcatggcaatggaaacaattcatctttagatgaagagaatgaagaccttttagcggatttcattgatgaagatagtcagttgcctagtaggacaccaaaagcgaaaatggtaaaaggcaattctttacattggaaagatggagacatttcatcacagacaggctcatcactttctctattaaggatgatggacaaatacgccaggctgatgcaaaagctggaaattgtcaatgttgagctttttaagggtatctcccaactatttggcatcttttaccactacatatatgagacatttgggaaccaagacaagagtcaaagcagcaagcctttgcctgatcatcaatcatctcggcttaaagccgctttatcaaaaataacacaagactctgatcagtggacaaagccaaatactgtttcatattcaccttcatcccctttgtcaaaaaattcaacttttggtcaaatggatgtgatgcctactgcacctcccagttcaatgttcacctcctatgggttaaaggagagatgtgcagctgctgaaacattatcattggttgctcgaattttgaaccgatctagagcccatctacactcagtattgtctaaaaataacagttctgttgttgaggagttctttaggacactggtggactctgttccagatttgacagagcacattcacagaacgagtgcgcgtatgcttttgcatattgatgggtatccagataagattgcgaatgctaaatgggaggtaaaggagcttggaatagagcacaatggatatgttgatttgttactgggcgagttcaaacactacaaaacaagattggaccatggaggaatttctagggaggatgctgtcctttcttactctgaatcatttgacgacggatttactgaccagtgcaaattcacacatgtgct

SEQ ID NO: 20960 - DNA, 3994 bp, Zea Mays
gctgtcaatcgcctccccactgcggcagatccgcaatccgctcctccaccaccgcgctcctcacccacgccagggacaagactgtctacctccacgcccgcctcaccaactccgcggccaccgccaccgccacgcccctcccccatggtcgtcgagtccgagtggtggaaccagcgacgcatgcgcgtcgagggcgacgtgaaataggtgctccaccgcgggcacaacgggcacagtggaggtggaacgagcaccatcgagttctggttccaccgaatccaccgctcgcacaccggatccatcgctcccacatgcccgcacaccggatccaccgctccctcccccgcgatggcctggttccaccgagacaactgcggggctagggtttggattcgtgggtggagcccaaggctagatccagcagggggagggaggtagaggaggggagggaactgctggtggtcggcagtgggcgaaggcgcgacaatccaggatatggattcctgagcgtcacccacccgcccatccacgtcgcgcggtgtagtcatcccctatccgcagccgcctcgctccctctcccacaacaaatccattctcctcctcccactcgacgaggatcgcgaggatgctggaggacgtcgtcgctgtcacgcttgacgttagggcctccgatgcttgacgttagggcctctcgcttgaagaggaacacaaacagagctcatgttttttattttgctctgcattatctactgcttctctgtgggggcgttatttacagtatgtggcctgtttgttgtgttgttcctgcggaagggcgggcgggccgaaggtgtttaagaaaatgttgttgtcaacatcaacctcctggaagggccagaacgcaggcagcgcctcaactcgtcaccccatcagcacggtgagccccttatctggattgttatcatggtacgcggtgcgctgcaagcctgcaagtgacatcaaattggattggtagtcagcgggtgtcatagtgtcagttcgatggaatggttctgcagtgcatgtgcttctgtaatttccgcaagaagcagtcaacttctccctgatatggcactaggacattgtagtgattcccgcacgtttgtggaactcgacaacctaccagagcgccagatgtttcattgagaagagaactcctccagtctggctttccactggtctagtctctcctttaaaccaaatttgataccactcattgaagtcaatagctgggatgtagacatgtgaaaccacacctgtggaactttcagcgtgtgatgactgggtcactggtggaataccgtgttttttgagctgctcgctttcagttcgcggtcatagtcctgtgttttttgccttcagtttcttgatgtagttattgcctaaaatttctatatcttgttcatcgtactggagatgctacttcatgtggagctggtatgtaggatgattatcacgagtacttcaagcgctcattttaggaagacatcgctgcgcaagtgcctcaaggagtggaatggtgagcccctgtccatctactgaacagagaaaataccaggagcaaatgactgcatttttagttaatccttttattcctaaattaattgtgtttgttaatgcttttattcctaaaataagtaaccgagctcgggattcttcgcaatttgatttgcgagatcacccccataaaggcatcatgaatctttatgcctgtaaagacatcccactgtctctttcgttttcgataagatgttttggccgttacataatgcctgtaaggtagaatgccattgcagttgttgcatcagaaagcagccatttaacgccattgtaaagtgagtgatgattaaatacaaccacacttctgtctctcaggtttctgtacatggagtttttattgcacctcttcttccccagcaattagtacttgcagttagactaaatgaatcttgaatgccccttaactgttggctttacatggaactacttttgcatataccagacaactattttgaacttcaatatgtttttcaattccagcaattgatcgaaacatgatatatttgacatattcatgatggatttttgtatttgatgtgtcgctttttcatctatcaatgtaattcttggacataacattgcgcacaggtaccaaattcacacccttgttattgcgagttctgtaaatcatgatgttcacatgtgatggtttgattcagttcaatggttagcaagctatttgaacatgatactatagtagtgcatatttgctgtacaaatggccactgcccagctatttgcataagatattatgtttctcctgtgacattttctatgccacatacatttatatggcatttttgtgcaatttagtaccggtttttggttgatggtgtctggaggtgtgatgagacaaaaccctttgtacgtgatgaatatggactgatcagcaatgaagtgcttgtggaaaacaatgtactacccgttgtgcagccagagccttctatcagaggaactaatatggataaggatgcccctggagccatcatctcagaacccaagcatgcaaatagcagttatccgccatgtggtctctggaatattattacacaataccatatatgacgttgttcccctttctagcaagttaacagttttggacactcagcttcctgttaaacaagcatttaaaataatgcatgatgtgggtcttgctctggttcctttttgggatgaccgtcagggaaccataacaggcatgctcactgcatcagattttgttttaatcttgagaaagttgcagagaaacattcaagttattggcaacgaagagcccatttctgcttggaaagaagcaaagctacagttctatggtgggcctgatggtgctgtcatgcagagaacgccattaatccattttgtacagacaggcaacattgatctcagggccaagaaagaagctcaactcggcatgcttcctgtttgaagcaagggcaacaaacttaccccaccagatctctgtcgccaaagcagggctagtgaataagctgtgtttcctcccggattgtcactgcttttatatttgtgcatttattttgagggaaacattttgcccaaaaaaggcctgcagtgcacgttttaaacaagtcatttgaaccaactcttatgctgaaaactgtatgtgatactgcagaaggcaacacactagcttgataggaaagttggttggcaagcataggtggactctggtgccttcatatatctatatatatattttaagttgacgatcttcgtgatgctgaaactgatgaagacctccgatgaaaaaagagacatgctgcacatgcacgagggtacttgcagatcgatgtcggctctatggacgaacactcgaccaagtcagatgaggagtatgagggcctagccatgcgcgacgtgatggctactggtccgacgatgagcagcaagctgtgagttaaagatgaactcacctgccctggagagtaacatccataggagtgaggcaaaatggctggtaccaccacaacatggacccgttcctgaagatgtccaaggaggtggtagccgacaccataatgtcttgtgtcattgtgtcaccggtcggcaacacactgcgctggtaccggcgggtgttgtgtttcttaggcgtctgcttctgtgctttgagttgtgctatagagtggttgtgccaactactgattttaaaagaaaaaggtgagctgagaatcattgttgaaaacaaacatgtaattgttcgttctcatcagttgtgccaactaccaagcatttcattgatcagaatttatcgttgctcatgagaaccaaaagtaagacacttctcaataacattggatgcaaatttctgctagcttatcttcactatcttttctcgtatcaatataacacacatttatacataatttttgtgttattatatgttttcgttgcaacgcac

SEQ ID NO: 20961 - DNA, 1096 bp, Zea Mays
gaatgggacttctgtttgcgggaaggaaaggtaatcgagcatcttgatgggcatacagacataatccaaaagaaattaagaagcgactggttaccatggggaatgagaaagagagatctattacttagacgatattggaggcgagaagatgatggaacttatgtaattctataccactctgttttccactacaaatgtcgtcccgagaaaggctacatccgtgcatgtcttaaaagtggaggttatgtaatatcaccagtcaatcaaggaagacaatcagttgtaaagcacatgcttgccatagattggaaattctggaagtcttatctgtttacatcatctgccaaatatatcactatacgaatgttaggcagagtagcagcactacgagaattcttccgagcgaaaaatggtaattgttcttgcatggagttctcatctggagagttgaccagggacacgggattacctcaaggtgaaaatcagcgaataaatttggaaatgcagcaagaaaatgagaacggaagacttgaaggtcctactgaaggatcactgggtggttctaacaggcacttaagcagtactggttcctttgttcaactcaatgatgcagcagatgagttctttgacgtgccagacgaatcagaatatgatcagagagaagttatgtttccttctgatgagagcttgcatgctgcggaccagcgtcacgctaaactgtccactgctgctgtttttgtaaaaaggttgcatgatcttgcagttcagaaaagaggatacattgacttacagggagctgcagatgctgataatgggccatgttgctatggatatactcttcccaaagattcgagctatacagtgccttctacttgggcaatgacagatcctacaacattcttaatccggggagagacttatttgcacgatcgtataaagatcaaggcaaatagtaccctgatgcaaatggtaggtgctgactggataaaatctgataagcgtgaggatgatctagctggtcgccctggggggctagtccagcacaagggggcacccgattcttcttcattgtaaacattcaggttcctggttcaac

SEQ ID NO: 20962 - DNA, 2840 bp, Zea Mays
tccgtccccaaaaccctagggcgccgccgcctctggagcaagctcagggcaaagaccaagatgaaatcgatcctggtttacaccacctgaacaccgcccctcatacttgtcgacggtctacctgatggcagcaggttccggcggtggaggttttctgggcgacgtcaacgacccatggctgaagccgcggctgctccgcgcggtggtcaccgggcgccttccgcagcctggcgccgccgccgagctctcgccgacggaggtcgcctccatcctcgaggtggtacgcactcacggcctactcacggaggatctcccgggccgcggcgcgctggtgaacccgaagctcgccgaggcgtggcgcgccgccgtggacgcctgggttgagcgtgtcgtggcgctggtggagagcgactcgacatacagttgttggttgggtacttgctttctcggtgtgactttccaagagtgcagaaatgatcgatttgcagaatcacactccatttggtttgagaagattctgagtaatttgcagcaatcgtctagctttcaacttgttattgttatttcctgtacttccatgtctgatttatttgtaaggacgaagcaattgatttgctgaggacagttattaaattgtacccatcctctgtaaaccggcactacaataaagttgaatctgctattgcagcaaagattatgagcaatgtaaaaccatctgagaaatttgcgagaaccttagcattgttaccttctgtccgagtgtccgaggacagttggtcactgatgattcggaggatactgattgtggtaaacaatcttttgaatgatgctttcattgggcttgaagaagaaaagaaaggccatgatattatgctgctgctagttccacctggaactgatcctctaccaacattgggagatgaagtaatgcctggaggcaatgtgcatatcatgaagaaatttcgtgtctttactgttcctaccatttcagctcttacgctttgctgcagcgtgatgctgactagttattatccagttcaggtcaatgttccaattcatgctttgatagctttgatgcgaagagtgctgttagttgatggatcattgcataacaagctgttcccttctacaacttcattgcatcaagagcttatttgttttgatcttccatcgttacattcaactttcttggatttgctgaatgcaactattaaaggcatgcgaagccaactcttacctcatggtgctagtatcatacggcttataacagagtacttcaaaatagcaaagctgcctactttgaggacaaaaacttatagcattttgcagctgttgctgacctccatgggtgttgggacgtctctgcacctgcttgaggcaacagtccgcaatgcagttgctgatctgaatgatgatggtgaaattaacatgactatgatcaacacaaattcatcgcaattgaccaatgaatcatcatcaaaagtttattcgaagaagaggaagcaagaaccacagatgcaaaactcaaccatctcaggttcagagaaagtagcaatcagcccaaggaaaagaaaaggttcttccataccaattacatcaaagggagtggcccctgaaagtacaggagatgttacactatcaactccacattctgtcaaaatagctgcgcttgaaacattggaagttcttctgaatgtgggaggttcattgcggatggatcgctggaggtcagaagtggacatgctcttaattaacgtggctagaagtgcttgcggcatgggagggagttatgagcaaaagccatccacatttggggagccaaacatatcggacttccaacttgcttcgcttaagggcctgctggcatcttttctttcttctcatgcccgtcctccttatttagccaacggaattgaactcttcagaaaagggaagctagagataggcactaaggttgcagagttttgttcacatgctttgcttgctttggatgtccttgtccaccctcgagccctttctctggaaagaacagttcctgcaagctctgggttcaactacactgcacagaaaaaaacagtttttggtgctggtacacaccagatctcaccatttggggaccagcctcaagcaatggaggtcgaagacatgtacgatgactggctaatatccaacaacaatgaaccaccagaggttccagtgaacggtagtgatgctgtggtaagtaaaggtgtgctggtggaggatggaaagcagctcaatcccatagcagaagatccaaaagtcgacccacccagaatcacagacgcagcacaagatgcaccagcatccaccaagactgatgtcaaggtggtcgatgcagctgcagccacagctgccaagccaaacacagcggagaatccttcgagttccaatgctgtcccctctccagtgcgcacaacagattctgattcacgtaagcatgcgtcatttcccgagcaggatagtcctcatgagaacaaaagcgcagccgtccatccaggtgaagcttctgcgactccaggtgttggttcaagccaccaccgccatgaagcacctgaggcccgttcagccagcttcacggaattgtttggttctgagtctggcatcgaatcagagtccgaagacttgatgccagatatcgtcgacggggaccctgactctgactaggtttgccgtcgtcatttgtgacatggcaatggaaattttgtgatgttcctgttttgttttgagcaaattgtacgacattgccggctgacagatgatgcagtatttgattgatagatatagatggagctaaattttgtgatgttcctgttttgttt

SEQ ID NO: 20963 - DNA, 1418 bp, Zea Mays
ccggagtcttggacgatgctggctgtggcgggcgtcgacatggaaggtgcaatttgcatttcccatggagctcactgattaataacgtcccttgggttcatctatgccggtaaagagggcgcatttgaagccacatgccgcagacatcaagaggaacccccatgtacatgagctttacaaattggtttaccgacttccggagaaccttagctggctgttggcaccaccagaaattcctaaaagacctgcctcaaagaagaaaaaacaaaaagacgaaatagtggccggtaacagctttggtgtgatcttggagtgggagggagttgttgtggatgatgatgatccagacttggagccccgggtttggtatgttctatcactagaagaggggaagtctttccctccagatgcattgctgaagaaaatcgagggaatgagaactgaccaggctattgcagaagtcttatgttggtcagaagatccagcagaaatccaaaggttggcaacacacaaggaggttatatatcaaaaacttcaagctcctcgctcaaggaagagccttgaagaagggatcaaaactgttggtctgcaaggctacttcgatgctatagttgcattggaggacttctgcttagggaaacctgatggtgagatgtttgaagtcgcagcggagcaacttggtctggaaccagatgcctgtgttgtgtttggtaactcaaacttgacgacggaatctgcacataacgctgggatgaggtgtgtggcagttgcaggccgacaccctgcctatgagctccaatcagcaaaccatgttgtgagatggcttgatcagctctctattgttgacttgcagaggcttgctaatggtgaagttattggtcgcaggggtagagaatctgacatggatatggaaattgtgattgaggaatgatgatgtttctgcaaaaatgacgcactaatatattgttgtgcttataatctgatacacctaagtaatgcattacattttgtaaacaggccaagcagtgcaagttccggactaaggatactccggagtttgcattaccttcctggtttgcttgtgatgaattggaattcgcctaaaactcttttagtcattagagttggaagtgaagaaactcccacccgtaacttgtgtatgtacagtatatatatgtattacctattcttccctacatctttgaaggtgtatctgttgggctttttgggaggggctcaatttatacacggttaaatggcctttgggttttacggggtcacgagtgaggggagggaagggatgaaggttgattcaaataatattgtctattgaatttgagtatgctatctagcgatatgaaccgttagttttaatgatgtgttaagtctgtatacaatttgtttcgtagatttatttg

SEQ ID NO: 20964 - DNA, 2765 bp, Zea Mays
ccgacctgcggtcctcggccagcggctggttggctgtgccctggttcctcgtcctcctagtcaccacgcaaccagtaaaaacattcccccaatcccgaacccctccgccgccgccgccgccgccgccgccgtggccaaggagcaagaaagggacacggcctatcccttggtcgcggcgccagatctcgccgctgctcgcctctcatccatggaggcgagatcctcgtcgtccgcggccgcagtgccgccgcccctctccataccttcgtccagcgaccagtgcgtctgggctgacgcctcgccgctcctcgccgccgcgtgccgtgatctcgaggatggggaacttgtacatggagaaaactttagtctatttgctgcaatgtctgcattggaaataatggatccaaaaatggattctggaattgagagaagtcgatacaactccattgatgaagcaatagaagatggtgttgccccaatcccacttagcttggacaggacacttgatgttcaacgctctattgatgtcatggatcatcttttctcatgtgaggcaacatggcacaaggggcacactctagctcagactgtatttacatgtatctaccttatgagaatggaaagaacttcatcgcatgctgtactaaatagcttttgcaggattttgcgtgctacttgtaatgctgtcatttctgctgtttctactgcccgaactcatgaggaagaggatctctttactatgtcctttggtctgcctttgagagatgaaggtgatgataagtgcctgtcaattctaaactcagtcgaagagataatatctcgtcaattacgtgcatgtaaagcccaggcgttgtccaagaaaaaaacactagaaggtcttgaatcccttcaagataatcctgatctggaggaggattactgcagagctctgttatgcagattacgttttcgtaagcatttctaccatgttattatgtgcatgaggaaacctcatggaagaggattggagttggcccggaagcatgttgcttcatgcttgacagagcttaatttgatgcataagtctcggaagtttctcaagtcccagtccagcactatggtacagcaaagtgatggaaactgcaccactgcatctggttgtcagcctgttggctttgatgttagcttaaacagcagacttttgagtcccacaccgccacgtgcagtaaaagttcttagctggagcaatgcaatcaggtactttgagaggcttctgcatgatcttgatgtcatctgcgctttgtcgctcaatccggtgcttgataatgtgcttcactttattgtccagttccaaaaaacagtgccagatttggttcctagagcatttcttcagactttgttggtccaagatggtaaactttatggggaatacttcttttctgatgtcatttcaagggctttatcactaccggacattataggagataaggagtttcagatgaatgagtttgtggtgcagctaggtcagttggttatcaacctgataaaaattctttgtacaaacactgcatggcaacggcgcaagcttgggaagagtttgcaggattggagtactatttccatacagttggagcttgcactgaaaagagagtttggtgaaactagaaatgtcttgcagaatgagaatatgtgcatgagagtatcaaagcaacttcttatttggactcaggaacatgcatactgggttgcttttcggtttctcacattgggttttgaacttgacctatattctccgggcgaatacagtatggtgtactggtacatgtatgtggtgctcacaaagctaatagaaaagatgcagttacgagttctggccagtagtgaaacctcacgaagaaaggggaaaaagaagaaggatcatttgaaggattcagctcgggatatggcattttcgtcgtcttgtttattgcctcaatgctatcttttgctatcagagggactctcgatgatgctagctgtcctcagaaacgaaagtaggtcattccaattaccaagtatcttcaacactgaacaagagagattcatgcagcactttgatcttcttctgaaagctcgagtccctgagcacatttccttctacagtttcaaggaatcatcttcccgggcaggcatgtcggatttggtgaagtacaacttcttcaaggaaattcagaagatagtgccctcactacggggcagctttgcaagtgaaccagaaaaactcgctgaggtccgtcggatagagcaggtggctgagcacaacaggatagccctaaatattatcagccaagttggagctggcgatccgtctctgagggtctcgtttgagtttacacaccaccctcacttcgcagtggcagttgtgaagagatcatgattcaagtttggcatcgccaattctttacccttctcaatcttgatagtgatagcggatgattcttgttcacgtgttgctcacgtgtttattggttctccagagcgcaagcaacaccatgtgttttaggctgtacacaaacaccattagcaattttgtaggcaagataagaaaaaaaaaacatatgctggggaaaaaagtcctttcccctggcattattttgtaagcaaatttttttagctcactttgttatgcgaaacatgattatacagatgtgtaatttgagtcgtaattcgttactggtatgacaaggacgacaattttctcttgtttggcattttctattttgcggtgataactgactagtattttc

SEQ ID NO: 20965 - DNA, 6470 bp, Zea Mays
tgttgggcgaacagagagtcgtcttgctctactctagtcgttcggtcttcactcgacaaaaggtgagggagtgcagtccggggacgggagggagaccaatcggagctgatggaggcagcggcggcgctgccgccggagagggatacgtcagcggactggggagatggcgtggtaccgctaggtttccgggtgaaggcatcctctcgcgagtcgccgtcacagaaggcggggaacgtgctggaggccgacctgcgctcccactgggccaccgccaccaacaccaaggaatggatcctccttgagctccaggaaccgtgcctcctctcccacatccgcatctacaacaaatccgtcctcgagtgggagctcactgccggactgcgatacaagcccgatgcattcgtcaagttgcgcccccgctgcgaggcccccaagcgcgacgtcgtctaccccgccaaccacaccccttgccgctaccttcgcatttcctgcctgcgcggcaaccccatcgccatcttcttcatccaactctttggcatccccgtgcctggcctcgaacctgagctccagccactgctcagctatttactcccgcaaatcacatcctccaaacaacccctttctcacaacatgcacctccagttgcttaaagatatctccaccaggctacctccatttcttccccaaattgaggctgaccttaatagtgtcgtggacaccccagaaagcagcgtgcggttcttggctctacttgctggtccattttatcctatccttcaccttataaatgaaagagatcctaccaaatctttgtttggttctgctgattcagatgccctcagaactagtccagcttctactccaacagtttcttcaaactttgaggcacaaccaaggagatcacggagtccatctgttcagcctgcttcatatttgctggcatttcgatctgaaacaactatgctcctcttaaggaaagcacataaagacaaaacccttggagttgtttgtgttcgagcatcgaaggtattgcaaaaactgttggagcctgagccatttttagacaaatcgatgtatactgatgtcatgctaccaaaccaagtctctgatgaaattcctaaaagcgatgctctcagcctagtacattctacagactactccagtatgtttggagaggaatttagcctgtcagagaatcagtttgatggttcattactgaatattttggatattgctgctgtggaagaaggcattcttcatgtactatatgcggctgcatcacagcctatgctatgtcgcaagcttgctgaaactacttcagacatttggtctgtcttaccacttgtccaagctctacttccaggaagctggccaatctcttgctcgttcacgtgcagcactgaagtatgttgtattggcaatttctgggcatatggatgatgtgctcacagaatataaagaagccatgcataagttacttttcgttctggagatgctagatccttttattgatccatctacaagtgccatggaagacacagtaatatttgatggtatctctgctatatatttggaaaagcaatcaagtgtatatgatattgccttaaatattatccatacagcagtaaagagagctgctgttctcccttctttagaacttgaatggcgacgaggagccattgccccaagtgtaattctctctatcttggatccgcacatgcctcttcctcctgacatagacctctgcaaaagttcagtgcatgagattgataaagtgcctttggctgttttggataatcatgcaccacagccatgcaacccagaaaatattgctgggcgagatgcatctgaaacaactattcgtcctgaaaattttgaacagtgcagctttctgtttgctcctgaagaattaaaccaatctgagttgactagtctttataccttgaaaggaaaaggccatgatgtaataactcaaacaagtctgaaccatgacattcctgaaggcagaagtaaagagaaactatcatctgaccctttcctgctagataatgttgttgcagctgattattttgattcacaggctgattatcaacagctggaaaactaccaggactgtgagttaagagctcaagaatttcatcgcatagcactcaacctatgcatgcaacaagaaccaacattagaagggcataatgctggaattgatgctttgctattagccgcagaatgttatgttaatccattttttctattgggattccagtctaatttagagcctctggacaagattgaacgtattcattcagagttgatgcaagggaatgcttcctctgtatcaaaaaatttgcacttgaaagatttcaacaaaaaaacaatctacaatttggagaacaagcgtgatagatctgttatagatttactcctacaagccgccagatttgactttgaatatcatggaaagatacctgaaggggaactatatccaaatattgctgaagatggcaagcgatctgtagaaatctcacctgaagctcttcagtttgctgatgctgtaactttggtccgaaagaaccaggctatgctgtgccactttattatgaagcaattccaaaggaaaggacacttgggtagtgaaattcttctccagagcttgttgttcctgttgcactcagcaactgatctattttgtccaccagagaatgtagttgatataattttgaagtctgctgaaagcctcaatgatcagcttacatgtctttacagtttttttagtgcagggaataagaaattggataggataaaaatacatggtctaagaagacgttggatgcttctccagaaactggttctggcttcatcaggcagtgatagtactagagaacttgccagaaataaaagagatggtttccattttagaagtttagtccctccatcaacatggatacaaaagatatctgatttctccatgttttctagcccactccctcgatttttcggatggatggcagtgtcttgctatgccaaggaatatttaaatgagaagctgtttcttgcttctgatttctcacagcttacatctttgctatcaatttacatggatgaactttgtttgatggatggagttgcaatcccgaaagtcaggtctgcaaaaggtgaacaatttagttgtacggacttgtttcttaaaaaggaaactactctgtcagaccaaccaagcatgaccgaacagtttaaaatcttacttccggagctacatttcttctttccaagcatgggtaaattgtttaatgcatttggggagagcatcttggaggctgttgggctacagttaaaatgtctgcccaatagtgcaataccagacgtcctttgttggttttctgagttgtgcttatggccttatctcgaacacattaaggagcatcttgtagttgcaaacggagttagttatataagaggaagtattgctgctaatgcaaaatcagttgtcttctacctacttgagtctattgttactgagcacttggaggctgttattcctgaaatgcccaggatagtgcacattcttgtgtctctctgtagagcttcttatactgatgtggccttcctaaaatctgtgctatgtctaatcaagccactcatctcctacttcttaaggaagggaactaatgaaacaaaagtactgggccatataaaggagggcagcaattttgagttgctttgttttgaagaattgtttgaaattgttcgctgtggtaaagattcggtggatacaactgaagataatattcaggcaccgttggtcatcttcattctgggatctatgtttcttgatttctcatttgagagaaggattgaaatgttaggctccttgttagtatggattgattgcatcagttccgatccaccatcgttattatgcaactatcttcaaggtttccagacacttctagatggttttgaagctgtgctaattcaaaatattgaactacttggtgtcggcatcctttctgcgacaaactcgtctatagaatcttctgattccttgggcattgatggcactatgctactagagaagaaggcacaagataatgaagaacaaacactaatgaaatccgtaacatactgtgagaacgatggaaatcataagggtcttcgtaatctgcatcctaatagtatcatagagttttgtggcaccctggagaagtttattttgcaccttacttcatatattgaggatagttggaaatggcaccatcagttggcctctaggatctctttgtctatggcaaagtgtttgttgtttgcaaaatttttgaagtccatagcgcaagaagacacaatatctagtagcagtgagcaagatgtcgctgtgaaaatttcctgtgagcttgcacaaaagcattggcaaagtgctcttgaaggtctaggagataccattttgataaatcaggaaacacagttctggcaggtggcatcagctatgcttgattatataatggggataccaaacgtccttgcttggggtaatgttcttaatactacatgctctgcggtcaagcacttctgctcccatgcacctaggctatcttggaggctgcagacagataagtggttgtcattattagtttcaggtggaattgagggcttcaaaaacagtgagatctgtttgattgatcttttctgtacaatgttgaatcattctgaaccagagcagcgttttgttgctgtacaacagcttgggaggattattaactcaacaagttctactgaagctgatttgaaatatccaaactatgaccaaaatttcctcatatctgtttcgacagtaacatcccttttggtaactcatacatgggacagagtagcagcattggctctccatgactcttctatgctattaaggaatcatgcaatggcattgcttactgaatatgtgccttttgttgataggaagcacctgcagtccttcctttcatccagtaacggtatcctgactggtttgggacaactttctggtgtaattgaagagggctattttacacgaatgtctttgctgttgttttctaaggcatgtctttattctaatcctgaagatatcgctttgatacctgaatgtgtttggcagaagttggaaaacatgcaaacatcaactggaggttttggatatatggagaaagatctctgcctagctctgtgccaactaaaaagtgaatcagatgctacaactgttgcaaaagttctttctggatgtaatagtcaaccagtcagccctgatttcaagagcatccgtgaatcaatccttcaggtgatgtcctctttgagttctattgaagcatactttgagttcttcgcagccagatctgcacaagaacatgaggaacttgaagaagctgagattgaattggagcttattgaaaaagagaaatgaccgtgatggtagtgaggttaataaacggctccagcaaatccgggaaaatattcggtccctggaaaggtctaggctgaaagaggaaattacagcgcgcagacaaaagaagctgcttctaagacatgcccgtgaaaagtacctagaagagacacgctccagggaaacggagcttatgcaagagctcgacagggaaagagctctcgagatggaacgtgaagtagaaaggcagcgtcaactggatattgagcgtgcaaagtctagggaactgcaattcaacattgatttggaaaaagagaaacaaactcagagagagcttcaacgcgaactggagcaagtcgagttggggcggtcatcaaggcgtgagttctctgccaatcccaacagccgctccagggagaggtaccgcgaaagggatggtggaggcagagcacagcaggaggcggggagcctgaggtcttcgagcagccgaggccaggaggggggctctgcccaggcgcccgcaccggccgggccgggccctaccgtcatgctcgccgggtcaaggacgttctcgggggccaaccttccaacgattctgcagcctcgcgagcgcgctgccgacgaggacagcgcttgggccgaggacgctagcagcaacggagatcctgaactggacggcgtgaggccgcatgggccgcgaggcagcaggtcatcctcctctaggcaggttgcggagaggagggagcgggatggcactgctgccggcacgggcaggagagaagggaaatgggagaggaagcagcacccgtgactattccctgcttgtgttgtgcctaagcctaacggaggcttcctcaatcgcgttgtaattgtactcgtatgggcattggatcaggtggctgcttagtcaacggtaccgtgcattgataaaaaggttggatcatcgtatgggaacactaccaatcagctgcctgctcagtcaacagcaccattaccatcacactccgacttttgtcagatcccctaagggtgtgttcggttacaccaatccagaggggaggat

SEQ ID NO: 20966 - DNA, 160 bp, Zea Mays
ctaaatcaagaaaatcatcgcgttcaacaattctatttgatccatcaacccaatcaactaataaaaatagtgaatcagcttacctaaatccgacgtggaatttgcagaaatgacgacgatcacatgttcaagaagttcgtcgaatatttgacgagcacca

SEQ ID NO: 20967 - DNA, 4439 bp, Zea Mays
ctcagtaacaaaacgggccgaagataatgatccacggaccacggaccggcccatctcgtcctagcggcggcggcggcggcgtccttcaccgctccaggtccaggtgggcggccgcgaccagagtcgtgcccgagcccgactcgagccgacgaggagagagctcaggaggcggcggagagaagggagaaaatccccggtagggaggggggaaggaagccaaaggcccaaaggtctcggcgctgccgtagtaccggctgaggcaagatggtgaaggcacgaatgacgacgacggacgtggcggcggaggtgaagtgcctccgccgcctcatcggcatgcgcctagccaacgtctacgacatcacccccaagacataccttttcaagctgatgaacagcagtgggattactgaatcaggggaaagcgagaaggtcttgttgctcatggagagtggtgtcaggttccacaccacccaatacgttcgtgacaagagtaccaccccttcaggtttcactctgaaactacgaaagcacattcgtaacaagagacttgaagatgtccgtatgctcggatatgacaggattatccttttccaatttgggcttggtagtaatgcacatttcataattttagagctatatgcacaaggaaacattcttctcacggattcagaatacacagtattgacactactccgttctcacagagatgacaacaaaggattggccatcatgtcacgtcatcgctatccagtagaagcttgccgtgtttttggcaggactgactttgcaaagttaaaggacatgttgacaaagcctgataaggctgatgataaagaggaaattacgtctggatcaaccgatgctcaggaaacttctcaatccaccaatgatgaagtgttggtaactgaaatatctgaaaaatcactgagtaaaaaagaaaagaaggctgctgcaaaagctaagcagtttggttcaaatgcaaaagtaaacaatggtgctcaatccaataaagctactctgaagacaattcttggtgaggcactggcttatggccctgcactagcagagcatatcatattggatgctggtttggttccaagtacaaaggttgggaaagacccagagagcactatcaatgacagcactgttcagtctctaatggaatctattacaaggtttgaggactggcttgtagatattatatccggccaaaggattcctgagggttatattctcatgcaaaataagatgaccgcaaagaacatcacacccttggaagaggcttcgattaatcataagatatatgatgaatattgccctgttctgttgaatcaattcaagtcaagggaatataatgaatttgcgacatttgatgctgcattagacgagttctacagcaaaatagaaagtcaaaaggtgaatcaacagcagaaagcaaaagaggaatctgcagctcagaggctgaacaaaataaaattggatcaggagaatcgtgtgcatacattgaggaaggaagtggaccattgtgtcaaaatggcagaattaattgaatacaatttagaggatgtagatgcagcaattttggctgtgcgtgtttctcttgcaaatgaaatgagttgggaagctcttactcgcatgattaaagaggaaagaaaggctggaaacccagtagcaggacttatcgacaaactaaattttgaaagaaattgtatcactctactcttgagcaataatcttgatgacatggatgaggatgaaaaaactgcacctgtggagaaggtagaggttgatatagcactttctgcacatgcaaatgcaagacggtggtatgaaatgaagaagaaacaggaaagtaaacaagagaagactatcacagctcatgataaggcgtttaaagcagctgagaagaagacacgccttcagcttgctcaggaaaaaacagtagccgcaatcactcatatgcgcaaagttcactggtttgagaaattcaattggttcatcagcagtgaaaactacttgataatcagtggccgagatgctcaacaaaacgagttgattgtgaagcgctatatgtccaaaggagatctgtatgtgcatgccgagttgcatggagcttccagtactataatcaagaatcacaaacctgacactcctattccaccattaacattaaaccaagcaggatgcttcactgtttgccacagcaaagcatgggattcaaaaattgttacaagtgcttggtgggtgtatccacatcaagttagcaagacagctcctactggcgagtaccttactgttggtagttttatgatccgtggcaagaaaaattttcttccacctcacccccttgttatgggctttggtatactcttccgtttggacgagagctccctagcatctcatttgaatgaaaggagggttaggggtgaagatgaggccctccatgaaatggaagcagagtctcgcaagaagcaaagtaaccctgaatctgatgaagatattggtagtgaaggtgcaaataaggaaactcatgaagatgaatcaaacgggcaaactacaaacattcaacaaaacaatgatcttgagcttcctgatctgtctagcaacattggtactgccaactcatctgaactccttcctgaaatccaagctgaggaaaccttggacaatggaagttccattcttaaggaagaaacaatcgaagcttctgtttcatctcaacttgatgatctgctagataagactctttgccttggccctgcaaaggtgtcaggtaaaagctctctgcttaccagcatcccttcaagtttagcagaagatgatgatgatcttgaagtgaaaaggccaactataagagacaaaccatacatatcgaaagcagagagaagaaaattgaagaagggccaagttaatgatgaaactgctactgattctcaaaatggtgaagctgtagaaacaccaggtacatcaaagcaagaaaagggaaaggcagagacaaaggctactgattctaaagcaagtcagccagatacttcacagcaagaaaaaggaaaggcaaacacaaaggctactggttctaaattaagccagccaggtaattcacaacaagaaaaaggcaagggaagcactcacgctggtaacgctaaagtaagccgtggacagaaagggaagcttaagaagattaaagagaaatatgcagagcaggatgaagaagaaagagagatccgtatggcattgctcgcgtcatctgggaaagcattgcggaaggataaaccttcacaagatgtagaagaaacctctgttaaagaatcaaaaccatcagctggtgaagatgattcgtcaaaaatatgttataaatgcaaaaaggctggacatctttctcgcgattgcccagaaagcacatctgaggtggaccgaaatgatggcagtattagtagaagcagagacgatacgggtaccaatactgctcctgctggtggcaacagtcctatggacgaagacgatgttcaagaaattggtgatgaagagaaagaaaagttgattgacttggactacttaactggaaacccactaccaaatgatattttgctatatgctgtacctgtgtgtgccccttacaacgcattgcagacatacaaatatcgtgtaaagattaccccaggcactgcaaagaaagggaaagctgcaaaaaccgcgatgagcttgttcctgcacacacctgatgctaccaaccgtgagaaggagctcatgaaggcatgcacagaccctgagctggtggctgcaatcgtcgggaatgccaagatcacagcgcctggcctcactcaactgaagcagaaacagaagcagaaggggaagaagtctgcaaaacagaactagtgtgaaactggtgggtccaaagaactgatccatccccgattcgcaggaagtgaagctttgcctttgcagaaagtctgtggatgttgtggtttgtcagttgtcgctcgaggcgcatttgggggtatatgcagcctgtcagggagtacacccctttggcgtcacactggtgaggccagagcgacaggcacgcagtaggggacccaagctgcacgtctatgatgcaattgcgatatacagctcataataaaagaagtattgatttcatatgcaactgattggttctttattttatttgtgataccctgaaatgaattccgcacatacatttcatgtgcaattcccactaggcatgaatgagtcgtcgattgtgactcgatggtacatgcagaagcatgtcagaacacaagaaaattatataggttcgggttgcctgaatgagtagtaccatacattttatttggtgctaagtattgagtttgctggtggtgcacatattacaaatgagttgcaggtggtgatggatgagatcttacgtcagtctaatggtagtgagagggatgtcg

SEQ ID NO: 20968 - DNA, 1696 bp, Zea Mays
tttttttttttttgctgaaaggaaccttcttgctgaagttgatagtgcttacatagttaagctctattattctttccaagacgaagagttcttatatctcatcatggaataccttcctggtggagacatgatgactttacttatgcgcaaagacacactaacagaagatgaagctagattttatattgcagaaactgtgcttgccatcgagtctattcacaagcacaactatgttcatcgggatatcaaaccagataatcttttgttagatcacagtggtcacctgaagctttctgacttcggtttgtgtaaacctttggacagcagtaatttccctaatttgaatgaaccagattatatgtctggaaaagttaccacacctttgcctgataccactcggttaagcaacccttctgcaccgaggcgtacacagcaggagcaattgtcacactggcaaaagaaccgtcggatgttggcatactcaacagtcggtacacctgattatattgctccagaagtgctactgaagaaaggatatggaacggagtgtgactggtggtcccttggtgctattatgtatgaaatgctagttggttaccctccattttattcagaggacccaatgtctacttgcagaaagattgtgaactggagaagtcacttgaaattccctgaagaggcaaagcttcctcctgaagctaaggctctcatcagcaagcttttgtgtaatgttgagcatcgacttggtacaaaaggagcccatgaaataaaagcgcatccatggttcggaggtgttcagtgggagaagttgtatcagatgaaagctgctttcataccagaagttaatggagagttggatactcagaattttgagaatttcgaggagattggaactcaaattcaaagttcatccaagtcaggcccttggagaaagatgcttccatccaaagatgcaaactttgttgggtatacgtacaagaactttgaaattgtgaatgatgatgaagtggcaggaattgcagagttgaagaaaaagagttccaaaccaaagcgaccaaccatcaagacaatgtttgagaggatggacgaagaggagcctgttcaagggagtttcttaagtatgttgcccccggagggccaaccttcgtcccactccagcgttccacaggaaaaataccaacctcgccgtaaataggatatggaggtttggaaagtaaagcataggaaagtaaaacaagaaaaaaaatcgtctgctgccttttgatctgttccctgtctaggttttgtaaatcctaaccaatgcgttctttagtcaaatgcttaaaaaaatctctccggcaaaatagtgtattgcatttgatgtgaacatcagtgttcggctgtatattgtgtcaccgttctaacttcgaagtgatgcttctcagccatattggcaaaaacttgccataccaggagcaggcaagttgtgctgctgtgggcctgtggcaagcatgggctatgtgtatgacctttagatgtttctttggggtcatggttcataggagcttgatcaacttgcacttgtagcatactccctctatacccaaaagctcctatgaattgagggactgcattcttttcggacagattttgacttacctgggattaaaacccactcaatccctctcaattcatatggattggagttgaatcgaac

SEQ ID NO: 20969 - DNA, 2707 bp, Zea Mays
gttagactatgatgtcgaggatacagctttgcctcttcaaccgtcgttgaactatactgcaccagaattggttcgaagtggagattctaaagttggctctgcttgtgacatgtttagctttggatgtctagcttaccatctggttgctcgtagaccacttctggactgccataacaatgttaaaatgtacatgaatgccttgacatatttaacaagtgaagccttttctaatattccttctgatttggtatcggatttgcaaaggatgatatcgatggatgcagtatcgcgtcctagtgctgtggcctttacaggttcttctttcttccgggatgatacgaggttgcgcgctcttcgtttccttgaccatttgcttgagagagataatatgcagaagacagagtttttgaaggcattatcagatatgtggaaggattttgattcccgagttcttcgatataaagttcttcctcctctttgtgctgagttacgcaacatggttatgcagccaatgattttgcctatggttctaacaatagcagaatctcaggataaaggggattttgaacttgcaacactgcctgcgcttgttccagtgtttacttcagcatcaggtgaaactctacttttgcttgtgaagcatgcagatctcatcattaacaaggccacacaggaacatttgatatcacatattcttccaatgctggttcgggcttatgatgacaatgatccccggttacaggaagaagttctgcgtcgaacagtatcactgtctcgtcaacttgacaccaagctagtcaaacaggctgtgcttcctcgtgtacatggattagctctaaagacgacagttgccgcggtgcgcgtgaatgcgttgcgctgtttaggagatcttgtgccatccctggacaaagaaggtatattgggtatcttggagacggttcggcgttgcacagctgttgaccatactgcgccaactcttatgtgcacacttggtgttgctaatgcaatctataaacaatgcggtgtggagtttgctgcggaatatgtgattcctctcatcttcccattactcacagcacatcaactgaatgtacaacaatttgccaagtatatgctatttgtcaaggacattacaaggtattgtttatcctgcattgctctcctgtgtccattaatatgtcaactaaactactacctatttctacagcaagatcgaagagaagcgtggtgtgactgttacagataatgggaacacagaggtaaaagcatcaccttcattggcaaacgggatccattctgaacctatgccaggacaaataccagctgcaaagagcagccctccatgggatgaagactggggtccttctaagaaaaccggtgttccatctctctcagttgattctagtgcacagacaaagcaaccctcagtacacccttttgacttcagtactcaaacaaagcaatccacaccactcccctttgatttgagcacccgagcaaagcagccatcattagtttctcatgctacagcagctacaatcccacctgcgcaaccacaaccagtacaatctcttgtgcccagttcaggacctcaaacttctggctcatgtgcccctgttgacattgagtggcctcctcgaagaagctcgtcatccgacttcaatgcatccttgtctattagcaaggagaatgaatctggaaggctatctagcgacggacttgacgatattgatccttttgctgattggcccccaaaacctagcaatgttactagcattacagcaaccgagcatcgtccaagcataaatcaaaatatttctggatttagctcaggtaacatagggtttggtggcagcgggaattctatagggcaagcgaaaagcaaccaaatgagctggtcaaacacgcctaatctgatgggcatgaactcaactggcagctatttgaatcagggcagtgcagctctaggttttggaaatccaattggaggattgagcactggcctctccaatccaagcagttccagtacaggcctgagcatgatgcaaccaaaatctgattttggatcactgtccatgtctgccaataatgccgcaaatggcccacccagacttgcccctcctccatctacttcagttggaagagggcgtggtagaaatcaaggacaatcagcactctcccgagcatcaaggcctcctcattcgaactcgtcatcaggacaacaacctatcctggatttactttagtaagagaggcttgcctctattcttggcgatgacgattgtcaatgtgtacatcttcaaacctttgtaagaggttaccttctctcatgcgtagggttttgatttgggcattgaggctatcttcatattggtgacagaagaaatgtcgttgtgtatgtttctgtctaaaatcggctgtagcttgtagagttgatgaatatagttgacatgcttatctggactgtgaagttttgaatgtttacataatgtttcatgtgccttatatgtggtccctgcccattttctccccgctccccaacatcatgtaattcattagttaaggctcgtgttgtgtatacttagtctgtcgagtttaaggccaatcggcaattctgcttctatacagttgtttggttgctggtaggatcaccactgttatgttatgataccccacaactgtgtgaagtcgatcttcatgtttggtc

SEQ ID NO: 20970 - DNA, 912 bp, Zea Mays
actagatatgttgcttcagtgctccattttgaatgtttgaatccatagttgcaaatgccatggctgcaaaagcaaagttgctattgcgggagctgaaaactgtgaaggcagatttagcttttgcaaaggaacgatgtgctcagcttgaagaagagaataaaatgttgcgtgagagttatgacaagggtgataatccagaagatgatgatctgatccgcctccagttggaaacactactagctgagaaagcacggcttgcgcatgagaactcagtatatgcacgagaaaacagattcctgcgggaaatagttgagtatcaccagctcactatgcaggatgtcatatatgtagacgaaggcatcgaagaggtcaccgaggtgtaccctacacaagtactacctcgcactgggtcgagcgtcagtcgtgcagccactgcagctacaccgaaatctgctccgacgtcaacataatcttgccctgtcgtacaagcttctacaaatacactttttcgcggtcatctctgagcaatagatcaaagcgcccacctccaaccttcacggaagagtaaggtggttgtttggttgtgacgggaccacatagtttatgctgctactgttcaatgtaaacaaggattcactgttgttatgcctgtttgttgtcgtgactgagctgtggcgaaatatgaatgaacagtagcttctgactttctatatatattgtctcttaaccgcatttatggtcagggactcatggttatattatatagtctcttaattgtctcttatacttggaaaaataatgtacatgctctaagaagtggtattggacgacaaatagtcatgggaatgcattgttgtcagctactaatgtgttaaaaagaatggaagtaaaatgatttcatgtttgaccaat

SEQ ID NO: 20971 - DNA, 2537 bp, Zea Mays
atggcgcggtggccgggcgcgggcgagggcgcggagggcgggcgccgtcgagggtgcggcgggcaggcgagcaagggcgcgagcacggcaggcaagggcgcggcggacgggagccggcgagggcgcgccggccgggcgaggtcgcggcggcgagcgagccaattcctctacccgttctgcccttctcagtttctccagtacaggatcgaggcttctcctggtagcctctccgtcggagcgctccccgccgcctgcacatctccctggcagtggcggttgcctccaccctcagcgccgcccagatccctcgtcctcacctgttctctatcgcggaccctgatctgtccatgctcaagaatcaatccagagttaagttgtatggatcctgctgatgttccagaagggattgatcccaagagtgcgtgcagagtggaggtcactgtcaattcctacttcactatgcaagatggtagaaaggaatataatcgaggcaagacagtaagctatgttgttgattcagaagaatactcagttattgatttagagaaagatattgcttcagaatttaaatgggggagcgaccaacagcctaatttctgggttctaacaaggggtaatatgacaagcaagttggcttcagatgcacaacttcttgacttgttaagggcatctagagtagtgaagttattaatgatagtgggcaactgtgagcacaatgtaggacatgggcatattcctgctacatggaacatacaagaagagatacctgttgcagtgaacatagaagaagagatgcttgatgcaatggataataatttggaggaagcagatggaggatttgcatgggcagaaatacctgaatatggggaaacaactgcagggccaccaatggctaaagaggaagaaaaggagcactttatcactgttgggtgcgatcctaatggagataagccagctggaataaatgaagaatggaggtactttaaaagtgttgatcatgtagctattgatccactgcaaaatcttaaagttgagggacagaaaagaaagagggcaagacctgttttagaaataagagactttgatactgaagctgttcctgaggatgagactactctgcttgatgtttttattgtgcctcacacatcacatgacagtgagaatccagtcattaaggagggtgacacctttgtagacaagattgcttttgtccacactattaagcaatatgccatcaaaaatgagtttgagactaggattgaacatagtgacaaagaaaggtacagggcaaggtgtgtagatgaaaattgtgattggagagtatatgcaaagaagctacatggtggcaacacatttatggtagtcaaactatcagaattggatgtgcacacttgttccagtcaaacatctcagaatgcttcaacaattggattaaagattacaaagatctcccagtcgctgatctaatggataagattagggagaaaattatggagaagatttatacaaggcaagagatagccaatcgaatggaagggcgtatcctacaaagtgtgatacatgagttgaacatgaagagcagaggattgcactatgaaatcgtgaagagtggactgttgtcagctgagatatcaggaataacaaaagaagggaagaattggagagttgcagttgacattaagaaaagaacttgtggatgtggacagtggcagatttctggaaaaccttgcactcatgcaatagctctatttgggaaacttagaaaccttaacattgaggactttgtggatgactactattcaattgagaggttcaaaatggcttatcagtttgtggtcgctccgatgggtgacaagactcaatggccaaaaattgaccctgggtttaaaatggttcctccaaagctagaaaggcctgctggtagaccaagaaagaaaagaatcaaggctagtggagaggcaggaaaaagaggcccatatcagtgcaaaaggtgttttcagtttggacatatagagaagggctgtactgctactcaagctgaattagaacaagagcttccaccacctcatccaaagaaaccaaaaaaacaaagaaaatccaaatctgaagctgttgaagtctctatggttgatgtcgagccatctcaaaccgacggtgttccaaaagtgatgtctagcccaggtgtaacaacaagaagcatgtcttctgcttctccaactagtccaggtcctacaacaaggaggaaggcatccatctcaccaggaggaattaatcggaggctcattattagctagatatagtagttgtcattctctattttgtgtgtgggcatggctgtgcaactattttgtgtaactattttgccgctatgcaacactatgtctgatggtggtgcttctatattctgaattgcaagaactcatttaaatgttgcagttatggtactgaaatggcatcaaaattatatatatatatatatatatatatatattgtgtccaaatgtaattgaaatggaggttggactacaactatattg

SEQ ID NO: 20972 - DNA, 2541 bp, Zea Mays
tctattgcatgcctttatagatgttgagaaagatctgacagaaagggaaacaccaatggatagattaatttgtggagatgtgggctttggcaaaacagaagtcgcaatgcgtgctatattcattgttgtgtctgcaggatttcaagctatggttcttgctccaacaataatacttgctaagcaacattatgatgtaatgactgagcgctttgccaactatccagagatgaaggtcgcaatatttagtggtgctcagagcaaagaggagaaagatgagctaataacaatgattaagaatggagatttacacattattgttggcactcatgcccttcttacggaaaggatggtctatagcaatcttggtctcctagtggtggatgaagaacaaaagtttggtgtccaacaaaaggagaagattgcctcatacaagtcttctattgatgttcttacactttctgcaacacccattccacgtaccctgtatctggctttgacgggtttccgtgatgcaagtttgatgtctacaccacctcctgaaagagttgctgtaaagacatatgtgtcagcatttagtaaagaaagggccctatcagctatcaagtttgagctgcaacgtggtggtcaagtcttttatgttgtgcctcgaataaaagcaatagacgatgtgttgcagtttctcaaggactctctgcctgatgtaccaattgctgttgctcatggaaagaaattgtcaaagaacatacaacttgctatggaagattttactagcgggaaagtcaaaattcttgtctgcacacatatcattgaaagtggaatagatattgcacatgccaatacaatgattatccagtttgctgaactatatggacttgcccagctgtatcagttacgaggaagagtaggaagatcaggtacagaaggcttcgcataccttttctacactgataagtctttgctctcaagagttgcaacggatagactcggagctattgaggagcattcagagcttggccaaggtttccatgttgcagagaaggatatgggtatcaggggatttggaagcttgtttggtgagcaacagtctggagatgttgcaaatgttggcatcgatttattctttgatatgctttttgatagcttgtcaaagtacaactattggggatgattgctttcctttataaaagcaatcaagtaatttcttagctaagttctagctataagttctgcatgacatgctattgcccatgataattctgacaggattgcttcaactctttcaggttgaccagttttgcctagtcccagtaccatacaaagatgttcagctggatataaacatttctccacgtctctcttctgaatacataagttatctggaaaatcctgttgagttgctcaatgaagcggcaaaagctgcagagaaagatctatggaccttgatacagtttacagaagacctccgtcgacgatacggaaaggagccccgtgatatggagttactactgaaaaagctctatgtaaggcggatggctgcagatcttggtatcagtcggatatatccatctggcaagatgatattcatgaaaacaaacatgaacaagaaggtatttaggctcatgacagaagcaatgacttctgagacacatcggaattccctatcatttgctgaaaaggaaattaaggctgaactcctcgtgaatttgccagataccctacttctgaactggcttttccattgcttatcggactgctatactgtaataccagcccttgtgaagtactagattattgttactatttcataagaactgaaggcttctgctgcccaccatgaaaggggacaatatgtccatgcttgaagagaatgatctatcagagaaatcagtcttggctctttgattcatctgtgatggatgactcttcgttatgttggtattggcagtcaggctctggcaggccaaagcaagcccatacacactactgctttaggaaaaggtccgccaaaattgtcaacattacaagcatacttcaatgctatacacgaactggagaatgctccacagacacattgcagttttctacattcgctaacatcaataggatgagtgtctgatgcataattgctaaattcaggtgcaatgcaagtatgaaacatgaaatcaggaagctcagaggacctagttcagatgtacctgacaatagattacatttcaaaattcttctaggtttttttgacatgaactatcaaaatattgctcgagtagatagggaactagggatggcgttaacaatagaccatttgtttgacaataaaacattaggaatttttgaccaattggtcagagttaatatttgttgtaaatctattcaaacagattgtgacattgacaataactataatagttgaaaaaaatcacggaactacaagtatttttatatagggagaatgtatccaatgcactggacccatccgtacacgtatccaaagggcatgtacaatttaattaattaaatgaagggtctctcgaaatgtatata

SEQ ID NO: 20973 - DNA, 2494 bp, Zea Mays
tctcacctaaccaatcctgaaaaaaacttgaatcagcacgcggactatccgcgccactgaccgtgcgcgaggaccttgtgtgttcaacagttaacaccctgcactctgcaaatttccatttccacgcgacgacgacgaagaggaggtgggattcggaggagtaaatcctaacagccgtctcgcgccggtggtccggtgcccgcgcgagatcggggggggggggggggggggggggggggcgacatctagggcgcggtgccggccatggcgagctctggactcgcctaccccgaccgcttctacgccgccgcagcctacgcggggttcggcgctggtggggccacctcctcctctacggcctgcacagcaggccacagttggtccgtgcaatgtgcccaagccaagggcgtggaaccccgtggagcagagcaaatgggccagttggcacggacttggaagcatgccatcggctgaggcgatgcgtctttttgtcaaaatcttggaggaggaagatcctggatggtactcaagggttcctgagttcaactctgagcccattgtagatattcaaatgcataaaccaaaagaagagccacagattgtaccggcttcaacgaatggaacatcaatttcagaaccaaaaatcatttctgaaaatggaagttctgtggaaacacaggacatagatgttattttggaaggccttagtactgttagttctcttgacgaatggacaccattagctatcagtggccatcgtccgaagcctcgttatgagcatggagcaactgtgttgcaggataagatgtatatatttggcggaaaccataacgggtgttaccttagtgacctccaggctttggatctgaagaatttgacttggtcaaagattgatgccaaattggaagcagaatcttctgattcagcaaaaacctcacaaattgctccttgtgctggccattcattgtttttctccattgctgggcataccaaagatccatctgaaggtgttacaggtttgctaaaattcagcttttaaggaatttgatccgcatacttgtacctggtctattgtcaggacttatggaaaatcaccggtttctcgcggaggtcagacagtgactcttgttggaacaacactagttttgttcggtggtgaagatgcaaaacggtgcctcttgaatgacttgcacattcttgatcttgaaaccatgacatgggatgatgtggatgcaataggcacccctcctccgagatcggatcatgctgctgcttgccatgctgaccgctatcttttgatttttggtgggggatctcatgcgacatgtttcaacgacctacatgtccttgatttgcagacgatggagtggtcaagacccaaacaacaaggcctgacgccaagcccaagagctggccatgctggtgcaactgtcggggagaactggtacatagttgggggtggcaataataaaagtggtgtctctgatactcttgttcttaacatgtcaactctgacatggtcagtggttagcactgcggaaggacgagttccccttgccagtgagggcatgactctagtgcatagcaattacaatggatacgattatctcatctcatttggaggatacaatggacgatacagcaatgaggtttatacacttagcctcaaatcagattttaagtccaccacaaaagaagaaactgtctcagatctagggtcgtcgaaccagaggttgaaatggtgattggcgtggacagtgctgattcagacctgaagaacagtagtacagtactgatgaagcaagtgaacagttcttagcagctctcaaagctgagaaagaggaactagaagcgacacttaacagggaacagctgcaaactgtacaacttaaagaatacattgctcaagcagaatccagaaatgtggaactcacaaaggaacttcaagccgtccgtggccaacttgctgctgagcagtcaagatgtttcaaacttgaggtcgatgttgcggaactacgacagaagcttcaaagtatggatgcattggaaaaggaggtcgagctgcttcgacgacacagagccgcgtcagagcaagcagcgctggacgcaaagcagcggcaaagttctgggggcatgtggagctggctcgttggtacccctcctgatgataaatctgaatcgtgatcgcgtcgtgagggcagcactttagttcatacaggccgtgattcatatattatacttgtaacatttatatacccgttgatattttttttacagttactgaattcgtgttcattttgaccacagaagataaggaaatcattagttttatgccttgttttggcgtattgcaatcactcaaatgtatcaggaagtttcaacattatttcttgaaaagctagatttcaacattgtcatcatgtattggtcctccttttgacgacatggttcaatatatgttattcgtttgagactcttgttttttaaaaaacca

SEQ ID NO: 20974 - DNA, 3717 bp, Zea Mays
ccatccgaccccatggcctcggcctcattccagcccgtcgcggcgtcggcggcctccgcgccgccgcgcccggccccgcgccaccccttcgcagccgctgccgccgcgcgccgctcctctctctcgttacgccccgccgcgcaccgtcccgttatcccgctccgctcctccgccgtcgcggctaacaccctccgcgccacgcaccgccgtgccgtctcggcgaggtcgaggagacgcgcgcaagggctcggcgcggcgcccgcgttggctgcgtcgacctggggcggcggtgacaagggaggttgcctctcttgcttccccaagagtaggcggggcaggtcggggctcgcgccttgcgcgctcccgcacgcgtcgggactatcgtttcgcagccggttgagcgggtcgaaggtcaggcctagccatatattgcacgccgctggtcctgatgaaccacatgttgcaagtccaacatggtccgatacttcccttgatacaactgacatggatcatgctattagtaaggaggagcttgaagatgtcctcaacactccgcttcccgagcatccgaagctaattcgtggtcaattgaagaatggcctccggtatcttatcttaccaaataaagttccagcaaacagattcgaggctcacatggaagttcatgttggatcaattgatgaggaggaggacgagcagggaattgcacatatgattgaacatgttgcgtttcttggcagtaaaaaacgtgaaaaaattttggggaccggtgcgaggtctaatgcatataccgacttccatcatacggtgttccatatccactctccaactaaaacaaaggaatatggtgaagacttacttccttttgtgctggatgcattgagtgagatagcttttcatccaaagttttcttcatctcgtgttgagaaggagagaagagcaattctttctgagctccagatgatgaacacaatagagtatcgggttgattgccagttgttgcaacatctgcactcagaaaacaaactgagcaacagatttcctattggacttgaagagcaaatacataaatgggatcctgataagatccgcagatttcacgagcgttggtactaccctgcaaatgccactttatatctggtgggggaaattgatgatattcctagagctgtgcgggaaatagaggcggtatttgaacacactctttcagaaaatgaaggaaatcctgtaccgagcgctaatccatttggtgctatggcaagcctttttgcaccaaagctcccaggtggttttacttcaaacctaactggtgaaaaatcacctgccacagataaaataaagcctgcaaaaagggaaagacaagcagttaggccacctgtagagcataagtggtcccttcctggagttgctcaggatgccaaacccccagcaatttttcaacacgagttgattcagagtttctctatcaacatgttctgcaagatacctgttagcaaagttcagagctacaaggacctgcgcagtgtactcatgaaaaggatatttttgtctgccctacattttcgaatcaatacaagatacaagagctcaaaccctccttttacttcagttgagctggaccacagtgactctggaagggaagggtgcacggtcactactctcacagtaaccgctgaaccccaaaattggagaagtgcaatcaaagtcgctgttcatgaggtgcgaagactgaaagaatttggtgttacaatgggagaaatgacccgttacatggatgcactgataaaagatagtgagcagctggctatgatgattgacagtgttccctcagttgacaacttggacttcatcatggagagtgatgcacttggccacactgtcatggatcagttgcagggacatgaaagtttgcttgcagttgctgaaactgtcacccttgaagaggtcaacactgttggcgcggaagtattggagttcatttcagattttggaaaactcaatgctccccttcctgctgctattgtggcatgtgtcccccaaaaggtgcatgttgatggcgcaggtgaaactgaattcgagatatatccagaagaaatcactgaggctatcaaggcaggtcttgaggaacctatttaccgagagcccgagcttgaggtgccaaaggaattgattactcaatcagagctcgatgacctgaaatctcaatgcaatccttcatttgttcctttaaccaaagaggagaatgcggtgaaagtgtttgacagtgaaactggtatagcacaacgccgtctttctaatggaatttccatcaactacaagataacacaaaatgaagctagggttggtgtcatgcggctcatagtagggggagggagagcaacggaagattctgaatcaaagggatctgtcattgttggtgttcgtaccctgagtgaaggtggctgcgttggtaacttttctagggaacaggttgaacttttctgcgtcaataaccttatcaactgttcactggaatcgaatgaggaattcatatttatggaatttagatttgctttaagagacaatggcatgcgagctgctttccaacttcttcatatggtccttgagcataatgtatggctagaagatgcatttaatagagcaactcagttgtatttgtcttactatcgctctatccccaaaagtttggagcgttctacagctcataagcttatgttagccatgctaaaccatgatgaaaggttcgtagagccgtcaccacattcactgcagaagttgactcttcagtcagttaaaaatgctgtcatgaaccagtttgtgggtggcaacatggaggtcagtattgttggtgatttcactgaagaagaagtagaatcttgtgttcttgattatcttgggaccgtgagggcttcgagttctctaaacacagaggagcgtattgagaagatttccttccgaccatttccatcagatgttcatttccagcaagtatacataaaggacacagatgagagagcctgtgcgtatattgcaggccctgctcctaaccgttgggggttcactactgaaggaaatgacctatttaatgtcattcggatatctgatgctgatgcagaagtatctgaaccagtgagcttggatctaacagggaagagacacgttgatgttcgcagccacccccttttctttggcatcactttgagtctgcttgctgaaattattaattctaggctatttacaacagttcgagattccatgggattaacatatgatgtttcttttgaattaaacctttttgacaaattgggtcttggttggtatgtaatcgcggtcacttcaactcccagcaaggtccataaagctgttgatgcctgcaaaggtgttctgagaggattacatagtagtcgaattgtggaaagggagcttgaccgggcaaagaggacgctgttgatgaaacatgaggctgagacaaagacaaacgcgtactggcttggtttgctagcccatctacaatcttcatctgtaccaagaaaggatgtatcatgcatcagggaattgacgacattatatgaaagtgccacaattgaggatctgtatcttgcatatgagcatctgaaagttgatgattcttctttgtttgcttgcattggaattgctggcgctgaatctggtgaagatacaaatgggcaggctcgatacaatggtgagggttatccc

SEQ ID NO: 20975 - DNA, 5450 bp, Zea Mays
caaatggtactgaaactgatccctcaaattttttaatagctcggaaaaagactctttgtttcgttgcagttgcacgggttggcgccggctcctccgatccagtctggccaccgggcaccggcgatgggctgctcgccggaggggggctctgcggcgtgtccggactgcctgagacgccttgtcctacgtgacctcgccggctccggcctctccttcgtctacggcctctccgactcaccgctccccttcgccgcctccgccgtcgttcagattgcatctgatggagacgagggaagtattgggaggcagcatatctccagttttgttttagtgggcttatgtggtggcaaagtgccttttaatagccaacaatgtgacaacagttccttggagaattgcattcataaagatccccaggcagagcaaaccttatacaatggtgataatgaatatactgagcagtcagattcctcatcttgtatagaatgcattgaaggttgcaaaagttcctctggtccttgtaagcaaccattggccataagcacgattaccaaattagctcctgcttgctatcttagcataggccacacttcagaggttagagagcttattacaggttatctgacctcatcaagtgaagagtatgtgattaattcgttaaatctgctatttgaaaacaaaattagtggatctgctggtttagatttcctcagcttcgttggattttcagcatttgatgacttgcattcttctggctgtgtgaggcatcccaacatcttaccagtgttaggtatactagaaacatccgattgttgctacatgttacaaccaaaggccccatacaccttggaaaacattatgcactacagtccagaggcattctgctcagattggcatattagatttcttgtctaccagataatatctgctgtggcataccttcatgatttaggagttcatcatggcaacctaaggccatcaaagatcttgatgtcagattccttatggccttacctgagcataagtgatacctgccctgtaaagcacagttggggtgttgccaatcataaatgttcacctaattcatgttgttttatggaggactgttcctcaaaagccatttatagtggtttcaaactgcaatcgtcgttagattggcattctcactttaagcaatggtggaaaggtgaactgagcaattatgagtaccttcttgtcttaaacaagttagctggtagaagatggggcgatccaggttttcacactgtgatgccttgggtaatagattttacagggatacctgatgaaagttctgataatggttggagggacctgaccaaaagtaaatggcggttggcaaaaggtgatgagcagttggattttacgtattcatcatctgaagttccacatcatgtttctgatgagtgtctctcagagctagctgtctgcagttacaaagcaaggaggttacctaagaccatcttgagatcagctgtgcgttccgtctatgagccgaatgaatacccgtctagtatgcaaaggctttatcaatggactccagatgaatgcattcctgaattttatagtgatcctcagattttcacctctcttcattctgaaatgagtgatttggcattaccttcctgggcaacatctgcagcagatttcatttatcttcacagggatgcattggagagcgaccgagtctcacaacaactgcatcactggattgacataacatttggctataaactttctggagaggcatctgttgaagcaaaaaatgtcatgttgccctctaatgatccatctaggccaaaatcgattggccggcatcagctttttacaaggcctcatcctaagcgccttgttagcacacctcatgcagtctaccacaataatttggactcttgtgctagatgctgtggcaaacgaagcggtgcaacaactgatgcagtgttaaatggctgtggatctccaaatatggtttcagaaattggccgtctggaggaatttgagaaagcaactctgtttgcagagcttgaataccagttgaatccagtctatgattatgctgatggtgatccttcaacttgtttctcttcaaacaaatatcccaagaaacaaaatgcagatcagatattgcagcatgacaatgcattgccagcagcacctaactttgatcttggttcctttctagaatgctttgagtctgatgataattctcatatgggttatcaagaactgctgctctggaataaaaagtctaattcacaaaacgaatgccatgcaaatgatgtattttctattgggtgcattctggcagaaatctatgtgcaaaaaccactttttgacaatgccttgctatctgcatacaaagaaattgggataatgcccggagcacttcaaggcctgccttctcatgtcacacttcttgttgagtcatgcatacagagggaatggaaaaggaggccatcagcaaagcaccttttggagtcatcatactttcctccatcagttcgatctgcatatatgtttcttgctccacttcaagttttgtctacatctagagagcgaatcaagtatgctgctaagcttgcaagtgaaggggcactcaaagctatgggagaatttgctgctgaaatgtgtgcaccttattgcctgtctcttctttcatcatctttgtcagatgttgataccgaatcagccttgtctctgcttaaagaatttctagggagtttgactatccaagcaactaaggaccttgttctgcacatcattcagaaaatcttacaggcaccagaatattcacatctgaaggttgccttccttcaagactcttttattcgggatttgtggaagaaattggggaaaaaaacttatattgaaaagatacatcctttggtgatctcaaacttatacagttcacctaacaagatcatcgcctctgctgcatctactgttctgatcgtctcaagtgaggaactaggaataccaattaccattcatcagacgattttaccactaattcactgttttggcaaaggattatgtgctgatggaatcaataccttggttaggattgggggacttcttggagaaaattttgttgtaaagcaaattcttccgttgcttttgaatgtcatattctcttgtatcgattcgtctaagatgagtaagcccgagccacagcatagttggaattctttcgcgctgattgatagcttatctgccttggaaggtcttgtgttggttcttcctgtcaaaactgttattaaggagcttcttcaggaccaagcctgtctttatgtaaaagttcttatgcagattcctttggatcttcgtgtgattcaagtggctgctacagcactcattgacctttgtcaacgaattggaccagaaaacacttctatatatgttttgccacaactcaaggagctttttgctgaactggccttttctcatgattcatctggtcttaaccatcctataaaaggatttaaaagttctgatgaaaataaaaacaagccaattaaagtggaatccagaattgaccttttgttgctgctatatcctttcttggcatcacttgttgggatagagaagctccgagagtcttgctcaacatggtttcttttggagcaagcacttcaaaggttgtacaattggaagtgggagccttctggtgattgttctaagaatgctgaaaatatgaaaggtcaaaggctccagcctggtaactatatgtcatcagagtttgttccaaccaaactgcttttcaatggggtaggttggtccatgccacaatcagaaaccactaaaaaaaatggtcggaacactgcagcttctaaccttgagaatgagacatctagtgacaatttgtctacttcaagttctggtaatcaaccatggttttggttccccacccctgatagtagttggggtgttccagaatttcttggtcgtggtggtggtttgagggatgaacttccctggaagattaaagcttctatcctttactcagcccgtgctcaccctggtgctctgcgttcattagcagtccatgatgatgagtgcacagtttttactggaggagttggtcctggttttaaaggaagtatccagaggtgggaattgccaaacatgaattgcacatctggttattatgggcatgaagaggttgtcaattccatctgtatcctgtcaattactggcagagtggcttcttgtgatggcactatccatatatggaatgggcagtctggaaagctcattgcagctcatgctgagtcgtctacaacttttccactccaaaccccatctattgagcaggcaaacatgcttaatcaggacgcactctcaggtggaatattgtcaaatgcatttcgtggtagtttgtatacgactatgcattatatggaatctgagggtatacttgttgctggtatgggaaatggttcaatcagatttattgacatatctcaagatcagaagctacatttatggaagagcgatacggctgaaatatctttctcatcacttgtgtcggctatttgctcgtgtggctcaaacaagctcaggaaaggaagcctaatggcttcatcctggatagcagcaggtttaagttctggatattgtcgattgcttgataagcgcagtgggaacatcattgcagtttggcgagcacatgatggacacattacaaagctggcagcaccagatgatcacttaattttgtcgagttcccttgacaagactcttcgagtgtgggacctcagaaggaatctggcaacacagtcaaacattttcagaagtcattcagacggcatttccaacttctctgtgtggggtcaggacgtggtatcaatttcaaggaacaaaattgcactaacttccctgtcgagaccagaaagtgaaattggacatcagcagcttgcacttcagaacttgtattcggctgacagaggggtgaaacataaaaacctatctgtcctttcaactattgctgtgcttcctttgtcaaggttgtttgtggttggaactgaagatggatttctcaaaatgtgccactaggtgcttcttccggtactggtgaccatctctcattgtgaagttttggtggtttgtctccttcgatgtgctgagttgatttttgtgtggagccttgttttgcggtgtgggtgtgtgcggggggggggggggggggggggggggggatgtacattaacacgtacgggaaatacattgtgtgcacttaatgtgtatgaaagcttcaaattttgcttggtcttactctcttgaaacagcacatcgttaggccttgttcggttacagtggattgagcaccctaaatgatttctagctggattgtttgtctaattcatataatatttgatgggctggaacaattcctagtgaaatcagacataaacgaacatgccctaaagtgg

SEQ ID NO: 20976 - DNA, 2487 bp, Zea Mays
cttgaacaatgtgggagtagttggtcatggaatggatcgtgagagagaggccctacaagctgagtgagcttgattactcgtatctgctggagttcacagctaaagtccatggcatttctgaagccgaaagcctcttccttcgcgtgcctcaggaatgccggaaagagctcctctacaacaaccttgtcatggctgctttagatctgaatcacattaagcattcatacgcttacatgaggaagatgagagaattgtccctgccgatctcgccgtatgtttacaaccgcctgatcatccttcactcatcacccggtcgcaggaaaactatatccaagatcctttcccagatgaaagctgatcgtgtggtccctcacacgtcaacctacaacatcctattgaaaatacaagccaatgagcacaacattgatgggctagccagggtgttcaatggtatgaaaagagcaaagattgagcccaatgagatcacttatggcattctagccattgcacatgctgttgcaaggctatatactgtttgccatacatatgtagaagccattgagaattccatgacaggtactaattggtccacgctggaaattcttcttatcctgtatggataccttgggaaggaaaaggagctaaagaggacatgggagatcatgcaagacctccctcatattcgatccaaaagcttcacactagcaatcgaagcatttggaaaggttggctccattgaccaggcagaaaagatatggatccatataaaatcaacaaagaagttaagccttacagaacagtttaattctatgttatcagtttactgcaggcacggtgttgtcgataaagcatcatctgtattcaaggaaatgagagcaaatggatgccagcctaatgctattacttatcgccacttagcattgggttgcttgaaatcaggtcttgttaaagaagctttgaacacaatagatatgggaaagaaggaagtcgtcactaaaaaggtgaggagttcaacaccatggttggagaccacacatctgttgcttgagaactttgcagaaattggagacttggaaaatgcaaagagactgtacagtgaactgaatgaatccaaatattctctgaattcctttgtgtataacaccctcctgaaagcttatgtgaaggcaaaagtttatgagccggatttgtcgaggacaatgattttgagaggggcaatgcctgacgctgagacatatagccttctcagactgattgaacaattcaagatctaatgctctatgtgtgttgttgctttgaaggaaaaccagtaaaccactgctggattttgtcatgcaaaaaccattagagatactgtggacagcgtgttgcattctggcaatcaaattttttttgcacagtaatcccaacttccgcactaatcaattggagatatgcagctatcttttctatcataaacaattttagaactgcaagatatacaattcttgtgcattccgaattttggaaatgttcctttttctcatgcagaaggtatatcaactagttcaatttaatattggtataatatttgtcctccaatgctgcatttcatttcaagtacaaaagatggaatacaggcacccaaacaataaaggaggccaattgtcttttatcatgccacaaagaggtgatagaaatggtgaatatttaattgtgttgctactggtaagtctttgcagatccttgctcctgcgacacttctaaggtgctaggctgctagctatacttatgagaaaacagtagaagcatcctccacacaagctttgccagaaccaagctgaataaacacaagtgctattctctggttgcagaactgaacagaactccattctgccttttgcctatacacaaatcaaatatgctcaaatcatccacgcggaagggtagtgaatggaatcggaaccaacacaaagcaaatttcaccgatgatgtgaacttgccaaccataccaaataatttgccgttgagcttgacaattccctttgctgttgagcttgtttcttgagcagatactgttcagctgcgaggataaaggaacctggaaatttccgtggagaaggctccaacttttttttttctacctcatcaattagtttaactacattgggattcaggttagaagtctacatactggttaagtgctcatccgggtacaacatcgtgttttttttctttgaacttctgttgctcttttagagcttgtagtttgatcttgtggaccttctacatctgcttgctttataaataattctgcaccaagctgttcttgttctccagtagtgagatggttttccgtaagaaaatgtgaacagctagtgggtcacaaagaatgccatcagcattatcatgaggctgtgtggtgggtgcagtgtttctgaatgttcaggttggcaaatggcatacgaatggaaaatgccccactgatttgatcaactccatctgcca

SEQ ID NO: 20977 - DNA, 2136 bp, Zea Mays
tacctttctcatgttctccgggagcttccatcttctcctgttccagcttcctgctgtacagcattattggaagctttccgtctggacatcaaggaatctcggatcaaatctatgcgtgcagcaatatctgaaacatttcctgagcctactaggcggctgctacagagaattttgaaaatgatgcataccgttgcttctcatactgccgagaatagaatgactccatcagcagttgctgcatgtatggccccactcttgttgcgtccccttctttctggtgaatgcgagctggaagatgattttgacatgagtgatgacagtgctgctcagcttattgctgctgcaaatgctgctaacagcgctcaaggcattgtaactactctattagaggaatacgagagtatattcaatgatgagcactttaggtgctccttatcacctgattctcaaacaggagatagtggaagtgaagaatcaactgatgatgaaactgtggatatcaaggataatgggtttcatgatgcagaaaatgatgtagatcaagaattagatgatgccgagcgaatactgaatggaaaattgagtgaaaccagtgcatgtgtccatgctgacctccatgactacaagcaggaagttaatggcaacgattcagacgctgagctctttgttgaggataacacatttgaaccaaatgtaaatttaaatgatactcccctaagtcgtttaatagaaaatggaaagaaaccatcaaatctggcgtccagtcatgaaactccattatcagtgggagaaattctttcgtctttggatgctggagttccattacctggtcgtgcagctgaatattccaaggacagactctctagcaaacccaatggaattcagcagcatgtgaagcgtactaacttatggggacggagcaatgcaagaaagggccaacgttcagagttagttgatccttcaagtgaagaagagcttgctattcaacgacttgaggtaatgaagaatgacctacaggtcaggattgcaaaggaggctagaagtaatgcaatcctacaggcaagtttagaaagaagaaaacaagcactacatgagcgccgtgtggctctggaacaaaatgtgtcaaggttgcaagagcagctacaggctgaaagggatcttagagctgcactggagattggattaagcatgtattcttcacaattttctagctcgcactccatggactcaaagacaaaggcagagcttgaggaaattgctctcgcagaagctgatgttgcaagattaaaacagaaggttgcagagctgcatctccaactcaatcaacagcgccagcaccagtatggctcttcggtagatgcaaatgattgtcctccgcaccttccaaatcatctctcacagaacactgtccaaactggatttgataggaccgttgctttttgtaatcaagagaagcaaagaaatgaggagagcttgccgtgcacatcccactggagaagcatcaaacagcatgtgctctctcaggattcttcaaggcctttctcccgaaagcattcctcagacacctccttgagtgattcaatggaggcatcaacaagtgtgcttgcagagggcgggccactgttggtgaacatcgccagaacaacagaaggtgttgaatacgggagacctccgactgtgccgtcatctactctagttgaactaacaaccaggctagatttcttcaaagaacggcggtcacaattgatggaacagctccacagcctcgatttagggcatggatccgcgtcccatggtttcccatacaaatcttcatctccctggaacaacccaaggtagggggcttgttcagttgctgcattaccgcgcatctgtatattcttggtataggatcccttttgtttcactttatctctgtagaagctggtctcgtttttgtttcacttgttatctctgtagaagctggtagtgagaatgtatataccccttgcctgccttcacttgttttgctagtgcttccagcggacatttttcgagcgtgatttttgttttgcttttgtatttattgtgtatgtaatgactcaaggggaaatatatagatgcgtctttttttcttggggatatattccactgcag

SEQ ID NO: 20978 - DNA, 5094 bp, Zea Mays
ccggactaccaggggcgaatcgcggacgccgcccacctcccccatctccttccccagcacgtcgcaaacccttcgtcgccacccccgcctcccgccgcggctcccgtcgtcgcgtggccgtcgcgagccaccgctggcgtctctcgtccggttctctgagtctcggcgacctgttcctccgccgagttctcggggccctgctgtcgccaccgccgaatcctgctgtcctcgccgcagccggggaacgcggtgtgttgcgggagctggcaccgcctccttcgagagttttggtaagaaggatatgcatcatcctcaggaagagatacattcttctcccaatacaatgtcattaccaagtccatgcagactcaatggagacgtcacaccttgtgaagcggagaaaatagcagaggatcgtggcaaagtagatgggattgtagatgctgtaagtaaggaagtcaaaactgacttggtaggatgccatgcacggcaggaagaattgcaatgcacgctccaagatctatcagaaatagcctgcagtattgatttagtacgtaataaatcttctccacaagaagagaagaagtctgtttcccctttgaatgacatgggccataatgtggataacaatagttgtaatggtgataccaattataaagggcaggagctcaatatggggaatgttggagatgaggatcatgctgtagcactttgggtgaagtggagaggaaaatggcaaactggaatccgatgctgtagagcagattgtcctttacctactctaagggcaaaaccaacacatgacaggaagacctatatagttgttttcttcccacgaacaaaaacttactcttgggtagacatgctacttgttcttccaatagaggaatgtcctttgccacttgtgaatggaactcatcgtaaatggagaaagctggtaaaggatttgaacattcctcgacgattcaacatacagaatcttgccattttaatgataaatttaattgatgagcttcatattgaggctgtagttgataatgcacggaaggctacaacatggaaagaatttgccctggaagcatcttgctgtagagattacactgatcttgggaagatgctcctcaaatttcaaaatatgattcttcctgactgcataagctgtgaatgggtacaaaattctattgagacgtggaatcaaaagtgtatgaacgcacatgatgccgagactattgaaatgctttgtgaggaacttcgacagtccattcttgggaacaagcttaaggaattgcgggatgcatcagtgcagcctgaattagtccctgagtggaagacgtggaaacaagaattgctgaaacagtacttttcattacatcctgctggtaatgttggcaacttcgagaaaactaattgttacgacgatccagctttagatcaacaaggtagtagaaagcgtccaaaacttgaggttcgaagaggagagatccaaattttacacatgggtgaagctgactacaggactccaactgaggacccaaaccaaaataagcttcctagtaactctgtcatgcatgaaaatataggggcattaggagcaacaagtcaaaaaaatgctgtcatgttccctggaagttctggcaccaatgagaatacaatatctggtagttccaatgcagctttacagaatgctagacttgatttagattcattcaagagctctcggcagtgttctgcgtacattgaagcaaaggggaggcagtgtggtaggtgggcaaatgatggtgatatttactgttgtgtgcatcaaagtatgcattttcttgatcattcttcaagggaggataagacacttaccattgaagctccattgtgtagtggtatgactaacatgggtagaaaatgcaagcatcgagctcagcatggttctactttttgtaaaaagcaccgcctacagacaaacttggatgtaatgcacccaggaaatttgttggatccatctgaggtactccatatgggcgaagaacctccgaataagtgggtggaaggaatttctaagtcgcaagcattgtatagcatagacttagaaacagacaaaaatgtccaggctgttgtacaagtgaaactgatgcccactgtggctatagagaactctggtgaaaaaggttgtgcaatggagaaaactgatatgtgtgctgcgtcaacgtccatgacaaatactgatgatacttctctttgtattggaattcgctctcatgacagtattgttgaatgccaggattatgccaaacgacatactctttattgtgagaagcaccttccaaagttccttaaacgtgccaggaatggaaagagtcgactcgtttctaaagatgtctttgtcaatctgttgaagggctgctcatcaagaaaagataagatatgtttacaccaggcttgcgaatttctttattggttcttgagaaacaacctttctcatcaacgcaccggtcttgctagtgaacatatgccccagatactggctgaagtgtcgaaaaatccagattttggagaatttttgttaaagttgatatctactgagagagagaaactagcaaatatctggggatttggtacagatagatctaagcaaatatattctgaaaacaaagaaggatctgtagcgttgcaggaagagaaaactaatctttcatctggtcctaagtgcaaaatctgtggtcaccagttctctgatgatcaagctcttggattacattggacaactgtccacaaaaaggaagcccggtggctgtttagaggttactcttgtgctgcatgcatggaatcatttaccaacaaaaaagtccttgaaagacatgtacaggatgtacatggggctcaatacctccagtattcaattctcattcgatgtatgtcatgtaacagcaattttttgaacactgatctgctataccctcacattgtttccgaccatgcccaacagttcaggcttcttgatgtccctcagcgaccaagtggtcaatctgctcaacaaacagaagggatgagtggtctgcccctttatgatagccacaacgttgaggatgaaaatggctcacagaagtttgtctgcagattatgtgggctcaaatttgatcttctgccagatcttggccgccaccataaagtcgctcatatggtctcaggtgctgttggccacattccactgggccgtgggaagtaccagcttaaccgcggccgacactactattccgctttcaagaaaagtttgcgaccaacaagtacattaaagaagagcagtagctctggaatcgataaaaatttgaagtttcagatctctggcttaacatctcaaatagttgaatctgaaacatccagccttggtaagttacaggatttccaatgcttagatgttgcacaaactttattttccaagattcaaaagacaagaccccatccaagcaactttgatgttttatcggttgcccgctctgtatgctgtaagacaagtcttcttgctgcgttggaagttaaatacggacctttacctgagaacatatttgtgaaagctgcaaagctttgcagtgacaatggcatccaaattgattggcatcaagagggattcatatgccctaaagggtgcaagtctagatataattcaaatgctctgcttcctatgcaactcacggcagttgattttcttgaagctcctgttgattcccgtaatgatgatgaaatgtggggaatggaagaataccattatgttcttgattcaaagcacttcggatggaagcctaaaaatgagagtgttgttctctgtgaagacataagctttggcagggagaaagttccaattgtctgtgtcattgatgtggatgcaaaagattctttaggtatgaagcctgaagaacttttgccacatggcagttctttgccttgggaaggatttcactatatcacaaaccgtgtgatggattcatctcttattgattcagagaactctatgcctgggtgtgcatgttctcatcctgaatgttctcctgagaactgtggtcacgtgagtctctttgatggtgtctacaatagcctggtggatatcaatggaacaccaatgcatggcagatttgcatatgatgaagatagtaaaattattttacaggaagggtatccaatatatgagtgcaattcatcatgtatttgtgactcgtcctgccagaataaagtattgcagaaagggctgcttgttaagttggaactctttagaagtgagaataagggttgggctattagggctgctgaacctattctacagggtacctttgtctgcgagtatattggtgaagttgtgaaggctgacaaggctatgaaaaatgcagaaagtgtgtcatcaaagggtgggtgcagttacttgtttagcattgcttcccagattgatagggaaagagttcggactgtaggggctattgaatactttattgatgccacaaggtctggaaatgtttcccgttatattagtcacagttgttccccgaatctcagtacccggttggttttggtagagagcaaagattgccagcttgctcacattggattgtttgctaatcaagatattgccgtaggagaagaactcgcctatgattaccgacaaaagcttgtagcaggcgatggctgcccatgccattgtggaactaccaattgccgaggccgtgtctattgattttgcaggaatacactaactgttcaatgctcggttgcagaactccagagatttcaacagttgtgtaggcttgctgagcgatttagcattgcaattttcctacagcttgagtgcagggctaggatctcattgttaatgctacaaatagtgattgtgatataggactcaggcaagcattaggcaataacatagtgtcgattttagtcatggtaccatcatgtttaactgattatttgttagaagcagcctgaaatgaaactgattcaggctgctctgttcgtaggcgagaattctctctgtaaaattccttcattcatattttatggttcatgagcaccatcattgacgtgaagtaataaactagttatcccagtggcctattg

SEQ ID NO: 20979 - DNA, 769 bp, Zea Mays
gaggaggaaagcttctcagaattcttagagcagaaaccaggccttggagtcgtcggccggcgctggcggcttctcctgggcggccggcggctcggtcgcggggatgacggccttctcttcggcggcgttctccttcgccggcgccgccttggtgacctccacttccacctccacctttttggcctcctcctcggtcatgttgctgtctgctaggagaagcttagctgttgctgttgaggggtgggagctagctgtacctgtggggcgtgcgtgcgagcgtggtggcggtggcgcgtttaactgttggccgtgtctggactctgggcgaagctggacgcctgaactggagagcagcccgcaaaggaagggaagagagcggaaggggagtcggcaagggatgaaggaacccatgcgcgcgtacgtgacggcgacccgggccggcgcatcatggcattgggcccgccgtggcccgcgggcgcagcgcattggctcccagcgcaatcgccctgtgctgtgtgctcagacgagacgagctggcccgcaccgctgggcgctcggatcccgtgagcgcggagactctctggtggccgtcgcacgacgcgcgtcgcctttcacgccagcaaggcagcaacgttcgtttcgttcaacgtcgtcgtgcccgggggcccgtcccgtgggcactgttgacagaacgacagaccacggggacgtgcagtgtatatgcagtagcacgcggccgggcaggtcgtcggacggctccgcagcttag

SEQ ID NO: 20980 - DNA, 1347 bp, Zea Mays
ctaggtgtccaaaacagagtaaagtttcaagactcttttgtttagaatcgtgcaaaggatcatctagcagtgcatttatcatggaggagatgaaaagaagatttaatgatgcatggggataattgagaaaacctactactgaagaaaaatgctttagctgagtctgaatgagtagcacatcttatggattttttgtttttcatagatctgtaattcacatgagggctacaaggatttggctatcatttttatgctttaattttcttgtttttaattacctacagtgagtgcattgcgaacgttgaagggttcacttggtcttcctcttcgatttggctggaatggtgacccctgtgttcctcagcagcatccatggagtggagttgattgccagtttgacagcaccaaagggaactggatcattgatggattaaacttgagtggcaatagcataaaggggaacattccaatctccctgggtaccatctctgtggtgcaagtactggatctgtcatacaatgagcttaatggatctattccagagagcctcggcgagctgacatcattacagatactgaacctgaatggcaatcgtctttctggtcgtgttccagccagtttgggaggaaggcctctgcacagagctagatttaacttcacggacaatgccggactatgtggaatacctgggttacgtgagtgtggccctcatctatccgtggctgcaaagatcggcatggctttcggcgtgcttttagctattctattcctagttgtattcgctgcgtgctggtggaagagacgccagaacattctccgtgctaaaagattagctgcagcaagggaagctccttatgcaaaatcaaggacccagttcacccgcgatgtgcaaatggccaagcatcaacggacacatgaaaatgctcggagcagcaacagtgaaggctcgccacatttgctttcctagctcggtgagaatactgcgacagtgacttggcttccatctattcttcagttcctcctttgtatgctcctctgcagtcttgaaagacgaagctgctgtacatactagctaggtcacgaatggtgtatatacttgtattttttttggtgatctagaactcagtccaggagagggatcagtctatcagatgagagaaattacccatttcatcctacttactgttctgattactgctgttgatttccccttcactgttcaagtatgcttattgtcagttttgtactgtggtctgaagctctgcaaaactgcattttgccaggagctggagccccaggctgggctgtgttgagatatagagtgaattctacaccttttcctattag

SEQ ID NO: 20981 - DNA, 277 bp, Zea Mays
attttcaactacattacatcgaggtgatacaagcccttgaaacgtcttccagcctcagcttaaacaacacacggcttaaaacaacaaaagacgataacccacacactttaatggtagtcaattttaatgattagaccgccacccatgtgtctcagaaaagtccttggccacctgtaccaagtactgagtagcctctatgaccgtaggtcgcaactctgccttctgtaaaatagttcatgttcgaagccagtgggcaatggtgtatagataacctgca

SEQ ID NO: 20982 - DNA, 1809 bp, Zea Mays
actggaaaggccgagttttagctccggttccagaaaaaaactcggaaccagatctcaaaccacacaatccacggctgctccttcgctggacaccgagaaaccgtcaaggcgcaacgaacgaacttgcagcaaaatttcccggagaccctcgagcaaaaatctgcgcgacggcgacctcgccgccggagctcatccggaagaaggagaccgccacgccgttcgaatggatggctccgacgatgagctggaccaacctacgagtaaagcgactgagcacatcacggctatggacgtgaggaaggggaaggatatgcaagggatcccctggaacgtgatgccgactacaagggacaagtacaggcagtcacggctgcaggggtacgccaactttgagaacgtgcctaattccggaaggctttctgagaaggaatgcatgcctgcagagaaaggccaactctactacgagtttcagcacagcacgaggtcggtgaaaccgaccatccgtcatttccagttgaggaatttagtgtgggcaacaacaaggcacgatgtgtatcttatgtcaaacttttctgtgcttcattggtcagcaatgacttataagaagcaagaagtcattaatcttcaaggacatgtgacaccgtgcgagaagcaccatcggaatcactacgagggtttttatcagactccagtcagtactttggcggtgaagcataacttgcttgttactggtgggtttcatggggagataatatgcaagtttctggatcgtcaaggagtaagctactgttgcaagacaacaaatgatgacgacggtattactaattctctggagatatttgagaagcctagtggttctctgcacttccttgcgtcaaacaatgattgtggacttagagactttgacatggaaaagtttcgaatatgcaaccacttccattttgcttggcctgtgaatcatacatcgttgagcccagatggtaaacttgctgctattgtgggggacagtcctgatggacttctgattgacgctaattcaggaaagacggttcacaaactccatggccatttggattactcctttgcgtcggcatggaatccagacggccgaacattcgccacggggaaccaagacaagacgtgcagggtctgggacgtccgcaatctctccagatcagttgttgtattgggtggcaacatcggagccgtcaggtcgattcgctacacgccagacgggaagttcatggcgatgactgaacccgcggacttcatccacatcttcgatgttgagagtgggtacagcaggaagcaggagctggacttctttgttcagtcggcgacggttctactcgtaccttgattcaacactgtgagcttgtgctggtgtagacctgtgaggtcgacatcacaggctttagaagcaagaaagttgtggctatgttcataggtgttgctgtgaagaaactggagaacgatacgtttacttttgctgaacaagctgtaggtattcggcgacccatcttttctgggtgatcagagtctcaattaagattcccgctttctgttatctatcccatacttacaccgtacgactacgattagatcatcctatcctacgggcgagacgtgagtctacgtaattgattgagacctgctgagggctttgctttcacatgcatgcatatgtaatcatcgatcatggaattgctaataagctgtctgtttgaaactcagtttcagttattccttcttgttaccagcacttctctgctgtttcagtcagttacttaattggaggatcaaccagca

SEQ ID NO: 20983 - DNA, 309 bp, Zea Mays
tggggtactggtgtttccgtttatttggggtttcactgaggttcagatgtcaaaacttaagaaaagcgaagccttcactagagaaagggagagagaaattgagcaggttgttgaatcagtcaacgaacttgcacagatcatgaaggatctttcagttctcgtgattgatcagggaaccatcatcgatcggatagactacaacatacagaatgttgcagcttcagttgaggagggttacaaacaattgcaaaaggactccaagctgtatggtgcttgattgcttttttgagtagcatgatttggtctttt

SEQ ID NO: 20984 - DNA, 123 bp, Zea Mays
ggctgcttcggtgagccgtgccacggaatcgggagctccaggtgggccatttttggtaagcagaactggcgatgcgggatgaaccagaagccgggttacggtgccaaactgcgcgctaaccta

SEQ ID NO: 20985 - DNA, 3652 bp, Zea Mays
ggctctctctctccggcgtgccaaccttatcaccacccattcgagcttgctgcggctgcccgctgcccccacgatcccgatagttttccgaaaaaagacacttccccaatccgtagtggttcacgtcctggttcctcgccggcggcaaccgcgctggacgaggtttcatctgcgcttcgccggcggcaaccgcgctggacgaggtagcgctgctatcaaacaccttgtgctgtcaacatttatgagtgcaaggcagtattgctaagagtatcttgccatggcatctcctgcttccgtcaccaacctcggaagcaatgggaggtctggcccgctcccggctgcagctgcaaggagggcgcagttggtcacaaggatcagattcacggggttcgatggcataaggcgatggcagtatgagcctgggaggctttgcaggtgtatggtcgtcactaatctgattgaggagaaggttgttcagttctcgtcaagagggagtgtcagtgtgaaagctgatgatgacaatgatctgcttctgaagccgccacagaagccagtccggtcaaatggacccccggagagcatgaaaacagcatcactgccggatcagaagccagcaggggcaactttagacgacagagagaaggtcagagagtcactggacgctgtattggagaaagcagagaagcttgaggcctccagctttggtaatgcagatggtggcaaccttggttcaaggcagagtaatgtttccatgagtaatggtccaggaccgacagcagtggaggaaggtggtaattcaaggaagacaaaaacactaaagagtgtatggcggaaggggaaccctgtgccaactgtacgtaaggtcattagagagcaaccaagaactgaaacaaggagtcagtctatacctgtggctaaaccttcagtgtcatctgcatctaagccttcccctctgctactatctaaaccttctgtagcacagcctcctcgtcggcctatcaagtctgatacatcaaatgagaaaaaaggacccatccttattgataaatttgcttccaagagggcagcagttgatccgattgtacctgaggaattgttagaccctctaaaaccagtacgaggcccaccagcaaaagtcagagttgatcgtcgtaaaaaaccagacacacaagctggttccagacgacgtatgtccaatgatgatggattagttgatgaggatactactgacgtgccaatttctggtgttccagtgcgcaagggtaggaggtggagcaaggcaaaacgccgcgctgcaaggctagaggctatgcaagctgaagagccagtcagagttgagatccttgaagttggtgaagaaggtatgctgattgaggacttggcatatgagttggcaattggtgaatcagaaattttacgattcttatcggtgagaggagttatgcttgacaatgttcagactctagataaagatttggttaagatggtttgcatggaatatgatgttgaagtactagaaagtggtcctgtgaaagtggaggaaatggctaagaagaaggagttccttgatgatgaagatttggataaattggaagtgaggcctcccattgtgactatcatgggccatgttgatcatgggaagacaactctgttggattatatacgcaagagcaagttggtggcatctgaagctggtggtataacacaagggattggagcatatcaggttcttttaccagtagatggaaaccatcaagcctgtgtttttctggatactccaggacatgaggcgtttggtgcaatgagagctcgaggagctagagtaaccgatatctgtattgttgttgttgctgcggatgatggtgttcggccacaaacaagtgaggcaattgcacatgcaagggcagcaggggtgccaattataatagcaataaacaagatagacaaggagggagctaatgcagaacgagttatgcaagaactttcccaaattgggataatgccagaaatgtggggtggtgataccccaatggtcgagataagtgctcttactggggataatgttgatgaacttctggaaactgtcatgcttgttgcagagttgcaagaattaaaggcaaatccacataggaatgcgaagggcactgttattgaagcatgccttgacaaggccaaagggcctcttgctaccttagttgttcagaatggaaccctaaacaaagctgatattattgtgtgtggtgaagcttatggaaagatccgtgcattgtatgatgactgtgggaagctcgttgacaaagcaggaccatccaatgcagtgcaggttattggcctcaataacgttccccttgccggtgatgaatttgaggttgttgacaaccttgatgttgcacgtgaaagggcgaatgggcgtgctgaagcactgcgcatagaaaggatatctgcaaaagctggggaaggaaaagtcacactctcagctattgcagcatcggtttcatctgcgaagcaagttggaattgatacacatgagctaaatgttatccttaaagttgattttcaggctattaggcaagccatccaaactcttccacaagaaaatgtctctctgagattcctccttcaaggtccaggagatgtgagtgttagtgatgttgatctggctgttgcttcggaaggaattatatttggctttaatgtcagagcaccaggatcagttaaaaactatgctaagaagaaaggtgttgaaattcggatgtacaaagtgatctatgatttgattgatgatttacggaaggccatggaaggtcttctcgaacccgctgaggaggaagtaccaattggttcggcaaaagttcgagctgtctttagtagtggcagtggaaaggtggccggatgcatgattacaacaggaaaagttgttcaagattgtaatgtgcgggttcttcgtaaagggaaagaagtatatgtgggttcgcttgattccttgagaagggtgaaagaaactgtgaaggaggttggtgctgggctagagtgtggtattggggtagatgacttcgatgaatgggaggaaggtgacatcatagaggcattcaataccgtgaataaggcaagaaccctcgaggaggcctctgctaccgtgactgccgcactcaaggatgcaggggtccagctgtagaattggcaacacgctgatactcttttttattaatgctgttgtgagctggaccggtggaccgtttccctgattccttcggtggtggctgaagctgaatggtgagctgctggagagtggagacgtggagtggtggccggtgggcgcctgggcggtggctgccggctggtgcagactgtgcacttgtgcagtgcagtggcgctaatatattgtgtgtggctgtggaagatgcatgtgtggatcggctgtctgtagtgagatggaagatactgtatatagcatatcaaaccatatattcatcgtatatacattaattattgatattgaattttgtcggtcaagcgtatgggccggccaagccaaactgtatttgccgaaagccgcttttgaatcgccgggagtggcaaggcagctagttggggtttcacacgcagcaggtttagattagaagtttgcacggttgcaaaggtttggtttgca

SEQ ID NO: 20986 - DNA, 2290 bp, Zea Mays
gttcgcctccgggttggccgcgagccgggaaagcgaccgcccctcctcttctcctccctttctctcgtctcgtcggctcctagctcctcctcctcgctcgccaagggagacgcacccggtccattcgtcctctcctcctatcgcctccccctctcctccccggagatccccgctaccgaaggattatcccgtgcagaggcccactagtatatcagcttggagttgaggagaatggctgttggtgggactcaaccagtccttaggaagtacctaggcgccctcaaggacacgacgactgtgagcttggcaaaagtgaacagtgattataaggaattggacattgcaatcgtcaaggccacaaaccatgttgagcgcccatcgaaggagaagtacataagagaaattttccattccatttctgctgctaggccacgggcagatgtagcctattgcattcatgcccttgctagacgtctttcgaagacgcgcaactgggcggttgcgctcaagacattgattgtcattcatcgcgcccttcgggaagttgatcccacttttcgtgaagagcttattagttatggcagatctaggtcccatatgttgaacatggcctactttaaggatgactctagtgcagaagcttgggattattctgcatgggtgcgcatttatgctttatatttagaggagaggctcgaatgtttccgagtgttgaagtatgatgtagaaacagatcctccgagaactaaggatcttgatactgttgctttgcttgatcatctaccatcattgcagcaactccttttccgtcttcttgcttgccagccacaaggagcgtcgtcttacaatgttataatccagcatgcactctcaatgagagtattaagatctacactgcgattagtgatggaacaatcaatctagttgacaagttcttcgagatgcaaagaaatgatgctgttagggcacttgatgtatacaaaagagcaactaaccaggctgaacgactttcagagttttatgaagtgtgcaaaactatacacattgggcgtggtgagaaattcctgaaaatcgagcagcctccagcatcattcctgaataccatggaggagtatgttagagatgctccaacaggtcaaaaagagaaggctatactagcgatagaatacaaaaaagagccagaggaggaagaaaaaccgtcctcacctcctgcggctccagaaccagaaccggaacaagtgcctgagccagaacccgagccagtgaaagaggaagcaccagaagctgaaccagatttgctgggtctgaacgaacccaaccctgctgcaactgcgatagaagagcagaatgctttggcgctagccattgttccgatagatgatgctccgaaagctgctcccacttttggaaatggagtcactggctgggaactggcccttgtgacagcaccaagttcaaatgagaccgccgttgccccaagcaagaaactggccggtggtctggacttgctgacccttgacagcctgtacgacgaggcgaaccggagagcgagccagccagcaagctacaacccctgggaggcgacccccgccgcgcctgccccgatgatgaccatggcgccggtgatgcacgacccgttctacgcctcgaacgggtacgctgcgccgcacggcgtgcagatggcggcgatggcgcagcagcagcaggccttcatgctgcagcagcagcagatgatgacgatggccccggcgcagccggtggtccaccacccgatgcagatgcagcagaaccccgcgaacccgttcggcaaccccttcgcggccgccggcatgccgctccacgccgggcccggcaacgtgtacacggggctgatctgatccggtccggcggtccatttcttggtctgcattagcgctgctgttaccacatcattcattcttttttgcccgagttttcttgttgccattgtgagaaggaaatttgtagcacagacacagacacaggtagagtgtattatagcgtcggtcggagtgtatagcaagcagggggtcgtcatcagtggtatcccgtacgtagaaggtgattgcatgtatattatacacacagagtttggtcacctgttcatgtgcagttgagagtccattcttgcggcgaggagacgcggcacggcgccacgtcgagattgagattggattattcttaacattggatacggttgaataatgcagcagccattctttttagcacatgacactgttcgatggaatggaacaggacggttgagatcgac

SEQ ID NO: 20987 - DNA, 3749 bp, Zea Mays
agtaacatcagactttcccaagtggaatattgcttagggcaagctccctccatcggtccgtctctctcagcttcttcgtcttctctcttaggttgacctctttgcctcaactgcgccgcccgctcaccaagccaggcagaggctgcaggggtcgtagagttggagggcccagtccatctgggaggtcccagtgccgcccgctcaccagttaccagccaggccgtcgggaggggagagagagagagagagacgaaaagatcgagacccatacgctcagatcgaagttcgacttctcctctccccctcccccaacctaacagattcgtgtagcacagatccatccgactttgggttgatttcttcctttgctgctgatcagaaagttacagatggatcatgctgaggtctctggtttgttgtgtattggtacacgtgaaacagatgggggtgaagaatcatatgcggctgagtaccctaaaatggatcaggataccaatgcaacgaccaaatttgatgtagtaatggagacttcagcaatgtatactgatcaaatcaacaccaatgcttgcttagatgaatatcacatgtctggaaaacagcctatggaagaaatgggatttggcagtgcacatccctttgaacttccatcagaaggaatggtagctgattctggggaagaaagcatgccatctagccctgacacatctaccagtaattatgatgcgcctggttacacggagcaaaatctgcagcatatctataattcgtatgatgcactggttgacaaagacggagttgtgcttactcctgccttcatgatatgtgacaaaactttgtatcttgaacctcacctcactttctcattggacgggatcaagattgagtatttggatttagattcctttgaagacgagaagctgtcagctctacaatgggaaatatctaatattatttccatcagttgtaaatggactcgtagtgttggatctgccttaataacactccttgttggatctacagcagaaacaggaaatgcaggtcctgttagagcacgattttctcttgatgattcgcaatggccaaggagacaacagaggatttgggaactgggaccaagatatcaagaaatatggaaagacatcccatcagatgattttgcattggagaattggagcatcgaaccctgtctgtttttccctaggcaatacttttccagcactgaggactttgaagatgttatttatccccaaggagatcctgatgctgtttctattagcaaaagagatgttgagctcctgcttcctgaaacctttgtcaatgatacaataattgacttttatatcaagtacttgagcacaagaattgaatctaccaagaagcgcaggtgccacttctttaatagcttcttttttcgcaagctggcagatcttgacaaagatcaggggagagctccagaaggtagagcagccttcttgcgtgttcgcaaatggacccgcaaaataaatgtatttgacaaagattttctgttcattccagtcaacttcaacttgcattggagtttaattgttatttgctatcctggcgaagtggcgacatttgaagatggtgatgccaagctctcagctaaactcccatgcattttacacatggattcacttaaaggaagtcacactggactcaaggatatcattcaaagttatttatgggaagagtggaaggaaagacaccctgaatcagcatcagataattcagacaagttcttaaacttgagatttgtctcccttgagctccctcagcaggataattcatatgattgtggcttattcttgctccattatgtggaattatttttgacagatgctccaagtaacttcaaccctctgaagattgatgtattttctggctttcttagtgatgattggtttccacccccagaagcttctctgaagcgttcggtggtccgaaagttaattcatgagctggtaactggatcttttcagaatcatcccaagctagcttgtggtggtgagcagcttgacgaaagacatcaaagatgctcaaatcctggtgaacctgaaacagtttgcacagttgatgatggaactccatgaagtacagccatccaagtccatctgtttatatgattccaaagaggggctacctacttctggatgcatgttggacactggaagtgtcccaattgttgatgtacagaatctacaagagtcagaggtttgtgcaccagtgaaggatactgttgtttgcttgtcaatccaggatgagaaaaatgacccacttgcatctaacagtcaacttaatatgagatcatattccccagaaggtgatggcgtgattaaggaatcaaatcgtgtggtgacagataaggaaaatgataagtctttgtttctttctttggataatgaccaaaaagttcacagccaagcagaagctgaggtgcaggatattatggttcgtactagctgctcaatatctgaaattttagctcagaaaattaccagcaaagaacagccctcccaaaaaagcatagaagttggggatgagtgctttagaccttctcaagatatggattatgttatgatgtttgactccagcaaagatgagaatggaccaaatccagaaagattgacagctgaaggtgattgtggcgatcctcatgaacgtctggatttagtcacagtaggtgatatcggaaaaatggttgtagacaatgcaatcatcgaagatgtgaagagtaataacacaactgcaaacaatgtcaatcacggtgagctgcatgtttcattgcagttgccagagggaaacactgacaatggtatgactggtgttagcacagcttcctctttagacataaaagagggaaacaatgacaaagtagtggcagatgcctctgcacatgaaggtgatataaatgacaatggtagctctgaattgaaaataggaaatacgaacagtggtattactggtgttatcgcagcttcctcagacttaaaagaggaaaatattgacaaagtagtggcaggtgactgtgcacatgaaagtgatataaatgctaaggattgcactgagttgaacattggaaatactgataatagtattgctggtgatagtacagtttcccctgaggtgagcgcggaaaacactgatcaaatcatagcaggtgattgtggaaatgaaaccgatttaaaagctgatggtgagggtgctgacaaattcttagcaactgacagtgctcttccttgtgaagatgatgcaacttgcatggatggtgcgaatgtgattgtatcactagatgtaccccgtagcacgaagaatgatacattttccaagaacacatcttctgacgctgaaatgcctctgcctgttggaacctgtgagctcgtcgatagaccttcttccgagaatgacatgtctgagcacacatcttttgatggtaaacggcctgcggatgataggactttggaagagaacgaaatggttatgcctggtgatgaaaaaacagaggtgcattacaagcgacggaaggttttggcctcagagaaacaaagcagcttctccggagcaacttctacagattaggtttggctggctagaatcaataagctatagggccggtggtgcgtggtgcttccatcacatcgagatcaagattggcggtggattttgtggacgacaagggagaacggacatggagagacgcggtgcaatgcaagaccggaccggccggaggg

SEQ ID NO: 20988 - DNA, 895 bp, Zea Mays
aaggcgactactccaatgaccagtgcttcgggagctccaactccgaacagggaagcactggtcattggagtagtcgccttgttggtgttcggccccaagggtctagcagaggtagccaggaatttggggaagactttgcgtgctttccaaccaaccattagagagatacaggatgtatcaagggagttcaggagcactcttgaacgagaaatcggaattgatgaggtttcccagtcgacgaattatacacccacgaccatgaataacaaccaacaacctgctgccgactcaaatatcaagcctgcacctgcaccttacaccagcgatgaacttgtgaaagtaactgaagaacaaattgctgcatcagctgctgcagcttggaacccgcaacaacctgcatcgtcgcaacagcaagtgtacactactccgagtgaggacgctcctacatcaggaggaagcgatggtcctgctgctccagctcttgctgcgagtgactcggatccaaagcaagtgaatctggacaaggcggaaacacagagatgactccgcttaacagcttgacactggatgggatgagcacactgaacacgtcaggacgagcagtcttattttaattttgtaggcgatggacttcagattaaagccagttatttggactgctgcagctataatctatagagacataacactgtaaaaatagtagaatccgttttagattaaagccaaacgagatgagagcgttttctgtgtttactaggcttgttctgtagcagcatgcatgggcaggttcatacaaaaaggctatgtgtatgcgtaacataaccacgagtttatatggattaaatatatttagccacgttgaaaaaccggttcagttaataaaataatgtcagtt

SEQ ID NO: 20989 - DNA, 1140 bp, Zea Mays
ttcatttgcagcccatgccggcccagctcagcggattacgagaacccgccgccgctccgccccataggtaggttttgtttgggatctcaccgtttcttcctcgtctccgtctctacacggcggcgccgccgccgccagctgctgccaggagccaagcccaagcctgagcttaaaccatgccgattggttctcttttcgtgtcgaggctggccaggtctagccatgccctccccgctgccgccgccgcggccatctctcaggcgcccaggccccagcacatcgcatctcctatattctccggccttggagcagcggctcgtgatttcagctcaagggctctatggaagggagcattcgtcgatgccttcctggctagaataaagaagaacagagaaaacatgaatgggaagaagatttggtctcgtaggtcttctattttgccggaatttgttggttccactgtgctcatttacaatgggaaaagtcatgtccggtgcaagatcactgaagggaaggttggccataaatttggagagtttgcttttacacggagacgaaggccccatcgaacaataacaggaaagggaaatcaaggaaagggcagaaagtaaaagtagaaatgtgcatgaaaggtgggtttaaggacagcttgatgacggcgtagctgacgaacaagcacttgaatcaccagaattcatgatctggactgttttttcttagaccaataaccgcaggaaaatgttagctcatcttacttagggccgacgcctgtgttcaagaccacactcgcatctaggaaggagcatggtacaagcctcacgtcttctttacagatgttgaacaacgtcaagcatccacttaattcaacaattggttggaaccagaagccactcattacaacaggtctggaaattggaaccaacggctagaggaactttgtgccaacagcccaccagaggaattttggttgacatggagtagctatgaactgtagaaaagttattatggatcgcggcctgtgaaaatgtataagttgtttgaatatctattcccatatatgtatttctgaatatctaggtgagttttcccgttacgagtctaggcacttatgtaccaatgcaatccttgggcaaccgggcc

SEQ ID NO: 20990 - DNA, 1049 bp, Zea Mays
gctcaaagcataagtacaagtgcagtgcatccgttgctacggcatcgaagcccatgtcttgtctttgggtagaacatgtcgtgctttgcatgctgtggtgatgaagatacacaagtaccagacaccaggactcaatacccaggacatcatccagcaagagccgacgcataccgccctgctgatcaacctcccaagggttcccaacctgtgaaaatgcaaccgattgcagtccctgccattcctgtggatgagcttagggaggtgactaagggttttggtgatgaagccttgattggtgagggctcctttggtagagtatacttaggtgttctaagaaatggcaggagtgccgcggtcaaaaagttggattctaataagcagccagaccaagaattcttggcgcaggtgtctatggtgtcaaggctgaagcacgaaaatgttgttgagttgcttggttactgtgctgatgggacactccgcgtccttgcctacgagtttgctactatgggttcccttcatgatatgcttcatggaaggaaaggtgttaaaggggctcaacccggcccggtcttatcatggttgcagcgtgtgaagatagctgttggggcagcaaaaggcctcgagtatcttcacgagaaggcgcagcctcatatcatgcaccgagacatcaagtctagcaacgttcttcttttcgatgacgacgtagctaagatcgctgacttcgatttgtcaaaccaagctccggacatggcagcccgacttcactcgactagggttcttggaacgttcggataccatgcgcctgagtatgcaatgaccgggcaactcagctccaagagcgatgtatatagttttggagtcgttcttctcgagctattgaccggaaggaaacctgtggaccatacattaccaaggggacagcagagtcttgtgacttgggctaccccaagacttagcgaagacaaggttagacaatgcgttgactcgaggcttggaggggactaccctcctaaagctgttgcgaagctcacgggatccaaacaaacctg

SEQ ID NO: 20991 - DNA, 1527 bp, Zea Mays
ggaagttatatttttttatcttaaccacttgtctcacgcgcttctctctcacatcttcctttcctctcctctctcacgagcttctctctcacatctcgtactgccgcatcgtcccacacgtccctccgtccatggtctcaccggcgttcccctcccccgctccccccattccccccgcattccgtccgtggtctcatgggacaagacggtgaggctttacgacgctgacgccaacgtgctcaagagggagttcatgcaccctggggccatcctcgactgctgcttccacgacgactcctcaggctttagcgccggagccgaccacaccattcggaggttggtattaagctcgtccaaggaagatgttttggggcggcatgatggtccagttcgttgtgtggaatactcttatgctgcagatacttttatttctatggatttgcttttggatttcttttctagcgtttctttttcttctgcaaggtacttctgcagcctgatgcagctataaatagaacacattgatagctatttttgtacttgaattccaaaaacactatatatagttatgcagttatgcttttgaaagtatttactcctaggccaagataaaaattatattctgcacagtttacaatgccacaatgcaaaatctttatctctcaatttgaactaagaattgtacatatgtccttgccagaatcgtgtctttggtacctggttttttcttttctttttgtccttggaatatattttgtagtattttagttgtcagcaacttaactatgcattgtcctcaatctaatcacaatctctgtccaatcgtgccatgtctttgttctatattttacacatttttttagaaataaataactattaaccgctcacctgattactaagcttatacgagaggaaacattctataactttcaagttagtcgatactggaagtaattggcttctggatatttggttacaacatttactttggttgcaagaagaggggtaactttagcccctgtttcagaatactggaaagggaccgctacttaaaaatggatgcttccatgaattccatccaacattacttttcagtatgagtgacacgttggggtcagatttgaacatgattattgcaagtcaagacatcgtcatataattattccaatatcaagtatgatgcaaaatcaagggatgggaactccatctgttcaacaatcagagagctcagggtcagaaccatacaggctctttcacaggactgctggaaaagagctatggaggttgaactgaagttaattcaagaaaatcagacctgggagattgctgatctgccaagggatcactaaggctataggactcaaatgggttttcaaagtaaagagggatccaacattagtgcgaacaattgtattttagtttagatttagagtacacttatgtatgagttgtttgacaatgcttatttatgagacattaaaatgtacttatttatattatattaattataatgttgttcaatatatg

SEQ ID NO: 20992 - DNA, 652 bp, Zea Mays
agacaaccgattgtgccatccgttttgatctcaacggcctatattcaatgaagacccgtcctgatcctagccctccgcatcgagatcaatggttgagaactatctttgaaccggtacagatcggatctaatcttggccgttacacacagaatccatggcccaggattcatctcccaactcgccctccacccatctccccgagggcggcgtcgtacaacacccacggcggaggaccaccccggcgaggaaagtccacgatcctagcgtcccatcctctaatccaagtagctctatgcgatgcggaaatgaaagtgaatacagataagggaaccttatcgaggatgatgcgagtgggcgggcagtccacgcagaagagcggaactgcggcggattaggctcgacagtgagaaattacacaggctccggtgaacttcgctcgaatcaatggggcgcacgccttccacgaggtgcgaggatcacccaaagtcgagtcccaatcccagactcgtcgtggttccgatttccaccgtcggtggtccgccatgctagcgacccactgcccctcccacgatttcggtggctaacccgggcgttggtgcgatggtggcgcacgaaagggtgaggaggtcatcgtagccccaatttatgggcg

SEQ ID NO: 20993 - DNA, 5806 bp, Zea Mays
ctcacatcctatatcctctccagtctccaccctcgcggcgcgccccctcaagttctcattccttctcctcgctcgctcgcctcctcctctcctctcctctcctctgcggtgggaactgcggcggcggcttaaaccctcgcgccggcggcttccggcgctccatcagcgccgcgctcgaaggccgcccgtcgctggtcgagcgcgcgaggcagcaggcaccggctaggcaggcagccaataatggcccccaaggccgggcgtggcaagggcaggggcggcggcggcagaggcggcgacaggaggaagaaggaagagaaagtggtgcccagcgtggtggacgtcacggtcgtcaccccctacgaatcccaggtgacactcaaggggatatcgacggaccgtgtgctggacgtgcggaggctgctggggtcgaacgtggaaacgtgccacctgacaaactattcactctcccatgtggcgcgcgggcaccggctggaggacggcgtggaggtcgtggcgctcaagccctgcgctctccggatcgtcgaagaggagtacgcgacggcggagcaggcggaggcgcacgtgcgccgcctgctggacatcctcgcctgcaccaccgcgttcgccaagccccgggacggcgccgccaagcacaggccgtccaagcacggccgtcccgcgtcgcccggggcccatggcgccgtcagcggcgaggccgccgcgccgccgccgatatcggaggcgcacgacatggccgccatccggccgccgccgaagctgggggagttctacgacttcctctccttcgcgcatctcaccccgcccgtccaccttatcaggaggaaggaggcgagcggcgcttctcgggaaggcgtctacttcgaaatcgaggtgaaggtttgcaacgggaagcttctgcacgtagttgcttcacgaaagggtttctacttggcagggaagccacaaaacgcatatgaggcgttgatgaaagcttttgtggaccacaataagtttgggaatttgccatatgggttccgtgcaaacacgtggcttattcctccaatatatgttgatcccgccacaaagtgcccagcactgccagttgaggatgagaattggggtggaaatgggggtggctgtggtcgtgatggaagatatgatcgcagatgctggtcaaaagagttctctgttctgtctagaatgccatgcaaatctgacgaagaacgggtgatcagagaccggaaagcttttcttttacacaatctgtttgtagatacagcaatttttagagctgcatcaacaatacggcgactcattgatcagtctatgaactcaattggttcccgtggtactactcatggttcaaacgtatttgaggaacatatcggcgacatgaatataactgtgaagaaagatgaggctgatgctagttcaaaggtggacgacaaggttgatggtgttgccttctgtaaaacaggtgctatggatattgcacaaaagaatcttctgaaaggtttaacttctgatgaaaatgttcttattaaggattcttccacactcggagtggtgattgtcaagcattgtggatatacagcaactgtgaaggtttctggacgtgcaaaggacagtaatgatgttaaacaaacacatgacgtctctgataattttgatggaatgctgaacattgatgtgcctgaccatccagatggaggttctaatgccttgaatgtcaacagtctaaggataccactccaaagtgttacgcatccagaaactgttgttggtaagcagaaccctagcccaaagtctcatgcttataaccccgcaaggaaactggcatgcaaaatacttgaggacagcttggtaaagcttgatagcatgcctagcataaattctagaattatcagatgggaacttgggtcctcctggctacaacagttacagaaaaaggattctccggcatctgagaatgttaagcggaatgcaacaaaggctgataaagaatcagctgtcaaaggtcttggaaagcattttgaacaattaaagaaaattaaaaagaaagaatgcaacattgacggttccagttctgagaaggaagaatgtaacagtaactgctcgtcaatgaatggtatgcaagtatcagataagatatctgttgatgaaacgaataagggagctgattccctcgaagagctcacaaagatggcccataatttctatgatgagactgcactcccaaagctggtggctgatttcgcgtcccttgagctttctcctgtggatggaagaaccatgaccgatttcatgcatacaaggggacttaatatgtcctctttaggtcgtgtggtagagctagcagagaagctcccacacatccagtctatatgcattcatgaaatggttattagatcctttaagcacatcgtccgagctgttattgctgctgttgatgacatgcaaaatatttctgcagctatagctgaaactctaaacatattacttggatctcccagacttgaaaatggtgctgacacagatgcccatattgacaataatttgcgtttgaaatgggtagagagcttcctttcaaaaaagattctgctggaaactgaaagatgaatttgcacacttacggaaatttatcattctgagaggtctctgcagtaaggttggactggagctagttgcaagagattatgatatgaatagccctaacccatttgacaaatctgacattgtcagcattgttcctgtatgcaagcatgtggtctactcatctattgatggtcgaaacttactggaatcatcgaagatggcattggataaaggaaaattagatgatgctgtgagctatggaacaaaggcattgtccaaaattatagctgtttgtggtccataccatcgactgacggctaatgcatacagccttcttgctgtggtgctttatcatactggagattttaatcaggcaactgtatatcaacagaaggcacttgatatcaatgaaagggagcttggtcttgatcatccggaaactatgaagagttatggggatttatctgtcttctattatcgccttcaacacattgaaatggctctaaagtatgtcaaccgtgcactatatctgcttcagttctcgtgtgggctttcacacccgaattcagctgccacctacataaatgtggctatgatggaagaaggcatgggaaatgttcatgttgctcttcgatacttgcatgaagccctgaagtgcaacaagaggttgctaggagctgatcacatccagactgctgcaagctaccatgccatagccatagccctttcaatgatggacgcgtactccctaagcgtgcaacatgaacaaacaaccttgcagatacttcaggagaaactagggcaagatgacctccgaactcaggatgctgctgcatggctagaatattttgagtcaaaagcattagaacaacaagaggcggctcgaagaggcatgccaaaacctgattcatctattgcaagtaaaggacatcttagtgtatcagatcttcttgacttcataagcccagaccaggaaagaaaagaaagggatatgcaaaggaaatgcaggcgtgcaaagaataatatcagagctcatcatggtgaatcagttgaagagaaggagaattttcagcttgtttcaggatctcctcttgaagcaagcaaagacagttttcaagaagaaaaactggatgtgcatcctcctgctgtattagaagaaaattatgctgcccatgatgagcataagcaatgtgatgttttatcaccagaagaatattctgatgaagggtggcaagcagctagtatgagaggaagatctgcaaatgtaaggaagaaaagcagtcgcaggaaaccggctcttatgaaattaatggttgatcattttgaaggtagtcatacaggttctgtgtataggactggtttacaacctcaaacaaaaggagacaaagaagattctgtaagtgctcctagccagctttcatttggaagttttttgaaaaccgacaagttgaatggggattccagcattgctgaagataagacgtgcaatggtagcgctaaccaagaacaacggacaaagctaacaggaattaacaggccaaccagtatcgcttccaaattcatatcatacaaagatgtggctgtttcgccccctggcacagtattgaaacccattttggagaagaaggaagcaaaggagaaagatagtggacgtgatattgacctagcactgtcatccgaggaagaagataaaaagtttacagaaaaagagaaagaaaagccaagtgaggacagtagcaaagagattctttcaattcagcgagatttagagagtcatgcagaaatacctcctgacagcaacagtgatgaaggcccatctgcagctagtaaagcgtctggaagcaaactgtcagcttcagctcctccattcaatccaggatcagtgttatcaatgtcccagccatacagcacggtggcagtatatgatgccagtgctatccttcaggcaataccaagtcaagcaatggagattctcccttctgccattgacactagagtgcctcgtggtcctcggtccaccttgtactatcgtactgggcattccttccaaaggaaacaaggttacacgcacagccagagcactattgtaaggggtagctactcccccacaaccatgaatccacatgctgctgaatttgtgcctggaaaaacttcgcaacaatctgatgtggctgacagagaacccagtcctgctaatcctgtggccaattctgatctggatgttgtatcgcagaccacagatgaagcgagggccgaaacgcctgccacagaaaaggcaggtcaggttgagaaagtcgtttcaggtaaaggaaaggaaaacagggggaaagacatcgtgagaaactcatacaaaacagaacttgcaaggcaaattttactcagtttcattgtgaagtcggtgcacgacagtttaggtccctcccgggctgaaccagagaggaagccaagtggatcagatgaagctagtaatgaacagaccagcgtcttaggcaagaacgcttctggttctggtcgcaaagatccagataaacaagagaaagcgacggaggttactaagggcctgaaggatacagagggattcactgtcgtttcaaaacgccgaaggcgtccccagccgttcatgaaccccataaatggcctatattctcagccgtctatttgcacctctgtcagttaaggtcattgcgttttcgaagacctgcaatattttgagagatggacctttgccttcgcctttgcctttgcttagaggattggtagcagagattttccctatccaagtgagctgtgagcagcgagcatttagttaaactgtacaaaaggtttccgggataccctttttgtaataaaagaaactgatgtattccgcagtagctgtagcgctggatataatgttcctttgtatgttatatatgacagaatcataggaaatagcagatgttaagttaatccgatattcagtggagcgcccttgtgctttatgatgttcctcatgttgtgagccccagttaatcattgcaatttgcaaatatgctgccagactgccagagcagaagaaactgaatcttctaggcgccaagagttcgaaatcttattcatggaggcatgtctttggataccttgccagcgggtgagcagcacttcactgagaagcaattgcagctgcagacccaccagatcaccagaccaccggggcccggacaggcgtgaa

SEQ ID NO: 20994 - DNA, 2501 bp, Zea Mays
caaaggcgaaagccgggcacgcacacccaccccacagatctccctcctctctctgcccgtgctgttgctgtccccgtcgttcgcgctcgcccaagtcgtcgcccagtcgctgcgccgctcagctccaaagccagcagaaccgcgcaagcgcgcgcgtgtccctcctccgctcctccattccgcgccgctggactggacgcgtcgctgtgcggacttcttgcttgcgccggctgctacgggcacggtccacgggacctgactggcggctccgggccgggggaggcgagcgacagagcgatgcagaggcaggggagacacctggagcggtccaactcgaagcgagccctcgaccatggcggcggtggtgacgacgacgaccgcccgtctaagcgcccgcgcgtccccgccctcgccagtgtcattgtagaagcactcaaggtagactgtttacaaaagctttgctcatcactggaaccaattctgcgcagaattgtcagtgaagaagtagagcgtgctttagccaaattgggccctgcaggtcctgctaggatccaaggaaggggctcacccaaacgaattgaaggccctgatggtagaagcctccagcttcagtttaggactaggttatcccttccgctctttactggagggaaagtagaaggcgagcagggagcagcaattcatgttgtgctgcttgatgcgaacactggacatgttgttacttcaggacctgagtcatctgtgaaactggatattctggtgcttgagggtgattttaataaagaggaagacgagggctggactgaagaagactttgaaagtcacattgttaaagaacgagaagggaagaggcctattttaactggggacctgcaggtaacccttaaagaaggtgttgggactataggagagcttattttcactgataattccagctggataagaagccgaaaatttagacttgggttgagagtctcgtcagggttttgtcaaggaattcgtgttatggaagcaaaaacagaggcttttactgttaaagatcacagaggcgaattgtataagaagcattatcctcctgcactaaaggatgaggtatggagattagaaaagattggaaaggatggttcattccacaagagattaaactcaagtggaatctatacagttgaacactttcttcaattccttgttagagaccaacagaaattaagaagtattcttggcagtaacatgtcaaataggatgtgggaaagtcttattgagcatgcaaagacatgtgttttgagtggcaaccattatatatattactcaagtgatgcaagaaatgtgggtgcaatattcaacaacatatatgagttcactggtttgattgctgatgatcaatttatttcagctgaaaatctcactgaaaaccagaggcaagcatatgctgattggatcaatgttctagaatatgatggcaaggcgctattaaagttcaaccagaaaaagaaatatgttacaactagaagtgaaacagcgaaagcttcagcaagctaccctgcatcaaacggtttagtgaactcacagaaagaactgcctggaggtcctgtgaatgctgagcaatcttccctgaacaatgctagccaagatagaactagaatcccatccatgtccatggggaaccaggtagcaagagagtatgcaggcaatcctcagcacatgacaccaagtattaccatgcaatgcgacacgaggtcattgatccccggaggccagttcagtggtggttcctccgtgcagactcaaacttcacgaagctccaacatgcttgcgctgcggccaacgcagcagcctcaaaacttggacttctctgggctaggtcagtccacacagccttcagggaccaaccctttcgccgactggtctcggttgcaggagagcagcgtcgatgagtacttgatggatgagataagggcgaggagccacgagctattggagaacgatgagatgcagcatatgctgcggttcctgagcgtgggcggggcgccgaccggcctgaacaacgttgacggctttctttcatacccgtctcctgccccagccttcggatttgatgaggacgaccgcgctcgctcgtccggcaaagctgttgtcgggtggctgaagatcaaggctgcgatgcggtggggtatctttgtcaggaggaaagctgccgagagacgggctcagcttgttgagctggaagactagcagtcgcaggtgcttgggctcggtgttgcacatatttatgcggaagggttactagaactgcaaaatattgtataatacgcttcccttttggctgatctttttaatttgcacaatagccccgttggtattgtatattactgggtacagacgtacagtacatgtacatgggaggacgatcaggatcggggcttttttacgaatgaagtcacgttggttgtatacgtgtctgatacgcttgaccttacttgtgctttgaaatattcttgtcg

SEQ ID NO: 20995 - DNA, 3209 bp, Zea Mays
atgctgcagatgctgggcttccgcgggggaagccccagcaccggcgacgcgtcccccgccatcagcggggacggcggcgcggccgcgcggccgctccgcctggtgtactgcgacgacaagggcaagttcgtgatggaccccgaggcggtggccgcgctgcagctcgtcaagggccccgtcggggtcgtctccgtctgcggccgcgcgcgccagggcaagagcttcatcctcaaccagcttcttgggcgaagcggcgggtttcaagtggcttcaacacatcggccttgcaccaaaggactttggatgtggagtgcgcctttgaagagaactggtctggatggaactgaatacagtcttgtgttgttggatactgaaggaattgatgcttatgatcaaaccgggacctatagcatccaaatattttccttggctgttttgctgtcgagcatgttcatctacaaccagatgggaggtatagatgaatctgcgttggatcgtctctcgctggtcacagagatgacaaagcacatacgtgtccgggcctcaggacttttatctggatttggcagaagacaacagaaaaattactccacgggattacctagagctagcattgaggcctgttcaaggtggaggaagggacatatctgcaaagaatgcgatacgggactccatccgtgcactttttccggacagggaatgttttacacttgtgcgacctgtgaacaatgagaaagatctccaacgtcttgatcaacttcctattgctcttgaaacatatttacactttaaacagtttgatggcatttacaaattatgtctgtcccttcatgacctgagtaatttccgtccagagttcagatccggtctggatgctttcacgaaatttgttcttgaccgaacaagaccaaaacaacttggagctactacaatgacaggtcccatccttgctggattgacacaatcgtttcttgatgctattaataatggtgctgtccctacaatctcttcatcatggcagagtgtggaggaggcagaatgccagagggcatttgattctgctgtgggcacttacaattcttcttttgaccataaaaaacatatagaagaggattctttgagagaagcacatgaagatgccatgaggaaggctatcagtgcttttaatgtttctgctgttggtgctggaagacagttagagcatatagatgctgaaaggaacgccctgagattgaaatgcaattcaagcgatgataagttggcattgctgaggaagcagcttgaagcaagcgagagtcacagagctgagtatgtgaggcgctatgaggaagttctgaatgataaacagaaaatttccaaggattactctattcgtataactgaacttcaggccaagagtagcaagttggaacaacggtgcttgagcttgtcttcttctcttgaaactgcaaaacgagaatccaatgattggaagagcaaatatgatcatggtattttgcagcaaaaggcagatgagagtaagttaaaatctcaaattgcttccctagagtctagggtgagtatcagtgagggtagattatcggcaacacgtgaacaggctgattctgctcaagaggaagcatccgaatggaaacgcaaatatgaagttgctgttagtgaggccaaaacagctctgcagagagcggcggtagcacaggaacgcacaaataagaaagtgcaagagagggaagatgctttgagggtagagcttgctaaccaactatctgagaaggaagaggaaattgcaagattacatgcaaaacgtagtcaaatggaaattcatgctacaagtttgatctcgaggcttgaggccactgaagcgaagtcgaagagccatgagtctgattcgttggctttgagggaggagatcagattactgactgataacctggagtctattagaagtgaagctctgtcacgtgagaaggaagttgggatcctggaacaggaaaagaaccatcttgaggagaagtatttgtcacagtgcaaaaagtttgatgagacagatattagatgcaaggaagctgaaagggaagcaaaacgagcaacagaattagctgatgtagctcgtgtagaagcttctgctgctcaaaaggataagggggaagctcaacggctcgcaatggagaggtttgcactgatagaaagaatggagcgacaggttgaagctctagaaagggacaaggctaagttggtagaagagattgagagacttcatcagtcagagaaggatgctgtgtccaaggtcgcattgcttgaaagaaatgtaggtgagcgggaaaaagaaattgatgagatgttgaagcagaacaaccagcaaaggtccagcacagttcaagtgcttgagagtctgctggcaacagaacgtgaagcacgtgctgaagccaataagagggcagaggaactgtcgttgatgttgcaagcaactcaaggcaaactggacatgctccaacaagaaaccacacttgatagcaagctcaagacctctgcaaggcgcttaaggggtgatgctacagagtctgtacatgatatggatatcgatggggacaatgggaggcgtcggaaacggtcaaaaagcacaacaagcccgttcaagaacaatcacacagaggatggcggttccgtatttattggcgaagatacttacaacgggagtcagcaagggacagaaagcgaagactatactaaattcactgtgctgaagctgaagcaggagctcaccaagcacgggtttggtgctcaactactccagttgaaaaatcccaacaagaaggatatcgttgccttatatgaaaagcatgtcatcggcaagtagttcctcggcaatacttgtatttatgctttatagacttccctctgtagcgttgaaactttaattgacacgatcggattgaagcaaacaatgcatgtaacttagtttaaatctctggtctgtgtattgcaacaatggtgcagttcattttagcatgcatcgtcggcaagtttgtagttaggagtcgtgattgaaatgtttgtctttccaatcccggcacaggttttcttgtaatgctatgacgacaatctattcggattccatggttttgtggtgtaattttatgccatcgatcttttcagattctaggcagtgttgtactgttatggctgacagtccctatccaatttgttaataa

SEQ ID NO: 20996 - DNA, 4194 bp, Zea Mays
cgaattaatcctgcccagactgacctagaaattaagttaaacgatgaacttgctgatccggaccatgaagagcaaagcaatgtgttcggagaacggagagttagcttggaagcaaatgccaacgagcctgaggaaaagaacctagctaacgtcatatcaactgatctccacaccaaaactctgcagcatgataatgacagaatagctgaagagactgataaagaccatgaagagcaaagcaatgtgtccggagaacggagagttagcttggaagcaaatgccaacgagcctgaggaaaagaacctagctaacgtcatatcaactgatctccacaccaaaactctgcagcatgataatgacagaatagctgaagagactgataaagatgtttcgtctttggttttccctattgaagagcatgaagaaaaatatgcagtgagccctatagctgttgaaaagagcgtcagtcgggaagccagtgcatgtgaatctgcaggaaaacccctaactgtcatcttttctaacgatctccacaccaaacatctgcaacatgattgtgatgtgctaattaaggagactggtgaagatgttttagctcaggagaattgtaatgaccagcctgttccggcccagactgacctagaaatgaagttaaacgatgaacttgctgatccggaagttttagctcaggagaattgtaatgaccagcctgttcttgctcagactgacctagaaactaagttaaacgatgaacttgctgatctggctatggaatcaggttgtagcattactgaaaggaatgaagggcttgttgctcataatcttgatcaagaaggtttccttgaagcaacaccagagtgcaaacaggaatgtggtttgcctgaggagacagtaatttcctcaaaagaaacaggatctctgctgtgtgcagatcaatcaccaattggtctggaatctttattttcgcaagaaagcatagttgaatcagtggggcattgtgcacttgcttcagcaacaactcataccgaaaatggctttgatgattcaaaagattgccataacaagtctgcacttgaaaatgttcatgtgccagaaccttgttcacacaatgatactaaaggaggcatttttaaaaatgttgattgtatgcatacatcccagcgagatgatagaatggaaggagtaccagaggctaacactgatgaagaacatgttctgtcagcctttttgctggatgcaaatcacctaaacgtagtcattaattctgaagaagtggtttgtgagggtgaagatagtaaggagcttctccattcggaagactgtaaagcttcatccgagaaaacagatgtgaatgatggcaatgtatatggtattagtgatgctgtagtgagatgtgcactgcatgctccagccgatgataattatgagatttttttgggtcccaatactgatgtaccacgtcaggtttataatgacggatgcagtgatgtcaaagaagatcgatttgcttccaaaccctggacaattgatattattgaggatgcctctgtcaaagaaagatcaaatttaaaagattggcaacttgattccaagttggagggcacagaaatagtggaatctggcctttacttcaataaggatattggtaacattttacatagtggatctattggtgaaataactccatctggttctggtttatcaaaagattcatctgtggactatagaggggaggttttagatggcttctcaatggaagcatctcttgaaaggtcttctacacgtggggaacaaaatggttgtagactagatgctattgagaatccttcaattactttagcaacttctggttataagcatgaaggtgctttatctgaggaagcagtgtacacaaagaagaattacgctggaacatgcttgtcaaatcccagggaattaatcatggagctgcaatcccatttctcaaaggaaaacataaatgaatctgatcctcatgacagccttgtattcccaactgctgaaaattcagcagatgaacagctggttaaagtacaccatggttctaatctgtctcagttaggattaactgatctgttggatggaccaattgggtgttccaataccgacgtgttgtgccagtgtgacaatcataaaaatcaatccaatgaggacaaggtagaggaagttgaggcggtgtctgctgctaaatacatagaaagtgaagttgtgctgctcccatctcaagagagatcaaatttgaataatgagcagcttaacaccaagttggaaagcccaaacattatgggatcttgccttaactgtgataacgatgtttgtaatacttcggacaatggatctgtttttgtcattggtaaaagaactccatctgcttctggcttaccagaagattatcctaaggatagtgacttgcaacaaccggttttagatagcttctcagtggtttcatcttttcaagacaatatatctgggaagaaaactgtttctggtgtagcaggcagtgagattctttctttaagtttagcaactcctgattataaacatgaagatggtttctctgaggaagcagtatgcagaacaaagaattatactggaacttcctcggtagatccgaggcatttagacatggaggggcactctatttactctgagggaggtactgaaaaatctaatctgcaagataatcttgcatttctaagcgctgagagtggaaaagatgaacctattatttgccatgttgagaaactggttgacgcacatgcttcttcagatacataccaaggtccttgtcaagatctaggcagacatgaagaacaagagagctgcatgtctattcctatgcaagccaaagaaagtggaggggttttgaggtctagccacacgaaagggtcagttacagcagcccaaattgatttggcaggtgatgcccatcttattgtgagtgataatgctgctgccaagcaagtgtttagtgaggagaaagaggaaacaaaatctatctcttcttcagatattgatatccttcatgaaaaatcatactccagtggacacgatgaccatgctgcttgtgctgccgaaactcagttctaccatccacagaaagcatctatatctgatggactacatttgggtcctagttctttgcaagtagaatcactggatgctttggatagcgatatactgtatgttaacacaggagttctcgagcagcatcataaagagggttactatgaacccagtgtctaccaaatcacttcaggcatttgcacaatgtctgaagctgaaccattcgaagttttagaaactggaaaagatgtaaaaacgccatctaagctagatgagcaacttaatcctgggttggacggagatgaagctgagaaacacagcttagactgtggtacagacaccagtcctgtgatgagcaagagaaccctttcttcaccaggatcaggaccatgccagcagtatgtaaatgaaagcaccaccagtacacagtcgactgataatcacccaaacgacctacccgctccgagatctcctgaacaatccgcgtgttttcagaatgacaacgattcgggttcagcatttgtcaaagcagcaggcgaagaggtatagatgaactttgcggtaagctgcagagtttcaaagtttccagcgccgtaaaaggaagctacgtagctatgggtgcacctcgtccgaagcctggggacagcacgagccgatctgcagccgcgctgctcaggaacatagagaacacaactgctgttaaagctggccgtcctcctgtcaagccaaacgccgatggtaaggactcgtctaggcgagccctgcagcccataagcggaaggcctgacagtaggtagttcggcggttccttaataagtgtgtcgtgtttgtgttcaaccctttgttgaaagccaggtccgtgtatttgtgcagcttgttgtcatgaagctgctgtgtgcgtgtcatttaacataagcgtgcgtgaagttgtgttatggaagtggctaaatatgtgttcgttaggaggtcaattggcttgaactgaccctgctgttccgtgatttctgtctaaatatacttgtgtggctgtgtcactttgattggccttatcgatcacatgcaatgggatcacatctagcgtgctctagggtcctcgtttggtaatcgctg

SEQ ID NO: 20997 - DNA, 3808 bp, Zea Mays
cttgagatcggctcctgcatggccggttgcgtgtcgctgggggaaatagaatagaaagaggctagatttgaggtcgctgcgttctcaccaccctctccacttctgaattgaagaacctacgatccgttccacaaccgggcagcggtttgttccgtgctgcaaattagatcgagaggccatcttcttcatctcagagtttcgccgtcggttggttcccggagccgcgccatttctcgacccaattttgtttcaggtttcattgacgacgttgcagtgctcaggcagtgtgatcccggactgtgcatgagctagctgaaaagggaaggggattccagagatgccgttgttcgaacgggatcgctaccagaggctggacggcgtgggcgcccggaggccgccgccgccgccgtcgtcgttctgctcgtcggcaaccgtcgtcgtcttcgtggcgctctgcctcgtcgccgcgtggatgatggcgtcgtccaacaacatcgccgtcaccgtaacgccagagaacaactcgggggccaaggaccaggacgggtccgtcgacgttggcggcgacacgcggcaggcgagcgacgaggtggcggacactggcagcggcacgcagtcgacggaggtgagtggggacgcaggcaagaaagatgatcgtagcggtggcgacgcttcgcagacgaaggaggacgctgatggggacaccgacaacaaagatggtggcgacgcttcgcagacgaaggaaggcgctgatggcgacaccggcaacaacaaggacgacggcgctggcgccacgcagacggccgaacctgtcactactgtcggcaacgacgtcaaccagagcgacgtcacggggagaacggatgcgacagccaacggcactaccagaggcacggacgcagaggactccggagagccagacagcggcaccgttgccgagggcgacacaccggccaggaaccagactttctccgacgagaacggcaagacggagggcggcgaggtggcgaagccggaggaccccgacaaaaaagtcgagcagagcgccgagcagacggcgatcgatggcaacactaccacaagcggacaggatcaggacgagaacaacaccgacaagaacaccaacgaaaccggcggccaggctgacaagagggaggaggaggcgtccactgacgacaagagcaccggcggccaggctgacaacactactgtacaagaggcatccaccactgacgataacagcaccggcggccaggctaacaatagcaccaaggagacaccgacagagtcaaaagagaccgttggcggtgacgacggcacggcccagagccagacgagcttcgacgacatgaatggcagtacgaacgactcgcagcccatgaaagaagacgggaaggtcgccgagaatagctccgatgaaactgccagcggcggcaaggtggaaagcacagacgacgacgcgacaaccggcgcggcgtcaaacaacgcaacttccggaggccagaacgtcgcggccgagaccatggcatttgcagccgcggatgatggcgccaacggcaacatcactgaaaacagctacgcaacgaacagcagcgccacgactgaagggaagataccgacggttggagaaggagacgcggcagagaaagccgacctgctgccgagcgggcaggcggagctgctgaacgagacggcgtcggcggtggcggagaacggcgcgttcccgacccaggcggcggaatcgagcgaggagaaggaggcgctcgcaggcaagaacaagaagaagaaccagaagaaaaagaagcagaagagcaaggaccagggcgccgcctctggcgagacggcggaggggaaggagacgtacgcccacacctggaagctctgcaacgcgagcaccggcgcggactacatcccgtgcctggacaacgaggcggccatcaagaagctcaagagcaccaagcactacgagcaccgggagcggcactgccccgccgacgcgccggcgtgcctcgtaccgctcccggagggctaccggcagccgatcccgtggccatacagccgcgacaagatctggtaccacaacgtgccgcacactatgctggcgtccttcaaggggcaccagaactgggtgaaggtctccggcgagcacctgacgttccccggcggcggcacgcagttcaagcacggcgcgctgcactacatcgaggtgatcgaggaggcgctcccggaggtggcgtggggccgccgcagccgcgtggtgctcgacgtcggctgcggcgtcgccagcttcggcggcttcctgttcgacaaggacgcgctgaccatgtcgttcgcgcccaaggacgagcacgaggcgcaggtgcagttcgcgctggagcgcggcatcccggccgtctccgccgtgatgggtaccaagcggctccccttccccggcaacgccttcgacgtcgtccactgcgcccggtgccgggtgccgtggcacatcgagggcggcacgctgctgctcgaggtgaaccgcctcctccggcccggcggcctcttcgtgtggtcggcgacgcccgtgtaccagaaggtgccggaggacgtcgagatctggcacgcgatggcggcgctcaccaagtccatgtgctgggagatagtgaagaagacgagcgacacggtggacgagaccgccatggtggtgttcaagaagccgacgagcaacgagtgctacgacgcgaggacgcgcgcggagccgccgctctgcggggcctccgacgaccaggacgcggcgtggaacgtcaccctgcggccgtgtatgcaccgggtgcccaccgacgcgtccgcccgcggctcgcggtggccgacgcagtggccccagcggctggcgacgacgccctactggctgagcgccgaccagacgggcgtctacggcaagcccgcgcccgccgacttcgccgcggaccaggagcactggaggaaggtagtcgacaactcgtaccgcgacggcatgggcatcgactggaagaacgtccggaacgtcatggacatgagagccgtctacggagggtttgcggcggcgttgtcggacatgaaggtgtgggtgatgaacgtggtgaccgtggactcgccggacacgctgccagtcatctacgagcgcgggctgttcgggatgtaccatgactggtgcgagtccttcagcacttacccgaggtcgtacgacctcgtccacgccaaccacctcttctccaagctgaagagtaggtgcaagctgctgccggtgatcgccgaggtggaccgagtcctgaggccggaggggaagctcatcgtccgcgacgacatggcgacggtcaaggaggtccagagcattgcgagatcgttgcactgggaggtgaggatgaccgtgtccaagcaggggcaggggctgctctgcgtcaggaagactatgtggcggcccacgcaagtcgaggcgctgagctagtgatcgcagaacgtggaattaaaggcgcatctgtgtgttgagtgctttcagcatacgcaggcccaaaagcctttggtctatggctttgtttaggacagctgctgattgtgaacaaacaacttatttgcttctggttgatgactgcttttagttcattctgaacagcaattgaactagtaagctaatgcataagttgcctgtttggcatagattctacttagctgtgccaaactgggtcatattgtaatacccaaaagtgtaaactatgaaaatagagttgatctccatattttgtggcctctacttatcatcacatatgactaaccctatttaaaaagtgaataataa

SEQ ID NO: 20998 - DNA, 200 bp, Zea Mays
agggaatccacgccgcccccgccaaatctcatccacatcatcggtcggagtcaagctggtgactagggcgctttgtcgacgctcggggatgacgtaaatcgcatcttgatgggagaattcgggccatggactacggaatttctcgccgaagacttgggttgccgcagatccgctttgcgtcatggtcgggagtgcctgct

SEQ ID NO: 20999 - DNA, 2543 bp, Zea Mays
ctctctcaagcaatcttaaccactcaaaccagttcattgttgggcttgcgctctgtgcccttggcaacatatgttctgctgaaatggcacgcgatctggctcctgaagtggagagactgttgcaaaatagggaccctaatacaaagaagaaggctgctttatgctctataaggattgtgcgaaaagttccagacttggcggaaaatttcatgagtgctgctgcatcattactgaaggaaaaacatcatggtgttctgatatctgccgttcagctttgcatggaactatgtaaagccagccatgaagcattggagtacttgaggaagaattgccttgaaggactggtccgaatactgagagatgtctccaacagttcatatgctcctgaatacgacatcggtggcatcacagatccattcttacatatccgagtgcttaaactcatgcgaatactgggtcaaggagatgcagattgcagcgagtatatcaatgatattcttgctcaggtttcaacaaaaactgagtcaaataagaatgctggaaatgctattttatatgaatgcgtggagacaataatgggcattgaagctacaagtggtttacgtgtgttggcaattaatattttgggtcgttttttgtccaaccgtgataacaacataagatatgttgccctaaacatgcttatgaaggccattgccgtggacacacaagcggtgcagaggcacagggcaacaattttagagtgcgtcaaggatgcagatgtctctattcgtaaaagagccctagaacttgtttatctacttgtcaatgatacaaatgtaaagccattgactaaggaacttgttgattaccttgaagtgagtgatcaagatttcaaggaagacctcactgctaaaatatgctcaatagttgaaaagttttccctggacaagctatggtacttagaccagatgttcagagttttgtctctggctggtaattatgtaaaggatgatgtatggcatgctcttatagttctaatgagtaatgcatctgaacttcaaggatattcaatcaggtcattatataaggcattgcaagcatctggtgaacaggaaagtttagttagggtggccatttggtgcattggtgaatatggagaaatgctggtcaacaatcttagtatgttagacatggaggaaccgatcacgagattgctcttcagcgttactcggcggatgttactaccagggctatgtgtcttgtctctcttttgaagctttcttcccggtttccaccaacatcagagagaataaaagaaatagttgcgcaaaataaagggaatactgtgcttgaattgcagcaaagatctattgaattcagttccattatacaaagacatcagtcgataaaatcatctttgcttgaacgtatgcctgcattggatgaagcaaattatttggtgaagagagctgcttctacacaggctgcagtttcatctgtaaattctgctcctgcagtcacttctggaggcccacttaagcttccaaatggcgtagcaaagccaccaccagctcctttagctgatttgcttgatttgggttctgatgatgctccagtgactacttcggcccctactacatcacctaatgattttctacaggatctgttgggcatcggtttgactgattcgtctcctataggtggagctccgtctacaagcactgacattctgatggatcttctatctattggttcatctcctgtacaaaatggcccaccaacgtcaaactttagccttcctggcatagagactaaacctccccctgttacacctcaagttgtggatcttcttgatggtttgtcctcaagcacatctcttcctgatgagaatgcagcttacccgacaatcacagcattccagagtgcaaccttgaggatcacattcagtttcaaaaagcaacctggaaaacctcaggagactacaattaatgcttctttcacaaatttagcaactactgcattaacagatttcgtcttccaggcagccgtgccaaagttcatccagttgcgtttggacccagctagcagcagcactcttcctgccagtggaaatgtgtcagtcacacaaagcctcagtgtcactaacaaccaacatgggcagaaaccacttgcaatgcgtatccggatgtcttacaaagtgaatggtgaagacaggctggagcaagggcaaatcagcaactttccttctgggttgtagtgccacctgtgtctatggggttggggttgctctttcagcgtgctacagtatcgcctacagtacaaaacagtgttttgcacgctcgtgagatggccttatgctcccatacacagaaggaatgtgttgtatcgcgattttcctgatgtaattatttatttttctaatcaagctcgtacaggcttattgtgcacagacaaattaattgtttttcatgtgcgttcctttaggttcagacatatttggaataccagactcccccaattcttgccaaaaaataggcagttatcaaatattttcatatggt

SEQ ID NO: 21000 - DNA, 2511 bp, Zea Mays
ttcaccttcaagagaaaaagcattggaagccctgcccaagtgaataccatgcaaataatcctgagatgtccaagctgttgcacaaagcaattcgtgagaaacgtgataatgcgtacactgtctaccaacaacatcttgcaagccgtcctgtcaatgttcttcgagatcttcttgaattgaaaagtgatcgtgcacctattcctattggcaaagtggagtctgcaacctccattgttgaacgtttttgtactggtggaatgtccctaggagccatttcaagggaaacgcatgaagctattgcaattgcaatgaatagaataggtgggaaatctaattcaggagaaggtggtgaggatccaatccgttggaatcccctcactgatgttgtagatggttattctccaacacttcctcatctcaagggtcttcagaatggtgacacagccacaagtgccattaagcaggttgcatctggacgttttggagttacaccaacattcttagtaaatgctgaccaaattgagataaagattgcgcaaggtgcaaagcctggtgaaggaggtcaacttcctgggaaaaaagtcagtgcatacattgctcgtctgaggaactccaaacctggagttcctctaatctccccgcctccacaccatgacatttattctatcgaggatcttgcacagttgatttatgacctccatcagataaatcctaaagctaaagtatctgtaaagcttgtgtctgaagctggaattggaactgtagcttctggagtttcaaaggcgaatgcagacataattcagatatcaggtcatgatggtggtactggagctagcccaatcagctccatcaaacatgctgggggtccgtgggaacttggtcttacagaaacaaatcagacacttatacaaaatggattgagagagagggtagtacttagggtggacggtggattcaggagtggtcaagatgttcttattgctgctgctatgggagctgatgaatatggctttggttctgtagccatgatagctactggatgtgtcatggcacggatttgtcacacgaataattgtccagttggagtggctagtcagagagaagagcttcgtgcaaggtttcctggtgttcctggtgatcttgttaactacttcctctttgttgccgaggaggttcgagctgcattagcccagttgggttatgagaagttggatgacatcattgggcgaacagatttgcttaaaccaaagcacatctcattggtgaaaacgcagcacattgatcttggatacctcctatcaaatgctggattgcctgaatggagcagctcccaaattaggagccaggacgtccacactaatggccctgttcttgatgagacaatccttgcagatcctgaggtgtgattgccaagaagtatggagacacaggttttgctggccagctcaacatcacgttcaatggaagtgcagggcagtcctttggttgtttcctgactcctggaatgaacattcggctagttggggaggccaatgattatgttggaaagggtatggctggtggagaactggtggtagttcctgtagacaaaacaggatttgttcctgaggatgctactatagttggaaacacttgtctgtatggagctacaggtggtcaggtatttgtgagaggcaaggcaggagaaagatttgctgttagaaactctctatgtcaggcagtggttgagggcaccggagatcattgctgtgagtacatgactggtggctgcgtagtcgtacttggcaaagctgggaggaatgttgcagctggaatgactggtggtcttgcctacattctagatgaggatgatacacttgtcccaaaggtcaacaaggaaatcgtcaaaatgcagagagtgaatgctccagctgggcagatgcagctaaagggcttgattgaggcctatgttgataaaacgggcagcgagaaaggtattgcgattttgagggaatgggaggcctatttgccgctcttctggcaactggtaccgcccagtgaagaagactcgcctgaggcttgtgcagagtttgagagagtacttgccaagcaagcaaccacccaattgtctgcgaagtgatcgaatcagactacaggaaggtggtaggtgttttctatttgacacaaagtgatctcatcttatcacttcaagaaaatcgaagaccataaccggcgctctgaggcaccgaagtgcccgtctgaagactgcaactttgtggaggctctgcccaggccatctttttgagttgagctaacagaaccgagggttcttctcgacgctcgtgcacctaggtaacccctgtaaattggtttgctgacgctaggctgcaaggggcctgccctgtttgaactgctgtactgtacatgattcttggccgttgccctgtgtaattatgttttggttagctcgtaaatttatacgcatccaatggaggcatacaatgcaaaaaaataattaagatacaacaataa

SEQ ID NO: 21001 - DNA, 1512 bp, Zea Mays
gaggggggtgtgcactgggccctgcgtgctgcgtgtgagcagcttgctataggaatctgagggaggaggcgctgggcggtgcccgggcgttggataggagaggtcaagattcaagaacgacgacacgccgaagtagcagagggatccgttggcctcccgtacccagcccccttctaccccttcgtcgacggctgggattgcggcggcgcccttgtcttcgccggcgacgagcatcgccagggacttccgattggggggggcgattgcggagatgggctgatcagaactgcgacaaggtccggttttctcctccaaattgtggtctctggaggtggatttgctttttccgtagccgcagatggacgacgacgatggcagcctgggcattcggaattggggcttctacgacaccatgaagggcaacctaggcctgcagctcatgtcgtccatgccacctgaccgggacacgaagccactgctcccgagagctggtttcttgcagcagcatgggcatcacaatgcatcgcaccagctccatgcacagcagtcgcaacattatcgtgattccacttgcggtggaggagcctctggtggcatgcccaccgagcagcactctatccacatggacttctcacgcaatgaagcttggctgcacccatcgcaccaccaccaacatccccatgaccagaaggtccttcattctcgccctaccgtaccagctgggcatgttgggcatccaggccatggtagccatcctgtgcatggtgggcatatcgtgcatcaccatcctactggctatgggtcaatatcagatgcacaacatactctccagatgatgcaaccacagcttgagtcacagcttcaggagcctcctccatgcaagggagacgaagcgccacctccgccaattgaggatcactctgtggttagtaccgggccacctgtgaaaaagaggcagcgaggccagcagcagagtcggcagcctaagtcaccaaagcctaagaagcctaagaaggttgctgttctgccagagggtggggcacttaatgggcatgcaccccgtaggaggggccctaagaaggctgtggggatggtgattaacggtattgagttggaccttgccaacttaccaacaccagtgtgctcatgcactggaactccccagcaatgctatcggtggggtgcaggtggctggcagtctgcatgctgcacgactgctatttcaacgtatccactgccaatgagcacaaagcgccgtggcgcacgtattgctggaaggaagatgagccaaggcgcattcaaaaaggtgcttgagaagcttgctggtgaagggtacaaccttgttaatccaattgacttgaagacattttgggctaagcatggcacaaataagtttgtaacgatcaggtgttgaaatctggttatgacttacgaagcgaagcagatttccagcagtgtgacaaatggatccatgatgcagtgtttgagaacttaaaattaattcggttctaa

SEQ ID NO: 21002 - DNA, 2954 bp, Zea Mays
ctcagatctccccgacctgccaccacccgcgagccctgcacaacatcactgctaccttctctgtcgatccctcgatctccagacaaccccgctcgcctctctccctgctccggtccccgcccgcctctcgctcgcgacaactccgccgcagcacgcggcggccgcggcgagatgctccgcctgcgggcgttccggccgacgagcgacaaagtcgtgaagatccagctccaccctactcacccctggctcgtcaccgccgacgccaacgaccgcgtctccgtctgggactgggagcaccgccaggtgatctatgagctgaaggcaggtggcgttgatgagcgtcgcttggttggagcgaagcttgagaaacttgctgagggagatgattcaaaaggaaagcccaccgaggctattcgagggggaagtgtaaagcaggtttccttttatgatgatgatgttcgcttttggcaacattggcgtaattgctctgctgctgctgaggccccaactgcagtcagtcagcagtcttccacgttcattgcacctgcaccttcgacacgaggaaggcactttgttgtcatttgttgtgagaacaaagtcatatttttggacttggtgactatgcggggccgtgatgttcctaaacaggagcttgacaataggtcacttctttgtatggaattcctctctaggacatcttctagcgatgctcctcttgttgcctttgggtcatctgatggtgtcatcagggtcctttcgatgttgacatggaagcttgtgcgtaggtatacgggtggacataaaggagcaatagcttgcttaatgacgtacatgtctgcagctggtgaggtacatttagtttctggtggcagcgatggcctgctgatattatggagtgctgatcatatccatgactcacgtgagcttgtgcctaaaattagtatgaaggcccatgatggaggtgttgttgcagttgaactttctagggtgatggggagtgctccgcagctcattacaataggggctgataaaactttagccatatgggatactgttactttcaaggaaataagacgcattaaaccagtgcctaaacttgcttgtcatagtgttgcatcgtggtgtcatccccgtgcaccaaaccttgatattctaacttgtgtcaaggactcacatatttgggccatagagcacccaacttattctgctttaacaagaccgctctgcgagctgtcatcactagttcccccacaggtccttgcactgcataagaaactgagggtttactgcatggtggcacaccccttgcagccgcatcttgttgctactggaactaatattggtatcatattaagcgagtttgacccaagagcacttccagctattgctcctttaccaacaccaacaggcaacaaggaacattctgctgtttacatagttgaaagagaacttaagttactgaatttccaattgtcaaacacagcgaatccatcccttgggaatgctggtgttgcatctgatgcaggaaggtcaatgaacaattcaatagaacagttgatagtaaagcagaccaagaagcatatcagcactcctgctccccacgattcctattcggtcctttcagttagcagttctggaaagtatgttgcaattgtatggccagatatcccttcttttgctgtatacaaagcaaatgattggtcagttgttgattcaggcacagggaagctttttgcctgggacacttgtcgagacagatatgctctggtagagagtgcattggccccaagaatgccacttgttgttaaaggtggttcttctaaaaaggcaaaagaagcagcagcagctgcagctcaagcagcagctgcagcagctagtgctgcttctgctgccacagtgcaagtgcgtatcttattagatgatggaacagcacatgttttgcagagatcgattgatggtcgtaatgaaccagttattggattgcatggtggtgctttacttggtgtcacataccgtacatctcgtagaatcagtcctttgacagcaacagctatatcaactgttcaatcgatgcccttatcaggttttggtggaagtggatcatcttttgcatctgatgatccattttcctctaaggaagggcctccacaaaatttccaactgtacaggtaccttggagatgtttcaattccctttgcaactggtgccgtttggcatcgaaggcagttatttgtgtctacaccaacaacaattgagtgtgtctttgttgatgctggagtggcagcgattgacattgaaacaaaaaggataaaacaagaaatgaaagcaagagaagctcagagtcgggcagctgaagagcatggagatttggctcttatcactgttgaagctccccaggttactgtgagtgaaaaagtatcattgaggccaccaatgttgcaggttgttcgtttagcctcctttcagtacgctccatcgataccaccatttatagtaccaaagcaatccaagttcgatggagatgattcagtgtttcagaaagaactggatgacagaaggtatgctgaagttgctgtcgctggaggaggtgtgtctgttgcagtaactcgcttccctcctgaacagaagagacctatcggacctcttgttgtggttggtgtaagagatggagttctctggcttgttgacaggtatatgtgtgcacatgccttatcactcagccatcctggtataagatgccgttgccttgcagcatatggggaccctgttagtgctgtgaaatgggcaacgagacttggcagagagcatcacgatgacctggctcagtttatgctgggtatgggctatgccactgaagctctccatttgcctggaatatctaagaggctggagttcgaccttgcaatgcagagcaatgacctgaaaagagcacttgcttgtctattaacaatgag

SEQ ID NO: 21003 - DNA, 143 bp, Zea Mays
acaaggtagtttggtggactgaggtatggtgcacgtcataataggacataccggaccatccacccttgctgcacgatttgcagcccgatgacgttgtacatggcgacagggcaccgtggtcggacgggggtgaaggccttgtg

SEQ ID NO: 21004 - DNA, 1042 bp, Zea Mays
cgtcttcattctttctccctgcccctgccctcgcctgctgaaggaagccgcctttttggagtttggactcgggaggacagcctccgcactttccgtccgtcgcgaggaattcctgcccgggcgggcgtagagcagggatggctggaaaaggaagctatgtacctccacaatatattcccttatacagcctagataccgaagaggatcgtgtccctgccgtggaagagaaccatgctacgcgccctaaactaaaccaggatccaacacaatggtcatctggcatctgtgcctgttttgatgacccccagagctgttgtattggtgcgatttgcccctgtttcctttttggaaagaatgcacaattcttgggatctggaactcttgctggatcatgcactacgcattgcatgttgtggggccttctcacaagtctatgctgtgtatttactggaggtctagtattagcagttccaggatctgccgttgcttgttatgcttgcggatatcgcagtgcactaagaacaaagtacaatcttccggaagcaccctgtggcgatttgacgacacacttattctgtcacttgtgtgctatatgccaggagtacagggagatccgtgagagaacaggcagtggctcctcaccagctcctaatgtgactccacctccagttcagacgatggatgagctttgatctttaactgatatgaatgtatgttatctgacaaactttggtgtgtggcctggtgactagtgctgcctttgcctgttggcattttgacatatttttgttcttgggctctcacaacgctgctatgttgtttgtagagttgtaaacacgttttgaactagtgaaccactgacagttcacggaagttgtaacacagttgtaccatggaactgtagtagaattaagtgtatttttttgctatttatataggtgagaggatgagaagggaaaagaaaagaaatgcgcttatcatgcagaatgtttcattgtgtttagttctatgaacaatccaatattgtggtgagtggttgttt

SEQ ID NO: 21005 - DNA, 1635 bp, Zea Mays
gatcagatgggagtatgaactgaacacggatcagatgggtcgacctttattctatggattgaagatgggtgtcctaccatctggagaaagagctctaaagttatcaatgcaggccttctttctttcccttttcatgattttctttcttccttggcaattcagaacgggaggttctattggaagccaaatacttactgagatcagcatttttatagtgaccactggtgtttctctctgtttggaaataaatcatcattttgttcaggttgtacatacaaggaggtgcagttttgctccgcctcagagcactgctgctgcagacactaatcccactgaatttatcctagaatctttggaacaaagtgatccacgatcattgatacaatatcttgcataccaagatttgtgtgtggcatctgagtgtaatttggaaccatggcgcagagctgctttctttgaggaatctggtgaaacttataaaagaatcgtgacaacttgtttgaagccacttgaggagtttacttcaaaaattgctgaatcccttgaagatttttctagtgataagccagaattgatgctacaacagtccaaactctttagtgcatttgatgatttccagatatgcgcatggtgtgctcggacattgactgggttaactgcgtgctcacgccaggaggatcggtatggtgttgctcaactcactggctgcaatgctgctgtgatgacaacgttgctgtctgccctagtagcaattgagacatgcttaggaaagaaaacaaacccacagcctgtgcactcattgggtcctgaaaacattaggtgggttaacttctccacaggacgaaaaggcactggagttgcaattgcatgcacacaaaaaggcggcctacacaagaaagcttataccatggcagatgttcttcggacttctgtatatcagatagtttcagcattcatcgatgacctacgagctaatgcaaaaccatccagcttggagaagaactggatcagtgaagggagaaaacctgtatatggttcacaagccgtgttggttcagaagttgattctgtttattgagtaccgtgcagtatgaacttggttcatgtctctcagatccttacctccatatcagatcatacttggtagtcatgggtttttgaacttggttcaagaaccattgatttccaccagagcctatgaagatggatcctaaaattacttctgtattcctttgggctgctgcactgctgaaggcagtgacgctctcggattggataaccattatgcacccaggccttgtttctattctggtttatccactcaggcctttgtttctattctgatttgtagtctggaagttgaatagagttacctgtatgttgtatcatggagagggaatctgaaatacttatgatttttttatatccacttatcagatttatgacaaactgttagtactgcttagctgcacctatttggtggaatttcgtggtgaaaaggttcggggtgatgatctcctggaataggttccagttgttctttcccagtttacccaatagcaatatcagcctagtcttgaaacttcttccagatatttgagctcatagttcgcaaacgagagcttatgcgttcatt

SEQ ID NO: 21006 - DNA, 457 bp, Zea Mays
acgacttctgaaacgggtaatgctagtgctgagctgctgaagacggttgtgctctcaggcaccaaaacattcggatctgaaatcctaaacggaagtgagacgcccaatcggtgatccaccgcttccccgtcggtaccatgtccgctggaagcgagaggccgtacgccttctcgcccccgtcggcggtcccgggccccttctcccgcggctccggctccgctcccaccacggccgcgacagatagcactgggaggagctcgtcctccgtggcgccgacgaagagccgaaagccaccgttccggcccgccgtggacgacacaaagcccgtcctccgcgatccgatatcacgctcggacctggcggtcaccgagcaggtcgtgctgcggctgccgccgttcccctaagttcgcgccacccaatggcatatgaaaataaagaagaggaagaaaatgttgag

SEQ ID NO: 21007 - DNA, 2802 bp, Zea Mays
cggacaacagcgcgcaggcctgtgaattgcttccctctccacgcgcaccttcccgcctccgcgcccagcccaaccccaccgttgccacgcccacctccggcgtccacctcgcggttctccgctgcacaatcctccggaagacttccccagtgcccctgcgacccgtctgcacacctccgcggctgctcgccctcctctacccaaaccctaaccctaggtccgcgcgccggtgagtccttcgcgctggaaggatacatctgtttgctggtgccatcagaatgaactgccgctttcagtgacatgcatgcgatgcatgcttttgcttttcttcaatggtgaatgctgagccatgctcgatgggtggaattatggattacggtgttggtgtgggcaccaaatcttcaccacgcagtatggccattgagaaagctcaggaggagctcaggcaggagtctgatgttcgcgatgaatggaggagagaattggaatttctagagaaagtatgcccgcaccaggttatctcttagattatatttctgccttcactgtacctacttactcctatttattgcagggaggcaacccattggatttcaattttgcacatctggaaacggtcggtgtacactctgcttctctcacaaatcaagtagaagcacaaactgtgataagtgacgcgaaaggtagtttttctgcatcacctcttggagattcggtcgagagtaccgacaaaccaggaggttccatgtgccgcgaaaccaacacagcagacaatcttatgcttttgggtggaggtaaaaatgacattgcagaagaaaaggttgtaaaaagaggaaccaaaagattaaatgcagcacaacccaaacattcattgcccagtgacggtcacaaaaacacaaaaaagcctgctgcttctggtttgtcacacctcggtgtcaaaagccaggcatatgttcggcgcaacaggtcaaagccaagtagggagagcgggaatgtcacatctattagatcttctatgatccctgctaaagtctatgagccaaatgatgaaaaggttacagcacagaaaaacaatgcagacgatcatggtgtattgtccgtttctagtataaaacagtctggacctaaccgtgacattgcaccaaagagtatagcttctgatgaccatgcagcaatggagctggatggcattcaaacaattctcgaaagtgaatgtgtggtgaacgacaaagtaaacaaagctggcaataataacaaagctaaacagttgtcatcaaatgacacaaatcatgatcgtttccttgttgggtgtggtgagatagctgctgaagtttcatctgcggaaacccctgatgccaatttaaaagttgttataaagccatgttattctagtgcatctacatatgatgagaaagagtcatgtgctgttcacgaaaaggctgatgatggacacctggatgaatgtatggcccatatccgtgaaggggaacttggtcacagcaggacacttccttgtgttgtagaagcttctacttcacacaatgatgtagtgggcccatcttgtgaaggcactgtgaatattgttgatgaacatgcagatggggacatcaatactgttgcagggaagattgattctcatgaagacctagatagtagtagacattctaacatgattctcaaggtaagtggcacatcgatagatttcagcaggcctgcttctttgaaggaaagttctgatcttgtacgacctgaagccagtaatatttctcatgtgaaagatgaaattgaagtttgtaacagtgcaatagttgcacagaaagacacagagtgcttgtcttctggccgcagcatgaacattgaggaaagtccagtttcggttaggaaaaatagctatgttgggaattcaaactctgcacatcctatatccgtaggcatcgatttgtctgatgccttgtctccaccaaaaaatgatgaatctaacgtggagagtgagattaaaaaatatgagaacctgaataagatggaaaagaaggcctatgaagattctattcttaaaaatgctcgcgttatagaggcaaatattaaaaaggctggtcaacgatctccctgtaacattgctttagagaagaggagaaagagtcactgggattttgtccttgaggagatgacttggatggctaatgatttcatgcaggaacgactttggaaaagtgtggctgcagctcaggtgtgccattggattgcctctgatgcccacgccaagtttgaaaaagcaagcattctgaaaaagcagaaagctgttataaagatcattgcaaagggtatcatgagtttctggcgttcagctgaggctttacagactgctgacaggacagctaaagtgatgccacacaattcaactatgctggaggagatagatccttcgggagtcaaagcaggaaaagaacagggtcacaattcactggaagcgaaagaatccagccagcaacggtcacagattcatgattatgcagttcgatttcttgaatataatagaacagctgatttgcacgtgttgcctgaagctccaccaactcctgacaggctgaatgactttggagtcttgaaagtgtctgatcatctctcagaagaaagtctcttttatacagtagcagcacctggtgcagtgctggcatacagggactctctggaatctcttttcatgtatcacaaggctcgcctccgcaagaagagaaattttatctccaaattggaggatgagggaaggattgtcaccaaccatgagcaaatgcaggaagtttt

SEQ ID NO: 21008 - DNA, 610 bp, Zea Mays
gcccgaggcctcccgtcgcggtggtcgctttcggccctggaccccgctgccggaatcgaatctcctcccctcctttctcctccgacctcccccttccccccatccgcggctccgccccgacccgtgacgcctcgcttcgcacccctctcgcatctccgccgcatctccgccgcgatcctcccgactagccgcgactgcctcccctccagcggccaggcagaggatggagggggcaggcaaggatggcaacccgttgaggaattatcggattggcaagactctcggaattggctcattcgggaaggtgaaaattgcggagcatatcagcactggacacaaggtggcaatcaagattctcaaccgccgtaaaatcagaggcatggagatggaagagaaagttaaaagagagattaagatattgaggttatttatgcatccacatattatccgcctctatgaggttatagacacaccggctgatatttatgttgttatggagtatgttaagtgtggggaattatttgattacattgttgagaaaggtaggctgcaggaggaagaggctcgccgtttcttccaacagtattctctttcttgccccctcttgata

SEQ ID NO: 21009 - DNA, 178 bp, Zea Mays
gcaagaaatcattcatgctgcctgcttccctctcaagggatgtcttcacgcccccttcatcatgaagatgattgaagtggtgactcagtttcgctttgacaaaggaacaagacatctctcgtacacccccttctggattgatccaaacaatccagcagggcgtctgaggaaagctccc

SEQ ID NO: 21010 - DNA, 1931 bp, Zea Mays
aacggaacaatacttatctttttccctgcccccgcggccgccgccccgaacgcgcacgcctcctccgccgaagccaagcaaaccaccgacctcgacggagtcttctagccgtcaccctcgttgtcgccctgctcctcctctcagccggtccggccggcggcgtggcgtgaagatcaatccggacccggaacgagttccctcttttgctggttacataaactttggaataggaggatatcccatattgatctttgtgattgagattgattttttttctggaaaatggagatacaaacttcagggaagcccattgatgtgctgatggagaaggttcttagcatgaacattctgtcttctgattactttaaggagctctataggttgaaaacctatcatgaggtcatcgatgagatctacaacactgtcaaacatgtggagccttggatgactggcaattgcagaggcccctccactgcattctgtcttctatacaagttctttaccatgaagcttactgtcaaacagatgcacggtttgttgaagcatcctgactccccacacattagagctgtaagtttctgtttcctgcccttctgtttgctgatgctgaatgtcttgcttcatggccctgtatctattcattaggcatgaggttagtgtatgaatctatatgtttattgggatgattataaaacttatttcggaagtattttttgcaatgaaaaatcttacattccttgcgaatcacttgtacataattttgtgcttacattttggttatagccactaacggtccgacaacttgtttctttggatggacttgtggctgaatttcttggtcctaggacacggggatgacaaagtttgcaagaagttcatagtgtaccagtctgtgctttggagttattggtttcttgtatcttcggtatgttgcagacccaaaggttctttggatgtggtatgagccctatttgagggatgatgaggagttctcccccggatctaatggccgcaagacaaccatgggtgtttatgtgcgtgatcttatacttggacagtactactttgatagtcttctaccaagaattcctctcccagtaactcgtcagattacagccaatcttgaaaagatgaaattgcccactaagctttctggggcaactggagactccagtcgtcagggatcagaagatactgcacgccgtcctccttcagtgaaagcttctctgtcagtttcctttggacagcgtgctccacatcgggcttccaccagggattcatctccagttcgtcgaacagtcacccgtgatggtcatcgaagttcatactcaccatctcgtcgtagtggtagccgtgagggtcctgatcatgaccgttctgaccgggaactggatcattctagtcgtgaccgtgaaagagcccgggatcgttcaaaccgggatcggtatcattcaagccgagaccttgaccgtgacaaggatgccagagattatcatcggcatgagcgtgatagcagggatcgtgagtactacaggtccaggcattcagaagaaagacgggacgacagaagagatcatgaaagtagcaggcacaggcgctctagctctcgccacaggagcaggagtaggagccgaagcaggagcaggagtaggagcaggagaagccgcagccgaagcacgagcaggaggagcctgaatgagcagcgatccagcccattcagggatgcaaataaagagaaggcagccaccgtgtcgagcaacctagcaaagctgaaggacttgtacggtgacataactgcaaagaaggaagacagtgatgctgaaaagcttcaccgtgattcatgcgctgaggaggtcatcaggctgggaggccctcgatggaggaagtcgcccgcatgattcaaggcacttttggacatccttgtctttgca

SEQ ID NO: 21011 - DNA, 406 bp, Zea Mays
cagtcgtgggtgtttacccatcttgtagccgcagctgcctttctggctttcttggcccctcaaaatcattcaaccaatcccactaccaccctcaccgtgtacccagttcgtgcgcgatcagctgctacccagcgctctgggatcgggaaaaggaggctcttttgtggttcctgcgggcatatctcgcggagattcggtcagatttggatttagggtttaggaggtggtggtggtgatcggtttgtaccgccaggtgaaatgtcggcggctgtggcgtgcgcggagaaggcgaccaacgacatgctgattggcccggactgggcgatcaacatcgaactctgcgacatcatcaacatagatcccggtgttttaaaggcgtcgtctaggcgtcgcctagggcgttcaa

SEQ ID NO: 21012 - DNA, 253 bp, Zea Mays
ccacttcctctccctctctccacgccactctccctactcccttcctctctctctctctctctctctctagctccccatgcagcagcaaccccctcccatggagctggcgaccaagccctcccatgctcctccctcaccttggcagttctcccatggcgtctcccccttctctacggcagcaaggtgtaggtactccttagaatgattggttgatggtgtgacttggcctccatccctgccaccgggatagacg

SEQ ID NO: 21013 - DNA, 1156 bp, Zea Mays
aaaaggcccatggggctttcaatttagcgggtgctcccatctttcgttaggataagaggaaccctagtccctagcaacgcctacagcgtcacggaacaccggcgaaccaaacctcggagaaaccctagcaaggccgcttgcccctctcaggcgcgacacagcatcggcgactagcgatgacaggatatcgcagccgcagtccgagccgaagctacagcccacggaggcggtacagccggagccctcctaggcgcaagcgctacgacgatccacgcgaccgctaccgctgggccggggccggcggaggcggggaccgacgtggttacggtcggccgttggcgcagtccggtctcctcatccgtaatatctccctcacagccaggccagaagatattcgagctacatttgagcaattcggccctatcaaggatgtttacctgccaaggaatttccacacgagggaacttcgtggttttggatttgtcaaattccgctaccctgaggatgctgcagttgccaagcgtgagatgcatcatcaagtcattggtgggcgagaaatttcaatagtttatgctgaggagaatcgaaaaacgccacaagaaatgcgcatgagaacaagaactagtggtaggtacatggatgaaagatacacaagactgtcaagatctccaaggtctcgttcccactcttattcaccaccgccttctccagttaggcgtgacttcaggggcagggagcgcccggatagttattcccctcagtactcgcactctccacgccctcgggacagcaggcaccacaggtcagatggtcgctctccaactccaagcctagatgaccacaaacctaaggcgacaccagtcaatggtggacatggtccagcagttgcatccagatagtatgatgccattatggatgccttgaattgtgttcggaggctggagactgcagactatcttttcaccaatcttctctaagagatgagtagggttgtagtaaacagatacttggtagttgtattacaggtgatggtttcggttatgagtccaatggccaaaatatcgtccgaggaaaaaatggtgaaatcagggtttatatgatctcgaggatggggacaaacgcatcccggcgcgcctcgatggtaacacccagtttg

SEQ ID NO: 21014 - DNA, 1302 bp, Zea Mays
ccagacgaagtaattgcagccaaaggtgtgaagccaacattatcaccaaatctcaatacacttgccttagtcgaggcagctggtgtaaagcggcttcttttctgcggtgtgggctgtcaagtgcaagctttgagatctgtagaaaagtaccttggtttggaaaagctttatgtgcttggaacaaactgtgttgacaatggtacgcgtgaagggcttgataaattcttgaaagcggcaagcagtgagccagaaactgttatgcattatgaatttatgcaagactataaggtgcatctaaagcatttagatgggcacattgaagaggttccttatttttgcctgccagcaaacgacctggtagatgttattgcaccgtcatgctatagctgctttgactacacaaatggcttggcggatttagtggtggggtatatgggagtaccgaaatatgctggggtctccatgacacagcatcctcagtacattacagtcaggaacgatcgtggacaggagatgctgaacctggtagctggccttctggaaagcacacctacaattagcagtggctccaggcaaccgtttgttatggagacagtgaaagctgacgatgccgcaaaactggggaaaggcccttcgaaaccagctcctagattcgtcggcgacattctggccttcctgctgaacttggttggacccaagggtctggagttcgcacgctactctctggactatcacaccattcggaattatctgcatgttaggcgggcatggggaaagcaaagagctgagcagcacatcccggggtatgccaagaagatcgtggaggcctacgacaaagacggacggatcgaggcaatggttacgcagtcaggtgactgactcacaccattcacactctactagctggtagtatttgtatactagctggtagtatttgtactgcattgtagtaaagattaaggaatgtagaagaattgtttgtgatgtgacgtagtggcgatgtatacagtagaatgtataggctgcatggcagcagctcagatctgtatgtacatcctgcgcttgccagtttctagtttgcatttgcttttctgggcatgccttttgttttaattatattgtctttgataagtccaagataaaagaagccacagagtcctcaaatgttggaaatcgccaagttaatggctgaattttgttgcgtcaatctaagcacaaccatgctacgattgatttagtgtgtatgatatgatgaggggtagctctatgttaaggtttggacgaagcagaggagagttgggc

SEQ ID NO: 21015 - DNA, 191 bp, Zea Mays
cttaccggggttgagggtagctccggcggcgattttggagttcggtggctgagtatacagctccctctttgacctcacgtgcaattcgtgcgctgcaatgtggtggcggcgcacagaagggataggggaggtgtttatcagctccgattttatgggcagcccggccgttccatcccttggctatcacccgg

SEQ ID NO: 21016 - DNA, 2218 bp, Zea Mays
ttcacaggtaccggaccaaggtttaggtcctacatcatatcatattgtcaaggcattattaacttctagaaagttgttgctggaagaactgaagaaaatcagtggtgctattggtaagacagtagaggaattagatgttgctgacttgaatcttggtagatatgagtcatttaatccatcaaaatctggattaccaaattctagtaaagtgttccctgcaactggcaagggtgtgggacagttgactggagttttacatgatttcttggagaaaaacaacgatatggttaatggtacagatgattctatgctgtatactcttccccaggaagagttgtttgaactatttctaactctgagcggacaacttttcacttatatggaatgcatttttgaaatttcatagggtaaataaaacaaagatattggagtacttgcacgatgcttgggctattgacaggaaggcagaatggtcaatatggactgttcactcaaaaattgagatccctcatcgctatttgcggagtatgaatgatgaatcatctcaccgtcattcacttcttagagtttctggatcaaggaagttccatgacgatcctgcacagaactctgcttcacgggctgaactacaccggaaaagcatagcacaaatgaagatcaatacacaatctgttcaagatatgcatatatatgctgatccttcacatgttcctgttgttcttatagaacaacatgtcatggttgttccacagcatagttccagcaaggatttggcttcgaatgcttctgaacaaaaggatactattgtgctacctaaactacaaggagagcctctggtacccaaaagtagtgttgggccaccatttggatttacgtcttgttagaaaccaatggcttctattggaccctggagctgattgcctaatgtctgaggctaatgaagataaaacatctggagacttcaaagaaatgggtagcaggttggccggggaggtaattgccttcctgaagaagaaaatggataagctttctagatatggaggctgcaaagagctgaagttaagttttgtcggccattccatcgggaacatcatcattagaagtgccctggcagaacctgcattgcagccatacttgaagaacctctacacttacatgtcaatatcagggcctcacttgggttactggtacagttcaaattctttgttcaattctggactctggctgctgaaaaagctcaagaatgctcaatgcatccatcaactcactttcagtgatgatcaagacccccacaatacatacttctataagctttgcaagttgaaaacattggagaacttcaaaaatatcatattgttatcatcaccacaggatggctatgtaccatatcactcagcgagaatggagctctgcccagccgcatcatcggacacctcaaagaagggtcaagtcttcacagaaatgctcaacaattgcttggatcagatccgtgcgccctcatctgacacccggacgttcatgcgctgcgatgtgaattttgaccagtccaaccacggacggagcctgaacaccatgattggcagggcagcccacatcgagttccttgagaccgacatctacgccaagttcatcatgtggtccttccctgacctgttccgatgacagacaacgccgctcgtctctgtaatgtctctgtaatactgctgcataccaaacctacaaaccgatagcgcacactactgagtactgaccaggcaaggaaaagtaagcttgcataaaggctcccccagaatccaacaccgccacaggcagagtagcgctgtaaagatcctagaagcaacggtttttccagcttgctagatctgattctgtataaatagttgattctttcgtcattccattcatagtgctgtagatgtgcacctttgctgtgaatttataatcctttgtcggcttgtgtatctaacgcttcggtttaggatgtgctgacaatcagtgagcttatgtccaaataagccccctttcttaatgtttggttttagtcaccttggtctttgtgctgctgtaaatccagggtgttgtttctgtttggtgaaatgactgctacatgaatatctggttctggcatcttgccatagccggatcttgcttctgctaaggttattcctatcagggatatataggattggaaaaaaatatgaaagattttgatttattt

SEQ ID NO: 21017 - DNA, 405 bp, Zea Mays
aaaatgttaaaactgtatacgaaagaggattaaggtggcgatggtggcgtggtagaagagaacagctctactaggctagctctagcttctcaatgcttgtatgatatcttagctcctgtcttccatcgaaaagatgaaataatacttgagagctgtgttagccccctatggtgctctacttgtttctagttgtacagcttcctccatgtctgcataattaagcttctgtacatatctgagttaagaggagactcgtcagcggatgcctagtttttttttcttcgatatggtttaactccaagtaacctatgcacattcatcataaatgcaaactagttacatttctgcactttatatttgctttggtttgtgttagcattaatcaccaaaaagggaagattgaaa

SEQ ID NO: 21018 - DNA, 1475 bp, Zea Mays
aacttggttcatgctagtatgcttttcaggttttcatcaaggtagaaaaagaaacttttctgtccggtcatggctttcccaactgcagcagctgttttgcttaatgagaacatgcagattcataaaggaaacagggttgatgcaccaagtgccaaaccactgaaatcatcagccaaacctgagagaaaggctcttcaggatgtgtctaacattcctaaaggcactgctttaaagaacagatccacagtcaaagaggggtccgccttgaaagaaaggcctgcactccacaatgtgtctaacaacctcaaagagaggtccatcctgaaagagaggcctcctcttcaggatgtgtctaacacccgcaatgagaggtccatcctgaaagagaaatctgccctgtgtagccatgaagctattaagaacccagtgaatatttttgctgatgacgaagagaccaaagggtgccatgaatgggctaaggatgggatggagggcactcacttcactggaaatgattctcagaagttggataaagatgtgcaacacaaacgtatcaagaagaaagtggcaaaagttacgtcagcattgtatggctggtcacatgaggtatatggtcatgtgatgtttatggctatggttcccaagttttctgaagaatcgaaagagctggagctggaaccagagattcttccagacatcactaggtgtatgtctacctcaggcaagagggatgatgcaccaagcgccaaacggctgaagcctaagcttcaagaaccgaaggctcttcaggttcaggatttgtctaacactgtcaaagggagcccttctctgtgcagccatgaagctgtgaagaacccagtgaaaatattcactgttgaagagaccaaaaagtgtcatgaatcggctaatgatgtgtcggagggcactcacttcacaggaaatgatcgtcagaagctggataaggatgtgcaaggcaagcgtgacaaaacacagctggttgaagattctcctactgatgatgagcttgacgactacccatttttggacaacagtcctgttaagtttgagctgaaagatgagtcagtgattccagatattggagcaatctgaagtgatagtgtttgtgcgattgttctgtagcaatctatgtagtacgatgtttagtacatgttgtttgttctgtagcaaactatgtagtttgagctgaaagatgagtcagtgcctcatcgggtacttttgagtaccgtagcggttgtcaagtttcatgctctcctgaaacatccttcgcaactcgcaagtgaaactctggtttatgccctgaatcagctgctgaataagctaatgattgcatgagtatccgttgatgcatagtagtgaaaggaatggctaagagggagtgaattagtttttttttaattttgctcaaatctatgttttcagttttcagctaatgattgcatgagtatccgttgtac

SEQ ID NO: 21019 - DNA, 919 bp, Zea Mays
ctgctgcccattcctctcatcccagcgaacgaccctccagcacgccatccgcttagccgccccggagcattgccatcgtcgccatcgtcgccgccaccttctatcccggtgtggagcgggagagaacccgtctgcactcagaagctggtttaatccggtgggagcacaagtcgtgtctaaaatattcagattgctaagatgttgggtcatggtctagtaactgatccctcaagaaccttacgatgtccagttaattcaagggtatcaagtgcacccttggggcttgtttcttcgttgaatttcaacaggggatgcaagggaaagaacaaaatattcaatgtggatagacacaccaagtatagtacttctttctgttatgcgccaagaaatgccagaatcacaccactagcaactgcatcatttggggatatggctgattcttcaactcctatctttccccgaatccatgtaaaagatccatatcagcgtctcggaatcagcagggaagcatcagaagaagaaattcgagctgctaggaactatctgataagcaagtatgcaggccacaagccaagtgttgatgcaattgagtctgcccatgacaggattatcatgcagagtttctttgataggaaaaaaccaaaaatgaatctcaagaaaaaatttagggaacttagtcagtcacgtgcagtgaaggctattcaaggcagatttcaaacaccacgtagcaaagtcatttggcagacagctattgcttttgtcttgcttggagtgcttacccttgctttccctaccgaagaagggccaaccctccaggtggccatctcttgtgcagcaaatatctatttcatttatcagagggtcaaaagtggatggcgagcattcttttatgggggttcccccctcagtcttattgccg

SEQ ID NO: 21020 - DNA, 1864 bp, Zea Mays
aaccgctcccgacgcgtcatgggcccttcctcgctcccgcctccactccgtagctcccacctcacccccgctcctcgcaggctcgaccccacccgttcggtccgcgtgcccgcctcacgttggtccgccgtaagcagcagagagcatggcgagatcagggcgggaagcggagcccggagaggaggaacggaagctggtgctgggcaagtacgagctgggccgcctgctggggcagggcaccttcgccaaggtttactacgcgagggacctgagcgccggcgccggcacgggccacagctgcagcgtagccatcaaggtgatcgacaaggcgcggctgcggcgcacggaggggatggtggagcagctgcgccgggagatctccatcatgcggatggtgcggcaccccaacgtggtgggcatccgggaggtgctcgccagccgctcccgcgtcttcgtcgtcatggagtacgcgcgcggcggggagctcttcgccaaggtggcccggggccgcctcgacgaggaccacgcgcgccgctacttccagcagctggtcgccgccgtcggcttctgccaccgccgcggcgtcgcgcaccgggacctcaagcccgagaacctgctgctggacgaggcggggcggctcaaggtcaccgacttcgggctggccgcgctgcccgagcagctgcgccacgacggcctgctccacacgcagtgcggcacccccgcgtacgtcgcgcccgaggtgctcaggaagcgcggctacgacggcgcccgcgccgacctctggtcctgcggcgtcgtgctctacgtcctcctctgcggcttcctcccgttccagcacgacaactacgtcaagttgtaccagaagatcttcaaggccgactaccaggtgccgccctgggtctccggcgacgcgcgccgcctcatcgcgcgcctgctcgtcgtcgaccccgccaagcgcgcctccatcgccgagatcatgtgcacgccgtggttcaggaagggcttcgtgccgcccgtcctttcgcccccggtgacgcccaagaaacagcagctggacgaaggcgctgccctcttcgacaacgacgacgacgacaacagcaacagcaaccactctggcgccacctcccctcggtcgtgcaacgcgttccagctcatctcgtccatgtcctccgggttcgacctgtcggggctgttcgagagcgagcagaagaccgcgaccgtgttcacggcccgcgcgccggcggccaccgtggtggagaagctggagtccgtggcgcgcgccctaggattcgaggtcaccagggggaaaggctggaaggtgaggatggaggccaaggccgagggcacgaacggacggctcgcggccaccgccgaggtgctcgaggtggccgtggacgtgaccgtggtcgagttcgtgcacgacgccggggacgcgctggactttaacaagttctgcgccgtcgacgtccgcccggggctcacggagatcgtctgggcgtggcagggcgacagccccgccgccgccgtcggcaccgcgtgaacaagcgtccccgtctgtcacgtggaagttgtagcaactttgcgtaggagttaaacacggctgcactggcaccagctttttatagcatgtaaagtttcaagttctcgtcgttgcttcgagactgccatggtggctagttcgttgtgtgccatatgctgtacaggaaggaaagagtcgaatcgagccggggagttttcgatcgacttgccaagttttgtacgatcataacctgtattttctggagatgtgtgcatacaaaattttgcccgtgatcaaatttagttttggtccccatatattttttcccatcaggatgattctacc

SEQ ID NO: 21021 - DNA, 2237 bp, Zea Mays
gtctccctcctctccgtcgcccgcaggcgtgcgccaccatctacgccgcgccgcccgccatcctgccgcccgagatgtaccacgcgatgcggctgcgctgcctcctcctgcaccctccgatgtggagtaattcgagctccctcggcatctctgccagcggcgtcagtagaggttccttcgtcaggaggttcagcgcgctcggggcgccgcggccgcctggtcctgcccgacggctgtgtcggttttacggctccaagggcggcgtcgggagcgctgaggcgaggggcgccgctgcgtccccggcggcggcggggagcagcggcaggtgcttcgagcaggagcacgcgcggctcggggaaagggaccagcaggagtggctgagcggcgagaggtttctcaccggctgcaagcgacgggagtcgacgttcctcaccaggcgggagaggttccgcagagagttcctgcgccgcgtcgtgccgtgggagaaggggtcgctctcgtggcagaatttcccctactacgtcaatgacaatgcgaggcagctgctgagtgagtgtgtggcgtcccacctgcgtcacaagagtgtcacatcagaatatggctcacgtttggaatcctctggagggcggatattgctccaaagttctccaggaactgagctttacagggagagatttgttagagctcttgcacatgagttgcaagtgccgctattggttctggacagcagtgttcttgcaccatatgattatggggaggattactcagaaagtgaggaggaggatgagcatgctgagtcagaggatgaaggttcagaatctgaaatggaagacgatggtgatgaagattggacaagcaacaatggaaaatctggtgaaagtgacgatgaggatgctctcaaatctgtggaagatctgaagaaatctgtggatgacctaaaaaagttggttccttgtactatcgaggaatttgccaagagaattgctggtgctgaagaaagtacggcgtcagaatcttctgaaactcctgagtcaccagaagaagagaaaaggcctttccaaaggggagatagggtgaagtatgttggaacctctgcagtcgttgaagcagatcagaggatcattttggggaaaatacctactcaagatggctcaaggagtgcctatacttttattagtggaaggggtctatcaaatggacagcgtggggaggtatatgaggttaatggggatcaggttgctgtcatatttgatccttctatagagaaatcacacaatgcccatgaagatgtaactaacaaggaggaaaatggatcagcaactgtttactgggttgattctcaggatattgcacatgatcatgataccgaatcagacgattggcatattgcacttgaagcactttgtgaggttttgccatctctacagccaataattgtctactttccagacagttctcaatggttatctagagcagtttcaaaatcagatcgcagagagtttgtgcaaagagttgagaaaatgtttgaccggcttaccggaccggtagtattgatatgtggccagaacttactggcagcagcacccaaggataaggaacaaccatccccactgaagcggttggtagggggcctgaagggagaaagatattcaaggtccagtgacatatcaaagctcttcaccaatagtctaactgttcctcttccagaggaagatgaacaactacaactttttaataatcagattgaagaggatagaaaaattatgatttcgaggcataaccttgttaaattgcacaaggtgcttgaggagcatgatctttcttgtgtggagcttttggatgtgaagttggatggtattgttttaacaaaacaaaaagcggagaaggccgttggttgggctagaaaccactatctgtcatcaacaactcttccttctatcaaaggtgacaggttaatcattccccgtgagagtctggatatatcaatcgagaggctgaaggaacagggtataacagctaagaaatcctctcaaaatctgaaggttttggctaaagatgagtatgagcgcaatttcatttctgctgttgtgcctccgaatgaaattggagtgaaatttgacgacatcggtgcacttgaggacgtgaagagaacattggatgagcttgttacacttccaatgaggagacctgaacttttttcgcgtggaaatttgttaagggtatggcttttctgctag

SEQ ID NO: 21022 - DNA, 1428 bp, Zea Mays
gggaacggataggaataggagcgggggagtccgaggataggcaactcattgcttctgaatctctctcctcgtcgcgacgagatcctctgcatctctacttccccggggaagtagctgctagcgtgtgggtctgacctctcctcatcccgagttcttcattttcaggacatatacgacaggccgccgcaaacctcttcttgtccggtactgtcttgctccgaccaagaagaaggtctccagagggcagggtctcctgttaaagctcagccgagttcatctcgagctgcatcatgtaataacaagccaagactgaggtggactctggagctccatgagcttttcgtgaaggctgtcaacaagcttggagggccagaaaaggcaactcctaagggcgtgttgaggcttatgaaggtagaaggcttgaccatctatcatgtgaagagccatttgcagaagtatcgttttgccaagtatcttccggagacaaaagaagacatgaagtcctcttcagaagacaagatatccaaatcagagatgcctggaagcaacgctggcagaaagaagattctcagaagcttacaagtagcagaagctcttcggatgcaaatggaggttcagaaacaacttcatgaacaattagaggtgcaaaggcagctacaagtgcgcatagaagaacatgcaaagtatctgcacaagatattagaacagcagaaggcaaggaattccttatcagctacgacaagttcaatagaaacagagctttctgaatctacaaaggaagagaaacctgagacacaagcggatacttcttcagctcagttgccaaataaaaagaactcagatactgacatggaatgactcataaccaaagaactcattatgtatgaacaactgaacatgttgactcgccaagcactttccttctctaaccttgtagaatacaaacacttctgcctagatgcttctctcttgtatcatcatccctagtgcttgaaagagttctagctagccattgtatatgatttattttcagatgaaaatgctacaaaaaaaggaggaggaccagccattcatctattccatgtgtcactaaatttatttctgcctgtaaatgacgacagctgttcacagaagaaagaatgactttctgatttctacagtttctgcgtgtatcgtaagaacaaaactgttgcctacacaaactggggatctatgtagaacttcctgtgtaattttctgcatacctacagcagtgggtgtgcttgaatggccccttcaggtgaggaatgctgaataggccagccacttctgttttcttcttcagtgaatcgcaggagctcctcttgccctcttcgaagaggtttctttggagaactagaagtatagtcccatcccatcattgaaggtgctagtttcgaagaggctaaa

SEQ ID NO: 21023 - DNA, 882 bp, Zea Mays
taaatcctttgtattcaattttgactaggaggggattaaaataatcctctcctaaccgaacaaggatccttgaggtccctagtctcctggaggaagggtcttcttcggttgtcaagaggaacatcctgaaacagaagcaggaaagtcatgcaaagaacggcagtggatgctgtcaatagatgtgctgatccacgcgacaaggttggctgttttcgtgtgagctgccctgacgttctgctgtacatgagttgtatctacatggtcttgtgagtaaaacagggttaaagaatcagcttgtttggcggggagggggagtgagcataattgatttgtacaaaggacatggcagtttggtgtcattgattttctctctctctcttatcatctccggtttagcgaagcaattttgttgtcgtccctatggaatcctctctcgccacagtattgtactagctgacctgttggggcaactcgtgtgagcattgggcagaccaactccagcaacgctatacatacgggcgtgtataacactttacagtgtagatgtactatttgcagagtggagtttgaaatagagtgatactttgaaatagagagtgatactgggagtggaataggaaggcttagtagtagcgccgatgttggttagtagtcgttggctatatcattttctaccgtgtttggttgggaagtaaatgggatggtttggtaacaaaaatacctagggatacaatcatttcatgtgagaaatatttctgttagggcttgtttaggagctagaatactagagaggattcgataccagaggatattagaggggctaaaatctctctgctatattcaattatgaatatatgattttagtccctccaatcctcttcg

SEQ ID NO: 21024 - DNA, 4159 bp, Zea Mays
cacgactcgatctgtttctgatagacggtgattttgcaaaatcgacccggaggacggagacggagtagaaccgcgcagcgaagcagcagcggcaccaaaagccctcgcgttggtcgcggctgccgcccgccgcccaccgccggtcgccactgccggtcgagtcccatcgagccgagtcgcgctctccgatccgggtggctgcggcgccggcatggcgcggttcgaggtgaacggcaagtcggtgcaaggcgtggacctgctgcggcggcgccactgggcgtcgcgtctcgacttctggcccttcctcgcgctctatgcgctttggctgctgctcgccgtcccggcgctcgacttcaccgatgctctcatagtcctggccgcgctctccgctgctcacatcctcgccttcctcttcacggcctggttcgtcgatttccgggccttcatcgggtactccaaggtcaagaatatctgtgccgctaacgtgtgtaaggtgactccggctaagtttttggggtcaaaggagattgtacccctgcacatacagagaaatgtggcctcaacttcggttgcaggtgagacagcggagatttactttgattttcggaagcagaggttcatctactctgcggagaaagataactttttaaaactccggtacccaacaaaggagttgatcagtcattatgccaagggcactggttatggaactgaggccaagattagcactgctgtggataagtggggtagaaatgtatttgagtatccacagcccacatttcagaaattaatgaaagagcaaataatggaaccattttttgttttccaggttttttgtgttgttctttggtgcctggatgagtattggtactacagtttgtttacacttttcatgcttttcctgtttgagtctactatggcaaagaataggctgaagacattgactgagctaagacgtgtgaaagttgatagccagattgtgttgacctatagatgtggaaaatgggttaaaattcctgggactgaactactaccaggagatattgtgtcaataggccgctcaactagtggtgaagatagatctgtaccagcagatatgctattgttagctgggtctgcaatagtaaatgaagctattcttacaggagaatctactccacagtggaaggtctcaattgctggacgtagtcctgatgatatgctatctataaagcgggataagaaccatatcctatttggtggcactaaagtattgcaacacactgcagataagtctgtaaatcttcgagcacctgatggtggctgtctagcttttgtattgaggactggatttgagactagccaagggaaattgatgaggactatcttattttcaactgagagggttactgcaaataacaaggaaagtggcctgtttatactctttttgctcttctttgcaattattgcgtctggttatgtgcttgtgaagggactagaggacccaacaaggagtagatataaacttttattgagttgttcattgattattacttctgtgatacccccggaattgccaatggaactttccatagcagtcaacacatctttaattgcattggctcggcgtggtattttctgcacagagccattcagaataccgttcgctgggaaggttgacatatgctgctttgataagacagggactctgacatcagatgatatggagttccaaggtattgttactttggaagatgacactgagttaatatctgatgcaaataagctgcccctccgaactcaagaagtactttccagttgtcatgcattggtatttgtcgacaacaagctggttggtgatcccctcgaaaaggctgctataaagggcatagactggatctacacatctgatgagaaggccatgtctaaaaggcctggtggtcaacctgtacagattgtgcacaggtaccattttgcttctcacttgaagagaatgtctgttattgtccgtattcaggaaaggttttacgctttcattaagggtgcacctgagactatccaagagagattagttgatttacctgctgcatatgtggagacatataagaaatacacacggcaaggttctcgggtcttggctcttgcatacaaattgcttcctgagatgcctgttagcgaagctagaagtttggaaagggatcaagtagagagcgacctaacgtttgctggctttgcggtcttcaactgccctataaggggtgactctggtgctgttttacaagaactcggacaatcttcccatgacttggtcatgatcaccggagaccaagcgttgactgcctgtcatgttgctagccaagtacatatatcttccaaacctgttttgatcttgacacggataaagactggcggttttgagtgggtttcgccagatgaaactgatagagctccatatagtgctgtggaggttgcagtgttatcagaatctcatgacctttgtattaatggggactgttttgaaatgctacaaagtactgaggctgttctccaggttatcccttatgtgaaggttttttcacgtgttgctccagaacaaaaagaacttgtactaactacattcaaaagtgttgggagggtgacactgatgtgtggagatggaaccaatgatgttggtgcactgaagcaggcacatgttggcattgctcttttgaatgctgaaccagttcagaaagtcaactcaaaatccaaagctgaaaataaatctgggaaattgaaaaaacagaagcctggtaatgaagcatcatcacgagtgactccggcaaccaatagttctgctaaagcatcgagcagccgccccttgactgctgctgagagacagcaagaaaagttgcagaaattgttggatgaaatgaatgatgaaagtgatggccgctcagcaccaattgttaagcttggtgatgcttctatggcttcacctttcacagcaaagcatgcctctgttgcccctactcttgacatcatccgtcaggggagaagcaccctagtcactacacttcaaatgttcaagattcttgggctcaattgccttgcaacggcttatgttctcagtgtcatgtacctggatggtgtcaaactgggcgatgttcaggctacaattagtggtgtctttactgcagccttcttcctcttcatctcccatgcccggccactccaaacgctgtctgcagagcggccgcaccctaacatattctgtgcatacgttctgctctccattcttggccagttcgccatgcacatactcttccttatcacagctgtcaatgaagcatccaagcatatgccagaggaatgcatcgaacccgactcagacttccatccaaaccttgtgaatacagtctcgtacatggtgaacatgatgatccaggtggcaacctttgctgtaaactacatgggccacccatttaatcagagcatatcggagaacaagcccttcaagtacgcattgtatggagcggttgctttcttcacagtgatcacatcagatatgttcagggatttgaatgactacatgaagcttgagcctttgccggagggaatgcgtggcaagttgatgttgtgggctattctaatgttttgtggttgctacggatgggagtggctcctccgatgggtgttcccagggaagatgccggcgtgggagaagcgtcagaaacaggcagttgcaaacttggagaaaaagcgcgactagaatccttttttattatttgcactttattctttaccttttgctgctgcccattggttacttggcagtacatactgatcatgttttgtcatagttgcattctaatctgtagcctaggggaattttttggagtgtaggccctaaatgataggaggatacacagggtcggcactttgcatactggtcagcaggattattaaaactttcagttacaatatgaaatcttatatttagatggcaatgatatcggatgatgtacaatgcaaaatacagaagctatcttaggctttcattcttttgctgttatgatcttagtggccctttggaggtacattgtaatgtcgatcattgaaaactcgagtttctgggttgtttcgaagaagatctgtttcagtgtatcattagttgatttggtgaaagctctgcttgataact

SEQ ID NO: 21025 - DNA, 429 bp, Zea Mays
taaggataacgaacattttattttccaacaaaaatatcacttttaggaggtaatagtcatatctcaatattcacatattatgtacacaaactaaacattctttttcgcaagtggtacctaaattactgtacatgattactgttcaatgactatgactgttaaattgtgctgtttctacagattacattacactatgatgtaccctttgaagaatgccactagtctgattgaacagatctgaatagctcctcccatttctctgggtcagtcccaggtccttcaccctgagtttatattgtgtccacataagtagaatatacacagatttcacttagataaccagaaaataagcaaaatgcaagtctaaggagttccatcttgatatgcaactctagtcggtgtcagcacccatatttatgccaaagtcac

SEQ ID NO: 21026 - DNA, 118 bp, Zea Mays
cgcgatcttgaaagcaaacgtgaagtgtcaggagacgctgccttcagtaaccagcgcctgttaatcgccaatttctttgttgcagaaaaagttctgcaagatcttgttctgcaactcc

SEQ ID NO: 21027 - DNA, 3205 bp, Zea Mays
tcaacaaaagctctcggcgcttattaagtcttgacgatttatcattccattacatccacacctgcgatggagtacgagcgcggtggcggaggcggccgcggccgcgggcggggccgtggaggcggcggaggaggagggcgcggaggtggcggcggatacgggcggcagcacggaggcggcggcgacgcccgcggaggccgagacgagtacggcggcggaggaggagggtacggatacgacgaaggagaaggctatggcgggggtcgtagaggcggcggcggagggtacgggtacgacgtagggggccgtagaggcggcggcggctaccaccaagggcctcgcggaggctatggcacgggcggcggcggctaccaccaagggcctcgcggaggctatggcacgggcggccgcggcggaaacgcgtgggcgccggctcctggcgcggggagaggtcgcggagttggcggtggcgcggccgagtacgcccccgtcagggggccagcgcccgcgcaggcgccggtggcgagtccgcttgcgcccaaggacaaggaggcgccgcgttcgtcgggatccgtcgaacgcatcgcatccagcgaaatggccagagtagaaccaataggatcaacactagctgccacatcttctgttaatacacgtgtgccaatgcagagacctgattctggaggttcattatctcaagcaacggttaaacttttggtgaatcactttattgtcagctaccgaaaggtgacaactatttttcattatgacataaacatcaagcttgatgaagcttcgtctaatgcttcgggcaaagagctatccaaggcagaatttctctctgtcaaggatgagctcttcagggaaagcagtttacggcgtctttcctcatgtgttgcttatgatggtggaagaaatctgtatacttctgctgaactgcctgcaggtttatttcgtgtgagagttcgatcaaagacctacattgtatcagtagatttgaagaagcagctgccattaagtcaactctcagatttacctgtgcctagagaggtcttgcagggccttgatgttgttgtgcgtgaggcctcaagatggaacaagattatccttggtagaggattttactcaccaagcagcagtatagacattgggcagggtgctgtagctatgaaaggaacccagcagtcccttaaatccactcagcaagggttgatcctgtgtgttgactattctgtcatgccgttttacaaagctggaccggtgatggatcttgttcagaaattagtgaggtaccttgattatcggacaactttgaacaagaggcaaatggaaaatctggttgatgagcttaaaggccgacgtgtaactgtgattcatcggaggactaatcagaagtacacagtgcaaggtttgacacccttacctgccagccagatgacctttgtggatgctgaatccggccaaacacggaggctcgtggattattatgctcagaaacatggcaaggtgattgagtatcagatgctgccatgcttggatttgagcaagagcaaggacaaaccgaatcatgttccaattgagctctgcactcttcttgaaggacagaggtttccaaaagcaaacttgaatcagaattctgagaggatactaaaaggaagtgctctaatccgtgcatctgaccggaggaaggagattcaaaacttggtgaatgcttcggatggaccgtgcagaggagaaattgcacagcaatttgggatttccttggatgtacgaatgacagaagtcacgggtaggatccttcctccaccaaacctcaaacttggggcatccaatgggcagacctccaaattgagtatcgatcatggctgccagtggaatcttgtgaagaagagactagtagagggccgggttcttcagtgctggggcatcgtcgacttcagtgctgagccgtctggctctggcgcccgtcaggagcccctcgatacaaggatgtttgttgagaagattgtgaggaagtgctgtgagcttggtatccgtatgaaccctaatccatgcttcgtgcacataacaaggatggcagtgctcttcgatccacatggactacatgaagagctaaacaaagcaaaacaagctgcagtgagcaagaagcagaggttgcagctccttttctgcccgatgtccgagcagcattcggggtacaagacactgaagctgatttgtgacacacagctggggatcctgacccagtgtttactgagcgaccgcgcaaacaatcgaaagggacaggaccagtacatgacgaatcttgctctaaagatcaacggcaagcttgggggcagcaacgttcagctgtttgactcgctcccacgggtcggtggtggggtacctttcatgttcatcggtgctgacgttaaccacccgtcccccggtaacgtggagagcccatcgatcgcagccgtggtcgcctctgtcaactctggtgtcaacaagtatgtgaccagaatccgtgcccagccgcaccgctgcgaggtgatccagcagcttggtgagatctgccgggagctcattggagtctttgagaagcagaaccgcgtgaagccgcagaagatcatctacttccgtgatggcgtgagcgacgggcagttcgatatggtcctgaacgaggagctggctgacctggagaaggcgatcaaggtgaatggctatgcgccaaccatcaccgtggtcgtggccaagaagcggcaccacactcggctgttccccagggacgaacagcagccgcagacgaagaccgggaacgtgccgcctggcacggtggtggacacgggcgtggtggacccgtccgcgtacgacttctacctgtgcagccacactgggattctggggacgagcaggccgacgcactactacaccctggtggacgagcacggcttcggctccgacgacctgcagaagctgatctacaacctgtgcttcgtgttcgcgcggtgcaccaagccggtgtcgctggcgacgcccgtctactatgccgacctcgcggcctaccgtggcaggctctactacgaggctgccatgatggcgtcccaggcccagcgaggggggtcctttgacgtcactaacttcccgaggctgcacaaggatgtggaggacaacatgttcttcatctgacacaagtttttttttttttttgccgaaaaaaaaaata

SEQ ID NO: 21028 - DNA, 2177 bp, Zea Mays
gtttgttagagcattcccccaaggaatataacaccattgtgtgacgagcaacccttcaccaaaaactaaggactgataaactgcaagagaccgttcctatcaggattgtggagtctgcaaccagatatcaatgcataacagaattgaagagatgtatcatcatcaacaacagcttcagagccacagtcatttcctgtcttctaggcagacattccctccagaaaggcacatgcttctgcaaggagggagcattccagcagagccagggcttgtgctttccactgatgctaaacctaggttaaaatggacacctgaactacatgagcgttttgtggaggcggtaaaccaacttggtgggcctgacaaagctacaccgaagacaatcatgagactcatgggtgtccccggactaacactataccaccttaagagtcatcttcagaaatacaggctaagcaaaaacatccatgcccaagctaatggtgtaaatgcaaaaaatgtgattggttgcaccatggcaatggacaaaccacttgaaggaaatggatcaccagctagccacttaaaccttggaacccagacaaacaaatctgtgcacataggtgaagcccttcagatgcaaattgaagtacagcgccgactgcatgagcaactagaggtacaaagacatttgcaactccgcattgaagcacaagggaagtacctacaatctgtgctagaaaaggcacaggagacactttcaaagcagaatgcagggtcagtcggtgtagaaaccgcgaagatgcaactgtcagaattagtctcaaaagtatcgacagaatgcctccagcatgcatttacaggctttgaggagattgatggttcccaaattctacaaggccataccatccaacttggcgatgggtcagttgacagctgcttaactgcctgtgacggctcacagaaagatcaagatatcctgtcaatcagtctttccgctcacagaggaaaggagataggaggcatgacctttgatatacaagagaaagaaagaggaagagaggatttgtttcttgacaagctaagcatgacgcctccaggccaactagacaggcgtgagagaggaagttttagtatgacacggaaggcagcaaaactggatctgaacatcaatgataccactgatgggccacagaactgcaagaaaattgacttgaatgggttcaactggacctaggaagagttagcaaaagaccttgcaaattaaatctgacttgattcatcaagagtgacaagcttataagcttgagattggctccttctgccaagatagcagcaaagagaggaagtgaaaccgaatgagttattccaaagaccagcagcatcgacatatcctccatggcaggacctgggtgatcctcggaacagctgcgctgtcggcccatcacgattcagcgaaataagtgatgaaattacaataagtagggcatgtagattggtagagtgtatttgagagagtctagtgttctcctccggctataccttattgtgattctgtacacaagcatataaatacaacgatttttgtcacaagtgattgttgctgggattggcaaatgcccaggaatgttttgccatcagctaagcgtgcctacaccctgctgccaaatcatgaatctacaagacagcaactggtgcacaaaacataagggacggacggatgcatatgcatcgtacaaaacacctgcaccgtgtccttgttggattatacataatggtttcaatgtttcgtttcatgcggctatgaagcgggaatgggacagatttactcccaacacgcaaatccaataaggtatcacgaccgctcttcgatgacaaggcagataaatcgtaaatcagctgctaagctgcgaaggtaaataaatcgatcgtacctcccaactgatctaggtggcggcggccgttcgatgagtgcagaaggggatcttctcctgctaaacaatcaccgccgccgccgccgcctctttcctcacaaaagctaaacaacatttgctccaaccaatttgtcggtttgatatgaagttcgtgattcgccaacctgcaactgcaatagaagccgtcggagtcggacgatgaatgctcaagggctcaaggccaaggaggagaggcttcgtttctcggggtgcgaggactaaagc

SEQ ID NO: 21029 - DNA, 2877 bp, Zea Mays
tgaagcgtggttttaggttttaggactccagatgatgttgatgcttggttgtttcaaaacccaatgcgttgccctggggctttacattttcaagatataaatgccactcagataaagtatggtattcagacaaactctactccggtagcacggagaggaacatatgaagaccctaccttcaagttccagataccactccaagttgcagctgagagggaaatggcaaggcttctgattggagacccaaattttagctggactgttggatttaaagaatttgctcacccagccacggagaccttctctaccattgctcaagcagggccaactttttttcttgccattgctatgttcggatttgttttccaaatcagtgcattggtggcagagaaagaactaaagcttcgtcaggttcagacttcactcaccacagtctgcctgcatatctttatgctcaaattcgatttcttccttcataataattttggaatcctattcctcctgttcttcctattccaactgaacatgcttagttttgctttcatgatatccacgttcgtagcgaaggcagcatcagctactactgttggatttgcaatattcattattgggttcttgactcagcttgttaccacctttgggttcccttattcgtctgactacaaaaagttgtaccggacattgtggtctttatttcctcctgatttatttgccaaagccctcaacattctaggcaaggcaacagccactcctgaggataaaggttttagctggaatcagcgtggggagtgcccatcttttgagactgactgtgtcattactattgatgatatatataagtggctcatatccacatttttcttgtggtttgtccttgcgatatactttgacaacatacttccaaatgtaaacggcgttcggaagtcagttttctactttcttatgccttcatactggacgggtaaaggaggcaagatggaaggttagatattgaagtatttgatagctactcacattgtttccgctgtcgtatcttacactgcccattaatctttattccagagggaggcctctttagcttttttggttcaagccgtcctgcagatgatgctacccctactgacgaggatgtccttgcggagcaaaacctagtaaaggaacaagctgcaaacaatgcggtagatcctaatgttgcagttcaaatacatggtctacgtaagacatatccaggaactttcagcattggatgttgttgcaaatgctctaaatctaagccgtttcattcggttaaaggcttatgggtgaaccttgagaaggaccagctattttgtcttcttggtcccaatggagctggaaaaacaactacaatcagttgtctgactggaatcacaccaattacaggaggtgatggtaagtatcgttcattgaagcagcattcttgtttctttgtctcaaaacaacaacttccatactaataatacatactaaacatctcatagcattcatttatggtcactctgttcgaagcactgtgggaatgtcaaacatccgtaggatgatcggagtctgcccacagtttgatatcctgtgggatgcattaacagctaaagagcacatggaattgtttgccagcatcaagggattgcatccagcagcaatcacatcagtagcagaagagtcattagccaaagtaaagctcagccaagtaactaatgctcgagcaggcagctacagcggaggaatgaagcgccggctaagtgttgcgatcgcactgattggtgacccaaaattggtttttctcgatgaacctactactggcatggatccaataacaaggaggcatgtctgggacatcatagaggaggccaagaaaggaagagctattgtcttgaccacccattccatggaggaggctgatattcttggtgaccggatagctataatggcaaaggggaaactgcggtgcatcgggacatcaataaggctgaagtcgaaatttggaacaggatacattgctaatgttaatttctctggaaatggccacatgcagagccccaacatcaacagcaacactgaggctccggttaatccgaacatagaagctgtcaaatggttcttcaaggaacggcttgatgttaatccaaaagaggagagcaggacattcttgacatttgtcatccctcatcacaaagaaccacttctgacgagattctttggagagttgcaagacagggaaggggagtttggaatatcagacattcaactcggtctgacaacacttgaagaggtgttcctgaacattgcaaagcaggcagagctggagacctctactgctgaaggtaccctggtgactctcaacctgtcatcaggaacaacaattcagattcccaagggggctcgtttcgttggtattcctggaactgagacagaggagcatccaagaggcatcatggttgaggtgtactgggatcaggatgaaaatggatcgctctgcatttctgggcactctgacgagatgcccgtgccagttcatgctgagctgaggaggcctccgtcactttctcgtagggcctcaatggaccgtggacgtccagttgggtatatgattgacctgaaccaggtcccatgaaaaaaaggatgagtccaggtgcaacgtttagattggttttgatgcagattatctggtacatatagtatataggaatcttgtattcgtgtctttgtattagaagtcgtaaccttgtattgcagtagtaattggtaaagacatgctttgtaaaatatcctatagtgtaacacagtattttctgttgtatggcaaacaaaggctcgaaatatgacgcaatagaattacatggtaactacaccctgcgtctc

SEQ ID NO: 21030 - DNA, 6756 bp, Zea Mays
cgtcggtctccaaccgacctcgtctcgtctcgtcaagcatcatctgctttctgcgactctgccgcgaagccctcttcgctttctattcatcagaccatatcgaatcaagtcagattcagggaggggaaggcaaaaccctaacctctctcactccgccgccaccgggggagcgcgaggaggacccttcatcgacccgccgcacgaacaaagctcccatggccaacctcggcggtggcgccgaggcgcacgcgcgattcaagcagtacgagtatcgcgccaactccagcctcgtcctcaccacagactcccgcccgcgcgacacccacgagcccaccggagagcccgagacgctctggggcaggatcgaccccaggtccttcggcgaccgcgccgtccagaacaggccgcccgagctcgaggagaagctctccaagtcgcgcaccaaaaagtctaagcgcgacgctgctgccgcgctcgactccgccgacctcccccgtcgcgacgccaagcgcaggcgccgcgctgcttccgcccaggaggtctccgtcctctccctcaccgacgacgccgtgtacaagccccagaccaaggagacgcgtgccgcctatgaggccttgctcagcctcatccaacagcagcttggcggccagcccctcgatgtccttgctggggcagctgatgaggtgctcgctacactcaagaatgacaaggtcaagaaccctgataagaagaaggacattgagcagctgctcaaccctatctccagccagctctttgatcagcttgtctccattggcaagctcatcaccgacttccatgatgcggcagctggtgatgcttccggtgcgccttccgccgacgctgtggacaccactctggatgatgatgttggtgttgctgttgagtttgaagaagacgaagacgaggagagtgattttgatcaggtgcaagacgagctggatgaggatgaggaagatgacatggctgagttgaatggtcctggaggtatgcagatgggtggtgagttagacgacgatgacatgcagaacgccaatcaggggctgaccgtcaatgttcaggacatcgatgcttactggctccagaggaagatatcccaggcatacggggatggggacattgatgctcaacagagccagaagcttgctgaggatatcttgaagatcattgccgagggtgacgacagagacgtcgagaatcgccttgtcatgctcttggactatgagaagtttgatctcattaagttgttgctgcgcaaccgtctcaagattgtttggtgcacccgcttagccagggccgaagatcaggaacagaggaagaatatagaggaagagatggcaagtgacccaagtttggctccgatattggagcagctacatgcaaccagagcatccgcaaaggagaggcagaagaacctggagaaaagcatcagggatgaggccaagaggctcctcaacaatgatgctgctgctgctggtgctgatggtgccagggaccacagggcagccgagtgggacatggagagtggatggctgaaaggacagaggcagttgcttgatcttgaaagcctctcgttccatcagggtggtctctttatggctaacaagaaatgtgaacttccgactggatcgtttagaacccctcataagggatatgaggaggttcatgtgccagcactgaaggctaagccctatgaaacaggagagaagattgtgaagatatctgatatgccagagtgggcacggtcagcttttgatgggatgacacagctgaacagagttcagagcagggtctatgatactgctcttttcaaaccagacaatatccttctctgtgctccgactggtgctggcaaaacaaatgtggctgtgcttaccatccttcagcagattggtctgcatatgcaggatggagagtttgataataccaagtacaaaattgtctatgtggccccgatgaaagcattggttgctgaagtcgttggaaacctgtctaagcgtttggcaggttacaatgttactgttagggagctcagtggagaccagaacttgaccaagcaacagattgatgaaacacagattattgtcacaacacctgagaaatgggacattgtgaccaggaaatcaggggacagaacctatacccaaatggtgaagctgttaatcattgatgagattcatctgctacacgataacagagggcctgttctggagagcattgttgctaggacagtcaggcagattgagacgacaaaggagaatattcgtctggttgggctctctgcgactctaccaaactatgaagatgttgcattattcttgcgcgttcgcaaagaaagcctcttctattttgacaacagttaccgaccttgccctcttgcccagcaatacattgggatcactgttaggaagccactacagaggatgcagttgatgaatgagatttgttatgagaaggttatggctgccgctggtaagcatcaagtgcttatatttgtacactcaaggaaggagacggcaaagactgccaaagccatcagagatacggcgttggcaaatgacactgtcagccgctttctgaagaatgagagtgcaagccaagagatccttggcactcatgctgaacttgtcaaaaacaatgatcttaaagaccttttgccttatggatttgctattcatcatgctgggatggcaagggttgaccgtgagcttgttgaagaactttttgctgacaagcatattcaagtacttgtatccactgctacccttgcatggggtgtcaatttgcctgcacatactgttatcataaagggtacacagatttacaatccagaaaaaggtgcttggacagaactaagccctctggatgttatgcagatgcttggtcgtgcaggaaggcctcagtatgatacgcatggagaggggataatcttgactggccacagtgaattgcagttctacctgtctcttatgaaccagcagctgcctattgagagtcagttcatatccaaattggctgatcaattgaatgcagagattgttctggggactattcagaatgctcgtgaagcatgctcgtggcttggctatacttacctctatattcggatgctccgcaatccaacattgtatggtttgccagcagatatcttggagagtgataaaacacttgatgaaaggagagctgatttgatacattccgctgcaaatctactggataggaacaatctgataaagtatgacaggaaaacaggatacttccaagttactgacctgggaaggattgccagttattattatatcagtcatggaactatttcaacatacaatgagtacttaaaacctacaatgggtgatatcgaactgtgccgactgttttctctgagtgaagaatttaagtatgtaggtgtcaggcttgatgagaaaatggaactggcaaagcttttggatcgtgtgccaatacctgtgaaagagagcttggaggaacccagtgcaaagatcaatgttctgctgcaagcatatatttctaggttgaaactggaaggcctttctcttagttctgatatggtctacatcagacagagtgctggacgtctcttacgggcactattcgagattgttttgaagaggggatgggctcaactagcggagaaagcactgaatctttgcaagatggttgataaacaaatgtggagtgtccaaactcccttgaggcagtttactggaattcctaaggagatcttgatgaaacttgagaagaaggagttggcttgggagaggtactatgatctgtcctcacaagaaattggtgagctgatccgctatcccaagatggggaggccgctgcacaagtgcatccaccagttaccaaagctgaatctttcagcccatgtccagcccattactcgtacagttttgggttttgagctgacaattacacctgatttccagtgggatgataagcgatgacagcgtgttggtcgctgcgccaacaggcagtgggaagacgatatgtgcagagtttgctatactaaggaaccaccagaaggcattgtctggcgagagcaacatgcgggttgtttatatagctcccattgaagctctcgcaaaagaaagatacagggactgggagcggaaatttggagagtttgccaaggtagttgagctcactggtgaaacggcagctgatttgaagcttctggataaaggtgaaatcataatcagtactcctgaaaagtgggatgcattgtctcgccggtggaaacagcgaaagcacatccaacaggtcagcttattcatagttgatgaacttcatctacttggatctgataagggacatgttttggaagtcattgtatctaggatgaggcgtatttccagtcatattggcagtaacatacggatcgtagcactttcagcatcacttgctaatgctaaagatcttggtgaatggattggtgccacctctcatggccttttcaacttccctccagcagtgagacctgtgccactggaaattcacatccagggtgtggatatagcgaactttgaggcaaggatgcaagcaatgacaaagcctacctacactgccatcacacagcatgcaaagaacaataaacctgccctggtgtatgtaccgacaaggaagcatgcaaggttgactgcattggacttgtgtgcgtactctagtgttgagggtgctggaactccatttcttcttgggtcaggagatgagatggatactttcaccagaggtgttgaagaagagactcttaagaatacacttaaatgtggtgttggctatttgcatgagggtctaagtgagcttgatcaggaacttgtaacccagctgttccttggtgggaggatccaagtgtgtgttgcaagcagcacaatgtgttggggaagaccattgcctgctcatttggtcgttgtcatggggactcagtattatgatgggcgggagaatgctcacaccgactatccaattacagatctgcttcaaatgatgggtcatgccagtagaccacttcaagataactcagggaaatgtgttatattgtgtcatgcacctcgcaaagagtactacaagaagtttctttttgaggccttccctgtcgaaagcaatcttcaccatttcttgcatgatcacatgaatgctgaggtggtggttggtgttgtagagaataagcaagatgctgtggattatcttacttggacgttcatgtatcggcggctagctaagaatcctaacttctacaatcttcagggtgtaagtcacaggcatctttcagaccatctttctgagctagttgagactattctgaatgatcttgaatcgagcaagtgtgtggctatagaggaggacatgtacctgaagcccctcaaccttggccttattgcttcatactactatattagctacacaactattgagcgttttagttctatgctgacccagaagactaaggtgaaaggactcctagagattctagcatctgcctcagaatatgcagagcttccgggtcgtcctggtgaggaagaattcattgagaggcttgttcgtcaccagaggttctctatcgagaaacccaagtatggggatccacatgtgaaggccaatgctctgctgcaagcccatttttcaaggcacacagtggtcggaaatctggcagctgatcagcgcgagattctcctttctgctcataggttgctccaggcaatggttgatgttatatccagcaatggttggcttagtcttgctcttagtacaatggagctgagtcaaatggtgacacaaggcatgtgggatcgggattctgtgctgcttcaagttccacacttcacaaaagacttggctcggaggtgccaggaaaatgaagggaagcccatcgagagtatctttgatctagctgagatggctgtcgatgagatgcgggatctcttacaactatcgaactctcagctgcaagacatcattgaattcatcaagcggttccccaatgttgatatgacctatgaggtccgtgagggtgatgatataagcgctggtgacaatgtaaccgtgcaggtaactctggagcgtgacatgactaacgtttcatctgaggttggtccagtccatgcgccaaggtttcccaagcctaaggaagaaggctggtggctggtgattggggacagctccacaaaccagttactggcaatcaaaagagtggcactccagaagagggcgagagtgaaacttgagttctctgctccggcagaggctgggagaaaggactacatgatttacttgatgtcagactcttacttgggctgcgatcaggagtatgaattcaccgttgatgtcaaggatgctggaggggattgatgatgaagactgtgacactatgtcgcatagaagtagaattgagtgtgtactgtaacgcgatattggaacattctgtgttgtaacctcgaacatgtggaagctgtaacttattttgcatgttgaccggtgcactttgggcgttgctgtgttatcctattctagtattgttgtaaggattgcgctcggttacacttgagccacagtattttggatcaacttgttgcttctataagcttgctgatgctataatgtttgatcgacctgttgatgcactaatggtgtgttgatgttttaacctgttctattggcaggacaggcagtaggctagttcgaaaactcaaacctcatgggggattaaggccccgttcg

SEQ ID NO: 21031 - DNA, 648 bp, Zea Mays
gtcgttcgtccctcccccctcgaatatcaaaagcgaggcgaccggccactagaggagcagtccccattgtccactccctccaaatccccgttgcgtcggccacacctcttcctcttacgcgttacacatcttcctcttcctctaaaattaaccgagcgtctcgaccctgcgaattcatacgcgcgcgcgcgcgcgtgtgcacgtgcgcaggcgcggctggtagcctgcagacaccgacacgtagcagcggcgtcccgtcttccatcttccatggcggcggcgagctatgatcggttggccgtcgcggcgtccgctgtggtggtggcggcggtggcgctggcggtcgctgggctgccggcggctggagcgctcggggtgaactggggcacgatggcgacgcaccagctgccgccggccaccgtggtgcggatgctggaggacaacggcatcaggaaggtgaagcttttcgacgccgacgccggccccatggacgcgctcgccggcaccagcgtggaggtcatggtggccatccccaacaacatgctcgacatgatgacggactacggcacggccagggactgggtgcgccagaacgtcagccgctataacttcgacggcggcgtgaacatcaatcgtacaaacgtttgc

SEQ ID NO: 21032 - DNA, 1693 bp, Zea Mays
aggagatcagagccccggcgaggtcgcaccgcaccagccatcgtctccttccttccttcctatactaccatccaaccagctgcccagcgcaacgttacctgcccgacatccgacaagccagtccatccggcagcgagcaaaggtctgagatgggttccgtagacgcggcgatcgcggtgccggtgccggcggcggaggagaaggcggtggaggagaaggcggtggtgttccggtccaagctccccgacatcgagatcgacagcagcatggcgctgcacacctactgcttcgggaagatgggtgaggtggcggagcgggcgtgcctggtcgacgggctgacgggcgcgtcgtacacgtacgcggaggtggagtccctgtcccggcgcgccgcgtcggggctgcgcgccatgggggtgggcaagggcgacgtggtgatgagcctgctccgcaactgccccgagttcgccttcaccttcctgggcgccgcccgcctgggcgccgccaccaccacggccaacccgttctacaccccgcacgaggtgcaccgccaggcggaggcggccggcgcccggctcatcgtgaccgaggcctgcgccgtggagaaggtgcgggagttcgcggcggagcggggcatccccgtggtcaccgtcgacgggcgcttcgacggctgcgtggagttcgccgagctgatcgcggccgaggagctggaggccgacgccgacatccaccccgacgacgtcgtcgcgctgccctactcctccggcaccaccgggctgcccaagggcgtcatgctcacccaccgcagcctcatcaccagcgtcgcgcagcaggttacctgaacgaccccgagtcgacgaagaacaccatcgacaaggacggctggctgcacaccggagacatcggctacgtggacgacgacgacgagatcttcatcgtcgacaggctcaaggagatcatcaagtacaagggcttccaggtgccgccggcggagctggaggcgctcctcatcacgcacccggagatcaaggacgccgccgtcgtatcaatgaacgatgaccttgctggtgaaatcccggtcgccttcatcgtgcggaccgaaggttctcaagtcaccgaggatgagatcaagcaattcgtcgccaaggaggtggttttctacaagaagatccacaaggtcttcttcaccgaatccatccccaagaacccgtcgggcaagatcctgaggaaggacttgagagccaggctcgccgccggtgttcactgaggcccgtatgcagcttcttctcggacggccaccacgctgctgcgaaaaaaaaggcgatgtaatggcggtaacactactattcatgaactggcaacagaagggacacgtattcctgtggaacacatgttgccagaaagaggttttagtttgtctgtttgttggccctgtgtgtaatgttcataaacgatatagacgtcgtctctatgttgtttttgacccaaagaacaagcctgattacggcaatacagctacggagtaccgtgtttcatatgcctagatgtttgtcataagttattatagccggagatggcgatgggcctcgatctctccttcactaggactagtttggcaacgaggagagaaaaatcccttgaaaattaatctaggaggggattttagatgccaccttatttcccccctcttcggtgt

SEQ ID NO: 21033 - DNA, 1285 bp, Zea Mays
actcagtgctcaccgaactccatctatctcttccccacgaacgcttgcggcggcggcggaattaggaggcgatggggcactccaacgtctggaactcgcaccccaagaactacgggcccggatcccgcgtctgccgtgtctgtgcgaaccctcatggactgatcaggaagtacgggctgatgtgctgcaggcagtgcttccgcagcaatgccaaggacattggcttcatcaaggtatgcaatataagcttcaaactcctgtgtgaatgatgcttagcatcattaatgctttatgattttgtattggatatttagtctgaaaagttgctatcaaaaaacacgacaagaaaaaagtgaaagaccgataaatccattagttaatatttgtgaaatagctccatttagacactattctgcttttagttagcctccatcgtaaacatggaaaaggctccaagattctatgatgtaaagtgtctgatacttatctgttgttttatcatctttaattctttaatgaattagttactgccagcttttaggcgacatcttgcagtttagggcattcctatgtatttagactgtttctttggcactttgttccctttcttgcaagtgcagctgtggtattttgttgaaacatgccctacactttgctggtagtctttttttattcaaagaatgaattgtggttacatgtttttcatgttgacatgaaaacattaatgtatggctatggcacataaagtgcctacaattattttgctgcccatggcaatatttttgaaatttctccaatttggttgacttactattgctctttaaccaatgcaatgcctatatttttgttgcagtaccgctgaaatcaggtgggaatggaccatgtggtagaggcgaggctgtagttttatttccagtaatttagatgttttgttcagaagtctgctagtaaagactgctacgtttatgatgaagaacttagccatgttggtcatattgatcatgagttacctatgttgagcttaaactatcttgtgtccaaccatcgctgggtagtatgattactgtaatgtagggtggttaaggtcgcaaactaatacttatattgcatgtgtcgaagatccattccaattgtacttctagcgcactatttgtgaaatgttgctgggcctgtacggcattgacattaggtatcacaccaaaggattaatctgttccattgaacaatcctgccctgcattgttatccgatggatgctgaataggagtcggtcttctagacattcg

SEQ ID NO: 21034 - DNA, 2546 bp, Zea Mays
cttggctttctctgcctgcccttacagccctccacactctttcgcccctttccagttgtccatgaccccatccctccctttcaccactgccccttcttcctcctccccctagctgcacagccccctcgctgccagtttccgtcataacccgtcgtccagaggggccggaaccaaaggtggcggcggccatgctgcaccaccacggtggcgccgggtccccgtacatggccccggagacggctggcacgggcacgggcacggccccgttctcgccgacgccgacggggctcgccgtgtctgtcaccgccgccatcccagccctgccgacgatgcagttgcagccggcggggtcgagcgctaatttcgaggaattggcagcgggcggctccggcgccggtgtggcggtcagactccaggacgaagacatgcaggccgacttgggcgccagcggcgcgggagcgtccggcaaccggtggccgcgcgaggagacgctggcgctcatcaggatccggacggagatggacgccgacttccggagctccccgctcaaagcgccgctctgggagaacgtcgcaaggaagcttgcagggctgggttaccaccggagcgccaagaagtgcaaggagaagttcgagaacgtggacaagtactacaggcgcaccaaggacgcccgcgccgggcgccaggacggcaagagctaccgcttcttctcgcagctcgaggcgctgcacgcctcggcgccgcctctgccgcccccgccctcgggcatgaccacggtgcaagctggccctcatcagccgatggaaatggcatggacggcgggccctacggtgctgggccctgccgccgtcgccggcctgccggacctcagcttctcgtcgatgtccgagtccgactcagagtacgactcggacgacgacgacgacgactctggtgcgggggaggagggcctcagcgggggcgagtgcgacagggagatgatggccaccttcgagaggatgatgaagcagttcacggagaagcaagacgccatgcagcgcgtgttcctggagacgctggagcggtgcgaggcagagcgcacggcgcgcgaggaggcgtggcggcgccaggaggtcgcccgcatgaaccgcgagcgcgagcagctcgccagggagcgcgccgccgcggcctcccgcgacgccgcgctgatcgcgttcctccagcgtgtcggcggggggcagggcgagcccgcgcggctccctccgcacggcgccggcgtcgtgcccccgccgcctatgccggactgcgcccctccgtcgcctcggcgccacgcggccgccgcctcgcttcagcagctggtgcccgtaccgcccaaggcggtggaggccttggcgcgcgctggaggagagggcggcgggtccacgccgtcgcggtggcccaaggaggaagtggaggcgctgatccagatgcggaacgagaagggcgagaagtaccacgacgcgggggccaaggggcccctttgggaggacatcgccgccgcgatgcgggggatagggtacagccggagcgccaagcggtgcaaggaaaagtgggagaacatcaacaagtactacaagaaggtgaaggagagcaacaagaggcgccccgaggactccaagacctgtccttacttccaccagctcgacgccatgtaccgcaacaaacaccgcagcggcacaggcggcagaacggcacccagaacgaacatggcctccgccgtcgccgtcgcagcaaccgtgcaggacaatccgagcaagcgcgagctcgagggaaagagcagcaacgatgccgacaaccggaagaatgacgaacaggggaacgtgcttacttctcccgctagcggcgatacagcaccaggtggcgccgccaaaaacaagacggcagagggcaatgtggatgatacagatgtgcagcaccagcaccagcagcggttcagtgcggacgagacagacagcgacgacgacatggacatggcaagaaactacacagtttacactgaagaaggcaacaacgaagacaaaatgaagtacaagatgggcgtccaggagcgtgatgtgatcgggagcagcggcaacgtgcttgcgccaccaccatcaccagcagcagtagcagcgacggctgcggcaccgacgagttcagctgccccaacgagcagcaccttccttgccgttcagtagagggcaacgctgcagcaggaggcccggtgccagccgatcagcaccagtgcatcaccaccttttgcggcccattatcaccgagtatacttgccctgcatctgaaccatccgaataccatttattgatttgttctgtaataagtaccagatcatgaaaaccctcaaaaggtaaaaagaagacaatgaagaacagaggaggcagcagagacgcctaaacagaaagttcttttctttttttctcatcataggtcatgttatactttacctattgctaacaattgtacattcatgtctcagtctcaacttcctgtaatctactccgacagaaattgatcagggttttggagtggcg

SEQ ID NO: 21035 - DNA, 2420 bp, Zea Mays
tggggagaccgggagagggaagcgaaatgcgaaaggcagccgaggccgcgagccgacgcacgcggctcgttgcttcctccatcccctttcctcacgccgacgccaaagtataccaacgaattcctcctcgggctcccacctaatcgtgttcgccgcctgcctctcccaaaccctagcaacccacgatcgaacccaaatccgctcctcccacccgaggaattatgcgaaattccccgagatcctagcccagcactagcagatcgatccatcgcttgcccacctgccggccaccaacccttgtagtctcagtcaatctgtagattgagactacgatgagcctgtcaccgctcgactcctcctccccgccggccgcggctgcggctgctgctacggaggtgcccctcgccccgggcttccgcttccaccccaccgacgaggagctcgtctcctactacctccgccgccgcgtcctcggccgccgcctccgcgtcgacgccatcgccgagatcgacctctaccgcctcgagccctgggacctcccctccctctcccgcatccgcagccgcgacgcccagtggtacttcttcgcccgtctcgaccgcaaggtcgccggcgctggcgccgggggccggggcggtcccggcaacaggaccaaccgcgctacgccgagggggtactggaagaccacgggcaaggaccgcgaggtgcaccaccgcggcaagcccgtcgggatgaagaagacgctcgtcttccacgccgggagggcgcctaagggcgagaggaccaactgggtcatgcacgagtaccgcctcctcgatgcagacggacctcaggatctgcatgtggtttgtagaatcttccagaagcatgggtctggaccacagaacggtgcgcagtatggtgcaccatacatggaagaggaatgggaagaggatgatgatgctattgagaatggttctacccacgatgcatctggtcaaattgctgcaaccacctgtgctgtagatgaggagtcaaatgaggacgatgagaatgcatattgtgaaacaaacagacctgctcgagtagaaccatctcatctgccttcggtccatgaaatgctcaatccaccagagatggctcctctccaagggaatgataccaatggggttgcatattccaggcagcagcaagctgatggcttcccagcacctcgccaagttgatgaaagtatggtattttatgatgccccatctgattacaacttggtggatggaaaagatgacttcgtatatctgaacgacattctgaatgagccacttggaaatgaatcgctctttgatggagatgatatgatggcttactttgatgccacagagaatgatttcaagtatgacattttgggctctggtcagggtttggattatccacttgcagacatgccgttgaactttgcccaaaagagtgacaaggaagacaagtttacattcgaagggatctctgaggttccggaagcaaatcctcagtacggtgcatcctcatctggttcacatgaagatctgtatactgatactgaatttctaggtgtaccaacagatgacactgctgataaaacttacggaaatcgcctggccagcatgttaggctctatcccagctccacctgcaatggcctcagaattcccgccgtcaacagggaaatctgctgggatgctttcggctgtcagctcgagctcaattcgttttactgctggtatcatccaacttgatggcctcactttcagcagcggctccggtcagtggcccttgcagaagaatggagacttgagtttgcttgtctcttttgctgtggagggcgacgtggcatccaagctccctgttggtcttgggcgtgctactcggattagcaccgttcccatggtgctgcgcagtggtttttaccttttctttatgtcggccatgattctcttgtttagctacaaagtagggtcgtgtatctacagcaggtaagttgaagttgatggcgcctcttgtccggccagacctgtgggctgtttattttagttcaacacgtggatcattccctcagtgatgggggtatagcagtcgttcgacaccttttttacacatttaccattttgacctgtcaaaacatacagcaataaactttcgaactggtggtggtgatcatgccgggaccatgttctcgtcagggaaagcagtgcactgtgaatttggtgctctgctcttattattgtaaccaaaattaactgcaatatgttatattctgtcctgtagaggaaaagctattttatctggttattgtaaccaagattataccttggtgggttgctgtcaaagaaacaatggaaatatgattattatcaggccgtgttatttgctccaggccagataattaccatttgatcaacataaacctca

SEQ ID NO: 21036 - DNA, 887 bp, Zea Mays
catacatcggtgtgttgcggtgagagccggaatatacccggttgctcccccttggatccttgtttgcttcctgctgcctggccttctctcctccccaaaatcaatcgcccacaaaggagagccaggcagccagccaaatcttccacctcctccatttccagccccgtccccacaccagctcgcgtaacctcctgcccatggctggaggcggcggcgcaggcgcgggctcgtcgtccggcggcggcggagggggcggcagggagggcgactgggactgcggcagctgcggcaaccgcaactacgccttccgctcgctctgcaaccgctgcaagcagccgcgcctcctcgtcgaccccaacaccccgcgcgactccaagtggctaccccgcgccggggactggatctgcaccggttgcagtaacaataattatgcatccagaaagaactgcaaaaagtgtggcttgcccaaggaggaagcagcaatgccagcattgcaaatggcagggatgactatgccaacttatgcaacttatattgcaagactacaaagccttgctgcttctgcttctgcctataagatgaactttgggatggctgccaattcacctttgcagcagcaactacttgcaaatgcaaactggccctatgggatggctggtagatatgggatgcaatcttctggttggccatttggcaacggcaacccaaatcagtttttaggtgttccaaaggattggcgtaatggagattggctctgcagctgtggatttcataactattcatctcgtactcagtgcaaagagtgtggtgcacctgtaccatcgggcattccctccacaacaatgaaagctacatctgatgcctcttccatgtgcatgctgtgattg

SEQ ID NO: 21037 - DNA, 701 bp, Zea Mays
ctgcacattcttgctcatagcttgctatcttgatgttcccctccgatatcccttgcgctttggagggtcccgatcttatgtgagtgatcgcttgccttcagctgatacagcatcatcggctgctttagcaagtaccaggaacaccgaatcagaactaacagaataccctcttttcctggaatgccaagacgatgactccactagtgcctcctatgccatttatttattgcacaaggatacggagcagcttctgaactatgttggagctgagagctgtggaaggcacgtgtttggtaacctacgagaacttcttaggatcgtgcagtctgataagtttgtgtacagatgatggttccaatccatgtggttttggagtgcttatgctgtagatgtattatagagatgtaagtaggtgtttttcttttctcttcctattctttcgtgtgattcattccctctttccctgcgctaggttttttatatgtgcaggaaataggcaattatgtttttctagagaaatgaaatgtactcacacgtatggcttcttgcatatcttattcgagaaaaaagatggtccaatcgaaagtcctacaaccactgggtctgtctccttgacaagcaagtgtttgatatttagattatccaataagtcacattttgcaatcgttgggtttgaattcaaccaatcatatttattttag

SEQ ID NO: 21038 - DNA, 2612 bp, Zea Mays
ctcactcgcaggccgcgtcggcaccgtgctgcctttactcctctccgaccaccttccccgtttcaattcgcttcactccccgcagtcgccactcgccgctccctcgaccccagagctctctctctctctccctccctcttcctagctccccctttccggcatggcctcctgctagctcccgtcggaacgcctcccagatcccagacgcagcgcgctaccccacgcgagcgaaggccggcgcgcgacatgggagggtgccacgcgaagccgctcacgcaggacgcggacggctcgccgccgcacgcggcgccggcgaccccgcccccgggcaacgctacccccggccccgggaagaagcactgggcggtgtccccgttcttcgcgttctccacgccgagcccgagccccgcgcaccacctcttcggcggctccgcggcgtcgccgcgcaagtcccccgcccccccgggctcggcgcccaccaccccggccaggcggatcctgaggctgcccttcccgccgccgtcgcccgccaagcacatccgggcggctctcgcgaggcggcacggcccgccgcggccgtccatccccgaggagggcggcggcgaaggggagggcggcggcggtgccaggggcctcgacaaggggtttgggttcaacaaggggttcgcggccaagtatgacttgggggatgaggtcggacggggccactttggctacacctgcgccgccacggttaagaagggcgcacgcaagggggagtccgtcgccgtcaaagtcatccccaaagcaaaggaaacaaaaacttggtgcaattttatgatgcctacgaggacaacgacaatgtatatatagtaatggagttgtgtgaaggtggagagctacttgacagaatactttccagaggtgggaagtactctgaggatgatgcaaaagctgtcctggtgcaaatattaaatgtcgtcgctttttgccacattcaaggagtggttcatcgagatctcaaaccagagaattttcttttcacatcaaaagatgagaattcccatcttaaggccattgactttggcttatcagactttgtaaaaccagatgagaggctgaatgacattgttggaagtgcttattatgttgctccagaagttctgcatagatgctatagcacagaagctgatgtctggagtataggtgtaattgcatatatccttctttgcggcagccgtccattttgggcacgcactgaatctggcatattccgttcggttctcaaagctgaccccagctacaatgaggcaccatggccttcgctgactccagaagcaatggattttgttaagcgattgctgtgcaaggatccacgtagaaggatgactgcagctcaggctttaagtatgttgccattcattttattctggtggcttctattgaatattgcattgttgtgtgtattcatgtttttttctaggtcatccgtggatcagaaattataatgccattaggctgccgttggacattcttatattccgacttatcaaagcttatattcgttcctcatctttacggaaagccgctttgagggctctatcaaagaccttaacagttgacgagcttttctatctgaaagcacagttttctttattggaaccagacagaaatggatgcatcactcttgacaatatcagaatggccttaacgagagaagctactgatgcaatgaaggaatcccgagttcaagacattcttgtttcgttgagcgcccttcagtacagaagaatggacttccaagagttctgtgcagcagcagttagtgtgcatcagcttgaagcattggatagatgggagcaacatgcgcgatctgcttatgaatattttgagaaggaaggcaaccgagctattgtaatagatgaattagcttctgaattgggcctcagtccttcagtgccactgcatgtcgttctgcaagattggatcaggcatacggatgggaaattaagttttcttggatttgtcaagttgttgcatggcatgtccagcaggtccctgtcaaagatgagatagctgtcgataatctctaacgacagcgcgtgtttacaccgtcctgttgacttggttcacaggcaaattaacagggctaaagaatcgtacgattggagcttgcatatcaagggcgtctgagctctaacagcacctgatccgacactaatttaactatagagttatgtttattgttgcctgcctactgatcatttagccgatagggaaatgaaagaaaatctcacccatgtctgcaacatgtgatgtttctaacaaccttagattaggcgtcatcttctgttatgattctagaaattttgtaatgcttcttttctcgaactggagcaagttagctgcagtcaccaggttggcgactggagcatggacatatcactgtcattgtgacattgttactgtatcattgtaccgacagatgaaagtgcttgatgtggtatgtcaggttctctccgtgtatatattgattgatgagatggaattgtgccatttttaaatatcggaatattagtatgtcaacttgcactctctaaggctcttttggaaagcaggattttagaaaaaat

SEQ ID NO: 21039 - DNA, 3523 bp, Zea Mays
cttttttacgttgaatctgatctttgtcatctgtgccagtatactgacttcagtgttcatcaggtgcagcttgcgcggatccccctcatgaactgagcaatcgatagaagaaacaaaaagggccatttccgctacagaaaataaatcatcaggaatgggaaaacgaggccacaggcggtctgcatcacaagacgacgacaatgtgggctgtgtgtggggcctcatgcgcatgctttacttccgccgagaccccaaacttttgctggatgcgaagcagttgagtgggaggcatgcgttccgggaggtcagcgggagggggcattcagcaaagaggccaaatgattttgacgggatagaagaagatggtaacatagaagatcgcactttgcagaaaccgacagtaaaaaaccttatggaggatgaattggaaaaattaatgctgctgaagaaatttccaaatgatgaggttcagagaagaaaagccgacctgggaattgatgtctctcttgatacgatttcagagcatacaaataaatcaacagataactcatatcaccaggcaggaatctctacgccttcaactccatcaatggattatggggttttgaattatactgaagaatataatcttgaatctgtgctggtgaattttctaggtgaaatatatagttgtcacaatgaatgcccacacagtgattgcaagaacaagaatgaattgtgtccttcactgaagtccctaatccataaaaaggtcaatgaattgaataatcttccccacaatattggccgtgggcaatctcaagagggcagtgatgctaagccatctgaccaaaataatctttataacaccatggcagcccaatccaaacaattcaaggatgcattggaaatactgggttcgaacagtgaactttttgtgaagctgcttcagaagccaaatcaacatatagctgatagtatccaacagcatgaaaacagtaaggtgtctgctggattagagcctgacaaaattcatggacagaccaattttgttggaggaagaggaagctcaaaacagcatcctttggctacaaaagagcaggctaaagagagaaaatatatgttcttctggaggaagagtaaatcaaatagaaggcagatgcttgacgcaacagatggagctcagactgttagcaaaattgttattctgaagccaaatccagaaagagggattaatcagaaagcagctactgcaagaactttacatcaacagccatgtacatcgaatgctcctggatgcagtggaagggaaaactcaaagttttcaattaaggaagtcaagaaaagattcagatttgtgactggtgagagaagtgaaagaaatttgtcacctgcagaggaccttcaaggagacccacgtaagatcaaagattctgttgttgcaattaataaatattttagacatctccctgaagggagcttggcaaacaagtctgcatcagacattgagaatggcatcaaaccttttatcagcagtaagcaaaagaatcaaaatgggagcataactgaaatcagtggccatatagtagcaccaaaaggtgcatctgtattttatgaagaggccaggaggcatttatcagagatgctaaaaggtaatgactgttccataaactatccagaagttcaaatatcaaaatccttggaaggcatactttctcttcctcatggcaatgtgtcaaccactgggagtagcctgaggggaaaggattaccttgacccctcacctggagaaacagatgtttacgatgcatgtgaggttgagagagaagaatgcacacaagagagaagccaatcacaagaggattttggaagcattgctcactgtacttgcacaacagttgatgatcaggtgacagttcgagaaggatattacacgaatgaagcacaagaaggaccaagacatgctcatgatgagccagacactctgtatattgaaggacttgataaattcatttgccgcgaaaacattcgcaacgaagagtccagtccagcagaacaaagcagagacgatatacgtcaagtaagcttaaataaatgcatatttttctttcttgtgattaatttttctaaatgtcccatgtttcataaaggagatactagaagaaataaatcagggaaaagagcatgttaaaatgtccctagcttctgttgagggcatagatgaaaagttggggcagcaagagccagaaacaccggaaccaagagcatcagccaaattaatctcagacggttctcctaatcaaagcgatgaaaagcaagagaggcccagtccagtatctgttcttgagtcatccttcgaagatattggcagtccagactgcataaacaagaaagagtgtgagctgcatggtctccaaaggaccctgtattttccagataatgaaccagacgttaatgtcctttgggaggacaagaatgtcaggttggactacataaagctggtgctagaactctcagaactgtgcgcagaacaaaatctagaggtatggtacctagaagacgagttgatcagcccctgcttgtttgaagaactacagagccagggtgatcagacggatgatcgaatgcttctgtttgactgtatctgtgaagctctaacagagatccaagagagatattttagactctcctcttggctaacttttctaaaacacgacatacggacacctccgacaggagagaacctaatcacagaagttgataggtacgttaacgggtatattatccagtacagtcttccaagtactctagagcagacaattaaaagggatctggaagttcagacgtggatgaacattagatcgaaaaccgaagggattattatggagatgtgggagtttgtattggatgagttgatagatgagactgtctccgatttgtggatttgaagttctgattaggcttcgtccatggtgcctctgtggcgagcatagtgagtaggatacaggagttctttcgtgctgaaaaataaccagttctatgcggcagaatagcatgggctaccgctagccaagtgtgtaactgcagtggagatcgttctcgtgtagtcgtgtggaggagaacagaagtctaggttcagcagatctccagagctgtgaagtttgcgtggatgaagttgggcacggtttgtctcacagccatgcctctgcacggcgaagtgtacagcagtctgaagcgcattgcgattttcctctttgcccgttgagatttgggagcttgtgtgtgcatgtgtgatgcgtgcacttttcagcgtgatcagatcgcgcttgtttttttataggtttgttttgtgtgtaaatgtgaaaaaaagagagaaagcaaacatacatgattaatcaaatgacatgttttatgtatgctttgttgaatggcgcaaggcacatctacccccatggggctgtgcatgtatttatagatcaaaagatacatgcagatatgtacaagcaaggcaacaacctgccgagaagggaggcgcagctccagc

SEQ ID NO: 21040 - DNA, 2242 bp, Zea Mays
gtttatatgtgcgtgtgaaatgtgaggtgttgaagtttgcccttttgccttggtactaaccgaaggaaggtatccaatgatccagaacttcaccagaaggtggcaggtgtattggttgagtcaaatggtgtcaacaatgacttacaagagctgtctcctgatagaaaatttccacaagatgattttgcaccctactcaaatcacagccatgattggaatcctgctggatcaggtatcatgtggaacaaatataattttcctgtatttctactttcagaagagagtacaaacactcttcaaaagatttcagaaaaaaatgagaagactggcaatggatataaagcaaatgttgcagaattcgaccttgttatgcagacaaccaaagctcaaacacatgattcagcatcctgcctcaaagaacaatcatgcttgcccttaggtggacacagtgtatggacttcattaccgccacttaataacggatctacagagcatccgaaacctttaatattggctattgcgtctcaagactctgcatcattttttcgggaccgtagtcttggttcagattctcccatatctggattgattgctttgctcactgctgttgatgctctttctcacattcatggtctaagcaagcttaagaaacagcttgtgttcgctgtttttaatggtgaggcctggggttatcttggtagtcggaaattcttacaggaattagatgaaggcgctgcttctgtgaatggaattagtagcttaaagattgaccaggtactggagattggttctgttggcaaggctatacttgaggaatatccatcattttatgtgcatgctgaagggaatccatcagcttcaaaggaaatattagatgcactgcaaagtgccagcaagtctcttggttctgataatgttaaagtaaaacaagcagcttcatcaaatcctggtgttccaccatcttcattaatgtcattcataaggaagaacatgtcaacttctggagttgtgttggaggattttgattcccacttctccaatagattttatcatagctatctggataactctgtaaacatcaattcctcgtcaatagctgcagccgccgctttggttgcgaggtcgatgtatattcttgctagtgatgactcagttgttgaccttataacactaaacactataaaagtgaacgtttcattggtcgaagaacttattggatgcctgcttacttgcaatcctggtctttcgtgcggccttgtgaaaagattcatttctccaagcaatccctgcccaagtcattatgttggtgtttttctggatgacccatctggcacgcagcttccttcatatgcagatgacacgtctcggtttgtatggaactttttggcagacagaactaattcagcaggcaataaaagctcatgtactggaaagtgtggtgatgaaggtgaagtatgtgtaggggcagaggtggagggtggaggtagatgtgttgtatctacaaccaggtatgttcctgcttattcaactcgggtgaagtttgaggacaatgcatggcacgttcttccagcgaactcgtcagatccaatgggtgctgcagatcccgtgtggactgaaagcttctggaacactattggcctcagggtctacgccgtgcaagatccagcttacgattggcttattcttcttgccgggctcggaatcactgctgcatcttattgcgctgtacactttggcagagcatacatttcaaaggtggcgaagcttgactgaagcgtcagtgagctgccccactgataatgggtatctagagctggaaatagaactaattaggctggcaattcgtagaacattagcagcgcatgagacagggtgattaagctgcgagaaagccgcaataaattatgagaaccaagcacacccgaagcaagtcctccatcattatgcggacgtccaggtcgatgtaatattaatgaaattgtgaccgtgttacgttttgtgttgaactggtactggtaggtaggttatgacacgcctctagctctagttggtggatgtttccggtaacgtgtttttctgtttgtggatcctgcctactcagttttggttgcgtataagcctgcccctcatgaatcctatgagtttgtgaacaccaactattatactggtgacttgcattcgcatgatgattggatcttgtatcgtgtttggtttcgccgctccagttgccactgtttgggct

SEQ ID NO: 21041 - DNA, 2080 bp, Zea Mays
ttcttcttttgttgttgttttgatcaatatttatgacagagttgggagccaaacgaaggagccggctctttgtcaaccagttcagtcggtgtggaagtagaaaaatatagaaatctgtacactatcaaggccttgcctttaagtgatgtacgcttcatccgtaagtacaccccaacgtttggactggactacgtaataatcgttctctcatcaggcctggctttccctccattctatttctacaacggtggaattcgtgaattgtttgcaacactgaaacaacatgtattcatcatcaggtcggatgacgatcctaatgtttttctcgtcaacgactttcaagatccccttcagaaaagcttgtcatccttggagcttccaggagtagcctcagtagcaaatgccatgtcaagacaaaattcactcagttttactgggtcaattgatgagtccaggcatggggataatgttagacatggggcaacttctagcatgtctcagtatagctcaaagcaaaatcacaaatcaaatgatccaggtcgtgatctttcaattcaagtcttggagaaattctcattggttactaaatttgcacgagatactacatcaagcctttttcgagacaatagtggtgctcatgcttatggacgccaacaacatcaatacattttggataataaatcaactaataaacataaaaatcagtatgtaacaccagaaaaggcttcggcaccctcagcaacactcgagtcagatccattacctctcgtatggggaaaacaacgagatcacccgttaagtgtcgaagagtggacatctttcttagatcgtgaaggtaggattatggattcaaaggcactgaggaaaaaggttttctatgggggagttgatcatgctttgagaaaagaggtctggaaattcttgttggggtatcatgaatatgattcaacatatgctgagagggaataccttgctgtcatgaaacgagcagaatatgaagtcataaaatctcagtggaagagtatctcagccacccaagctaaaagattcaccaagtttagggaaagaaaaggcctaattgacaaagatgtggtgagaacagataggtccattccctattatgaaggagatgacaatcagaatgttgtagttttacgtgatattctgttaacatattccttctacaatttcgaccttggttattgccaaggaatgagtgactttttggctcccatactttatgtcatggaggatgagtctgaatcattttggtgctttgcttccctgatggaacgtctaggtgccaattttaatcgtgaccagaatggcatgcatgctcagctacttgcattatccaagcttgtggagcttcttgatccttcattgcacaactattttaggcaaaatgactgcttgaactatttcttctgtttccgctgggttcttatacaattcaaaagggagttcagtttcgaccagatcatgcttttatgggaagttctgtggtcccattatttgtcagaacatttccacttgtacttgtgcgtagcaatcttgaaaaaatatcgtcagcggataattggggagcagatggacttcgataccctccttaagttcatcaatgagctcagtggtcagatcaatcttgaccgggctatccaggacgcggaggcattgtgtactattgcaggagaaaatggggcttcctgcattccacctggaaccccaccttcaatgcccgtcgagaccgatggtggcatgtacgtgcaagaagacgaggtcttgtgagatatcggtcaccctagaaaataattgcatagaagcatcgcaagtttttatccagtagtgctttcgtcgtcgtcataaatgtgatccgttgttttacctcagctctccatcagatcttctatctcctagagcatctccatcagcctatctcatcaactgtacctaaaattagtgtttaaaaatagtgttttaggagatagagaagttgcaggtgatcttctatgtcatctatatatctatattttttattaagagatcttctaatagaagtatcatctctccaaaataaagg

SEQ ID NO: 21042 - DNA, 1411 bp, Zea Mays
ctctctcattcactcactctctcttatccaaacgcccccgtgccccgtctgcgtcgcgtagggttttggcaacttgcacgtacgagagcgtccatggacgacggcagcagcaacaaggtggttgaggacgtcgcggaggaggaccccggccgccgcggcggtccatggaggacggatgaggccgacgccaacgagaaggcgcctcgcccgagcaggcgggtcgcttccctcgacgtcttccgcggcctcaccgtcgcgctgatgatactggtggacggcgccggcggcgagtggccggtcatcgggcacgcgccgtggaacggctgcaacctcgcggacttcgtgatgcccttcttcctcttcatcgtcggcatggccgttcccctggccctcaagaggatcccggaccgtggccgagccgtgaggagagtggtcgtaaggacgctgaagctgctcttctggggcatcctgttgcaaggcggttactcccacgctccggacgaactggcgtatggagtcgacatgaggcacgtgaggtggggcggaatcctccagaggatcgctcttgcgtacctggtggttgcggttctagagatggtgacgaaagacggcgccaaggttcatcaggaccagccgccaggttcttcaggccgcttctcccgtgtattcagaatgtatctctcccagtggatcgtcgcgtgctgcattctggtggtctacctgtcccttgcctacggggtctacgttcctgactgggagttcagagtgcgaaacgctgacagcccagactacggcaaagttctaacggtgaggtgtggtacgaggggggcgttggaccctccctgcaacgccgtaggctacatcgaccgcagagtcctgggcatcaaccacatgtaccagaagccggcatggagaaggcacagggcctgcactgatgactccccacacgaggggcctttcagagaggatgccccagcgtggtgtgtcgcgccattcgagcctgaagggatactgagctcactgtctgctgtgctgagtacggtcgtcggtgttcactacgggcatgtgcttgtccacatgaagagccatacggacaggcttaggcagtgggttaccatgggcgtagctcttctcgttctcggaatcattctgcacttctcgcatgcgatcccgctcaacaagcagctctacacgttcagctacatctgcgtcactgccggcgccgctggggtcgtcttctcagcgctctacttcttggtcgacgtcgtgagcctgcgctacgccttcgcgccgctgcggtgggtcggcatgaacgcgatgctggtgtacgtgatggccgcggaaggcgtcttcgagggcttcctcaacgggtggtactacgagagcaccaacaacactctgtttggtgcag

SEQ ID NO: 21043 - DNA, 1036 bp, Zea Mays
tgggaacatacatagtatttccatcttgattactttgagaggaccttgacaagctgcgggagatggagatgtttggggagaatggcagggatggggtctggactgtgatcgcaaatgtgatggacccggagagtttgcatgaggctttcgacggctgtgttggtgtctttcacacttcgtcgcatgtggatccagcgggcatctccggttacacgaaacacatggcaggcttggaggccaaagcagcagagctggtggtggaagcatgtgtgaggacagaatccgtgaggaagtgcgtcctgacgtcgtcactgttggcatgcgtctggaggcagaactaccctcatgaccgccgccggttcccaactaccatcgatgagaactgttggagcgacgagagcttgtgccgcgacaacaagctgtggctgtcactcggcaagacgatggcggaaaaggcggcgtggagggccgcacggggaacagacctgaagctagtgaccatatgcccagcactggtaaccgggccggggttccggaggcggaaccctactccatccattgcatacctcaaaggagcgcacgccatgctcgtccaaggtctgctggcgactgcgaacgtggagagggtggcggaggcgcacgtccgcgtgtacgaggagctgagcggcacggccgggggccggtacatctgctacgaccacgtggtgcgacgaggcgaggagttcgcggagctgcagcggcagctggggctcagggtccccgcgaccgcgacgcccgacggctatggcggcgacgacgacgacggccgggcgccgcggttccagctctgtaaccggaagctggcggcgctcatgtccgcgcggaggcggtgcacctacgacgcctacttccccatgccgcaggagtgagaccggaagaggagagagagctgctgatgctggacaacgactggagcgtgcgtgacaagtgacctcgtgtacatagcaatagtggtgatcggctcgcatcaatataataaatcggcctcaagtatccc

SEQ ID NO: 21044 - DNA, 1989 bp, Zea Mays
accatttcaccaaattggcaagaaagccgctagcaatccacagttgcgatttgcgggaacaactactactatcaaaaactttcgacattcgattatgctggcgatggaaatggagctcctggtccgatttcaatgagagccataggcctccaaaaatagggttcaaaaagggccagagagcaaggagtcatcccatttttagccgttgccgtagctggtcgtcgtcgtcgtcgctgctcccaatctgcggccgtcggtgttgccttcgactttaatccacaagggcgagcagcaccgaccgagccgatccgctcctcttcttggttcttcttcaataaatcagcagagcaggaaagatctgtgagcgttcttgcagccggcaggttattagcaaataaatagctggagaagaagcctggcaaaaaaaaggtgaaatttgtggagaacatgtttgggatccaaaccagggatgtggcagaagatttcaactcctggaggaggacattaaggaacacacccaccgtctcaatgcccatgaacaaccacaacattatgtacaacacaggcaagagtttgttcaatgtacacctcatgtctgtcaagtttgaagacctgtatggattcatggtggagggcaatgtggacgatgtcaatgtgctgaatgaggtgcgggagaggatcagggagcaaggcagggtgtggtgggcgctggaggcaagcaagggtgcaaattggtatctccaaccaaagatttcttcaaacgagggggtgatcagtgtcacatcactcaagttgtcagtgctcactaatacaattacattgaggaggttgatcaggaaaggtgtccccccggtgttgaggccaaagatctggttatctgtgtcaggagcagccaagaagcggtcaacggtgccagaaacatactatgatgagctaattcgtgctacggaggggaaaaccacaccagccacaaggcaaatcgatcatgatcttcctcgcactttcccttgtcatccttggttgaacagtgacaaaggtcaggcatctctgcggcgagtacttgtggggtactcattccgtgattcagaagttgggtactgccagggtctaaactatgtagctgcactcttgttgcttgtgatgaagacagaggaggatgcattttggatgcttgctgtactccttgagaatgtacttgtcagtgattgctatactgacactctttctggatgtcatgtcgagcagagggtgttcaaagatctcctggctaagaagtgtccaaggattgctgctcaccttgaagcaatggggtttgatgtttcacttgttgctacagaatggtttttgtgcctcttctcaaagagcctgccttcagagacaacacttcgggtatgggatatattattcaatgaaggagccaatgttttgttccgtgttgctctcgcaattttcaagatgcgagaagatgatctactgcgcatccaacatatcggtgatgtgattgatattttgcaaacaaccacacatcatctatatgaccctgatgaactcctgacattcgcgtttgacaagattggttcaatgccaacaaatacaatcacaaaggaaaggaaaaagcaggagactgttgtcctggctgagcttgatcaaagaacaagacggctgagttcactcaagatggatggatagtttgtaaaatacaagttcttgaaagctgtagtcttggcctattcggcacctggtcccacagcgtatgcttcactgagcgaaaaatcatgggtctaccgaatactgggagatggaaagctgcagtatgtgtttgttgaacacgagtttttggacttcatattgtgtgcttttgtgtgttcttcctttgtgtttgcaattcatatttacaagatacgggccatggtgctgatttctcttattatgtatatgtctatttcatatctatttttatatatcttataattttaaaacctactaaaa

SEQ ID NO: 21045 - DNA, 454 bp, Zea Mays
tggcaactacgagcaagcaagaagcaacgtaaaccaaactagcacgcggcgggaagaaggaaacaggacgaaagggacacgtacctgcctccggagctcggcctccctaagcctggcctcgatctcctccacgctcgccggcgccccaccgccgcgcgccccctccaccagcctcctcctaatccgccgcggcggcgccctcgccgccgctggcccttcctccgctggtatctccatggccaccggctcccgcgcccccgtcatcaaaccctccgatcaacccaactcgcgggcggagagaccgagtcgagcgggtttccgcaagcaaccgcgtgttccctcgccgcccttgcctttcctccgctgcggctgcggcgcgctactttactctccctcttctacctccttcccgttgcctcgcaagtactttgttccgttaatggatgatcgcgcg

SEQ ID NO: 21046 - DNA, 305 bp, Zea Mays
cgctaccgggaggagggcaaacgctggtgtgaacatgaaggggtggcgtaccagtgcacagcgcggcgaaaaccccatccgcagagcagtgtgatcccctgacgaagcttcatcgtcggcaagcaattgccagccctccgatcgatcacccctccaaacaacgccacagacacatccgccaggataggccgagcctccctggccgtgttcttaactcagacgacggcactccctccgattggccagcggcaacaaccttcactccgcccagcggcaactctccctcacgttggcgttcatggccg

SEQ ID NO: 21047 - DNA, 3021 bp, Zea Mays
ctttgaaaagttgtagaatgtcacatttcaactaaataacctaattcattaagtagattccaattcctccaaaataaaaggatccaaacggctccttagaggaaactgtgattattcttcaaataaacagtacaaattaagttctgccacctgttaataagttgtatatatatatgttatgttgtgtgatctcaggtgagcaatggagcccgtggggttcctcagcagcagaataggttgctctcagtgcttgtggcacccaagattgcaggaatgagcaatgttgtggccctcaagctgatggatggtgcccttattggtagacgctatgaatcgagtgcagcagcagttgattctacggaccagctagctgagaagcacgagtaccaggctgaggtcaacaggctcatggatttgattgtgcacagcttgtatagtaacaaggaagttttccttcgagaactggtcagcaatgctagtgatgcacttgataagttgcgttatctgagtgtcacggaccctgagcttctgaaggatggtccccaacttgacattcgcattcaatcagacaaggataatggagtaataacaattactgattctgggattggtatgacgaaacaagagcttattgattctcttgggactattgcaagcagtggaactgccaagttccttaaagcattgaaggagagtcaagaagcgggcatggacaacaacttgattggccaatttggtgttggtttctattccacatttcttgtttcagagaaggttgttgtgtcaacaaagagcccaaaatctgacaaacaatatgtttgggaaggacaagcagattctggttcttataccattagagaggaaaaagacccagagaagctaattcctaggggaactcgccttactctctatcttaagcatgatgataagggctttgctcaccctgagaggattcaaaaacttttaaagaattattctcagtttgtttcctttcccatttacacatggcaagagaaaggcttcacaaaagaggtcgaggttgatgaggatccagcggaagccaaaaaaggggatgatgatatcaaaactgagcctaagaaaaagaccaaaaccgttgttgagaagtattgggattgggagctttcaaatgagacacaacctatttggcttcgaaaccctaaagaggtttcaactgaggagtacaatgaattttacaagaaaaccttcaatgagtacttgaatcctttggcctcctcacacttcactacagagggtgaggtagaatttaggtcaattctttatgttcctgctacaaggaaggatgatataactgataataggaagaccaagaatatcagactgtatgttaaacgtgtattcatatcggatgactttgatggagaattgttcccaagatatttgagctttgtgaagggtgttgttgactcaaatgaccttccgttgaatgtttctcgtgagattcttcaagaaagtcgaattgttcgtataatgagaaagaggctagtgcggaaagccttcgatatggtacttggcatttcttgcagtgaaaacagagatgattacgaaaggttctgggagaactatggaaaaattttaaagctgggtgccatggaagacaaagaaaatcacaagagaattgctcctttgttgcgcttcttctcttctcaaagcaacgatgaattaatcagcttggacgaatatgtggaaaacatgaaacctgagcagaaggatatttacttcattgctgcagacagcctgagcagtgccaaaaatacccctttcttagagagactaacagaaaaagagtatgaggttctacttttcgttgaccctatggatgaaatggctatccagaatctgagctcctacaaggataagaaatttgtggacattagcagggaagatttggacttaggtgatagcaatgaggaaagagaggagataaagcagcagttcagccaaacctgtgattggataaagaatcgcttgggtgacaaggttgcacgtgttgacatatctaatcgtctgaggtcatcgccatgtgttcttgttgcagcgaagtttggttggtcagccaatatggaaaggctaatgagagcacagactatgggtgatacaaccactttggatttcatgcggtcaaggaaggtttttgaaataaatccagaacatgagataatcaaggccttgaatgcggcatgcaggaataaccccgatgatcctgaagccctaaaggctctggatgttctctttgaaactgctatgatttcaagtggcttgtcgcctgacaaccccgccgagctcagcgggaagatctacgagatgataaccactgccatcgcaggcaagtggtcctcacagtcgcaggcgcaacctgacaacacaactctgcagcacgcggcacctgggaggtcggatgagccgcttgaaggtgaagtggtggagccagagcccgttgaggctgatcagcataagtaaggggaaccccctttcgctttctcgtgctagctttgaaccgttgtgcacgtggcggagaattttgagtatttgttttgacggcctttagctttatcatgagctgtgacggacctaatgtttagaatttagaagattagggataagtggcggttgaactacttgaactggttatgtgatcctaggatcgtctctggactcattgtagattaattataacagttagaagcgcaggtgaggtgtctatcacggacacccaaacgcatcagagttgctaaatttggagctgaggcctgcggtgaatgagatcgtctcttttgtctcgacttccacgactttctttgggctgaggtctgcggtgaatttggagctgaggtctgcggtgaatgctattttcagcggtcttacttatttcatctcttactaggtgagtgtccgtgcgttgcaacggaaccgtataataacataataacttatgtatatatgtgtgttatattgttatagttatattcccgtgcgttgcga

SEQ ID NO: 21048 - DNA, 2354 bp, Zea Mays
cttgtgtctgctcatgctgtgccgtggtggccgtgggctgcaagctacagagctgcctcataaaagctccctgcgtttgctcctgtttgcagcttgcacggaggcggggtagtagaggacggcctcgcaaggtagctctgctcgagcgaggcagcagcactactcccgttcaggagaggaggcgttctccaccgggtcataggaatcctgacgagatggacggcaatgctaggtcgacggcggcgagtcagaagaagtccatcgtcccggacgacgacctcgtggagctgctctggcacaacggaagcgtcgtggcgcagccccaggggcaccacaggccggcgccgccctccgaccgcgactgcccgggcaccagcggccttactgccgaggagaccgccgcgtggttcccggacaccctcgacgactcgctggagaaggacctgtacacgcagctctggtacagcacgatcgccgacgccgccccgcaacacgagggcatgttcccgggccctacctcgcagccttcgccgccgccgcccgttgcgagcagcggcgtcgagtcgagctgggccggcgacatctgctcgaccttctgcggcagcaaccaggtgcccaggacgccggcagggatcagggggaaggacgcggcattgcagccggaggtgccgagcggtgccggcgcgcacgacggcacatcgtcatccggtgggtccggaagcaactatgggggatccgggctgcccagtgacagcgtccatgtccacaagaggaaggggatgtgtagagacgagtcagatagtcggagtgaggatgccgagtgtgaggaggcaaggagaccaaaccctggcggcggcatgggcggaaacgccggactcgtgcagctgaagtccataatctctcagagaggagaagaagggaccggatcaaagaaaagatgcgtgcgttgcaagagctgatcccacactgcaacaagactgacaaagcatctatactagacgagacgattgagtacctgaagtccctccaaatgcaagttcagatcatgtggatgacttctgggatggtgccaatggtgtttcctggtgctcaccaatacatgccaccaatggctctaggcatgaattcaggttgcatccctgcagcacaaggcctaagtcagatgcgaagattaccatacatgaaccaccccatgccaaatcatatccctctgaactcgtctccagctatgaatccaatgaatccactgaacactgtgaaccagttccaaaacggtcacctcagggaggtaccaagacctggaccccatgtttatggacaccaaatagcacaagccgaagaacacaacagaatactggaagtggcagctagtactgttataccaacttctaaggcagggcaaccacctacttttgatggagtttagagtggtcataaatcctgtaaggtgttgcactgataatctgacgatgcatagcgttggtaccttgagttgtatatctgtgcagtagtgtcagcagcatactctttgacatctaagcttggttctagagttattaataggagcctagtataggtaacaagattgcaagacaactacctgtctaccaccatattctctgtggaagaactggagctgcatactgctgtgcagtacagtgttcaagagagaatggaacagatgagtatttgaagcacaacctgaacaggaaatggtcttctttctggcaatcgctgaaaatactgacgtgatgaggagcagattgcatccctatggctgtattgtaatatatctacatcaacatggcaatacgtgtctggacttggatgctacagttacatgtaaatgcagagttgcaggtttggtcggcaggagcatacatcttcacacgacgtggacagtggactacgggccgagacagtggcccagacacgacacggctcttatatcaggctaggccagacactatttaatgtgtcatgcctcaggccggtccacgagacacggctgaccatctataccacatactctactcctccacggcaacagttcagcatcctcctggcaatggcaacggttcagcatcctccatggcaactgtgcggagccctagactagacctgctgcaagatggcagaccctcatcttcagagcggattgggtttggatcccctgtactcctccttgctcccctgttgctttcagttcgtctcacggttattgttcagacttcagatacatatgtcgttgtgcctggttggctgtatctggacatcagtttccgtgttgctactattttcccccctgtatttctttataacggacattcaccttataaatatacacacaaaac

SEQ ID NO: 21049 - DNA, 1443 bp, Zea Mays
ctggaatcacccaagtgccagtcctgaaaccatttggtctaagatgggtcagagtggatatttacaaacaaaaaagctgatgaagcccatcagttcacaatgcatgtgaattttgataagttttctgaaggcattttggttggtgatgagcttgtaatagatggtggaatggcaacatttgaagttactgagaaaataggaaatgatttgcgctgtaagtgcacggacccaggattgggctgacatcgaatttgggatagctgaaggagttgattgcattgctctatcatttgtaaatgatgctaatgatataaagcagttgaaagcttacctctctagaagatcgttagagcacatcaaagtatttgcaaagattgagagtctagaatctctcaagaacctgaaagacatcatagaggcatctgatggagttatggtagcacgaggggatcttggagttcagattcctcttgaacagatcccagccattcaagaatcaattgttaaactatgtagacacctgaacaagcctgtgatagttgcttctcagcttctcgaatcaatggttgaatacccaacaccaactcgagcagaggtggccgatgtttccgaagcagtgcggcaatatgcagacgctgtgatgctatcagcagagtcagctataggtgcatatccccaaaaagcgctatctgtacttcgtgcagccagtgaaaggatggaatcatggagccgtgaggaaaacatgcagaaacttcttccacggcatcagcttgcaattgcattgcctgaccggatctcagagcagatttgcagctgtgctgtagaaatggcaaacaaccttgctgtggatgccatatttgtctacacaaagcatggtcacatggcatcacttctatcgcgcaaccgacccaaccctcccatattcgcgttcactgataatgccaattcaagaaagagcatgaacctctactggggagtgattccacttcatctaccattgtcaaatagcatggaggataacttcaacaaaaccatcagcctgatgaggtcgaagggttcagtgaaacccggagacacggtcttggtggtatcagattctgatctaaaccaaccttgtgctgccacctcggtgttccaatccattcaggtccggctagtggagtaggttccatgagatgagatcctactagccgtttggttggctaaaatgtaacgtaaccaactactactatgcgttaccattgcaaaccattcccaccgtctataattagatcctatttccatctccaaataaagattgaaccactgcgattacagtggtgtctgatttcatttccttcgtgtcaccgttcattgaatcaaacaccgtctagtttcagtactgggttgctgcaaatgtctcgttgaaccaaacacgaattaaagccagctgtttctatattc

SEQ ID NO: 21050 - DNA, 902 bp, Zea Mays
attttaaataaaaataaagctcgacgtcgtcgtcacctctctcgccgtccacgagtcacggcgagcggcgtcgacggcgggcgggggtcctggccgttcactgccatgcctgaccccaccaccaaacccccttcgccacgcccccgccgtcgccgcaggctctgcggcctctgcctcggcaccgcgctcctcgcgctcctcgtcgccgcgctcgtccatgtcgtcgccccgcttccgcgcgccgcttccgcctccgcgcgcttctccgtcatcatagacggaggcagcacgggcacccgggcccacgtcttcgtcacggggcacgacggcagcccggatctggcgctatccaccgtgatgcgcgtctccccgggcctctcgtccttcgccgccgacccggcgcgggccggggagtctttgaagccgctgatagattttgcgagggataagattgacggcgcgggcagcgccgctggggaggcggaggtgcgactcatggccaccgcagggctgcgcctgctcgaggagcgcacccaggaggcaatcttagcgtcctgcagggacgttctacgagcctctgggttccggttcgaggacgcgtgggccaaggtgatcccaggctcggatgaaggtatctatgcttgggttgcagcaaattatgctcttggaagacttggaggggatcctaacagaaccgttggaataattgaacttgggggcgcttcagctcagcttgccttcgtttctgatgaagtacttccacccaaactgtcatataattatacttttattgaaacaacatacactctctataccaacagctttttaaactttggtcaaaatgcagctcaagactcgttccatgaaatgctgaggtcaagagttcaaaaatgaactagcgg

SEQ ID NO: 21051 - DNA, 1519 bp, Zea Mays
catattcagtctttctctgcatcagatcaaagaagtatttgctttcatcatcaatggataaaacagtacggttgtggcacatgtcaagcacttattgtttgaaaaccttctcacacactgactatgtgacttgcatacagttcaatcctgttgatgatagatacttcattagtggttccctggatgaaaaggttcgtatctggagtattccaaagcgtgaaattgttgattgggttgatcttcatgaaatggttactgctgcctgctatactccagatggaaagggcgcgctgatcgggtcccacaagggcagttgccatttgtatgatacatctgatgacatgctttgctacaaaacacagattgacctgcaaaacaagagaagaaaatctagccagaagaaaataacaggatttcagtttgtcccaggggattcttcaatggtcataatcacatctgcagattcacgaatcagagttcttgatgattttgagctagttcataggtttaaaggattccggaacaccagcagccaaatctcagcttgtttagctggaaacggacggtatattatctcggcaagcgaggattcccgtgtatatatctggaggaacgatgatggttcgaaaccaagtaaaaagaagggcattgtttctgtcacaaatacccatgaacacttccactgcgagagtgtcacggttgctgttacctggccttttaccagcaccacaatgacttctttaatgaaccccaggaaacaagagcttgagcttgggtctgagaatggctattcaccgcaagatctgcaaaccaaacttgctaaggcacaggagatgacagatgttgagtaccggagcacaaatatcacaagttacaactcgaagcataacagtgaccggacatctccggcttggcctgaagaacttgtcacaccaccaaatcaaagtctcagcgctactacctgccatgccaacgagggagaccaagctctgaatcggtcggcctggggcctagtaattgttacagcaggccgtggaggtcaaatcagaacatttcaaaacttcggttttcctgtaagagtatagcatgagtccgaatacataagatagtcactgccattcaggagtgcagtttgtgtatagataggagatagtgggtgagtttcacactattcagggattgggtttgactgttccttggtgcacctgctagagatcagaatcttcatctaacatacactgtcagtagtccaaaacttgtgtatgccaaatttattttaccctgaaggcccaagttgtacatgaaagagaaagccctacagagagcaacactatcagctgactggagataattcatctgtcagcttcaaccctacctttcggttttagacttctattccgaaccatgacatgttcttgtaagaaaagaaaaggaaaaagatagacgtggtgaaattgtcattttggctttatgatctcatggtattggtatcctgaatcttttttcagaccccacctat

SEQ ID NO: 21052 - DNA, 1681 bp, Zea Mays
gccgcgttcgctaccgacgatgcactccacccacctccgccgcccgccatggcctccacccaactcacgtgcagcaggttccaactcccaagatctaggtcggacaccggcgcacaccacgtcagcgacgccaagcaccactcgttcgacctcgctcctgacatgcagttgtagcttggctcgaggcgggcatcagcgacgacaaacatcctgctcaatttgttgtatgataaatactgcgaaacaatgctggtgtttcataagatgaccgtgcagctcatgaaaatccagagggtggagtcgagcgagacgacgtggccggcgcggcgccaggtcgtggcgtgcgccgctgtttgctggtcgtggcgtgaggtcaccaaggaggtggtgaagacgctcaaggagtgcggcaggatcaccttccccatgtcccttaagcaggttggcactctctgccttttctctactttgatgatcaatcacatgtcttcacctttgcagaggcttatgattttgaagatctagaatctatggttgaagaaatagccaaagcattcaagacaaagataatgtttatatatgttgacactgctgaagaaaaccttgcaaaaaccattcctcactctttatggcattgaatcagaaaaggcctactggtccagttcttgaaagggtgggaatgtgtccaagaagacaaaggcatcgacccgccaattcttcgctacaaattaaaacagcactagggtgagatcagtgggcttgagagtagcatcatccttcaaacatgatgatgggtttctagctgatggtgtctctatagctcactggtatccttcaaaaagaaacttcctggaaaaaatgtcttttgaagctaatcttgctccatacagctaatcttcacatctttcaaagcatttgctagggccccttcggtgagcaatagaatacgacttgcgctaccaaagcgtccatagctgaatgcaaaccattgagatggtccaggttgaggacctccatgacacctatgttggtgtgggttgtgccgccccatcgtgaccgtcatcgattgggcctccgagtccaggagaagacctccgatgaagaaagagacatgctgcacatgcacgagggtacttgcagatagatgtcggctctatggacgaacactcgaccaagtcagatgaggagtatgagggcctagccatgcgagacatgatggctaccggtccaacaatgagcagcaagctgtgagttaaagatgaactcacctgtcctggagagcaacatccataggagtgaggcaaaatggcgggtaccaccacaacatggacccgttcctgaagatgtccaaggaggtggtagccgacaccataatgtcttgcgcgtcattgtgtcaccggccggcaacacgctgcgctggtaccggcgggtgttatgtttcttaggcgtatgtttctgtgctttgagctgtgctatagactggttgtgccaactactgattttaaaagaaaaaggtgagctgaaaatcattgttgaaaacaaacatgtaacggttcgttctcatcagttgtgccaactaccaatcatttcattgatcagaatctgtcgttgctcatgagaaccaaaagtaagacacttcttaataacattggatgcaaatttctgctagcttatcttcact

SEQ ID NO: 21053 - DNA, 3348 bp, Zea Mays
caagattgtagcgttagtatggactatatgttagtgtgaaatacatccgacgtggttttatgataatttcttgttaaaagtcacagaaaagttaaaaaagtcagtggagaaaagaagaaaatgatttagcggcagggcagctggtgatcagatctccaccgtcctcgacttgtcgtcgtcgccccctctctcgatctctcaaattgacaaaatattgaactcctttccagcctctcctctccccaatcaccgacaccgcgcgcgagatcgcaagcgtccacaccgtgaccaccggcgccgctgcggcgtccggagcaggcggcgagcgtcgtccacagggtaggctcggctcgctgaggcggacgagatgagcgggcacgactccaagtacttctctaccaccaagaagggggagatccccgagctcaaggaggagctcaactcccagtataaggacaagagaaaagatgctgtcaagaaagtgattgctgctatgactgtaggaaaggatgtctcatcattgttcactgatgttgtgaactgcatgcagactgagaacttggagctcaagaaactagattcacaagacccaaacccattgattcgtgctttggctgttaggacaatgggttgtatccgcgtggacaaaatcacagagtatctctgtgatccacttcaaagatgcctcaaggatgacgatccgtatgtacggaagactgcagctatttgcgttgctaaactttatgatataaacgctgagctagtagaggacagaggatttctggaggcccttaaggacttaatatctgacaataatcctatggttgttgcaaatgctgttgctgctctggcagagattcaagatagtagtgttcagccaatctttgaaatcaccagccatacactgtcaaagcttctgacagctttgaatgaatgcacagagtggggccaagttttcattttggattctttgtcaagatataaagcagcagatgccagggaagctgaaaacatagtggaacgagttacaccccgtctccaacatgcaaattgtgcggttgttctttctgctgtcaagataatccttctacaaatggagctcattacgagcacggatgtagtcaggaatctctgcaagaaaatggctccccctcttgttactcttttgtcagcagagcctgaaattcagtatgtagccttgaggaacattaatctgatagttcaaaagaggcctacaatactcgctcatgagattaaggttttcttttgcaagtacaatgaccctatatatgttaagatggaaaagctggagattatgataaagcttgcctcagatcgaaatatagatcaggtgctcttggaattcaaggagtatgccacagaggttgatgttgattttgtgcggaaagctgttcgtgcgattgggagatgtgcaattaaattggagagagctgctgaaaggtgcatcagcgttttgctcgagctgattaagataaaagttaattatgttgttcaggaagctataattgttatcaaagacatcttcagacgctaccctaatacgtatgagtctatcattgctacactttgtgaaagtctggacactttagatgaaccagaggctaaggcatccatgatttggataattggagaatatgctgaaagaattgacaatgcagatgaacttcttgagagcttcttggaaacattccctgaagaaccagcattagttcaactgcagctgctaaccgctactgttaaattgtttcttaagaagccaacagaggggccacaacagatgattcaggctgttctcaataatgcaacagttgaaacagataatcctgatttgagggacagagcttacatatattggcgacttctgtctactgatcctgaggctgcgaaagatgttgttttggcggagaaacctgtgatcagtgatgactccaaccagcttgactcatcacttcttgatgagctgctagcaaacatttctaccctttcatcagtttatcataagcccccagaatcatttgtcagccgtgttaaggctgctcctagggccgatgatgaagagtttgctgatacagctgaaacagggtactcggagtccccatcccagggtgttgatggggcatcaccttcatctagtgctggtacttcttctaatgtacccgtgaagcagctggcggttgcatccccacctgcaatgccagaccttttaggtgatttgatgggtatagataatgctattgttcctgttgatgaacctgcagcaccttccggccctccactacctgtcttactgccttcgactacaggtcaaggactgcaaattagtgcacaactaacacggcgtgatggccagatatactatgacatatcttttgagaatggcacccaaggtgtcctagatggatttatgattcagtttaacaagaacacatttggtcttgctgctggtgaagcacttcaggttactccactgcaaccaggccaatcaacaaggacacttttacaaatgaccccgttccagaatatcagccctggtgcaccaaactcgctactacaggttgctgtgaaaaataatcagcagccagtgtggtacttcaatgacaaaattccgctgcatgttttctttggtgaagatggaaaaatggaacgagctggttttcttgaggcctggaaatctttgcctgatgacaatgaatttacaaaagaattcccgggctctgtcatcagcagcatagatgctactgttgagcgcctcgtagcatcaaatgtgttcttcatagccaagcggaaaaatgcgaacatggatgttctgtatctctccgcgaagatgccccgtggaatccccttccttatagaggttacagccgtggttggtgttcctggtgtgaagtgtgcagtcaaaacaccaaatagggagatggttcctctcttctttgaagctatggaggctctcaccaagtgacgacaaacttaatggatctggatcggtggttctacaaaaaaaataccagtcgatgagctgctataggtgtttggacgtggcattttatttttcacggaagctggtgtgaattgtagtttttttggtattagattacagtatttaaactgctagtttcctggttccaaagttttttcaccagaaatactggaggtgttcatgccttgcatgatttgtacatcttaccatgttgtatgaagcgatgaaattgtaggtgacgaaaaagtagaataagcatagattaactggtacgattgtggattgttattaatttccctgcaacccaatcactattttaatggtgatgtatctatatttttcaaatggac

SEQ ID NO: 21054 - DNA, 243 bp, Zea Mays
cgggaatgggacaggggaaaagggggttttggcgagggcggggcacgaaccagcagcgggtggaggattaaccccgctggcggactggctcctcgtccgccgcattactaggtgcttggagctcgttccctccctgtgattgttggaggggacgaagaagccgaaggaagcaaaagaaaaaggcgggttaggtttttagagcgacggccgacggagccggcgagccgcggcgggtgcgtcggg

SEQ ID NO: 21055 - DNA, 3775 bp, Zea Mays
gttgctgttcccctgcgaggcccgcgtctccccttcgtctcaacacccaccgcctcctcgccggagccagtaagcttccggcgaagaaatccggcgggcacatcacaagggggccgagcagggggacctaggcgagcgccggaatgggggccagcgcccgggggctcgccgtcgtcgtggctctagggttagataggtgtccgtagcttttttcttcgctcgccctcccccacgcggccagggtgtgcagccccggcgtcgcattgggtcccgggacgaccgtaaggccgcgtgatccacccgtgctcgagctcggacagggtcccggttgcgtggcatgggggcatctcttccgcctgctcccgctgcctgcgagtttggcaccgtttttgagctctgaagaggaggaggtggtggcagcaggcaccgatctggatgccatttcaagtcatggatccgaggcaccacctctcccagttcaccaatacaaccgtagctgcgtcctccttctctgaggagcagcttcgccttcccacagagaggctggtgggtttttggaagcaggagtcgttgcatcacattgtgggactgagatcaaatgatgtgcttctacatcaaccacttgaaaaggttgaaccaactcatgtagatgatgagccctttgagttaacagaggaaatcgaggctcaaataataggaaacatacttcctgatgatgatgatctactatcaggtgttgatgttgggtacacagcccatgctagcaatggtgatgatgttgatgatgatatattttacactggaggtgggatggaactggagaccgttgaaaataaaaaaagtacagaacctaacagtggagctaatgatggtcttgggtcgctaaatggcacaatgaatggtcaacatccatatggggaacacccttcaagaactcttttcgtccagaacattaatagcaatgttgaggattctgaattaaaggtcctatttgagcattatggagaaatcagcaacctttacactgcctgcaaacatcgcggttttgtaatgatatcttactatgacataaggtcatcatggaatgccatgagggcacttcaaaacaagccactaagacatagaaaacttgacatacattactccattccgaaggataatccttcggggaaggatattaaccaggggatgcttgttgtatttaatgttgacccgtctgtaacaaacaatgatatccataagatatttagtgactatggtgaaataaaagagattcgtgatgcaccgcaaaagggccatcacaaagttatagaattttacgatgtcagagcagctgaaggtgcagttcgtgctttaaacaggagtgatcttgctggcaagaaaataaatttggggactgttggtctgagtggtgttagacgattaacacagcacatgtccaaagagtcggggcaagaagaatttggtgtatgcaaactgggcagtctaagcacaaatagccctccattgccttcattggccatgacatcttctggccgtgaaaatgggagtattcatggtttgcattctggactgctcacatcaatgagcccgttcagagaggcttcttttccgggcctatcatctaccataccacagagcctgtcctctcccattggaattgcatctgctacaactcatagtaatcaggctccccttggtgagctcagccactcacttagtcggatgaatgggcatatgaattatggttttcaaggcttgggtgctcttcatccccattctcttcctgaagttcacgatggagcaaataatggcaccccgtacaatctaaacaccatggtaccaattggtgtgaatagcaactcaagaacagccgaagcagttgactgcagacatcttcataaagtgggttctagcaacctcaatggacattcatttgatcgtgtcggtgaaggagctatgggattttcaagaagtggaagtggtcctgtccatggtcaccagctaatgtggaataattcaaataacttacaacgtcatcccaattcccctgtgctgtggcaaaatccaggatcatttgtaaataatgtaccgtctcgctccccagcacaaatgcatggagttccaagagcaccatcacacatgattgagaatgtccttccaatgcatcatcatcatgtgggctctgcgccagcaatcaatccatcactttgggacaggcggcatggctatgcaggggaattgacagaagcatcaagttttcatcttggcagtgttgggagcttgggatttcctggtagccctcagcttcatggcctggagctaaataacatattttctcacactggtgggaatcgcatggatccaaccgtgtcttcggctcagatcagcgcaccatctcctcaacagagaggtcctatgttccatggaaggaatcctatggttccccttccatcatttgattcacctggtgagcggataagaagcatgagaaatgactcaggtgctaaccagtctgataataaacggcagtacgagcttgatgttgaccgcataatgcgaggggtagactcacgaactacactgatgataaagaatatcccaaataagtatacctccaagatgctcttggctgctattgatgaaagtcataagggcacttatgactttatttacttgccaattgattttaagaataaatgtaatgttggctatgctttcatcaacatgaccaatgctcagcatatcattccattttatcagacttttaatggtaaaaagtgggagaagtttaacagtgagaaggtggcatcacttgcttatgctagaatccaagggaaaacagctctgattgctcatttccagaactctagtttgatgaatgaggacaaacgttgccgccccatactcttccactcagatggtcctaatgcaggagatcaggaacctttccctatgggtacaaacatccgagccaggtctgggagatcccggacttcctctggtgaagaaaatcaccatgatatccagacagtcttgaccaacggtgacacttcttccaatggagctgacacttcaggtcccaccaaggacactgagtagctgaactgcagcttgctgcgttgctgaccacaaaggcccaaactataactttttgcaaacccattttcagttctttcccccctttcccattttggttctgttttgtaaagtctcccgatctgtatttattgacttccacgatgcgggtcaccgaagacttaggttgctgcaaaattttgtccctgacgggaagctatatgcaagagggtggtactggctatgtgcttgttaacctgaaggccgagaaaggtgaaaagcgcagggagagcctccagattttggtcgctgtaagaattaaccccatgttgtacagcaggtcccagtaacttgtagtgatgggagagtggagtcattttcatcagtttttagtggtggttgtgtggagaggaagagtcttgcctgcgttttcttttggaaccttctcttgtgcctttacatttttttagtcgagggttcctcttaaattgtgtgcagagggggctcaattttgttaaccggaacaaggcgcatgtgcgtcttggatcaaccccggtcttgtcttcaggcactgttaccttatttatcaaacatatgtacacctccatctatatatagtatgagttttgatgcctatctattttgtggctgtcgtctcacaaggttatttatctatatatagtgtgagtaattcttg

SEQ ID NO: 21056 - DNA, 661 bp, Zea Mays
caatatctagctcatcaagattaatagttaaacttcgtggaagctctccagattgcacccattgtggcgaaaactccgttttcacagaagaagactttcagaagtttgactatgagagcttcacacagtcaccaatgtctgataaggcagcaccaagcgtgaacgtactcccagagagcgcgcggatcacttgcagagagtacaagaaactggccgacgatggtgaacctcatctactgttggacgtacggcctgcgcatcacttccagatagcttcgatctctccgtcccacaacatcccgctctccatgctggaagagaagctgcccgcgctcgaagcctcgctgaaggaagcaggagaggggtcagccttggttgtcctgtgtaggagaggtaatgactctcagagagccgtccagcttctccgcgagaagggattcgcctccgcgaaggatatcatcggtgggctgcaggcatggggacgagacgtcgatcctgatttccctgtgtactagcgagatggaaatagatgcactacaccttgtaacagtttgaatgccgccagagattctggtggtgttgcaagaacgagaactctggtactatgatttgggtactaattttgccataccgtgtacttgcaaatatatatatatatata

SEQ ID NO: 21057 - DNA, 3040 bp, Zea Mays
gtagtctttaattttatatatatgatcgagctgcagatgagaagctgcacgcgatgccccagcaagcagtattagttgggttgacggcgggcatggtggcggcggaggggaaggcagctgggaacaagacgatgatgcagaagcagcaggcgagcagctgctgctcggaccgtgaccaggacatggcggacctggagctggcgcttgaggcggttgttccggtgagcgtgcagcggcaggactcgctgtacagggacgcgacgagggcgggcggcggcgggcagcagcagcacgaagggtgggctcggactctgaggctggccttccagtgcgtgggcgtcctctacggcgacatcgggacgtcgccgctgtacgtctactcgagcaccttcgccggcggcatccgggacaccgacgacctcctgggcgtgctctccctcatcatctacagcttcctcctcttcaccatcatcaagtacgtctacatcgcgctcagagcaaacgacgacggggacggcggcacgttggcgctctactcgctcatctctcgccacgccaaggtgagcctggtgcccaaccaccagcccgaggacgagctgcagacgacggacgccgccgccgccgtgctgggcaagcacgggagcgtgcggcgccggaccgtgcagctggcggcgtcgcacgggcgggagcagcgggcggtgtgggtgaaggagctgctagagacgagcaagcccgtgcgcatctccctcttcttcctgaccatcgtggccaccgccatggtcatcagcgacgcctgcctcacgcccgccatctccgtcctctccgccgtaggggggctcaaggagaaagcgccaaacctcaccacagaccagatcgtgtggatcactgtgggcatcctggtgcttctgttcgccgtgcagcgcttcggcacccacaaggtgggctacctgttcgcccccgtctcctcctgtggctgctcctcatcggcggcgtgggcgtgtacaacctgctcaggcacgacgtcaccgtcctccgcgccttcaaccccaagtacatcctggactacttccggcgcaacggcagggacgcctgggtctccctcggcggcgtcctcctctgcttcaccggcaccgaggcgctgttcgccgacctcggctacttcagcatccgctccatccagctcagcttcggcttcggcctcgtccccgccgtgctgctcgcctacatcggccaggccgccttcctccgccggtacccggagcaggtgtccaacgccttctaccagtccacgcccgagtccatcttctggcccaccttcgtgctggcgctggcggcgtcggtcatcggcagccaggccatgatctcctgcgccttcgccaccatctcccactcgcaggcgctgggctgcttcccgagggtcaaggtgctccacacgtcgcgccagtaccggggccagctctacatcccggaggtgaacttgctgctcgccctcgtcgcctgcgtcgtcacgctcgcgtccaagaccacggccgtcatcgccgaggcgcacggcatctgcgtcgtcctcgtcatgctcatcaccacgctgctgctcaccctggtcatgctcctggtgtggcgcgtcaacgccgcctgcgtcgcgctcttcttcgccgtcttcgccgccgccgagtccgtctacctctcctccgtgctctaccggttcgcgcacggcgggtacatccccgtcgccatgtccgcggtgctggtggccgtcatggtgctgtggcactacgtgcacgtgaagcggtacaagtacgagctggagcgcacggtgtcgcacgagagcgtggtgcgggacctgctgccgcgctgccgcaccgtccccggcgtcggcctcttctacacggacctggtgcagggcatcccgcccgtgttcccgcacctggtggacaagatcccgtccatccacgccgtcctgctcttcgtctccgtcaagcacctgccggtgccgcacgtggacgcaacggagcgcttcctcttcaggcaggtggcatcgtcgtcggagtcggacacagctgcaggcccacgggtgttccggtgcgtggcgcgctacggctaccgggacctgctggaggaggccagtgacttcgcgggcagcctggtggagcgcctccagtactacatccgcgacgtcaacctctacggcgtggagcaccagcagccgggcgccaaggtgagctacccgagctcgcgctgcgacagcatgatattgatggcgcggcagaggtcgtcggtcatgatgctgcggcagtcgtcggcggcatcctactactcgtcgtacgcagcggcagcggagacccagcagctgcagctggcgagggccaggtccacgtccggggcggggggcatcctcctccactcggcgtcggagagggccgagcagctggcccgcgccaggtccacgggcatcttcgcggaggagatgctgacgccggcggagtcgttctcggagctgtcgaggatggggagcatcggcggcggaggaatgcaggcggtgaagatcagcctggaggagatggcgcggatcgaggaggagcagcggtttatcgagcgggagatggaaaagggggtggtgtacatcctcggggagagcgaggtggtggcgcggccccactcgtcgctgctcaagaagctgctcgtcaactacgcctacgccttcctgcggaacaactgccggcagggggagaagatgctcgccatccccaagtcgcagctgctcaaggtcggcatgtcctacgagatctgatctgatctgattctgatggcgcgcgcgtcaccgatcgatctcccagctccatcatgccgtcgtcctcattatatatatatgacccagactccatatagtatagtacactactagtcttcagacagatttgatttcgtatgctttctctgcagtgatgctactagctacctagctagctagtacaattaattgtggcacacttgttagctgctgcagtagcataattattaagtaatttgcttctcatctact

SEQ ID NO: 21058 - DNA, 2463 bp, Zea Mays
cgctgctccccagccacaaatcgcttgcacgtggggcccaatagcacggtgtccatatctgcaactgctaactcgagcaaggtgaccacggtggcgactggcgagagagacgcgcggcttttactcgtcgcagtaatcgaatcttgtgaacacaagagctccatgtggccaccggccacggtgtggcaatggtagtttcgtcacactgactctgctccaccgctcgccgatggtactagcatggtgggaggtctagttctgtcccaggcgcagacgcaccataccgccgcgccaagaaccgccgcaccggcgccggcacaggcgttggagaagcggccgagggaccaggcccagccatgtggcacagcggcggcggccgtctcggtgcggagcttggacgaggtcaggaaggcgcacgcgcggcacatcaagctgggcctcgaccgctccccacggcacgcgcggccgctgctcgcggcgtgtgcgctctcgggctggccgggcggcatggagctcgcggcgtccatcttcgagtcgctcgtcgagccggaggccttcgattacaacaccctgatgcgcggccacgtcggtggcggccgtgaaccggcggccgcgctgcgcatgtacgttgacatgctggaggcgggcgtccggcctgacagctacacgttcccgttcgcactcaaggcgtgcgcgcagctcgcggccttgcaagaagggagacaggcgcacatcgtgaagctcgggttccagcacgacgaacacgtgcagaacagcctgatcagcttctacggcaagtgcgtcgagccggcgatggctcgtctggcgtttgaccgggtggaggcggaggagcgaacggcggcttcctggagcgcactcctcgcggcgtacacgaaagccgggctgtggggcgaatgcctcgagtcgttcggcgcgatggtgctcgatgggtggcgtcccgacgagagctccacggtcagcgcgctctcggcgtgcgcgcacctgggtgccttcgacgtcgggcggagtctccactgcgcgttgctgaggaacaccgcgaggctgaacaccatcatgcagacgtccctggtggacatgtacgccaagtgcggcagcatcgagaaggccgcggcggtgttcgacgcgatggacgacaagaacgcgtggacgtacagcgccatgctgtccggcttggcgctgcacggggacgggcggaaggccctgcaggtgttcgacgcgatggtccgggagcgccacgcgcccgacgcagccacgtacgtcggcgtgctgaacgcctgcagccgcgccgggctgctcgaggacgggctgcggtgcttcgaccgcatgcggctggagcacaacgtcgcgcccaacgcgcagtactacggctgcatggtggacctgatggcgcgcgccggaaggctggacgacgcgcgcgcgctcatcgggagcatgtccacggggccgacggacacggcctggcgaagcctgctgaacgcctgccggatccacggcgatctggatctcgccgagcgcgccctccaggagctgaggcgcctcggcgccgcgaacgccggcgactacgtcatcgtcgcggacatgcacgccagggccaaggactgggccgctgccgcccagctccggacagaggcggtggactggggcctcgcgcaatcccccggggtcagcgccgtggaggtacgcggcgagctgcaccggttcgtgtcgcaggacaggtcgcacccgcggacgagcgacatctacgagatgctccaccagatggagtggcagctgcggttcgatggctacaaacctgacacgtcggaggtggcgctggacgtgggcgaagaggagaagcggcgtgtggtcgccgcgcacagccagaagctggccatggcattcggcctgctcagcacggcggagggggcaccggtgaggatcgtgaccaacctccggatgagcaaggaatgccacgcgtacagcgcgctgatctcggaaattttcggccgggagatcgtcatcagggaccggaaccgcctccaccggttccggcgcggcgtctgcagttgcagagactactggtaacggtttcgttttgtcaacagtggtcgatggtgtaaatatcaaccgcaatttctgtctttgctgttgagtcctgatcgaaaaaaatgtctgaacgtttgctgacacttcaaaggccgaggttggtatgtttgatgtcatttgggctaagcaaacgcaggaattttacaagaacggtgtaggaatttcacgggaattagttcaaaaacacgtaaaaaatgtatgattcggattaattctatttgttccaaaggaggtctaagaattgaagacagatatagtaagcgattagcaacgtcaagagaaacttcaactacttaaatcatcaaaactaagtttgagggtttttctcttataacaaagccggttcaaatcggcgca

SEQ ID NO: 21059 - DNA, 2628 bp, Zea Mays
cccatctccatcttcctcgcagcttcgacgctccatcttccgctccctcccttacccgcggtcggcacgcaggcgacgccggcggcgctcaggctcgggctctcatctactgcgtcagcagcttcccctcccgcatctcgccagtcgcctcgcgctctcacctccggtcttccgcacactggccggtgaccctgccttataatattctgccacatcactctgggtgaagcaagattggtgctctttaaatttggaacttggaacatggagcatgtgctgattagtagaaggtttccaactgatcctgctctctaaatttggaacatggagcatgtgctgagtagtagaaggtttccaactgatcccaatgagtataagttatatgaggaaattggagatggtgttagtgccacagtataccgagctctttgtgtcccacttgacatcttggttgccatcaaagtgcttgaccttgagaaatgtaacaatgacctggatgggataagacgggaagtgcaaactatgagtttgattgatcacccaaatcttcttcgtgcatattgctcatttacaaatgggcaccagctttgggttgtcatgccttacatggctgctggatctgctctccacattatgaaaacttcttttccagaagggtttgatgagccagtcattgctactcttttgcgtgaagttttgaaagctcttgtctacctacattctcaaggacatattcacagagatgtcaaggctggaaacatcttaatagatacaaatggggctgttaagctaggagactttggtgtgtcagcctgtatgttcgatactggaaataggcaaagagcaagaaatacatttgtagggacgccttgctggatggctcctgaagtcatgcaacaactgcatggttatgattacaaagctgacatttggtcctttggaataacggcattagaactagcacatggtcatgctccattttcgaagtaccctccaatgaaggtgttgcttatgaccttgcaaaatgcaccaccaggtttagattatgagagggacaagcggttttcaaagtctttcaaggatttggttgctacatgcttagtcaaggatccacgcaagcgtccttcgtctgaaaagctgctgaagcattctttctttaagcatgctcgctcagctgaatatctggcacggagtattcttgatggcctccctccattgggtgaacgctttagggaactgaagagcaaagaggctgagttgcttctcaataacaaacttggtcaggagagcaaggagcagctatcacagaaagagtacataaggggcatcagtggctggaacttcaatctagaggacttgaaaaatgcagctgcccttacagttcaaatggcacttgttatttagatgtcagggagaacagagttaaggatgactcacaagaagcttacaatggtccagaacatatttaccaggaaaggctcaaccatgttgcttctagaaggcctgaagaggatgagatacaagaagttgaagccttgaatgatgctgtctcctcttcgttttcaagccgctcccttgaggcactaaaatcttgctttgatgtttgtggtgttgatgatccgagcccaactgctactgattcaagagcgcaaccaagtgtcggaactttacctttccagcagttgcaaaaatttgagcattgtaaaagtggcgactgcaatggtgaaagcttggaaagaagcgtttctgtacctacgaatctggtcactagtggataccacaagcattcaagtggttctcttatacctgagcaagttctttctccctacttgagcagtgatttggaaagggatggatttcgtcagaaaaacttaagcagcaggaactgtagtggccctttattgttccgccaaatgaaggattcacgcacacatcaatctgttgcgccagacgagtcgtcggaaggaaaaattatccgtcgaagggggcgcttccaggttacatcagatagtatttctgaaaaggtagctacatcatcctgcaacagcagcaggataaatctaccaattgatgcagcacgttcaagtcccaagttgtctgcaattcttccaactttgcaattcttgatgaagcagaatactatgcaaaaggaagtactcagtaggctgatttcttcaattgaggaaacatctgatgattctgaagcaaccggaagcagttcatatcagtcttctggagggcctgcccgagaaaaggaattgcatttgtatgttctccaattgcagcgaagtgtcaccgaacttgctgaggaagtgcaaagattaaagctccaaaacaataagcttgagcatcagatcaatatattgtcaagaaaagatgaaaggtcgtcaacgcaagataactgacaatgatgatatgccccttctaccacattgtaattcgattacccaattttgctttgttagaaagttatttttattccctgcagtcagagttgtatcattgtaagttgtaagtatttagcgaagtgtgaaatcatagtaattttgatctgtacagctttgtttggttaaccatgaagatatagttcttgtgttataagtaatgtgctgataatattgttttgcg

SEQ ID NO: 21060 - DNA, 4332 bp, Zea Mays
gtatgttttcagttctgttgctccggtttagagagagtctgaaggatgttggagaaagtttgcaaagatccccaaatgcttgcagatgtgtttgtgaactatgactgtgatcttgaggggccaaatctttttgaacgcacggttagtgcgctatcaagaatagcacaaggatctcaaattgctgatactaactccatcgtgtcatcccaaacagtttctgtaaaaagctcctctctccagtgtttggtgattattctgaagtcattggctgattgggagcaacttcgaagagattcctcaaagcaagggagcattgttgaatctcatgaagaggatgcttcaaggagattgacaactgatgagatgaagaaccaagaggatggtcggaatcagtttgagagagccaaagctcataagtcgacaatggaggctgcaatctctgagtttaatcgtaaaccaagtaaagggattgaatatttgttgtcaaataaattggtagaaaataaggcatcatctgtagctcagtttctcaagagcaatcccagcttggataaggttatgattggtgaatacttgggacagcatgaggagttccctcttgctgtgatgcattcctatgttgactccatgaagtttatagggttgaaatttgatgctgcaattcgtgcgttcctgaaaggatttcgccttcctggtgaggcgcagaagatagatcgcataatggaaaagtttgctgagcggtactgtgctgataatcctgagcttttcaaaaatgcagatactgcttatgttcttgcttatgctgttataatgttgaatactgatgcacataatccaatggtgtggcctaagatgtcaaaatcagattttgttcgtatgaacactgcaagtgatgcagaagaatgtgtcccaaatgagctcttggaagaaatttatgattccattgtcaaggaagagataaagatgaaagacgattctcatgatacttcaaaatccaccaagagacctgaaacagaagaaagaggccgtcttgtcaatattctcaatttagcccttccaagactgaagtcagctagtgatacaaaggcagagagtgaaaagatcatcaaacagacccaggcacttttcaagaaccagggacagaagaaaggtgtttttcatgttgcgcagcaggttgagcttgttagaccaatgcttgaagctgtaggatggcctttgcttgcaacattttctgtgaccatggaggaaggtgacagtaagcctagggttgtatcatgcatggaaggatttcgtgctggtatccatcttactcgtgttcttggaatggacaccatgcgctatgctttcttgacgtccttagtgcggtttacatttttgcacgctcccaaggagatgcgcagtaaaaatgttgaggcactgaggactcttcttggtttagctgacactgatatggatgctttacaagatacttggaatgctgttttagaatgtgtctcaagactcgagtatatcacttcgaacccttcaatttctgcaactgtaatgctgggatcaaatcaaatatcgagggattctgtagtccaatcgctgaaagagttggctggaaagcctgctgaacaaatctttgtaaacagtgtaaaactgccaagtgattcaattgttgaattcttcaccgccctatgtggtgtttctgctgaagaactaaaacaaacacctgctcgtgtctttagcttgcagaagcttgtagagataagctattataacatggctcgcattcggctggtgtgggctagaatatggtctgtgttggcccagcactttattgctgctggaagccacaatgaggagaaagttgcaatgtatgccattgattcactaagacagcttggtatgaagtacttggagcgtgctgaattaaacaatttcacatttcagagtgacatactgaaaccttttgtcattttaatgaggaatacccacaactcaaaaatccgaggtttaattgttgattgcattgttcagttgatcaagtcaaaagttggtagcataaagtcagggtggcgttgcgtattcatgatatttactgcagcagctgatgatgaggatgaatcaattgttgagagtgcttttgaaaatgtagaacaagttatcttggaacattttgaccaagttgttggtgattgcttcatggattgcgtcaactgtcttattggttttgcaaataacaagtgcactcctcggattagtttgaaggctattgctctcctgcgtatatgtgaagatcgtttggcagagggattcattccaggcggcgctattaaacctattgatgttgttccagaggccaattttgatgtgactgagcattattggtttcctatgctagctggtttgtctgatttgactttagactccagaccagaagcatgctggaagggatgggctttcttcttctggggatgattggcttcgtgatactagcattcattcgctgcagttaatctgcaaccttttcaatacattctataaggaggtatcctttatgcttccacctcttctcagtttgctgcttgaatgtgcgaaaaaaacagaccaaactgtcgtttcaatttctcttggcgctttagttcatctgattgaagttggtggtcaccagttcagtgatggtgattgggaaacattattaaagagtattagggatgcgtcatacacaactcagcctcttgaactgctcaattcattaggattccataaatcaaacaaccagcagttactttcaagagaagaaagcaatgcacatggcaatagttaccatggcagccggggggaaccctccatcgttaataatggtgagcatagtcatgcagaggcaggtccacaaactagcctggagaattcggaaggtttaccgtcaccatcagggagaacacaacctgctgtttccccacgtggccaaagctttggacaaagaattatgggcaatatgatggataatcttttggttagaagtcttacatccaaatcaaaaggtcgagtcgatgatattgctccaccctcacctgtgaaggcccctgatgatgatgagacagacaaggctgaaggggaagagagccctatgatggaaactgtccggagcaaatgtatcacacagttgctgctgctcggggcaattgacagcatacagaagaggtattggagcaggttaaaagctacacaacagatagcaataatggatatcttgctctcactgctagaatttgcttcttcgtataactcaccttcaaattttcggacgagaatgcaccatatacctctagaaagacctccactgaatcttctccgtcaagaactagttggaacaacaatttatttagatatccttcataagtcaacagtggagcaggacaaaattgactccattgaggaaacaaatggtttaaatgtggaatctggtgaccaggaaaagatcaagtacctagcagaagggaagctggtttctttttgtgggcagattttgaaagaggcgtctgttctccagcctagcactggggaggctgccagtgcagacatacatcgtgtattagacttacgggcacctgttattgtaaaggttttgaaaggaatgtgcatcatggatgctcagatcttcagaaggcacctgaaagagttctatccattaattaccaaacttatctgttgtgatcagatggatgttcgtggagcccttggtgatctctttagcaaacagcttactccactcatgccctgaagtctggcagtatttcctcccttgcatagatcttgttggaacatattcttcgtcagcatttttgtgcaaacatggagcaccggttgggtgcttgacatccttaacgcgctttctggtgcaacagctactccctaggaacttaagagcttgatcagcgggaacggcaggtccctaggccacatcttttttttttggatgacgcaagggaagtagcttgactgatgcgcacaccgtgtttttcctagcaggcttgtactttggagctatttatctgtgcccggacagggatgatgcttccattatacagtagagtagtgttggtaatatgtacacattgttgagaacgttgtacttgaggcctgttgttattatacggcaatagtagattgtttgcggcaagcctcgttttttgtgcgtctaattctctgacttgcagaattgcggtggcaaatacccattgccctccaagttgtgcgttagcgtatttatccgtagttgacagcaatgaacatattactactgctttctgtattttctattaacgcatgcacatagtttattgg

SEQ ID NO: 21061 - DNA, 2888 bp, Zea Mays
agactctccagcaagagagaacatggccgctgatttggtagaggttgttaaaaggaggactatatctgatgatattaacggcgatgaaatgccattgtcggggaaaaaacgatctgtgagggataggttaggaagtaatgtgtctgattctgatttttatggaagccagcagaggaacaaaaggcaacagacagaaattaatagctcacatggagatgatggttcaggtgatgaaaaaccttaatttcttgtcaattcactagggcttgaattgaagatatctggcactacttactctgttgcattggcgtgcaaaatatttgaagatcgcttggttggcaaggatgatctgagactgaaactcatgaggaaaggctcgtttcagaggagcaatggtggtgcagaacagaatacaatggatctccgtgaaaagctttcccgaaatcataagaagttgccaagatatgattctagaggccatgctgcagaatcaagggctagttatgatatgagagatgagccaccagagttaaggtccagatatttttcaagggaggatgtcctagggtcaaggaactcttctgttgtaagtcgagttccttattcaagaactgcggatgacttgttaaaatcgaacccttcaagaaaatcttacccctcatggacagacgatggtttgaggcacagatcacctgaaaggattttaagtgttcgtagtgatgtgtctccaccagtaggttatgatcagattaggtccatgccaccacttagatctgccggttcctcaagacctcaaagttttattacaagaggtgctcctgatacgccaaggagtcaaccatatgctggcaaagccaccatttctgttgatacagtacagagaactaatgggatcactccatctagtgcacctttgcctaaggtccctgttatggtttgtatctgtacctcctctcatataccctaattcatcgatgcttctgagaaaacatagggcattttggagcaaaattccttttcttttgtgcacaacattttcaaattctttctaaaatcacgtctgactgtttttaatgctgttggggctatgaaattggcatacagtcaacaacaataacaaagccttttagtaccaatcaagttgggttagtctagagttgaaacccccacaagtcaaggatcagacacgtggatagctgttttccatgtcaatttcagccttcccctgcttctttccacatgtccaaaccatctcaatcggtgttgaacaagcttttcttcaattggtgctacccctagcctatcatgtatatcattgttttgaattcgttctcttcttgtatggcttcaaatccaatgtaactacgcatttccacaatactttatttgttgaacatttttttgtggacaaacattttgcaccatgcaacatagtaggtctagtcgccatcttataaaacttgcattttagcttctacaagaccctcttgtcacctagaacgctagatgctcaccactttattcactccgctttgattctatggctaacatcttcatcaatatctacgcctctctgtatcattgattttaaacactgaaaagtattcattcttgggcactacttgacctaactagcatctccttcctcatgtgtagtagtgtcgaagtcacatcttatatatttagttttagttctattgagtctaagaggttgtttggcatcgctctagagcaaaactccgaaggggagctggccagagctagccaaacaatgtaactccaaacttgcaaacttcatagagttttgagagctacaatacaaacttttagagtacctcttttgctgctctaaaatccttaaaaaacaacttagatatggagtttgaaggtatttacccgccactaccactagttatgagaaagcaatctagactttggagcagaactgctccatccagagttttggagcagagatgctctagagtggagcggagtcatgccaaacaccccctaactctagggtcttttgctgcaactccaatttcctatttgctcttgcttactttcatcaactagcattacatgattacatcgtccgcaaaaagcatacaccaagagacatcctcttgtatgtcacttgtgacctcatccatcaccaaggcaaaaaggtaaggctcaatgatgacccttgatgtagtcctattctaatcggaaagtcattcatgtctacatgacttgtcccatcattgttgtacatgttcttaatgagtctaattcgtgagaactttatgtttgtccaaagtcgatcacataacattccttggtattttgtcataagctttctccaagttaatgaaaaccatgtgtagattctttttttggtccatgtaatgctccattacttgtcttattaagaaaatggcttacatggttgacctttcgtgcatgaaaccaatttggttcatagagatcctcattatttctctcagatggtactcgataactctctcccattgcttcatgtaatcttttaacatttgttaagtttgctcattgttatctaagaatctaggttccacatctgaattataataacttctgcagtcttagaattttattagttatatatggttatgaattcctataccggtgttcatagaatcatacttgaagtttaataacattgctctatgcaactttgcaggctgaagccccgcttacagttactggattgttgaattcgttgggtcttgagaagtatattgttctctttcaggctgaggaggtggatatggctgcattgaggcaaatgggggagagtgacctcaaagacatgggggtacctatgggacggagccggagccagaaaaaagtttaggaaggactga

SEQ ID NO: 21062 - DNA, 1369 bp, Zea Mays
ccgtggaaccgtgaaaactagtactttatagtagtgatgatgaaatgatattgttttcatcggtttttatttcatcaattaaaatggtgacatgagtatatttttgaaaaaacgaattaaaaataaaatttaatccgtcaagggaagatggactcacgctcaatgggctgaatttgggctttcccgtagaaaactcagtccacgcttttgggctttccctttgcccctactcgtcttccccaccgaagcagggtgatgcggagggcgtcgccttcgctgtctccggcgaggggcccggcggtcttcgccgccgcggtcgtggtgtttctgccggtcttattccccgggttgttctcccctcttggccacgctttcccttctgtcttctcggagtggaatgcccctaagccaatgcatccttctcttttgaatgaggccttgcgatggacagctacagacggacaaaagaaagatctatggtcacccttgccatatcaggggtggaaaccatgcttaacgccatcagtttctcacaaattacctctggaaccaagtggatacatccaagtatttcttgatggtggattgaaccaacaaagaatggggatatgtgatgccattgcagttgcaaagattcttaatgctactcttgtgatcccacatcttgaagtaaaccctgtttggaaggattcaagctcatttgaagaaatttttgatgtggatcactttatcaactccctaaaagatgaagtttccattatcaaagtgcttccaaaagaattttcttggagcacaagagagtactatggcacaggcatccgtgctacaagaataaaaactgcacctcttcatgcctcagcaaattggtatttggagaatgtcagtcctatcctgcaaagctatgggattgttgcgatcgctcccttttctcaccgccttgcatttgatgatttgcctgtggatcttcaacgcttgcgttgtaaagttaacttccaagctctggtcttccgttctcacattatctcacttggagaaacacttgtgaagcgcttgaggtctccggtccgggttcattccagtaaatctatccatcaagttgtaggagacacaaatcaagctgaaaaatatgcagttttgcatctccgttttgataaggatatggctgcacattctgcatgtgactttggaggtggcagagctgaacagctagctcttgctaagtacaggcaagttatatggcaaggaagggtattaaattcacagctaactgatgaggagcttcggaacacaggacgctgcccattgaccccagaagagattgggctgttactggggaaatcaggaagttttaagagcatctccaccagat

SEQ ID NO: 21063 - DNA, 3063 bp, Zea Mays
cctggccgcctccctgcctcctcgccgccgccaccgcttgtagcctccgctacgtagaccacgatctatggggtccgagaagggtggagccaaggttattggcggcggtggaggaggaggcgggatcttcaacctatttgattggaagcgaaagtcacgcaagaagctgttctccaactcgccagaggcgtctaagcttgtcaagaggagcgaagaaaccttgctgtcagtgcgtctccacttgggtgatgaagatgaggggattggtgtatcaagcttcaagggaagcagcgactacagctgtgcgtcttcagtgaccgatgaggaagggcgtgagatgaaggcgccaggtgttgtggccaggctcatgggcctggacgccatgcccaccttgggtgttccagaaccgtactgcacaccgttccgagacacaatatcattcagggacagccacagcctcaagaggagccctgagtactcaacgaatgaccaattcggtcatgttcctcgaagagttgatggatatatcaggaagccattggatttcagagcaccaaagatgccaagcagcccgattgaaaggttccagatggaagcattgccaccaaggtccgcaaagcctctaccaatgtctcaccatagattgttgtcccccatcaagaatccaggtttcacttcagcgaggaatgctgtccagatcatggaggaagcagccaagattcttcagccaagggcacaaacaagctctagggagaaagtatgttcttttagcccggcgcggattcctttgagagtttcggagccaagagagaacatccctttttctcagagggctgtgcctctgaaaccgcaatcatccaggactgctcctgagctgccaaatgtgagaatctctagagcacagcagatgaaccgaagctggaatagtgaggaggatattgtcatattcagaccatcggttgattcttatgagattaataatcctagttgttctaagaacaacaagggaaagtctgtttcattggcagtccaggcaaagaacaacgtccagaagagggaaggcgcaactggttctgggaggaattcacgagtacaaaaagaacatgatgagaaaagggtaaaccaaccatttaggagtcagtctaatctccagagaaacaagcagcaaaagaagccatcatcatctggcacttcttcccctgttctttggcaaaataatcagaaacagaattctttggtgaccaaaggcaaggtggcactaaacaaaaccgtctcaacacagcaaggcagaaaggtgatggccggagattcatcttctgggaagatcaagagtggaagcaagaactctaaagttggcagaaaagacattgtggaaagcattagtggtgatagagaaggatcatcgtcgaacaacaaggacttcccgcagaagaaacggttgatagagagaaactccaccaacgagaagggtacatttgtgcctgaaaacccagtgggtaaacttctgaagcaggttcaacctaatgttgttatggacgagcacattaaatggaacaaggaatgtaaagataccacagatgttgtgtcatttaccttcacctcacccttggtcaaaccatcggcaggaccgtccagactggcgggtaagtgggatacaagaagcaatcttgatatggacgcaggatgtgataaagatgattcagataacaaggctcaagggttgtcatcagtggggctgaactttgtaaatggtgatgcattgagccttcttctagaaaagaagctgaaggagctaacatcaaaaattgatccatcaatcacctttacgaggggtgacacatttgcgcctgctacttttaccttggaggaaccaccaacctcttcatgcagtaattggggctcagaaagtggagcatttgactgtagcccttctgaactaaaaccttctcagtatgattattgcccttcagcccagtcatctacaaaaggccaaaattttcgaggcagtaaaataaaggtggaagaacaagaagaatgcagcagcataagcaatgcaaggaaggaacaggaaaatgaagatctaagtcccctatctgtgcttgaacccaccacctctctaagcgagagttgctggtcttctgagtgttcggacagcagcggtgggggtaaggtttatccatcactttttgatgttaaaaatggtcaggggaatttcttgattaacccagcatcagttgatatcgaggcaaagacaacagactcagcctcttcggcatcagcagatacatcggatgtttcagatatcacccaatgctctaaaagatcaagacacacagagctggagtacatcgcagatgtgctaagcagtgtgaacttgacaacagatgaactgggatcactcttcgtcaatcaggatagatcagctctgcaccccctcctcttcgagaaactggagaatacgcatgcgtacacacaagggaaagagcccttttgccatcgagggtacaggcggctgttgttcgactgcgtgaatgagtgcctggagacaagacgcacgacctacttccgggcaggatatgcggcatggagcaaaggagcagcgacgctgggcatggaggaggcccaagtctgcagtgaggtaaccagctggaagcgcatgggagactggacggaggacgagctcgtcgacaaggacatgagcggcgggctgggcacatgggtcgatttccgggtggaggagttcgaggccggtgaggaggtggagaaccacgtactgagctcactgctcgatgaggtggtgggcgacatggtcgcgagacggcggcggccaggagtatttgtgatttgagaatgggccctgtaattttgtttcgttttgctgttacatatctccccaatttattttgtcaccccagaagtgtgctgttcaaatcagtgataaatgttcatcgatcgttttcagctcggctactgaatgccctgcttgacacggtttctgaagtctttttacctctgtgataggcaaaacaactctggccatttctactcgtaattcgatccaaa

SEQ ID NO: 21064 - DNA, 1567 bp, Zea Mays
ctcggctacttaatctcgctggcaggacgacgttggaaacttctgtcaaggactaccagaatttcaatttccgacaaccttattctcaagcttcatactatgtctctctgatattggaagataaaaaatggcctgtcgctgagaaacttgaagctctttctaagcttgaatcagatttttttgcaaagtttgtaccacacctactatcgaagacatttttggaatgttatgttcaagggaacattgaaccaagtgaagcaaaatctgtcgtacaagagatcgaaaacactatatttaatgcccccaattctttgttcaaatccatgtctccatcagagtatctgactaaaagagttgtcatgcttgaaaatgagttaaaatgctactaccaaactgagggattaaaccagaagaatcagaattcatcagttatccaatatattcaggtacatcaggatgacgccattttgaatatcaaacttgagctgttctctctaatagcaagccagccagccttcaaccagctgcgaactgttgaacagcttgggtatataacaagtctttctctgagatccgactatggagtcctggcactccaggtggttatacagtccacagtaaaggatccttcgtatcttgatggtagagttgatgaattcttcaagatgtttgaaagcaaaatctatgaactctccgacaaggacttcaagagaaatgtgaaatcactaattgattctaaactggagaagtttaaaaacttatgggaggaatcagatttctactggggagagattcaggcaggaactctgaagtttgatagggtcgagtctgaggtcactatgctaagagagctcaagaaagaagaattcatagagtacttcgaccagtacataaaagtggacgcgcctcaaaggaggacactaagcgtgcaagtcttcggcggcaaccattcggcagaattcaagacggcgatcgccgaagccgatccgcccaaaatgtacagaattacagacatattcggcttcaaacgatcgaggccgctgtacagctcactcaagggaggtccgggcaggatcaccatggactgacagccatcacgcagctattccctagttttcatgtacgtacgtagtgtaacggcctgttcatacgcctgaattccatcctgaatcctgcatcagattcgattgcacgattgatgctattcttaactgatggtttgttatgttaaccaataatgcacgacagcgtgtcactttctgggcagatatagggggctgtataaataaagtcatgtatgttcgcatgtctgtatgcatttcttctgacagctatgcattatgtacagttacagttacagttacatatccagtgcactaagaactagaaggcgccatgaggagcggagagaccaacacaaacagcatcttctacacaccataccaatatacagtttgggactgacagcccgtgccggacgccgtccggagaaccgtcaaggcgccgccatccgcgcgtgcatcgccggcccggcttcagcacgccccggtgtgttcgcgaacggccg

SEQ ID NO: 21065 - DNA, 2908 bp, Zea Mays
acgggtcgcggctagccggctagagtctcttttccaagcccactcttttttctcctctccacttcgttacgcggacagtgggaggagccacagccattataatagcacgccatacgccaaaagctccactggagccgagcagctactcctcccagtcccaggctcactgtcgctcctcccaagaacccgcccaaagaatcctagaaatccaagaaagggagcaaccaaaacaggaggaggtctgcaggaggaggagcaggtcagcaggaggaggtggtgctgaaggggaagatctcacaagtgtgtgaagaccacacagtctcgcgcactcgcaaacccagtgcgcgctgcggtcttcctcttcgcccaccttcttggagcggggaggttggccatgaggaggtggtggccggctgccctgctgggctgcgcagtggcggtgtccgttctggtggccgccgtggaatgcgctgtgacttacgacaagaaggcggtgctgattgatgggcagaggcggattctcttctccggatccatacactaccccaggagcacccctgatatgtgggaagggctgattcagaaagctaaagacggaggcttggatgtcattcagacctatgtcttttggaacggacatgagcctacgcctggaaattactatttcgaggagaggtacgatttagtcaggttcataaagacggtccagaaggctggcctgtttgtacatctccgcatcggtccctacatttgtggcgagtggaacttcggcggcttcccagtttggttgaagtatgtaccgggcatcagcttcaggacagacaacgaacctttcaagacggccatgcagggtttcactgagaaaattgtgggaatgatgaagagcgaaaacctctttgcatcccaaggtggcccaattatcctctctcagattgagaatgagtatgggccagaaggcagggagtttggtgccgcaggtcaggcatatatcaactgggcagcaaagatggcagtcggattgggtactggtgtgccgtgggtgatgtgcaaggaggaggatgcacctgatccagtgatcaatgcatgcaatggtttctactgtgatgcattttctcctaacaaaccttacaagcccacaatgtggactgaagcttggagtggctggttcacggaatttggtgggaccatccgccaacgaccggttgaagatcttgcatttgctgttgctagatttgtacaaaagggtggttcttttatcaattactacatgtatcatggaggaacaaattttgggcgcactgctgggggtcccttcatcacaacaagctatgattatgatgctccaattgatgaatatggacttgttagagaaccaaagcacagtcatcttaaagaactccacagagctgttaagttatgcgagcaggctttggtttctgttgacccagcaattactacccttggtaccatgcaagaggcccgcgtcttccaatctccatctggttgtgcagctttccttgcaaactacaattctaactcctatgcgaaagttgtgttcaacaatgagcaatacagcctaccaccttggtcgattagcatccttcctgattgcaaaaatgttgtttttaacagtgccacagttggtgttcagacatctcagatgcaaatgtggggagatggtgcctcatcaatgacgtgggagaggtatgatgaggaggttgattctctggcagctgctccattgctcaccacaactggtttgcttgagcagcttaatgtcacgagagacagcagtgattatttgtggtacatcaccaggtggcggcaagcctctgtctctcagtgtgcagtctgctggtcatgccttgcatgtctttgtcaatggacaacttcaaggttctgcttatggtaccagggaagatcgaagaatcaaatataatggcaatgctagccttcgagctggtactaacaaaattgcactgctgagtgttgcctgtggattgccgaatgttggagtgcattatgagacgtggaacactggtgttggtggtcctgttgtgcttcatgggctggatgaaggttcacgagaccttacttggcagacttggtcctatcaggttggcctgaaaggcgaacagatgaatctgaactccatagaaggctcaagctcagttgaatggatgcaagggtcattgatagctcaaaaccagcagccattggcctggtatagggcttactttgagactcccagcggggacgagccattggctttggatatgggtagcatgggcaagggccaaatctggataaatggacaaagcattggacgctactggacagcatatgcagatggggactgcaaagaatgcagttacacgggaaccttccgggcacccaaatgtcaatcaggctgtggtcagcccacgcaacgatggtatcatgtgccaaagtcctggctgcagcccaccagaaacctgctggtagtcttcgaggaacttggtggggattcatcgaagatcgccctagtgaagaggtcagtctcaagtgtctgtgctgatgtatctgaggatcacccaaacatcaagaactggcagatcgaaagctacggcgagcgcgagtaccacagggcccaaagtgcacttaagatgtgcacgtgggcagtccatttccgcaatcaaattcgcaagctttgggacacctacgggaacctgtggagatttccagcaaggagattgccactcagctaactctcacacagtcctagagaagaaatgcattgggctccaaagatgcgtcgtcgccatctcccccgagagctttggaggagacccctgcccgagcgtgacgaaaagggtggcggtccaggcagtatgttctcccgtcgcgtagccttacttctccaagcaat

SEQ ID NO: 21066 - DNA, 3225 bp, Zea Mays
tcatcgttgatatgagggcggtagtgggaaaaagctgaaaaaaagaaggctagcgagtttgaaaaaggtcttttcccctgaatggtgatgtggaggtcattctcttcaattcaaatggtccccccccgcagagcaagatgaggaaatgttcaaaatactcttaagccgtgtagcacgacaagtttgttgcagaggacaagcgacgactgggttttcttggcactttgtcaagtccgtgagtagaagtttggtgtaagcttgtcttcgaacaagatgatgcagaggccaccgctccgtccggaggagtactccttgaaggaaaccacacctcaccttggtggtgcagctgctggtgacaagctcacaaccacatatgacctggttgagcagatgcagtacctttatgtaagagtggtaaaagcaaaggaacttccgaacaaggacatcactgggagttgtgatccttatgttgaggtgaaactaggaaattataagggccaaactgggcatttcgagaagaagaacaacccggagtggaatcaggtctttgcctttgcaaaggagcgcatccagtcatcagttgtggagattctggtcaaggacaaggatcttgtcaaggatgacttcattggacgtgttatatttgatttgaatgaggtcccaaagagagtgccacctgatagcccattggctccacaatggtatcggttggaagaccgcaatgggcacaaggtgaagggggagttgatgctggctgtttggatgggtactcaagctgatgaagcgttccctgaagcatggcattctgatgcagcctccgtccctggtgatggccttgcaagcattaggtcgaaagtgtatctaactccaaagctttggtatctccgtgtaaatgtcattgaagcccaggatcttataccaaatgacaagactaggttccctgaagtttatgtcaaagcaatgctaggcaaccaagtccaaagaaccagggcattggcaagccggactttgaatccattgtggaatgaggacttgatgtttgttgcagctgagccatttgaagagcacctagttttgagtgtagaggacagggtggccccaggaaaggatgaagtaattggaaggacaatcattgcactgcagcatgtaccccggaggctggatcacaggttgctaaccagccagtggtataaccttgagaagcatgtgattattgatggtgagcagaagaaagagaccaagttttcaagccggatccacttgagaatatgtcttgaaggtggatatcatgtcttggatgagtcaacacattacagtagtgatttaaggccaactgcaaagcccctgtggaaacctagcattggcattcttgaactgggtatattgacagcacagggcctgttgccaatgaagaccaaggatgggcgtggcacaactgatgcatattgtgttgcaaagtacggacaaaaatgggtgcgtaccaggactataatcgacagtttcactcccaaatggaatgaacagtacacctgggaggtgtatgatccatgcactgtggtcacaattggtgtattcgacaattgccacctgaatggcggggaaaaggccaatggtgcgagggacaccagaattgggaaggtccgcatccgcctctcgacactcgaaactgatcgggtgtatacccactcataccctcttattgttctgacacctggtggtgttaagaagatgggtgaggtgcagctcgctgtccgtttcacgtgttcatcactgctgaacatgatgcatctgtactcacagcccttgctgcccaagatgcactatgtgcacccgctgtctgtgatacaggtggacaacctgaggcgccaagccacaagcattgtctccacaaggctgggccgtgcagagccaccgctgcggaaggaaatcgtggaatacatgcttgacgtggactcgcacatgtggagcatgagaaagagcaaggcaaatttcttccgtatcacgggtgtcctgagccccctgtttgccgtggcgaggtggttcgatcagatctgtcactggaagaacccgctgaccaccgtactgatccatgtactctttatgatactggttctatacccagagctgatactgcccacaatcttcctctacctgttcctgatcggggtgtggtactacaggtggcggccgaggcagccaccgcacatggacacccgcctctcccacgcagagaccgcccacccggacgagcttgacgaggagttcgacaccttccccacctcccgcccaccggacttggtgcggatgcggtatgacaagctgcgcagcgtcgccgggaggatccagaccgtggtcggcgaccttgccacgcaaggcgagcggctgcagtcgctgctgagctggagggacccaagggcgaccgcgctgttcgtggtcttctgcttcgtcgccgccatcgtcctgtatgtcactccgttccgcgtcgtggtcttcctcgcaggcctgtacgtgctgaggcaccccaggttccgccacaagatgccatctgtcccgctcaacttcttcaggcgtctgccggcgaggaccgacagcatgctgtaggcgcggcaggtgcatggccccatcgctggcgggtggtttcgcctctcagttgcagctcacagatggttgttgctctctcttaagtaagtgtatcaaaaaaaaaaaggggctgctagctatcttcgtttactttttgagcttctctgtgttgcatggttggttatgtattcatatggttgtgaacctttcctgtaacaactggacgcatgatgcgtgactgtgtctaggtatgcatgcatgtgtgtgatgcttgaaaactccgagctttagtgtttattgctttacctacttgttcagcggcagtgctgtcagctaacaaggctctctactgctgcatgtgcatcgtgtttggtttgcagctcaatttaccgacttgccagttgtaattgggaaatactgatctgaattttgcctagccgagagcccgagagttctcttctacgcagactggaactatttgggtgccaatctgagcagaggcgagctgttgtacttgtgaacttaatagtgatgtcatggttgaatttccttccaaacggagctgatgcttgtcttcaaaacgctcatggttagggatgtaataaatggcacggatattatctatttgtatttatatccgttcat

SEQ ID NO: 21067 - DNA, 2005 bp, Zea Mays
ccaaaagtcgagtaaaagatggacgagtcctactgtcaatctaacatggaattaggtaagcaatccgaattattgggcatcggttgtggacaagtcaaacagagggagggaagggcgacgaagccgcctcctcgtttgtcttggtcgtagtactcgcgccatcagcaccaacccacgccacggcacaccccaaccccaacgaacaacgagtggtacatatcagcaccgcccctgcctcgaggttgcgtgttttgttctctgtgagcgtcgtgggtgttgatggcgtcaacggcgtactcgcggccatccaagccgcctgggccggcggccggagacaggagcggaccgcggctggccaaggagctcggcaggatcgagcccaagaagctgggcatcgggctggttgccggctgctgcttcgcgctgctcacctacctctcctttgcccggctgtttgccatctactcgccggttttcgctcgtcgtccatggtgttgaagaacatgccgccagcaacgacgacggtgccgggtacagctacaggggcgctgccggtggaggagcagaaagaggttcgtgaccctgaggcggacccgcacatgccgaacttaccggaggtcacagaaaaggatcagcaggaggaggccacggcgacgaagccagaggccaagatcacctgcgacgagaacggcgtcgacgagggcttcccgtacgcacggccgccggtttgtgagctagccggcgacatccgtgtcagtcctaaggagaaaaccatgtacttcgttaacccgtccggcgccggcccgttcgactccaacggggagaagaagatccgaccgttcgcccgcaaggacgacttcctcctccccggcgtcgtggaggtcacgatcaagtccgtgtcctcggccgcagccgcgccgcggtgcacccgccggcacgacgtcccggtggtggtcttctccgtggccgggtacacggacaacttcttccacgacaacacggacgtgctgatcccgctgttcctcaccacggcgcacctgcaaggagaggtgcagctcctcgtcaccaactacaagccgtggtgggtgcgcaagttcacgcccctgctcaggaagctctccaactacgacgtcatcgacttcggcaaggacgacgaggtgcactgcttccgggcaggccacctcgggatgtaccgcgaccgcgatctcatcatctcccctcaccccacgcgcaacccgcgcaactactccatggttgactacaaccgcttcctccgccgcgccttcaacctgccgcgcgacgcgccggcggtgctcggggaggagaccagcgccaagcctcagatgctcatcatcgagcggaagggcacgcggaagctgctcaacctacccgaggtgtccgcgctgtgcgaggcgctcggcttcgcggtgaccgtggcagaggccgacgctgacgtgcgtgtgttcgcggagaaggtgaacgcggccgacgtgctcgtgcagatcgtgccgtggggcaagatggactggatggccaccaacttctacggccagccggcgcgcgacatgcgcctccggtacgtcgagtactacgtctcggaggaggagacgacgctcaaggacaagtacccaagggaccactacgtgttcaaggacccaatgcacatccacgcgcaggggtggccagcgatcgccgagatcatcatgaagcaggatgtcatggtcaacatgacaaggttcaaacccttcttgctccaggcgctcaacgagttgcaggactagctgcagctggagaagggtgattccctttgtatggctcgatacggacagttcggatagggcgataggccagcacagatgcggtacaggagggcctttcgtttgtttcccttttttatttgtcattttaaatcaactaaaattgatatttttatttgggactgtttattaacacgccgttgtgcaatttaaaacagatacaagttaggatctaattgagaaatttt

SEQ ID NO: 21068 - DNA, 440 bp, Zea Mays
atacaaagactgtctgaaatcttctagaaacgacatcgaaaggaacttcaagctgaacaagcgaaagcatctatacaaagattgtctgaaatcttctaaaaaaacctaaaccctatcgggaatggagacgctctcggcgaagcaggagggcacggtggacgtgaagctgaagccgacttctaaccaatccaactcgtaggcgggcggggagcggatgtgccaactagaagagtggtctctcttggcgcttgcttgacaaacgtgtgttattaaccgttgtatataatgttattaattaatgtcctttattccctgatgcttctgctgtggctcacattctcaactttgtatctgatgatgaaagaccagatgttttcttgcagttttcgaaaaagtcttctagagacaacttaattttgattaacaacacaacacatggc

SEQ ID NO: 21069 - DNA, 2677 bp, Zea Mays
ggactacatggagacctgaaccaattcttcttaattgcttgagtcctatttctaacaaaaacttggacttacctgatggaggcatatcagtagcggccacacaatcagcaattaaatgtgcatgtaaatcatttgagtcaactgttgattcactgctgcctcaagctcatacagatgaggttttgtttcccctcttgtccgggcaagtggaattattgcttactttggcccgaatattgtttcatcaagcaaagaacaagaaatcaagccatctctgtccagatattgtacttctaatgaaaacttcaggtgccagcacttgtttgtttgttgatctcatgccatctgctcatgctcttaagcaaccagtgaagacacttcttgttctgcttttgtcgtcatatgagttcatgtacagcaaggttgacataaaagacctaccaaatgatattaacatttttggcgaattagcccttttaagtgtgagcttgctacctatactgtgcaaattggcagagaatagggaatgctctgatcttgctgttgcatcaatggacctaatattgaagggatctgtaccttctaatttatggatgcctattctgcaaaagcattttcatctccagactatactgcataaatgccagaatggtgatttattatctactcaagttatacttaatttcctcttgaccttggggcgaacaaaggatggtgctaaagttcttcagtctgccaatatttttgcattcttaaagttacttttgagtcagttgtctctggatgactcctgtttgagaaattccttgagcgcccaagtgaaggatgtgaacctatggggcttgggtctcggtattgttgcgtccctgaaccattgtttggatgatgacatttctcataacaatgtcgtgagcaacactatcagcttcctttcaggacatgtgcctttggtgtcatcatatctgtctacacagagtgctactactcatcagagcaagaaacgggcattgtcgcagaagtcacagacatcgctttcagcccttagtcttactgagaatattctcatacttctatgcatcttggcaaaataccattttccacgggacactggaaagaaggaagtagattcagaactaagagagattattatccacctgctagcatttataagcaaaggaagtgtaaagactggcaatgcctctaaatggaactcatcgtttttctgccctgctgttatcaaagaggaagtagcgcttaatgagaaaccaccactcatttgtagcaagtatgggtggttcagatttgcagcaagttgtactttgtcaactgcaggtgtttcagtttctcccagtgcagctttatcagtggtgagacgggacaagacttcaggagattctgattctataaggcagactcgttttactgagatattagctgttcagatatacaggattgcttttcttatcatgaagtttctctgtagtcaagcaaaagaagcagtaaaaagggcagaagaactggagtttcttgacctcgcccattttcctgagcttcccatgccagatattcttcatggtttacaggatcaagtggtttgtattgtcactgaaatattcgaggcaaatgggtcaagcactctaaatcccgagacagagaaggtatgccagctcctattggtgacacttgaaacgtcactttacatggaactatgtgtatcccaatcatgtggcatcaggccagtacttggtcggcttgaagatttctgcaaaggaattaaggctatgcttcaagctatagagaagcactccagttttgaaccttttgtcaggtcgctaactgaaattacttctcttttgtatcccgggcttttgcataataaccttctcatgtgactcttgtaaattgtcactgttaaagagatgtgttgttggctaactttgaattgagccacatatggacttgcatactcagttgacgtcacccgaggaagcttcgttttcgcacgttactgtcaccaaagtaaagtgggttccagcggctacgaagcaaattcgcagagccagggcaccaaatcaaactgaaggcgacgacgcccgaggaagcttcgttttcgcatcacctttgttcggtttcacagccgaggctcccaaagtggccagagaatcttggtggacttgcctttccgggactccacactgccgaccacgcttattcacccgtgtaaattatgctgggattctcctttgctggctcgtctggccgatgtgcgtcccatcatcacagagaactagaaacaaatgatacatatgtagatgctatgcgttcttgatcaatcagacacgcatttttttttctgtagaggaatacatgttcggcgcgttgcatctttacactaccatttgtttgccttctccatcctgtttaagccctgtttcaaaacgctaccatgcaaattaaccctaagggataatttgggagccgtaaaaccggaggggattggagggtctagatttcccttagggttgatttggtgacaaagggatcacgggaggattggaagggattgagggggaaataaactaatttccctctcaatcccctccaatcctcccgagatcccgggtcaccaaatcagcccttagggtccgtttgtttccttttattttgaggaattgga

SEQ ID NO: 21070 - DNA, 830 bp, Zea Mays
gtttcctggttatttggtaaccatttgctagttagttttatcagtctgctttcgttataaggtttaaactaaggttagtagtgatgtgtaaataattgttgccctagcaacgtcactttgtggaatcagtctgttttgctttccttttaacagtggaaagctgcaaaagaggagcttcgtgatgaagaggaagatgagcctgaaactgctctagaggcattagaaaggaagcgacaaaaggaaatagaggagtggcggaaacaacagatagcttttggacatgctcaggaaaatgccaattttgttcctgttcgtggtgattggcgtgaccgtgtaaaacgcagaagggctgaagcaaaaaaggagtcaaaagatgacattgttgttgcatctttaagtagttccaaacagcataaaggatctcctgatctagcagagctttccaagggtcttcctactggttggcaggcatacttggatgagtctactaagcaggtctattatgggaacagtctcacgtctgagacgtcctgggagcggccaacaaatgaatgaagatctataaccttggtgtgcggtcaaccgaacgatacaagttgatttgttaatgtagttgatgctgttgaatgggcagcccaattttgtttggcagccaaccccatcctttagagaagaacaaaccacacctcaccaggagatggctgattgtttcattgtcttggtcacaaggcacaaaatttttgatgggataggttttgcttggctaacctatctgcagtacaacatctcttattaatcactaactagatgaaggcacatttcggtcatag

SEQ ID NO: 21071 - DNA, 819 bp, Zea Mays
ctctgattcccatgtatttttggttgctgacccagagttggaagctatcaggcagagacggatgcgagaactacaacacggtgcggcaaatcagcaaaatgcgggccaacaaaaggctcaggaagacgcgaaacaggaagctgaggaacgccggcagatgatgcttgctcagatattatcttctgaagcaagagaaaggctttcccgcatagctttggtcaaacctgacaaagcaagaggggtggaggatgttttgctgagagctgctcaaactggtggaatatctgagaaggtgtctgaagaaagacttatctcccttctagaacaaattaacagccacacaagcaagcaaaccaaagttacgattcagaggcgtcggaatgtccttgacgacgatgattagatgcaacctgcaaggctctgcttcgagtgtattattggcttgtgataaattaaaagtggtaccgaactgtttagacaatgatctcatgcgactatcagcagcaatgaaaacttggtacttggtagactatttcattggatattcggcggtatatgatccgatgtcttattttggtgtgtgtgcccccatcgaggacagtcgatattggctgtgtttatccccgaaacactgttcttccttgagtcatggcattattaatgggtgcgttttgcactcattttatttctgcctgttgagttgtttgcgccaaaatggcatgtcatgtacagtgcgctatgcatccgtcatcccattcatgcagcggaggctgcagatgtaaacagagggcgttgcagtccgcttctagatagatgcca

SEQ ID NO: 21072 - DNA, 231 bp, Zea Mays
ttttggacatttccctacatcaggataacctccacaaagttgatgggactgaaggcttgtcatgatcgtaatatcacccaccgggatatcaaacctgagaacatgatcatttgctttgaggacatcgagactggaaagtgtctaagagaggttccatctgaagcaaagcaaaataagctgaacatgcgtctgattgacttcggcagtgccattgatgattagacgttgaag

SEQ ID NO: 21073 - DNA, 555 bp, Zea Mays
aacagttagcaatcctgttgatccagttccggcgcactgtttcttatgtcacatccagcaactctgaaggatcttttcaatctctagttcgtgtcctagtctctcctctccactggtgctggcattgctgttaggagacctctggatttggggttatattttggtgggaaaccctaaatgtggatcaattgtttttttcctgtagcactatgaaggtcaagattcttcagtggcatgcagtggcttcttggacgtgggatgcacaggatgagacatgtggcatatgcaggatggcttttgatggctgctgtcctgactgtaagttccctggtgatgattgcccactcatttggggtgtctgcaaccatgcttatcatcttcactgcatactgaagtgggtcaattctcaaacatccacacccctttgccccatgtgccgtagagagtggcagtttaagggctaaggtactatggacatctagaactgcaccaagcgactctcagttctcagagaagactgatgtttttctgttgcatgggggctgttactgctta

SEQ ID NO: 21074 - DNA, 286 bp, Zea Mays
tgtcaaagctgcctgggagcaaagaaaacaggtcaatcaaggttgtttagagatgcctgccaacactgattgttctgaagatttattccaaagccatgaagcagaaatgcttgagaacgcagaattttggtcaaagtcaaactactcccctgtggagcatctggagtgccatatggaagttaacatggagctgaacgaaggagaacaaatgattgatcacacagaagctagccgatatgaattgtttagcaacgatctgcagagcaaatcaagaacttccaacttg

SEQ ID NO: 21075 - DNA, 5854 bp, Zea Mays
ctctccgcgagctacagcatacagctctgtagcgccttctctctctctcttggctcgctcgcgctgtggagctcaagaccctcgccattccgccgcgggaaaccctaaccctagccctcgcaccgctacgggaggcgcgggagagtccgggtcgcgccgcgccgccgatcccgatccagacgccgttgcgcggagccgcgctgatcgagtctctggtggaatagaggacggacactatttcagattgcttggtgctagtttatttttccaactcagggtggacttctgggtctatctttctcatcatagaagcaaacatttgtggaagctgcttatagctatatatgatatgaaagtttgggaaccatcaactgcaaattggccactctttaacgggcattagacccttagggacacttcaggaatgtcacattttcatcccacacagcatgcgggtgacaatgattttcagatgtggcagcagcagatgatgttcaagcagttgcaggagtttcagaggcagcaacaactacagcaatctgatcatggagccaggatgcagccatcttttggccagtttcatgctcctgcaaaacctttacctgctgatcaattgtcgacaatgtcaaatgaaatggccaacaatgaggccatgaattctgcatggccacataattttacaggtggtgatcccagtttgacaagcaactcccaaatgttgaataatggtagcacaaattgggatcagattgttggtgctcctggtgtaggcaatttcatgaacagttcaatgtttgcgaatgctcagaatcaatcgatgagaccaatgggaatagctacccaccaagtggatcaatctttttatccaatgcatcctaccagcagcagagggcatggaaaccagtattcccaatttttagggattcatgctgattctcagagtgcagtggcaagggttggtccagatcagtcagaaaagacatccagaccattcaactcttcaatgaatgaacatggtcttcatatgcaaggtcctgccagttcgatgcataattttcgtggaaaagggggtttcttgaataacagtctgatgcaaagtcaaggtgatagtatcagggcaggcagtccggttacagtgaatcaactacaacatggtattcaaacccaagattttcatggtaggtcaaaccaagttgaccttcaagtgggcatgcaagataaatcagcaatgcaggtagggcaagcaagtcgtggggctagccttgaccccaccgaggagaaaattttatttgggggcgatgaggatggcaactggggagctttgttgaggggcgacaatgataatggcaattctttggacaatgataattatggtggtggctactcatctctacagagtggtagctggagtgcccttatgcaggaagctctccagtctacaaccagtgaaaacagtcccaaagaagagtggagtggcttgagtttccataaaactgagcaggtgatggctaacaatgcaactttatcaggccatgatgataataagcttactaggttaagcggtgcaaacctagaaaatgcacgtccttcaccaacatccagctacgctgatggaacaatgaataacccaaatctcgccagttttcagcatgccataaggcctccattcgagcgaagggaccatatgactcatgaatctcctaatgctcctgttaacaatcatcaatcaacttctgaagtcaacaatgggtacattcaacatggcttaaaacaaattcaatctgatggaaggcaagaacaagtgcacctagcaaatggaatttggccacatcaaaagactgaactgctcagaaataattcacagtcaactggtatgcatgctacaccacctggtgcacatggattttggatttcacaacaaaatacagctgatcacaatatgaatagagagtccagtaataaccaaaatgactggaaagctaacaatgtgcttggacaagacatgcacaatagccaaaatgtcttcaatagcaatgagaactcttggaagtcaactggaggtaatgttaattcagtccagagacttcagcagaggaagtctgatgtaagcactactaatgaaagttcagatggtaaaagtattagcatgatgagctcaagcatgtcaatgatggcacaggatcattatcagatggtcactagtcggagtggcgagcaaattggcatgaaccgtaatatggcgcatagagctccagaaatctctgaatcaccaagaaaaagcacagaacaaagaccaggtgatttcaaccaggaatatctaaatgcaactcctaacgaaaggcaaacacacactttaaaccatggacaacacataagtgattctgcccccagaaggcattctatatttgctgggaaggaatccgaaaatttaggtcagtctagtcagcaagcaatgggatcttacatgttgcaaaatcgtgctatggggagctctggaatgaacattggcccatctccaggcaatccagtgtcaaataatctgtttccacctcagatgcgaaataatctgcagcatcattttggcacaaactcccttgtttccaataatatgccttcagtaagtgagaaaatgatgatggcacaggaacaacttcaatctcgacatggtctccctaatagctctagtgcattaccttttggaggagctgatactggtctgtctcagaacagagcagttcaaaacagtcaacatatgcttcagcttcttcataaggtggataactcaagaaatagcgatgtggctgctgacatacccaacaacccccttggcgttgtttctgcccagcaacaacctaaccattctttgcagggatttgggttgagactggcaccaccatcccaacgccaatcaaattcgggtaatttatggtctagtcagactaatgttgatggcaagcaatctgaccactcagcacaagatgatgaccgcacaccacaaccttccacgcctagccagtcattgactcctcagcatcaaaactctcaaccttcaccatttcacagttcagaaacagaaaataccgggcaaccaattgcacgctttccccagttaagtccaggtcaacattatcctgtcacagatgatagatctggtcctgcacccatgctgcagcagcagtctcagcaaagcaacttcgcaacagtattcaagaatgtatggacaaacatatcagcacagcgcctaggtggtatgcaagctaacaagattacacccaacatccttcagtctatgatgtttccaaataattcttcagcttccaacttatggagctctcagaaggcagatgatcaagggcagagggcatcaactccatcagatattgcaacaacttcagctaactcacagaatcaagatccaaaacgagctgctgataatgatgcagggttagcatcttcccagaaggcaaacctagagtcgaaaggaactaccgtaacaggaggaaatgaatccttgcagaagcctttttcagatgggaattccatgaatgctgtttcatcctttgcacaattgcatcagcaaggcatccttggtgctaaacatggggaaaacccaggagccaattttcaggctatgaattcttcccacaatagtgttaataatagtggtggcattgttttacatggaagcccagcaccttcaaacattcagcagcaaaattactctcttctacatcaaatgcatgccttgaggcatacggatattgatccaggcagtttagctggaaagacgacaagacctgatgttggttctgatgcttcacagattgactggaaatctggccagaggtttgctcatgtagacaataaccaaaccaaatcagctgcagataacgttggaagccctggtgtcccagggtcattcacttcagacatgaaaatactgagttttgcttcaaggagtgaggagagaaatgtcaatataccttctcatcttccatctggagagcgcccgtttcctggtatggttactgcacaaaatgataatcagaatcaagttcagcctatgggcacaagtgcaacatcaaattctgttgaaagcagtgagaggccgaggataaaccctcaaatggcaccttcgtggtttggacactacggaaactatagaaatggtcagagtgttgctgtgcttaatgctcagaagcccacggctttgccatataattttccgaaagttccttgtaacaatgaaaataataactctgctgaaaatagagttgaatctggccaatctgttacgcctgggcatcatctcccatcaacaagaatggaagctttggttccttccaatgtaaaagtatctccaatgatgagaaggcctaagaagcgtaaagctatggactctgcacttgtttcttggcataaaataattgaaagcccacaaaacttgaggagcatcagcacatctgagatggactgggcttgggcagctaatcggttaatcgagaaggatgaagcagaaacttcagacgatacttctttacattatttaccgcggaagaggctaattttgacaacccagttgattcagcaacttctcccttctataccagcaaccattctgagagctcaagctgtgtctgcttttgaaagtgcgacatacactctatcaatgctgacactaagggatgcatgcagcatggcatcatcatcattatataactcttgctcccctgtggaggatgaaaataacccatctgaacaaacaagaagtgctaagaaaatggaagacaaagtgtctaaggtcgtggaagtctttgttggaagaatccggaagatggaaaatgactttataagtttgaacaagagggcctcgatgttggatgtgcaactggagtgccaagatctggagagaatttctatcgtaaatcgtttgggaagatttcatggccggaaccatgcagcagcagtcgagagttcatctgcttcagaaatgactccccggagaatttttcctgaaagacatgtcatgtcttttgcagtccctggaaatcttcctgaaggagtacactgtttatcactctagtggaatgatcttcaattactctctagccactcagatgatctcaggttgcgccccgtgattcccagtgctccttatccatgcaaaacatggccaaacagaagagtcatattatcaagaggtaactagagaaccggaagcgtcacaataccacgatgagggcaggccaggggacgtgttccagccgatcaagtctgtgctggctgtggttgttgtcccttatatcaagtataggtccatgtatattgtggaaagtcaaggaaaaaactgtggatctcccatcatttttctctgatgaagagtaattaacttcagatttttttagagaagtcgatgcatactagcttagtacatctagcgagtttcttcgctatttgtcagtctctaagaaatccctgatgatggagtgttggcaggctagagtggagataataatgtgagcctttctctgggttctttggttcctttaggatgggatgcaaattggctagtgtgtccagtctaactgaccacccttgttaggcagcagttaattactagttttatgtagtgctgaaagcattcatggaacaagtggcgggtaaagtgcttggaaattcttgtaacttgtgtacccgtgatgtttaaagcgctaacgggctattgtaaatttaaagtgccaatattcctgaggttatattttgtttcatgcaaattggctagtgtctccagctgtgtcagtgtgttaaggtaactgaagctgagctggttgctcagcccatacaaaatgtaaca

SEQ ID NO: 21076 - DNA, 640 bp, Zea Mays
tcaattggtttgtattgcttgtatttggtcacattctgtttttgttagttacaaagaatagctataggtatggttatgcatgatgcttttggagttcggttacatgccggaaagcaggcagaggtgctgaatcaaattgtctatgagctaccagaagaacacccattatcagagacaaagccattgcgtgaaatccttggacatactgttcctcaggttgtggccggttgcatccttggagttctcatggctgccgttatgcacctgtctctcgggagttcttagtcaactgttgttcatggatgtcatgacagatgatcacctaatgtctcgctggtgatggctataaagcatgaagcatgatctccgcatggatctggttgtccaagtgtttggtagtacgaagttctaaccgatttagttctggacagtaggatataggttgtgtagcttgaatcggttactgtaaatctgaaaggttttgctttcaactccaactaccaatcacggtgtaatggaagctttgttatacaatcaacagcagtaaattcattctgaggtaacgatcggtatagttgatatatcatgccatcacatttgcttcccgttccaaattgtaagtggttctgacttttttaac

SEQ ID NO: 21077 - DNA, 134 bp, Zea Mays
agcccgcttgcctccaccttatcacgacacgtggcatgagtacggatccaaccgagggactgttcagttattctggattgcaggcctccatttctccgattgggggacttcatgcgagcgggcacggatccaac

SEQ ID NO: 21078 - DNA, 2254 bp, Zea Mays
cataagatattgccatctccacgtgacacacaggccccccgtggatgtctctagagcgggacccttcccttcgtattccagccaagcagaacgcaggaatctccttcccacggatcactctgccacgatccgcgtgctcacccgcaaaactaatccacaccgtccgtcctcctccaatccaacgcacgaaacctcatttccctcacgaagtccccgctgctgttccaaaatttcactctctctcccgcccaccacccgtcccttatttaatcaccccgcctccgcactcaatctcacaccgcaatcttcaatctccccagcaatccctagcagaagccttccatcctcactcgctcgatggcccgcacgaagcagacggcgaggaagtccaccggcggcaaggcgccgaggaagcagctggcgactaaggcggcccgcaagtctgcccctgcgaccggcggagtgaagaagccccaccgcttccgccccggcaccgtcgcgctccgggagatccgcaagtaccagaagagcacggagctgctgatccgcaagctgccgttccagcgcctggtgcgggagatcgcgcaggacttcaagaccgacctacgcttccagagctctgctgtctccgcgctgcaggaggcggctgaggcctaccttgtcgggctcttcgaggacaccaacctctgcgccatccacgccaagcgcgtcaccatcatgcccaaggacatccagcttgcccgccgcatccgcggggagagggcctaagcgtcatattttctgtcatcagtgcccgatcagaagatgtagagatatgctgggttctgtagtttgggttactgtcgaatcatcgagtgttggctgttcactgctgtaacttaattatcatgatgcatatgaaatggcaatgaactctgttatcagttctcgaattttccgtttggatcccttcttgttcctctgtgcataatcattttatatttgtggggataacgggatgaatggtgagaaggatgaatcagcgttcaggccgagcgttctttcacaagtggtcgtgtaggcgtgctgggctgtcaactgggcccactggcaggctaatcttccccttgtgaatcgtcttgtactgttctcgtgctaggcagtgggctgcgaccgaatccaacataagaggaaaggggcgtttgctttatattcgttctaacctgcgatctccgtccatccagccgagaggtcgtgtgcgcgtggatctctgcgtggaagcgatgaagattacggcgctcctggtgctgaagccgtcgacctctggagccgggagctcctcgtccggcggcgagtcgggcccggaggcggtggtgctcgcgaacgcgatagacgtcagccacttcggctacttccagcgcagcgccgcccgcgagttcatcgtcttcgttgcccgcaccgtcgctcagcgcacccagccaggccagcggcagtccgtccagcacgaagaatacaaggtccactcccacaatagaaatgggctttgtgcggttgcattcatggatgatcattatccggtacggagtgcattttctcttctgaatcagatgaaactcaacagtgggctttcctgacagacgccttgacaaaatttcaggatcctgcggaagctgacaaattaatgaaaattcagagggacttggatgaaacaaaaattatcctacataaaactattgagagtgtccttgccagaggagagagattggatagcttggttgagaaaagctctgatctgagtgctgcttctcagatgttctacaagcaggcaaagaagacaaaccaatgctgcacaatactgtaaattttggctcttcactcatggttgcaagaaacaaaaacggtcgatatcgtgctaatttatttactgtaagttaagtcgccagtgaagcgtggacacgtggttgcaaggcccgagctcagtaaaggctatactgttcttcaagacctgccagaattggactgttttcttgtgagaattccagctctccaaacaggccatggagtaccatcaacattctttagtgactatgaaacctcgtagtaccagctaacaccatttactctactactactatataaggcttgcgtcaaactgcagaaatcaccaatatggttaaattctcaaagcttgctggagcacattttgtgtccacaacacaacctatgtcacattcttactcaactctaccaagtttggcgcacgcatgtacttgtt

SEQ ID NO: 21079 - DNA, 1157 bp, Zea Mays
ccgattaattcggtacggggatgctgcaacgatcaggtccaaaaacgtggtcaccggcggcgtcgaggatcagggccaagatcctgtacgcgacatcgaagcaaggcctgcggcggctgctggacggggtccactacgaggtgcaggccaccgacccctccgagatgggcttcgacgtcatcagaggccgcgcgcaatgaggcccccgctgcgctctgctcctatttacgtacttacctgtgcgtgggcgtgttctcctactactcactgctcagtagtcagtagtcatctgcgttcgtgtgtgtgtgtgtgtgatcggccggatgctaattggcgttggtgtgctcccgtagcgatcgatgctgccaatctgacgaggcttcgcgtgtgtttgctttgctattttcggttctcgggagagatggtgcaggcgtggtgtgttgatgttgatgggtggagtagaagctcaggggagtggcagcggactaatgaaacgtccacctctgcgacgtagaattccactgaaaaaaaaatgctccagtgtaccataagctgcttcagatttgatcgtgttttctctcccatggtggcgtttctacctacatttttcttagaaaacacatttctagttactcgttcagttctgaattataaaatgttttgatttttctagatgtattgcttttgctacgtttagatatacacaatgtctagatagatagttaaagcaataaatctaagaaaaatcttataatttagaacgagacaatatgattcagagcaaagttgggttacgagagcaacatagaagaaaaaaaagtacaaagtggggaatagccatggcaattaaaatgaagttgtgtttaaaaattgcttgctccagttctcaggatctgcctagttttccggtccgttttttagaatcgttttgatgaaaatcgtccgaaatcgacataaacatgccgagtcgtagtgatagtagtaatccgtcacttttaaaacctaaaccatataaactcgtttatctttctttgcacgtaattcttacgatactcatattaataaaagtttgttagaaaaaagctaaaacaaatagtcccatattaggtactctcacactttccagtctagaccttgtactatatagttgggccaac

SEQ ID NO: 21080 - DNA, 687 bp, Zea Mays
cagaaaataactacaattaagtaaaaaatttgaaagaaaattgtcttgaaacggtagcatcaagctcactctgctgatatactgatgctaaacacagttacagttgctaaatctgttgtttttgtctagattttagaaccacagttgtatgaatgaacaacaccaaacacgacatccccaatgtttagcttgatttgcatagaatatcaaataccataccttcctagatttcttgcgatcactgctgctatgcctccgagacttcttagcatcgtctttatcatccctctcagagcttacatcatctgtgtcatggtgacgtctcttatgtttcttttctttttctttatctcttttcttatcttttgtaccatgggtgttcaaatcagcaccatcaaactccatttcatctctccttgatcgatccttccctttctccttttctctctcctcccggtggtctctttctttttctttgcgttctttctccttcctttctttctctttctctttcttcttctctttctcctcacgctctttctctctttttgcctaataagagtaaaagttcaggggtggaaaagaaaaatgaaaagaaacatctcataaaaactatagtatgcggcaaacaatgaaggtagtgttgaagataaagtgataattaattcagttggttcccataaaaac

SEQ ID NO: 21081 - DNA, 2017 bp, Zea Mays
ctgagacccacgcacgcacgcttatcggcattcggcaacccacgaaagagcacagcgaccgccgaccggtgccggagcctgccgcacaacgatccggtcgcgcccgtccgtggcccagagaagatcccaaccccgcccgtccgccgcggactcccgggcccgccgcctcgtccgttttccgaatcggccgcgcggggtaccgcggcgccgggggccgcccggagctccgtccgagtccgttgccgggagccagccagggcgcaacgcgagcgcaatggcggaggtggggagccgggtgcgcgggttcctgcggaaccggtggctggtgttcgtggcggcgatgtggatgcagtcgtgcgccggggtcggctacctcttcggcagcctctcgccggttatcaaggcctcgctcggctacaaccagcgccaggtcgccgggctcggcgtcgccaaggacctcggcgacagcgtcggcttcctcgccggcacgctctgcgccgtgctcccgctctgggccgcgctcctcgtcggcgccgcgcagaacctcgtcggctacggctgggtctggctcgccgtcacgcgccgcgtccccgtgcccccgctctgggcgtcattccagttctactcagcttcttttcggatgatgacgagactttgtatgcactattgttgccatcacctcggaaagaagaagcaagtgcatcaacatcttctgaggagcaacatgaggttatactcagcgaggtggaggatgaaaagccaaaggatgttgatttacttccagcctcagagaggcaaagaaggatagcagaattgcagacaaggttatttcaggcagctgctgttggtgctgtcagggttaagaggaggaaaggtccacggagaggagaggatttcacactgatgcaagcgctcatcaaggctgatttctggcttctatttttctcccttctgctgggctctggatctggtctcactgtgattgataatcttgggcaaatgagccagtcattgggttacgaggaaacccacatatttgtgtcaatgattagcatctggaactttcttggacgtattggtggagggtatttctcagagattattgtcaaagattacgcatatccaagggcgatcgcattagcgatagctcaagtcctgatggcgatcgggcacttcaacttcgcgatggcttggcccgggacaatgtacatcggcacgctgctcgtcggagtaggctacggcgcgcactgggccatcgtgccagccgcagcctcggagctgttcggggtgaagaacttcggagcgctgtacaacttcctcacggtcgcgaacccagcaggctccctggtcttctcgggggtcatcgcgagtggcatctacgacagtgaagcagcgaagcaggctcagcagcgccacaactccacgtcgctggcgatgagtggcagagtggctggcatggtctctggagccgctccgtcgttgaagtgcgagggcgccgtctgcttcttcctctcatcgctgatcatgtccgggttctgcatcatcgcttttggcttgagcttgatcctggtctaccgcacaaagatcgtgtacacaagtctatacgggaaaccgcgtacttgaaggatcaaccctaaagggacacagggttatcaaagcatacttcaatttttaatttattagtctggtaccccatgcctgtacaggtacagtgtcggtcttcccgttgttgtgcacaggttctcaagcagcatttcaacttttcaagtatgtggctgcaaatgggagcttcagtatagcgaagcatgtgagagtagaaagtccgtctgtggctggactgggacgctgtccttggctcaagttttgctgtatttggttgtgaaaaatttgtgtacacatgtaataagctagagacgtttcgacgcatgtcagagtggagaacatattcttttatgatttgttgaaacttgcgtatttgtatctatcacaaagaaaacagtccaacttgtcaaccggc

SEQ ID NO: 21082 - DNA, 4038 bp, Zea Mays
cacagacacactctctccctcttcctcccctcgctctcttgcagtcttgctcacacagcacatagcacacacacgacacgctgcgagaggggtaaagaacttagaagggcaggcaggagaagcgacacaggaaactgacgtcgccttcggcggcctgctacttaaataaatcccctcgcctcgcctccggctgcctcttccctttttccttccgcgcaaatcactcaggtgccagttgcgcggcggagatcgcgacgaattccggacggcagggaggtggtcgggggaactgggaagtgcatgtgagatccgatggcggcggctgcctgcgccggtgcggaagcaggacgcggatgcggagggaaggacgcgctgttcgtcgagctgtggaaggcctgcgcggggccgctgtcctgcgtgccgccgcttggggagaaggtctactacctcccgcagggccacatcgagcaggtggaggcatcgacgaaccagcttgccgagcagcagggcacgcccctctacaacctgccatggaagattccctgcaagctcatgaacatcgaactgaaggttgagccggatactgatgaggtgtacgcccagctcaccctgctccctgataagaagcaagatgagaatacatctacaacagtggaggaagaggaggtggtggtgcctcctgcgctaccagccacaaatgagggtcctcacatccattccttctgcaagacattgactgcctcagacacaagcacacatggtggtttctcagtgttgcgccggcatgcagatgagtgcctcccaccattggatatgagtcaacatcccccaaatcaagaattggtggccaaggacctgcatggggccgagtggcggttccgtcacatctttcgaggtcagccacggagacatctcctgcaaagtggttggagtgtttttgtgagcgccaagcgtcttgtcgcgggggatgccttcatatttctcagaggtgagaatggggagctccgtgttggagttcggcgtgcactgaggcaccaaaccactatcccatcttcagtcatatcaagccacaatatgcatcttggtgttcttgcaacagcatggcatgcagtgaacactgatagtatgttcactgtctactacaagccaaggactagtccagctgaatttgtggtttcgcgagataggtactatgaatcactgaaacgaaattattcaatagggatgagatttaagatgagatttgaaggtgaagaggcagcagagcaaagattcactggcacaatagttggaataggtgcttctgatccatctggttgggctgactcaaaatggcgttcccttaaggtgagatgggatgaaccttcttctatttctcgtcctgaaagagtttctccttggcaaatagaaccttctgttagcccatgtcatgtgaaccctcttccagttagattcaagaggtctcgatcaagcgttaatgctttgccatctgacgtgtctactgtaaccagagaagtcacttctaaagtcatggcagactcgcagcaaaatagtctcacaagagccttgcacaatcaaggaaggacacaattgacagttcgataccatgataacagtgatgtgaagactactcaggatcttaccgtgtggtcttcaggaactgagcaacagagaaacaatattgctgcccagacaaagctatgtctggagggttggacgccaactagaagtcctgaaggctacaatcagatattctcggcatttaaaccactgaaagatatacataacccacttggtccttttcctagtcaaatatctgggactcactcaaatagctgggacacagctgatgctcgttatccagtccaacaagctaattacagcatgttacctggcacatggtctttgaggcctcataacagtggttttaggatgaatcaacaaaattatctagtgatgcctgaaggtgcaaattttacggggaaatcagctttcacttcacttcaggaccatggcactgataaatgctccacaggctgctttggtcatattgagtcaagttcccacacagaccatgcatcctcaagtttgatcaggccccagcctttggtccttggaaatggtgttcagaaaagcaaaggcacttcatttaaattatttgggattccccttggcagcccagaaaaatctgaacctctggtatccccaccaagtgtcgcatatgacgggaaacttcaaacttctccatcagaaaaagggaatcagctagacgtagttgaagtggataattgttctcatccttctaagactgtgaagccacttgatggtcctcagtcagattctattacagagaataatcagccttctccagaagctacccttaatatccagaacaaagtgcaaagtagttccaccagaagctgcaagaaggttcatcatatgttgcacctttttccttgctagtagtcattccttgatacataaatgcttactaggcccaaaccttcaattgaatacttctcaaagtatgctccaaagaagtttatgtactcttgatcccttttggcaacttgttttatgtatctagaagcaccggtccaataaaacctgctagttgtgtaacctactaacctttcatgctaataaattacttgagtttttcttgccccttcaagtgtcgtatttggatctgtttggcatcatcaaaagagctatttatccttaagtttggctgtcaagaaagaaaaaaaaagctgtgggaatcctgtgatgagactttttaatctttaagcagtatgccttttggatatatagtctagcattatgcaaatggttattaaatacaatgtggatgacaaatgtcacgttgtcattagattggtgacatgggctttgagaaatgttagctttctaatgataacggtcaaatgttctatctaattgcatccatttttctccggttgctttttattttattttatttatttgaggggaaggataggcctgacacaatataccgagtaaaggccttgggttcgacgcagcttttctgcaaaaatgtagggatatggcgtgcctcggttattacttcatcggactccactcaagtgtgagccgcctgttcataagcaaggtagtgccctcggcaggtcgattgatctaacaaagttcgcttgctatgatgagctgattgctgaactggatcagatgtttgacttcgatggtgagctgaagagtccatgcaaaagttggttagttgtctacactgacaatgaaggcgatataatgctggttggtgatgacccctggaatgaattctgcgatatggtccacaagatcttcatctacacgagagaggaagtcgaaaggatgaacccaggtgccctgaactcaaggtctgaagatagtctatctgactcgctgggaagaggggtagcttccagagatccccgaggaggcgggtctacttcggctctcgattccgagaactgctagtttgttcagtcagtgaggcctttggaagtgaagcagacaaaaggcgtgaatcttgcggtgtagagtgtagttggtacattgtgtgtatgcctccgggtaagccctgcggtacccagtttgtgtcctggcgccagtttaccatttaagctaagtttttgggtgtgccctgtgctggggtctgggctctagttattgtagcagagcaggcaatgcatgcaagaaactgatgatgcgcctgtttggccctctttcccttcccaagccatgtaaatagccttggctctgaagcgtagtattgtattgtcgacagccgtacttgagatagtactccaagaggcgcgcttgctcctgtcagttgggtgtgcgtatgtagatgtgcgtgtgaagccatgcaagcaagggtttgtggggttgatggcttttcatggtagcggatctgctttcatggtactgacgtgcaggtggcaggctggtgttggctgctatgttttgctgcacgatattggcagaaaacagtagtactaaggggtgtttggtttctag

SEQ ID NO: 21083 - DNA, 1256 bp, Zea Mays
gttaactagcatattgttatggtcgggcagacatacaagagaagggataaggatgggggataaaaatataattaaatttgatggtgatcataattctccaagacctcaatcatattatgattcagtttctatattcttctacaaatctttgcatcctcctctgctgcctgcagcacgatcaaagcttcatatgggagcatttaaagttggtaacataaccaatgagaatttcttctttgaaatcatcaatggtctacggccagcaaacactgcaggttgcagttcatcaaccgatgcacctaacatcccacatgatggcacatctgtaattgaattgttgtctgatagcatgaaccaactgtccattaagaatgagaatcacttgctgcaggactttcttttagatgaaaaccacagcctgccagagattgatagtgatagtgttggatcacgattgcaggataaaagaagtaggcgcaatgaggagtcattttcattcacaagctctaacagagaaagttggggcagatgttcatctttaggagcagccagtgatgaatcattctcaggcgataataatgataagcagaatttgacagtcaaggctttggctacgcctgtaagacaaaaccagaggcaaagccagaggaaaccgattgagaaagctaagcagaagaagattcaagccctatggaagaagattaagcgcgaaaaggtggagatgggggacagcctatcttcgcgtttgaagatgtgcctagggcaatctccgcagcacaagaggaatagatcgtctggaaccattacaacttcatagctctgacaactctactgaaccactgattgtccaccatagattctcccttattctgacctactcattgccacgttgtaacctatataccctaggtgaatatatgctacatgaccgcattgtagcatgccaggatgttcgaaagctgagaaagcacttgtatcatctcttgtaattgcctgaaacaagtgtaattgccatctctggctcgttgtcgcatgcaatttcctttcccctcttgcatcctgtgggccttgtatcatctcctgtaattgcctgaaacaagtgtaagtgccatctctggttcgttgttgaatgtaatttctttctcttgcatcctgtagtttgcggcgctgcaacgcaacaacggcatggtgatgaaatggaatggtacaatgggtttgttgttttcatcttcaatcgccattgttcgcaattatat

SEQ ID NO: 21084 - DNA, 1126 bp, Zea Mays
tattttcatagggaagcgattgggaaaattcttgcccgtggtcatagtcgtgttcctgtatactcaagaaaccctaaaaacatcatcggtctcctattggtgaagagtcttttgactgttcgtgctgaaacggagacgccggttagtgctgtttcaattagaaggattccaagggttccttcagacatgcctttgtatgatatactcaatgagtttcagaaaggaagtagtcatatggctgctgttgtgaaggctaaacctaaaactgaaccaccgcctgacagaactgaaccaaatagggaagcagttgggccagcacaattgactgttaccttgttatctaatgctgaagaaagtgcagacaatgtggttgtggatatcgaaagaccacataacaggcagattaatgggatcccagcatctaacgcagtgcctaggtcatcagaggatattgaggatggtgaggtcgttggaatcatcacacttgaggatgtatttgaagaactcctacaggaggaaattgtggatgagactgatgaatatgttgatgtccataaaaggatccgagtagctgctgctgctgctgcatcatcggttgcaagggctccatccgttaggagattaacgggccaaaaggctgcaggagcacagaatcgccaaggacagcagcctcctggaattctcaagaaacctactgagggtgattcaaactcatcaaaacaagtgaaccttgtcgaacctcttcttgaaaagaggaggtaactctaaaaacgtagccgataaaacgcatggaatcaagccggaagagcctatggttcttgctattataacaagaggtaaatatagatgaactcgttgttgtaaattccaacaggagcttttggtgtcatggacattagtcatgaattctctctccccctctccccttctcccctctttggttatggactgcgaaagtagaatggccactcttgaatttatttatcaccgctcaccgcagtagcaactgcattatatatatgcttcaaatccctagattcctagggtttatagctatgcataaggcctagtttaggaaccctattttttccagggatttttattttctcaagaaaaaataaactaa

SEQ ID NO: 21085 - DNA, 371 bp, Zea Mays
gtaccaccctgtgccgcttggcatgacactccgagaggagggttgagggactcaacaggttaaggtaccgtctttgtagacttggctggagaaattggttgtttctatgatgaagactaagacgagtaggagcttacagaagtctgggagaggtaatcaggtccaaggagaagggccaaactgggttcttgttgctgggggttttttgcttagcgcgctttcagtcaagattgggtgcaaactaaagcagtggttcaatgggaagcagcaaaataatacttccaaagctaaaagaagacctgaagcatgcgagctgcactcagacctctaccggttcagtgaccaaactggctgttgctactctgtttctt

SEQ ID NO: 21086 - DNA, 460 bp, Zea Mays
cgcgctcgccgcgcttgaggctcgggtgcgcctccccgctcgctgccctcgtgcctctggcttctgcaccgccgtcggccagggagacacaaccgacctccctctccgccaggtggcctacgacgcccatgcgtccctggggaacccgtggccactccaggccgaccacgcgcgttctctgcactgctgccggcagcgtccaaagagaggggaaagaactgctagttcagcatttgcttgttggtgaaaaggatgtcaggcttctggttgatctcgaaaagaatatcattgcaggagacttgagtgatttagccgtggagcactccttatgtccatccaaagcaaatggtggtatgcttggtgggtttgaaggcgacagatggtacaacattaactttgtagctatgatgatgtgtttccacatgcttgcttgtgtattgttttcactgatatattaaat

SEQ ID NO: 21087 - DNA, 727 bp, Zea Mays
attaattatgaaacagcgggacccacatgttctttttttcttttggctaggcaactctgaaatgtccaatggcaatagaatatgtttgactgaaactatcatttcacttgcagataccgtgctttctttgaatgtaatgattaggcacatcgaaagacacacagcctgagcaaagctccgagagggatgcaccggctcagcagggaggtcaaaagagaccgcggaccgtcgaaggcgctggagaaggcacggcagaccttgagagcaagctggtcgagatccttgaccggaacagccggttggtggctgcacagttggaggcgcagaaccagaactgcgagcttgacagagagcagaggaaagaccaagctaacagcctagttgtcgtgctcggcaggctggccgatgcccttggcaggatcgccgataagctatagtcagtcacctaggtgtatatgttgacagaaataattacagcgggaaatgtaagtgaatgtacagattggtatagggctattggcattcgattctttttcttttttttggtattgggagcggtgttatatactagcactcaaatgatgtggggactagcagaattcagttgtgggtggattctggggctgtgttatatagggaggcgagtaattattctcagcaatgcaattgtgtatagttgagccttttgtgatgcctgtgcttgactgcatgtgcgtttgtgtgtgtg

SEQ ID NO: 21088 - DNA, 1137 bp, Zea Mays
aaaatggcgtaaaagcggcaagcctgcaactgcaacccgaaatcctgtgggtgccgtgccgcaagtccggcggggtgcggttcaccatcaacggcttccggtacttcaacctggtgctgatcacgaacgtggccggcgcgggggacgtggtgcgcgcgagcgtcaaggcggccagcaccgggtggctgcccatgtccaggaactggggccagaactggcagtccaacgccatcctcgtcggccaggcgctctccttccgcgtcaccgccagcgaccgccgcacctccacctcctggaacgccgccccgagcacctggcagttcggccagaccttcgagggcaagaacttcagggtctgatgcatgggatgggatgcgatgggatgggacttgggagaagaagccaaaactcttttctttctttctttctttcttcttatacgtaattattactactcactcctgctaccgtactactgctactggagtactaagcgcgtgttactgtgttagagggtggtgggtgttgtcaatgcctgttttaaggtcacgccttccgcccgccttaatcccaggtccaggtcctctctgaaaaaatggagtcttttcttctgaacaagatgtgtggatgggattctctagagtttgtcagggtatattgccgtctcttcggtccctagcacttctctatgcatcaagtttgtgcctttggcttgggggtgactggtgggtttctgtgtgagctgctcaagtggctgccgagctgcggctccaatttggtggcagcgcggtgagcgtagcccgcagctgctcgtcatcttctttcgtcccgtcccgtgtctctctgtctgtctccatgacaggaacacacatttgttatctatctcgttctacatcatggttcattgccagtaagaaagttagttgatgtgctcgcgtttctgccccgttccctttttgcgtgaatgctgctggcaagaaagggctccttcctccgtttgtgtgccgagatcgaagtccgtgaaagggataaagcacaaagcgaaagcgcgccgcgggaaccggggggccaagggccttccgctttgctcggttcggtcttgtctatttgcttgagttcggacgccaggggtcgcgc

SEQ ID NO: 21089 - DNA, 12379 bp, Zea Mays
gaattcgagcttgggcacgtaggcgtcgctcctgccatcgccgcagcggtcactggactctcacgccgccgccgccgccgccggagaccattagttctcctgcgcggcggctccgcggctcccgccctctcccttaccttcttcccgctagggttttctccgatccccaatcactgctggttcacaaatggcttcatctcagcatgttgagatggaggctgcgaaacttctacataaacttatccaggagtcgaaggatgagcctgctaaactagcaacaaaactttacgtgatatgtcagcatatgaaactaagtggaaaggagcaatcactgccatatcaagtcatatcaagggctatggagacagttgtgaaccaacatggaattgatatggatgcattgcgatcatcacgaattccatttgctggtggtcctcaggcaggggattctagtggtgtcatgtcaaaggacaaggaggtcattggtaaccagtctcccatggtcggaagtgatgcttcccaaagtagtggacaagctggattatggcagcttccatcaggtagggtacccacagggccaaataggggagatttctcagcagctgatattcatcaaggctccatgtcacaaaaaagcggtagatcctctggcattgaaagccctgcaagtctgcagatggaggacaccagatctatgaattcacatgattctttgaaatccgatgagaaaacaagtaagaaaacctcttccaagagaaaaaggatggattcaaaaggagctggtgatttgcgttcagaagacaactcaaagtcagatgttatctccactggacagaataccaggaaggggaaacaggttggtaaggctggtagacaaggtcagccttccatgggaattgagcatgagcagcaacctcataaactgcaaggtggtactggtcaggtaccacctatacatggtggtgcaccttttctcaggactcgctcagaaggtccttctgggaggacaatggacaagactaaaccatcaaatccattctcaatgggtcaaattccaaattttcctgaagggctggcttctactggtgctccaatcgagttgcagaaaagtatacagggtggagcaagtttatttaatcctggttttggctggaaccaaaatccacaagttcaaaccttgaagaattctcaaggttctattcataatttagtgaggtctggagttactgttgaagggaaagttaatgtaggggcacaaggagcttttaactctgcctctgcaccacagatggaatttcccacagttcctccatacaacccctcttccttcggagctagctcacagtttctggacaaaggcaaggagttggtttccagcattataagcactgaacctcattcatctaaagttgcatctcagcctgggatttctcatggaagtcccatgcaagaaaggcaaggtatgatcagggtgccacagagaggcgaggcatcatttcaggaacgcaggccatcttcacttccgagtagaagtactgggccaagtccaatgtctcacatttcttccaacacaccatttaaagaacagcagctgaagcagctcagagcacagtgcttagtatttcttgcatttaggaataatttgcagcccaggaaggtacatcttgaaattgctttgggcagagggcctcctgcagaaagtgacagtgcaggtcaaaggggcagcgagggcagagtgtctgatgctctgggaaaggaaaatggtagcagtcgggagaactctggtgtcttttgtaggcaaactgatatctctagacttccagccacatctgcaggaagtattgcagaggatgattccttatcgaaggatccagaaaatgctacaaaaaaaatcaagttagctgaacaggagaagtcattgatggaagtagaaaatgtccagcaagcttctgttatgcaaggaactagttctgaaatgcgttcccaagaaactgcatctcaaaatccatatcgaccacaacagtcatattatcaaggagatacaagaagaatcgcctcggatatccataggactgatgctgaaattttgaaccagaatttaagttggggaggccagggatctactgctttgggtggtactagacagcttctgaatcaggaaactaaagaatcacttgcaccttcaaagtcacaccatatgcctgttgatggttacaactccaatatacaaggaatagatcggactccagagatagctggagctggtaatgatgttgaaaattgtagccacgtagcagatattgtgcctgagcaggctgctgatgaaggagatgaggacctctcagagcatgaggatttattgtcatctccaaagcacacaatgacggaaaaatggatcttagattaccagaagagaatttacaatgagaaacaaaagagaacattggagcagcataaggtacacagcagaatgtcagcaacatatgaggagctaaaggagagcgttaattcatccgaagatctttctgcaaagaccaagagcgtcattgaattgaaaaagcttcagcttctgccacttcaacgtcgtgtacgcagtgaatttttgctggattttttcaagcctaatacatccgacttagagcgcataaaatcactgaagaaacataggcatgggcggcgggtgaaacagcttgaaaaaattgaacagaaaatgaaggaagaaaggcaaaagagaattcgtgagagacagaaggaattctttgctgatattgaagcttacagagagaaactcgaggataacttcaaggttaagagagagcgcttgaaggggttcaatcgatacataaaagaatttcacaaaaggaaagaaagaattcatcgggagaaactggataggatccaacgcgagaaaatcaacctgcttaagaacaatgatgttgaaggttatcttagaatggtcaaggatgcaaaatctgatcgtgtcaagcaactattgcgtgaaactgagaaatatcttcagaaacttgggaacaaattacagagtgcaaagtccacagatggccgctcatcttttgttactgataagagtgacactgcaaacgacattgaagatgagagctaccagccacagcattatctggaaagtaatgaaaagtactatcaactggcacacagtgtaaaggaaactgtaaatgatcagccatcttatcttcagggcggcaaattgcgagagtaccaaatgaatggcttgcgttggctggtttcattgtacaataataatttgaatggtattttagcagatgagatgggccttggtaaaacagtacaagtaatctctttgatatgctaccttatggaaacaaaaaatgaccgtgggccttttctcgtggttgtaccatcatctgttcttcctggatgggaatctgaactcagcttctgggcacctagtataaataaaattgcttatgctggtcctcctgaagaaaggcgcaggatgttcaaagagatgattgttcatcagaagttcaatgttcttctgacaacatatgagtacttgatgaacaagcatgataggccaaaactaagcaaaatacaatggcactatataataatcgatgaagggcatcgtattaaaaatgcttcttgtaaacttaatgctgatttgaagctttatcggagctctcatcggatattattgacaggaacacctcttcagaataatctcgaggagctgtgggcacttctaaattttttgttgcccaatatttttaattcgtcagaggacttctctcagtggtttaacaaaccatttgaaagtaatggtgataattcacctgatgaggccttactttcagaggaggagaacttgttgatcataaatcgtcttcaccaggttcttcggccctttgtactcagaagacttaagcataaggtcgaaaatgagcttcctgaaaaaattgaaagacttgtaagatgtgaggcatctgcttatcagaaacttctcatgacaagggtggaagaaaatcttggtggaattggagccgttaaggttcgctccgttcacaactctgtcatggaattgaggaacatatgcaaccatccatacttgagccagcttcatgttgaagagattgagggctacctacctaaacattacctaccatctattttgaggctctgcggaaaacttgagatgttggacagattgctgcctaaactcaaagctacgggccatagggttctacttttttctacaatgacaagattgcttgatgtaatggaggattacttggtttggaaaaagtataaatatcttcgattggatgggcacacttctggccatgaaagaggagctcttatcgataaatttaacgatcctaattctcaagcattcatttttcttcttagtatacgagctggaggtgttggggtcaatctccaagctgccgatacagttatcatatttgatactgattggaatcctcaggttgatctgcaagcacaggctagggcccacaggattggtcaaaagaaggaggttcttgttttacgtttagaaacggtccgaactgttgaagagcaagtcagggcttcagcagaacacaaattaggtgttgctaatcagagtataactgctggtttttttgacaataacacaagtgctgaagatcgaagagagtatcttgaatcactcctacgtgagtctaaaaaggaagaagcagctccagtgttagatgatgatgctctgaatgacattctagctcggagcgaagctgagattgacatattcgaatctattgacaagcaaaggagagaagaagaaatggcagcttggcaaaaggtggttcaggatggttcaactagtgggctagaccctggagtattgccttctcgtcttgtaactgatgatgatctgaagcccttctgccatgctatgaaactttatgagccatcaaatgtgaaaacagtaaatgtgaatgtgaggaagaagggtgaacttgggggccttgatacacagcactatggaaggggtaaacgagcccgtgaggttcgctcttatgaagaccaatggactgaagaagaatttgaaaaactttgtcaagctgattctcctgaatcatcccaacctggtggcatgtcgaaggatttggatattcttaataaaggcattaagactgaaattcttgtggagagttcaaaagaaccagaacaaacgaagatggaggcatccccaactgtcggtgactctccaccagccaaacggcggagaggtagacctaaaaggtcagatgtttttgtatctcctactgctggtctgactgatgctgtcaaacaagacacaggaaccacacaggacggtagttctgctacaccagcaagtaccatccactctgatgcaccagctactgcaatcaattcagctgtttcagatgttaatatacattctattccaccagctgataccaagaaacaagagttcagtactgataccaaggtttccagttctgtttctgttttggaaggatctgtgccgaatgaaattggtacaccattacagagtgttcataatgtagcagtttctgcaccaccgcatcaatcagctaggggcaggaaatgccaagcaggagaaacacctcgtaggcgaggccgaaaaccaaaatctctatcttcatctggtgtagatgatgttagtcttaacccaaccttttcaactgttagtggtgtagcagacactagttatgttccttcatattctcaggtctcatcacaaggcactgctgtggcactggcaggaatccagaaggattttgtgacagttaagttggatacattgttaccagatagtggtaagggtgctcctcctgttaatgagggagataaaggtgctactgttacaacacctgtggcaaaagatatatgtgctgggactgtgacaacatcagacaacactgtcaccctgacaccaaatactcttaaggaaaacattggattagttcaagtggcatctgcaccttctatgctcgtggcttctgaagaactaatgaaaatagcacatgttgcggtggccgataagcctgttgagaagcaaactgcttcacgtcgccgcagaaagaaaacatctagtagcgaggatactggagtcagcactagacaaagatcagctatgaaaagatcttactacaacacctctgttgccgttgatgatattggttctgctgtgatcccaaatgaaaaatcaggaataacgaaggaaagagatgtcagttcaattcaaagtacatccaatgaactaccaaatattaactcaccattgtatgagaagtctggatatgattctcaaccaagcacacctatagctgtccccatcaatgaagacactcttcctagtggttttgacacctgtactaattctatgataactcttgccacatctgccaactctgctgaagatgataaaccagttgatttgcaccttaatgcacctgtttctgttgattcccaaaaccaagaacaacacatgacagggaaggaccatttggcagtgtgttctagaatctttgctactcagttacagacggacactgcaaatcctgctattgatcataaaccaggaactgcccagtttgaaccatctgcttccttgccccagaattcaggcaaggatgctactgcactaccttctgaggttgacagtgctgctccaaatagggcatcaagcaggaggaggaaagggtcaactcgagaaccacgcaccagaagtaattctgcatcagctgcaagtgaacgtcgtgcccgacttactggattgaagcaggcagaggacataaagaagttagagatgtcagcaacgccgaccacaacagtgtgtatttcatcggtagagcaacagggagctgcttctttaagtgcgaagattaccaatgcttctgtttctgaaggacagaagaatcctggaaattatatgccttctgccatttcaattcccgtggggagccatgttctgggcctgggcgcaacaagtattgaagaaacaactgccactatgataactcaggctcctgcagtttcaaaatcagaacgaagaaaacttccaggaggcagtcaacaaggtattcagtttgagagttcagcatcaaaaacaaagatggtatcagctgtggaaccagcacctgcaaatgttgaatgcatgcaaggtactgaagttaatagttcagaacagacaatagtttctgctactgaaccagcacctgcaaatgatgaacacatgcaagagcaaccaacaaatatcgtttcatctgtggaatcagaaccttcaaatgatgaagagcacacaaagcatgaagtgtttcttgcgactactggtgataatatgcttgcttctagtgcaggaactgaaatattgcgggatacagttgagcatgctgcttgccagccagaagcagtatgcacagatggaactgcaaggcagtctgaattgtcgcaacttgatagaaaagcctttcatgatgcctcatataaatacactcatgggtccactaaagatgatggtatcttgcccagtgaaggtacttctgttgatgttactggttctaagcaggatgatgtgaacattgttggcacacaaactgatgatgtttctcggggttctagtcattttccagttattttacaatcaactgagtcagatcggcctccaggtcaagtgaagaatttggagagtaggatggagcaggtgaaaacagaagaagctttggttaacagttctggtggcaatcaaactcacagtctgggcgatgaaccttctcataatacatcattagcaagaaattctccctcagaacactcgaatgagcgttgctctgatcaagtaattggtgaaaatttcaaaagtaaagaaaatattgttgaagtccattctggcattaatactgatggccccgatgaagctctgaatgcattgcacacccaatctaaggaggccagcatgacagatattggtgtacctactgatggtgatagatgtgaaggtaaagggactagtgtcgaggtctgtgctgacatgaatactgatgggcctgtggctacccaggatgcttcgtccacgaaatctgataaagagtcctgcatgatggaatgtggtgtgtctaccgatggctgtcccacagtttgcaaaacacacaatgatctccagggtcatgtatcttgtgaagaaacctttgttaggactggtggtgatgacacaacccatatcaccaatgcaaattatggttctaataatgaaagtgaggccaccattgctagtcctgttgaaaccacacaaaaactgatggaagggagcactgttattgtgtcggagaattctgatttaaataagcaatgccacacattgcatactagaaatgatcctcctgcaaataccctgttgatagttgagtctaacaaagttacttgtgatgctgaaattgtttgtgctagcaggttagaatcttctggcattgaggctgaaacagtgggtatccaagagtcagctcttactgattttgagggaacaaaaggaactggggatttgggtgacagaactaacagtcaactgcatgatgatgttcatgggacatcatgttccacgatagctcttgtatctgagaaagaaccttccgaagatcttaccaccggtagccattcagaagcatctaatttacttgctgctgtagaacaaactcaagaaactactgttgagaaccaagagatcatagatgcagtagtgtttatggatgcctgcaaggcagaacctgttggtgattttactattgctaaaggagctgaacagactgtagaaatggttcattatgttgataagcaatctgctgtattagactatgttgagacacagacaaaacgaacttcggtttgtggttctacgctaaatgaatcccctcaggctgcagggttggaagaagactgctctgtactgaagcatggtgatcctacttcatctgagcttcttactgtagcacctaatccaatcggtgaaacttctgttattcaagtggaaccagaggcaagaaactcagatggatactgcacaacagaggctggcagtgctttatctgaaactgtcatgggattggagccaaataaagaaactgcggttccaatgcaagagaatattggagaagctaatgataattttaataattgcgaagcacacaataattcggagattcatgcatttgaagtgtcgatggaaacgcagtcatcagaagtcaaggaagtatcttctattcagtctggtgcagcaaatttgagcacacagacaactgcactgcctgatgtaacaggacaaaccagtatggcatcgactggagaactagtatctacaaatgaacacatacacatgcaaggcactgaaatcaattcagagcaacaaacaaagatggtttcacctgctgaatcagcacctgctaatgatgaacacgtgcaagacattgtgattcttagttcagaacagcaaacaaagatggttttagctgcagagattgacgcattatgcgtccaggagactgcaattattgatcttgggggagcaagaggaacagttgacctgaatgacataagaacacaggttcctgcattacctggaagggatgtgctagatgtggaggcacatattttggagcaaaaaaaaacatcttcaccaggtgatgaaattaagggttcagaacaagcaaaaatcgaatcgattgcagagatcgaaacagtgggcgtcaaggagaatgtcattgctgatcataaggaaacaggtaacaacagtggcgtaagtatacatgcgcctctattagttgaatctggacaaaaggcatcacctggagttgaattgcgtggtattgaggttgatgctcatgttttggaacaagcaaagatggtttcagctctagaaccagactctactccagaagtttgtgctgacaagttagaaccttctggtgctgatgatgttggaatgattgttgtccaggaggctgcttctgttgatgatcacaatagagcacaaggtggtgaggctcattgttcagaacaaataaagatggcttcaattgcacaagcggtgtctagcatggctttagtaggatattcttcttcagaagactcaatggtggatgctgctgcccgagtaactgatgctgattttgtggatagtaaagcagctggtgtttatcgccaagaaactatgcctactcaaaccacctctaccctcccagagaacatggattctcctgcaactgctgctaccatggttgaatcgaagtttgctgcctcgtctgagcacgttgcaggacccgagccaattgatgaaacttctgttatgcaagtggaactggcaacaagcacaggggatggatgtgcagcagatggtcacaatcttgtttcatctgaaactgttgttgaagtgaagcttgctcaagaaattgttgttcctagtccaggtggtagcatagaagctaataatacttctaccatcagcgaagtatacaaagatacccagtctcgtgcatctggtgaagcatgcaatgatggtcagtctcatggtgatgaaaatatgaaacttggtgaagcttacactgaactgcagctggcaccttcctctggtgaggaggccatgacatgtatgtgtagtgagctgcccagccaggaggtggaggctccaagcagtgaccctttggagaataatgaagaaacgaaaaatgaagctgctgctcaaggatcagtaaatgaggattctgctcctcgtgctgaaaatgcaaagattgatgaagctgacacagaacaggaactgcttccatctggtgaggccacggtagacgaatccagcgagctactcagccaagacgaaaaggtggctcgtaaagatgcaaagatggaagagtctgctgctgctgctgctgcacagagacagctaactactgaagttgctcatgcaagtgaaaacgcgaaacttggtgaagatggcacggagctgcaactgccaccaccttcaatggtagacatatctagggagcaactcagccaggaagtggaggttgcaagctctgggccttcaggaactgatgaaactgctgagatgaaacggctaaacactgaacattcacctggtgatgaaacttcaaaacttgttggaactgatctaggactgcaattgtcaccttctggtgatgccatggtagatatatctaataagccacccagctgccaagacgtaaaggaggccccgagcagtgacattttgggaaatgatgaaaattcagacaccgagaagactcctgctgccttgcatggacggctgaacaccgaacttgctcctagtggcagaaatacagaatttagtgaagctgacactggaaaacaagagacacccgtgtctgctgaggctatggtagaatcatcgagcgagcctcgcagccatgaggcaaaggaagctccaacccctgacctgtctggggatgatgaaaaagcgaagtcagcaagggctgctgttgttgcggaactttttggagatgcaacagaaggtggttcggatcagccattgccgtctcctagagaacaaggcaaggaagcagaggccgatggaggcttttagagtaaagttgcaaatattgtatcaagagatactagaatccgtgtaagtaagaactgctaatagtgcttttagttgtaactggtgtaagcttctactcagaatcaaaagcgacgtgctgagattacagcaacagtggcctacggcagtttactactgttttgtgcaatattgctgctgagttttgttgagacaggcaattgatctgtcatctgtctcgtcttgcatcgaagttggcagcaccatggtgaggtgctcccgccttaacctggaagcgctgacagagggaagaacaatactctctggtttcctaatgttttcctgttcactgttttgatttgatgctgcattgcagtagtgtgacttagtaacataatggtgcgtttggatagacggacataccgatccagaatcatctgaacctaaatattgagtacaagcttagattatctgtttggtctgctttatgtctgggtgcaatgctctctgatttctggacggagtggtaccgcaatccaaacagactttaatgtttgggtgcttcaggtcataatcaaccatctaatttactttgcaaatgaatgtttcaaactggactgctcaagcctaccaagtttaatggtccttcctagtattgaatccttttgagtctagcccgtttcctcatttgaattttcactgttagtgtgcctatacttgcctcacgtagaattttgaaagcttatggttgggtgcgttgtactcgac

SEQ ID NO: 21090 - DNA, 2531 bp, Zea Mays
cttgggcaacgtattttgttttctttccgccctaatttacacggctgtttttttatatttaagctcacgaccacctccaaaagcactatagcgatccttttaaaacccttattattcggactttcacacccaaaataaaagaaaaaaagacatccaaggaaggaaagggtggaggtggaagccgcaaaccaaaccctctctgcctcgtcctccctcctcctgcttcgtgcttccccttccccttctcgtctgcggcgccaagctcgagctcatcgccaccgaggtcgtttcgatctgggttttagcctatccgcgaggaaggtaaattagttggagacttcgtgatggctgctgcgaagtcgggcgtagacgtggaaacgagggacggcggcggcggcggctccttcagcgaggagaggtttgttgataagctcaacaagctcaacaacacaacagcgagcattcagacactttcacattggtgcatttttcaccgcaagagggccagaaggattgtggacacatgggaaaagcatttcagtactgcaacaaatgataagaaaatatcattcctgtttctatcaaatgatatcttgcaaaacagtaagcgcaagggaggagattatgtgcatgagttctggagggttctacccagattattgaaacatttctacgaaaatgggggagaagaagcaaagaaactagtggcaagactaataggaatttgggatgaccgcaaagtttttggaacccgtattgaaagtctgaaagacggcatttttggtgacaaccctcctatattcgatcacagtgggaataataataattcaaatcctagctctaaccccttaaattccaaagttggaaggaaagattccagtacagtactaaaaaaactggctgttggtggtatgcctgaaaagattgtgactgcataccaatctgtgtttgatcagcattttgatgaagacacagctttaaacaagtgtaagagtactgttagtgttctggaaaatctaaagaaggatatagaccttgctagtaccgaaggtgatccgcctgcctcaacaatgatttctgacctacaagaacaggaaacaatcctgaaacactgcattgcacaacttggaagtgtagatgcagcgaggatatcactgataaaccaattaaaagaagctctcaccgaacaggagtcaaagtcagaggttcttcgcagccagttgcaagttgctcgagcagaggctgaacatgccattcaacttaggcaacggtttggtggtgccgttgtcgcaaatggcacaggatctagttctagtccgctgctgatgtctcctcagttacagtcgctgaatccagcaccctcactcgcccctccaatcggtgcagccggagatgagcccaagagaacggcagcagcaatggccgacaagctggcatctctgtcagcgccggtgcaggtcctgagctccatcttctcatctttcgtcgccacacacggcgcttcgctatcttccatgaacagcggatctcctcccagagaccaactctccggggcaccgccgggcttccaggtcgaaaagaggcccaggcttgagagaaccgtgctggccagcgacatgggcgcgcctccattctccatgcaagcaccacggctgcagcagccggttggatcgatgcccacacaagcagcgacacagatgaaccaagcgccaggcctattcgcaccaccgcctccaccaccgttgccgcctcttctgccaccgctcctgcaacagttcggtcaaagcgctggaggaatgatggggatgggaccgttcgggatgatggctggctccatgccgcctcctccgccgatgtccagcatcatgccagcaggttttccagcgccaagcggtccacctccacctccgcttccaccggctcagacccaaccccagcagcagcagcagtctcctcctcagccgccagcgccgcagcagtcagcagggttcttccagacatcagcaggcatggggtacttcccagcagtgcaggtgcagcaatctccgtccgcccaacgacaatgactctatggtggcatgacatccatcggggcgggcttataaaaggcagcacctcgtgctaaattttgtacattagacataattacctggtgtcgagcttatacgtgactggccctgctgcaagagaagcagcaggaccaatggtcacgattagaaaaaaaaagattgtagaataggcatgggggcttttgtttggtccgagttgttttaactcttcctgtttgtgtcgtgtgtgcagtagttagactttgcattgatcccctgaggcgcaagaaagtggtgctggaattgttgcttaatagagctgccctctgatatagcagtgcccttttaggggctggggcgctgggctgaagcagtgttagaacttaactggtcatagtgtcatagatatgatgtgaactgcaaatacttgtcctttttgtgacttaaatttattttctattttctatttagttttgaatagag

SEQ ID NO: 21091 - DNA, 1901 bp, Zea Mays
tcctcctgcccaaattccccagcggcggaggaataaattcttcgaccactgccgcaaggaaggcacctcccttccccctctcttcaccgccgccgggaaggctacagcttccactccaatccttgtctccacttgcccgcgattcctctcaccctcggctcactcactcatccttgtatccacttgtgtatccgcggcagcggcggcggcggcggcggcctccactgcactccgtccggtctactccctgtccctgggcccgacgtttcgtcggtgaatcctcgagctgctgccgtcacgtatgaggaactggagcgtcggggccgttgcggccttcgaatttgcgctctggagctccgtctggtgcttcctggtcgtctccgtcaccagtttctgagccgggatcctactcctcttctcgcgctactatcagtgcagtgcagtaggccactggactgctgtcgtgccggggtagttgcggccaaaggaacaagccaccttctccgagttggaattaggtgcggccctccgcatcaaaagggctcgtttggtgggaactttcgcttgcctactcgctgctgcctgcttcggtggtcctccgtgacggggattgctggaattggggttggaaggacattctgactgaattgctcgagtgaggggtggggttttggcgcccgttgcttgaggatggaggagaggccatcgtccgaggcaggcgcgggcaactcgagggccgaggacgacttcaggagctgctgcggggatgaggaagagtgggaggacacggaggagtcgttcacggccggcgtcaccaagggggagctggacgaggcctctgtgcgtctcttcttcaagggcgtgtcgagccctgaggcggaggggaagaagctgtctgggatcggagtcgtcatggagaggtcgcccggggtgcctgttcttaaggtgcagaagaagctggatttctatgtggaggagctcgtggctgatcacctcgccctcatggatgggctgcttgtcgcactgcagaatgggatcaggaagatcttcgcctttactaattcggagaagctctactttcagatagcagaagctgaaattcttgaagaccagcttttggtagctctaggacacaggattcttgaactggtggataagttggaagactttgatttgatattgcttcctagctttgaactagagaggcccttgcagttggctaaagaagctataggcatcagatatctgtctccctacgaggttggtacctgcccgatttgccgtgaggagaaactaggttctcagatgatcaaggcaggttgttctcacacatattgctataattgcctgactgggtatgttgaagagaagctgctgacctcgaagctgcctataaggtgtccacaattaaggtgtaaatacattatttccgctagtgagtgcaactcgttccttccagttagcagctatgattccctggagagagcatttgcagaagctggcacctcaggaatggaaagattttattgtccctttccaaactgttcagtgctgttagaccttagtcagcacttctctagggcaagttcatcaagccagtcagatctcagttgtgtcgagtgcccagaatgccatagagatatatgtatcaactgtggagtgccgtggcacatcatgatgggctgtgatgagtaccagagcttgcccgctgaggaaagagatgctggagacctatctttgcatcggcttgcacagaacaataggtggaggcgttgccagagatgtcgacgtatgattgaactgacacagggctgcttccatatgacttgctgttctccagattgtgcagttggtcttccatattctggtccctcaaaacaacatcttcttaagtagtgaag

SEQ ID NO: 21092 - DNA, 1725 bp, Zea Mays
ttaactcgattttttggcgagaattcctatactgtgctgtgctcgtccctgatcttttggtcggtctgaggcacatgatgatggccaacgcgaagctccacaagcaggccctgctgccgccgcggagccccttcccgacggcggcgccgtacgccgaccgcggcccaatcgcgcggccgcaggttggcgccacgcaccaccgccacggccaccaccagcgcacgtcgtccgagagcttcatcgaggagcagccgccgtcgtggctcgacgacctgctcaacgagccagagacgcccgcggcgcggcagagcggccgggctgggcaccgcaggtcgtccagtgactcgtttgcgttgtttgacggtggagctgctggtgctggtgcttacgccaatggtttcgaggggatggggagaggaggtgggcaacctgcgccgtggggcggtgtgcaggagtactatgccaagctggccccgattgggagggcacatggccggccgtgggagcaaggcatgccgaattcggcgggcttcaggcatggtggtggcctgccaatgcccacaaaagataaggttggtgggcatcatgggccaccgaaagtgtcgagggagcatgaccatggcatggacaagagaactgatgatgctggccatgatcaaaaggttggagccaaggagggtgtgccgccgaagcatgcacagtcagaggcggacaacaagcgtgctaaacagcaatatgctcagaggtctcgtgtccggaagctgcagtatattgcagagcttgagagtagagtccaggcattacagtcagaaggggtagaagtgtctgctgaaatggagttccttagccagcagaatatcatgctagacctggaaaacaaagccttgaagcaaagagtggagagtctagcacaggaacaacttattaagcgttttcaacaggagatgtttgagcgggaaattggtcgtctcagaacaatatatcagcaacagcagcaacaacaggctcctgctcttgttcgtagtaacagcagggaccttgatgtgcagttcgccaacttgtctctgaaacacaaagaccccaacacgggccgggatgctctctctgggcctcttcgtacttagttctttccatccttccgttcttgtgggttctatcagtggccaccactgtgtctgtcatctccaccaagaaaggagaagtgcacttggattgtgtgaaaaacaccggaaaaaggctaatagctatggatctgatgtttattatttcgggatatgcacctggcggtcatcctcagctcgcgtccattggtgatgctcgaccagtcggcggtgtttagggtttttgtttttagctagatgcttttcaagcatcattgtaccatttttcatgctagggttctaatctgttactacccccgttttcctgaactgtgtgcttcaagcatcttagtcatgtttggattagttctgcgttatcagtgcctcagtggaatgtggagcactaggcagcatcaggtaagttgctttggagatgtgccacatccttgacaactgcatgttctgctattatttcttagtactcaataagctagtgcaaatgaggtattagcgatcttcagatttcaggttgttcttgatgtactcctatgaatatatctcaattgctcaacgtttcctttttatgttaaaatttggctccataattgtatattttgaatcaagc

SEQ ID NO: 21093 - DNA, 1305 bp, Zea Mays
ctcaatcttcctatcctattttctctcactccatctcaagtcaggcacggtgacttgacgaggcccatctaagcacactacagcaccgggcgaggcggctaggccccctcaccgtccaccggcgactgggccggccgtcgctgccgccctgcctctccaccgtcgccggcgacgagcaccactagctgttgttttgcctcccaggtgtttttgagtctgttgcgagtgttgtggccatgtccatgttcaataggatcttcgggaagcccaaggagcaggccaactccaatgctttggccactctggacaagttaaatgagacacttgatatgctggagaagaaagaaaaggtgctggagaaaaaagcaaacgctgagcttgagagagccaaggagttctcgaaagcaaagaataaaagagcggctatccaatccttgaagaggaaaaaactttatgagcaacaaattgagcagcttggaaattttcagttgagaatccatgatcagatgatcatgttagaagcagctaaagctacaacagagactgttgatgcattgagaactggagctgcagctatgaaagcaatgcaaaaagcaacaaacattgatgatgtcgacaagaccatggatgaaattaacgaacagactgaaaacatgaaacaaattcaggatgctttgtcagctcctcttggagcttttgctgatttcgacgaggatgaactggaagctgaacttgaagaactggagggagcagagttggaatctcagcttcttgagcctgttgcagctcctccggtgcatccagtgcatgtcccagccaacaagcaaccagctcgccctgccccacagaaagttacagctgaagatgatgaacttgctgcactgcaagcggaaatggcattgtgatcaggaacttgcaggttctcatggagaggtgaaacatgtaaatgaagatgaaagctgagtcagctatactatatatttgccatgcgtgtacaaacttggccggatatttggcaaccgcagcagaaaaaagaggctgctccagcccagtgcttgtttcagtgactttggaatctgttgtcgatcgatgacagttcttctgttaatgtcgctcggttagctctacgctaattattcagatcacccaacgtgcattgtttcagtgttttgcttaattggcccatactgtctggagccgtgcatgtaaaagtgttgcagggttcacgtttgatgtggctgttcgcagcgctttcaacctcagttgaaggtccaagcaaggtggtgcggccaacagaagtgggag

SEQ ID NO: 21094 - DNA, 3813 bp, Zea Mays
ctcaaacggaccagaacccgactacccgaggccttgtccccacgtttgcctcttctcgacttctcctgtagggctgttcgtgttttttctgctttcgcctttttcccagcatttttttcctctcctgcgcctcgccaccgcttcctcttgtcgcccgcctctctcatcgaccctaggcgcgccgcctcgccgccgccgatcccgcagccgtcgatcctggccgctccgatagccgagggctacttgattgtttggaatctacttttatagttgattccaagcatggaaagtctaccaaatggttcagtaaacaatgcggagcataaccaggaaaacaagaagtccatggatgctagtgtgcctgaagaagtacaagatgtttttatttacagagaagatgttgtgagcttgaagtccaaggaggatgtccgtggattagttttagaggtagctggggaatatgattctgaaggtagcatcactgatgatgatattgatactgaggaacatgaagataaaactgttcgtggagcagaaaatggtgctgctgatggtgataatgctagtaatggagctgaagttgaaagccagagttctttgccggataacaaagttcgagtgttatggcttgatgatagtgaaaaaacagaagacattgatgaggtagttgttgttgatagaagtttccttcatggtgatttagttgcctctgcctcagatccaactggtcagatggggcttgttttggatgtcaatcttgtggttgatttgcaaggtgtgaatggcgatatgataaagggtgtttcttccaaggatttgagacgaatcagggaattcaatgtgggtgattatgttgtctctgggctatggcttggtcgagttgatgaagtgctcgatagtgttaatgtgctttttgacgatggctctgtctgtaaagtcaatagagcagatcctatgtgcttaaagccagtatttggcccaatgcatccagatacagattgtcctttttatccaggacagcgtgtgaaggcagtgtcatcatctgttttcaaaacatcaaggtggcttaatggattgtggagagcaagtcgtcttgaaggtactgtcacaaaagtggaaagtgtttctgttatagtctattggattgcatctgcacactttgcttcagatcagcaacctgttcctccagagaagcagaacccaaaggaccttactcttctgtcttgtttctcttatgcaaactggcaattaactgactggtgtcttcctcaccgatacactttatgtactaatgataccgtgattaattctgataagcatacaggtcagatctgtacatgcccagaaagctcagttccactgtctgatattccagaatctcaagctgatgttcagactgaacaagatcaaatgactgatacagatgcaggtcataggcaaatagatgttgattctactgcagatggattgagtatgtcggacggagataattcatgcatagccaaagaatcagaaactagtgtatcaagcattctaaaggagccacaggacaatgcaacatctaggaaaaagcttaggaaagtgtccctaaaaaaacataaaagaacgaaaaaaagagacgacagctttgagcgagctctactcattgcaaatacttgtaccaaagttgatgtaatctggcaggacgggacaaaggaatgtggggtagccgcaacatcgttgattcctatccacaatccaaatgaccatgagttcttccctgagcagtatgttgtggacaaggtcacaaatgatgttgatgattcttctgaaccaaggcgtgtgggtcttgttagaagtgttagtgctaaggaccgaacagtaactgtatcatggtttaagccttcgctacatccagaggagacaaagaatatcgtgtgtaatgaaattgtgagtgcatatgaactggatggccatccggattatgattattgctatggagatattgtcgttcgcttgccgcctgtctcacctgtaattgaatcaaccaataacaaggatcaaatggaactagataggacggtcgatgcctcggaaggatttgctgcctcaaatgatgcaccctctaatactagtgcaagtgaacaacttttgcagaaggaatcctgctcgcagtttacaagcctctcatgggctggaaatatagttggctttcaagacggtgagattgaagtcatttggggtgatgggtcgatttcaaaggttgggcctcatgaaatatatgttgttggccgtgaagatgatgatgcctcactagatgacggaacagcctctgatggtgctagctgggagactgttgatgacaatgaaatggatgtacttgatgattctgcaaaggatgattcacaaagcatacctgagaatagcattgaaagggaagatggttcattcagctcccagaatggaagttctgttgcaactggtcccctttcagttgcttttgggtttgtgacccgactagcgagtgatctcttcgctcgaggtagaaggcatttagatagatcgtcaaactcggatgctatggatgaagttgagtctcaccagtctaatgaagtttcagaaactagtgatgacattgataagattaatgagaataatgtggaatcgccagaggatgctgcagtaatagaaaacgattcttctgtcgagaagtctgtagatgtggtcatggctgataatcttgtagatttggaatgtttcaaacactttgatattctgcaatgtcctccagaccaccattaccttgaaaacatagcccagggcacgggtggaagaaagtgggtaaaaaaagtacagcaggaatggagcatacttgagaagaacctaccagactatatttatgtcagagtctttgaggatcgcatggatctcttgagagccgtgattgttggagcaagtggaacaccctaccaagatggcctgttcttctttgatttctaccttccacctgagtatccgcaagttcctccgtcagcatactaccattctggtggtttgcgtgtaaatccaaacctgtatgtggatggaaaggtttgcttaagtctcttaaatacttggaccggcagagggaacgaagtgtgggacccatcatcatcaagtattctacaagtactggtttcacttcagggattggttctcaatgaaaaaccctattttaatgaggctgggtacgagaagcaagttggtactgttgaaggggagaagaatgcagtgccgtataatgagaatacgtacctgctgagcgtgaaatccatgctgtatatattgagacggcctcctttgcattttgaggattttgtgaagagccatttccgcaagcgtggccactacatccttaaagcctgtgaggcatatttgcaaggaaatgttgttggcactctcactgacgacgcatgcaccaccaacagaagcacggagcactcgagctctgtcggcttcaagcttgcactagcaaagattttaccaaggttgattacagccctgaaggagcatggagctgattgcgaccaatacgagcaccttggcaaaacagaccccgttagagagagctgatcattgagtgacttgtacttggatcttttgccttttatatctgttcttttttcgggtttcagaaaagatggtgacttaataccaccaggctgttttcgtataaatgtacattcaaagtttgttgtttccgtcaaacatttggaaaatatggccccaaatgatttattcgatacatggaaccgagctaccctgtgcagttgatgtttccgttgaacttgcagg

SEQ ID NO: 21095 - DNA, 1382 bp, Zea Mays
gctgcaaacgtcaatgcctactttgttgttccaactatcaccgatataaatggcaggagtaccaccaagcgagcgcgatggtgagctccgcactgaggcgctgtctcccctgccatgcctctctctgtcatgccttccctccccatccgctgctggccgctgccggcgtcttccgtcgttcattccagtccggggatggtgagactatggacgaattcgaagaacggttgtttgggggcaaggacacagacaaaggatcactctacgagaagctcgatagggctgagaacactggtaggagatacaatatgggctctgggatgggtggtttgactgggttaagtgacaagagcagatctgggttgtccaagggtggtttcacttggttaagtgacagtagcagctctggtttccctgggtttcctgcatctggcgacaggagcaattcaggatggatggatggttatgattcttttaatgatggcttaaatgatacgattgctaatgcggcacgcaacatccaaatggaggaggacgaggacgtcgacggtgactgggaagatgactttgagttcaggcctgatgtgcggtttaggcaaggttcaacgtattctgttcgggaccttgaccttagaaaacctgcagccgcaaagaaccctcctagacgacagtttgaaacaactacagcggaggtactgaagaaggctgattttaggattcctctccaactttcttacggaagctggaattatcatcaagagaagccagacccgtataagtgcaaaagctcagcgtaagattgcaagagagatcaaaaccgcacgtgcgtttgggttaatgccttttacaacaatgggtagaagaccattcatttttggcagaagtgcggaggagcattattgggatgatggatatttcggctatgtgaagcagaaggatggtgagcctgttgagaatgaggatgctgagccaaatgtggaggctgtgtaaacattctgaagcatccttttgcaagcgctccgttcagtttcttctggtgccttcatgacacaagtcacacaatgcttgttttgcgtcttcagatcatagcgtagctcagcttgaataaaactgtaacatcacgcaagttttgtgaaactcgtgccttgctcaattgtgccactttagcagacatccccagctcacctcatcctggctggagatcatatgcagatatgaaatggaacgtgggatcagagttttagttgacgctcaaaattttgagatagcagcactgatttcagtttctgttggataatgattgtttggctgttcaacgagaaaaatattgtatgcacgtacaaaacgttagattttttaacaacgaaaatattttcttcaaa

SEQ ID NO: 21096 - DNA, 1435 bp, Zea Mays
gtttaacatcgtcgcgtctcagtggttgcttaccttgactgatataggcaattgagtatgctgctactttaatttgcccgtggaaattcatcagatggattgtctcaaccttaggacatctttccgtgttctgctctcgatacagttgctgctatcatcgttcagtcccttgattgtagcgaacttatcttcggagaagcaagcccttcttgactttgtctctgcagtctatcatggaaacaagctcaactgggataaacatacctcagtttgttcatggcatggcgtaaaatgctcagaagatcagtcacaagtttttgaattgagggtaccggctgctggtcttatcggagtaatttctccaaacactcttggcaagctttattctcttcaagtactgagcctgcggtctaatcgattgaccggaagtcttccagctgatgtggcctcccttccgtctttacgttccatatacctacagcacaatgaactttcaggagggttgccttcttccttcagtcctaacctcagtgtaatagatttctcctacaattccttcacaggagaagtacctgcaagtttacaaaacctcactcagttaaccgttcttaatttgcaagataactctttctctggatccatccctgacctcaagcttcacagtctgaaactattaaatctgagcaacaatgaactgaaaggctcaattcctcgatctctccagaaatttccaaagggttcattttcaaggaatcctggactgtgtgggctacctctagctgaatgctcacatccttcaccagcacgctcacctgaatcatctccatcgcctcaatctccacctttgacacatcatgataagaaactaggcacgggtttcatagttgcagttgctgttggtgggtttgcattgctgacgctaatcgtggttgtgtgcttttcaaagaggaaaggcaaggacgagattgatgtggaatccaaaggaaagggtactgccaccaggagcgagaagccgaagcaagaattcagtagcggcggccaaattgctgagaagaataagttggtgttcttggagggttgcacctatagctttgacctggaggatctactgagggcttctgcagaagtccttggcaagggtagttatggaactgcttacaaagctgtactcgaagatggtactgtcgtggtagtgaagagattaaaagatgttgtggcagggaaaagagagtttgagcagcagatggagctcatcgagaggttgggcaaacatgcaaacctactcccactacgcgcctactactattccaaagacgagaagctcatcgtctatgattatattgacactggaagtgtttcggccatgttgcatggagagctgcgtatgtcactgactagatattagttgcttcttttcttcaatatggttgggaag

SEQ ID NO: 21097 - DNA, 847 bp, Zea Mays
attttggcctggtccgtggcataaaggagaccggttagggttggaaaaaccctagccggtcctctctttgtgttgctggcgccgccgccaggggccgaagccgtagtcgccgcgaggagccgccagtgcgcgcccgcggaggctagctagggctgcccgtgtggccgccatgatcggttcgcaccggagcatggggcgcccgcacgcgcctacggaggctgcgtgaccgacctgcgtcggggctggggcacccgcccgcgaggttgcggcggcggcctgcctgtgcgcgtggctcgtccatggacacacagtacaatcatgcagacgccacgtagtacagttgtttcttggcgctgctcgatcgatcgcgctggctggatgcggcatgccgccgtggttctcggtggcccatcgccgtccccgggccggggtattgtttcccggcttgcacgcaccacctcaaatcaaaggacggcgaccacacatcgtcgtaccttcaaggaaaagaagattatatgggtttgtggacttgtcttgaagatatacaagaagaacttgtggaactctcctttggattctccacaatgccaaatgaagaaatttgaaggaaaattcacaggatgtcaaatgaagttgaatgccattcagccatgctcattacaataatttgttgttgcattttgaaaactatgtatgactataatttcattccaagaacatgttttatgatgtattgtattgtctttgctacttctactacttgctatggactatgtcactatggtgaaatgttgttgtaagcctggaatgttatctatttatgttgttagaatgttgaaattattgt

SEQ ID NO: 21098 - DNA, 3202 bp, Zea Mays
ctcagcttaacctttcttctccgcctctccctccttccctgtcgctctctccccgttctggttttcgtctaatctagattggatgggatgatgattcgaggcgttagcttattttagctgtaatcccagactaaaccctggctcgttggttcggcggcctcccggatggagacgaagaaagtggagtctgtccctggtcataatcacgcggggagtggatgataagatcataaaaatcagacaatcatcggtcacaactcatactgttgtgtctttttaacccctgagccaccgaggccaggagtgattgattggtttaagctcagcgcacccagagtctgtgacattcatgggtagtgcctgttcgaggaagaggggccagctggtccaagaggatgatctctacagtgcgaggttctccaagagcggcagcttcaagtggctgctgcatacgctgccccgcagcaactttgctgatgtgcagcggagagcacagggcccagctccaaaccggtgcccgtcgcttgtggagctgtgcgtggccaaagtctgcaaggacataaatatgtattctgatttatccctgctgcccagagatcttagtcagcagatattcaatgagctggtggaatgtggatgcctcacggaggcatcgcttggggctttccgtgattgcgatttgcaggatatttgtctgggagactaccctggagttactgatgcttggatggaagtagtggcttctcaagggcagtccttgctatctgttgacctctcttgctcggatgtcactgatagtggattcaatcttcttaaagattgctcaagcatgcaaagtttggcatgtgattattgtgatcaaatctcagaacatggacttaagacattatcaggcttttcaaacttgacatcactgagcattaagaaatgtgctgctgttactgctgaaggagcaaaagcctttgcaaacttagttaatttggtaaacttagacctcgagcgttgtccaaagattaatggtgggcttatacatttaaaaggcttgaaaaaactggaaaaactgaatctgagatactgtaatggcatcacagattcagacatgaaatatttgtcagatctcacgaatttgagagagctacagctctcttcctgcaaaatatctgcttttggtgtttcttatctgagaggtttgcacaagctaggtcatctaaacctggagggctgtgcagttactgcagtttgtttggaggttatatctgagcttgcttcgttggtcttgttgaatctgagtcggtgtggcatatgcgatgaaggctgtgagaacttgaaaggtcttacaaaattgaaggctctaagtttagggttcaaccaaattacagatgcatgtttaattcatttaaaagtaatgctgataagatgaaaagcagatgccagcctggaatgacatcttcaaggaggatttggtcaacttggagtgcttgaacttggactcatgtaagattggtgatgagggtctatttcacctaaaaggcctcatacagctaaaaaacctggagctttcagacactgaagttggaagcaatggacttcgtcatctttctggttgatttaaaacgcctgcagaaatgctagtattattggcaattgtttttttcttgttaatccattctggtagaccaattcaaatcgtctagtcgttttttaatttattgtgtgttcggtttgaggaatggactggtccatcattttctcctttacttttttgtttggtttttttttggaaaacttttttgtttggtttctggaatataatgtgttgattccccaccaccctcacaaactaaaatttgtataagaattgatgaatgggtgattccactaaaatttacgggatgaactcatggtgcaccacctcatatagactatgatggttccttaaacaaaacacctccctgacattgttgctacagcctttgatgaattaacacgtactctcaatagatgttccttatccatacacttatttcctaattcctagtggcagagctatagggtggtctgtgtgggccacggaccacccaagcacaaaacttattaagctataggtattaggtataaaaaatattattcctaattatttatttggcgtgtccatggcgacgacacaacacatcacgacaacatgtgaagttgggcgtctgggcctgcagtcgtatcaggtggctatctggctctagaacaagcgagcgcggtgagatcgggcacgactacgccacacacgcgttctaggctaagtactacaagttgcacacttgccaccctcgtcaagtcgcttaggtaggagaaggtcacgctcgccgtgcaggtctgcgtaatttgcagagcatcaatctctctttcacattggttactgacattggtttgaagaagatctctggcttgagttcactgaagtctcttaatcttgacaatcgccaaatcacagatactggtttagcgtctcttacaggtctcactggattgacacacctcgacctatttggagctcgcataactgattctggcatgagctgcttcagatttttcaagaatattcagtccctggaggtctgcggtgggttgattacggatgctggcgtgaagaacatcaaggacctgaaagctctgacgttgctcaacctatctcaaaacggcaagctcacggacaaaaccctggagctgatctccggcctgactgcgctagtgtcgttgaacgtgtccaactcccgggtctccaactcgggcctccaccacctgaaaccgctgcagaacctgcgctccctatccctggagtcctgcagggtgacggcaagcgagatggataagctccggctggtcgccctccccaaccttatcagtgtgcggccggagtgatacgaccgccagcgctcccacagcgacctgtaactgtggagcaagtggcgcctggctagagcaggccgccttgtacatacttttgcaaaaacgaggtgtctgtacatattgttcgtcgtgtcgtgtcgtgtcagtgtgcctgatggcaacgggctaatacgtccgtgccaacgtgtgcatggtatcccacggaccctgtggtagtaaggagcagttgtaaatatgccgtgcttcctctccattttccatgtaaattcgtggatgtaccaattgctgcggtcacgccgtc

SEQ ID NO: 21099 - DNA, 4345 bp, Zea Mays
ccgtcgccggagacgatcgcgcacacttcgcacgggcacgactgtggccaaatggcgccgaagaagaagcagccggactcgaagcagaggcagaagcccaagtcctcgtcctcctcatccgcagccaccgccgcgccgcgcctccagatctcgtcggagaacgagcgccgcctccgccgcctcctccttaactcctccgcaccatccccgtcacctgccaacgtctcggaagtccgcggcgagtcgagggagcagaaggcgcggcggctgcgtggcgtgtacgacaagctcgctctcgagggcttctcttccgcgcaaatcgagcaggcgctctccgcgatacccgattcggcgacgtttgaatcggcgttggactggctatgttttaatctgcctggcgatgagctccccctcaagttctccagcgctggcgacagcaccatgtcgtctctcacaggagctgaaggttctgttaaagtactgtccacagccaaggacaattgggtgccacagagtcgtgaacctgaggaggtgaaggtgagcaccgaggggttggaagttagaattggtgggcggagagatgagaatgtgtcactggatgatgggcgattgtcacaagctgcatggattcgtcaatacatggaacaacaagaggaggaagaggatgcaaattccaatgattcctctacatgggaggatcactgcttacaaagttttgaagttgtcgaagcaaagccaagtaggcggaagagcaaggctgcaaaaaagaattccaagcatggaaacttgaaggaacagataagctatcctaccaattctgtatcttcaaattctgaaactgcaaatgttgagggtgttcagaatgatttagaggcaagtgaggaaagatctgagagtctaggcaatattgatgaaggatctgatttgaaaaaggaaattcctaaggatattgataaaacttgtgcaaaggaggtagacgaagaggtgatagagcttgataacatgttctttgaagactcatctgcttgggaagcagtggctccagaaatcttgaaacagcaacaaatagagaaattatcacatgatggttatggccatcttattggaaacatagatgatatatggaagaagggagattctggtaaaatgccgaaagctgttctacaaaagttttgtcaaaaacttggttgggaagcaccaaagtataataaaatatctgagagagatggcaaatttgtatattctgttaatgtgttgcggggagctactggccgtggtaagagtcggaaggctggaggcttgacgataatccagttacctaaactacatgaagaatatggatctgttcaggaagcacaaagtcgagttgcagcttttgctctatatcaattttttgctgaccttccactacgtcaactgcttactgagccatactcatcacttattttaagatggcaagaaggtgaattgtcatctacatcaagggtgctggttacggaggataggcgaagatctggctttgtagatatgttattgaatatagatgcagatacaattccttcatctgaaatagaaaattctgatactgatgtcatatctatggattctgggaatactgaaggcagcaaatctgtgaatgagaagagacagactaccatgacgagttgtatggcagagcgtgcagagagtgcaattttgaaaaagcagttggaagataaaaggaagctaccaaattacttgaaaatgctggaagcaagagcttctctaccaatagctagacagaggcaacacttcctacagttgctgaaagagaacgatgtagttgttgttagtggagaaactggatgtgggaaaacaactcaggtgccacagtttattttggatgacatgattgaatctgaacttggaggttcttgcaatatagtttgcacacagccccggcggatagcggctatttctgtggccgaaagagtatctgatgaaaggtgtgaaccatcacctggatcgaatgattcactggtcggataccaagttcgtctcgacagtgcacggaatgagaggacaaagcttttgttctgtactactggtatccttctcagaaagttatctggaaacagagacttaagtgatgttacccatgttgttgtggatgaagtacatgaacgtacaattttgagtgacttcctgcttattgttcttaagaatcttgttgagaaacgctccaatcaacaaggaaggaagttgaaagtgattctcatgtctgcaacggttgattcaagcctatttgcacgatattttggagaatgccccgtgatcagtgttgaaggaagaacacatccagtgtcaactcattttcttgaggatgtttatgagaaaatggagtactgtcttgcattggattctcctgcatcaggagcttactttgcgcagcatggggaaaagtggaagcatgctagcagctcagtgaacaaccgacgaggaaaaaagaaccttgtcttatcctcatggggtgatgagtcaacgctttccgaaggctatgttaaccctcactatatttctgattactataggtcatataatgagagaaccaaccaaaatctaaaacgcttgaatgaagatgtcatcgattttgatctattggaagacttgatatgctatattgatgagaactgtcctcagggtgctattcttgtttttcttcctggagttgcagagattgacttgttgattgatagattatctgctttagttagatttggaggggcatcatctgattggatccttcctttacattcactgcttggaccctctgatcaaaggaaagtgttccagtctccaccagataacttccgcaaggttattattgccacagacatagcagagaccagcattacaattgatgatgtagtatatgtagttgatactggaaagcacaaggagaaccgttataatccacacaagaaaatgtcaagcatagtagaagattggatttctcgtgcaaatgcaaaacagagacggggtagggctggtcgtgtgaagcctggtttatgtttctgtctgtatacaaggcatcggtttgaaaacgtcatgcgtccatttcaggtgcctgagatgttacggatgcctttgactgagctgtgcctgcaaataaaatcacttcatcttgatgacatcaaatccttcctgctaaaggcagtagagccccctaatgaagaagctatttcctctgcagttgacttgttatacaaggttggagcttttgaaggacatgaagagttgtcacctcttgggtatcatctggcgaaactgcctgttgatgttttgattggaaagatgatgctttatggtgctatctttggttgtttatcaccaattctgtccgttgctgctttcctgagttataaatctccatttctctctccaaaagatgagaagcaaaatgtggagaaagcaaaagccacattattgaatgagaaccttgatggatctagttctgtaacagataataaacaatccgatcacctgctaatggtaattgcatacgacaaatggtcccgcatactgctacagggacatgcgtcttcagtttggtaccttgttagcagacattggacttatagatcttcctaaagatactctgaggcacaaggtgggcagtagaaaaaataatctcgagagctggttttctaatatgtctcttccattcaatgcctatgctcgctgcacctcggttattaagtcggtgatgtgtgcaggtctataccctaatgtggcagcatctctagagggtgttgatcctggagctctaggtggaagaaagccatctgatgttctgttcagtaaggaccgtcctcgatggtatgatggaaggcgagaagttcatatacatccatcatctgttaatcacagcttgaaagctgttcaatatccatttttggtgtttcttgaaaaggttgagacaaccaaggtgttcttacgtgatactagcgtcgtttccccctactcacttcttttgtttggtggttccatggtaatccaacatcaggagtggttgttatagatggatggttgaggctgtctgctgctgcacagactgctgttttattcaagcaacttcggatgactcttgatgctgttctaaaagaactgacaagaaaaccagagatggcaacttttgttgacaacgaagtggtcaggtccatcattcatttattgttagaagaagacaaggctcgataagcatgaattcatggcaatcctatcgatactaattttttagtaaaaacactatcggtccctaaaattttttagtaaaaacactgtcggtccctaaacttttaagtgt

SEQ ID NO: 21100 - DNA, 4893 bp, Zea Mays
agtaattatactgatttttagattgaaactggtctcaatgtcatttctacatatgaaccatatagagtttactcacatatacacatttcaatccaatcctaacgacacatggcactactgttatgcattcgaagaaagaaaacaagaagcgctcacgccgtcacgcgtccggaagccaagctggtcgcccgtccgccatcctttccaaatctgcaccaaatcggcctcctgcctgaaacacacgcgaggggccttctcccgcggcctccccgctcgcgtagccccggcgcccgctctctgctgctctagggtttgccttcaatggggaaccagaaaaggcggggattgatgagttagagacattcatgggcaaaagggtcatttcgcgtctagttggcaccaaggtccgttaaacttttctggtgcagaagaaatttcgatcttttataatggcacgcagcggctctagcgataagccaatcctctcccttcccagagccgtagcgggctagtggcgactgactggggtcggggtcgggcgaggcattcctccctctgcgctttgctggcaacgacgacgaatagggttctgtagggaccgagattctggatacctcactcccttgattcagaatgactccactgagtcattgctccgttggcaatgtcagcctgtttcacatcggaagctacaggaccacccgagaaatccagataagaaggttccagggctcggcgaggtattcgagagtagcatcgccgtcgcctcggagactgctgcagccgcaaacagcgttccacctgatcagtatctacaagagaagaagctggtcctctccccagaggccaagaaccttgtccgcggcgaccgtggggactgatgtcactgtggaggatctgaatccgtctccctcggaggaagcctccgatgggaactctgaggctgcacctgacgccgttgatgcgagcgagcaggccgaggctagcacgggacaagcctcttctgctcgcaaattgggacgcaacatacggaagagcgagatgcctcctctgaatgaggaggatctagtgcctggcgcatcttttactgggaaggtgatgtctatcaagccattcggagttttcgttgacattggggcattcacagaaggccttgtccatatctccagagtaagtgatgggttcgtgaaagatatatcttctctcttcactgttggacaagaggtgtcagtgagattgcttgaagcaaataaggaaacaaagcgtatctctctgacgatgagggaaggcgatgactatgtcaagcctcaaaaagaaatgccgaaggctgcaaatggtgggcggagtgccaccgcaactcctaaaagctcgccaaggcaaacaagggaaaggcaggaactcaaggagacacttgagtcaaaatatgtaccagggcaatctctgaatggcactgtgaaaagcacaacgagagcagggacatttgtgacgttgcctgatgggagtgaaggattccttcccagagaagaggaagcattggcgttatttacccttatcggacaatctgcaatggaaattggtaaacagataagggttaaagtactgaatgttgcacagggtcaggccactttgacgatgaaaggggtggaagatgatgaagacgatctgaagacgctaaatatggagcttaagcgggactggtccagagggactaatgcgttcgagttggctttccgtaggaacaaagagatatctgcattcttggatcagagggaaaggaccaaagtgccggctgatacttcagtttctgctccggaagctgaaagctatcaggaggaagctgctccagaagatgaggaaagtagtgaagaattgagctctgtgtcagaagtagcaactgatgtttctcctcctgtatctgatgcctcctctcaggtgggaattcagtattctacttctgtggcaaatgctgctgaggaccaaactgtaggatctgaaagttcacctacaattagtgttgaactgtcctccaacgggaccccagatagctctattgtgtcttcagtttcagaaactgcagataaacctactgaacctgaagaatcttcagcggtagaagaggttcttgtaactgcaagcagcgaggcagggaaagaaccagctgctgacactgaggctgtaccagccttgaatgagaaaactggtgccgaggttgctgctgctgctggagttgcacaagcaagcaccacgacagccactatttctcctacccttgtcaagcaattgcgtgaggcaactggagcaggcatgatggactgcaaaaaggctcttgctgaaacagggggtgacatagataaagctcaagaattcctacggaagaaagggttggcggctgctgacaagagggctggcagagcaacagctgagggaagagttggctcttacatacatgacagcagaatcggggtccttattgaagtgaattgtgagactgactttgtgtctcgaggtgacattttcaaagagttagttgacgatcttgccatgcaaattgctgcttgccctcaagtgcagtacatctctattgacgacgtccctgaggagcttgtgaagaaggagaccgagctggagatgcagagggaggaccttttgtcgaagcctgagcagatccgggctaagattgtcgaagggcgtgtaaagaagaggcttggagaattcgcgttgttcgaacagccattcatcaagaatgacaaggtcacaataagtgagtggctgaagcaaactatagctacaactggagagaatatgaaggtcaggagatttgcccggtacaacctaggtgaagggctggagaagaaaagccaggattttgctgctgaagttgcagcccagacagcagcgaagccgccaccatctgctcctcccaaggaggacaagcctgctgaaacaacagaatccgccgagaagaagccggctgttgcagtttcagcctcgttggtgaagcaactccgagacgaaaccggcgctggcatgatggactgcaagaaagctctggccgagtctgacggcgaccttcagaaggctcaggagttcctgaggaagaagggcctctcatccgcagacaagaaatcctctcggctagccgccgaaggactggtcggctcctacatccacgacagccgcatcgggtgcatgatcgaggtcaactccgagaccgacttcgtggcccgcaacgacaagttcagggagctggtgaacgacctcgcgatgcaggtggtagcgtgtccgcaggtcgactacgtctcggtggacgacatcccggagagcgtcgtcggcaaggagaaggagatcgagatgcagagggaggacctgcagtcgaagcccgagagcatcagggagaagatcgtggaagggcggatcgcgaagaggctcggcgtgatggccctcctggagcagccctacatcaaggacgacagcaagacggtgaaggatctcgtgaaggagacggtcgcctcactcggggagaacattaaggtgcggaggtttgtccggtacaccctgggcgaggactgatcggtgtgaggtcgggcagcgatccctccgtcgcagcgcagcgcagccctggcatgagaagtcgggcacgtttttggcatgagaagagaacttgcaaaacatctaggcgacaaaggagtcattgtttttgaagatgttaaggatgtgatcatgaagagtgatagatctcttccagagtgtttcaagctttttgatctgtttcatatacttacaactgatcatgatacagtaacaaggattgctaaggaggttgaaaagatcttgctgcagacaatgttgcatatttggaaataagaacacacctaagaacaatgaggcaaaggggatgaccaagaggtcttacatggatgctgttattaaaggtctgaaagcagttgaagatgttgatgtcgaattatttggttctaatttcagaacaaatgaaacactaagttctaagcttttggatggtgtcacaaagaaaaagaagatatatgttaggctccttcttagtattgatcgccgcgagacaacttcggctgcattggataccgttaatctagccgtggaaatgatggaccaaggtgtcataggcattgacctttctggcaatccagtcgtgggggaatgggaaacatacctgcctgccctacaacatgctaaaaatatgggaatccccgttacaatccactgtggagaggtggcgaaccggaaggaaatccaagcagtgctggacttttgccctcagaggctgggtcatgtatgctgtctgaatgatgtagaatggaagaagctcaagtctctgatgattccggtagagatatgtttaacctcgaatgttatgacaggaggtgctccttccctagagcttcaccactttgctgacctctacaatgcgaagcaccctttgtccctgtgcacggatgattccggcctgttttcgacaagcctctcaaatgagtattacctcgttgcaacaactttcggcctcagcaagttcgagctgttccagctggcccaggatgcagtgcagtttgtttttgctgatgatgtggtgaagaagtctctgaaggaggtgttcaagcatgctgaaaagaggctgctcatgtgggatgaacttgctgcaccaagctagtgtacgtacccgttatgagatcagtatgtatcaacccaattgtatgatttatatatggttgtgtaacttttcgtttatgcacctattatatgtgtaccgtttttcaacgtcttagtagaaggtcccgctcgcgcaaccattggacacacaacccagttgttgatatctacgcattaagctaagcacaccaccatcatgtgttggttacc

SEQ ID NO: 21101 - DNA, 179 bp, Zea Mays
ctttaagtaatcataggtacttgtattgattggaggaaggtaaaaaaaacataatacttgtccacaaaatacaattgatatttacattgatacgattctagagaataagttaagtctataaaggtcaaaatgaaatataactacaaataagaaatattcttggtattcattgcttcttc

SEQ ID NO: 21102 - DNA, 1183 bp, Zea Mays
ccctggtctacgttctgtcgttctgtggctgagctccaaagtccaaagattagtgaatccaaaaggcgaccaaacagatcccccgctcctgtgctccgctcatgttagagaaccccctgggaaaacgcagcggagaaactctggagatcgaaaccccggcacgcagctaggcgaactgcacgcaactgcaggtcgacgtctgatccatttcttgtcgcttcagcttctggtgctggtcttcttccagttgcatcctggttacctgtgtcaaggggcggttggtgtctggtgtagttggagggcagagcttcgcgggcggcgaagaagaagagcagcagagagactctgctgacactgaccgagggagatatggcgaggaagctgagagagttgctgcagaagagcggcaaccgcgtatgtgccgactgcggcgcacctgatcccaaatgggcatcggctaacattggagtattcatttgcctaaagtgttctggtgttcacagaagcctcgggacacatgtttcaaaggtgctgtcagtcacactagatcaatggacggatgatgagatcaactccatgatagaagttggtggaaactcttatgccaatgctatatatgaagcatttctgccagagggctatcagaagccgcatccagattctagccaagaagagagagctgatttcatcaggtcgaagtatgagttgcaagaattcctgaagccaagcctaaggttagtttccagcaataagggctctttagaggcgaccagctctcgaaagcatatggataattctgtgtctctttctgctagtttcagcagtgaggtaagtttcacttaactgctagttaaattttgctgtataaaaagagtcggtttcgaccttcaatgacacgatgccctttttagcatccttcgcttcatatatttttcaggctggaatggttgagttcattggaatactaaaagttaaagtgataagagggactaaactagctgtaagagacctgatgagtagtgacccctatgttgtactgaccctaggacagcagaaagcaaaaacttctgtgagtaaacgtaatctgaatcctgtttggaatgaagagcttaagctgtcagttccccagcactacgggcctctgaaacttacaccttttcttcaatctttcatgacccaaccc

SEQ ID NO: 21103 - DNA, 2189 bp, Zea Mays
ctcctgctgtctgctgccgaagtcgccaactaacatagatcgcaccatttcccgttcacctccccttccgttacatcccaccatttgctgttcaccttccctcccgtttgcctcctctcgctgtctcgtagcttctttcctccggcgacggctgggcgagcggccgccagtcggtcccttcgtcggcgacgagcatccacctggcgacggcggcggcgctcaggatcgggctatcaccgacggggtccggcttctccgcccgcctctcgccactcgtcctcgcctccggtcctccgcacaccggccggtgatcctgcctctgtaggttttttgtactatactttttagtggttctggccttcttgacacaatggtgaagctgacaatgatagctcgtgtcactgatggccttccactggcagaagggttggatgatgggcgagatctgaaggattctgatttctataagcagcaagctaaacttcttttcaagaacttgtcaaaagggcatcatgaagcttcacggatgtcaattgagacagggccctactatttccactacattattgagggcagagtatgttatctgactatgtgtgaccgctcttatccgaagaaacttgcattccagtacctagaagatctgaaaaatgaatttgagagggtcaatggcaaccaaattgaaactgctgcaaggccatatgcttttatcaagtttgatacattcatccagaagactaggaaactgtatttggatacaagaactcaaagaaacctcgcaaaactgaatgatgaactctatgaggtgcatcaaattatgactcgcaatgttcaagaagttcttggtgttggtgaaaagctagaccaggtcagtgaaatgtcaagcaggttgacttctgatacaagaatatacgcagataaggctaaggacctcaaccggcaggcgttgattcggaagtatgctcctgtcgccattgtcattggggtagtattgatgctgttttggctcaagaacaagatatggtgattgtacagtacgaaggatactgggccctgttacaacaccggagaagaacagatggagataaaaaccaggtctattctggaacaagaagatgctttggtgacttgtatcccgtatctgcccattcaagcgattacttaagctgcccttttgctcctccctataagctagtatcaaagtgaattcgttggagtgcagacctgataagagcatctccggaagtctttcaaaatttcactctaaattctcattttgagagtcatttgcttaataattgttattatgtttttttcactctccaacagcctttaatatcctgtttgcactagggagccattctctttctatattggactaccgatgaatttggaggagatggatatattcggatagctgtttttaaaaaaagctgttgggggaatcttagcaattaggaagggtatagtctctagagaaactcatattttgtgcatccgttgaactcaatgtaatataatataagagctctagagttctacatcggggttgtggaactcaatgtaatacaagagctgtggagttgactttacatcggggttgtaatttttagggtggaactcaatataaagattcagggtggtctgatgagttgacgaaactcgagcatgctttttatagctgcctaatatgtattgatttaaggtcagagagagtcgtgtatactacagctacgagcagaaccctccgtggcaactggcacccaagtcctgtcctgtccagcaaaaaggttgggtgcgccgtgcgcgtctccacggggtcggagtcggaggtggatgggcagtgggcaaagcctctcgcgctggcgaccgtgcagatacaggctcagtgctcaactgtctcacaggcaaggatggcaatcgggccttattattcgcggataccttattatatccataaccatacccacggataccaaattccaccatacccgcatccaatggataattatccgcggttatttacccatacccatacccatacctattgctatccctactcacaggctcacagccgcgcacaggaccgtgtcggtgtcacggtggagagacgtctcggcgagtcggtggtgccacaatcgcggacacctggcgacgttgctgacagtcttttactacaccctttctaa

SEQ ID NO: 21104 - DNA, 2205 bp, Zea Mays
ttcccgcaacgactgctcgcgccgtctccggctctccgctcaccgtgaccgcgtcgccccgtacgcctccgccccgaggcccctcgtccggccacctccgctcgcgtacgccgttgtacactgggaggccctcgcccggccatctccgctcgcgtacgctgccgcccacggggccaccctgccccggccatctccgcccgccccggcctcggaggcgccgccctgcgctctctggcgctaatggcgccgccgcgtccacccacaggaccgatcctcttcctgcccctcgtcttcctcttcctctttaccaccgccgcggcgtctgcggcggcgcctgaggatgaaaagttcactgaggagctgctcctgcggccgctcccggaccgcaaggcactggcacacttccacttccgctcctctgcgccccccgctgcctccgttggtcggcaccaccacctcttccccaaggccatctcccagctggttaagaaatatcatattagcgagttggagctatctttcacccagggaagatggaactatgagcagtggggtggatttgatcctatgtcaactaataatgcaaagcctcctggtgttgagctgtgggcagtttttgatcttcctttgtctgagatcgatgcaacatggaagaacctgacacatacactctctggcctgttttgtgcatccatcaactttttggagtcctccactgcattttctgctcctcgctggggcttcaaactgaacgaaggcaatttgcgatatggtgcattgcctcgtgaagcagtatgcactgagaatctgacaccttggttgaaacttcttccatgtcgtgacaaagctgggatagcttctttgctgtacaggccttcaatttacaaaggatattaccattcacaaaaactgaaactgagatcctcccagtcacttggtattattcttgatcaaactctgactgttgtgctgcaaccaaataatgtacatggcgaacagctacattccaatcatggtcaacttcagcccaactggtccatgagacatcttttcaacagaaagttgtcagggaaatgccttgtttctaaatccagcagagtattcattgaggttgataaaggcattgctgacgaagttaacatatctggaagtgttcattcttggagtaatgaattctttgtattgtccaatagcccggacaagttgatcaaaggtcaaaatcacttagaaatgcaatcttcttttttatatgtttatgatgctagtaactacagtgaggaacaacctttggatttgggcataacttggaagcttcccctgatatggacttgcaccccatcaccttttcatgcaagcagatttcttatgggcagtggcaatgaaagagggtcaattgctctgtcgtttatgtccactaatcttcataagaagatatctggcagcgcaaatgattgttcaataaaggcagttattttccaggttgttccatggtatgttaaggtctattatcacagcctagaaatatttatagatgggagcaggaagactgtgtcagaagtagttgacaagattcatgtcattccttcagaagacaagcttttgcctggtaccttggagatgctactaagattcccttgcagtatgcagtcgggaactctgacattggattttgacaaggggttcctgcatatagatgaatatcctcctgatgctaatcaaggatttgacattccttcagctttggttagctttcctgagttcagttctgctcgaagttaccctgaaattgatccagtacttggatcacctttactagaaaatttccaggaagatagtgttgtgaagtcgtatacagaagtattgctcgttcccctgacaactccggatttcagcatgccatacaatgtcatcaccttcacatgcactgtcttagctctttactttggttcattattgaatgctttgagacgaaggattggcgaggaagagagggagttgaagaaaagagccacaaggcatgggctcatttctcggttgctagccaagttaagggggcagaaggtggatccatcggagtcagggtcttcatttgaatcgactgggtcaaagaagctgctattcaaggttaaattttcttttgaggaacccactacattttttacgttgatctaaagctgactccaactagagcctgtaaagctgctc

SEQ ID NO: 21105 - DNA, 2682 bp, Zea Mays
cgccgcttatcatgcgctggcgaaggcgattgagcgagttcagcggctaatagattttcagttttatttccgggagaatgcggggtggcggcggggcttcctggctttcgtttcgcggcgtggtggtggaggaagaagaggcggtggtttcggcgccggaaaagccaatgcggcgggggcggcggaggtggggagcggaggtggacgacggctactcgccgagctccacgggcggcggcgggagcagctgctgcgattccttcggctgcgactcgcctttggccgggttcgtgcgcccagatggtgacccagacacagatctggagacagatgggttggccacttccacctccagtgcttctgcagcctttaccgagcggcaggacgacgaagcggaagaggcgctgtacggggtgaaggaagaggagtgggctcagatacaagaaccagccaagaatccggcattccgtgccaccccagaatgccacaaacagcggtaccggacggatgctgctgttcttttgcatggtaggaaggggtcgaaacagcggccggcctcacttgacctcggtagccctgggttccatggagccacgttttctccaagtttcgtgattggtggtgtggggttgatgaacaaaggacttggagcatcagtcatcaggtcagacgtgtttcatagtcctgggacgccgaactatccgcgccaccgtgcatcagtgttagggtgccataaagggtggagctctgagagagttccacatccttctaaaggaaataggcggtacccaggcagcagcatggcatttccttacagcaatgggaggacattgccctcgaaatgggaggatgcagagaggtggatcttcagtcccaattccagcgacgcgcttggaagaactacggttgctcatgctcggcgaccgaagtctaaaagtggccccctggggcctccaggaagacttggtggacagtattcatctgtttcttcagtgtcattgcttgataatgggagagctggacctattacagcaaattcaccttttgcggctggagtactaatgccggaacatgtttgtgaaggaaaaagtacaaatggaacctattcaagtagaccaattggtaacgaaatcaacattggaagaggagtcaaaatttgtccactgaatggtgggtctcatcctgttcgaacttccagagttcgccagcgattagattatgcagtcgaatcatctgtttcattgcctagcacgcaagaatctgtccaagacgagcaggttgaaatcacagaagattcagcttctactattgcttctataatttctagaaaagatgctgcaacccagaccagtccagagctaagtaggtcctcttcacccaacactagaccaacatttaatggttccttgtcaacagaacaagtgaaagagaaggggagctgtttgtcagatcttgatatcagggatgttcagatggatgatcgagtgactttgactaggtggtcaaagaaaaatgtaacacggtcgtctaacaagaattcaacaaacataatagagtggagcgaaaagacagtggaatcaaaatcttcgtcctggggctttgccaaagcgaagtgcatttctaagattgatagagaggacacagaaattactgcatgggagaatattgaaaaagcaaaagctgatgcagcaattcagaagttagtgattaagttagagaagaaaaggtcatcttcgcttgataagattttgaacaccctcaaatctgctcaaaggaaatcccaggtgatgcatgagcatgagcgtgatgcagtaacagcaaaccaagatggaaaaggctctaggaaggcaaaaaagagagcacaactcagcaagaatggccaaatcagttcactgagtggctgcttcacttgccatgctttctgatacatgtaattccaaaattgagaatcaggatccgacaaattccttcgcattccatgcaccaccttcatgttccccacatcaaaatctgggtgaagttcggagatccatcacatatcagtacataatatgatgatcccacagctggagattagacagagatctttcgaagatgctagctgcaggctccagctgctatgatagggacaatgccaaggggacaaataaaatgcagcacgaaggaaaggaggaacagtactgcgtacaccccatgtgcccgggtcgatgcctcctttatcattgtgctctgccttgtagctaggcactgtgaggctctgattgcaatcttgttgccaaagctgtatggatcatactaagagcaattccattgcacccaagggacagcaaaatcttgaggtacgaggagaaatcatgtcctgcttgtgcgtgtgactatttgagtgctctgctgggcgctggaagggaaccacgccccgttgtctcttttgtttggtacagtgctttacgaaggtgccatcggggtgactacttgcatttgcttttcagcagcgtcggtgtgttgtgttgtgtgtacctcttctctttgggaaactgagatgttggtttggcctggaaacttcggaatatcatatacagggacgaaaataatcatcactatgacgatttgttgtgggtgtcattttacggcagttattcatctggaatgctagtggcctttttaacatattcttcacttgcc

SEQ ID NO: 21106 - DNA, 1614 bp, Zea Mays
ttcctatcttcatttgatcatgtggaatgaaataatatagcaacacagaatcttctgatgatgttggcaaacaagagattagtgaactatcagatggagatgattttcatttctatgacacaaggcaaagtttcagtgaatttactacgactcctgctgacctgagaaagggatgtgtaaacaccggaaatgaagatcataaatctgttgaatcactgactgttgatgaggccgagaaatatatgctgtcacatccaaaaaggcgctcacagttgcctgagccaatagaaaaggagaaaggggttagcctttggtcaatgattaaagacaatgttggaaaggatctaacaagagtctgccttcctgtttacttcaatgagcctttatcttctctccagaagtgctttgaagagttggagtactcttatttgctggatcgtgcatatgaatgtggtttaagagtcagtcatcatcctatggtcatggcatgtcactgtgaggggaaaggttggaaattttggggagacagcaatctaaagagcaaattctggggacaatccattcgactggatcctaatggtgtgctaactttagagtttgatgatggagaaactttccaatggagtaaggttacaacaacaattaacaaccttatccttggtcgagtatattgccatcaccatggcacaatgaacataagtgggaatagacgatattcatgcaaactgacgtttaaagagcagtctttccttgatcggaatcctcgccaggttcaaggagttgtcaacgatgctgatggaagcaaggtcgcaacattgatggggaagtgggatgaaagtatgcattatatcatcaacaatgatgcctccaagaccaactcccatggttcacatgagggttctggtgccactttgctatgggagaaaaacgagcctccagtcaatcccactcgctacaacttgtccacatttgcaataacattaaatgagttaacaccagagctcaaggagaagctgccaccaacggattcaaggctgagaccagatcaacgtcacctggagaatggggagtacgagaaggccaatgctgaaaaactgcgtctcgagacacggcagcggatggcaaggaagatgcaggagagtggctggaaaccaagatggttccaaagggacagcgaggatgggacataccgctacgtcggaggctactgggaggcaagggagcagagaacatgggttggctgcaatgacatatttggtaacttgtctagcagcccaaagctgccgccatccggtctcaacactagctcaagtatatagaggagctgacatcgcattaatcacttgggtttagctgtgagctaacatcacttgtggtacactgaatcatttgtcacattgaagccaaggacattcaagcttaacccaagcttttgtcgatactagaaagaacacgagaaatattgccaaaactattgttaaaagaattctttatgatatcattttcttctgcattgcacaaggacgttttgcatgtttggtgcttgtgttgtttgtctcgttggtgatgctgctcaaggttgttcaagaactagagcatcaggctgggcttcat

SEQ ID NO: 21107 - DNA, 1056 bp, Zea Mays
gtgactcaaattcgagcacttatttcaaactagacatataccttcatctaataatgtagcttcgtcgctaaccggtaatataagacaaacataggttaaacttttaaatgaacggttttatctaagcacatgggttaaatctgatttctcacaaaaaccgcttaaacacaaaagcacgatttttataattaatcatgatacatttctaactgcttctggagttcttcagccatggagttgcccggatccagatgtcctcaccacccaccacccacagggcacaaggccaccactcaccagataccgaagccgtagcaaagcaaactagcaaatcaaggcaagtctggaacggccccaccgatccgacccaaagcccaaatcggattcccctcgtttctcatcacgccaccgtttacccgccgccgcactggcagcggcgatggcgtcgtcgtcgtcgcggcccctgctctgccgcctcgcggaactggccagcggccgcgtccgcgccaactaccgcatgctctcatccgccttttcatccactgcctccaccgagagggtttcgcagtcgccggcggagcccgaggcggtgctcatgacggaaggttgcgtccggagattaaaagaattacatgctaaagaaccatcctctgaaggtttcaacaaatcctagtgctgttgggggctgcagctgcaagagttctttcatggtgaaatagcttcaattaccttgaagagatcaataattggaaatagcattctgtagcgaatcatacgctttggatctgagtgtacaattgttattttttggtagttctgaagacgtttcttttttagttttgttactgttggaaacatcatcacaaactgtctggttcaatctgtacccctctaacttgtgatagttgtgatatgatgacaagtttatgtacataatcttgtagctattaacagttgactttatgttgctccttataaaattgcaaaataagacgaacagtatttttgtattgatatgactgaatatactgaaaatgtttttagtattaatcttca

SEQ ID NO: 21108 - DNA, 1966 bp, Zea Mays
gtttgtgttggccgattcaccaaaaatcatcggcccttcgttattttgttctgcttgacgaggtcgtcaacgtctggaacagcatcaagcagaaggcccagaaagagcaggtggaggcagggaagacggaagggaaggagaacgagggaggagggcccaagagtgagggtccgcaggagtctggcgccaacgctgcaccggagctttctactgccgagaagcaggagcttcagaacaagatggcgaagctgatggcgatgctggacgaggtggaccggaagtacaagcactactaccaccaaatgcagagcgtggtctcgtccttcgacatggtagcgggggctggagccgccaagccatacaccgcggtggctctgcagacgatctcgcgccacttccggtgcctcaaggacgccatcaacgaccagatcagcgtcatcaggaagaagctcggggaggaggagagctcgtccggcagggagggcaggctgacccgtctccgctacatcgaccagcagctcaggcagcagcgggcgttccagcagtacggcatgatcccgcagaacgcttggcggccacagaggggccttcctgagaactccgtcaccattcttcgtgcttggctcttcgagcacttccttcacccgtaccctaaggattctgaaaagctgatgctggcaaggcaaacaggcctgacgaggagtcagatttcgaactggttcatcaacgcccgcgtccgcctctggaaacccatgatcgaggacatgtacaaggaagagaccggagacatcgagcaagactccaactcctcctccgacaacgcgccagcaggaagcaaggccaagacggcgtcttcgcgagacaaggaggaccacctggcgagaagctgctgcacgccgcgggccgtctgcgagagcagcagccagctgagcgagccaccaggaggagccagcatgagggccatgagcgtcgccgccgccgccgctggagcgcccatggggttattccagaacgagcctggccacgaccacgaccacgacgacagcttcatgagcctgatgctcaaggagcagcgaccgaacgacggcggcggcggcctcctcctccaccacagcgccgtggcgcagcaccaggacgagaacgcccggttcatggcgtaccacctggcggagctgggcaggtacggcaacggcaacgtgtcgctcaccctggggctgcagcgctccagcagcagcctctcggttccgcacgctcagcagagcttccccggtgtcggaatcggtgtcggagacgacgacatctacaatgccaccgccgctcctctcggtgtcagcgtggcgtcgccggactacgagtccatgagccagatggatcagcggcaacggttcgagcagtcgccccttctccatgattttgtggcgtgattgttcgtttgcctatactcactctccgttccaaatcgcaagacgtttttttttttggcttttctaaatccatggcctttgctatactaaatataagatatgtgtttagatatacccaaaacgttttataatttggaacggaagagagtacctcagatgattatatatgtgttacatatgtgcctgaaaggagcattgggttgtagtagcctgtagtttttcaattgtatacagattggtggtatactggtatagcaggaaatgtaatgtagcgtaggtgggttggggtgataggggtgaaaaggaaaagggaaaggatcttgtaaagatgaaacacactatactatacgtgtaaaagcttgtgatttggccaccatactgttgttatgtgatgacattcgaacggggcctagccagtttagaccagtaatcaagttttaaaagcatttctacgagttcatcgcaatcaggtgtgcgaatgacatctaaaccatgtccagaacaacagctcctatgaacatacacactgctccttcgtgtca

SEQ ID NO: 21109 - DNA, 3539 bp, Zea Mays
tagcctgctagtctctccttgggtgattgggtccttcagtccttgcaatttcctcccgcactcccggttctcccgcacgctcccctctgcctgtccgtgtcgcttgcttcgcttctgcaaacccctgcccggcggccggggcgagggggcgtgatggtgttcaaggggcgcttcttctcgtcgcgacacaagtcatcggagtcatcttccagcccagacggcagcaacagcccacgcacgcctacctcggccccggcctcggcatccgcggcgtcgccggcgtcgtcgtcgtcgtctagatccgacaagaagaagactaaatcggagactcctaagaagcgcgacaagctcttcggttccgcggccaccgcacccaagagcgccgcatcgtcggcctcgtcaagcccggcgggtgatgggaggaaggggtccgtgccgcatcatagggatgcgggcgtcgggggcgggggtggcgcgtcggcggccgcgctgtcgccgatcctggcgtcctcgctggggctcaaccggatcaagacgagatccgggccgctgccgcaggagggccaacgcatggctgccgtgatcgggagcagcaacctctcgcgcgggcagggccaagcggaaccgtcggctgcctcagccggcgtcggcggtagaaagggcgtcacctcctgggcggatactagtagtagcagccgcggaaaagggaagacgaccgagctgccgatgcgaagtacagctgggacgagcttgggaccagtagggaagagcgctgtaaaagctaaacctagtgcacagcggaaccattctggagatttgaggacacctactcacatacctgaggctgcgtgtgcatatgatccgtgtgagacaccaaaggaatccgagtccccacgctttaaagccattatgcaggctactagtgcaccgaggaagagactccctgcagatataaaaagtttttcacacgagctgaactccaaaggggtgcgcccatttccttttttgaaacctcggggcatttacaacttaaaggaggtaataaaagttatccatgtgagatttgagaaggcaaaggaagaggtaaattcagatttggcagtttttgcaggagacttggttagcgtaatggaaaagtatgcagactctcatcctgagtggaaagatgccctggaggacttgctaatacttgcacgtacctgctgtgtcatgacacctggggaattctggcttcagtgtgaaggtatagtgcaagatttggatgaccatcgtcaggaactctcaatgggtgtgctgaagaaactatacacccggatgctttttatccttacaagatgcacaaggctgctccagttccacaaagaaagtggttttgctgaggatgaagttgttattgatcagcgtgataagattatacaatctgcagataggcagattttaactcaatcaggtgtgggtgacacaacatccagagccagtaaaagtgaggcaagaaaatcatacagtcaggagcagcataatttgaaatggaagcgtagccaggagataaagcctgttaaccttcttccaccacttgatacggatgttaagaaagtggctgattctccaaccaaagaacgaatatcttcctggaaaccttttccatctcctgttacgaaggtcccaaaagaatctactcctactaaattggaatcacctaataagaaaacagatgcacactctacagttagtagccatgttgaattaagcagtccagttgaatctttaccacaacaacagcttcctgtcaagcatcaacataaaacttcatggggccactggtctgaccagccaaatatttctgaagagggttcaataatgtgtcgcatatgtgaagagtatgttccaacacagtatgtagaagaccattcaagggtctgtgcaattgctgacaggtgcgataaaaaaggtgttagtgttgatgaacgcttaatcagagttgcggaaatgctagaaaagatggtagaatcttattcaccgaaagacctgccaaatgctgcagtcagcccagatgttgcaaaagtttcaagttcaagcatcaatgaagaatctgatggtccctctcctaaactctctgattggtctagaagaggatctgctgatatgcttgactatctccaagagactgataacactatttcattggatgacattaaaaatcttccttcaatgacatgtaagactcgttttggaccaaaatctgatcatggaatggccacatcatccgctggaagtatgactcctaggtctccattaactccaagatcaaatcatatagacatgcttttagctggtaaaaatgcaattaatgagagtggtgatcttccgcagattgtcgaacttgctgatattgcacgatgcatagcaaatacccctctggatgaagaaagcgcattatcccaaatggttacctgcatagaagatcttcaagaaattgtcaaccgcaggaagcatgaggccctcacagtccagacatttggaacacgcatagaaaaactacacagggagaagtatctgcagctctgtgactcagttgatatggacaaggttgattcagcaagcaccataatggatgaagaagatgatgttgttcgtagcttgcgcgcaagtcctgtccatccagtcaaggatcgcacttcaattgatgactttgaaatcatgaaacctattagccgtggagcatttggacgtgttttcttggccaagaaaagaactacaggagatctttttgctataaaggttcttaggaaggcagatatgattcggaaaaatgctgtcgagagtatattggctgaacgtgatatcttgattacagtcaggaacccttttgtggtacgctttttctattcgtttacctcacgggagaatttgtatctggtcatggagtacctgaatggaggggacctttactcattactgaggaatttagggtgcctggatgaagacgttgctcgtgtatatcttgcagaagttgtactagctttggaatatttgcactctatgcacatagtccatagggatctaaagcctgacaacttgttgatagcccatgatggacatattaagttgacagattttgggttgtccaaggttggtttgatcaacagcacagatctgtctggtcctgctgttagtggggcttcactgtatggagatgatgagcctcagatgaatgagctcgaacaaatggatcaccgagcacggagacaaaatcgttctgctgttggaactcctgattatttagcaccagaaatccttttggggacaggacatggttgcagtgcagattggtggtctgttggtgtcattctgtttgagctcattgttggcatacctccattcaatgcagaacaccccgaggcaatttttgaaaatattatgaatcgcaaaataccttggccacatgtcccagaagagatgagttttgatgcacaagatttaattgacaggattaggatgcaatctgcagctctggactgtgggcgaggttaagttgactg

SEQ ID NO: 21110 - DNA, 932 bp, Zea Mays
atgaagtttgaggctgaggtcaaaaaaagttcaaatttgcaaaaatcattgaaagaacttcaagataaatgtctagagttcagcaaccgatgcgtgcagcggttaaggcagatcttcaactcggttggagccagctctgagaaattcattccttcgattgaggacttgccagggaccttcaaacacattaagggcgaagttgatgctcctgatgaagttatagccggacacggtgatttctgtgccctgctagcttctcgaggcacggctgttgccttcatgaaatctggttgcacgcatggaaagattgttaatagaccaaacttcagcttatcactagcagatctgatttatatccccagcctagcttgaagcataggaaacagatttataaagcaaatatgggcaaagggtgggcgaagcctagctggtgacgaagctcgaagtcacctcaagccggatgacgaagccgaagaacacagagtcgaagcttagcagacaattcgaagctcaacagatggtgatgaagctcgaatacctagctgtggaagaattctaagaaaactcttgtattaacctttataaagagtattgtaacttaagaatcagattctactctgtaaatttgtccataccttgtaatatatttttatttccattttacctttccatcgatgtatgaaatgctttgatgtggtcgaaatctgtattttttgagccgaaggcgaaaaacaccttcccttcttttcgtacacaacgaagcatgaatctgcttttcaagctgtatgcttagagccgaagcaactgtctgtatttgtatgatatgatgatgatcctatgtatgtctaaatgaatgtttatgaatgcaatgtatgatgtaatgtatcgtgcaaatgaatgtccaaacacacacattcgaaacttcatccaca

SEQ ID NO: 21111 - DNA, 2814 bp, Zea Mays
aaaaaattcaactgatcccttgaccattttcattagagattatagaaaaggtctcccttgctttatttccatccaaaccaaagcgaaccaaaatcatcttctagatcagtttctgacgatggcagttgaaaagctaagcatgatgacctaatagcgtcactgctgagcttaagatttcagattgagcagtttacttaattatactgaccttctcatatggcgttggatccgtgatgcctcctccattcctgaagctatttggaattcattgcctgaatcagtgttctgaagtgctatctaacagtcagaaatggatggatccgagcttgaaaatcctacttctagaagctcatcccagaaatctagccgacgttcgagtagtaggcgttctcaaaagtcagctggacagcattctttgaccggtgctcaagagaaaagaagcaaatcgaaatcttcaaggcagaaacacttggttattgacgacaaagaggctaaaaaagggaaaaaacatgaccacaaaattgacgtggcagatgagaggtccaattttctaggttatgaagtgtatgctggaaagctgattcttcaaaagaaaaatagaagtgcgagtgataataatcagttaccgtcaaacggaaaagctgatgcaattgatgctagactcacaagtaaagctctgatctggggcagctctgtactcctactggaggatgttgtctctgtatcatataattctggagtcaaacattttacattgcatgcatactcaactaaaaagtctttatttaaaaagacatgcagagttcagaaagatttctgctttatagcctctacccttgacgaggccattttgtgggtgacatgctttgctgaacaaagtatatatgttaacttactacctcgccttggagcatctagtatcaatcaagactcagaaaatcccctcagtgagtctttatttgaccagccaccgattaaatgcaaatctccgcaaagagtacttgttatattgaaccctcgatctggacatggtagatcaagtaaagttttccatgagaaagctgaacctatatttaagcttgcaggttttcagatggaagttgttaaaactactcatgctgggcatgcaaaatctcttgtatctacatttgatttcagtgcatgccctgatggaatcgtgtgcgtgggtggtgatggaattgtgaatgaggtgctcaatggtcttctcattaggagtgatagagcagaagctgtatcaattccagttggaataattcctgcagggtctgacaactcacttgtctggactgttttgggagttagagatcctatttctgcatcattattaattgttaagggtggtttcacagctctagatatcttggctgtcgagtgggttcaatctgggcaaatacattttggctcaactgtttcatactatggttttgttagtgatgtcctggaactttctgagaaatatcagaagaaatttggtccacttcgatattttgtggctggaatactgaaatttttatgtttgcctagctacttctatgaactggaatatcttccttcgccaaaggagatggccgtgaatggaaaaggtacagatcaagacaaggcccacctgtccaatgtctataccgatgtgatgcacagcagatcaaagaaagaaggaattccaagagcctccagtttgtccagtattgattctattatgactccaagtcggatgtcgcttggggatgttgatacatcaggtagtacagtggcaagcactgaaccatcagactatgtacgtggtctcgatccgaaagcaaaacgcttgtctctgggaagaagtaacattgtttcagaacctgaagaagtgctacaccctcaaccacatcatggatcattctggccaagaaccaggtccaaagcaagggctgatagaaattcagttggtataacgtctactaatgacacacggtcgtcttgggcagccccatcaatgcatgataaggaagacatttcctcaacaatatcagacccaggacctatttgggactgtgaaccaaagtgggacacagggccaaaatgggatagtgagctaacttgggagcctgaccaccccattgaacttcctggaccacaagaggacatgggaattggagcaccgatggaacttgtgccaaatttggatgagaaatgggtagttaggaaagggcactttcttggtgtcctagtatgcaaccattcatgcatgacagtgcaaagtctgagttcacaggttgttgcaccgaaggccatccatgatgacaacagcttggacttacttttagttggtggaaaaggaagatggaaattgctgagatttttcatacttctgcaattcggtcgccatctctctttgccttacgtcgaatatgtaaaggtgaagtcagttaagcttaaacctggtgcaaacactcacaatggctgtggcatagatggcgagctttgccgtgtcaagggacaggtactctgctccctgcttccggagcaatgcagactgattggccggcgatgtagacaatctatttaagcgctgtgttgaatttcatggatcctggggttctttccacttctaacaaatgtttatataactatactttctgatgggattaagcttgggttggtgttgcaaatgttgagagtttgaaccagaagcaatgttgtgaggtttctgtatatttgagcggttataggatgatatgctgattctgtttaattatgttgattttgcttatatatattcaatagagtaatttagtcccacttcggcgtggcggg

SEQ ID NO: 21112 - DNA, 1210 bp, Zea Mays
attttaatgacatgctttgctacaaaacacagatcgacctacaaaacaagagaaggaaatctagccagaagaaaataacaggatttcagtttgtcccaggggattcttcaatggtcataatcacatctgcagattcacggatcagagttcttgatggttttgagctagcgcataggtttaaaggattccgaaacacaagcagccaaatctcagcttgtttagctggaaatgggcggtatattatctcggcaagtgaggattcccatgtatatatctggagaaacaatgatggtccgaaaccaagtagaaagaagggcattgtttctgtcacagatagccatgaatacttccactgccagagtgtgacagttgctgttacctggccttttgccagcaccgcaatgacttgtttaatgaaccccgggaagcaagaagagcttgagcgtgggtctgagccgcaagatctgcaaaccaaacttgccaaggcacaggagatgccagatgttgagtaccggagcacaaatatcacgagtaacaactcgaatcataataatggtgaccggacatctccgacttggcctgaaaaacttaacacaccaccaaatcaaagtctcagggctactacctgccatgccaacgagggagatcaagctctgaatcggtcggcctggggcctagtgattgtcacagcaggccgtggaggtcaaatcagaacatttcaaaactttggttttcctgtaagagtatagcatgaatatgaatacgtaagataatagtcactgccattcaggagtgtagtttgtgtatagataggagatagtgggtgagtttcacactattcagggattgggtctgattgttccttggcgtgcatgctagagatcagaatcttcatctgacatacactgtgtactgcgaaacttggtatttatttaccctgaggcctaaattgtacacgaaagagaaagccctagagagcaacactatcagctgactgcagataatttatctgtccgctaaaacccctcctttcgctattactattccgaaccattgcatgttcttgtaagaaaaaaaaatacatgtggtgaaattgtcgttttggctttgtggtctcatggtattggaaccgtgaataatttttacatgttcgaacagtcctggcaaatgcagtgtttatgcgtcagataagtcaataaagaagaaaaaa

SEQ ID NO: 21113 - DNA, 5129 bp, Zea Mays
ttcttttttaggaaccggccttataagcaatattgtgatactctttacatgaatgtaggggtgtcagtataatcatgatgctttgtgtaattaggtatccaagcggcctcgttctgaattaacagaagtctcttctcatactggcaaagatgtttgtgaaaacatacaagacccgaatggtcaggttggacactcttggggctgggacgatgagggtgtcgttatggacatcaatatacttctgtcagagtttggagattttagtgacttctttcaacaagaggagttagattttggtgagcctccaggtactgctgaatcacatgctctagtaattcctgcttcagactgtggagatgtcacattcacagatagtccatcaacagcaatggatatccctgaacaaagactttctcctgttggtttcacaactttggatgcatttgaccatcaaattatggccccagctcaagatgttgttgctaaagttcaagaacctcataatgatactgcaacacctgcacagtcccactcgcaagttttatcatctggaagatttgattatcttaccaaagctgaagcaaagctcacatttgctccagaatatgcagctgttgaaattttgattgctgaggccccaacaccattgtttacaaatccatactttcctagatcaaagaaaccaggcagttctagttttagtgcaagagtttattcatatgatgttgcacaaagctctcaaattgaatccacaggagacaagccagataagacttctaaactaatatctggtaatcatttacatgatattagttcatcaaacttgtacacacttgtccaaggtgggaataaagggagtgataagatcttaaagagtactgatacacagccctctaagggagaattgtcaccacctatttctggtgtgacttcatttaatttttctcttgtttcacaaaagaagagtggcaacatgttcaatgctggctattttctgctgtctatgaagactgctttggcaactgaaattgaatgcatcacgttccaggctgccatgtgcagaattaggcatacactattgtctctgagaagcaaagcatctgccgagtttaacagtgcaacatccagcttcatacagacaaatgtcagcaacaaatcagatctcacccccagatccttaatggacaatgtgggagtttggaggcctgttgttacacctaaagggcctaaatctcttgagtctttgtctgctaacacattaactggtgcaagcccaagtctgtctatacaaagacaacctgttgtagatcttctctgtgccatgactctgcttgttcaacaatctacttcgtttgttgatatgtcacttgatatggatgacggggacggttcttttttctggctttccctggatgagcaaaagagacgtggattttcttgtgatccttctatggttcatgctggctgtggtggcctattaggaacatgccattcaaaggattgcgctggtgttgatttagtcgatccactttctgcagaggtttcagagccatccatgattagcttgttgcagtcagatataagagtagctcttaaagctgcctttgcaaacatggatggcccgttatcagtaattgattggtgcaggggtcgaggcaatgctgctgagtctgcaggtacgggagatgcatactcttttcagtactccagtggtgatatcctggagccgtcaagttcgttgtccattggtggagattcaatgagcccaccccagccaaccagtagcaatcgaggcatttcagaattagagttccaaaagggatatcaccgtgtcagaccaaccattgctgtcctcccttcaccttctatgctagtcgggatgattggttgaaggcctcggtgaatagtcttaaaacatgggagaaagctccttttgaaccttatgccttgccgaagcctgttacttactatgcactttgccctgatattgatatgttgacttcggcggtagctgattttttcatgcagcttggaacagtttatgaagtttgcaaactgggaactcattcgccccaaaacaatggaggacaaatggaactatctcctggaaaatatttgccttcaggacttgttctagttgattgtcctgagcagttgaagaaggttcgctgtggccacttaggtcccatcagttcaacaagtgactgtcttcaagctttttcaaaacattggagcgtgaaaagttttgtaacatctatttcaaggatacttaaggatataaagctgacttcaaacatatctacaaatcagaaagagagcagtagtggaccttgcacagtaatttatgtagtttgcccatttccagaaccttgtgcaattctacagacgctagtagaatgttctgttgctcttgggtatgttatttcatccccggaaagggaaagaaagttactatattcacaggttgccaaagccctaaacagcagtgcttctgtagatgaagcatcagcatcaaatgtcgttatgctatccgggttcagtatacccaagctcgtcttgcagattgttactattgaaactgtactgagaatggataagccaaacaaggagcttgctgttttgaaggacatagcattcacagtgtacaacaaggcacgacgaatcccacgggctgtctccacaagcgatatgttccagtcaccaacttatttgggtagatctcagtccacaatgatgcatgttacatctcctgctcctactctttggaaggaatgtttagttcctcgaatgtctgggccaactctctctcgagaaaccgattttgatgcatccatgaggtcggcaacatgggataactcatggcagcctgctcgttcgggaggacttctggacccaagtaagctgcctgatttatgtgctcaggatgataggaaatatgcctttgagccacttttcatactagcagaccctgggtctgccgatcttaatgctttaatggaaccatcaaaatctggagcagatgcatctggcagcagggtatatggctcaatttcaggaagtaactctgatagtggagtgagccctctactcgacgtatctgagagtgacagtgcagcaagtcttcattgctgttatggttggactgaggactggcgatggctagtgtgcatttggacagatgctagaggagaattattggacagcttaatatttccttttggtggtattagtagccgccaagacactaaagttctccaaagccttttcatccaaattctacagcaaggctgtcaaataatgtcgtcttcacctgaggctagcaatatgagaccacgagatgtcataataactcgtatcggaggtttccttgagcttgaaatccaagaatggcagaaggcaatatactcttatggtggcaatgaagtgaagaagtggcctgtgcagttacggcgatccatacctgagggtattccacctagttcaaatggtcctacgctccagcagcagcagcagcaagacatggccttaattcaagatagaaacatgccttcctcaccaaaccctctgtatagccctcatccaaaatcaagcttcatgaaaggtgcacttggacaatctggcaacaaaaaacagatccttgtggaacaaagtggaatggacacttcaaggggatcactgcacttagttcgtagcatcagtttggttgcagtttcccaagatcattcgttgcatctcacatgccaagcagatctactgagcagacctgcttcagctggcgaagggagtcaaggcagcagtggcccttggagttacctggaaggtttcactccagtgaagtccattgggtcaatgtcagcgtcacactcgtaccttctagttccttcgccaagtatgagatacctctctcctgcaacattacagctcccgacatgcctcacatcggagtcaccgccgcttgcccatctactgcacagcaaagggactgcgattcctttagcgatgggctatgtcgtctcgaaagccgtcccacctgttaggagggactctgcacaactcaccaaggatgaacagccctctgttctctcagtcagcatcatcgatcactatggaggcagcagtgggactgttcaagagaagatgagccgaggcggcggcggcggcagcaaacaggcaaggaacttgagtcaggagacaacaggtcgtgagtgtgagatggagatgcatagtgtgctggaagctgtggccgcggagcttcactctctgtcttggttgacagtaagcccggtgtacacagaaaggcgcacagcactgccctttcactgtgacatggtcctaaggatgcggcggcttctacactacgcagataagtatctatctgaacctaagggagagacaactcactaattgtcatgtacaattaatatctagctaggtaggtatgtgagggcacatttgacgagctttgtagactgattttgcaataaccctgataacttacaggtggatgctgtaacctttttctctttttttaggtctgtattgtttgtcgacacaagatttgagatatgattccgtttgttgactgtattaatcagaattacaagtacagcgtttactgggattgccgtgccctactgcgacgacgtttttttttcctttaatcagaaatacttgtaaaatcaaaatcatctctccgctacggctattgctcacaccccctggctggaataggcagcttaaaacccaggtaaaactgacaggtccgcaatccccttgggcaaactctcaatcttcctcagcaacgttagccggttgttgcgaactctctcgtcttcctgcgcataatatacaccatcatcactctcactcatcagcacaagttaagtttttcaagggcctcacaaaactcaccgccatcacgaagacactattgaagaaatcttctaggggttgtatcaggataagagaagcatccacaaaggtcttaatatcaacacctacagaatgggtagttggaggaatcagacaaatgaacatttaaattgaaatgaaaaatggatatgaaaaacatgtaccaggatggatcttatcagcaacctccaagtaggcgctccacaaaactttctctt

SEQ ID NO: 21114 - DNA, 2788 bp, Zea Mays
ctcaccccgcgcgtctctcttctttccctctgtctaccgcacgcgcccgtggctagctgccagccgcgcgcccgccgccaccccgcgcccaccccactgcgcgccggctggcgcgccgccacccagcgcggcccgccctcgccaccctgtggccccgccaccgccccgctgccccaccgttaaggcaggtgatgcggccgacaagggggcggcgtccaggaacccacaaaatcacgtcgtggtggggaggcacgggattcggatccggccgtggccacacccggaccccatcgaggtgatgcgggcgcaacggatcatggagcgtgtgcaggaggaacagcgccgctggtacggcgtcaaggagccggggcaggtgctcgccgtcaccccgacctactcacgcgcgttccaggcgctccacctcaccggcctcctccactcactccgtcggaatccttgcgcatactggcaaggcagaccaactgctgctcagcgaggaggacaagcagaatatgcctcttccagtccatggccctgcttgcaagtcctcagggcatctgattggatggcacacgttcaactcattgcccttctctaggaagacggccacagttgttggtgaagcagcccctattctgcccagggatttctagtgggctagttttgtgttgaactcgaggatgctgtggaaggaggctgacggcaagcctgactgggtgaaggatcttgatgctgtgggcgagaactttgaggagcgctggttaaaggcatcaaagcgcagtgccgctaagaaactgtcaaaattgtcgaggtcgcataatgattcgctgctgtggatcaacaagatacctgatattatttctattgacgacgaaatctattcaaatgacgatgatccagagagatgggacatgcagattttccgatcaattgattcgaattctgtcaagggttttccaaaagatccacgggaggccactagtaagaatcttgtttgtgggaaaatgtactgattgatatgagcgtgcatacaacatatgtgaatgccatccgaggtgctcaacatttcatctatattgagaaccagtacttccttggctcttcatttaactgggattcacatagagatgttggtgctaataatctgatacccactgagatagcactgaaaattgcaaacaagatttattcgaatgagagattttcagcttatatagtagttccaatgtggcctgagggcaatcctactggtactcttacgcaaagattctttattggcagaaaatgacaatgcaaattatgtatgagataatctataaggccatgaaagaagtaggactagatggtacatatgagccacaggattacctgaatttcttctgccttggtaaccgtgaagccgaggacactacttgcacatctagtggaccattctcaaccagtaacccacagcttggatatccaatcaggaccaagctcggaataataggagattcatggtgtatgtgcactcgaaaggcatgattgtggatgatgaatatgtgataattggatccgctaacatcaaccagagatccatggaaggaactagagatacagagattgcaatggctgcataccaaccccagcatacattggcaaatatgctttctgctcctcgtggatagattttcgggtacaggaaaatacagtgtacgtgttgaaactgttatcctgccccaggttgggatagacggtggtacattcgtgttggtagaactgtgagaagaaaagatgggaaaactttgctttcttggctgtgatgattatctgctcaaacaagacatgcaaattgcaaaactcttaaaggatagtattagttctatttgttcatatagttctacagctagttgtttcttgctttgttcatggattgcaatactggataagatcatgatggatgttgtgtgtgttttaatcaccatttctaaaatttattctattggtaagacgattctaagatataggtcggagatggattccttgcatatacataaatagataaagaagcaaccggtttataacaaaaatatgtcttctattttgcctgttgcccaattctcttttagtgtagcctacttacaataattaaaagaagagttggtgtctgtttgagtagacaactaagtgcatatataagtacgtgcatgattttgattactaattgtgattttgatgatctttcttttgaagacggtctaacatataagcgcatgatttagatgaacggaattactattgtgccatttctgaagaatcttactgatttctcttgccttcttagaacaacatgggaagaagtgatgatgacagtccatcgccgccaagaggtcacaagagaagaacttgcagcccaagtcctcgtggtagttatggaggccatggcaagcgccccacaactaatcttatggtgacgaatcttggtccggattgtaggattctaactctcatcaagtgactcctcccctcacgatgactttgcggacagatgtctcaattatagtggtggagctacgaacaacaatccgatgtcctgatcgagagcgatggagctaatgtttgaacttgtgtgtttgaacttgtgaactaaaaatgtgaactatggatgtgaatttatgtgaatttgtgaaattatgtatttgaacttatgtgaatttgtgaacttatgtatttggacttgtgtgaatttgtgatatgaatatatatccatgtgtttgaaatttgtattgtatgtgatattctgtgttgc

SEQ ID NO: 21115 - DNA, 2034 bp, Zea Mays
gcatttggatcttttagtctagacatgcatgctttgaacttgagttccacctcggtattgggcatcgacctagttttgtgccatccattgttgttagtgttagctagcaaacatggccttaatcccatgatgagcaggtgcaggtgcagatagcatcatccccaaaaacataaagctgcagcaacaactagcctagaaataaagcatcctagctcttttcctcctccaccaccacttctcaagtactcccatccaacacgaacgaacatctagagcttggaagaaagctagctagcgagaggaataggatcgcaatggtggaacggccgggcagatcggcaggcgtcagggaggccaataagacttccgctgccgccatggtgaagacgacgacgacgaccaataaggaggagctggagagcccgtcctacaggttagcagcgttcaagagcctcttctcgtgcaggaacagccacgcgcggccgcgggcgccggacaccggcaccggcagcaggagcaagaggctgggctgctccgcgccgtccatctgcaagctcaaggacgacagcgtgcccgtgccgcccaaggaaaccacgggcacggcgtcggcaggcgagccctgcaagcgccgcgcgtccgtgagcgggagcagcgatcggtgcgtgaagaagccccaatgtggcgctggcagcaacaagcagctgcagcgtggcgggtcgtcgtcgtcgtcgggcgggtcgtcgttcagggccggcatgcagctgaggcggctttcggggtgctacgagtgccacatggtggtggcgggcagcgcctccatgagggccaccaccatctgcccctgcccggactgcggcgaggtgttcgtcaggcaggagagcctccagctccaccagtccatcaggcacgcatgtccgagcttggcactgatgacacgagccgcaacatcatcgagatcatcttccagtccagctggctcaagaagcagagccccgtgtgcaaggtcgaccgcatcctcaaggtgaacaacacgcccagaacgctggcccgcttcgaggagtaccgtgacgctgtcaaggccagggcgggcgccgagcagctggcggtagcggcggccaacagcaacaggcacccgcgctgcaccgccgacggcaacgagctgctccggttccactgcgccaccctggcctgctcgctcggcctcaacggcgccacgcacctctgcgacgccgcggggacctgcgcagcgtgcggcatcatccgcgacggcttcagcagcggcggggtgctgaccatggccacgagcggccgcgcgcacgacgctgcggaggctggcgccggactggatgaggaaaccactccaagggcgatgctggtgtgccgggtcatcgcgggaagggtgaagcggcccaaagaagcggtaccagaggaggaggccgtcgccgacgccgccgaggagtcagagtacgactcggttgcggggtcggccggggtgtactccaacctggaggagctgctggtgttcaaccccagggccatcctcccatgctttgtcgttgtctacaaggcttagctactggtggttacactttacaatccatgcaatgcagtccttgtattaagtaacaaacaattcatgataaacctaatgtattgactgacgaatggtcactcttaactgcttgctatttgtgacatccatgcaacgtgttgagagcagtgacatgacatagcgggttttaacccaagacagacagacagaccagaccatagggtccctcccatcctcctactcccactccaccgttgcaggcggcttagatgtgatgtcctggcaaacgcggttgatgccacgcacattgttgcaaatcttgtttaccacatctaccaggaatgcatgctcaaaatagtacctgaaagtaataaaaaacgaatgactcgatatgagaaaatatgcagtcaagtgtttaaagacaccatgggcaacaggaacagagttggaacttcactggtacataccaatctgcagtcatg

SEQ ID NO: 21116 - DNA, 1536 bp, Zea Mays
cgttggcgtctacctcgccaaggtctacacactagctgggctgagtggaggttttctaacatttttcatttccatgtccatgcttcttggacgatttgtctctagaatcattaggaagcagtggagccaacaatcacctaggtcgttggttgcgtatgtgctgcctatgaccccatgtctcctttacggtctttactatggtggattccttatccagttcctgattgaaaagatgggcatgatgggatctcttccaaaaccatatggatattttgtgcctgatgttattgttggagctgtagttggattagtggttggttggtgttttggtcctctatcacctgttgctagtcgttggttgtcgaagacttcaattatccatggcttcctgcaaattacagtggttgctttggctatctcatcccaactgtttccttacagcactggagcaccaaaaagagttgttcttcaacatacttttgttacagatgctaataatatcgtggattcaagctatggtttctctgtggttgattctaactcattggagttccttttcaacaatgcacctgaggccgccaaatggctgaaggataactctgagttgtcctttgaagaaaaatatcggtctgatagaagctcatggttggctttgtatcctgtcccattcttgttctctggaagtttaaaattccaggcacaaactgaagagattaaaaagtactaccagcatttccctcagttagctgttcaggagatctgggataacaatggacagcgaagggtgcatctcaaacttgcacttggttccttatcagaaatttggacctctgtgctcaatattactgggccactatcaaattggtccttcgctgataacatgctcccagctcctcaaactgtaagtggtgggccaccatcatatatttgtcgactcagtggaaagagcgatgtggattggtctttctggttggaggcaaactcttctgaaagtctgagagtcgatgtcgcagtacttgatcagtaccttgttgatagtacaaagaaactcaagagcctcttcccaagttgggcagacttgacagccttcacaacatttttctcaacgtatcatttatgaggaggtcaagtatttgatgttcaacaagtgtaaatcattttctctttgtagccctacgtttcggggctatatgtggttttgtcaccatgatcagctggacctgagccccgaggctggtgtttgtaaaatctttgtaagcgtgccttgatgtattcatgaatcacacaagattgtaagaatctcaagtcagtcataaattttttaccacttagtcattcacgattgacggtatggcatcactgatcattcgtgttctaagtttaaaaattctaaaaagaaatgttgcatcgacatagaagtactgcgtttcattttgtaatcgataccacctgaggtgaaaggttagattttttatctacagttcgcaatcccacttgaaaaaggaacacattatgcaggttcaaggttttggagtg

SEQ ID NO: 21117 - DNA, 1665 bp, Zea Mays
gaaacaaacacaccttagttccttgttttttgtaagtctgcaagtacctattatcaaccatgtttggacgcatgccaaggaagagtagtaacaataccaagtattacgaggttcttggtgtgtctaagaccgcaagtcaggatgagcttaagaaagcatacagaaaagctgccataaaaaaccatcctgataagggtggagaccctgagaagtttaaagagctgtctcaagcttatgatgttcttagtgacccggagaagagggagatctatgaccagtatggagaagatgcccttaaggaaggaatgggaggaggcagcagcagtgatttccatagccctttcgacatttttgagcaactttttccgggttctagcacctttgggggtggtagctcaagaggacgcagacaaaagcgtggtgaagatgtggtgcatactatgaaggtttccttagacgatctgtacaatgggacaaccaagaaactatctttatcgcggagtgctttgtgctccaagtgcaaggggaaaggatccaagagtggggcatcaggaacatgccatggttgtcgtggtgctggaatgagaacaatcacaagacagataggccttggcatgatccaacagatgaacactgtttgccctgaatgcaaaggatcaggtgagatcataagtgacaaggacaaatgcccaagctgtaaaggaaacaaggtagtccaggagaagaaggtgttagaggttcatgtggagaaaggaatgcaacataaccaaaagattgtattccagggtcaagctgatgaagctcctgatacggttacaggagacattgtttttgtcttgcaacttaaagaccatccaaaatttaagaggatgtacgatgacttatatgttgagcacacaatctctctcaccgaagcattgtgtggcttccagtttgttcttactcatcttgatgggcgacagcttctgatcaaatctgaccccggggaggttattaaaccaggtcaacacaaggccattaacgatgaaggtatgcctcagcatggccgtcctttcatgaagggccgtctgtttgttgaattcaacgtggtgtttcccgagcctggtgcgctctcccctgcccagtgccgatcgttggagaagatccttccgccgaaaccagggagccaactgtcggacatggagctggaccagtgcgaggagaccacccttcacgatgtcaacattgaagaggagatgaggcgcaggcagcagcagaagaagcaggaagcctacgatgaagacgaggaggaggatgctcaaccaagggtgcaatgtgcccagcagtaaaatccgtgttcgttggaactgttctccaaaagtttcagcaggattttttatccatctgatcatctcgattctttttggcaaaaatataatcgttttataaactttaaactgttagttccatcctagtgtcagggaaaaaatgagagcccggaatggcatgttccttgtttgaactgcaatgcgtgattggtgttagttaagctctgctccatgttattttgttgtacccgtgaaaaaggtatcatgttcatggtgtgctactatttttgatgtgtaagaaacattgagcttgctggtagtgatgatttgtgatgcaccctggggtgctggctcaaaa

SEQ ID NO: 21118 - DNA, 4023 bp, Zea Mays
atcacacggccgtgaggagcaactctgttcctcatctcccgttcaccccgcgggcgcagggcgcgctctctcctcgtggcgatcgccgaccgtagcggccgctgcccgggttttcgtcggccgcttcgccatgtcttcgctggacccttcgccagcgacgagcacccaacagaagcaattggagagtttggtaaatctactgacgcagggaagcaggtgtaactactgagcaggatccggattcatcgactaatattcctgagtatatgctttttgggtggcatctcttcttaatgctccatttgagatcaccagaattgttcaaggacctggtgtcctgcatccatggattagttgctgtgttggccatacttttgattcacgtgccagctaaatttaggagcttcacgattgaaggctcttctcacttaatcaaacaaactgagaaaggcgtggatcttattgcttcattatgtcataactatcatacctctgaagaacgtttgaaagaaatgttgcacaagtctcacaatgcaatagaagacattttccatatgaaagcactaagtgcttcagagtgcaaaccagaaaatttggataagatagacacagatgacctgatgtatttcaaaggtctgattgatatggaatgtttccagtcaaatttggaaaaaatggagaaactatgtaattctaatagctgtaaaggggagcttgattttaaatcaattttgatcaataatgattatattccctatgatgagaactcgacgggggattccaccaatttaggacattcaaagtgtgcctttgaaacattggcatctcccacaaagacaataaagaacatgctgactgttcctagttctcctttgtcaccagccaccggtggttcagtcaagattgtgcaaatgacaccagtaacttctgccatgacgacagctaagtggcttcgtgaggtgatatcttcattgccagataagccttcatctaagcttcagcagtttctgtcatcatgcgatagggatttgacaaatgctgtcacagaaagggtcagcatagttttggaagcaatttttccaaccaaatcttctgccaatcggggtgtatcgttaggtctcaattgtgcaaatgcctttgacattccgtgggcagaagccagaaaagtggaggcttccaagttgtactatagggtattagaggcaatctgcagagcggagttacaaaacagcaatgtaaataatctaactccattgctgtcaaatgagcgtttccaccgatgtttgattgcatgttcagcggacttagtattggcgacacataagacagtcatcatgatgtttcctgctgttcttgagagtaccggtctaactgcatttgatttgagcaaaataattgagaactttgtgagacatgaagagaccctcccaagagaattgaaaaggcacctaaattccttagaagaacagcttttggaaagcatggcatgggagaaaggttcatcattgtataactcactgattgttgccaggccatctgttgcttcagaaataaaccgccttggtcttttggctgaaccaatgccatctcttgatgacttagtgtcaaggcagaatgttcgtatcgagggcttgcctgctacaccatctaaaaaacgtgctgctggtccagatgacaacgctgatcctcgatcaccaaagagatcgtgcaatgaatctaggaacacagtagtagagcgcaatttgcagacacctccacccaagcaaagccacatggtgtcaactagtttgaaagcaaaatgccatccactccagtccacatttgcaagtccaactgtctgtaatcctgttggtgggaatgaaaaatgtgctgacgtgacaattcatatattcttttccaagattctgaagttggctgctattagaataagaaacttgtgcgaaagggttcaatgtgtggaacagacagagcgtgtctataatgtcttcaagcagattcttgagcaacagacaacattattttttaatagacacatcgatcaacttatcctttgctgtctttatggtgttgcaaaggtttgtcaattagaactcacattcagggagatactcaacaattacaaaagagaagcacaatgcaagccagaagttttttcaagtatctatattgggagtacgaaccgtaatggggtattagtatcgcgccatgttggtatcattactttttacaatgaggtatttgttccagcagcgaagcctttcctggtgtcactaatatcatctggtactcatccagaagacaagaagaatgctagtggccaaattcctggatcacccaagccatctcctttcccaaatttaccagatatgtccccgaagaaagtttcagcatctcataatgtatatgtgtctcctttgcggcaaaccaagttggatctactgctgtcaccaagttccaggagtttttatgcatgcattggtgaaggcacccatgcttatcagagcccatctaaggatttggctgctataaatagccgcctaaattataatggcaggaaagtaaacagtcgattaaatttcgacatggtgagtgactcagtggtagccggcagtctgggccagataaatggtggttctacctcggatcctgcagctgcatttagccccctttcaaagaagagagagacagatacttgatcaattataaatggtggcctctctcgtatatagctcacagatccgtgctccgtagcagtctattcttctgaataagtggattaactggagcgatttaactgtacatgtatgtgttagtgagaagcagcagtttttaggcagcaaactgtttcaagttagcttttgagctatcaccatttctctgctgattgaacatatccgctgtgtagagtgctaatgaatctttagttttcattgggctgacataacaaatctttatcctagttggctggttgttgggaggcattcatcagggttatatttggttgtcaaaaagtactgtacttaattcacatctttcacatttttcactagcaatagcagccccaaattgctttcctgactaggaacatattctttacaggtataagcatgccaactctaaactatatgaatcctttttatattctcatttttaagtacttctctgtttctgctacttttgtactgtatatttccagcttctccatcagactgatgatcccatattcagtgtgctgcaagtgatttgacatatgtggcttatccttcagtgagatgaagaaaacctgaaatgctatcaccatttaaaacattggcttctggaagttcaggtgattagcaggagacgttctgacattgccattgacatgtacggtagtgatggcaggagacgttcttaaacagcagctgctccttcagcttgtaatgtctgattgtattgaccaagagcatccaccttgccttatggtactaactgaatgagctggtgacgctgactcatctgcataatggcagatgcttaaccatctttaggagctcatgtcatgattccagctgcaccgtgtgcaaatgtgaaggccctgcaagggctttccaggccgcaccaatcctgcttgcttcttgaagatacatatggtgccacctaaataaaagctgtttctggttatgtctgtccttgacatgtcaacagattagtgttgggttgcagtcatgtggtgtttaagtcttggagaaggcgagaagtcattgctgccagcattgtgatcgtcaggcacagaagtactcaaaagtgagagctacttgttgcgagcaaacggagggcgatataggttgatagccaatttcagttctctatatacaagcagcggattttgtttagagttagcttttgagatgcatcatttctttcacatctgattctgtgtgttgtaactcggagtcgcgtagaagttagaatgctaactgaccttaattttcaccgaataatttgctagcgtttttcagtatgaaatccttgtcttaaatt

SEQ ID NO: 21119 - DNA, 1040 bp, Zea Mays
atttccatcccattcatctccgccagaggagggaggcgagccgcgtttttcatttcgaaatcaaaccacgacgatgccgcaggcgatggcggacgccgcgacgctctccgccctcgctctctttgcctcccgcctctcctgtcgcaggttcggggacgaggacctccgggtgctggaggccgcgctgtccgccggcgccgacgtccccgcgctgctcgccacgcgctcggcggcccggcgcctgctgcgatcgagcgcggcggaggcactcgcgttcaccgcggcgggtgcatcgctggatggtggggatgagagacggagcctcgccgtcgccgacttcttctcacgcgccttcgcgcttgtaggcgatgtcgagagctgccttgccatgagatacgaggcactgttgcttcgagacgctaaatactgcaacgaccttcacttgcaagtgtcccgtcaggagtggctaacttttgcaacggattgtcttgataatggcttctacaccattgcctccaaggcttttgcaaatgctcttgtgcacattcatccaagccacacagggcacttggactctgctaattccattgaggagaaggacaagatcattgaaataaaaggactccagaacttggccaagtcattatctgcacagcattgtgttcagataaagtctgctgaatacatggaaaggagagcttcaggtgttcacgagaagtataatttgcaatcaggaaaaccaaagttaacaggaagttcaatgttcaggctagggattaaaacgaggaacataaagaaattgcttcgtagccaggaaaggaacttgggggatttaaagcaatcttagcgttgcatcttccaaccgagaggaatgttgtaaaaagatcagttaggtgacaatttatgcaaatggagacatgaagtggagttatggatgggtctttgattcaacattaagacaaatacgttgaagagtagttgcatcctttggtagcatactcactgtgcaaaacgtaactaggcaatgaatctatcaagct

SEQ ID NO: 21120 - DNA, 675 bp, Zea Mays
ctacagtgcgctgtcatgctgggttgcaagcgatgtgcgacaccggtggacatgcaggccaaggtctatctttacatgcatgatctctggaagccgcacctgagcgcggtcaagtggatcctttggtaccttccggtgagtcctgatggtctccttcaacaaagttcaacagtagctgactcatcattgtttacgtttgctgatggaataactgaatctattcctcgatcatacattgaatttgctgaacgtctcctgttaccacagttcaaagatttacaagatgaagaggtgaaagaataccacaggcgtgatggttttgaggtgggcaatgcggacaagatattcgaaagtacatcgaaggatcagctgacgcggagatctgcatgaacagtgaactctagatctgcatatgaccccgtgaactctctagatctgcaaacaacccagtgtgcctcttggaagtgtgttggtgactgtgaaatgattgtacctacttgggtgaaataaagcatgggagtcaataaaaagtaactgtttctttattctacatctgttgaatccaaagagagaattagttactgtttcccttcctttggccctacaatctatcatcatccatatctgggaactttggcgttcgtgttccagaatagacatggcgtctgcactaag

SEQ ID NO: 21121 - DNA, 1547 bp, Zea Mays
aaaaaatagtttggccaggcttgaggcaatgattgcaaaattctcatcaatatctactcgaaagctatcgaaggcattgtcagcgctcacccgtgacaaaactatggttgctacaagtgactatggtgacttccacaaaatgattaagcgttatatcatgacattcatgttgggtacttctggccagaaacaatttagggacacaagaaacatgatggttgacaacatgttgaacactttccatacattgttgatggatgatccaaattctcctctgaacttccgggaagttttcaagaatgaattatttcgcttatccctggttcaggctttaggcgaggatgtgagttcaatctatgtggaagagtatggaaaggttatatcaaaggaggaaatctacaaggccactgtggttgacatgatgatgtgtgcaattgaggtcgactggagggatttcttcccgtacctcagctggattccaaataggaccttcgaaacaagagtactgactaccgaagcgaggagaactaccgtgatgcaagccttgatcaagcagcaaaaggaaagaattgcacgtggggagactaggatatcctacctggacttcctgctggcagagaatacactgactgatgaacaattactaatgctggtgtgggaagcagtcatagaagctgctgatactactttggtcacgaccgagtgggctatgtatgagattgcgaagcacccagaaaaacaggaatacctttatcaagaaatccaaaaagtctgcggcaataagacagttaccgaggatcacctgccagagttaccgtacttgaacgcggtgttccatgagaccatgaggcggcattctccagttccattagtgcctccaagattggtccatgagaataccaacttggctggctatgaggttccagccggcacagagataatcatcaatctgtacgggtgcaacatgaacaaaaacgactgggccgagcctgaggaatggaagccagagaggtttctggacgggaggtttgaagcagtggatatgcacaagaccatggcctttggcgcaggaaggagggcctgtgctggcagcatgcaggcgatgaacatctcgtgcaccgccatcggcaggtttgtgcaagagtttgcctggaggctcgaggaaggcgacgaggacaaggttgacaccatccagcttacaaccaacaggctttacccactgcatgtgtacctcgcacctagaggaaggaaatgagcctctactgtaaacgggtttcactgtactaatttaaaaaaataatttgctgttgcctgtgtatgacttttggatgatctctatgctgtgaagttgttggtctgaaattgggttaacaatacgaagtgcatatcatacaggacatgaacaccaacttgcagcatctactactgatactgactaccatataggcaggggcggatccaaggggtgggcaaggtgggccatggcctcacctcaatttttttaaccccttatacctaggtttaggtacacaccaaaataaaacaaa

SEQ ID NO: 21122 - DNA, 1007 bp, Zea Mays
ccggcctggttggataggtcaggaacatcatatacaaaccaaccatggatctgtatctgttgccatatatggtgaacatgataagcctgctcttattacctacccagatattgctttgaaccatatgtcttgcttccaagggctactcttctgtcctgaagcagcttcattgctgcttcataatttttgcatttaccatatcagccccccaggacatgagttaggagctgctccgattttgccgagcacacctgtggcatctcctgatgacttagcagatcaaatcgcagacatacttgatttttttggactggattcggttatgtgcttaggtgtcactgcgggcgcatacattcttactctgtttgcaacgaagtatagggagcgagtactaggacttattctcgtttcacctctatgtaaagctccctcatggtctgagtggttttataataaggtaatgtcaaatttactgtattattatggcatgtgtaatgtcgtgaaggatattttgttgcagcgctactttggaaagggagtacgtggaggctcagctgaacctgaatcagatattgtgcaggcttgcagaagttttctagatcaacggcagtgtgtgaacgtgtggcgatttatccaaactatcaacgagagaaaagacttgacagagaacctgaagcagctacagtgcaggacactaatttttgttggtgagaattcccagttccatgctgaagctgttcacatgactgcaaagcttgataggcgatatagcgctcttgtggagtacaaagcttgtggctcggttgtgacagaggagcaacctcatgcaatgctgataccaatggagtactttctcatgggatatggactgtacaggccaagccagataaactgtagccctcgtagccctctgaatccgttttgtatatcaccagagctccctctctcctgagagcatgggggtttaagctaagcccattcaagaacgcgaggctaaccttaatgca

SEQ ID NO: 21123 - DNA, 3411 bp, Zea Mays
ccgccgccggcggttccctcgtcgtcgcgcgccagcgcagctgctgcagtgcaggaagggacggtgtgaatgaaaggcgctcaggataaaaggcacagaaagaagcaggacctccaggttctcgggcccttcccgggatgcctggggaggatgatcaacatgttagacctcagcaatggcgtggttgctaccaagatgctcactgagaaggcgcatagagatgtttctccggccggaaaagaccggagtaatactttcaagatggcaattaatcccccagctcagactgaagataaacaaagggatagtcagacaagaaggaatttccctactaaaaggtcaaactcgcctactaaaaggactggtgcgatgcctgttaaaatgctgatggagcaggacatgtggaaagaaagacggcctgatgaggagccactgaatgttgttgcaagattaatgggcctacatgagcctccaggtcagcaatccaatttccctttaggaagacaattggataagaaatatcagtgtggtggttttgaagagaactactggaatctcaagtcaaagaaggaaagcaaatgccaccaaaaccaaaaggcagggccacgccatcagcacacttggaatggttctggtgaccaaccatcaagaatcagtagcagccagagcatgcaccaagaaaatgagacttgtgagaagaggatgtcaattgttcgcgagaagtttgctgaagcaaagcgactagccacagatgagaaacttcttcattcgaaggagttccaagatgcactgcagtttttaagctcaaatagagacctattcttggagttccttgacgagccaaatcctctattatcaagcaaccgttatgagttccaacctgttgcaccaccttctgaagtaaagcaaataaccatactgaagccatcagaaccagcaaagagaaaagacagcatctttgtggggagacaactgttttcagatggagatggaggtgaaagtgaacgaaacagatacaggcgccatcagagttcggatgtttccccagcaaattcaaatttgtctgagccaacaaaaattgtagtactaaaaccaggattccccagttctcatgactccaggattgcgaggtcttcattatcatcagcagaagacagtgaagatgaaagtatgatggcggttgatgaaaccatgtgctcaagaaggttggcaaaggagatcacttggcagatgaggatgcggctaaaagacaggcaagacgaagagagtatgctctcatgtgaataccctgacttttatatcggagatgactccttcagtaaatcagaagttgagattccaaaagagatgtgtggtgaaacaagtggggaattggagtttggcactccgacttctggccgctcttgggattttctgagtagaagtggaagtcctttctctgcgtcatgctctagtcaggcatcccatagaagggagccgtcagtagttagggaaggcaagaagaagattttagagagattgtctatggtatcatcaacagtcaatattgaggaagaaatggaaggtcgcagaagtacaggcacacttggtgacatgctcacaatatcgaaagtcaaggaccaggaagaaattggggctgaaacactggggagcccagcacctgagctggaacctgaggagcctttctcatgtttgccaagatctcgatcccttccactttctttgtcctatggagtcgctgagtcaaatggaataacctctggcactcatgaagctgaaaaggaaagaatcaggaagtcgtcatcgtttagggaaaaagtttctagcctgttctctaaaaataagaaatcaaccagggagaaggtagatccatctgtgagcaatagactcaaacatggaggggctgtgactactggtgatgtgaaggaaatctgcaaccatcttgccctagacaatcttcagaaacaacatacttgtctaaacacagatgagaagaacactgtgcaaggactcgtgactagttcttgtgagaccaatagtgcagctgatatccctgccaaggatatttcctccatttcaagtcttggtgtcccaggaatctttggtggccttcaggatgaacctagtcctgtatctgtactagatggaccgtttatatgtgataacaataggaggctactgtactcatctgaaaatttcatcacttcatccccacaagctttgtcaaggtctcccctgatcggatcattttcacggtcactgtcatgggaggatcccccgctggaagtcatgtcgccgaattcgttgagactctcaaggcttttctcgaaggctgatgaagatctagattcactgacgtttatccagaagctggtccactctcgaggcacgggtcgagaaagttgcatattagctgaccctttggacccgagtttgctcgagaagatttcggattacgaagaagatggaattaagtttgggaaaaggcggcccaaacagaggctccttttcgacgccgtaaacgaagcgctcatcgagcttgcttcgatggcggaactggctgcgtacccctggggtagatcatgctcttcggagcacggggattgcaagaacggttccagcagtaattctgcggctgaggaaatctggcgggtcattaggaactggtcgatacttgagaagtaccctcccggtgaagctattgaaagaaatctcttgctggagatgatactaaagagggaggtggcggaggcagccagcgctgacacgactcggttagagacgtttgatctcaacaccacggtctgcgccatggtcttggatggcctggttgaagagacagttgtagatctgactaactactgctagtgagttctcagaagaaggaaaagaagggtacagatgtaaacgaggagtgctgagaaagatgcatgcgtgctcttcttcatccttggtccgcctgcctttgctttgcagtgtctcttgctgctgccgtttgctgggtgttttgtagtgcagtgcttggccattgccatggaagtatggaagcccgtcttaaagactgaaggctagaagcagtataagtcggtatggattaaaaccaagtgaacgttcgagcagccgccaatttgctgtaggtcttctgcggaatgatctgacgaatggatgaatgattgccatgaaccgcttgcacgttttgctcttggtagtggtactgctaccctgtcctgtagttggctgtgtgttgttggttcttctcgttcagatccctgtacagtgactggctgacagttttgaattggggctgccatgccactgccaccttctacggcggatgcgtgctttctcaccgatccttgaagcatgaatgcgtacattaactaatttgatctggtgattgcttgtttgatc

SEQ ID NO: 21124 - DNA, 368 bp, Zea Mays
ctaaaggatcgataggccacgctttcacgggtcgtattcgtactggaaatcagaatcaaacgagcttttacccttttgttccacacgagatttctgttctcgttgagctcatcataggacacctgagttatcttttaacagatgtgccgccccagccaaactccccacctaacaatgtcttccgcccggatcggcccggcgaggccgggccttggagccaaaaggaggggcggtgccccgcttccgacccacggaataagtaaaataacgttaaaagtagtggtatttcacttgcgcccggaggctcccacttatcctacacctctcaagtcatttcacaaagtcggactagagtcaagctcaacagg

SEQ ID NO: 21125 - DNA, 3855 bp, Zea Mays
cgcagaaaagatagctgtagacatccccggaagaaatggtcccgtgcgtgcgctcactcctttgctgtttttcttctctccgttcaccttgcgtgcgcgacatctagggcgaccgccgccgccgccgccgccctacgcccagcagcccaggtcttcgtcgcgccctttgccggctacgagcacccaccacaccagatcactgtaatccaggctgaattgtggctggtattggcgatataagcattcgttagctgtttaaattgtgtcttttgtctttgattaagcgtcattggaaaggctgtcatgagaaaactcttttgttcaaacgtttctctcctgtaatatgaatgtactgtgacaatccttcatcctatgctagaatcacatattttagcttctaagctccttacagttctttacaagtttcttattcaaccgaatacctaatgcattaattcggtgcttgtgacaagcattcatgcaaattcgtggatattaattcagaacctggtggcatattaatcttggatacttggtcaactgcaaacttgaagattcattttcatgcaatcaatggagagcctagcgcaattagaggtgttgtgtgaaaagctttataattctagagactcggctgagcgagcgcatgcagaaagcaccctcaagtgcttctcagagaacagcgagtacatttcgcagtgccaatacatattggacaatgcctcaactccatatgccctgatgctggcgagttcaagcttgctgaagcaagtttctgaccgcagtctttctttgatgctccgtctcgatatacggaattatgtcataaactatcttggcacaagggggcctaaattgcagaactttgtcattgtgtccttaattcagctggtctgtcgaattacaaaatttggatggtttgatgatgacagattcagagagactgtcaaggaagcgactgattttttaggtcttgcttcccaggatcattatttcataggcttgaagatactaaacaatctcgttacagaaatgaatcagccaaaccccgcgatgcctttgacgcttcataggaaaattgcgggttcattcaaggatcagtttcttctgcagatcttccaaatttcgttaacctcactaaaccaactgaagagtgaagctccggatgactttggacatattcctcttgaccttgccttgaagtgcttatcttttgactttgttggttctccggtggacgaaagctctgaagaatttggaacagtgcagcttcctgcatcttggaggcctcttcttcaagatccttccacactccaaatcttttttgattactacaaagtcaatgacatacgggtttcaaaagaggccttggagtgtctggttcgacttgcttctgtcaggcgcagtatttttgtggaggatcctgcaaggtcccagtttctttctcatctgatgctaggcaccaaggagatacttctaactggccaaggacttgctgatcatgacaattaccatgagttctgccgtcttttgggacgtttcaaagtgaattaccagctggcagagcttttgaatgttgagttttatggtgagtggattggtctagtagctgaatttacaactagatccttgttgtcatggcagtgggccagcaacagtgtctactaccttctaagtctttggtcaaggctggtgacatccgtgccttacttgaaaggtgaaacaccaagtcttcttgatgaaactgttcccaagatcacagaaggttttatcacttccagaattaattctgttcaggccatccttgctgacaactcactggaaaatcctttggatagtgtggaagttctccaggaccagctggagtttcttcctttcctttgcagattccagtaccaaagtagtagtctgtacatcataaacatcatggaacctcttctgcaagcttatacggaaaggtccagattacccgctcctggtgatgctgatgagctgtctgtcattgaaggccaaattgcatggatggttcacataattgcggccattgtcaaagttaggcaggtaacaggtgttagtcaagaaacacaagagttgattgacgcagaactctctgcccgtgtactacagttgataagtgtgactgatacaggagcgcacacacagagatatcaagaattaagtaagcaaaggcttgaccgagctattctcatttttgtacaaagtttcagaaggtcatatgtaggagaccaagctatgcattcttcaaagcagttgtatggaagattgtctgagcttctaggacttaatgaccatttaattctactcaatgtgattgttggcaaaattgctacaaatatgaagtgctatgctgagagtgaggatgttattgatcatactctgtccctgttccttgacttggcaactggctatatgactggaaagctgctgcttaagctggagagtgtaaaattcatcattgcaaatcattctccagagaatttcccatttcttgcagaatacaaatgttcacgtagtagaactacgttctattacatccttggctccttagtcttcatggaagatagccctgtgaaattcaggactttcatggaaccacttcaacaggttgcattaaacctggaggcaactcctgatgctgcttttcggactgatgtcgctaagcgtgcatttgttggttggatgagagatctacgtggcatagctatggcaaccaacagccgcaagacatatggcctcctatttgactggttgtatccatctcgcatgccacttctgctgagagccatctcactttgcactgatgaaccagaggtcaccacacccttgctcaagttcacgtatgaatttgttttgaacaaagctcaaagactgacatttgattcatcatcaccaaatgggatccttttattccgagaggttagcaagataatcgtggcttacgggtcacgaattctattgcttcctaatggcacagacatttatggaagtaaatacaaaggcatatggatctcactgactgttctttcaagggctttgtgtgggaattatgtcaattttggcgtatttgagctctatggtgacagagcacttgctgatgcccttgatatatctctgaagatgaccctctcagttccattatctgatatattggcattcaaaaagctgtcgaaagcgtactttgggtatatggaagttctgttcaacaaccatatcaagtttgttctcaatttggacacaaacacattcatacatattgtcagctcactcgaatctggcttaaaaggtctagatgcagggatatcatcacagtgcgcttctgccatcgacaacctggcagccttttactttaataacattacatctggtgactcacctccatcaccagcttcagtaaatctcgcacgacatattggagagtgtcccaatttgtttcctcagatactgaagactctttttgagatcatgctctttgaggatgctggtaatcagtggagtctgagtcgaccaatactgagcctgataatgaccagtgaacagatgttcagtgaactcagagcgcacatattagcatcacaggttgtgtggtgcaattgcaatgcggcactgcgcattgtagctgcttgctggtaggagatagtggtcttgttgcttgccggagcttgtactggcctacctggaggtgcagacatgcaatgcagcagagaatttcttgagcctagggccccagctgtggaggtttcatattgccattcctgtgtttacgagtaatagtcagatcgtcatgttttgtttgtttgattatgttgatttcttgtttttacgatgctctttaaa

SEQ ID NO: 21126 - DNA, 956 bp, Zea Mays
ccgggtgttacaggctcgtaggtccgatcgccggagtcacatgctctgggctggcttctgctgctagctgcctcgctagccgcctagcccaaccgcaatgcgcgccatcgcctccccacttgcgcctcctcgcccagagccacccattgccgtccgatcaagatccaacgccctcaaacgcgccactttaccaccagtccccctcaccgccgcccgtctccgcctccgccgacaaccggagccagggccctcgccacccacccgattgagccaccccatgcctcctcccactgcgacgatgtcccccgcagctggcggttcctttcctgagctcacctgtcccgcggactttgccaccgtcgccgcccccggcggccgcttctccgtcgtcggcttcggatccctcctttccgagcggagcgcgaggagcacgttcccggagctggagggcttccgtgtcgcggtgctgcgggggttccgccgagtcttcgcccacgctgcccccatcttcttcgagcgcggcatcgccatcgaggccaccaaggaattctcaagcttgagcgtagagccatgcgacagtgaactgatagtagtcacggttttcgaaatcaaggaggaagaggtcccggcgtttattgagagggaacatgagtttagatttcttgcggttgtccctgaaggattggatggggtaccttttacaaatcgagcagttgtctgtgcacgctacagcaatgaagaatatttccaagagagatgccgaggaagcaaggaaatatataacaagtactatggacggtacaatattgacaaaatatggagagatgatatcttaccatgtcgcttatacctcagacattgctgtacataccggaggccgagaatttccaaagatgctgatccgagtcgtcaggctgcagcaccacatcactaaatcccagataagcaagtattcc

SEQ ID NO: 21127 - DNA, 3485 bp, Zea Mays
ctcgtcccgagggcacccggatgaccggatccccggcacgagttggtcgagccatcacgtgggcccgctctggaacccgccccagcataacttccaagtcccaaataaactcctcggtgactcgccccaacaccaaacagtaaacgacgcttccctccgccgccgtcagatcggagctcgactccgtgccccgcttctccgccgcgatggcggcgccaccgcgccgctccctccttgtccttctctccgggctcctagtcttcgcctcccttgttgccctcaccacagccatctacgaggaccaggtcggcctcgcggactggcatcagaagtacattggcaaagtaaagcaagcagtttaccacagccagaagagtggaaggagacgagttgtggtcttgacagaggaaaatgtgatctcgtctcttgatctacgttctggagatatattctggcgacatgtcattgacaagaatgaccccttggatcagcttggtctatcacttggaaaatatgttctaactctttcttcggggggaactatattaagggcatggaatcttccagatggactgatgatctgggaaactaaccttcgaacttccacagcatcgaactcacagttgcatgttatgtcaaacaataaagcggccagggacaacttagttttagtttcagctgggcgatggatttatgctgtatcaagcattgatggggcaatttcatgggaaaaggagttttctcttgatgacttggaaatcaagcggattctccaatcacctgaaaatgatgttgtgtatgctttaggacttgctggttcctcgaagctagctttgtatcacttgagtgctaaaactggagagatactaaaagatatccaagagtcattccctggtggattatgtggtaaaacagtacttggttctgataatgtgtttgtagcattagataaggccagatcaagtctgttacttattgaattcaagggtgagagaattagctacaacaaggtgctggtttcagatcttgttcaagacttatcaggatcatttgagcttcaatctttgtccagtgacatcatatctttgcaaacgtcatcttctatttccctcctaaagctcaaaggtaccgatggattggaagtacttcagagatttgaccagccagctgcagtgagtgattccttgccaatcacagaaaaagaaaaagcttttgctgtcgtgcaacatttgggttccgaaattgagtttatcgtaaaatttacaagtgacctaagcagtgagattattagagaaaaggttaatatagaccaaaataagggcaacgttgagagggtcttcttgaatagttatattcgaactgacaagtctcatggttttcgagctttggttgtaatggaggatcattcactcttgttaattcaacaaggtgaggttgtttggagcagagacgatgggctggcttcaattgttgatgtaacaacatcagaattgcctgttgagaaggatggtgtatcagttgccggtgtggaacacaatctctttgagtggcttaagggacacatgctgaaactcaaaggaactctaatgcttgctaatgctgatgaagttgctgcaatccaagcattgagactaaagagctctgagaaaaataagatgacaagagaccataatggatttcgcaaactccttgttgtattgacaaaggctggcaaagtgatgactctgcacactggagatggacgcgttatctggtcaaaattgctgccatctcttcgtgcctccagatttggtggagtgccttctgcattaaggatataccaatggcaggtcccgcatcacagtgtgatgcgggaaaacccatctgtacttgttgttggtagaactggagcagaatcttcagctcctggcgtattctctattcttgattcatattctggagaagaacttaactctatgaaacttgaccattctgttttccaaattatccccttaacactgaaggattcatcagagcagcgactttatctgattcttgattccaattccaatgctcatttatacccgaaatctgcagacaccctcaatatatttcttcatgaaatgtcaaacctgtatttctactctgtagatattcaagcaaatgttattaaagggtattcattacagaaatcatgtgatctcaattttggtgatgactactgcttcagtacgaaggagttatggtccatcatctttccttctgattctgaaaggattgttatctctgaaacgcgaaatatgaatgaggttgttcatacccaagctaagacaattggtgatcatgatgtgatgtacaagtacttgtcaaagaatttagtttttgttgctactttgtctcctaaagctgctggtgatattggatctgtgctacctgaagaagcttcacttgttgcatatcttattgatgcagtcactggacgcatacttcatcgtgtaactcatcatggtgcacaaggccctgtacatgcagtcttgagcgagaactgggttgtttatcattattttaatctgcgagctcacagatttgaaatggcggtgattgagatatatgatcaatctagggcggacaataaagatgtcatgaagctcatacttgggaagcataatctttcagcaccaattacatcatacgcccgccctgaggtggcagtaaaatcccagtcatactttttcacccattcagtaaaagcaatggcagttacacaaacggctaaggggatcacttccaagcagcttctgattggtactattggtgaccaggttttggcacttgataagcgctatcttgatccacgccgttcagtgaacccgacacaacaagaaaaagaagagggcattataccattaacagattctttgcctataatacctcagtcctttgtgacgcactctcaccaagtggaggccctgcgagggatcgtttctattcctgcgaagctggagtccacgactcttgttttcacatacggcgtcgatctgttctacacccagcttgccccgtcaaggacctacgattccctcaccgacgaattcagctacgcgctgcttctaatcacgatcgcagtcctggttgctgccatcatcgtcacatggatttggtccgagaagaaggagttgggggacaagtggagatctttaaactttaatgaagtgctggtatgtcactgtggcgtgcaatcccgtctagcttgtctgaggttctttcatgtcatgccaaccctaaaggtggaagtgggcgttcaggtcgcccatgcaagagtcccacccaggtcagggttctttggtagagggtgtgagatgtctgccatgatcgcgagaggtgagcgtcgtgcatcagcatcatcagctagctgtggtgccggcgcgttacctaccggagggttgcctttcgcagctgtgctgctgggtgcgccagccaaagtgggtgatgtgaggccgacttga

SEQ ID NO: 21128 - DNA, 585 bp, Zea Mays
gtcattcatcgccctactaaacctcctggcgacggacagggctattctggcattggtactgatggccctgagccttgccatcgttcccacaaaagtgcttctgctgctggtgtttctggaggtatccacgaacaactcaccactacgaagagcaagcacagaaaggtgtaccagaaggttgagagagtggtggttcagcatacctgcagctccagtggtggtggagaaagagaaagaggacaagaaaactagatgatacatccaatgtaatctttatgttgcttggctgatacgttgtgtaacgtatcagccaatgcccacctttgtacaaagaccgcaatatcaacaacgaggggcagtttcaatgaagatttcatctcacttgtaccacctgccctgtttacatggctcttgatgctttgttgcaagttgactagagctgaggccggtgtcaatcgccgctaataacacaaatccctttctctgggttggacatatcgccgtgcggacctgcgccccttcgtttgtaacatgaacagtattgattcttcgatattatgggattgcttctctaatagactatgt

SEQ ID NO: 21129 - DNA, 2230 bp, Zea Mays
gccatgtgtttcattcgtgcctgcctgcctgcacgcctggctcctaggattagatacgtgctgtcagaccttccgtcagacatcgtcgtccatgtcgacgacgcaaggttctacctgcacaagttcccccttctctccaagagcggtctgttacagaggctgatagtagaggcgagccagaacggcagcgacgaagttgccatacaagacgtccctggcggagcgaagaccttcgagatctgcgcgaagttctgctacggcatggtggtgaccctgaacgcgtacaacgtcgtcgccgcgaggtgcgcggcggagtaccttgggatgaccgaggacgtcgagaagagcaacctggtgttcaagatcgaggtgttcctgagctccggcatcttcaggagctggaaggactcgatcatcgcgctgcagaccaccgacgcgttgctgccgtggtcggaggagctcaagctggtcggcagatgcgtggactctgtcgctgccaaggctaccgtcagcgcgtcgaacgttgtgtggtcgtacacctacaacaggaagtctgcgtcctcggacgagatcgtcgaggctcgcaggagctcccaggcggttcccaaggactggtgggttgaggatctgtgtgagctcgatgtggacctctacaggcgtgtcatggttgcggtcaagtcgagggggaggatcccctccgatgccatcggagaggcgctcaaggcatacgccgctagatggctgcctgagtgctgtgacgcgctggtagacgacgcctactctggagcgtacaagcacctgctcgagaccatcgtctggcttttgccctcggacaaggggtcttcggggatctcctgtcgtttcttcctgaagctgctgaaattcactgtcctcgtcggcgctggggagctcctgaaggaagagctcatggacaggactgtgttgcagctccacaaggcctcggtcagtgatctcctgatcccctccaggcctccggcgcagaccgtctatgatgtccagctggttcagacactcatcggcaggtacatgagccatgccggggtatctcaaggtgggatttttctcaacgaccttgaccaggagatgtttgagacgaacgtggacggtgaatctttgctagcgttgtgcaagctggtcgataggtacttggctgaagttgcctctgatccaaatctctctgtttcgagctttgtggatttggcgacttccatgcctgaaacagccagaccgacacatgatggattgtacactgccattgacgtatatctgaagttgcatcccggcctacccaagatggagaagaggaagatttcgaacctgatggacgtgaggaagctgtccaagggggcgtgcatccacgcggcgcagaacgaccgactcccgctgcgcgtggtggtccaggtcctcttcttcgagcagctgcgcgccgcgggagccgccgccgccgctgggacgcccagcgccagcgtggcgcggtgcatagcgcgcctggcggagcaggaggaagaggaggagcgctggaacgacggccgcgcgctgccggagcccccgacccccggcgcgctgaagaggcagctggggagcctgaagctgcagggcgaccaccaccagggcgcgggcgacgacgggcggcgcctggtggcgcgcagcaacagcgtggccaaccagagcagccggatgtcgctgtcgtcgcggtcgcggaggatctttgacaggctgtgggtcggcggagcgaagctgcccggggaggccgccgccgcgggcaaggggtcgtcggacacgtccgggagctcgcagagcccgcggtcgtcggcgaagccgccggagtccaagtcgtccagctcgtcgtcaaggaaccggcggtactcggtctcgtaggccggggccgggggccggccggtcggcggcggaggctgtacagagaggaaggagagcctggtccaagcctaaacgtagctgctgctaactttcagagttcatgttgatctcgtgctgcctgcagtatgtggcatgcagctagaagaaatctttgttctgtcagtccagttgttctatctaatcttgagataatccctggtttctgtaacagacttggaaactatgattcagtcgaattctccatgaactgggcaatcctttttggcggctccaccactcgtgtcatgtgcttgatgtaaaatgccgtaatagtctaaatccaggttttaaa

SEQ ID NO: 21130 - DNA, 2844 bp, Zea Mays
caactaacgacctccgcccattccgctcgcggttgcctccgcctccgcctccgcctccgcgcctaacccaatccagagccagggcagggcaaccaaaccctaggccctcgcgctcgtggtatccatgggctgaccgcgtcccggtggggagcccggatccagagctagggttccgtcctcggcggcaacgccatggagtgggacagcgagtccgacggcgccggcagcgtcggcgtcgacgagcaggaagaggagcaggagcaggaggaggaggaggaggagcggggaggcgagggaggaggtggcgacgccggtgggatgttcacgctcgcgattgaaggcatgctgcgcgcgtcaggtccgtgcgggctcgtcgtcaccgacgcgctcgagcccgactgtcccatcatctacgccaaccgcggcttcgaggaggctacgggctaccgcgccgaggagtttcttggcaggaactggattgcttggcatgataccatactactgattacaaagaaaaccatatgcttggctttagctggcatgatattgctgttttgaggtcatgttcttcaatattgtttcgagagagaaatatctaagtcgattcctgcagtgtagagggccatttgctcgaaggagacatcccctagttaatgctgcagtggtttcagagattcaaagatgcataaacaacagcattgagttccgtggcgatttattaaatttcagaaaagatggatcgccactgatgaacaggttgcatctgacccctatatatggagatgatgaaactataacccattatatgggcatccagttcttcactgatgctaatgttgatttgggaccattgccctgtccaatgacaaaggaaccagtgaggtcaacacggtttgctccagataactcatttcgacccatttctgcggggccagagcacagcaatttctgccgggaatattctagcctcttccagttaacggatgaagtgctttgccaaagtatactgtcaaggttgacaccaagagatatagcatctgtgagctccgtgtgcaggtgcttgtatcatttgacaagaaatgaagatctctggagaatggtttgccagaatgcttggggtagtgaaactactcgagctcttgagacggtgcccgctgcaagaaggttgggctggggacgtctggcaagagaactgaccaccctggaagctgttgcctggaggaaattgacagttgggggtgcagtggagccatctcgatgcaatttcagtgcctgtgccgtagggaaccgtgttgttctatttggtggggaaggtgttaacatgcagccgatgaatgacacgtttgtattggatttaaacgctagcaatccagagtggaggcatataaatgtgagtgcagctcctccaggtcgctggggccatactctgtcatgcttaaatggctcttggttggttgtttttggtggatgtggaaggcagggtctgcttaatgatgtattcatgttggatttggatgcaaaacaaccaacctggcgtgagatacctggagttgcacccccagttccacgttcatggcacagctcctgcactttggatgggacgaagttagtagtttctggtggctgtgccgattcaggtgtacttctcagtgacacatatcttcttgatgtaaccatggataggccagtttggagagaggttcctgcatcctggaaaccgccttctaggctggggcactcaatgtctgtctatgatggtaggaagatcctgatgtttggtggtcttgctaagagcggccctctgcggctcaggtctagtgatgtgtacacaatggacttaagtgaagaagaaccttgctggcgatgcctcactggtagtggaatgcctggggctggaaatccagctggcgcaggtccacctcctcgcctcgatcatgttggtgtgagcctgccaggtggaagaattttgatatttggtggctcagtggcaggtcttcactcagcatcacagctttatctgttggatccaactgaagaaaagccgacctggagaattttgagtgttcctgggcaccctccccgattcgcctggggccacagcacctgtgttgttggaggaacaaaagcgatagtgcttggtggacaaactggggaagagtggatgcttacagaaatacatgagctctctttggcaaacaactcagtctgagttcatggtggacaaaccggggaagagtggatgcttacagaaatacatgagctctctttggcaagcaactcagtctgagttcagggtggccaaaccggggaagagtggatgcttacagaaatacatgagctctctttggcaagcaactcagtctgagttcaggaatggttcttagtcatgctccttgcaaactaattgcggcttcttatgcgacctgaagcttgattgccttcaccttcagagtatcatctggcagctacatggctttacttgggagatgaaatggttttcactggtttgctcgctttatgtaggcagagggtagcgatatgttcatttttattgccgtttgcttggccttctttttaccagataattacagttcataagctactattgtggaatgagtaccagattttatatgtattctcagatgtttccgacttgcaatatgttaggaaaacaaaggactaccttgtacatagtttaagcttttgttgtacggtacatggagaccttgatgctgctgtcttgcggcacaggcgcacaactgctgagatggcgtgatgtaaggtgatcaccgatcgaccatgtttttgtgcagaacttgtattatgcagaaatttcatcccgct

SEQ ID NO: 21131 - DNA, 1591 bp, Zea Mays
gtgaatgagctttgtaggagggggaatgagaaagacacgtgatagccgggaatggaaatgtgaatgagctttgcagggagggggaatgagaaagacatttgatagtcgggaatggaaatgtgaatgagctttgcagggagggggaatgagaaagacagacaactgagtctaccccttaccgtcttaataggtagtacagattatttttgataatatagagtgtcatgaaaatcaactagtttctataaattagagtcgcatatttctattcaacttttttttaccacaatcgggtgaggggcgtccattgcgagttgcgactgcgtcgccgattcccctgccggcatgtccagtccgcgccctcccctcggccggatcctccgcctcgccgtcgccgtcgcggcctgcgcctgctttcctagccccgtctccggcatccggaagggcattgactttattcaaccaattgtgtgcagaagcactgttcaggggcggcatctgatctctgatgataatggttatgtatgttctgcactttcaatcaatccatggtctcactgctgcccaacaacaggggaccgcttttcctgccagggctgcgaacttgatttacagtgctgcaattcatatgaatattgtgtttcttgctgtttgaatccttctaagatcaagaaagaagacgtgctgaagctgaaggtagctaagccagttactgctggaacatacacaaatgttttcgatttctgcatgggacgatgccgccatagctctgcaagtgtggttcatgaaaatgcctatgccagtgatttccatcactgtttttcagtgcaacaaaattcatcaggatcaactgagtctagttctgtatcaaagttgttgggcattaacgttgtagtaggaaggcccagggaatcttgcagcttggtgtgcaaagtaagaggacagtcctgtgttccaagcaggctctctgtgttgaacaaatgtgagattttgcagaaatatatgagatgcaagagtggctgctttcccagccttggaccagatcaacctgctgaagttgttgacgaagctccaaccagcttgaatccaggagcatgcttatacatgcagatggatgagcggctcacatgtgatggttcgcaccatcatacccggcggctctgtccatgcgcctgagaaggggaaatgaatgtgacactcataagacagcagaggggaaacaagtggaggcgataagctgataaccgatggttctccatcacacccccatgacgaacaacctctccacgcaccggttgcgggtttcctcaacaagaacgccctactctcctcctgtttctgggaaggattatggatgcaaaatgaaatggagtgcctgcaaagatctgctccggttcttgagaagcgtcgtggatgcagaaggagatgcaatacctttcaaatccttgcatggtatctgatataagacatgtggcgtgagaagtgataaaatggttttttatggagatatatactcgaacgtgtcttgtaaggacggcaggacgcaccgtctctcctgagttataggtacctaattatgactgtggtaaac

SEQ ID NO: 21132 - DNA, 1013 bp, Zea Mays
attgatatgttgcttagacaaatcgagtctctttataaacaaaagaagccatattgattttctgatacaggaagattacttttatctatactccaccttctttcgtggctatggcactagcagctatctataaccttttcatcattaacaaatccggcggccttatatactacaaggactatggttcagcagggaggatggataccaatgacagtttaagattagcaagcctctggcattcgatgcatgctatctcgcagcaactgtcccctaccactggctgtactggcattgatctcttacaagctcataactttgatctccattgctttcaatccctcacagggacgaaatttttcgtcgtatgcgaaactggagctccaaatatggaaatgctgctgaaagcgatttacgagctgtacacagacttcgttctgaagaatccgttctatgagatggagatgccgattcggtgcgagctgtttgatcacaacctggctcaggtgatccagaaggaccgtgttgcgctcctggatgcagatcttcgtgaagaccctcgccggcaagagcatcaccctggaggtggagagctcggacacggtcgagaacgtcaaggccaagatccaggacaaggagggcatccctccggaccagcagcgcctcatcttcgccggcaagcagctggacgacggccgcatcttggccgactacaacatccagaaggagtccacgctccacctcgtcctccgcctccgtggtggtggcggcggccagtgatctggtctgctgatcgcctcctgccatggggactggctagcacatgccgccttcctgcctgccagtgcgtgctcgtttcgtctttcattacgtcatgtcttgctcaggccgtctcatgcatctccatcagtctcttgtcttaggtcgtcgtttcttcttcacattggtaggaacgcacgctgtgcagtgctttggttaaaacaatttggagtaataaatctggcatattgttctac

SEQ ID NO: 21133 - DNA, 1112 bp, Zea Mays
aaatgatttgaggagaaaaagtccaaagggccaggatgatagggcaattcatgtaaagcacttcaaaaatatcccaatggcagacatggagttggttctgcctgagaagaaaaacccgagcctcacacctatggactgggttcaatttattgtttctgttgtcattggacttgttacactcatcagttcactggaaatgcctaaagctgatttctgggttgtaattgcaatcctctctgcactggcaggatattgcgcgaagatctatttctcgtttcaacagaatatggcaacctaccaaaacttaatcactcaatcaatgtatgacaaacaactagatagtgggaaaggcacactcctccacctctgtgatgatgtgattcaacaggaggtcaaggaggtcataattgcctactacattttgatggagaatggaaaggctaccagtgatgatcttgacttgcaatgcgaggagttaatccaggaagagtttggcttgcaatgcaattttgaggtgatggatgcagttcagaagctggagaggcttggtgtcattacaagagactctattggaaggatttgctgtgtccctctaaagcgtgccaatgagatcatcggcgcgaccacggaagaactggttatgaaagccaggcaaagctagcaatctattattttgaacaatgtagccgcattgtagattcttgcctgatggcgctgtaacgtttatggttactccagaaagtccaaacactgaactcttgcacaccaggagataagtacattctggtcatctccacagtagttctgggagagctacaagaaaatgtggttgtatttatttttttttatttttttggtggggggtactatggtttgtggaacgtcgtcgagggtgttgtaagcatgtagcattcttttgataacaagcgtggtaggaaggatgtttgaagaacacatacaagggctattatgttgctggattgatgctgtgaaccatgtattcttttcgtcagaacagtaaacttccgtaatgctgacggttcactgcggtgtgtacactgggccactggcattggcaacttgacccgtttctggcttctgctcgtgttcct

SEQ ID NO: 21134 - DNA, 168 bp, Zea Mays
ttttggccgccggcgcgggcgacaacggtccacgccccgagccgatcggcggaccagcaggagccgttccgcatacggccggtgcgcgtcgccagcccccatccgctttccctcccggcaatttcaagcactctttgactctcttttcaagtccttttcatctttccc

SEQ ID NO: 21135 - DNA, 1834 bp, Zea Mays
catatgtcacatttaacacttaaacccttccaccaccagctcaataatctttataaaaaaacccctaacaaaccatgattatatctgtgattagatcgtaatctaatgaaccagatggtttacttgcacgcttgcaaagaaggactgcttgcatagcagtcgttgccgctaagattttaactaggctatttaaaatcttatggttaattttagatgctaaaaattatgtagaaagggtcaaacatgcccttagcttggtggggcccgcaaagccaatccattcgagagcaatccaaggaaaccaagtctcgtcccacctatccccgtgggattgtgtagtgggaaggggtacgttagcgtttgcgtgcgcgtagcaactccccacgcaaagccgccgccgttccctctcgtcttccccagttcccctacgccggtaatcccacgtcctatcagccgccgatccagccttgcttccatccatccatccatccatctcgtcgcttctctctgttccgcgtgcgatcgagtagatcaaaaggaggaggaggatggcgaggagttcgttcaagttggagcaccccttcgaaaggaggcaagctgaggctaaccgcatcagggagaaataccctgacagaatccctgtcattgttgagaaggccgagaggagtgacatcccagacattgacaagaaaaagtcagccatttcacgagtatctctttagtgcatttgtattttctctatcagtttttttggacattatattttttctgtacttctaaaagttgccttatactgtctccaacagccttacataacccaactcttatttcaaacctcactctataaacagtagaggctgcagtacaaaacccttgcaaaatagtgttttgcacggttatatgcacgatttgttggacattgagctcaccaatacgaataagtggacgtgcaaaacattattctagcactgttgatgtattatagacagtgtggagttaaaatgttaaatagacggtgggataggcgtgccctggtggcctcagccttaccaatttttgttatttatttttatcaaattcttaataatgcaaaactgttggctgtgggcattatccttgtgccaatgatgccttcaaagttggcaaattccggacacttacaaacgtcccaaccaagagtctgtttcttctgcaagtagccatctagaaattgattgcttactccattggtgtaatctttgcttgtacaatcttccagcattaattaattcatcagaatgaggtcttgtttatcggtacaaggcaagaccagctgcaacatttgtgtggcccctgatatgtgaattgtgattgcttgcaggtaccttgttcctgccgacctcacagtcggacagtttgtgtatgtggtacggaagcggatcaagctcagcgctgagaaggcaatcttcatcttcgtaaagaacaccctcccaccaacagctgctctgatgtccgccatctacgaggagaacaaggacgaggacggcttcctctacatgacgtacagcggcgagaacaccttcgggctgttctgagtgggagccgctatggatccacattgggcaatgcctcctgtaaatactaaacatgcatcacaagaatctgtgtccatagcataatctggtctgtctgtcattacgcaacttgacgtgcaatgctaaacacatttaagtaataatatatactactctgctttgggatgcttcagaaattatgttaccttctgtatcctccgtgtgcctgtcgacgtgacgaagtaacatgaaggcgtctgcggtggttccacccatttagg

SEQ ID NO: 21136 - DNA, 1291 bp, Zea Mays
ctgagatacatggaacacaggatattgctccagtttgtgaagcagctgttcaacacagcttctaagagattagagattggggtagttgacttgacaaacctcttttcacacgaactgaaaaactaatccatcagtaaaccttgatgtttctgatgttgagaggctgaaagagcagtatgcatgttgcacagaagatcagttggcttttgaaggctatagaaagctcttgccaaccagaaaggcacttcctgatgggcaggtcataacaattgagaaagagaggtacattgttggtgaagctttatttcaaccacatatattgggcttggaagattatggtatcgttcaccagctagttactagcgcctcaaatgtttcatcagagtaccatcgtcagctgcttgaaaataccatgttatgtggtggcaccacatcaatgactggctttgaggacaggttccagagagaagcaaatctgtctgcttcagcaatctttccatcacttgtgaagcccccctgaatacatgtccgagaacctagcaaggtactcggcctggttgggtggtgcgatattggccaaggtcgttttccctgaaaaccagcatatcaccaagggcgagtatgatgagacggggcgtctattgtgcaccagaagtgcttttagagacaaactgccttgaactagcacggttgtgcaccatttgctgctgttcatgtcacagctgtgctcgtacctgaatgttgcaggtgccgatgcttgagtccactgtacgccagccacagttcataccgctagccacagttcatacctgactgttgcgaagtgttggtgcatctaggtcggttgggtttatttagagtgcaatagagggtaacattgacgtgtattcgttaggagttttagccaattgcccatttgcacctgtagtattagagaattagctgagatttccttttcaacttacattatgatccattatctcttcagctactgctagtgaaagagttgtttgggtcatgcccacaaactaagcatgtcacaggttcttaggcatatgtttttgttaggagccaagtagccaacggcatcctctccccctgccggccagagggtgcacgtaacattccatcgctcttcaacggctcccccttgggagcactctgcattgagaaaggggcttctctagggtgaaaatgggtcgggtacgccctatgggtaccgtgtcgggtactgaatgtgaatacagatagtgtaaatatctgttttttatgcgagtttgagtatttttat

SEQ ID NO: 21137 - DNA, 879 bp, Zea Mays
tcccagccgccgccgactctatctctcccttccctctcaccacctcctcgtcatcctcagcgtgcacgctgcgcgtggccgtagtgggggtggccccgcggcacgtcggctgccgaggcgctggtctcgccgagggcccagatgcaggtgctctcctctaccaacctcgccgctgacttctcccgcgcgctgccgcccggggcacccatccccatgctccgccgtgaggtgctccactccttcctccgccgtcgaggccgagctcgtccagggcctcatcacctccgccgtgaggtgctccactccttcgtcttcaagctctcgccccaggggtgcgctagtgccaggtgcggcgagccagcagatcaaggaaaccgcccgtggccgccccaagcgttacatctgcactggctgctgctggtgacaagcaagaacaaccaaagctcttcaaatgtctgtccaggatgcaaacatgtccagtgacactgatatgagtaaggtgtttgaagacagaacgtttgtgtcatctatccttaattcgtttcctggtgttgatcccaatgatccatctgttaaagatttgctggcatcattgcacagccagaaagaggaagagaagaaggaagacaagtcagacaaaacagaagacgagaagaactgcttcaagctggagtgatgtcgctgtggtgcttttgtgactgatcatctctggagcttttgtgaatgatgtagctagctatctgtaattgatctagttgtgaatgatattataattgtgatacttttgtgaatatataattgtggtgcttttgtgtttatgtgatggatctatgactgtggtatactgattaattgtgtatgtctttatgattcgtgtat

SEQ ID NO: 21138 - DNA, 2498 bp, Zea Mays
gttcgggatacctctgctccaaataactccttccctcgacctccccgaacccgaactcctctcaggtcgagcctagggttagggtttcgtccctccggccccgattcgaaccaatccgcctcggcctccgccgcgccatggccgccggctccatcgtggtggacttcccttccatgggcgccgccctctgcttccccagcctcgattcactcctccgcgactccgcctcgggcttcctcgctgccgtctccaacgccccagcccccggcgcagccgacctcaccaactttcaccgcgtcttctcgcgcgtcctcagcgcctacccggacccaccgctcgaggctgtctggttcttctccgcgctctccttccacgaccgtcccgacgacctccgctccctgctccagctcctctccgccttcaccgcctcctcgcccggcaccgccaagccgcttgcccttctcgcccctgtcgtttccgagctcttccacgccgacaagccgcgcagggagaccgagaccctcgttgaggccgtcctcagctacatcagcatctgcagcaaccgctctgccccctcttcgaccgtgggcgccaccgcagacgctgtgagcctgctgccggcctttggggagctcgtcaaagtgtggagcgtgcgctactcgagggagaggtgcccgttccaagtgctgttcccgctcgctggggacgaggccaggcgggagctcatgaaggaaggctgcagcgttgactacctcgccggggtggtgctggctgaggcgttccttctcaggctctgcctcaaggtgcagaatgcaacaggggtgcctcgctctgagctgcagaaggagctcaagatctgggcagtcagctccatcccggtcttccagaaccaccgattcttcggggtcttgctgaacatgctcttgaactctccactgcctgtttactctctagtggtatgtgtttcctgactaatgagcaattagagaacatgacttagcaagctagtattattgtgaatccactagttattatctaagttataagagtattaattaagcattcacaaggcatgtggtacttgtatggaccattgttattgtagcattttgctgtcatcatatgcaaggagcatgacttaagttggagttaatgactcatctttgtgacatgcaaacaggttgaagcctgatctgtgagcgctgatgatgaaatcttgttgagagatgtcctttatgattctcttatcctggtggactattctttcattaacaatggtgttggagttgatcttttgcctatatacgtgttgagattggttatcactcttgatgctgtcaatgatgccaggaggaaaggtgatcaagggagagcagtgtcatttatcaatgctttctcaacctcaaatgttcccaattttctcatcaagtgggctacttttcaagctggctctggtgcactcagcaaaccaattgccaatacaccgcaatctattattaagtggcttgtcgaccttgaagtcaaggggctcaaagtgtttggagactacagttcttgtattatggagaggtttgcttatgatggggtcaagaatggccatgggaacatgattcattcagatgcggaccttttcttttttgataagcagagtggtagggagtttatggacaccaaaggcagcgaggatgaagctgtggatgagatggagactgcaggtaataatgcttttatggctgctgcccagtcaatgaagggggtgactgacggcatgaggaagaggaagagctgcggatacgaagatgcaacagctgtgaagtttgtgaagtacaaggttgaagacagctcgctgaaggactacctatcagcagctaatggcataagcagtggcagtgaggtagagaacccgcagtctgatgatgagatggaagaatcaaactgatgcatagaaacgagatcacccgctaatgcttactttggacagttgcttttgagagttccttggacagccgcctttttttggagccaggaccagtcttgtttcagctgccgcttgttaatgatgccgtgcagaatccgcaagacggccccatctccagctaggcattcggatgtagtagtaaccgttagctgaccatacttgacatggagcatatgatgtttgctatgggccatatcgtgctctctgttgttatgacgcagctatagtagagtagagacctaaaaatgtagtcttgcttcaagttacttttgtaatagctgggtacttcgttatcccacggaaccagttggaagtaatgaaatcttaaccttctcctgtgtatagtgtctttttttgtgctgacgacatgcggtcaaacagtacgttttctttttttcttttgtgaatgatgagtgaatatggtgaaatattaccaacatgtttggtttgatgaatgaggtagtctatcatcttcttacttactttcttgtttggttttggtttgtggaatagacttata

SEQ ID NO: 21139 - DNA, 847 bp, Zea Mays
gagacacgggacccacccccggtctgcccgtggtatctctctcttgtccctgcctcccttcctccctccctccaacccagtgtgcgcacttcaccccccctctcggtctcaccctcctggcgacgactgggcggccgaacggccgtcgccgccgccccacgccaggtttcaaagtcttcgtcaggcccttctccggcgactcgagcaccacagggtgacaaggatagctttctcgggtcactgaaggaagacatcttctcgacgcggtagaccttctgacggttggctggttgtgctataagtgttcaaggggtggattaggaccgggaaactctgtactgaagggaaggtcaaaagtgtcaagagagcttgttccaagatggatgaaggtcagggagttaggtattggtgccaagaaggaagcagtcgccgcgctaccaaccgtgaacatcgaggaagcgttgggctgttcagtctgtcttgaggatttcgagatgggaggagaagcgaagcagatgccctgtcagcataagttccactcgcactgcatactcccgtggctggagctccacagctcttgcccaatctgccggtttcagttgcctactgaggagacgaagaacaacccatgcgaatcagccagcaccgcagggaccgtgaacggcggtggagacaacgctgctgcaagcggcagcgatacagaaagtactaaccacaatgaagatgaccattccgatagccctatcttctctgctctgagcacactcttctctgatccgttctcatccgacgatgatgaaagtgttccacactcttacgagaactgaagcagctacgcttgcattgc

SEQ ID NO: 21140 - DNA, 623 bp, Zea Mays
gaaaacagtaggaaaatggttcctttcagcattatctccgtttgctgtcccgccaacgcacggaccattcccatccgctgaaaatctctccaccccggccccggccccggccgcggccatggcggcctccgctcccatccacctcctcctctcgccctcccgctctacatggccgccacaagatccgagcctgaggcccataccgcccctccacgcgtggccggcgcgccaacgccatctccgcgctgcccgctgcgcgttgtcgccgcctacgccgtcgctcgacctcccgctcctcccgttccagcctgcggaggtgttgataccatctgaatcgaagactctacacttgtatgaagcaagatatatagcattgcttgaggaggccttgtacaagagggaaaaatcttttgttcactttgtgcttgatccagttgtagatagctctactaaagcttcatttgctgtaagatatggctgcttggtccacatagaaagttgtaggttcaaaagctggagattggagcgttgttatcaattagaggagtgtgccgtgtaaacatttcgaatcttttggatgcaagcatgcctccttcatattgggctgaagcgttgcacactgc

SEQ ID NO: 21141 - DNA, 116 bp, Zea Mays
cgaggattcccctagtaacggcgagcgaaccaggagcagcccagcttgagaatcgggcggcctcgccgcccgaattgtagtctggagagtcgtcctcagcgacggaccgggcccaa

SEQ ID NO: 21142 - DNA, 995 bp, Zea Mays
atggcggtcggcgttgggtggaagaagaggggagagcaagggaaacgagtggagagtggaggaaatgaagtgctggacgaggcgtgcacgcgaggaggagcgatgtgcgcgctagggcgcgagcttctcgcgtcccagagggtgctacatggcgaacatggtctgcggctcttgcagacgcgaggtagtgcaaggcaactgtttcagcgccttcaaggaccgtttgaggaagggactctcaagacacactttgagaaaataatattgcttggtcaaaaattgcatcaaactcgtagaaaggatgagatccatgagctgaggcaaaaaaatccacttcatacttctcatggttttgcactttctcaagcatgtccagggaacttatctggtgtcattttgacgccacttgacctttgcgatggaccttcgaactcggatgcactttctattggttatacaggatccaacacaagtgggttaggtcttccgaacaataactgctctgttggtgctactcttcctacatcaaatatgaacttaagattaccaggttctcctggtatggttttgggaagcaattcaccattgcctttgaatgctccctctagaggtatggtgtgcctagaccaacctcgatacagggtgacgagcaatcaagaattcattataaccagatggtaaatggcagaaaccttcagcaacctggagttcctgttcctggtgtgttgccatctggtgttgatcagggtgcccgaatgatgccacctgcccatggtgttggaatcatggctggactaaatcgaggcacaccaattactaggccaggttttccaaggcttggttctcttggaaacatgtcacccaccaatggtcaaggcttaaaaaatactgtaaacgttcatcctggtgccatactgggacctggaagtactatgttgaggccacgtgacccaatgcagatgcttagagtaagcactcaatctgatatgcattaa

SEQ ID NO: 21143 - DNA, 905 bp, Zea Mays
gttgtagtgcatttcttgtacattacatctttgaagaattcttggaaatggaggccacttattatgtcaaggtggaagaaatcaactgtgcatactttgaccaagtggacaagctaaataattatggtgctcacaacagagatacagtatcaaggctgctctggtcctttttccattactgggcatatgagcacgattacacaagagatgtcatatcaattcgtactggaaggattatcagtaaggaacggaaggactggactagacgagttggaaatgacaggcatctcatatgcatcgaagatccgtttgagatctcccatgatctcggtcgcgtagttgacaagttcaccatcaaaatactcagggaggaattcgagcgagcagctaatatattacagttcgatccaaaccccagcgtaacactctttgagccctacgtgccccctccatcgccgagcctgttgcaagaagaaactgcgaatgctgcagaaattgaactatgatagcgtttggttcgtccccaggtattgtaataggaaatagaatcaactcaaggattttgatccttgcatcactggttgcagcctttggttggatgtgtaaatggtattgtttaccgttacagctgtttggtttctatctcagggatcacaagtcagttcccgaacttaaaaatcattcgtggtatgttctatttcaactcaagggatcacaagtcagctaccatatcacatgtcctattttatttctatttcaaacttcattcggcaaatagtggtgcgaattctctatttggacagccaaaagtcagcaccatacgtataattttggttcacatatgaaagaggtcaaccaattattgtatgtcgtacaacaaatgggatgaataggatgacatcaag

SEQ ID NO: 21144 - DNA, 2743 bp, Zea Mays
ctttgtcttgtttctaaaaaactgtttcgaagcgttgtagtttatttgtttataaaacagtttattcgtttggaaggtatctgcttgcgaattgcgatagcgagactcatgcaggcacacaagggggagttcccgagtccacggctgcacacgtcgtcgcctcctctccactcgcacactcgcaccctgcgtccgcctgccgcctaccccaggcggccccctcccatcgccatgcctccgtccgccgccgccaccgccgccgccttcctcttcccggccgtcgcgatcccctgccgcgtgttccctcaacggcgggcgaggagcctcgccgtccgtgccgtcgcctcccctccagccttcgcggtcaagcccgccccgctgccctccaaggtagcggaataagcccagattcgttgcgcttggttggaatgcgaactgcttcgatgtgctttgagatcccatattgcagggcacatggggttgcgattccgaacttcttatggttaattaattagtaacataatggctatttccgttatcttcgagtctatactatacactagccctattctcattcgctgaaatatgggggtgggtggtgcaggtcctgaagaaattgccatgtccacaaaatgaaaatgcaataactctttagctcttatcttgtagggaatacattatacgctttaatgttagttttaggtttgaaacgctaccggcaggcaacatgcatcatacatggttaaccttagtcggggtttgtgattgtaatatatcttctcttcttcacattttgggaaatcattggaaagagggtgagtgttgaaatatgaagtgtacaaatataaagtgaactgccaccttccccatcagcttattggtttgaattaatcatgtatgtaacttaatagtaataataaatgattgttaaccagatatttctttgattccttagaagaactgagcacttagggccaggggagctcagccaaatgatattttacagagaagttatggtagagtatgatcctatgtaatgaactgagcggttgggagctgagaaaactaggggcatatttggatgtgcagtaagctttgcttgcctggcctcgctgctagtcaaggctaaccttgcccattgtggcaagccaattcggctctctcgctccagcaagaaaaactagcttgtacaagtatggaggcaacacgacaaggtaaccaaacatgtttctatatcctgtttctggctggtcaaggcgaggcaaggctcacatatggaaccaaaagtgctctcacttgtcctaattcttttcctacatagtttatcatagagaaccatttctccctgagaatcacttcctacatataatcaggagtagaagccttagcagccatgttaccggaagggaatgggaacatggactgatactttataatgtttttatactgtgggaatgtaattgttcctggtaatgtgaatgttcttgcaacgatgttcccgaaatggggaacgtggccatgttccacgtttccggctgctaaggcaggagccctagtaaactggcctcaagttttacatcatttgaaccacgaacttaagaactttcaagtttgttgtctccatttctattattctatattgtcttactgttagttatcatgaaaccttccataactgaaaaataaccagtttgactttggttaagatatttggcaggaagcctagtgtgagttaaagtatgatttgactgcttagctgaatgctactggagtctggatctcttaggctgtcattagagctgtggtataacatgcacttgaatggcagcattagcttccaacaaaaccacacaaagcattttttgtttccccctttgaattgtgggattgaagggcagcctctccgcatttgtagggggaaggcttgccttgatttatcccttacctagaccccaccattgtaggagcctccgacactaggtctgccttttcattgtttcaactgactccattgtgtatctatttgttaaactgttaatgttaatgtgaatacaattactctagtggaagataccctacattagacttaagaatgttagaatgatataccttgacaaaaaggtcatattaccaattttgtcatgtctctctgctgttacctgtgctataacattgtcgatgtgtttccagactggaaagtgggagtggaaattcgagaacaagccggtaaacatatactatgaggaacatgagcaggaggttgctgagaatatgaagaacattctcatgatccctacgatctctgatgtgagcactgtggaggagtggagggtggttgccaaagatattgttgggcggaaaggagaacttggctaccgtgttacaattgtcgattggcctggtcttggttattcagataggccatcactgaactacaatgctgatgtgatggagagctttctggttgaactaatgaattcaccaaacagtccagtcgcaaatgcagatgatgaactgatcattgttggaggtggtcatgcagcaaccatagctgttcgtgcagctggtaaagaccttataaaaccatctgctgttgctgctgttgcacctacttgggctggaccccttcccatcgtatttggccgcggttctgatatggaaactagatacatctggtgtagcatcctgataggcatgaaaggcatacagaattctgtaggttgcgaagccatcaagacaataa

SEQ ID NO: 21145 - DNA, 2976 bp, Zea Mays
acaaatctattacagctgaaatcgaagtcaaagcttgatagtgtgatgcatcttgtcgaggacaaatcaaataaggttctggccttattttcaaattttgaggcagctcatgaaaccatggaagaggctgaactcatgctttcagctttgctgaaggccaatgaaggattgaaacttgagagagataattgcaggcaagcggtggaattgttgttgtctgagaaaagttctctgatcggtgagttgaaggaacttgaagcatcaagctcttgtacatcccagaagtatgacaaattgcatcaacagataaatgagtgtgttacagagatgacaaagctcgctgctacaataaggaagtcgttccagcaaattcaaagtgtttctacagtagaactctttgctctttgctcagagattattacttttggccaagacttgaaaagatatataattgactcaaggtcatatatagcaaacatggtatcacttatagaagaaaaaagcagatctatagagcagttccatcacctaagtacacatgcttgtgggtctgctcgccaacaggtagagtcgaattcatgccagtggggtagcagaaaactttctcaatctgattatagtacagactatgcatcactcagaagagaatttaacaggaagagcaatgttgttgaaggattgtcttttgatcttaaactactgcaagagtctgcctcaaacgcgaaagatatgaaagataaagctgatgaaatatctattgcccttagcaatactcaaagagaactagatatgaaaacttccacaatggaaaccatgttgaaaaaacaaaaggtacttgaggaagaactagctgaaaatggtgccagactcattaatttaagattagagttagagcaatctcaaagtttatcatcagcattattgaaggagaacaaaggtctgagagtgatgttggaagatgaaactatgaagaatagtgaaacaaaagtgctgttggaagaaaaagttaaggtcatagagggactggagagccaaatactatttctaaatcgttgtgaagtggggcagttgatgtcagatattgaagaattaaacaatagcattaaaataatgagtagtgacagagacaatctccaggcagagatatttaagttaagggacaagcttgagatggcattggctttagctgaggaaaatgaagctgctgctattgaagttcgtcaagtaagtattttgtaatcagttttttttttcatccgcagctctgaatttagttgaaagtgggcatttgtcatgcttctgtagactgcagagattagtaaaatttatgctgaggaaaaagaagaggaggttaagattcttgaacgatctgtcgaggaacttgaaggaacagtaactgttcttgaggaagaggtatgcaaccttaaagaggaagtaaggaactatcaaatacataaacaatctgaagcccaatttcaagctattaatgacatgcttgctgaagaaaaagcatcaaaatgtgatgctgctgaggaatcgtgtcaagcgaaatgtcatctagaaaagagattgcaagctgagattcttgcacatcaaggtgtcagaaagaagattgaaggtctcaaattggaagcaaagcgtaaagatgatgagattggacaatacaaagagcatattgctgagttggtcctgcattcagaagcacagtccttgttgtttcaggagaagtacaatgaaatggaacacatggtttctagacagaggtttggtccgcatgaatcttattctgagactgtccccaagactgaaaagccttcagggcgagcaagaggatccagctcccctttccggtgcatatctagcattattcaacaaatgaactctgagagagatcaagaaatcttggtggcacgccaacgaattgaagaactagaaggtttggttagttgcaaacagaaagagatatgcttgctaacatcaagactagctgctgtggataccatgacgcatgatattataagagaactacttggtgtcaaactagacatgacaaactatgctaatttggttgaccaagaagagctgcaaaagttgctcatagcatcccagcaacagattgaacaatcaaaggcgaaggatacagagctcgaagcgctgaaggaacaacttggccatcttattctggaaagggacagcttgcttgatgacatggaccaaagaaagacggacctattggaggctcaactgctcgttgaacagctcgagcaacgggagcagatgctagaagcgcagattgaaatgttgcagctggagaaagacagccttcagcaaaagaccttggagatggacgagacaatcgagcttctagccagatcaaaccaaccagatataaatccacgaatgggcgacaaccaccatcgcggcagcagtgagttcagcaggcggctcgctcagtccgacatgctcctctcccacgcgaggcatgagcattctcgcaggcacgcggccggaagctcgaggacgcaccacggccggcaccgatgaagctcgaggatgcttgctagtagaatgctggtgcgtcagccgccagacaccgcttgtgtttgtagcggactagcggcgcggcttctctggccgggactgtacagaagctgcaccgaatggcagtggccagaagaaacttcccacgtctgtaagatctgcgcgcctgtaaatctgatagtgcaatgtacgcgttgttgtcatttgggccattgtatgttcttccgcgaggcttttcagcgagatctccctgaaagaagacaaacaactgaaaagtgacataatcccacagatttgtttctactttaccgagggttagctagggttatgtgccgagtcatatctaaatggatcaatcatcgtgccgagtcataatcccttgtaaggaggcgcatatatttacatgctccaattgtttttttctaaaaagcgcgc

SEQ ID NO: 21146 - DNA, 1578 bp, Zea Mays
aagcagaatgcagtgaaaggctgccattttaaaaccttgctctccggtataaaaaaaccttgctctccttctccgctcgatccccaacccacccgcacggcaccaccaccaatccatccatccttacgcattagctacactccccggcgtcgagcccccgcgaaccctagaccgccgccctcgcatctccgctcgtcgccgcggggtactccctccacccgtctagtgggagtcgcggcgggacgtccccgatccgagctctctccgccttagggtttttggggccggccatggactccatggagcagccggagcccaaaaccgcgggccactactacgcccttcaggttggctccgttttcctgacgggctactacaacgtcctgacgaaccagccgcacctggcgaaccagttctacacggacaacagcagtgttgttagactggactgcgagacgggtcggtggtcgtttggagagacggtggaggttatcaatgatatgatgatgtccatgaaactaagcaaggttgaggttaaaacagcgaatttcttagagtcatgggctggggcgattacgctgttggttactggcctagtgaaattgaagcactaccctgttcgcaagcgatttgctcagaatattgttcttgctccaaaggaagatggatattttatattcagtgacatctttaagctcatttgtgatgagtatgatgatcagtacccttttgctgattacaattgtgctgacaacatgccccaagtggaagcgtcttacacaatggctgaaatagggtctgattatttggatggagaacctgaggcacaggagactgttgatcctgctgaaaatcatgtgcagcaccaagattatttggaatataaggctggcaatgtgattgatgatgaaactcatttggaagagcatattcccccattccccagttcaacggatgttaaaagggattcacctcttgctcttccccaccctccatcacctaccctcgaagaacctgtggaagaagcacccaagacatatgcttcagtgttgcgaacgaaatcaaaggcaacgctggcgattacagagtcacagcaggctcaacagctggcccagcagccacagtctgcctcagtgcatgaaaagtctaacctggacaaccaccgggatgttagcgtccctgaggatgaaggcttttggaagaattaaacctgatggagttgctatccgaagccgcaaggaggctggagtattctttggctttgttgagttcgaagacatgtctggtattcagaatgctttaagtgcatctccagtagagttaaatggccgttttgttcatgttgaagagaggaggcctaactgcggattccctcgtggaagaagaggccgtggaagagctgatttctcaagggaccaagctggtgggagatacgacggggagtatgctactcgatcgaaaggaattgggcaccagaaaaaaactggacgccagtatgacagttactactagttatgtaccgctctgctgttcagatggttgatgcaagaagatacaagatttatcttggttcggtca

SEQ ID NO: 21147 - DNA, 1925 bp, Zea Mays
cgagatcgtcgttgtcttagtctttgacgagtgtgatgtcgaatgagtgcttgcacttgtggttgcaggtgaagggctcttcacaattgaagcacaaccccatacatcggtgcaccatcatcttcgatgtcgggtgtctgaaggggcgaggtggtgtagctggcggagatgctgatgacaatgctagagttggtggagtagctagtgttgatgtgccttcaaggaagaggacgagctgttaaagggacttgtccagtaatacattgagtggatctgttccacattctcttgataagttgtccaaacttacattattcaatgtttccatgaacttcctgacaggagccataccatcttctggttcacttgtcaatttcaatgagacatcctttgttggcaaccttggtttatgtgggaagcagataaacttggtgtgcaaagatgcacttcaatcatcatcaaatggtctgcagtcaccttcaccagatgacatgattaataaaaggaatgggaagaattcgaccagacttgttataagtgcagtggcaacagtgggagctctcctattggtggctttaatgtgtttctggggttgctttctttacaaaaattttggaaaaaaagatatgcgtggtttcagagtggagctctgtggaggctcttctgtcgtgatgttccatggggacctcccttactcctcaaaagacatcctcaagaagctagagactatagatgaagaaaatatcattggagcaggaggcttcggaactgtttataaacttgcaatggatgatggcaatgtctttgctttgaaaaggatagtgaaaacaaatgaagggctagatcggttctttgatagagaacttgagatattgggaagtgttaaacatcgctatttggtcaatctccgtggttattgcaactccccttcatcaaaacttttgatatatgattatcttcaaggtggaagcctggatgaagtgcttcatgaaaaatctgaacagttggattgggatgcacgtattaacattatacttggagctgcaaaaggcttgtcttacttgcatcatgactgttcgcctcgaataatacatcgtgatattaagtctagcaacatcttgcttgatggcagtttcgaggcccgtgtatcagactttggacttgcaaagcttttagaggatgaagaatcacatattactacaatagttgcaggaacatttggctaccttgcaccagagtatatgcaatttggcagagccaccgagaagactgatgtctacagttttggggttttggtactcgaaatactcagtggaaagcggcctactgatgcatccttcattgagaagggactaaacattgttggatggttaaattttcttgctagtgagaaccgggagagggaaattgtcgacctgaactgtgaaggagtgcagactgagaccttagatgccctgctctctcttgccaagcaatgtgttagctcctcgccagaggagaggccgacaatgcacagggtggtacatatgctggagtcggatgtaattacaccgtgccctagcgacttctatgattcagagtagtctcctggacaagccacgctgctgctagtttcccgtgggggcgcattcctttattctttgcgtatattgtgtaaatgcattgccgcggtgtttggtctccaatcggctggctcaacgggtgacttttttttgcgtctgtatacctatgtatgtatctgtcatggtacaagttggctatatgctgatttaataataagagagaacttactagtagactattgtatgtttaactatagtctttagatactcgtagatgttgtgggatctacaaaagaaatggggaaataatgaatatcgcttggaacaaacaagaatagataaaactcttttggcttggaggat

SEQ ID NO: 21148 - DNA, 4667 bp, Zea Mays
cctgcctatacggccagacctgctcgcctgattcgctctcccgcgattccacccccacaaatcctccgacccaacccaatccagcgtctcaaaattcacgcaacttcgcgtcgcgtcggctccaaatttgcccccttcgatccataaatcccttcccccacccccgattttgcgccgaattcggttagcttattactctccgagcttatcgccaaccgtctgtcccgacctcgagatccggctcattttttcaccctcttacgtattcggatcgagcccgagctgccaattcgaggagctccgaacgcgggccgcataaagcgaatcgaatgaatcaagcttgcgcgacgggcagttgatgccacccggcgatggatcgccgcatcctcaggacctcgtcgtgcaacggcagcggtaagaacccgtccccttcctctcccgcggcggtctcacggcctgcgtcctccgggggcatcggctccaaggacgacgccgctgccggcgagcgcaaggcgctgctgccgcggcagcctcctggcggcatggcgcggaagggccgcaaggggtccaaccgccgcgtgcagtggaaagataagcatggcagcaagctcaccgatgtcagggagttccagcctaggtacgtcgaaaacaagcatccccactcattttatgtgtgctttcacaatgtgttggtgcaattgttaatgattgatgctaccgatagcaaaaatcttttgataccaaattatactattgaattatatgagttctgtaatttttgctagttggtgaggttgcattattttgcacaaaatggagttataaggatagctataagtgtcccacggtagcatttgttaagactatgtctatagcgggaaatgggaagaacgatgatcggattatttgtctggagctgcagcttcaactagaacggtttcagttatcgccttatgggacgacatcttgtctggcagggtatgacattagaacatgtgttttgttggggtatgtcgtaaccttccattctcagcaaggctaacggaatgattgtgcttgggagctttcgatcacctaattcaagtaagttggtttaatgcatgtagttgcctttttctggagtaacttggatacctcaataaaaactgaaaagtttgtcgttatcgagccacctaacacgctctaaacgtgaatttcttggctaataaagttcaggcagagtttgttactctggtctaaaggcatggtcactgctgttaattgttgggcgagggtgggagcgtaaatgttgaactctaccgcattttgaatgagtctggtttgcatgtttttccttgtttgcttttgatatactattctgctgcaatacatgcacgaaaggtgatcactggtttattctgaagttcagcttctctgttagtgttcatctgtaaacatttttgtttgcaaaatgcaatttagtgagtaaatgattcaagtgttatgatctgaatactgtgctatttctggctttctaatcggatgatgagcagtcaaattctatggggtcaatcactatttaattaggcaatctagattaattgaagtttatgattttctttacatttattaggcatttttttgaggagctgcacatgttaattagcagtagattgttggattcgtactctttatcaagtaataaataacttccagtacttaggggttaaggtaattagttccccaaaggaaaagagatttaagacagctaacactcagtatcttattttcatcattttatacttatgcagtcaactggccaagttgacaaagttaaatctggacacatgcatgtacattacacaaccttgctgcacctaaaaactttgtttctatacatttattgtagtggagatgtttatgtcttttatgcccatgtcaagcacttttcatgggatctgaagttttagtttgcactaatgaaatggtgggcataatctatcttagtatgccaacagacagctggaactagatacgatcacatggccacccatcctgattcccattttgtttagttgacccggtggagcaaaggaatctgactacatgggaaaaaaatcttctgtgggtttgaccacactataaccaaaagttcattttccacttgcttggaagaatttctgtggaggacacatggtattctatcaccagtctctaacaacaacaacaataatgccttttactcccaagcaagtcgggatagactagaattaaaacacaacaaaatccacaagtcaaggttcagacatatgaataggtatttcctatgcactcaaattcaaggttaaatttatagttatattatatcctttatttccttttattgtctctttccatgtcaattttggccttccctcccctctctttccattgctattgtgccttagaactcactacgcactggtgtctctagaggcctttgttggacatgaaccatctcaaccgatgttggacagaattttcttcaattagtgctacccttagcctatcacgttcacatatatcattgtcctggactcgctcacttcttgtatggtcacaaatccaacacaacatacacatttctataacattgatctgttgaacatatcatctttttataggcaaacattttgcaccgtacaacatagcaggtctaattgtcgtcctataaaacttgtcttttagcttcaatggtaccctcttgtcatatagacgtcaaatgtttgacgccacttcatctaccctgctttgattctatggctaaaatcttcatcaatatctccatctccagttagttgtattattctcattgtttggaccagactagtaactcctcaagagcgaagttgagatgaaactgcacttcacctgatagtgagtcaatatagccctgtattctgatgttctatttaatccacataggaacccatcaaatttcaactactctgcaatgggctttagtcttatctccaaaggtgaagtgagtatactttggtaagatatgaaaataacatggaatttcatgctactttgttttatttcttatgtgggtactgctgtggtatctgaacacatatgtgcatacacaaacctatatttcgcacatgcacacctgcttacacacacctccacagtcttggtctctggtgtgattgacctccatgccccagacgacatctgcgtctagttgcgcttcaacgcaggtgggtaggctgcaaccagccacctaaccatgaagctatcagtttatttgcgccaatctcgtgctacttgagggtttgtttgttggctcgatattggagctttggttgtatgaacagaacattttcttttagttttataatctatatgcagctgtagctttgtagctttcttgggcaataatgaggtgagtatcatttcctcaggtcctgttctgactgacaaaactattgcagttatgttctgttttcacgagatcacattctagggaactagctaagttgttagctatgtttttttaacattagccgagtcttttattgtcttagtagattttgaaaatcattgaaattctttgttagtattaattagtcatgatgtaatgcagtcaacagtgatctgtgttaggggcttagggctggttgcacttttatatttttgaaccgagcttattgtacttaccttttttccaaaatattaatttctctctgctagcttccaactttgcacttttcttgacaaatatgttttccatctgaggatattatagtttcctaaactaataattctcctctgctgtttagaaatttcccagtataagtatttttcagtttatataaaaaacacattaggtattaagaatgttattttaattgagaaaaagttattatttaaagttaagagggtcaggcatgagcatgatgtcattaagccttcaagttgattatctctataacaaatcagatatattttgatattttccaattgctactgctttaaaagcctccatgctatattaaactgccatgctgatcttgtttatgttggagtttcaagagacctactgaaccttactactctgtacaaactattttaatatcttgctctaactatgattttaccttttccatattttacagtgactcaagtgactcagatgatgaatatttggatacatgcatatgctcaatcatgtaaatacatcttgcacaggtggattctatcatgtgtataaggagctgtatctcagtattactgtcttcggcttggccctaacagtacagtgacaatcatgcatgcatgcatagttcgttccaacagactccgaactggtgataatcagctggccttaactgggagttacatcaaagacctagaaaatgatcaccggattcagtaggtagacatgattaaagaagccgagaaagaatgcctttctttggtttaattttggataccaacagcatcctgagtttttggcagagtaatgattcatgtgataatgcaaatgctattagaatcgaacattactaattcctgtgcatgattcagatcgattttgtcaaataggatttgatgtattaacatggtatgtttcttttaaaaagaatccttgctaccatcatttgttacttacaggagctagtgcccagatttgtgctgaa

SEQ ID NO: 21149 - DNA, 2707 bp, Zea Mays
taatcgcgccgcgcaggcggcatcacactccagtacagctctcactgcgccctgcccgcatcggctccaccacgctccacgccccacgcccccctacacacacacacaccccgacaccccggacagagggggcgcaggcacgagaacagctcagtcgcggcgagctcccgggtctccagcgaaagtgccggaggagagagtggtggcggctggcgcgggctccctccgaggctctacgcggcgcctcagcgtaatgctggccttccccggggacagatcggcctgagtcgccgttgccgctctcgaatcggcgtcttcctcgcatggttccggccagagcttggatctcgcggcggaagacgcgaggcggaaaagtggggagggtgtcgttccttggttttcttctcgccaaaggattgaagttatgatggaaaagcttgtatagtagcgctaaatctaattctcttgaagcaagtctcaaccatgcagcgtcttacagcgatagtcttcgtggctacttctttccttattgcaagtgttccacatgccaaaagtgctgatctgaactctgataagcaggctcttctcgcatttgctgcatcactgcctcatggcaggaagctcaactggagctccaccacacctgtctgcacttcttgggtgggggtgacatgcacaccagataagagtcgtgtacatacactgcgcctacctgctgtaggacttttcggtccaataccatcagacactcttgggaagcttgatgcactggaggtattgagccttaggtcaaatcgccttactgttgacctcccacctgatgtaggatctattcctgccctccattccctctaccttcagcataataacctgtctggaatcataccaacttccctctcttccagtttaacattcttagacctgtcatacaacactttcgatggagaaatcccattgaaagtgcaaaatcttactcaacttactgcattgcttctccagaataactcactttctggacccattcctgacctccaacttcccaaattgagacacttgaatttgagcaacaataacctcagtgggccaataccaccttccttgcagaggtttccatcgagttccttcttagggaattcttttttgtgtgggtttcctttggaaccatgttttggaactgcaccttctccttctccagtatcaccaccatcccccagtaagaccaagaagagcttatggaaaaagatcagaactggtgtgataattggaattgctgttgttggaggggtattgttgcttattttgattctcgtgctcttgatatgtattttcaagagaaagggacacactgaacctaccacagcttcgtccaaaggaaaggctattgcaggtggcagggcagaaaaccctaaggaagactacagcagtggtgttcaggaagcagagaggaataaattggttttcttcgagggcagttcatttaattttgacttggaggatttgttgagagcttctgctgaagtccttggcaaaggaagttatggaactacctacaaagctgttcttgaggatgcaaccatagttgttgtcaagagattgaaggaagtggtggttagcaagaaggattttgaacagcagatggagataattggtagggttggccagcatcaaaatgtaattccattgcgggcttactattactccaaggatgagaagttgttggtgtttgattatgtcccatctggtagccttgctgctgttttgcatgggaataaagctgctggaagagctccattgaactgggagacaagagtcaagatatctctggacgtggcccatggaatcgcccaccttcataccgagggaggagggaagttcatccacggcaacatcaaagcatcgaacgtcctcctatcgcagaacctcgacggctgcgtctccgagttcggcctggcacagatcatgaccaccccacagaccccgccgcggcccgtcgggtaccgggcgcccgaagtcctcgagaacaagaaatcgacccagcagtccgacgtctacagcttcggcgtcctgctcctcgaaatgctcacgggaaaagcccccctcaggtctcccgggcgcgaggacccctccgtcgagcaccttccgaggtgggtgcagtccgtggtccgtgaggagtggaccgccgaggtcttcgacgtggacttgctacggcaccccaacgtcgaggacgagatggtccagatgctccaggtcgcgatggcgtgcgtggccgctcaccccgaggagcggcccaagatggaggaagtgatcaggagggtcacggaggtccggaattcttactcttctgggacgaggacgcccctggaggacaagccatcggagactgcacgagcgccatgagggggtacagcgtagtttagcaggagacggtagctaggttgcatagtggattccttatagagcttcagcaaagttgatagccacctgcatagcgcagtttccctcgcgattcccgatcgtttccagtaaatctgttgtgttgtttcctctctttttttccccctgattctagcggtctggttgtcgatccatgccattgtattgttgttcagttaaatcagcagctcttctggttagtgttgcactgtaatttgacataatctttgcagcgtgattaatgaatttcatttgccttctgtttctgccagat

SEQ ID NO: 21150 - DNA, 2062 bp, Zea Mays
gatgaatcggcttccccaatctgtttctttggatcttcaaggggtgtgggaacatggctcataaatcatatgaaaagtttctttgaaaagtcgagtcaggatttatctcctgccaaaggaaagaaagcaaaagggacaaaaagttatttgccaaggaagaacactgctgcttatgccatactaataacactccatagggcaaagactagcgggaaagattttatgatgaaacaagagcttattgatgctgctgaagccagtggactgtcacgagacgcgattggtccaaataaaagtaaagcaaaacagagttacgggaaggactggtacactggttggagctgcatgaagacacttctatccaatcgacttgtcaccaagtggagtaacccagcaaagtatatgctaacacaagaaggggaaggcactgcacgtgactgtctttcacggtctggattagatgattctgcacggcctctaacgataattggtgctcacaacacatctgctatggatccttctgttgccaggcacagtcctgagcttgtcagcgacagttctctgacaaaaaagaagagcaattgctaccgtcaagttcaagctactaattacgaaggaatcatttgttgcgattcagattcagaagagccatgtggaaaggacattcccctaaaaggcatggagcctattactagttgtggaccaccagatatttctcgtccattccaaggaacacccaaactgcaatcttctacaatgggttctgctaaactagctatgccacctcgtcgagccaatgaaaactttcttgaagcctatgaagttattttaatattggatgaccgtgaaaaattcgggtctcgttcaagaaaagttgctgataacatttgttccctgagccattttgctgtggatgtcaggcaattgcctgtgggagatggtatttggattgcccgtcataaggaagatcacacagagtatgttcttgatttcattgttgaaaggaaagaggttatggatttagatggctcaattgaagacaaccgatatagagatcagaaattaaggatgaagaaatgtgggctgaggaagttgatatatcttgttgaaggtgatctcaaccgtgcaccaaagagggttaaaacagcctgtttcaccactgagattctcgatggatttgatgttcagagaactactgggtttgccgatacccagaagagatatgttgatcttacacgttcggtaatagcatactatgatgcaagtttctcgatcgttggtaaagcttcccctgtttgcccaacctacgatgacttcaagagaaagtgttatgatcttaagaagaaaacagtgagcgacatatttggctgtcagcttatgcaggtaccacaagtaacagaagaagctgcacaagctgttgtagagctctatccaacccctttgttactggcaaaggcatactctatacttggtggcgatacctctgcacaagagaagatgctaaagaagaagaacgagatggtaaatgcaggagcaagccgaaacatatttcaccttatctggggtgacggatgaaaaatactctggactggaaccagttgcgggccaactgaactttggtggcttatggtgtcaccgtcgtggtgaccatcttttgtgtctccgagatttagaggctcccatgttctaaagcaaatagtggctccatagaacactagggatctagattaggaagagtttctctctacgtcgcgtctagagagtactctgctgtggtgtcgtggttgcacagtggaatgaagtggtcccttggatttacgtggtcgggatttcgtgtatcggtctgggttgtctggattatgtgctgtctcgagctacctcggggctgttaagtctacaggatagcataaaatatcgcagtgtacctacagggaagattgtatgggtcgcccatgtgttccatggtcggcgccttgtctggtcatctttggctgaggccctcctacatacaatgggtgtcgctttggctggccaagacaagagcagactgccctgccgtttg

SEQ ID NO: 21151 - DNA, 1588 bp, Zea Mays
atcgagctgtcccctccctgtgctctactgctcttgcgccttgctagcttgcttgcttccctgctccctccctcctcctcctcgtcgcctcttctctggttcttcctggtgtttgccggagcgaggctaggcgcaaggggagggagctgcgctcagccagagctcatcggcgctacgcaagcgcgctgcctgggttccaatacaagtaccaccatcatcagactttgagagtatcctgtcaccagagccaatctacagtgatcttcagttgaaagagatgaactacaatgcagcagcaatggatgaaagcactgagttccttcacttgattcttagtggcaatgatgaaggatacaatagcacaactgaattacaagtttgggatgttgtggacttctatgtctcagaaaacttttctgctctccaatttgatagtttgatgggttttacaaatgaagttagtacttcctacaatgattgtatgaatttagttgatatggtagagcggcccgtggctcgtctgtctctagatgatacaccaaaacccagtaacagtgatgatgcggttccggcagacaatgtcacaatggaccctgatgaaacatccttataccttcagacaaaaccaacagattcagaaacagaaagtagttctgccgcaggagatgttgaaactgaatatctagatctaaagctactttctagatgtatgcctgatttaatggatgttgactcgcccaattgcttatcgaaaacaccagtgaaaaaaaagcatgtgactcttgtgcttgatttggacgagactctggtacattcaacattggatcactgcgacaatgctgattttaccctagaagttttctttaatatgaaaaatcacacagtgtatgtgagaaaaaggccttacctgaaaatgtttcttgagaaggttgctcagatgtttgaggttgtcattttcacagctagtcagagagtctatgctgagcaacttatagataaacttgaccctgatggaaaatatatctcacggcgtatttatcgtgaatcttgtgtattctctgacggttgctatacaaaggacctgacaattctggggatcgacttggcaaaagttgcaatagttgacaatactccacaggttttccagttgcaagtggataacggcataccgattaagagctggtttgatgacccctcagatcaggaactgatcgagttgctcccgttcttggagagcctcgtggattcagaggacgtgaggccaataatttcaaagacctttcatgacaaacttgagcagaattagtttgaggcgacagatgtatcatccagtgaacctgtcgctgaagttagcttcgctccacatggtgcaggccatcattcttgggaagttagatataggatgaaaaatcacaatttctgttatgttagctgttacaaatagcaagcataaactgcggtcgttgtctcgtcgatgaaaatggcttgtatatgtatgtccctttgggcttccgtgtcacggatcattgtacagagacgaacattagtgctgaataaagtgatctgagtgcaattttgctcatgagga

SEQ ID NO: 21152 - DNA, 4114 bp, Zea Mays
tcgtcagcaatcctaatccaaaccgccgcggccacggccgcagccttccatagttctgtcagaaattccccttctcatccctgatccctccaactcccaccccaatacatcctgccgacgccatcagccggcgggacgcacacacgaggtcgaccttcgaaccctagtccttggccgagccgccttgcgggatcgtccccgccgcgcggcagctctgcctcgacccttttagtctccgtccgacaccgcttggatcagtgctgtgtgctgtcaggagccgtggggcggcgcgaccgcgctggctgcctggctcggaggcagcttggcagcttgcagtggccagcgcccagcggctgctcgcgcgtaggcgcaggcgcgcacggcgcagcggccagcggcggctcggacgctcggtcagcccctggggcctggctgcctgggctcggtcgctcggaggcaggcagggaggcaggcatcggctctgcctctgctggctgcggctgctcgtggcctcgcgccgtcgcgctcgcgcgcaggggtgggaaactggggccgctgctcggtcgcgcgcaaggagatggaatcaccacccctcacagctgaagcaattgcttttaccgagaaaaagatggacatgactttggaggatataatcaagatgtcaaagaaaaagaatcctggaggcaagaacccccctaggcagccgatcaaaaagcgtccattccagaatgccaacactaataaagggaatggcaaggttcaacggtttatggaatctagatcaaccattagacaaggtgttcttgcacagagaaggtcaaatcttggtggaagtcagtttgctgctacaaagcaggctgcaaagaaggctgctgctatgccaatgcgcagcggggctgtctattggaagaagcctaggtaaacaatggttatcttattgcttatgagaaagtttactgcattcaaggagttgttaaatttattgtgtcatgcaccttgggttatattggctgagaatgattgtgatgctggtgtttgcatggaactgccttgacttctctggttatacacagttacacacatgttattaaagaacaatgaacttcatattcctgttctgcaaggcttgttttcttggttgaactgctacaaatacatggtgaatataacatatgagccttaaagcttcattgaaagttatggcatttccctttattctggttgagctggtcaaatttgtgaacctgctgggacaccctggatatgtatctgctgttggctgacatttttctatgcaattcagcagtattcatggtgtaatctatagctgctggatgagtgctatttttggacaccagtgtctgaggtttacgttagtgttatttgtcaactatggttggaaggaccgaaggagatgtgataatgactagcatctcatgccactggtgactgatcatccagatacagggatgctacatgcctgagttggaattggtttttactactggctccttggctgtgctcagtgtttgtttgaatgatgaatgcaatgtgaatctagggtagtgatgctatagcaggacaattgtatgcctccaaggagtacattttgcttctgcctcctattaaagttggctgtatccataacagcattctatcataaagttgttcactagtttccacagatattgcttgcttgcatttctactggatgagaataaatcgtgttatcttgcgatttatctgactatatgctgagctgtatggatgctttcttttcaaggtcaactgttggaatttattttcatgatttcttatgtcttgttgatcctggatcagtggtcactaattacatgacttgagtttatcagttcaatcaatcaataagtggtgttaacttgggaaatttttgaaccatgtgtgttgaaattttggtggaaataaacagtctagactctagaatgttgggggccttggaaaccaagaggatgcactagatattttcagtgactactttatcatttctgtttgattttatttcgaagcatggtatgtacttcctgactccccttgagaagtgagaattgtatccttgttttgatggggcatggtgagtttgctcagaaaacagtattgatcctggttctccattgtttatgattcatggtacttgagcactcctgctcatgtgagatactaatgtttttattttgatacagtgcaagtaccttagtgcagaggaggtcagtaggtgatgcttttcaaaataccaaggtacgactatgtcaaatgttgaccttaatgcagagtaaataagataatctggctgaaaaagtaacttttttcctggggagttgtatctgtaagatgtagatgacaatcttttggtctaccaatttaatgatttatcttggaaaaccattgctactgtaatttaaattcgtgtacttgttatagtggtggctcgggttgccgggggggggggggctgtaggtttatttggtgacaaggggatcatggggggattgaggggggaaatgaactactttgcctctcaatccctgctcaccaaatcagccctaatggtgcccccaggactgccctcaatttagcgccaatatgcattgccttgatactaggatacacgatacaccgataccctaatacgacaatttctcaaaaactaggataggaggaatcggggatacgattttgtatatacctgagggccaacaaacgctgtcatagtaccatagaaccgatgccctcagtactgctttgcaaatcatagtcgatctttttttatcagggtcctctcactgcatattagtttgcaggaggccatctcttatgtgtgttgtgtcatccttgacaactctaggaccatgggggtgaacactgaaggacttggaggaggccccaatctccttcatggtgtccttggctgcagtgcctagaaacattctctgagaagggctgtaagttaggttgcacatgtgagggacctccaggttaggttgttttcaaaagatcatattttggtgagcatgaatagtgcaaccgcgtcagctcttagaagcgatatgcaaccaaagaaaaggccgagaagctcaagtgaagcgattcagtgcagacgaacaggggaagcagacagataactcaagctgtttagtgcagacaggcagctcaagcaggagtcggaattggatgatgaatcggattagggagggagagatcaaaggaggggaagagatagggaggcgggggccggggagggagatgagagggtggtcaggaggattacctggtggtggtggtggccggtggcaattcgtgagggttggcggcgcgcaaccgctgacggtggcagcggcgcgtctagggttgctgtgctcgtgtgcgggagcgggagtcaccaagtatagcgaaggccatacaggtcaaggagtcgcagaaccatgcagcaccaaggacgatggatgcactctttgcacggatgaaggcgcaacgcatgaggaccgcaccacagcagcaggcaaatcctgcctctggacgtgatttcaaccagcagcgacgtgttcagcagcagcagaggcgaggtagagcatatggtggccgtgttgtcggcaaccaatgagcatatttggtgcatcgaagccccttctcttcactggtcttaaggaccttgagggctagtttgggaactctatgtttctctattttctcaagtgaaaatgagctaatttttcttgggaaaatgaggttttcaaactagccttgaatgaaaggacgccgggggaaaatctaacttgactttctttgttggatgaaaggatgtggacagaatatgaagcgaattttgtgtgactctagttgtctgcttctgttcagcatgtacactgacctacggaaattacttgctagattttgatgtcatgtttattgagttgatttggttcgtctcttcaacagaactaggagtattcgccttttaccatatgtataaaattttaaatacctttactgtgaggtagacaagctgaatttatcatagtcctttcgttttaaaattatatctatactgtgtatagatacatagtgtatggtagaacct

SEQ ID NO: 21153 - DNA, 4336 bp, Zea Mays
cggccaccagaattctggtggttcctgtagcttgtggatggaggaggaggcgctgggtcgtggtggtggtgaaaagctttgatttcgtagccgtggtggacgccgctgctaatgcccttgccgtgcctcgttggtggcgtgcaagatgtatgccgtggggaaggtgggcagcctcatctcccgcagcgtgtacaccgtctccggcccgttccacccgttcggcggcgcggtcgacatagtcgttgtgcagcagcaggacggcagcttcaagagctcgccgtggtacgtgcggttcggcaagttccagggggttctcaagtcgagggagaaggttgtcgacatctccgtcaatggcgtcgacgcagggttccacatgtacctggacagcaacggcgaggcttacttcctcaggaacgcggacccgaatggtgaggaaggggagttcattgtctcccccgcctcgtcgggagatgagcgagaggtgccgatccaggaagctcagctgaggaagtcgaagagcacttcgtgtgatagctcgacgatggaagccgacgtcggtgagggcaagattcttgcgaggacaacctcgaggcggataaccatacttgaaaggatgtttggccggaaatcgattaagaacaatgcccatgctgtggatagggtgagttcattggagcgtgcagaggtcgctgcagaactcctagataccaagtggtcaacaaatctcccacgtagttcaaaacctaatggttcaaatgatgagccttccaagagcaacaatgatcagatggaaacctcaaaacctgtattttcggaacatagtttggatcatgggaaagagatggactctaactgtgacaatgctcactgcaattcatgcagccctcgtggaggaagaaacagttcagcagatgaaaccgatccgtgtttacaagccactattgtgaagaaagaggtggttgagatacacgcgcgtgagagcagcgacttcactgataatatcacttcaatcacacatcaacaagggtcagaatcttcgtcaaatgatctgggaacagataaacttatgcagcagtctgtcgatactcaagatgagttgctgcatgatgttgaagatgtaactgaaagggagacacatgcagaggaggttatttccaatgacatttttgaaatccatgttgttgagacagacattacaagtggtaagagcgaggtggattctgagattgttactgtggatccagaaccagatcgagctaaccagaattttacagatacaaattaccaaaattatggcaccacagatatttcatctgaaagacatgaggtttcattgatcccttctgcacaggatgcagttcaagagaaaatagttatcctcagcagttctgaggctgtggagggctcactagatgcagttccagagaaagtagtcattctcagcagttctgagactgtggatagctcatatgctgtgtcctgtattttggatgacacagttcatgatgcttctgatatctcacaggctgacggtgtacaacatgaggagcactctagtatctctgatgggagtacagaaaagctaatttctgaggaaagttcattagtatgctatggtgttcccagcaacaaaaaagacttggttaatatagctgttcaagaaagtaaagcctttatcttaaaaaatcctgcctcccaaatcttggaagagagtggtccaggtttggatgtatctacagacagtgtttccctttcacatgcagactcagctcctgatttagcttgtcagcatgtttctcctaatgttgaagatacaacaagttatgagcctggcattggtcctgaagatgtaacaaaaaactcagttgtggaaaatggagcatgcagcggggaacttgttgtttctgttattcagacctcagcgggagatggactgacaaaatgcattgctcatccagctgttttttctaataaaatagaagtagaaggctcaccaacttctgctggattttccagtttgatcagtgttgaagtgcaaaacacaaaactagaagatgacacaaacaaatctagttctgtgattggagatgaagctggttttgtgcctgaggctacagctgagcttgatgaagaagcagaaccagttatatcattatctgaatatacagaagaaattcagtttcaatttagtgatgctgaaaattttgcagatagaaaggccacggatgacatggtggctaacaaaacaacaggtgaagtagaacatgatgaatctgattgtgacacagagaaacaggaagaaggtgatgtaggtcttgtaaatgacttggagaactgttctgcgtcattaaagcctgtgagtagccctgtttctattcctgcaattgacttccagtcaggaaatagtaacagagaggctaaatctctaccaaatctccgttctcatatacatgatcttgaaaggtcttatagttttcagctaagccgctcactgcaatcaactgctgaaaataatggaattgatctagtcaagagcatgaattatgcttttcttgagcagaaatcagaagctattggtgatttttcagaagaaaataacagccctcctgaggttaccaacactgtagcacttgatggcaaccatgctgatgatctgaaagttgatgcgttcattccttttgcagaattatcactatgcagacacctgttatctgaaggcatgggggaggatgctgcttgcagtgcatttgattctgagaaggtaaccttagaggagttccgtaacatgaagcaatcactgatgcgaaacaacaaactagttgttaggattgctggccgctactttccctgggatgctgctgcacctatagtactcggtatgatttctttcagtgaggaacaagtttttgaacccaaaggaatgataaatgtggagcgagttgagcaaagtgcagctccaggtggcagctggagcatctggccatttagtttcagacgaacaaggactattactgctatccagccagtttgtgaaagtattgttgagacttctgtatccactcctaaagaattgacacattttaaagaactagatagagaaaggaataaatccagggtaaagaggattgagaggaaggtgcgatcactcactccaacatctgacgagcttgcatctcttgatctcagagagggcaggaacgtggtaacatttacgttctcaactgcaattgttgggaaacagcaggttgattgccacatatatttatggagatggaatacacgcattgtaatatctgatgtggatggaactatcaccaagtctgatgttcttgggcagttcatgccactagttggagttgattggtcccaaaacggagttgctcatttattttctgcaataaaggaaaatggataccagcttctatttctgagtgcacgcgctatttcacaagcccacatcacaagacagtttcttttcaacctaaagcaggacggcaaagcacttcctgatggccctgttgttatatctccagatggtctcttcccgtcactttacagagaagtcatcagaagagctccgcatgaattcaagatttcgtgtctagaggccatcaaagatttatttccacacgactcaaatccgttttatgctggatttggaaatagagacacagacgagcttagctacctcaaggttggtattcctatgggcaagatcttcataataaaccccaagggtgaagtcgcagtgaaccgacgggtcgatacaaagtcgtacacatccttgcatgctcttgtccacgggatgttccctccaatattgtcgtcatctgagcaggaggactacaatgcttggaattactggaagatgccattgcctgatgttgatttgtgaggccattacttggttggctacatgtggatgctcctgctcctgatataagttcctgcaagatggaattttgtatatataggatcataatagatgtagtagctatttcttgtgtctcctgttgttgttgttgttgtcgtcgtaggactggaaatcatacctccgtgtgtcctgtaactgaaggtacaaaatttactggatggagggatctgatagtatgttgcagccccccctttttcgtttcatccttgatgtaattgtggtaccgatgtattttgtacaagaacaaatcaataataatgcaatcgaaagcgagctgttcatacgcagacacaacatgttgcattgaccctaggtgcattcggtaactgaaaatcggagctgtgtatactgtggacatgtcatctttggtatgcctgcgacttttagctgcagctaatgtgc

SEQ ID NO: 21154 - DNA, 2489 bp, Zea Mays
atagtagggtttggactatacaattctcgtgtctcgccctcccccgacgcgccgtctagggtttcacagccgcaccccgatccactagagctatggagttcgacgaatacgagtacctggagaaggcggtggagccggctcccccgccggccaatggttccggctccggcgagaaggaccgcggctcgcgtcgccgcgagggcgacgagggccgcatatcgaagcgctcccgctcgggggaggaccgcgagcggggccggcaccgcagcgttcgggaacaccgggatcgggataaggatgacgggaaggagaaggagaggagccgcgatagccgcgggaaggacagagacagggaagggagagaacgggagaaggagaggggggacaggcaccggcccagagagagggaggtggaacgggagcggaggagcctgagccgttcggagcggcgccgtatcgaggaagaggagatggtgagggagctggagatggagcgcgagcgcagcgagcgacaccactatcgcgaccgtgacgtcaggcgtaggaaagatgacggggcagagccagaagttgatccagaaagggaccagaggactgtatttgctttccactatctctgaaggcagacgaaagagatgtttatgagttcttctcaagggctgggaaggttcgtgatgttcgtcttatcatggaccgaaactcaagacgttctaaaggagttgggattacacactgaaattttatagtttgctctacatgctgggattatcggcaatttacaagttctaggcaataaagggggcacccaagaaccaagttcgaaacctctacaatttttgatcaaaatgcctgaagttttctgtgaaaaattgaaatgtcttaacatatgatgccccacttattgttcttcttttcttttttacaggaagacatcttttcttggacgcttcgatgtttgtactaaacatatatctaaatttgcaggtacattgagttttacgatgttatgtctgttccaatggcaattgctttgtctggtcaaccgctgcttggacaagcagtgatggttaagccatctgaggctgaaaagaacttagttcagtcaaatgcgacatcaggtggtgcggcttcaggtggagcaagaaagttgtatgttggcaatcttcactcaaatattactgaagaccaattaagacaggtatttgaaccatttgggcaagtggagcttgtacagcttcctctagatgcaatgactggactgtgcaaaggttatggctttattcagtttgcccggcttgaagatgcaaaagctgcacagagtttgaatgggcagcttgatattgccggcagagttattaaggtttcagctgttactgatcatgtgggagtgcaagctagtggagctactactggagatctagatgatgatgaaggtggaggcttggcgctaaatgcaagctccagagctgctctaatgctcaaattggacaggagtggtacagcaaccagcttaactggtggtattggtgctgctggagtggctgtaccagctacttcagttattggggcagcaggagctgcttctcttctgtcaccaacagtttctgctgttggatcagttcctggggcacctgtgcttcctattaccgctcagaatgtgatcatgtccacacctacagaattcttgttgcttaaaaacatgtttgacccatcattggagacggatcctgattttgacttggatattagagatgatgtccaagatgaatgttccaagtttggtgcagtgaagcatatttttgttgacaaaaatactgcaggcttcgtgtatctgcagttcgatagtgtaactgcagcagggaaggcccaacaagcacttcatggaagatggttcgccggaaagatgattacagcgacatttatgtccgatcaggaatacagtactaagttcccaaacttgtgagcatatgcggggaagagttggtcagacccgcatagttcgttcggagagtttgctagtgctgtatcgttggatggtagactagacgaacaccttattgattgtatgacaggatagtttcagttgcagcgctggtcgtgcgtacaatgtttgatgtactttatttacggcatcacacacagtgaccatcccttattttgtccaccgaatgaaatgccctatgatctccaggcacgttggcatatggtttatttatgtacgatctgttggcactggtacgtatttgtatactaagcaaaagcgttacataatcacaatggtacctttattagtcccctgtcgtgggatatgcggccgcattttggccagctttccaatgtgttccattttatttttgttctcatgatgtttcgacatgttttcatcagtttttcctttcaccaaggtcactatttcattccgtttcattttcatttactccactgatactgtatctagttattttatttggtttatcaagaaattataa

SEQ ID NO: 21155 - DNA, 1861 bp, Zea Mays
agccaactatacaacgtgctgttgcttctgtgtgatttattactgttgggacacacttgcaagttgcaaccttgctgatgtgtggacattgtaagaaccttgctccagagtacgagaatgcggccaaggaacttagcaagcatgacccaccgattgttctcgctaaggttgatgctaacgaggagaagaacaggccgcttgctaccaagtacgagatacaagggttcccaaccctcaagatcttcaggaaccaggggaagaacattcaggaatacaagggccctagggaggctgatggcattgtggattacttgaagaagcaggttggccctgcgtccaaggagatcaagtcagcagaaggtgtggccgcccattttgatgacaagaagatctatatcgttggaatcttcaaagaattcagtggcactgaatttacaaacttcatggagcttgctgagaagctgagttctgattatgactttggacacactttgcacgcaaaccacctcccacgtggtgatgcatctgtggaggggccattgatcaggctgctgaagccttttgatgaccttgttgttgacagcaaggattttgatgttgctgctctggagaagtttattgatgctagcagcacccctagagttgtcacttttgacaataatcctgacaaccacccatacctcatgaagttcttccaaagctcagctcccaaggctatgctgtttttgaacttctccacgggaccattggattctttcaagtctgtttactatgctgccgctgaggagttcaaggacaaggaaatcaagttccttattggtgacattgaagccagccagggtgccttccagtactttggtctgaaagaggaccagacaccccttatcctcattcaggatggtgattccaagaagttcttgaaggatcacattgaggctgaccagattgtctcttggttgaaggagtactttgatggcaaattgacgccgttcaagaagtctgagcctattcctgaggtcaacaatgagcctgttaaggttgttgtggctgacaacatccacgatgtggtcttcaagtctggaaaaaatgttcttattgaattctatgccccctggtgtgggcactgcaagaagctggcgcccatcttggaagaggcagccaccactcttctaagtgacgaggaagttgtgattgctaagatggacgcgaccgccaatgacgtgcccagtgagttcgaggtccaaggctacccaaccatgtacttcgtgactcccagcgggaaggtcacctcctacgacagtggcaggacggcggatgacatcgtcgacttcatcaacaagagcaaggagaccgccagcgccgtccaggcgacggcgacggcatctgggaaggcagctgacgcagccgagaagaccgagcccgtcaaggacgagctgtaaacagccttggcgtggacgctatgggtaatgggacagaggaggggggacaaaagctggcgccaacgtactcgccaagcctccggctttagtttttgcgagggaagagggcaaagtaagagaatgggagggaggggtctgtggcgtgttttgctctggtgcggcatgcctgtgtatcccattgagattctgtacaattgcaaacagagagcggtacctttttagttaattatcagagatgactgtagaaagaaactgattgtggtgaggttgagtggacgaataaatggcgagtctgcctcattggatgcatcatgaaacgggcacttttgaggagggatggtaatggggaaatttccgtggagaatagcttttagcgtgtgtttggttagcgggttgatgcgggtttgaatgggttcaatcca

SEQ ID NO: 21156 - DNA, 616 bp, Zea Mays
ctcaatttcttttttggatttgagaaggaagtttctaggtacatcatattggttgggatatgacatgcttgtgtgatatgcttgccagtgcctaaaggcaaattctaaaaaatggttgagtttcattcttgaatcctgataattcttctcattatttgagtggaagacgaatctaattgtataggtacccaatataggatcggcaatccaatttggggacataagttgaatcaattgtcgtgtaccattgaaatgttagttgttacacatatttcggccatttatcttgttgaacctaccctattttcaaccgttggagctgggaatcggaggggtggtttggttaaatgatttgagatggcctgccatgtgtaatgtaatcgaagtacatggttgcacttttcggtgttgcccatatattatccataacaatatgtagtttcagctgttctgcatttacgaaaatgcattggaagagaaacgtccacttcaactgaatgtattctacgaaatctttatttatgggtatccgtctgttgtgcattctaacctttgtgaatatagagcgtgtatcttatactccttaagtttcaatttacaatttgtttgacttgac

SEQ ID NO: 21157 - DNA, 883 bp, Zea Mays
cagaccgacacggaggtaggagaggagggacgagggaggggaaaagagagatggtggaggcatcgccggagtccggcgccgcggcgaccggaggtgcctctagtacggcggcggtgcggaaggggaagtcatgcaagggctgcctctactactcgtcagtgctcaagtcccgcggttacaacccaatctgcgttgggatcccccgctccatcccccaagttcctaactacgtggtggatgaacctaaggaggaggcgacggcgcaggggcatgacctcaggcggttcagttattggtggacagcagattggtcgagagaaagccatcggcaactgaacaagctccagcacatgttgcaaaggatgcagctaccatccgctctcaccaacaaggacaacagagacctcagaacttgtcgaggcaggaattcttggacaggtttaagaggagcgctggactggtcgcttcaggtgttgcgaagaatctaaacaaaacagccaattatatcaaagaaaatattcaggacatgtacaccgatcgtcgtccaccaaagtagcaaccatgccgagtgattgtcgtcaagagctgaagaaatcgcttgctactggaaactttacatcaggactacctggaaactttactccactctcctcacttgttaaacgaaatggagcttttctgggataccaacttccttttctttacctgcataatcttgtaattttgcggctgtatatgtacatgcaaacaacttctttgaagcgaaaaatcagatctcgtttggtgtattgatcaatagtgtcagcacgtcacactgcagttcaaaggggcgaaagaattttgcggaagacgatggtatttgctcgtcgtcacttaagcgata

SEQ ID NO: 21158 - DNA, 1103 bp, Zea Mays
aaacaaacagggttcgtcacatcgcttgcgcctctctctctcggggacaactgcttcacccctgccgccgccctacgcttggtgcctaggtcttcatcggatcgttcaccgggcacaagcatcacccagcagggtttcttgccctatctgtttaagactgggatcgcttctcccccgccgaccaagccgtgcctcccctgttgccggcgtcgcccctcccccaccagtgaaactcgcggtctctctccaccgcacgcacctcgtgtagttgtcgccgcgtgcaccccctgtagccccggcgttgggtcctactgctccatccggtttgcttccggcaacaagatcaacaacaagcgagcgaggtagtgaaaagctgcagctgtgatctctggaggtgctcttcctactctttgctggtattttgatggtggcttgatggccagtaatatgcaggcttctgggctgcctcagcctcccagacctcccatgatgggttctagcgctcagccacaaaatcttggaccaccaatgcctatgcagtttaggccagtgattccttcgcagcctcctcctcagttcgtgccaccagcagcacaacagttccgttctgttggtgagcctatgccgggggctaacgttggcatgccagggcaaatgccacattttccacaacctgggcagcacatgcctcactcaaatcaagttccacctgtatcacaaggggttcccatggtatatcagccagctagaccaatgtcatcagcacctatgcaaccacagcaacaagctgcgtatgctgggggccatttgctcaccatgggtgctcctatgcaacccctgacctatacatatcaaccaacatcgatccctcctgtagtgcaaccctggagtacaggcccaggacagagtgtaactcatgtgcctcctctagtgcagtctgggcaccagcaggtgtcagctccaacgactttgcctcctgtcaacttgtctgaacctagctcttcagattggcaggagcacactgcagccgagggaaaaaagtactactataataagaagacaaggcaatcaagttgggagaaaccagttgagttgatgacacc

SEQ ID NO: 21159 - DNA, 2800 bp, Zea Mays
ctcaactcgactgccgccgccgcaggcacacgggatcctgactgaggaaaacggacaagagaggcggaggctgatagggagaggagacggaggaccaagagcggcgtcgatctaaaagcgttggcggcggccatggccaccgcggaccggacccggactttcatgaaggacgtcaaacgcgtcatcatcaaggtgggcactgcagtcgtcacgaggggtgatgatgggcgactggctgtgggccggttggggtgtctttgtgagcaggtaaaagagctgaatgtcttaggatacgaggtgatccttgtgacctcaggtgctgttggtgtggggaagcagaggctcaagtacaggaagcttgtcaatagcagctttgctgatctgcaaaagccacagatggagctggatggaaaggcttgcgctgctgttggtcagagtggcctcatggctctttatgatatgctatttacccaacttgatgtgtcctcctcgcaacttcttgtgacagatagtgattttgagaatccaaactttcgggagaggctctgtgaaactgttgagtcactattagaccttaaagttgtaccaatatttaatgaaaatgatgccatcagcactagaaaggctccatatgaggattcatctggtatattctgggataatgacagtttagctggtcttttggctattgaacttaaagcagatctccttgttctactaagtgatgtagatggtctatacagcggtccaccaagcgaaccgggatcaaagatcattcatacctacattaaagataaacattacagtggaataacttttggggataagtcacgtgtaggtagaggaggaatgacagctaaagtgaaggctgcttttgtggcttcgaacagtggcacacctgttgttattacaagtggatttgcatctcagagcattgttagagttctccaaggagagaagattggtactctcttccataaggatgcaagtctgtgggagccatccaaggatgttagtgctcgtgagatggctgttgctgcaagagaatgttcaaggcgtctgcagaatttatcatcggatgaacgcaagaaaatattgttagacattgcagatgctttggaacaaaatgaggatctaattagaactgaaaatgaagctgatgtatctgcagcacaagatgctggatatcagaaatctttggttgatagattgacattgaagccagaaaagatagcaagccttgcgaaatccatacgcactcttgcaaatatggaagacccaatcaaccagatactcaaaagaacagaggttgctgaagacttagtgctcgaaaaaacatcttgccctctgggtgtgctgttgattgtttttgagtccaggcctgatgccttagtccagattgcgtctttagcagttcgaagtggcaatggtcttctcctgaaaggtggaaaagaagccatgagatcgaacacagtattacataaggttataactggcgcaattcctgacaacgtgggtcaaaaacttattggccttgttacaagtagagatgaaatcgctgatttactaaagcttgatgatgtcattgatcttgtcattccaagaggcagcaataagctggtttcgcaaatcaaagcatcaactaagatacctgtcctcggtcatgcggatggtatttgtcatgtatacattgacaaatcagctgacatgaatatggcaaaacgaatagtgatggatgccaaaactgattacccagcagcctgcaatgctatggagacattgcttgttcataaagaccttataaaggctccaggtcttgatgatatactcctatcactcaaaacagaaggagttgctatttatggagggcctgttgcacatgaagtactgtgtattccgaaagcagattcattccatcatgaatatagctctatggcctgcacaattgagttcgttgatgatgtacagtcagcaattaaccatatacatcgttatggaagtgcacatacagattgcattatcaccacagatgataaagtagcagaaacttttctgcgtcaagttgatagtgctgctgtatttcataatgcgagtacacgattctctgatggggctcgttttggattgggtgccgaggttggcataagcacagggcgtatacatgctcgcgggcctgtgggtgttgaaggtctcttaacaacacgctggatcatgcgaggaagtgggcaagtggtgaatggtgacaagaatgttgcatacacccataagaaccttcccttacaatgaggctgtttttgtgcttgatcaggattcgtgtctatccagtgatgtttgatagtttcatcaggcaggagcatagaatggtgaatcttttcgattgaggactgtgaatccatggatgttcagtcattgtttgtgtagacattgtggtgagcttggaggccaccccacctccccaataaagcagtgctgggagtaatagagcactgatgtactgagggtgcctaggttaaacaagaggaaccggttatatttgttttgcggtcgaacacaaacaatttttgttggtgacttgtttcttatgattctacatatttcaaggtttatgtgctgtcctaaccgggttctttgataccgggtattttggatactgtaggcatactgtaacgacagcaaaagctggctgcagtagccacagctgtactgctgcaaatagctgttactaaaatatcgtgcatcacatgtcggccacaattacccaaaattgcgttgttctagttctaggcaatggtatttgtct

SEQ ID NO: 21160 - DNA, 2397 bp, Zea Mays
gctggattgcaaccggcgacgcaactgacctccctccagagtccagaccgaccgacgccgaccggcgacggcgaccgcccgcgatttgtttactcgtctcgctcacctccgcctccgcgaggagctcctttttctctatccaaccataccctcaccaactccccctgtctcggtttgcgtggagagagaaagggagggagcgagaagtcaagccggagccgggaacagctcaacaccacgggccgcggtttctgaaaaggagaggcgtggtgggaaggggagggggagcgggaggggggcgagccagccagagagccgtacgcgaagcaagcagccccctgcatctagatcaggcgttctgctcgcaccgccgccgccgccgccgccgccgccgcttccttctctcaccgacgctaattggagatcacgtctgggcctggctgctcgtcttccgtcctgggtacaattcgattgatgacctcatcagggaagaatgttttgcagtcttacatgagttaaagggatagaaagtgcaacaaccgtggaataaaggactcgtgcttttgagtaattcaggaggagtacatgcatcacgaagccttgattctggaatggtgtccagtcgaaggaacagtgggattatcctacgggaagggtcggttagggactggtccgagttcaacaatccctcgccgtccccaaaactgctgtactcacagtcctatgtcgcaatgagggggttgctggcctcagtgatctccttggactttttcctgctgtcgagcaagctaaaatctgtgtgcgcggctatgacttcccagaggcatggccgatcacaggagaggtcaaaatcaaaggggttgacctgcaggagagttgcagtccatctgctgttctttttcatggttggcattttcattgggttcatgcctttgttctctgtcgatgtttacaagaaaatagtatccgaaaacgagaggcttccgttccatgatggtgtgattgaggcggaaatgatgggcaccaaagttaaggagttggagacagttgtagtagagaaagaggtcgaactgattgacgagcctcaggttcaagagagccctccagttcctgcaatgttggatgatgaggcagattttgctgaatcttcacctgcattacctgctattgaagaatctgacattcctgtgaagaagctgctgataatcgtgacgatcacttctgttcggccacaacaggcatattacttgaatcggctagcccatgttttgaaagctgtacaggcacctcttttatggttggtggtggaatggcctgaacagtcctatgaaacagcagaaattctgaggtcttctggggttatgtacaggcatcttatatgtagaaagaataccacgagtgtacgaaagattgctgtatgtcaaaggaataatgcaatctatcatgtcaaaaggcatcaccttgatggtataatgcattttgctgatgaagagcggtcatactcagctgatgtatttgaagaaatgcagaagatcaggcgctttggctcatggcctgtagcaatccatgttggaacgaagtatagggcagttttggaaggccctatttgcaaaggaaaccgagtcatgggatggcacacagtccagacggttcagaagaagagttcgactcgtcgattcccaattggcttctctgcatttgctttcaacagcacaatgttgtgggaccctcaaagatggaaccgcccacctatggattctgttatggtccactcaggtggaagaggtggtttgcaggaatcacgatttatagaaaagctcgttaagaacgagcgccaggtagagggtcttccggacaattgcagtcgggttatggtctggaatttcaacctggaacctcctcgagtcaactaccccacaggctgggcactatataagaacctagaaccggacatgcctgtgacatagtttcctgccgctgccactgtgcctgcttctagaggtggtccagaactccacataggctgctcgtccatgccatcctgagcgagttgcgccaaagattacatggatactgcacgctgagatcttactcccttcccccgcgcgccttttagttttgtgtattcctgttatgccctttattttgtgtttctccttatattcaccagcagctagatacgccgtgtagactttcttttcatgtaggctcttctgttcttttcatactgtgtgtgttaccttactacagatgtataaaggctctcatacattgcagctgtttttaagaggaaaggcaaaaataccttcttgataaaaaaaaccttcagggattttttttgaacaatcgcaggagagttgcgtgtcatttcattgagaagaaaaaatacaaagaggg

SEQ ID NO: 21161 - DNA, 1000 bp, Zea Mays
tttcatccctagttttgactaaagttttaaaaaatagcatctataagttaaattaaatgcaccatcgagatattttcatggaaatttagtaaaactaattcgaggatgcatgcgttagtgcatttttctatagacttatcaaagttagagaagttaagcttacatcaaatctaaatgaactataatctggaacatagggagtacccgcttcctaagcatccttccgactcaggtttgttgatgaatttcctttccaaatcacgattttcctttctagggacctacagatcacatggccatcagggtaatgttatgctttaaaggtgatggacagatgatattccaggaagaatcacaatagccacagatgtcaaactagtacagatgcacattgagaatgcaattgagaagccagtgtttaggaaaacagagaaaccaaacaaactttgccttgaaacgacattggggactataaatgtaacaaaaattactctactgatgttctgtcgattcagactacacgttgagaggtttgctaagattgtaaaaatgtttataatttcggtcattaaatttatattataacatggtaatagcttttggtgccatatatatttattttccttttctctttcttttctgtttattgtgctcatgtagaagttgcaactctaagctatgctaacttgcttaggactaaaaggctttgtttttttctcaaatggctgttcctaaggtattttttgttggtccaaatattagcatgtaaataaaacaggtatgttatccccaaatccaaagcatgaggaacttattgagtattgatttatctttaacaatgtattactagactttgttgtacatttctaaattatttttctaaacttatagcttgtttgtagctcggaaactgacagtacttcctgttttaccgatagctctggcaaagggaggcagcaagcttgaggcaacaactgcacaacttgcaagaaagccacaa

SEQ ID NO: 21162 - DNA, 3572 bp, Zea Mays
taaacataacgaacacgcgcacaaaaaatattgacaaaaaccggaggggtaaaaggggaaaggccacggccgcctggaggagcgagagggcggaagaggggaagcggcagccgcaggcccgcagctcgtcgatggtggttagggtttcgccgcccgcaccctcgaccagctgaagaatcgcccggtggttgaagaggctcgcgcctcgccctacaaggctccaagggaagaggggatagacagcggcggaccgcggcgtgcggctgatggccgagcaggaggggagggacgcggaagcggggggcgatgccgcggccgcagcggtggcgtcgcacaccagcagcatgcagcgtgtcaaagtataccgtttggctgatggtgggaagtgggacgatcaaggaacaggttatgtttctattgattacattgagggttcaaaagaactaggtttgactgttttagatgaagatgacaatgatacactacttatgcacaacatcacatctgacgatatttacagaaaacaagaagaaacaatcatttcatggagagatcgtgaagcagcaacagacttagcgttaagctttcaggaagctgctggatgctcctacatatgggaacacatatgcgatattcagagaaaccttcagttcagtaaccttggtgctctggaagttggtcctcgtcaatcatcagaatctctagaagcctctagaataatgcattctaatgatgattcattccgctctgccaacggcggcgaattcagggagcttcctcctgttgagttgtctaatcttccttttattttgaagactgtattggaggctggcattacagatcagatgcacgtggcagagttgataacacaagataatgactttttcccaaagatagtggacattttcagaatgtgcgaggatttagagaacatagatgatcttcacatgattttcaaattggtcaagggaataatattgttgaacagtccatcgatctttgacaagattttctctgatgagtttattcttgacataataggtgcccttgaatatgatccagaggttccaagagtgcaaaatcaccgtgcttttctgaaagatcatgtagttttcaaagaggccatacgtattgaaaatgtttctgttgtttcaaagattcatcaaacatacagaatcggctatcttaaggatgttatactaccacgaatactggatgatgccactctagcaagtctgaacacaatgatacactcaaataatgcttcggttatttccctgctaaaggatgacacactctttattagacgactatttgccaggatgaggtcatcagatatttcaatggaatcaaaacgagaattggttctgttcttgcatgaattttgcacacttagtaagagtctaccacttgttcagcaactgcgactgtttcgggatctttcaggtgaaggagtttttgaaataatttctgatgtgttgcagagtcaagatagaaaaatcatttcagctgggacagatatccttatactttttcttaatcaggaccctaacctattgaggtcatatattgtccaacaagaaggaaattctcttctaggacttctggttaaaggcatggtaactgacttcagtgaggaaatgcactgccagtttctagaaattctacgcatattgatggattcttttactacgtctggagcacatagagacgtagttattgagattttctacgaaagacatcttgactatttggttgatgtaatagcatcctcttgtcccccgaggagcttgtctcgatcatcatctaactcggtacatgttggtggaaatgctgaaggacactgtatcaagcctgagattttgttaaatgtttgtgaactgctgtgcttttgtgttgttcatcatccctacagaattaagtgtaattttcttatgaacaatgctatcgagaaaatccttacattgactcaacgaagggagaagtttttggttgtagcagctgttagatttatgcgtactattatatccagaaatgatgaccatctcattcgccatgttgtgaagttcaacttgctgaaaccaataattgatgtctttgttgacaatggggagagatataacatgctacattcaggagtactcgaattgttggaatacatacggaaggaaaatataaaaactctcattatctatgctattgagtctttctgggatgaacttgccatctttgaacactttggaagtattcaggccttcaaactcaagtatcaacagtacctggagagcgctgaaccaaggttgaatgctagtgtgcctgacatgagaaagaaggcagaacaaagaggtcttgagaaggaagaggaagactacttcaatgaggacagtgatgaagaagattcaggctccggccggcgggctaaacatgcacagaaccaaaataacaagcctaagtccaaggtccccaatggaagtgaagctgatgacactgatggcgcctctaggcctaaatctgctggacttgtggactatgacgatgatgacgatgaggacttcaatccaccaccaaaggagccttctaggcctgcagaggatgatgtgcccttaaacatatccccgttgaagcggaagccagtgaatgcagtggatgggaaacattcagacggagagggtcgcaggaggcaaaaaatagaaactagaattagttgtgctaaaattgctgctgttactagtacagctattaagcacacagatctacaaaacaagtatgcttcccacttgcttacgtcagccacaccaagtactgaagccaatggtatttttagtgaacatggtactaactatgaggagcaacaacatcctatggagaacacagaaacttcacgacaaactggtggtgattgtataaaagatgtgggcagtatgtctcccgagaaggccgtaaatactaccaatacaagcgattcggagccttattcagtaagatgactactacacagctggttggtccatgtacccatcctgtgctgtggtcaacaggaaggaatcagaatgtgtttggctccaagcgctgaatgcatcgatatcatgctggaaacatgattggaggtaaacatggtcactccatccgcaaagaagaatcatgtgttcaaccagtgtcaattcaacagaataaagaagaatcatgtgttcaaccagtgtcaattcaacagaataatctgttcagcagtttgctttatccgtgctcattgtactacgaacctccgccgtctacttgaatatcaagcctccacgggcagcaaagaatggcgcaaattattgagactcgacagcaatgagcttgatcagtatgttcagggacggtccggaggtgtccttgagggggtcgccgatgacggcagctttctgagcgtgcgacccaaccgaggctatatctaacaaactgcactatgtaaacagtctacattgtaaaataatattttacacggttatatacactctatttaagcatgatcttagtgtggttgtttaaacatggtcttagtgtggttggatgcaccacttgcccttgtt

SEQ ID NO: 21163 - DNA, 2674 bp, Zea Mays
cggaccagcgcaaccccgtaaagctagtagtgccttccgtcgagtctgacagcttgccagtgtcagtgcaatggtgactagcaaatcctcgtggagccaggttgtaaaaaataccaggccgacaaacctgtccgttgctgcaagaaacctccaaccacaggaccttggagccgtgatatttggttgcacaaacagtaccattcaagagtgtcactcacggcaactttttggcttgccaaaaacacatatttcatatgtacgaaacattaaggaaggactacctctcttcctcttcaattatgatgatcgaagattgtatggtatttacgaagcttcagggaatggaaaattctgtcctgaatcaaatgcatggtcacaagatagcaagggcaaaacaagctatcctgcccaggttgcaatgcgggtaaaggtgtggtgttttccgctagcagagaatcagttcagaaatgcaattatagccaattactaccagaaaattcccggtgtccctggccagaagcttcattttttcaagtttgaattggatcatgctcaaacacgtgttttgatggatatgtttactccttctccttctcccaacagtttctggacgccccctgctgcagcaccagctgacgagcatgcgaaagaattagtgttgtcacctggatgggcaccagagtgtgaagggaacaataacctcaaatcagaaaaggttgtcaagtcatatgcagacatagtgaagaagaacacatttgtggaagttgggacaagagatgtggatgtggaacatgcaggctcaggtgatgaatcttctggtggtttcgatgaactggattgtcagtacacaccaacagagagggaggactacgctctatcagatagggtggttcaagtgcaacaacagtaccctgataagcaggcagaagtgcttagctttgatcgggttttacaagggcgcatcacttttcctggtcagcagtggcattctgatttttatgccaatactacccaaactgaggataacgatgcatatagctgcgagtatgcccaagaggtcaaatatgcaattctggatggcagctctaatttgccagaaaccttagattctgaagttgataaactgtccctggggcattctgatttgctggtgcagttgttggactctgaatcatgcacagaagctaagctgattgatgcagtgaaacagttatctggacgaatagaggtgatggagaagaagcaggcttggtccaacaaagaagtcaaacatctacaagggatgaatgagaggttactgaaaagaattgttgaactaaagggaaccgttatgacattgaattctaaaatagatcctttaaccctagatgattcacttaaccagtttgtagaacaatgtttgggttcagaagatgtcatttatttagttggtggttttgatggcttctcatctttgccatcactagactctttttccccttcattggacatactaacaccccttaaaccaatggctgttggcaagtcatattcctcaactgttgcactagagggcaagatatttgttcttggtggtggtgatggtgcttgctggtttgatacagttgactgttatgaccgaagccgtgatgattggtccacatgcccatcgttgacttgtgacaaggggagccttgctggggttagtgtcaacgggagaatctatgcatttggtggtggagatggaaccaagtgtttctctgatgttgaaatgtttgatcctgtgcatggaaagtggataaagaatcaacctatgctggaaaagcgctttgctctagctggtgtagcactaaatggtgcgatttatgctgttggtggcttcaatggtgttcaatatttgagctgtgctgaaagacttgatcctcgggagcctaactggaaaatgctaccaaagatgagtgcaggaaggggctgtcatacacttacagttcttaatgagaagatattctcgattggtggatatgacactagggctaaagcaatggtgtctactgttgaggtgtatgagccaaggatgccatcgtgggtgatggttgaacccatgaactacaccagaggatatcattcttcagctgtgctcggtggctcaatattcacctttggtggggtgaaaggtgaagcagacacaatcttggatgtggtggaacactacaaggaagggtgtggctggatgacaacgggattgaagtcgattggcagaagatgctactgctcagcgattgttctctgactgtaactgccttaaaaccaagtgagaatgaggagactgataataggtaaaactaatatattaatattaggtaaaaactaagaaggctcttgcttagcctgaactgacaacactagacacgatggacctcgtagtttctgaatcggcgaactgtaaaacaaacattgagctgtttgtgttgtccgacactggatggtgggtggatgcatgcatgagtgaatcggtactgaactgatgtagagatgacacttccatggatgaatatccaagtatttgactctgtatgttgagctttttctctttccggttccagctttttactaaagcagcttgcctaaacaaaaaaaggcactgtaaatggacctgtgacatttacctgaatttgtttgtcagggcgcttaagca

SEQ ID NO: 21164 - DNA, 464 bp, Zea Mays
ttcggcatcagactcctacagaaacgccgccgtgaccgccgccgggtttggcgctaattgtggttcccgtggttggactcgggccctaggtataaaaggaagctttgcgcctcgtccttatgtccccacagccgaaataaccttgggctcgtgtgtgcacctcaacgggggctgagggtgcggtcggagagatggtgggagatcgtcgccttcgttaatccacgtgtgcatcaatgatgtggcatctgcgtccagcctgggatacttcgtaggtcatgtggaggactcccgtggcatcaccaggcagggttgatgttagggacgcttgggattgtcgatggagcatgggcgccaccgcggatccatccttcaccatgggtggggaactccgctaatcgaccaacggtaaatcgctacctattatgttcgcttttgtcctctcttcgtgtagcaccaaatagatc

SEQ ID NO: 21165 - DNA, 1862 bp, Zea Mays
atctcctggtgcttctctcaagccaccgacgctcaggctctctacatcctttagcaggcgccaactccctggagctcgccttcctgctggccgcccccagcaccgacgccccttctttttccccatctccttccttggcgcgctcgcccaggtcacgcgtgtccctgctcgcccaggccgcgacctcgccaaaccgcgcagtccctgctctccttccccagccgcgctcagcccagcccttcctccttcgcccttgtcgagctccctcagctcgcccccaaccacaactgcacgccaacctcgccctaggccatggagcagcaacaaccatggaaccctttcgtgtcgcgccctcgatgtgctcgacgaaagaaaatcgggcaggctctactacctttacctggcgatgctaaaagccaaccagcactagcaacagcgactcaatttgctgccacaaacatctgcaccagcagaggccgctaccgcagaagccaccacggaatcagatcctgcaacgtccactcctctttcaccttatacaaattacccagattgtggtgcccgacgaggtggggcgtcgtttgagagggccgatgaggcgtcggagaagaagcagtcgaacccgatgcgggagatgaaggtccagaagctcgtgctcaacatcttcgttggcgagagcggtgatcgcctcacccgcgccgccaaggtactggagcagctgagcggccagtcaccggtattctccaaggcaaggtacactgtgagatcgcatgctatgtgacggtgcggggtgagaaggcaatgcagctgctggagagtggcttgaaggtgaaggagaacgagctgctgaggaggaacttcagtgacactggttgctttggatttggtatccaagagcacattgatcttggcatcaatgacacgaccttgacagtcaagatgctctttcaggagatggtcccagttactttacatggttctgttggacacaatgaagccatccagagatgctattaaaaatcctgctagtcattatggctttaaactgtaccatgtctgttctattttcagctaggcagagcatgttctatttacagcaggccagcagacaccaggcagtaaggtgatgtatgaatcaattatcaggtgacaaaatggttatgtttaatcatgcatgttttcttcctgactctctatgtttctttgaggcattcaactacttgtagtatcagtgcatcactgatgtatatatgtgttgatgttcatcatccaagatcaaatacatcctgctaggtcattacttgctaatgtgcatctgagtttgctgttgccaggatggaaatgttttttggcagctttctcagtgaatcagtatcaccgcagaacctttttggacacccagatgtcgagagatgcccatttctgaggaatatcaatggagctacaaccttttccctctcttctgctttgccagtagctgctcaaggaggcaagggtccaatttttgaggaagggtcaggctttgagtcagcattcaagcttttccatggccgagatggaatagttcccctttcagaaagatcatatgtatctgatgaaaaccacaatgagagcattgacgtcaagttatatacttagttaggctcaatttagagtacacttatgtagagtacacttatttatattgaaccgtcggagttcctacatatgtatcaagttatatacttagttaggctcaatgttagcatcaacagttgatgagcaactttaaatttagagtacacttatgaatgagttatttgacaatgcttatttatgagatattgaatgttatttatctatattatattaattatagtgtt

SEQ ID NO: 21166 - DNA, 2148 bp, Zea Mays
ctcacggggtcagaaactcagaatgatctgaactgttactgtattccagcagccccattatctgcagaactttgtccaatcaacattcaatgcccttcctgtggatcaagtaagaggtgcaacaattgttgtctctggtgatggccgctatttctcaaaagatgctgttcagatcataacaaaaatggctgctgccaatggagtaagacgtgtttgggttggacaaaacagtctcatgtctactcctgctgtatctgctgtcatccgtgaaagagttggtgcagatggatcaaaggctactggtgccttcatcttgacagcgagccataacccaggtggtcctaaggaggacttcgggatcaaatacaacatgggaaatggtgggcctgctcctgaatctgttaccgacaagattttctctaatacaacgacaatctctgaatacctcatctctgaagacctaccagatgttgatatttctgttgtcggtgtcaccagcttcagtggacccgaaggcccctttgatgtggatgtttttgactctagtgtagattacataaagttaatgaagacaatttttgacttcgaagcaataaaaaagctgctgacctccccaaagtttacattctgttatgatgcactccatggtgttgcgggagcttatgccaaacacatctttgtggaagagcttggtgctgatgaaagctcactgttgaattgtgtcccgaaagtaatgagttcttctattgtcacaaatatctacttataatgtggctaggtattaattcatcacttatatttttgcaggaggactttggaggtggtcatccggatcctaaccttacctatgcaaaagagttggttgaacgcatgggtcttggaaagtcatcctcaaatgttgagcctcctgaatttggtgctgcagctgatggagatgctgaccgcaacatgattcttggtaaaagattctttgtgacaccgtcggactctgttgccattatcgcagccaatgctgttcaatcaattccttactttgcttctggcctgaagggagttgccaggagcatgccaacatctgctgcccttgatgttgttgcaaagaatttgaaccttaagttctttgaggtgcctactggatggaagttttttgggaatttgatggatgctggaatgtgctcaatctgtggtgaagaaagctttggcactgggtctgaccacattcgtgagaaggatggcatctgggctgtgcttgcatggctttcaattattgctttcaagaataaggacaaccttggaggagataagcttgtcactgttgaagatattgtccgtcagcactgggccacatatggtcgccattactacacacgctatgactatgagaatgttgatgcaggggctgctaaggagcttatggcaaacctagtaagcatgcagtcatcactttctgatgttaacaagttggtcaaggagatccggtctgatgtttctgaagtagttgcagctgacgagtttgagtacaaggatcctgttgatggctctgtgtccaagcaccagggcatccgatacctctttggagatggttcacgactggtgttccgcctctctggaaccggttctgttggtgccaccatccgtgtctacatcgagcagtacgagagggactcctctaagaccggcagggattcacaggacgcccttgctccgctggttgatgttgcgctcaagctctccaagatgcaagagtacactggacgctctgcccccaccgtcatcacataaattttgaagagtgttttagaatgagttgaggcgcttacacaaactttcattccggcctcttgttccatagtttttcttgcatgttacatctcaccgatgaataaaatgtatgtatcagacttgtctcgtttttttgcccatccaagcagcaaattagccgctggcacagcatgcggtaataatcttgtcacagtgctgtaattgggagcgtttttcttgttagaagtgtttctggtttgtttgagcatttgcggatcgatttttctttctgaagagtatataaacattttactcacctgtatacactgtcgcagtgtcactaatgttctgatggctgtttagactatgtccaataagcgtttttcg

SEQ ID NO: 21167 - DNA, 920 bp, Zea Mays
ctcatgttatttcggtgttttgatggcatatggaggcctccaagattttctgactggaaagaaagatttgacaattacattgatcaggaaccggattctcccattatattctttggatccttgcagcatgcagcccatatttgatttcaacggctaattgggttattggtcagcttgcgatatgcctaccagaggacatgagttctagtatttatcagtccttaatgaaggcgttgaccatggagtatgtggaggacataacttgttatccggtttgtgcctctgcttctggtgctattgcagaactcatcgagaatagctatgttccacctgactggctcattctcctgcaagtggttctgaaaagaataagtactggagatgaaaatgagtctgctcttctgtccaagcttctgggcacaatagttgagggtggacaggaaaaagttctgtctcatattcctgaaattgtatccaacattgctagtactgtaatggagctcctgccccttgtcccagatccttggcctcaggtagtagtgcatctttcttctgtgtggtcaatattttggtactttgtcatgatgaccggcgggaggaacaccgggcgtgtaggagtgatcaagaacagggagaagcacaagggcagcttcgagaccatccacatgctgcttagagctttttgctatgtctagttttctcctatttgttgtataggaaaacatagaatggaattcaaatttggtggccgcaaaatgtggagacttgaattcatataaagttaggcttaacattagtgcaaacagctgtattttagtttagatttagagtacacttatgtatgtgttgtttgacaatgcttatttatgatatattgaatgatacttatttatattatattaattataatgttgttcaat

SEQ ID NO: 21168 - DNA, 2466 bp, Zea Mays
ctcaattgagatcttgtctaatcgagttggatctgacaaatgggtgccccattccagattagtttgtgcagaagtcttcaattgtttaaaattgaactattttgtgtggctgtcctgaataacaaaaacagtggatatggcagatatgagaagctgttacgataacttgctttctgttgctgcagcaattgcaaatagtgcatatgagttctctgaagcacttcaagaaatgggaacttgtttgcttaaaagagttacgccaaataaggatggaataaatgataaagttttgctgttgcttgggaaatcacaatttgaacttcggaaacttttagatagttatcgtgtgcatgttcttaacaccatcaccactccatcgctgtcgcttcttaatgaacttcaaactgtggaggaaatgaagcaccaatgcgatgaaaaaaaagaattgtatgaattcatggtaaacacgcagaaagaaaagggaaggtctaagaatgctaaaggtgataatggagcatcagagcaattgaaacaagctcaggaagattatcaagaggaagcaactctttttctattccggttgaagtcattgaagcaaggacagttccgaagtctttttacacaagctgctcggcatcatgctgcacagctaaatttgttccgaaagggagtcaagtcccttgaggctgtagagccacatgttaggctcgctgctgagcagcaacacattgatcatcagttcagcgcacttgaggaagaggattaccttgttgaggatgaaaatgatgacgattacaatggcagtcatgatggagagttatcttttgattatggagaaaataaggaagttgaggaatctggtaatgcttctaggaatcatacagagggtttttttaacagaagcaaagaagagtattcttctgttccacatgaaagacaaagaatcgtaagtcagtcagcaccactttttcctgagaaaaagctcaatacagaagagagaataaaagatttgcggcgttctgcaacaaggaagttgaatacttatgttttgcctactccaaatgacgttggagctacttctcagagagcatcaggaaatcctacttctgaacctctcgagagtaaaggtgccttccattcatctccactccactcatctgcagacataagagatttgggagacagtaatctacctagtcctacaagattgtctaacgtacagtctgtgctgaaagatagcaataccaataaaacagaaacaaggaaagtactcccagtgggtgatctggctttacctagctatcatgacctgaagacttctgataacaaaaaagtgaaaagagggtcattttctggcccaatagcttccagaccacggtcaacagagaacattgatgttatttctgcagcgcctaggcatagctcagcacatcagccagtgcacatgagagtatcccccggcaactcgccgccacccatttcctcaccgaagatcaaggaacttcatgagcttcctcgaccacctgttaatacatcaaaaaatatagcattccccagtttagttgcccactccgccccattggcaccaaatcctgcatctttgactcccaaagttcaagatcattttaggacaaaacaaacgctccaaagaactgcttcacctttaccaactccaccacctggatctatagcccgcagtttttctataccttctaggggtatttcagacagtaaagagacagaagatcaacacaagggagctgccagaatgagtctttcttctcttccttcagcacaaacattcttggaagatcgtcagccattgtcatcagctgctggatcggtcagcaaaacataggagtattctctattatcattatcaagcagctcgccgagccctcttcctgaaagaatgttgtacatattagcatttgaactctggccagtatcgcggaagaagttgggtgctgtttggttcacgaaatgtaacgtaaagggtaatggtaacggtttacactcgattacggacggtaacaagtttgaatagtccggtatcaaattttagtatggtatctgattacggttggactaaaacaaacatgatttaacgttatcacttacccattacgttacaaatatttgaaccaaacggtaccttggtgtttcgcgtgccctttggttggttaagatgtagcctgtgcaaataatgggttctgcggaaataaaatccccatttttctcacccatttgattgattgacgcgagatttgctgttgcgccgttgagcttgtttgccttgaagcgagttcagagtgccatctgtttcctgcagcttatgtaattatcacctggtttcctgtgcttatgtaatcatcatctatgtgtttgattgcctgtactggtgcttgcatcgcgagatgcaatgagctggtgtttggttgttgtcaatcaggctctacacgtgcg

SEQ ID NO: 21169 - DNA, 3016 bp, Zea Mays
cgcgcgacgaacagagctgaacacaaacacccacatcgatccaacccaagccacgcctcggcgacaggccgacagcccacgagcgagatccaacccaagttccgacgccgcgggcgagaccgatcagatccacctcagccgtctcggatggcgtcagcatcgacggcggtgcggatgctccccgacggcggcgctgacgacgaggagcggtggctcgccgagggcatcgccggcgtccagcaaaacgccttctacatgcaccgcgccctcgattccaacaacctcaaggacgcactcaagtactcggcgcagatgctctccgaactgcgcacctcgcgactatcgccgcacaagtactacgagctgtacatgagggcgtttgatgagatgaagaagctggagatgttcttcagggaggagactcgccggggcagctgctctgtggttgatatgtacgagcttgtgcagcatgctgggaatgtcttaccgagactctatctcctgtgcacggtgggatctgtgtacatcaaatcgaaagaggctcctgctaaagatgttcttaaagatctcgttgaaatgtgccgaggcattcagcatccccttcgtggcctttttctgagaagttatctttctcaaataagcagagacaagttgcctgatattggttccgagtatgaaggggatgctgaaactattaacgacgcagttgaatttgttcttcagaatttcatagaaatgaacaaactctgggttcggatgcaacatctggggcctgcccgagaaaaggaaaagcgtgggaaggaaagaaatgaactgcgtgatctggtaggcaaaaaccttcatgttctaagccagattgagggtgttgaccttgatatgtacaaagaaactgttcttccaaggatattagagcaggtggttaattgtaaggatgaccttgcacagttctacctgatggactgcataatccaagtctttccagatgaataccatttacaaacattggaaacattattgaatgcatttccccagcttcagccaagtgttgatatcaaaacagtactctctcaacttatggacagattgtctaactatgctgcctcaagtcctgaagtgttaccagagttcttgcaagttgaagcttttgctaagttcagtaatgctattggaaaggtgatagaagcccaacctgacatgccagttgttggagccgtaactctatatgtatcgcttctgacttttactctccgtgtacatcctgaccggcttgattatgttgaccaagtgctcggtgcatgtgtcaagaaactttcaggcaaagcaaaacttgaagatagcagggcaacgaagcaaattgttgcacttcttagtgctcccctagaaaaatatagcaatattgttactgcattagaactttcaaactatcctcgggtcatggattatcttgataatgctacaaccaaagtgatggctgtggtaataattcaaagcataatgaaaaacacaacctgcatatctacttctgacaagattgaggcactattcgatttaattaaggggctgataaaggatatggatggggctcaagatgatgaacttgatgaagaagattttaaggaggaacagaactctgtagcacgtctcattcacatgttgcacaatgatgagcctgaagagatgttgaagatcttatgtactgtacagaagcatatacttcagggaggccccaaacgtttaactttcactgtgccttctttagtattctccgctcttaagctggtcaggagattacaaagccaagatggagatgtcactggggaggatgttcctgcaactccaaagaaaatattccagatattgcatcagactatcgacgcactttcttgtgttccttccccagagttagctctgagactatatttgcattgtgcagaggctgccaatgactgtgatttggaaccagttgcttatgagttctttactcaagcgttcatattatatgaagaagaaattgcggattcaaaggctcaaatcactgcaattcacctgataattgggacccttcagcggatgaatatatttggggtggaaaatagagacactctcactcacaagacaacagggtactcagcaaaacttctcaagaagcctgatcaatgccgagcagtttatgcgtgttcacatcttttctgggctgatgaccaagatgggataatggatggtgaaagggttctgctttgtttgaaacgtgccttgagaatcgcaaatgctgctcaacagatggctagtgctacaaggggaagcagtggatccgtacttgtacttctttgagaaaggaattccgcagatcacaaataccgtgattcaagatttgattgaattgattagaacggagaagcaaagtgataactctgtagctgatccatctacagaggcattcttttctagcactttgcggtacattgaatttcagaagcagaaaggtgggagcataggcgaaaaatatgaacagataaagacgagttcatgagtcagaactagcgcggcgccacgactggtttcgattttgttgagaattgggtcgtttgtttggcatggttcagtgaaatagaaaccataagttttagctcgctccatgtaaaagatgtttatacgagctgttaattctcaaatctcacggtctgagcgggtctgttcgcccattggcaacactttcaggtttagtcaggtggcaataagctgtgtcctttggggagcacaggtctgtacaggattacttgtgttcgtgatcagttctactgctacctgaatttcatcgttgtatatttccgccccttatgcgaagcttatggattttagatctctgtaacattcggagtacatgccttcatttctgagttctgactggacattgatgattgtttcagagtggccagtgcaggacttgaacattttggatgcccgttcgttgacattttaatgttacccattactctgctgtgtggcatgacctcgc

SEQ ID NO: 21170 - DNA, 109 bp, Zea Mays
gggtacgcgcgagggtgaggtctatggttcgattcctcacaaccgcatagcgcgcgaattttgcgcgaaaaatgccgcgacttgcgacttacactggcgggtggggtgg

SEQ ID NO: 21171 - DNA, 2560 bp, Zea Mays
tttttttttttttgaaagacaggactggagaaggtgagtgagagggaggcgcgcagcggcagcggcggcggcggcgtcgccgtccatggcgaggaagcacggatggcagctccccgcgcacacgctccagatcattgcggttacggttttcttccttctggtgattgctttttatgcattcttcgcaatgtttctagggaagcaagtcctagagtatgttgtgatcggtgtctacactgccgtggtgttttctgtcgccatgctttacatccgctgcactagtataaaccctgctgatcctggaatcatgtcaaagttcgacaatgtcctcatcgatgcacctggaagtgctgccaacatacagggcacggatttgccagtgaaagctggtattggcgctggaacaatctccccatcggcaacatctacttgtaggaactctgtagatgggcattctaacgctggtgctttagctgctggagacacaaatctggatttaaggtctcagccgccaacaagtccatggagctgcttacttggagggcttgtttgttttttgtttgtgaaggaggattgtaggaaatacgatgattcagagaatcaagttgatggggaaggagccttgttctgcacgttatgtgacgccgaggttcgcaaattcagtaaacactgcagaagttgtgacaagtgtgtggatggatttgatcatcactgtcggtggctaaataactgtgttggacggaagaactatttcacgtttcttgctctgatggctaccagtcttctctggcttgctatcgaaattggagtaggcatcggtgttcttgttatatgctttgccaacaagaattcagagagaattattcaagacaggcttgggaatggtttgcctcggcctgcctttgctaccattgtagcgttttttactcttctttctctagtcgcttgcatacctttaggggagcttttcttcttccacatgatcttaatcagaaaggggatcacaacttatgaatatgtcgttgcaatgagagctatgagtgaaacacctcaagaggaggaagagcacgaggaggaggagggggtaaacattgtttattccccaacaaattcagccaccactgcgttcagtggtgctagttcactcagtcttcactacaagggctcatggtgcacacctccaaggatttttgttgatcaggatgaagtgatcccgcatttggagccagggatggtgccttcaaccatcgatcctgatgctgttggacgcgccgaaagagccaacaaagccaagaagcaggtcaaaatcagtgcctggaagcttgcaaagctggacagcaatgaggcgatgaaggccgctgctaaagtccgggcatcatcgtctgtcctccggcctattgattcccgccgggttccaggtgctagccctggctccagtggcaatgccagcatgagaagcagcatgagtgccggttacagcgccagtggcaccaaggaaaggggggctggtatgcttcagagtccctcgtatcctcagagccctgcaagccaggacgactacgagtcgggcacgcagagtggtagcagcaggaccagcccggtgcacattcacagacccgccgcaccgcacgctcagatcaacgtgccactgccacctcgtgtgccccaagcacctccaaggcctgcgccggcgttggcaccgaggccgcctgttccagccacgcagatgtccaagccaacgttccagtcggcaacatcttatgtccgtgagaaccggaaagtatcggttgtttgggatcaagaggctgctaggtacgtgtccgtggcaccggcgcccacaaggccagtaactggcaaccatggaagaactctcgcatccatgaatccttcgtcctcagcgttgccatctggacagccgtccgagaggttggcatacactgggcagtcgatattctttggtggaccgcttctgggtgctgctgctgctgaccctcggaggaatgaagctgtcgcgggagtgccgccggagacaaggaggaacgatggcactgggggagagaggagacgaactgcggagtccttcccggtgtttgctccaggatcccttgagaagaacccgccatccaacaggtgatctcgtggcggtatggcaccaccttttctgaccatcgtgaccaagacaatgggacgatcgttactcaacaaggagccctggagagtccaagggtgattactgtgagttcatcggcgatcgtcaccaattccacacgcagagaaggcgtcacagggacatgctacaagtctgaaatgggggcatcctagtactgagcctgaacccgaggttgagggatgtgagtgtctgagtgacaaatgaaccgtgcaggtgtcaagaaagctgaaacagggaggacacacacaaggcgtgagtgactgattggggtgtaaatgttttgctcgtttcgttggagtaacttttgggttagacgtgtgttttgtagagacaatataagttaggtcaagacaatggctattgattaggtgtatatggatttcatgtctc

SEQ ID NO: 21172 - DNA, 7602 bp, Zea Mays
gcacagccgacgcgacaataccagcgcccgcctgaagattcgtgccgccgcgcagcctccccgcccatcgacgccatcgccgtcaccctccatctcaccacgcctagctagggcagccctcccccttcccgtacaccgacccgacaccaccaaccttcccatcccctcccccacacccccgccgccgcctcctcgtcggccggcggcgagggcgcgacgcctcatacccgcctcttccggtcctccggggggcccgccccgcgcgtgagagccccctcgcaacgggcttcgcctacgagctcgtgggttagggtttcatgcgcctcgccggccgccgatgtcgcaccccggaaagtttgtctccgtcaacctcaaccgatcctacggccagtccgctccctcatcacaccatggcggcggcggccgtccctcccgccctgccggcgccggttcctcagccggcggcggtatggtggtgctctctcgtccgcgcggagcctcctcccttgccaagccgcaagcgcccaagctctccgtcccgccgcctctcaatctaccgtcgctccgcaaggagcacgagagatttgacggctcggcggccgctgcggggggcggggtcgcctcggccccgcctcgatccggcgggcctgctgctggctggaccaagcccgcctcggcgtccgagaagcctcccggctccgcagcgcttcctggcggcgtccccaggccaccgtcatatgggtttgcggagaaagccggcgtcttgcgtggggaggacttcccgtccttgaaagcagctgttgccccgccaacacccccgcagcctgcgcagcggcagaaggatgctgatggggtccgggtcgtcacgccagaggcgcgaccaggatctcttgggatgcggccacaggtgacaacctcgcggaccactgagacgctggcctctggtgtcagcttgggacctggtggccgcacttccgctgagagggtgcagaagcctgatctggggccgcttccgatggtccggcttaggtatgattctgactgggctgatgacgagcgtgacacagggctgagccttccagagcgggacagcagggagaggggatttggcaggactgaggccatgcttccagggcgcgacctttatgtatcgatgagggatcccttcaaaaaggagatgtttgggagagatgtggctgcaacaaataaagaaggtgggcaggacaggctgtggcgatctcccgtgtcaaaccaacacgacagggagcgaacagatggtcgaccttacagtggtggcagaggaagcagtgggcaatcataccgagaaaacatagctgccagtggatccaaggatgtgtggagtaatggtaaggagcctcctatgagtgcctatggacagaatggggtggaagctgctagcgagcgttacggcgacagttcaaataattggcctaggttgaattctttccagaataatgttggttccaaagtgcagccctttggtggtaataaagggcctttaaataatgatccagtggcaaaatttggcagggagaagcggctgactggttcccctgcaaagcctttaatagatgatagtggttttgacagcatttctgccgttaacttgactgcaataaagaagaaaaaagaagcagctaaaccagctgattttcatgacccagcaagggagtcgtttgaggcagagcttgataggatcttgagggtacaggagcaggagagacaacgggtaatggaagaacaggaaagggccagagaagttgctcggaagcaagaagaggaacaggagaggatgatacgagaagaggaggagaggcaacggctggcggaggagcaggcaaagcaggcagcttggcaagctgagcaagagaggctagaagctgctagaagggctgaagagcagagaatcgcaagggaagaggaaagaaagaggatcgctatggaggaggagcggcgcagggaggcagcacatcagaagctcttagaattggaggcaagaattgctaaaagggaagcaaaaacaaacattgacagcacaagagctgtcaatgatgaatttattcctggagatgtcaaggacagagacctgtcacactctgctaactttggtgacagaaaggatattgacaaaatgaatgagcgcatcaatacctcaacaccattggaatcctctagtattaacaggttcagtgagacagttccaagggtgcgcactcttacagatggacgcccttcatttattgatagagaaactgcacactatagttcaaggcctgcatttccagaacaagagaatgtgcatcataggccacagcatgacccttttgcttcaaagaggggaaatttccccaagaaggatcttaatgatggatttgggagtgtttcggttaggcaatcttcaacaggccgaacaactgattcttcatgggcacttgaagatttccatcatgaaaaggttccacgatgggatgcgcctagggagattgaccgtttcagcaaacaatctgaatttgataatgagttttttaacagcgacaggtttggagatacagcttggctgcctagtagttctcatggaagcctcaatgctcaacaaggagataggatgtttcagagtcctgatgttaatgaattgtcttcttttaccagaccacgctactctatgaggcaaccacgtgttcccccacccccaattgtgacctctgtgcacagaagttcaattggtgcttcagcacaacgtttcaattcatcttttgtggatggtgggaacagagagtgttctggtagagatgatgtgcagattatgcagggtcagtacggaagtgtataccaagaggcatctcgccagcatgggatacgatctgaccacatttctgtcaatgagcaacaaattgtggacagaaaaagccctgtattgggttcacaatcttctctttctgtttcaagccctcctagctcacctccacatgtttcacatgatgagatggacgtatctggtgattctcctgtgttaccgacttctgctgatggtgaacatacggcgctctctgacaaccatcatgcagctctgactgtagatgcagacaatacaagcagaattgctgcctcaggagtgccccacttggaggaggatgaatggtcaagtgtaaacaatgatgataggcgaaaacaggatgaatatgatgaagacaatgatagctaccaggaagatgaaatgaatgaagctgatgatgagaacatagacttggatgatgagttcttagaggggcaggatacacccgtagaactggaaccagttatacttgggtttgatgagggcgtgcaggttgaaattccaccgaatagtcaacttgaattagcttctgtgaggagcacggaaaggacagttggagtacatctaaactcaggagttgcagagcaagagaatgtcagtggttcagttgtccattctgatcctgttactgaagcagagaaagcactgcaggcattgactcttgatggtgtaaatggcctgacagaagacagtaatggggagccatccaatagctcaaggacacctgcttcaagttcccagttacctcaggcatcttctgtgggtcctattttttcgtcagcttcaacagtagttgggcagaatgaagtacctgtcagcctccagtttggtttgtttacaggtcctcctctaataccaactccggttccagccattcaaattggttccatacagatgccaatccatctccacaatcagtttaacccatccctgcctcatatgcacccttcaacaacccctttgtatcaatttggccagttgaggtatgtacgtcctatcgctccgagtgttcgatcgctgccttctcaggccacccgccctgcacattcttccatatcagctcaacatacattgaatcagaatgtgtccagtgttctacctgagctaatggatggaggtacaaaccagaacatcccagctcaggcaagctcatccacctttatcaacaaatcagcagcacctacaaccaaggttccccttggcatggacaattcaaattcccagtatctcaatgctcctgcaaacaatcagatggctggtgtggacggatttagtagtcaagtggacagagagtttgctgagggtacaactccaagtgggaggaatcaaggtctctctttgaagaggaattacaggcctacgtccaacaatgtagaatcttctcaatatggtttggaggggagagccatgggtgatccaaaggctcttggtgttgtctctgatagaagggggaggagatatggatatgctgttaaagacattaacatgagatctactggctcaattgttgagccttctcataaggattccaaaggaggattccagagaagggctcgtaggaatgtaagacgaactgagtttagagttcgggaaaacatcgagaagaatcaaaatgaaacttctgaatcattttgccatggtgaacaagatgagataacaagctccaatggaacaagagatattccagcgagaaatactaatagaagggaacttgatatgagcaaggcatctaggataaatggagcaagtgatcagagtctctcgtttagaagtacacacaatgtcccttatgagagatctcatggtgggaacaagaagtctagaacgggtgctgttcctgatggagatactacctcattgcaagctggagctgtccgtgttgtgaagcagcaaggcattgaggtccctgttgatgcagatggcttcattgaagtaagatccaaaaggcagatcatgagtgtcaggagagagcagagggagaaagaaaacagatccaaaataaggatggcaaaggctccccgcaaacagcatagtatttccctacaaagctcagttggtcctagtgtgaataagcgagcagctccttctagtggagaagttacaaagaaagtttcttctggttccgccatcacagtagaaggaagaattgttgactatgctgaatcttcaattccattgatgggtgatacagcctccatgaacctcatagggccaccctcaaccaatgcagaaactcatacaaactgctttgccaatcagcctatccagatccaggcatcctctgacttggtcacctcgagtcctgcaaagcttgtgagtggcttatctgatggcgacaataaagggccatctattagtactccatttaacatggtttcctgggataattcacaaataaaccaacaggtcatgccattaactcaaactcaacttgaagaagctatgggaccagctaaatttgaacagcaggctgggcctggcttttcgttggagtccaacaatgctttgtctcccacagtaatcacagaaaaggtgttgccttcatctgctagtcctattaactcccttctggctggagagaagattcaatttggggcagtaacgtcaccaaccatgctacccccagtcagccgaactgtttcaagtggtcttggagctccaggttcatctaggcctgatatgaagatcgatcgaggcttgcctagcgataacagtggtcctgataaggcaaattccaaggaattatgtccgagtaccgaggatgcggaagcagaggctgaagcagctgcttctgctgtggctgtggcagctattagcactgatgagggatctccagctgatgcaactactgcatcggctccagacaagagctttacaagcaaggatctcagtgggttaacatcaggaggggcaagaacaggtcaagctggtcaatcatccacagaagagccactcgcagttgctcttcctgcagacttatcggttgatactccatccatgtccttgtggcctcctatagccagtccacaagcatcagggccaatgctttctcagtttcatggtgcacagccatcccacttttcctgctttgatatgaactcgatgttaggagggcacatttttgcatttggcccaagtgacgaatctgctggttctcaaggtcagcaccctcaaagaagcaatgcattgccttcagcaccattgggagcttggccacagtgtcattctggggtagactctttctaccgccctccaactgggtacgctggtcctttcatcactccgggaggaatcccaggcgtgcaagcccccccacatatggtggtctataaccacttcgccccagtaggtcaatttggtcagatgggacttggttttatgggagccacttatatccctggtgacaagcagcctgactggaagcaaagtcaagggccacctattgttggtgtaagccagagtgatccaaacagccaaaatatggtgtctggtcaagtaaacgctcctagtgttcctgctccagttccacatctacgcccaacttctatcatgccaatcccgtctccattgaccatgttcgacattgctcctttccagacatctacagacatacagatgcaaacgtgctggccacatatgcctgtacctcctctacactcagttccattatcagttgcacttaagcagcatccagtagagggtacagccacacaacagtttgttcataacgtgccaatagacaagtctggtacaaataaccgatttcaggagtcctctgcttctgctgggccatcagacggcaacaaaaccttcccaaatgcagccgtttctcagtacagggatgagttaggtcttgtcgaacagccagcctcaaccagctcaagctcccaaactgttcagccttcgtttggccaggcgggcttgatcagcaatgaagtcccaaccagtgccaaagccatggttagggtgaccccatccaaagtcaaccctggaattgcagcaggggcggctggcagcacgaacgccccccaggtcaccagcataccttccaagacccatcagtcctcgtcatcatcatcagacccgcaataccagcatctggttaacaatcaggatcgccgtgcccgtgcgactcagaaggctggtactggtaacgagtggcagcgacgatcagggtaccagggtaggaatcaaggttctggttccgacaggagttcaggcactggtaggatgaagcagatctacgttgcgaagccctctgcaacaagtggccatgcctcgtcaggctagagagtggtggtgctgacttcactgagcctgctccacgctggtacacagctcagagcatccttggcatcagacacatgtgaaacatattttcgctccatgtctgtctattctggtttgttttggtgattgtggcatggtgctggttgtgtatgtttttggttcattttgttgcatagaagaaaatagagtgtgctgttgcactgcaaaaagacattcgaagcgataccatatcatgcatgataaattttgcagccgatggaatcggctgcccgtgtaagtcactggtgtgatgtaaggattactattgtttattgttactatttgttggctggctcaacgtctggacaggcgaggaaatgtaacgtgggggggtatgttaataaatgcctcatatgctactttgtcggaacacatgcatccctatcctgttttctcaatttatgttagtactgcaaaat

SEQ ID NO: 21173 - DNA, 742 bp, Zea Mays
cctccctctcatcagcaccacgttgcagcagtcgccatgatgcatagggcagcatttgttctcccgacctttgcaaggagagagctagaagcatattgcgtttccactgaaacagagcaagcggaggaaacaccggcggcaccactgaagttgactcttgcatccaggagtgaaattttcgctacatcctagctagaccaggactcgcgatgtaccacaagatatcaagaaaccattccttccttcctggtgccgtacctccagtatcgccattggttcatagtcttactatcacatgctatgagacgcataatgaggcatcatgtcagtaattcagtatccaaacaatgagatgagattggcatgctaagaaaggacgagctgatattacaatgtactcccttcaccatgtcagtaatttattgtccaaacaattagatacattgcgttatatgaaggagtttcttaggtgtatctagtgctcggagaaccgaaacgtagtatctaggttgtacatgttcacccttgtacttctacttattaagtgatgtaataaatgcagagatagtcttgctcaatacaaaatgttagaaatcctgatcttgggttggctggcacacaaacacaagtgtgacaatgatagtcttgctcaataaaaaatgttagaaatcctgatcttgggttggctggcacacaaacacaagtgtgacaaaggaacaaacaacagagtagagagaaagat

SEQ ID NO: 21174 - DNA, 1645 bp, Zea Mays
gccgaagccctgggtgcgctatccgcgaccgcgacgatgggtctgcgcgtggccgccaccgcgccagctccggccggcgtgcgcgtgctcggcaggggcgccgcgcgcgtgacgccgcgaccgtgggcggctgtcggcggcaggagacgcttctccgtgcggatgtccgtcgcgaccaccgaggccaccaccaccatcgccgtgggcgcctcggaggaccaggcgctggaggctaggaactccaagacggtggtggcggtcatcctcggcggtggcgccgggaccaggctcttcccgcttaccagacgcagggccaagcccgcggtgccaattggcggcgcgtacaggctcatcgacgtgccgatgagcaactgcataaacagcgggatcaacaaggtctacatcctcacgcagttcaactcgcaatccctcaatcgccacctctccagagcctacgatttcagcaatggcgtggccatcggagacggattcgtcgaggttctagcagcaacccagaggcctggaacggaggggaaaaggtggtttcagggtactgctgatgcagttcggcagttcgactggcttttcgatgatgcaaaatctaaagacattgaagatgtgctgattctttctggtgaccatctctaccgtatggactacatggactttgttcagagtcatcggcaaagaggtgcaggcatcagcatctgttgtttgccaattgatggcagccgggcatctgattttggcctaatgaagatagacgacactggaagggtaatttcattcagtgagaaaccaaaaggagacgaattaaaggcaatgcaagttgacaccacagtgcttggcttatcaaaggaggaagcagaaaacaaaccttatatagcttcaatggggatctatatttttaagaaagacatactcctaaaccttctaagatggcgttttcccactgcaaatgattttggttctgaaataattcctgcttcagcaaaagaaatcgatgtaaaggcttatcttttcaatgattactgggaagatattggaactattaagtccttctttgaggcaaaccttgctcttgctgaacagcctccaaggttcagtttctacgatgctgacaaaccaatgtatacatcacggagaaacctaccaccatctatggtcaacaatagtaagatcactgattcaatcatttcccacggatgtttcttggataactgcaggatagaacatagtgttgttggagttcgttctcggataggctccaatgtgcacctcaaggatactgtaatgcttggcgctgattattatgaaactgccgtggaaagaggagagctgcttgcagaaggaaaagttcctattgggattggagagaatacaacgattcaaaagtgtatcatagacaagaatgcgaggatagggaagaaagtggtaatctccaactctgaaggtgtagatgaagctgatagaacttccgaaggcttctacattcgatctggcatcactgtcgtactgaagaacgcgataattgctgatggattggtcatatgagctgaaaaggtctcacaggacggctaaattccatcgatttcgcggcacttggggctggttcaaaattaaagtagctgctattctacttact

SEQ ID NO: 21175 - DNA, 3720 bp, Zea Mays
atcagggaccccaactccagcaacacactaaaaataatcctggaaaagggtcatgtgctctcgccgatgaggggtgcccggccaggtgtactacccatctacccccaggagcagtgcagacaagcaagaatttcatatcacggggaattcaaagttgaggtctgcttccagtataatgaaggggcacaaatcaggcataccttcaattttggccatttgcctattatgttgatgtcaaaactgtgtcatctgaggggtgctgatccccataaattagttttccatggtgaagaggcaactgagatgggggggtacttcatatgtggtgggatggagagacttgtgcgtattcttgttttacaaaagcgtaactatcccatgggattggtacgcaattcttttcttaaacgtggtgctggatacactgacaaagcagtggtcataagatgtgtccaacgtgaccagtccagtgtgacaataaagttgtattacatcctaaatggaagtgcaaggcttggattttggttgggtggcagagagtttctgcttcctgttgggattgttctcaaggcccttattgatgcaagtgaccgggaaatctttacaagcttgacttgctgctacagtgataaacatggaagaggaaagggagttgtcagtactcaactaattggtgaaagggcacaaatagttcttgacgaagtcagaaatctgtccattctgactcgcacacagtgtttggtgcatattgggcaatacttccgatctgtgatggaaggatttgaaaatgatgactatataactgttgctgaagcggttctaaaggactatatttttgtgcacttggaaaataaccatgataaatttaatctattgatatttatgctgcagaaactttatgctctggtagatcaaactgcttcacctgacaatcccgacgcgctacaataccaggaggctctattgcctgggcacttattcacagtttttctgaaggataggcttcaggagtggctaagaaagtctaagcgtttaatccttgaagaggctgcaaagaacaaaggttttgaccttggtaatgcgctggagataaggaaatttcttactaaatatacaacatctgtcggaagagctgttgagagtatgataaaggttgggaacgtgaattcacgatcaggattggatcttccacagagagaagggatgaccattcatgctgaacggctcaactttcatcgttatatctcacacttccgttctgttcataggggctctgcttttgctaaaatgcgtacaacatctgttagaaagttactcccggaatcatggggtttcctgtgtccagttcatacacctgacggagagccttgtggtttactgaatcacatgacttctacatgccgtgtttcatcattctacaactcagaaggggtgataaaaaattttggggaaatgaagaagttgctttctgctgagttggttcgtgttggaatgaacccagtgttaccgaagattgagcaaaccggtcccccagaagtactccatgtccatttggatgggtgcattcttggtactattgcttctgctatgattgagaaagcagttaattatcttcgtacattgaaacttctggcacactcagggattcctgaagatctggaagttggttatgtcccacctagttttaatggagcttttcctggcctgtacctttttaccaatccggctagatttgtccgacctgtcagaaatctttttattctatctgatggaaagcaaagtattgagctcattgggccattcgaacaggcatttatggagatacggtgtcctgatggtggggatggtgggagacaagaaccatttcctgcaactcatgaagagatccaccctacagctattctcagtgtagttgccaatctgacaccttggtctgatcacaaccaaagtcctaggaacatgtaccaatgccagatggcaaagcagaccatgggtttttgcggacaggccctaaaattccgtactgatgtaaaagcattccatctacagacccctcagacaccaattgttcggacaggtacatataccaaatattgtatggatgaatttccatctggaacgaatgctattgttgcagtgctatcatacacaggttatgacatggaggatgccatgattttgaacaaatcagctgttgagcgtggtatgttccgtggacatatttaccagactgaatgcattgacttatcaacaaaaagcagagataatgttccagaaacttttgcaaagagtatattaacaagggatacaagtaatgtgattgattcagatggccttcctcggcttggacaggctgtacatccaaacgagcaatactatagcgtccataatagccttacaaatgtgataaggcctgtcaaactaaaaggcacagagccagcatttattgactatgttgctgtcaacgggacaggttcaaaatgtggcctgcagaaggcgaacattcgtctgcgtcgtgtaagaaaccctataatcggtgacaagttcagcagtcgacatgggcagaagggtgtttgctctcagttgtggcctgacattgacatgccattctctgcaaatactggcatgagaccagatctgatcattaatcctcatgcatttccttcaagaatgacaatagcaatgcttttagagtctatggcagctaaggctggaagtctacatggaaagttcattgatgcaacaccttttgcaaactcactcaaaaaggacaaggactccgacaagcctaattcgattgtggacgaattgggtcccatgcttgcatcttatgggtttaattatcatggaaacgaagtcctttatagtggagtttttggcactgagatggactgtgagattttcatcggacctgtttattaccaacgtcttcgtcatatggtctcagacaaattccaggtccgcactaccggtcgtatagaccagataacaagacaacccataggaggaaggaagcatggtggagggatccgatttggtgagatggagcgtgatgccctcctcgcccatggttcgtcctacctcttgcatgacaggctccactcctgctcggattaccacatcgcagatgtgtgctccttctgtgggagcctgctgactgcgacaatgatcaaatccgatacccagaagaaagtcaagcacgagatgcttgggctccccactgtgagaccagcgaagaactttgcatgccaggcctgcaaaacaagcaaggggatggagaccgtggcaatgccgtatgtgttcaggtacctggctgctgagttggctgccatgaacataaagctggagctccggttgagcaacaaatcaggattgcctctcagctaagaatcataacaccagaattagcgcttgttcatcgcgggggctgcttcgcaggagaagcttaaatgtaaccattggtccggcgtgtagttgtttcatatgtcggtgtgatgtaccaatgtaacttgtaagaaaaacataaatgacaacacgagttattatagtttgaatggcggttctttttcattgtcatgtcttaactagtgtttgaatataccagaactgagcttagttagctgttaaaattagggagtgtttggtttttagagactattttttagttcctccattttattctattttagttattaaattgtcaaatatagtaactaaata

SEQ ID NO: 21176 - DNA, 872 bp, Zea Mays
cagcaaactgcaactactagatgtacagatttctcgttagattttacatgaggatgggtttcaaagcagttcatgaggttgatggatcatcaatcagtgatcttggtcacatgttggtgtggggaggtaggggtactagaatggatgctgatattgaagagcttcttattaagtggggaaacagattcagactacaagactaaaaggtggatggtaatactgatatgttttgtcgagacatgcagtttttgcagcatgccgcatacaaatcttgtttggatgcaataagcttatctaggatggatctatttttacccctggtgctttgacaatgtgatcgctgctaggagcatatatggatttgtacttgtatcttagacaaaatgacactctggtccttttttcatttgaagcaataaatctttgtgctggtggtgtcagctgccaacaatgattcttgtcatgaaactctgcgataatagccacttggaagagcagtctatacttaagtttttttttgatattggggatactctccggcctctgcagcaagcactgacacgatgattgtttattttcttatgttggactttgacctctgaacttcattatcatgctactgtaagtgtaaggtaacaatttagtatttttgttatgagcaaaaagttttgttgtccgtcaaggtgaattgaatgcatatacatttgctaagcaaaataatatatccgttgctatgtatcatgatatgatgatgaggtgtccgacaagacaatcttggctctaaagaatattgagaaaggtaaatcttgtggtgcctaggtgtaagatttagcgtgaaaatccatagtaccacttgggacgaagagcaacaa

SEQ ID NO: 21177 - DNA, 3623 bp, Zea Mays
cgacaacccgcccgtggtcgcagtctcgctctcgcagacgcgtccgtgatccgtccgtcgccctccccttcctgcgcaagcgtgcgcctacctgcatccgctatccgtcggcgatgtcggtgccccccgccggcaagcgccaggtgtccctgcggggctcgagcgcgaaggagatcacacgcgacgcgctgctgcagaaggtttccgaggagcgccagctccgcagccacctccgccgcgccgccgcggccgccttctccatccagcgaatatggagaaggtaccatgtgataagaatggtttcagaacagctccatgaagactgggaactattaatgaaccagcctaacatcgacttgactactcaatggatatccaaaaagatgcttagaccgtttcttttcttcattactcaaccttctagctggtatattggacaatggagcaagactgtggaatctatcttaacatgcttcaagattatcttgaatagtataaattcaatggatgcaaggaaaaacttctgctcctttgctgtgggtataccagaagagagatctatttggctttatcaggccaaaaagctgatttcactgtgctcttccattcttgccaggtacgaccattcctgttgcaaggatggaagcatagtcgacatgactgctattgctatgagattggctgtctctctaactgattgcaaaacatggaaaagtttgaacagtgagaacactagcgctgcagatgcttctgtacagagtttgattgaatttattggtacgtgccagagtggcatgtataattgtgttaggcaatatataaagtctcttggtcctcatgttacttcagcgaagaaaagttctgcaactgcaacagatgatgattttcttattactgctagtgcagtcactttagccttgcgcccattcgattctaagaaagcaaagggcggtgttgatctgaatggtgcttcaaagaaatacttcacacttatacttacaataccagatctgtgcaaacgcatgccacctcttttgttacctgctcttaaacatttttctgtgctgcaaccgagtctcaatattttactgatctccaaggataaaatatttgaagaaataataaaactggaacagtcagaggtttcagctagtattattccttgttctggttgggctcttggaaatatagtgaacttagctaccaatcatgatgacttatccaattcagggtgtttcattcaagagttagatttctgcttatatgttgatgttattaattgtatttctgaaaacttactggaaagttttgagaaaagcaagggaacgtctcaaaatgttggtaatatcactttccatgccgacacatctgttgcagaggaagaggataccaatgacgactgcagaatgagaacattatttatggaccttctgaagccaatttaccagcaatggcaccttagaaaacttttgatgttggcaaaagaggattttccatgccgcagggcaactgattatgatccaaacttgaagaatattcactttcgaatcctaaagttgtcagatgttatatgcttctactatcacatgcttagaattttctcatcacttaacccttctatcggtgcaatgcctattctcaacatgcttgcattctcacctggatttctagttgatttatgggaggcactagaaatgcccatttttggtccacctatccagaattcacaagaaacaggacacgagaaacagttggctacaagtagttcaggtgtgcaagtatcctccatgaggcaaagaaggaatgccaaggacacagcaaacaggtggtcaaatgtgctccagaagattactggaaaatccaatgattcagaggagggcactttatctgatagtattttattttctcatgagtctaatgatgatgcattaacttcatgggatattgaagccatgagacatgcatctgagggtattggaaaggacttaatgtgcattatgtatcttttctgtgctatatatggacacctattacttgtgctagatgatatcgagttttatgaaaagcaggttccttttactttagagcagcagcggaagattgcatcagcacttaatacatttgtatacaattctttcattcaaaatagtggaagctacagcaatcctcttgtggatgtagctgtcagatgtcttaatctactctatgaaagggacagtaggcataagttttgtcctatttccttgtggttggcacctgctagaaatggccgaattccaattgctgctgctgccaggtctcatgaggcagcatttggtatttttccagggattcctcatcggagctctgtacttaccacattaccacatgtatatccatttgaagagagagtgcaaatgtttagagaatttattgagtcagacaaagcatcgagaagggttactggtgaagtttctgggccaggcccgggatcgattgagatagttattcgtcgaggccatataattgatgatggatacaggcagttgaactgcctaagatcaaagttgaaatcttgcattcacgtgtcatttgtgagtgaatgcggtcttcctgaagctggtttggactatggtggtctgtcaaaagagttcctaacagatctctcaaagtccgcttttagtccagagtatggactattttcacaaacatcagcatctgatactagcttaattcccagcaattctgctaagcttctggataacggaattgatatgattgaatttcttggtcgagttgtcggcaaagcactctatgaggggattctgttggactattctttctcaccagtatttgtgcagaaacttcttggacggtataattttctggatgaactatcaactcttgatcccgagctttatagaaatcttatgcaactaaagcactatgatggagatgttgaggatctatttttggattttactgtaactgaagagttgggtggtaaaagaatcgtccatgagcttagacctggtggtaaaaatatatcagtgacgaacgaaaacaagttacactatgttcatgcaatggcagatttcaaacttaaccgacagatacttccatttgcaaacgcattttatagaggactcagcgatctcatttcaccatattggctgagcctgtttaatgcaaatgaatttaatcagttactttcaggcggactacaggattttgacgttgatgatttgcggaacaacaccaagtatactggtggttatactgagtcaagtcgaactgttaaactcttctgggaggtcatcaaagcatttaagccaacagagcgttgtttgctcttaaagtttgtgacaagctgttcacgagctccactgcttggattcaagtacttgcaaccttctttcacaattcataaggttccatgtgatgtaacactttgggcatcaattggaggccaagatgtagatcgtcttccatctgcttccacatgctacaatacgctcaagcttcctacatacaagcggtcaagcacgctaaggagcaagctgctttacgccataagctcaaatactggatttgaactctcgtagagtgtccagatgtcttgatgacgtcactgctaaacaacc

SEQ ID NO: 21178 - DNA, 1405 bp, Zea Mays
acaacagaaaaaaaacatttgggtcgtcgagtttgggtccgaacaaaaaatgagcccaacggcaccaccgggaccgggaccgactggagacactgcttgcaattgcgccacgcccgccacgccgccaggccgccactagggtttttcggagcctcgtcatcgtctccgaccccgtgtctccgaacaacatcgcgcggccgccgcctcctcccagtcgccatggtcaggctcaccgctgacctgatatggaagagcccgcacttcttcaacgccgtcaaggagcgcgagctcgacctccgaggcaacaagatcgccgtcatcgagaatgtcggagccaccgaggaccagtttgacacaattgacttgtcggataatgagattgtcaagcttgaaaacttcccatacttgaatcgtcttggcactctactagttaataataacagaatcacacgtatcaatcccaatcttggcgagattgatcccctggcatctcttccaaagctacaattccttagcttactggataatactgtaactaagcagccagattacaggctgtatgtgatccataaattgaagcatttgcgtttgctggatttcaagaaagtgaaacaacaggagagagttgcggcagcgaaaaagttccactcaaaggaagcagaggaagaggcaaagaaggtgcctgccaaaacgtttactcctggtctgcctgatgctcaggacatcacaatggagccacaaggtcctaaagtagttgctccaactcctgaacaaatcacagctatcaaggctgctattgcaaatgcccacactctcgaggaagctgcaaggctagaacaggtactaagcactggccaagttcctgctgaatttgcagtgcccaggcccgatgcaaacatggccgaagcttcagatggagccgagaagatggacacagatggtgagaaccaagagggcggtgaggctgatgggcagaaacaaggcgaaggaagcaccccaattcaggaggattgaagtcatggtgacatgggctgggtcatccattgtctgagttaggtttgccagttttcgtgggggtgcaggaaagagctagagccttgttgccgcagaactccccctctatggatcgcatgtggatgctaacaagattcttgcttatttttgcagtagatggtactgagaacagaatcagatgttgtaaactatacatacagtcgtgcatgttgccgaatggaccattgtttcggtcgtagcgcttgtgtcggtgcctgactgcagtctgcagagcgagatgtcgccctgccgcctatccttttctcggagtgctttattacaagtttgagtgatggatcctgttgagttgaggcggatgatcgtcatctattgctggatgtttcgttttttt

SEQ ID NO: 21179 - DNA, 1311 bp, Zea Mays
  misc_feature (1310)..(1311): n is a, c, g, or t
cgaaatcgaatttcgttcagccacccttggatatcgtcttgtatatgaactggcccacgcttcttcttctttttgaatcttacaatggtcgatactcgatcaggtaggaggtatgcccgttatcggcaacggattcccggcaaagaagatcatctgggtgttggagtcatccagaggcacaagctgaggaatggggcaaaaggactccaagccttcacatggatatggctactcttcttatgattacgggagtgcttcatcgggatacacctcgagaaacactgggaattcgtcctccagttatagcgtcaggtacgcgccttcttcggagaacagtgtacagccggagacacatgccaggttgcagaggaagtattccaagatcggtgatgactaccgttctttgagccaggtgactgaagctttggcacaggcaggccttgaatcttcaaatcttattgtaggcattgattttacaaagagcaatgaatggacaggtaaaatttccttcaatcgccgctgcctgcatgatattggaaacactccaaacccatatgagcaagctatatctattattggaaggacactttcagcatttgatgaagataatttgattccctgcttcggatttggtgacggtaatcatttagttgcctttgtctgatgatcacctgatgggtttataataacatgtttaaagcacagtgttgatccagtgcttctgttttcttctgagcagcgtcaactcatgatcaggaggtattcagcttttacccagagaaccgcccatgcaatggatttgaagaggcgctagacagatacagagaaatcgttccaactcttcgattagcaggacctacatcttttgcgccgatgattgagacagcaattggaattgttgacagcactggtggtcaatatcatgttcttctgataatcgccgatggacaggttacccgaagtgtcgatacacaatctggacagttgagtccacaggagcgggatactattgatgcaatagtaagagcaagccagttccccctgtcaattgttcttgtcggggttggtgatggaccatgggacatgatgcaccagtttgatgacaatatacctgctcggtcatttgacaatttccagtttgtgaatttcacggagattatgtcgaagagcatagcagctgacagaaaggaggcagaatttgcattgtcagcgctgatggaaatccctacacagtacaaagcaacaattgatctccaactcttaggccgtcgccaaagaataaccccaagaattgctctgccaccaccaann

SEQ ID NO: 21180 - DNA, 1405 bp, Zea Mays
gaggctacgtcaaaccactgcaccagaatttggtggagcttgaatgtgagcactgggtgaacaaaggtgtcaatattaagtatgccacaagaaccagccgcaagggattcaaggcaggagctctgaagaaaggaatggaatgtgactatgcatggcaaagcgaatacattgctatatttgatgctgatttccaacctgaaccagattttctgctccaaactgtcccattccttctgcacaatccagaagttgcacttgttcaagctcggtggtccttcgtgaatgacacgacaagcctgctgacaagggtacaaaagatgttttacgactaccacttcaaagttgaacaagaagcaggatcagcgacctttgccttcttcagtttcaacggaactgctggagtgtggcgtacaggagccataagagatgcaggaggttggaaggaccgaactacagttgaagacatggacttggcggttcgagcaacactaaagggctggaaattcgtatatgttggagacgttagagtcaagagtgaactgccgtccacttacaaggcctactgtcggcagcaattccggtggtctagtggtggtgcaaacttattccgtaagatggcaaaggatgttttgtttgccaaggatatatcactcgtcaagaagttctatatgctctatagcttcttctttgtgaggagagttgtagcgccgacggctgcctgtattctctacaatgtcatcatccccatctcagtcacaatcccggagctttacctaccagtgtggggtgttgcctatattcccatggtgcttaccgtggtcacagctataagacatccaaaaaatctacacatactgccattttggattttgtttgagagtgtgatgacattgcatcggatgagggctgcgatgactggactgctggagctagaaggattcaaccagtggattgtgacaaagaaggtggggaatgatctcgaggacactgaagttcctttgcttcagaaaacccggaaaaggctgagagacagagtcaatctccccgagattggattttcggtgtttctcttcctctgtgcatcatacaacctggtgttccatgggaaaacaagctactacttatatatgtaccttcaggggttagcatttctgttactagggtttaacttcactggcaattgttcttgctaccaatgatagcatgtcaaagctgtacgaattgctgattgatattcattttctggtcatgcgttcgtaatgtttcaaatggtttagatcttagatgcatagaaagatggcattcattattctgcacgcttgcagcgattcagatcttgtaatacaatactgtcttaacaaagctcaaaggaagggaatatggaagtcgcaattttcagaaagtg

SEQ ID NO: 21181 - DNA, 808 bp, Zea Mays
ccaaaatctgcccaggcctcgtactaagagtgatcaaacaaccagggtacatggcctcaagtctggaaagatgctgaaagaatttcgaggtcattcttcatatgtaaattatgccatcttcactactgacggtagccgtgtcattacagcttccagtgattgtactgttaaggtctgggatactaaaacaacagattgcttgcatactttcaagccaccacctcctttgagggttgtgaagagtttctcatcaggtaagcgagaagggggagattttgttgcagcttcagtttcaccaaaaggagaatggatatattgtgttggtgaagacatgaacatgtattgctttagctaccaatctggtaaactggagcatctgatgaaggtgcatgagaaggatgtcataggcattacgcaccatcctcacaggaacttagtagccaccattgctgaggattgtatgatgaagatatggaagccttgactttttttctttttaaaaaaaccttgaaccgatgattaaataggatgtattttgttttgtaatttagataactggtaggcgctacagctatggactcgttggtgcttatgttgccccatgtcttactaccattgtatcctgtactagatttagggacctttcaatggtgtaaacacagcttactacgactcctcgctacaagttcattatggttaatttggttatagcacgctggatgctgattgtgtccgcaggcatatagcagtcgaaaattagcagttactataataattgaagacaacccagtttgcatttcaggtttgc

SEQ ID NO: 21182 - DNA, 1977 bp, Zea Mays
ggtacatcaacacacattgctggggtacaggatgatagggctctctacctagatccccatgaagtattggcaaatattaagtggcctgaaacactcgagactgattttatctacagtgagaaaacaatcaattttcctatactgaaatagttactccttccataccaaattataagtcgttctagcttttttaggctcagtttttgttatccatctagatatacactatgccttggtattattttttagatgtttcttgcttgggtaaaattattttataggtgctttatcatttgggacttcaattaatccacagttcattgcaagctttgcttctgctgctggtaaacgtcctcatcaagatttcgactctcaagaatctgatccagaggcaattcttaactgtttgctgaagcttactgtattctagaaaatcactggaatatgtatatcttttcttgatggacataaccacttaagtgttccttaattttcgtagtggggttggtggatagcaaaccatgagctgaagaagccatcaattagtctgttgtttccaacaatcatcctcctcagtcgccgccatcaacagcagcagcagcgatgctaaatagtagtggtggatctggttctaactactctggtggcgagatcctacctccaccatttttttatctttattatctgtgattctgcaatccacatgtttgattttttacttagtttctctttgagaccggtcgccatgtttggttagcacatctagaatgcattacaattggaggcaatagctgttcactatccactataacctgaaagcttagctgttcaactgagctttctgattcttccatttttttccattcaagtatatgatattcttgtgtgctattcaatattacaaataacaaatttgcatatgagaataattaagtaaatttggccacctaatcagtaggattgtttggttggaggaatttttgtagcatgtgaaacttgagctaattagaaagcaaccactaccttctcttcagcatgaaaaaatagcttagccatttcttagagttaagcccttagccacttgctggccttatcgtctggaagaagaaatggtactcaactgctggtctctttggcaaatttttctttgcacttttcttgttcgaactggcaatccacaaccaagtaccttgcttgcaccaacaaaagtcccttctactgtagggcaatccatggatttattgcttgtcctgaaatttgatagaggcattcatgatatcagttgctcgttaattccatttgtttcttgttctcttgtgcattgttatgacatatttgcaccttttgcggggaacgatcgaccaacaatggagtggcccactagattaaagatcgctctgtgtgctgccaagggtttagctcatcttcatgaagactgtcatccaaagatcatccaccgcgacattaaggcatctaacattcttcttgacttcaaatttgaatataaggttgctgactttggacttgcaaagttcactactaataataacacccatgtttcaacaagagtaatgggcacctttgggtatttggcacctgagtatgcagcgtctggcaagctcacagaaaaatttgatgtattttctttcggagtcatgcttcttgagcttattactgggcggcgaccaattgacacaacccaattggcactgcttgctataagcacatatgtacttccatttgcatgttgtataatactaataccaattgcaaaattatagttattttttctacccttgttagttaataagcatatttctggtcaataggttgtattcttattcttgtaaccgtgttaattaatgttatggacttgtagtcttgtattaccttgtgaatatatctgtccctgcctgccatgtgaacgtgcttagcctggaatttgtgatatgtacatatatcaatgtgtttgaaatc

SEQ ID NO: 21183 - DNA, 1082 bp, Zea Mays
cagccccgcatcgcaccctccctggccgccttctcttctccagcgtccgatctctcccactcgccttcctcaccgcagctctcccggctcggtcgcttcgccacctccgtcctccccccgcgctcggtcgctcgccacctgctctcccctccctccacgttgctcgcgcccgcgcttatataaggaggagctcatggcggacgctccggcgagccctgggggcggaggcggtggcagcgtcagggagcaggacaggttcctgcccatcgccaacatcagtcgcatcatgaagaaggccatcccggctaacgggaagatcgccaaggacgctaaggagaccgtgcaggagtgcgtctcggagttcatctccttcatcactagcgaggcgagtgacaagtgccagagggagaagcggaagaccatcaatggcgacgacctgctgtgggccatggccacgctggggtttgaggactatattgaacccctcaaggtgtacctgcagaagtacagagagggtgatagtaagttaacttcaaaatccagcgatggctccattaaaaaggatgcccttggtcatgtgggagcaagtagctcagctgtacaagggatgggtcagcaaggaacatacaaccaaggaatgggttatatgcaacctcagtaccataacggagatatctcgaactaatgaagacatggaccttttctgcaacagctgctcttccccgaggcgggtttttggtcgcagttatttactaagtaagacaccttgcggtgaccattaaagagtaaccaatcaccctgggtaggtcaatttttatctgcaagaactgatgaggccgcttggtaggagtaaatcgcttttcctgggaacgattgttggttagcgccgctactgtatgtatattgagataccttaacgattggtcttttggctgccatttggttacatgtatttgtatttggaggcataagtatcgtgtaatttgtgttatgactagtgtattgactattgaattatgagaagagctgctttagttgtaagatcacatgacacatccaagaattcccaaaaaaatgttcgt

SEQ ID NO: 21184 - DNA, 4068 bp, Zea Mays
tagcagtagcaaaaatggaagccgcatagcacctgcaccggcgcaatatttttttctccgggccatcggcaataattgggcatatcttgaagcttacatcaccgatatcttttgcttacgacgaggccgaggccgaggccaggtccagggatgcagcagtgcagatgagcccgaacccgagccccacccagctcttcctcccctagcagccagctatcgctagcttcgcacagccaccaataagccccccctcccccgcggcggcatctctctccagctcgctcgctcgctcgtgattcacccgcaggagccacccaggcacgagggcctatctcttcccctcgatcggcagacagacgacggaagtggccgcgacccgggtgccggccttgtctttcggctttcgcgcgcggcgtggacgatgtgtgaccttgacatggcgatgcgggtggagaacaacgggcgcccccgtcaagtgcccatcatggtgaggaagaagagaactggccctggcggctctggagaaacttctggagagtcttcaggagcttctggacaaggttcctcacagcggcctgaacggactcaacaacctggggcaggacgtggctgggtgcctcagcagggtggccgtggtggcgggcaacaccagggtcgtggtggacattatcaaggccgtggagggccaggtccacatcaccctggtggactgcctgagtatcaccagcgtgaataccagggacgaggtggtgagtaccagggacagtaccaggggcgtggtggtgcccgctccagaggtggaatttcacagccatactatggtgggcataggggaggtagtgttggacgaaatgttcctccaggtccatccagaacagttcccgagctgcaccaagccccatacgtccagtatcaagccccggtgatttcaccatccccatcgggacctggctcatcctcacagcctatggcagaggtgagctctggacaagtccagcaacagtttgagcaacttgccattcatggtcagagttccatgagtcaagaagttcaagtggcaccagcatcaagcaaatcggttcgattcccattacgccccggcaagggcacttatggggacaggtgcattgtgaaggcgaatcatttttttgctgagcttcctgacaaagaccttcaccaatatgatgtaactataacacctgaagttacttcacgtggcgttaatcgtgctgtcatgggagagcttgtaacactatatagacaatcccatttgggcgggcgtctacctgcgtacgatggaagaaagagcctttataccgctggaccattgccttttacttctatgacatttgaaattaccttgcaagatgaggaagatagtgttggcggtggccagggcggacaaaggcgcgagagagtatttagggtggtgatcaaatttgcggcccgtgctgatctccatcatctggctatgtttctagctggaaggcaagcagacgctcctcaagaagctcttcaagtgcttgacattgtactacgtgaattgcctactgcgaggtattctcctgttggtaggtcattttattctcccaacttagggagacgtcagcaacttggtgagggtttggaaagttggcgcggtttttaccaaagcataaggccgacacagatgggcctttcactgaatattgatatgtcctctactgcatttatcgagcctctccctgtgattgattttgttgctcagcttcttaatagagatatttcagttaggccattgtctgattctgatcgcgtgaagatcaaaaaagccttaagaggtgtgaaggttgaggtcactcacaggggaaacatgcgcagaaagtatcgcatttctggcctcacctcacaagcaacaagagagctatcattccctgttgatgatcgtggtactgtgaagactgtggtccaatacttcatggagacttatggttttagcatccagcacaccactttaccgtgcttgcaagtgggcaatcaacaaagaccaaattatctgcctatggagatagttgaaggacagcgttactcaaagcgactcaatgagaaacaaatcactgctttactgaaagtgacctgccagcgccctcaagagcgtgagctggacattttacagactgtgcatcacaatgcgtactatgaagacccgtatgcacaggaatttggtataagaattgatgaacgccttgctgcagttgaagctcgtgttctgccaccaccaaggcttaaataccatgatagtggccgagagaaggatgttttgcccagagttggccaatggaacatgatgaataagaaaatggtaaatggtggcagagtcagcaactgggcatgtattaacttctctcggaatgtgcaagatagtgccgctaggggtttctgtcatgaactggcaatcatgtgccaaatatcaggaatggatttttcccttgagcctgtgctgcctccagtgactgcaaggccagaacatgttgaaagagcgttgaaggcacgttatcaagatgcaatgaacatactgaggccacaggggagggaacttgatctgctgattgtaatactgcctgacattaatggttccttatatggggatctcaaaaggatctgtgagactgatctcggattggtctcccagtgttgtctgactaaacatgtttttaagatgagcaagcagtatcttgcaaatgttgcactcaaaataaatgttaaggttggtggaaggaatactgtacttgtagatgctttgacaaggagaatcccccttgtcagtgacagaccgaccataatatttggtgctgatgttacccatccacatcctggagaagattccagtccttccattgcagctgtggttgcttcgcaagactggcctgaggtcaccaaatatgctggactagtgagtgcccaagcccatcgccaggagctgatacaggatcttttcaaagtatggcaagatccacagagaaggacagtaactggtggcatgataaaggaacttctcatttctttcaagagagcaactggacagaagccccagaggatcatattctacagggatggtgtcagtgagggacagttctatcaagtattgttgtatgaacttgatgccatcagaaaggcatgtgcatccttggagcccaactaccagcctccagttacttttgtcgtggtgcagaaacgacatcacactaggctgtttgctaataaccacaacgatcagcgtacagttgatagaagcggaaacatactgcctggcaccgtggttgattcgaagatttgccatcctactgaatttgatttctacctgtgtagccatgctggcattcagggaacaagccgccctgctcattaccatgtcctgtgggacgagaacaagttcacagctgatgagctgcagactctgacaaacaacctatgctacacgtacgctaggtgcacccgctccgtgtcaattgtgcccccggcatactatgctcatctggcagccttccgagctcgcttctacatggagccagatacctctgacagtggctcaatggccagtggtgcccgtggccctccaccaggtgcggcacgcagcatgagaggagcggggagtgttgcggtcaggcccctacctgctctcaaggaaaacgtgaagcgtgtcatgttttactgctgagatgctgagctaccttcaccaagaaaatatcctgacttgttccatgtacccgcactgtttcggtgatactatctgacaccgaatttatgcattaagtcttccagtggtctggagattttaagtaacgcctgtttttattcgtgagttgtaacgctgcagttcgaggagcttcagtgctgtatgatgtgtaaactatttgttgtaagttgtaaccaattgttgtaagttgtaaccagccactatgttataatcctgtttgtttcagctttttacagtttctcgctaccaaaagctgttgtgaactgtcaaacgtttagctttttagttagctctataaaaatcgatttgttaaaaaccatccaaaattaata

SEQ ID NO: 21185 - DNA, 1923 bp, Zea Mays
cgtacaaattctcagtatactcaaagtattggacgcccagcccagcccaccagaagaggacaaaccagattcgattcctcctcctgtcctccatctccccaattcgcacggccatcggaccatggattccggcgtgcctgcctctgcgcctgcccctcccaaacacaagacatgccggaagtgcaaggcgagctatgacccctcggccaacacgcgcctctcctgcaggttccacccttccttcttcgtctgccgccgccacgacgaccagaagaggtactacgagctccgcgacggcgatcctccctacgccgccaagttctacgactgctgcggcgccgaggaccccgacgctccgggctgcaccactgacttgcaccgttcctacgacgacgcccaagactagcaaacctttgctgcttccacaggcctcatcttaatctcaagtctcatctaccgtttcgcttttgcatcccctccttatcctctctagtcagctatcaaattaaaccatctatgtacacttaaataaattttgcttcagatatgttacctactggagctttttttttcctttttttttgcaattgatcaaacatatctctcttcatctatacaccgtctgtttggttggcttgcctctcaggatgctttaagtatcatacgagtctgactccacatctgcacgtaggtaaccaaacacacacctcgcacacgtaaagcctggaaccaaacacatgaatactaaactggaacataaggcgccccctatctgaactcccaaaaaaagccagcaattcataaaagtttatgtcatacaaactttgattcagtaattctgattcattgtaataacatcgatcttgtttggaataaacatttcactgggatatagaatatccaaatgtaaatagtttctgtccatgcatatcccacacctgtttttataaaaaaaaaatcaggccgtcagtattctctttcagttcttcattcaaatgataattcagggacttcaagggaaggtggtgcatcacttttaacagcaagggcacgtgggtatagatctgatcggcgcgatttttttctttctttctttccggacagcggcaccgcaccgggagggcgtcctcgccgacgtgccgccgtccaacaagctggtcttcatcctggcggggcagtccaacatggccggccgcggcggggtggtggcgaaccgctgggacggcgtggtgccgggcgactgcgcgccgtcccccgcggtgctgcgtctctcgcccgacctgcgctgggaggaggcgcgggagccgctgcacgccggcatcgacgccgccaaccacgccgtcggggtgggccccgggatggcgttcgccaacgcgctgctgcgctcgggccgcgcggggggcgccgtggtagggctcgtcccctgcgccgtgggaggcacgcggatggcagagtggggcaggggcaccgagctctacgccgagatgctgcgccgggccagggtcgccgtcgagacggggggccgcatcggtgcgctgttgtggtaccagggggagagtgacaccgtccgctggtccgacgccaccgagtacggccgccggatggggatgctcgtccgtgatctccgcgccgatcttggcatcccgcacctcctcgtcatccaggtcgggttagcatcgggcctaggacagtatactcaagtcgtgagagacgctcagaaagggatcaaacttcgcaacgtcagattcgttgatgcgatggggttgccattgcaagacggccatctgcatctaagcacccaagctcaagtccagcttgggcgtatgttggctcagtcctatctaaattatggaaaaacgttccacccaataaaaccagaaatgggacaagccaaataaaatgatcgccacaagcgtgctgaag

SEQ ID NO: 21186 - DNA, 3107 bp, Zea Mays
tgggcccgcccatcacaccgcaatcacacgactggccccttcttacctttcctacgcgcacgccagaagcgaagaaaacccataactaggcgcacccctctgccccccgcctcttcgccggcgagcggcgacgagccgccgtggaggagctcagcgtggagtggcttcctctggtgtgggagacgctgccgaatttctttgacctggtcgtcgttacggtgtgccgccgagaaaagagtttttcaaagggtctctctcctttgcggcactggcctcttagagttagtttattaggaggcggctcgcccacgtttcggaagcgacccggtcgtcgccgccgccaccgccgcgtgttcccgtagtcgccgtctcggggctggctgtggtgatgagttcagtcgtatcctagggtttttgaattctgacggcttcgtcgagctgcgcaaggcgtcgagaaggagatggtgccgagtgggttgttcgggtgggcgtcgccccatgtacagccgctcacacccgtatccgaggtctccgagccgccggagtcgccgtcgccgtacggggacgggccggcgggggatgccggcgtggggacgagggagggggaaggcgctggcgccggagaggaggaagtggaggacgacgaggtcgagccgccgcccgcggcggtgtcattctggaggctttttgagtttgccgatggggtcgactgggcccttatggctgctggggcgcttgctgctgctgcgcatggcgcggcgctggttgtgtaccttcactacttcgggagggctctgaatttgctcgactctgagcgggttgggtcgtctctctatggacgcggcgaggaactgctccaccggtttaaggagcatgccttgtatattgtctttatagctgctggtgttttcgtcgcaggatggatagaggtatcttgctggattctcactggggaacggcagactgctgtcatcagatcaaaatatgttcaggttttgctaaatcaagacatgagtttttttgatacatatggtaacaacggagatattgttagtcaagtgctcagtgatgtattgctcattcagtcagctataagcgagaaagttgggaactacatacataatatggctacatttgttgttggtctcattgttggccttctgaattgttggcaaatagcacttctaactcttgccactggacccttgattgttgcagcaggaggaatatctaacatattccttcataggctggccgaaaacattcaagatgcatatgcagaagcggctagcattgctgaacaggccatcttatacatcaggactctgtatgcttttacaaatgagactcttgcaaagtactcctatgccacctcacttcaagccacacttagatatggaattttgattagccttgtccaaggaattggtcttggatttacatatggactcgccatttgctcttgtgctttgcaactttgggttggaagacatctgatccatcgtggaaaagctgatggtggtgaagttgtggtagctttattctctgtaattctgagcggccttggtttgaatcaagcagctacaaacttctattcattcgagcaaggacgcattgctgcttatagactatatgagatgattagtcgttcaacctccagcaccaatcaagaaggggcaaccttaccccaggtgcaggggaatattgaatttcgaaatgtgtactttagctacctgtctcgccctgagatcccaatattaagtggattcttcctcactgtaccggcgagaaaaactgtggcacttgttggtagaaatggctccgggaaaagcagtataattcctcttatggagagattctatgacccaacattaggtgaagttcttttggatggggaaaacataaaaaatttgaaagtagaatggttaagaagccaaattggtctggtgacacaagaaccagccttattgagtttgagcattcgggaaaacattgcttatggaagatctggtacctttgaccagatagaagaggcagcaaaaacagcccatgcccatgggttcatcagttcacttgaaaaggggtatgaaacccaggttggtctagctggtgtagccctcactgatgaacagaaaatcaaaatttctattgctcgtgctgtgctttcgaatccatccattctgttgcttgatgaggtcacgggaggacttgattttgaagctgaaaaggctgtacaagaagcattagatgttctcatgttgggaaggtcaaccattataattgctagacgtctttgcctcattaaaaatgctgattatatagctgtaatggaggagggtcatcttgttgaaatgggaacacatgatgaacttttaaacttggatggcctttatgctgaacttttaaggtgtgaggaagcaacaaaacttcccaaaaggatgcctaccaagaatagcagggagcgtaagtcgcttcaagcggaggacacatcggtgagccaatactttcaagaatcgtcctctcctaagatggcaaaatcaccttcactacaaaggacacacggcatgcttcaattttggcgatcagataccaacagaaactctcatgattcaccaaaggatccaagtccaccttctgaacaaactatagacaacgggataccgatggttgcaattgaaacagaaaggacaccatccattaagagacaagatagttttgaaatgaagttacctgaccttcctaaagttgatgtccatcgtatacagcggcagtcatctaagaattcagatcctgactcacccatatctcctcttttgacttctgatcctaaaaacgagcgttcacattcacagacttttagcagaccccagagtgaacgggatgatacgagttctgaacacagtgaactcgatgaggttcagcaccagaaaccgccatctttttggcgtcttgcaacacttagtattgctgagtggccttatgctcttttaggtacaattggtgctgctgtatttggctcatttaatccactgcttgcttacacaatagcacttatagtgtcagcatactatcaaattgaaatccgtgatatgcgccatgaagtgaga

SEQ ID NO: 21187 - DNA, 1635 bp, Zea Mays
gcaatcctactggaactcttacgcaaaggattctttattggcagaaaatgacaatgcaaatgatgtatgagataatctataaggccttgaaagaagtaggactagatggtacatatgagccacaggattacctgaatttcttctgccttggtaaccgtgaagctgaggacactacttgcacatctagtggaccattctcagccagtaacccacaggttagactgcagactattgttctgttttctgctgctgattccggtacactttagaaatgcccaaaactgaaggaggtactgatttccccaaaaaaatacaattatgctgcaacttggatatccaatcaggaccaagctcggaagaataggagattcatggtgtatgtgcactcgaaaggcatgattgtggatgatgaatatgtgataattggatccgctaacatcaaccagagatccatggaaggaactagagatacagagattgcaatggctgcataccaaccccagcatacatgggcaaatatgctttctgctcctcgtggacagattttcgggtacaggaaaatacagtgtacgtgttgaaactgttatcctgccccaggttgggatggacggcggtacatacgtgttggtagaactgtgagaagaaaagatgggaaaatttgctttcttggctgcgatggttatctgctcaaacaagatatgcaaattgcaaaactcttaaaggatagtattagttctatttgttcatacagttctacagctagttgtttcttgctttgttcatggattgcaatactggataagatcatgatggatgtcgtgtgtgttttaatcaccatttctaaaatttattctattggtaagacgattctaagatataggtcggagttggattccttgcatatacataaacagataaagaagcaaccggtttataacaaaaatatgtcttctgttttgcctgttgcccaattctcttttagtgtagcctacttacaataattaaaagaagagttggtgtctgtttgagtagacagctaagtgcatatataagtacgtgcatgattttgattactaattgtgattttgatgatctttcttttgaagacggtctaacatataagcgcatgatttagatgaacggaattactattgtgccatttctgaagaatcttactattttctcttgccttcttagaacaacatgggaagaagtgatgatgacagtccatcgccgccaagaggtcacatgagaagaactcgcagcccaagtccttgtggtagttatggaggccatggcaagcgccccacaactaatcttatggtgacgaatcttggtccagattgtaggattccgactctcatcaagtgactcctcccctcacgatgactttgcggacagatgtctcaattatagtggtggagctacgaacaacaatccgatgtcctgatcgagagcgatggagctaatgtttgaacttgtgtgtttgaacttgtgaactaaaaatgtgaactatggatgtgaacttatgtgaatttgtgaacttatgtatttgaacttatgtgaatttgtgaacttatgtatttggacttgtgtgaatttgtgatatgaatatatatccatgtgtttgaaatc

SEQ ID NO: 21188 - DNA, 2271 bp, Zea Mays
gttgcagacagctacagccgtatgtccgtgtgacattctgctcagtcggccaatcctcaccaaattctccatcaaatccaaccaacccctcaccgcctatgccgccgcgggccgcctagggttccggcggccgccgctccctcgccggcgcgatggggaacacctgcatcggtcccagcgccccctcggaccgccacagcttcttcaacaccgtctccctggccgtgctctggcgacccccggccgccgctgaccgcgccgagccttccccgaccgctgaacccagctcatccactccctgctctcccccctccagggcccctaaccctgtcaccatctccgactccgagcacccgccacactccacctccaccgccttaggccccgccgcgccgcccaatcctaacggcaagcccaagcccaagcccaaggtgaagcgcgtgcagagcgccggcctcctcgccggctccgtgctgaagcgcgactccgagcggctcaaggacgtctacaccctgggcaagaagctcgggcaggggcagttcggcaccacctaccagtgcgtcgagaaggcaaccgggaagcacttcgcctgcaagtcaatcgccaagcggaagctcgtcaccgatgaggacgtcgaggacgtgcgccgcgagatccagatcatgcaccacctggccggccaccccaacgtcgtatccatcgtgggagcctacgaggacgctgtagccgtgcacctcgtcatggagctgtgcgctggaggggagctgttcgataggatcatacagcgggggcactactctgagaaagccgccgcacagttggcccgggtgatcatcggggttgtcgaagcatgccattcacttggggtgatgcacagagacctcaagcctgagaatttcttgtttgtgaaccaaaaggaggatgcacccttaaaggctattgatttcgggctctccatcttcttcaaaccaggtgaaatattttctgatgtcgttggaagtccttactatgttgcccctgaggttctgaaaaaacgctatggctgtgaggttgatgtgtggagtgccggtgtaataatttatatcttattgagtggggttcctccgttttgggctgaatctgaacaagggatatttaaacaagttctaaaaggtggtcttgatttttcatccgatccctggcccagcatttcggagagtgcaaaggatttggttaggaagatgctaaatcgtgatcccagaaagagattgactgcacatgatgctctatgtcattgctgaaaatttgtctgaagatgaaattgcaggattgaaagagatgttcaaaatgctggacactgacaatagtgggcagatcacgttggaggaactaaaaattggtttgaagagagttggtgctaacttaaaggactcagaaattacaacactaatggaagcggcagatattgataacagtggttccatcgactatggagagttcctagctgcaactttacatctgaacaaagtcgagcgagaagacaacctcttcgcagcattctcatactttgataaagacggcagcggttatattactcatgatgagctacaaaaagcatgtgaggaattcggtatagaagatgcacacctagaagatatcatccatgacgttgatcaggacaatgatggtcggatcgactacaacgagtttgtaacaatgatgcagaagggaaataacccactagggaaaaaggggcactgccagatgagctttggtcttagagaagcattgaagcttggctaagtggcatgatcaatcctgtgtgaagtgccattcggcttcatatgccaactttagctgatgaaactaagtccgtgaatttgggacgccggtaccaaaggtggagcaagtgcgcgatacgattagctttgggataccaactaagcagtgagcatgcaggaacacattggtgatctttcgtcgttaaccccccatgtacatggcttttttgaggtgggataggaatggcggttgtgtttcccatggccattctttgcacgttatgaagctcagctgcaggatgctcttatatagagagaaatgttagtcacatcacatcgcgtgtccatactgtatagcgaaacttaacatgttgtaatatcggtcggacaatgtgtgcgtgttgtatgttatctttcttagatagaggcacaggcttagcgttgtcatatatgtattgcaagaatatgcaggctgtatattaaccaaatgatttttttgtgtacatttcag

SEQ ID NO: 21189 - DNA, 3762 bp, Zea Mays
cttttccatcggcggcctttcgtttcatcagatcctccgcctctattgggcgccgggcagccaagctgcaggcggatgggcgcgatagcgggaccacatcctgccgccgccgccgccgcctgcccctcttccactccgatccatggagcagcagctcctctgtggtggttgccacacgcacacgcctccgccgccaagcctcccctgcccctgcctccgccgccgcccacggaccctctctgtttcatcgaggtgccacgcgattcatccggaccagctgctgcgtgcccgcctcgtccccgacgtcaccaccagcgccaagctacaaccacgcgacgacgctctccatcggatccgagtcggagtcggagctaccaagcatgctttcaagcgtatattgacgagcctgattaagcctggcggtggtgaatacggcaagttcttcagccttcccgcactaaatgatccaaggatcgataagcttccctactctatacgtgttctcctggaatcagctatccgccattgtgataacttccaagttacagagagtgatgtcgagaaaatcattgattgggagaacacatctcccaagctggctgagatacctttcaagccagcgagatgcattctaatggacaacactggagtcccagctgttgtagaccttgcagctatgcgtgatatgatgccaaagttgggttgtgatccctacaagatcaatccattgattcccgtggatgctgttattgaccatgcagtgcgagtggatgtagcagggacctatgatgcattggatagaaacgaggagttggagttccaacgcaacaaagaaaggtttgcttttcttaaatgggcatccaatgctttccacaacatgcaggttttccctcctggttcaggcactgtacaccaggtaaaccttgagtatcttgcccgagttgtcttcaacgaagatggcattctttacttcgacagcgtggttggcacagactcacacaccactatgattaatagtcttggagttgctggttggggagtaggcggtattgaagcagtcgttgcaatgcttggccagccaatgggcatggttttgcctggtgtggttggattcaagttgagtgggaagttacaggatggtgtcactactactgacattgttcttactatgacccaaatgctaaggaagcacggtgctattggcaaattcgttgaattctatggtgttggtgtgggcgagctatctttgcctgctagggccacaattgccaacatgtctccagaatatggagctaccatgggcttcttccctgtagaccaagtagcattggactatctcaaattgacaggccgaagcgatgaaactgtgtcgatgattgaagcatacctgcgagctaacaaaatgtttgtggacaagcatgagcctgagacggaacgagttttctcttcatatctggagctggaccttagtgaggtggagccttgcgtttcaggccccaaaaggcctcatgatcgtgtccctttgaaggaaatgaagtcagactggcatgcttgcctggacaacgaagttggtttcaagggctatgcggtgccaaaggaacagcaaggcaaagttgtgaaattcgacttccatggaaggccagctgaaatcaagcatggcagtgttgttcttgcagcaatatgtagctccacaaacacatcaaatcccagcgtcatgattggtgctggccttgtggcaaagaaagcctgcgaattgggccttgaggtgaagccatgggtaaagacaagccttacccctggatctgtggttgctaccgagtacttgaaacatagtggccttcaagattatctgaaccagcaagggttccatgtcgctgcgcatggctgcgccacttgtgtgggcaactctggtgacctggatggatctgtatccgctgctatcacagaaaatgatatcgttgctgctgcggtgctgtcggccaaccgaaacttcgaggggcgtgtgaaccctctcactcgggctaactaccttgcctcgccgcctctggttgttgcctatgctcttgccggcactgttgacattggttttgaggaagagcccattggagttggaaagggtggcaaggaaattttcttgagggacatatggccttcaaaccaagagatcgatgaggttgtggagtccagcgtgcagactcacttgttcaagaaagtgtacgactccatcatggaacgtaaccctaggtggaaccagctgccggttccaaaggaggcactgtacccatgggacgacaggtccacctacatccgcaagcccacttacctggagggcatgtccatgacgccgcctggcccgcccacggtgacggaggcctactgcctgctcaaccttggagacagcatcaccacggaccacatctcctactcggggaagatccccgagggcacacctgcggccaagtatctgctcgagtatggtgtggagcccaagaacttcagctcctatggtggccgccgcgggaacaatgaggtggtgatgaggggagcgtttgccaatatgaggatcgtgaataagcttcttaatggcgaggctggtccctggacgatccatgttcctaccggggagaagctctacgtttacgacgcggcaatgaaatacaagtcggaaggtcatgacatggtcatcatcgctggctccgagtacggcagtggcagctctcgtgactctgctgccaagggaccaatgctactgggtgtcaagtcggtgattgcaaagagcttcgagcggatccaccggagcaacttggtggggatggggatcattcctctctgctttcaagcaggagaggatgccgattcactcggcctcaccggacgtgagcgctacaccatccacctccctaccagcaccgccgagatcagtcctggtcaggacgtgaccgtcacgacccacgacggaagatcattcacttgcactcttcgcttggacacacagcttgaggtcacatacttcaaccatggaggcatccttccctacatggtccgcaacctggcggcacaaatgaaataagttgaagtttattggtgggaataaattaaaaggtactcaatgccacgtatttggcgtatgtatgtaaataagtggcacattctaatcttcaattgtattattcgctctggcattgaggtgggtcgtagctgcattatactttctccgcaagacatgagcatggattttgttttagcaacagattatttgtactcttgattctttggttccatgctctcttcggccatctccatgtcaatttgctttgcaaacaatataatatcagcgtgccgtgcccttgtagatttccaaatggttatatgcatatgtactattgaaattgtcattttagtttgcaaacaataccaacgtgcctttgtagatttcaaaatggatatatatgttgtattcaagtttgctatttctagtgaccccatgtggccattggagcccccccggggggggggggggggggggggggatgtcgggagtcagtccaaggtcaccacatttctaggccctcgcagttgttgggttgaatattagaagggctggtaaatgctaggagcctccgacctcttcccgggtctacattagtttcaacccagaaataggggagtatgaaagctcttgtaaataaatcgagtaagactatggagatgacataatctatgaatatcctcgtaaaatctctgagctatttataagaacct

SEQ ID NO: 21190 - DNA, 3617 bp, Zea Mays
cacatggcgagggcggaggagagccgcaccccgcagctgtctccccattccaatgccgagtgttgatctctcagcaaggagggagaaagcagaaggaccggttttgatcttctgagcggttcatggttatggatcgcgcgggttggctctggaggcgcaagtcatcggacaagagccccgggggcagtgacagctctctgtccgtgtcgtcacattccgagcagtgctctgatgatcagtatgattacagccaagaaactggagtagcaagatccttgaatggcaagctagcagcaggggtcaatatgaacaattttaatccagagcatggtcaatcatttgaacaacatatatcctccaatgttggagatgaagagatcaaggagaccttggagagtttgaactacaaactttctgctgcactttcgaccatcagagcaaaagaagacttggtgaagcagcatgctaaagtcacagaagaggctgttgcaggttgggaacaagctgaagctgaagttactactctgaaggggctacttgaagcttcttgtcggaagaatgcttctctccaggatcaagtcagccacatggatgaggccctcaaggaatgcgtcaggcaactgcggctggcaagggaagaacaagaggacaaagtccgtgaagtcgtttcgaattctctggtcccgcagtctgaaaaccctgagctccaaaaccatatcgcagagctaaaaaagcggctggaaatgaccagattagaagcgtcatcttccatgatattacagcatgatctacatgaaaggcttcgggcgattgagagagagaacttggaccttaaggccaaacatcaggcaattgagaaagagaatatagatctcaaggccaaactgcttgtacagtccaaggacctgaagatactgatgttggaaagagatctgagcaatcaagtagcagagacagcaagtaaacaacacttggaaagtgttaaaaagattgccagggttgaggcagaatgccgcaggctacagcatctaacgcggaaaacaacactgatcaataattctagatccacacaaaacaattgctgcatggaatcactgactgacagccagtccgaccatggggagcatatggtgggcgttgataacgatctgcaaaattccgattcatgggcattagctttgattgctgagcttgatcagttcaagaatggcaaggatggttcaagaaatattgtgaacaatcctgttgagattgacataatggatgatttccttgagatggaaaggttagctgcattgcccgaatcagatggcacaagctctaactttgaaatggaaacagattctgacaaagctgtcacaagaaacagctccttgaaggtcaaaaatgaagaattgcaaaacaaggtcgcaaatttgcaggaaaagtttgaagcaattgcatgcgagaaaagggagcttgagctggcacttgtggaagttagagatcagcttgagatttcctgcgatgcgctagtggtggcaaagaacaggctggttgaaatgcagatgcagttggactcagcaaatgattccaaactttctgctttggatgatgtggagcgtttagactctgagaggaaggctttggaattgcagctggagtccaaatctgtagaagtcgaggagctacttattgctgtagcttcattggaggaaaatgcagagcagaaagagttggagtcgcagttagaactgatgtccgcacaagctacagaacttcgcctgactgtggcatcactggaagagagaattcaggctgagagagatctttctgtgcagcagaaacaaaacgcagaagccatgttgaatgctaaagaagaactggaagcacagctgtgttcagcaaacactgaaatggggaaactgcgtgacattatcaaagcactagagaatgaagtcaaaaaggagagagcactgtgtgaagaattaacagcacagttacagataaaggttgaagcagctgtcaatgcagttaaagaatcattggaggcacagctgtgttcagcaaatactgaagcagggaagcttagagatgttgttaaagcactccaggatgaggtagaaaaagagaaggcattacgtgaagagcttgcagcaaacctagaagtgaaaacaagagcagcaagaactgctgaggttgttaaagaatccttggaggcacagctgtcttcagcacacgctgaaatgcacaaactggaagagatcacaaaacaactacagaatgaggtagaaaaggagaaggaattctcagcacagttagagatgaaaattgaagtagagagagctcgttctattgagtctgctaaagaatcattagaggaacaactcctgttagtgaactcggaagctgcaaaactgcatgacatggtgtctgcgcttgagcacgatgtggaaaaggagaagtttttttctgcagagctccagatgcagctagaagctctagaggttgtcaaaaaggtattggagtctgaggcggagtctgcacatcaggatgccaaaattctcaagcagaaggtagagtcattggaagcaaaactcgaggagcagatgtcatcagctgacgaattcactgagactttgcagtcagagaggatggttatagagcataaacttaaaacagcagacggggaaatattaaaacttacaaacaaggtgagcttgctccatagggagatcgagcaggagaggttgctgtcagaagagtatgaacagaaatgccaaaagctggaagctcagatgtcaagagatagccgtgacgcaaagctctggcgtcttgcaaattcgaatggagatctgaaggttaagaaggagaaggagctcgctaacgcagctgggaagctcgcagaatgccagaagacaattgcttctctggatcgtcaaatcaaatcactgacagatctcgacagtgtggtgctagagcctgaaaggcttgaatccagcagggacatgccactgccactggacttcagaaatggcgatgctgaatttgctatgtttgcggatgacttgtacgactttgaccttccaaacaacgacacaagcttcttttctccacccccgtcgtcgatccagccctcgtctccaccctctgagatgtcagtatttgcaggggggctctcgactcttagcagttacaggagcaaaagagcaattagaaggtgatgaaaggaaggctgcccaaatgccatgctaacaaacagtccatggatgccgccatatgtgtaggtaggtcgatgtacattacagagactgattgttagatttgtgtgatgaacatccattccagcaagctcggtttttgtagcctgcttgatgaggtcttactggtggtcgtttgctgtaaaatgtaaacatggttatcttgtgtgattctagttacaggaaagcaccgagcaagtgcatatttagtgtccactagttaggtaccccgtactagaatatttaatttatttaaatatgaaggaagcatgtcacttatttctctaaatttacaacaatagttaggccctgtacgttgatacgatttctatatattacataaatatatcttattttaattagatagttgtttaaaca

SEQ ID NO: 21191 - DNA, 2511 bp, Zea Mays
ctcaaatccctgctgcgagaaaagggctgaaggcagctgcagggattacgtggctataaagatggatggctcgagtattctgcgacttctttagagtaaagtgctttcggcaaggagaactgcagtgggtttgctcatggaactggtctgcttaagaaggagagaaatggttgaattgctcctgcatggatcgagagcagagtcggtcgtggaggcaatggatgtgctgttggagtacctccggagcttgctcgcagaagaacaagccccaatcgccgttctactgatgtgtttggatgcattggtggagccaaacagaaacagcacgtacagagaagaggcgatcaagaccatcgcacgttctctgagatgctgcctgccagaggacactgccgtgcccagcactcggagagctctgctgctgcttctcaggcgaccttcacgcagaggactggatgctggaacatgccggcttcgtcgaccattcacgggccaccactgccacttctgatgctgttgtacacgacaaggaagcggccgaaaacgatgcgtggctgagacacgtggccgcggcgctactcggcagccgtagcaggatcaggagaccgttcctggaggcgctgtccacgtgcctgggctcccccgacgccgacctggtgggggcgtgcctgacgatggcctggtggaggttatcagtgagaaagtagatatctggataaaccacctcttcagctatgattttgcactctggttttatgcaaatgttgcctatcatattattgaattgcaattattttttttgtactggttaaatactaatagtgccatgagttaacgttagtgtttgtgattttttacaggctattgggtgtctcttgtatagaatctgcactgaatattaactgttggttatgattatggaaggtcttgttttcagctcatgaatataggtttcaaattttagttgtttttttattaggatggtcgaatataaaagtaactgattttattgtatgtacctgattaatctaaaagcattgaaataattctgctcttggctcgagtatgtatctgaagtatacagagaaatggaacgtgctggatgcgctccagatagaaaggctagagaaatgtttcatataaaaaaatttactaccgtcgcaacgcacaagcacatacctagatgagtctgtctgttactgtgaaaagctacatacaaattataattgagggcacattttcattactaatagtttttttgttttccttctttttttacctgaggttacaaagggtgcagggtattctccacgtcagtgtgtccaataatcctaaacaaggcaatatgtatttgctctttattatcaattcatgtgaaaatctgaaagaacgtggaacctaaaactattgtctggtgggctggtggctgattttcattcaattgggctggtacacctctgttttgactcccatacaccaagaatcgagggcgcctgcatccgtgggagtaagactctccggctttgaaggaggagacaaaggccgaagggcagacacattgccttctgttcatgctgcttgatgttgaaacaccaaccactcaccagtcatttactctctcacttgctcattggatcatgtgcaccaccatagttagaaacctttatgtcatagttagagcaatgcattgggattttttttgctatgcacagaatacttgtatttggatctggcataattacaatcatcctgtcatcatcagtttcactcctctggctgctccttgtgtgtgtgtccactaatgcgttcagcattgcaactgctgctgccaaatgctgagcattcgttgccaacatagatggtcactctgataaatcaaattgtatgctgtcatttccttgaattatactagaataaaatcagaagctcacaatgagatttattggtctaaagtgaatcagaagttagttcacataaaaaactatgaccatgcagttacatgtgttgcatagctccagaaggtggtagcacaaatcccataggcccagtaacccatccataaaagttttttgattgattgcttgattccctattctcacttgtaggttttgagaccgaacctatatgtaccaccaaaacaatatcctaattgcaaggaaggtgaccttcctctcatcatcgcgattgactagcaaccaatggccctgataggtgttatgcaagtgtagggcgacatcactaatgctcggacaacggatgtggcatttcgatggatgcaaagcagacttggttgtttgcgatggaggcttcggatagtaagatatcatatgagtgcaagagaactactcccaccattaactataacaaattttgtcaccaaaatttggtggctggtggatctgcttaagaatcaaaagtcagacaaggtggacatcaccatccaaccggaggagcaggaagccatgaatgatgttctagcagccagaacggtctttcttgtacgtgtatttc

SEQ ID NO: 21192 - DNA, 3855 bp, Zea Mays
caactccaagagattagctaaaaagactagccaaatttactgatttagctaatctctaaaatagattttagagaaaaagtgtaggctaatccaacagactcggtaaacctacggactgaatagagagtgaagcaggctatccaaaattggagagcgaagatggagaaatagagagccactaaatttgaagagtcatttacagagtctattggatacaattttcttttaatattagctaaatttacctttacaaaaccatatatctagtctcttggagttgctctaactttttaggcctgcagactgaccaccaacgcagtgaccagtggcggccactctaccaccaacggtttggtcttcgtctgtacacccgaacctggcatattcatacggtgactgcaaggtgagccacaactcagaggcaagcagagtcagcaaagatatatgaaagggaggagaggggttgaacagattattactctcagaaaccagccccttctaccctaccgttcttcctcctatacaatacaacaactactctcttgcgttgtactcggagccaggatcagatggatgcccttgctttgctgcctatcctgatctcttctcctctcaggatgtaggcagatcgagtaatcagtggctcacattttgacaagacactcaagggagcggcactgatgctataaggtgagccttgaccttattccaagtctgatcgaataagaagggatggcagagattgctgttcttctcgtcctgaagaagattgccatagctctggcaggagagaccctaagttttgctaaaccattgcttgcaaagaagtctgagtcggtggcagcactcccagatgacatgaaactgattagtaatgagctcgagcttatccgggcgtttctcaaggaaatcggcaggaaaggctggaaaagcgaagtgatagaaacatggatagggcaggtccgaagactggcttatgatatggaagacactgtagaccattttatttacgttgttggtacacacgatcagatgggatcatgctgggattacatgaagaagatagccaagaagcctcggcgtctggtttcactagatgaaattgctagtgagattaagaagataaagcaagagcttaaacaactctcggaaagtagagaccgctggactaaacccttggatggcgggagtggtatacctgcaggaagctatgaaactgaaaaggaaatgtatcttcctggacatgattacacaatcagcgacgaggagcttgcaggaattgatgaaaataagcaaaccttgattagttcattaaaatttgaagatccatcacttcggatcattgctgtctggggtatgggtggcgttggaaaaagcactcttgtaaataatgtgtacaaaaatgaaggatccaactttgactgccgtgcatgggtttctatctctcagtcatatagactagaagatatatggaagaaaatgctgacagatctcatcgggaaagataagatagaatttgatcttggaacaatggatagtgcagaactaagagagcaattgacaaaaactctagacaaaaggcagtacctgatcatactggatgatgtctggatggctaatgttttttttaaaattaaagaagttcttgtagataatggccttggaagcagagtaataatcacaacaagaattgaggaggtagcttcactagctaagggtagttgtaagatcaaagtagaacctctgggtgtcgatgattcctggcatgtattttgtaggaaggcatttctgaaagatgaaaaccatatctgccctccagagttgcgtcagtgtggtataaacattgtggagaaatgtgatggtttgccattagcccttgtggcaataggaagcatattgtcgctgagaccgaagaatgttgacgagtggaagctattttatgaccagcttatctgggagctacacaacaatgagaaccttaatcgcgtggagaaaattatgaatctaagttataaatacttaccagactatttgaagaactgcttcctgtattgtgctatgtttccagaagactatctaatacacagaaagagattgattagattgtggatagctgaaggatttattgaacaaaaaggggcatgcagcttagaagacactgctgaaagttatcttaaagaacttatacgacggagcatgcttcacgttgcagagaggaactgctttggtaggattaaatgtattcgaatgcatgatcttgtgcgtgaacttgccattttccaatctaaaagagagggtttcagtacaacttatggtggaaataatgaagcagtgctagtgggatcatattctcgacgagtggctgtgctccaatgcagcaagggcattccatcaaccattgatccatccaggcttcgcaccttaattacattcgacaccagcagagcattatctgtgtggtattcttctatttcctccaaaccaaagtaccttgcagtattagacttatcaagcttgcctattgagactattccaaattcaattggagagcttttcaaccttaggcttttatgcctcaataaaaccaaagtgaaagagctccctaaatctattacaaaacttcaaaacctacagacaatgagtcttgagaatggggagttagtgaagttcccacaagggttttcaaaactgaagaaattgcgacatcttatggtttcacggttgcaagatgtaactttcagcggtttcaaaagttgggaagctgtggagccatttaagggcttgtggactttgattgaactgcaaactctgtatgccattacagcaagtgaagtattagttgcaaaacttggaaatttatcccagctgaggcggcttataatttgtgatgtaaggagtaacttatgtgcacagttgtgtggctctttgtcaaagttgtgccagctgtcacgattaacgataagagcatgcaatgaagatgaagtgctacagctggatcatttgacatttccaaatcctcttcaaacccttagtttagatggacgactgtcagaaggaactttcaaatctccctttttcttaaatcatggaaatgggcttcttaggctaatgttgttttacagtcagctttcagaaaatccagtaccacacctctctgaattgtcaaacttgactaggttatcccttataaaggcatacaccggccaagaattatacttccaagcaggttggttcctgaatttaaaagaactttacttgaagaatttgtcccggctcaatcaaatagacatacaggagggagctttggccagccttgaacgtataacaatgaaacacctcccggagctacgggaggttccagtcggtttcagatttctcaagtccctaaaaacaatatttttttccgatatgcatcctgagtttgaaagcagctttcaaaaggaaatgtagatcatatcccgtacatatgcaggacaacaacataagtatggtttgtttgtatgtctacgtgtaccttctgtcctctcccaaaaatagggcgggttgcattggcgaaaagttcatgatgggtgttttgagcttgggcaattactgtggagaggaaatgcagcactaggatccaagctttcgagcagaaagcagcgctgaagctgaagggcatgtcatgtcattcaggtacctagtaggatccaaaccttcgagcagaaagcagcacaggcactggcaccaaagaggaaccatagccgccaggcaacatcagtcatcaggaccggttaataatgtttatgtgtgataatgttgtttcaataattatttggaaccatttcgaactccgaatacttgagagtctgtacg

SEQ ID NO: 21193 - DNA, 3072 bp, Zea Mays
gcggcacccggattctctcgtctgagatcctcgtgctccccgccggccgcttcctggccgccgtgctgcccgaccgcgaggtcaggatcctcggcggcaggctcggcagcttcaacctcaacccggggcccttcaacgtcaaggagcacgtcatcatcaccatcttcgccaactgcggcgtctcctacggcggcggcgacgcttactccatcggcgccatcaccgtcatgaaggcctactacaagcagacgctcagcttcgcatgcgccctcctcatcgtcctcaccacacagatactggggtacggctgggctgggttgctgaggaggtacctggtcgaccctgccgagatgtggtggccttctaaccttgcccaggtctcactcttcagggcgctgcacgagaaagaagaggagggcggcaagtcccgtggcccgtcgcggatgcgcttcttcctcatcgtcttcttcgcgagcttcgcgtactacgcgctgccggggtacctgctgccgatcctgaccttcttctcgtgggcgtgctgggcgtggccgcacagcatcacggcgcagcaggtcgggtccgggtaccacggcctcggcgtcggcgcattcacgctcgactgggcgggcatctcggcgtaccacggcagcccgctggtggcgccgtgggcgtccatcgccaacacggccgtgggattcgtcatgttcatctacgtcatcgtgccgctctgctactggcagttcaacacgttcgacgcccgcaggttccccatcttctccaaccagctcttcacggcgtcgggccagaagtacgacaccaccaaggtgctcaccaaggacttcgacctcaacgtcgccgcctacgacagctacgggaagctctacctcagcccgctcttcgccatctccatcggctccggcttcctgcggttcacggccaccattgtccacgtcctgctcttccatggcagcgacatgtggaagcagagcaagtcggccatgaacgcggtgaagctggacgtgcacgccaagctgatgcagaggtacaggcaggtgccgcagtggtggttcctcatgctgctgctgggcagcgtggtggtgtccctgctcatgtccttcgtctggaaggaggagatgcagctgccgtggtgggggatgctcttcgccttcgcgctcgccttcgtcgtcaccctccccatcggcgtcatccaggccaccactaaccaggcacgcggcgctcccgctctactgccgtcgccactgccgtcatcgtatcgtctgaaccctgctgtttgtccgtgaaattccttgcagcaaccggggtacgacatcatcgcgcagttcatgatcggctacgcgctgcccggcaagcccatcgccaacctgctcttcaagatctacggccggatcagcaccgtgcacgcgctatcgttcctcgcagacctcaagctcggccactacatgaagatccccccacggtgcatgtacacggcccagctggtcgggacggtggtcgccggcgtggtgaacctggcggtggcgtggtggatgctggacaacatcgagaacatctgcgacgtggaggcgctgcacccggacagcccgtggacgtgccccaagtaccgcgtcacgttcgacgcgtcggtgatctggggcctgatcggcccggggcggctcttcggccagcacgggctgtaccgcaacctggtgtggctgttcctggtcggcgcggtgctccccgtgccggtgtggctgctgagcagggcgttcccggagaagaagtggatcgcactcatcaacgtgcccgtcatctcgtacgggttcgccgggatgccgccggccacgcccaccaacatcgccacctggctggtgacgggcaccatcttcaactacttcgtcttcaggtaccgcaaggggtggtggcagaagtacaactacgtgctatcggcggcgctcgacgccggcaccgccttcatgggtgtgctcatcttcttcgccctccagaacgcgcaccacgagctcaagtggtggggcacggaggtggatcactgcccactcgcctcctgccccaccgcgccgggcatcgccgtcaagggctgcccggtgttctgaatcttccgacgtgagcgtagtaagcagtgtgtgtaacagtgtaaggaaatgtttgctacgggagccatggattcaaccaagcatcgattaaccgatgcagtgctttgtcactcgtgaatgtaacgccatagcgccagtggtggattcagatttcagagggagaaaaaaacacaggcccagtgtctttggaacgcccgaatttggagtcatctggaaccgacggctcaggtttactgcaaccaacaacttagcacttgcgatctagcgtgtgtaataaaagtctgcacaattcgaagctcggcgtgtcaagaacaagaagcatatgtgcggagaataccggagcggcgaaaactgcatggtttttatttagaacaagaagcatatgacgatacagtttttactccatgtcatagcttcaagaatccacaaaacacaaaggaatatacagactgatatttgataaaagcgagagtatgatcaagcgatctcatgtggtgaaagttggctaataaaagttgctctacgaatacctggttctggagtgccgtcgtccatcctcctcatcctcacagattgtacacttatcacctgaaagcagaaagtccttggctacttgcatgtcttctttgaactctggacgccgggcctctggatgctcaaagtggcagctcgaagatttcctcttcccttgctgcgatgtgtttcctgcagatccatgcaatgtggccgtcatctctgtatcgaacacgccacaggccaaatctctgtgctatgtccatccccgtcagaaccccttgccctttcaagaaatccacaagccattgcctggctgctgtcatatcctctcccatgtcgctcgtgctaccattccttgacttgccatacagtgctgccgcgcccagagcccccacggacatggcagatgcagttgtgccgtacaaggccgaggagtccagcaggc

SEQ ID NO: 21194 - DNA, 2396 bp, Zea Mays
aaagcaccgaagtccaaactggacgctgattccagatagtaacaccaggaacattctggaggtttactgttcaaagatacacaccataagctgggtgtcaatcgtaacactgtgaatttgctggagagaacatgagaattaaggaggttgatgtgggagtggtggcaatatttgacggtcataatggagctgaggctagtgagatggcttctaagctttttctggattacttcttgctccatgtttattttcttctcgatggcatacactctctgcggttcagaaaatctactgggaaactgacatatagggaagttactatttttaacaatgtatttaatctgtacaagcatggccaatccgaccatgcagagaggtcatgttgggcatcaccagccattctagaccggtcatttcatacggaaattctgaaggaatcactaatgagggcagttcatgatattgatttaacattctccaaggaggcattacagaacaattttgaatctggttcaacagcgaccgtggtcttgatagctgatggacaaattatatctgccaatgttggagattcaaaagcttttctgtgctccgaaggatataatctgcaccatcgaaataggaaacgaaggagaaagagaaactcaattaatcacgaggaatttgctttggcaaattatgatggaccgttgtatcatgcaagggagttgacaaaggaccatcatcctaatagagaagacgagagaaaccgtgtggaggctgctggtggttatgttcttgagtgggctggtgtatatcgtgttaatggcgagctagcactatcaagagctattggtgatgttccttacaaaagatacggtgtaatatcaacacctgaattgacaggctggcagattctgtcagaaaatgacagttttcttattgcgtcatctgatgggatctttgagaaaatgactatgcaagatgtttgtgacctaatgctgcatgcaaaaattcgtgttaaacatgattttggatcctctgccataacacaacgtaatttggcagattacgtagttcatgttgctttacagaaaggcacaacagacaatgtggctgctgtggttgttccattgggatcacctggtagcactggtactacattaaaagattcgtcccagttcgaagaagatctcaagatatctatttctccaatgttgaatgttccatatggattgaagcctgatcatggacatagttcagctgtcattgacatggagtatttcaagcgctcatcaataaagttccagaggttcttggttgaagcaaaacctaagaaacttggttgtttctatttatccgagagtctggatgaagatatggactatatatttagggtgccggaagcataccagcgtgaagaagtccatgacttcaaccacataccagctgagactgccttatattctgatggtaatctggaaaaatacaaggacaaacacttttgcttgtaccttggtcccgaagatggcgaaatgggacagtgcaatggtcctgaagcttttgcaaacttttttggtctacttgactcccttccgcataatggaagcaaaccaaatggttcacactcctttggcaacacgatcgatttcaggtacaagctcaagagaaggtttgatcgtgggtcgtacggtgaagtctggttggcatttcattggaattgttctgaagatacagatgttcataaagagcctccacactttacaaatatatctcaatcagagatgtataattgcacaagttcaggcagaatgtcatctgatgaagatcatggttcaggcacagtaaatggtgatttattcatactgaagcgcataatggtggagaggggaaatgcagcttacttgagtggattgcgggagaaatactttggggaattattttcaaatgcttccaggactcttgaaggtttgtcgaggatagaatcatcgactatctcagtggacatgctatatgatcctgatatccatctagaaaagaacttgtcagctactgaagaaccacttaagcatgtggctaggtttatagaatcttttgaatcagaatcaagggaaatttggctggtgtatcacaatgaaggccactcattatcaaaattgatatatacagctgaagaaacgaagttagtcactggcaacaataatgagagggtcagacatatccaagttttgcacccatcgaagtggtggcattggctaaggacaacaaaagctgggctaaagcagatgcaaaacctcttatggcagctgttgatgggactgaaggcttgtcatgatcgtaatatcacccaccgggatatcaaacctggtagaaatgatgtcactgcctattttttccttgttttctatacttcttga

SEQ ID NO: 21195 - DNA, 979 bp, Zea Mays
aggagttactcaagccttggcatggaaaagatctggccttatggtgagacccagcatacaagtcagtgtgtgccctacgtttggaggaagtgatcctggggtacgtgcagaagttgtccattcattgaaagaggaattgaatctgatgtgtggcctctcttgctcacagcgcccatcagcttatactgctctctctattggacgatcaaagtggaatggtcaagtgggcagttctggagtggtaatcaccttggaaacacctcttaataacattggaaggccgtcgttatctgttcaactgaatggtggttttgagttgtgatccttatgactcctgcactgaagctgtacatactattgtatatattgccatcactaatgttcgtgctccattgtcatggagacggctactcagctgatcaacctagaaaagtttgtggaagtgggctgcaggcttgcaggttgtttttgttactgtagtctataggtctaaagtctcaactcagcaaatcagctgctatggtatactcatgcgggcacagaactcaactgctttgttttccactcgaagaattataacaatccttgaagggattgcgatacttgcagcagttcagctcatattttcagaagttcatgaaagcggagggctcgctgccatggaatatgttcgtccagaatcacattttcttggagcaagactgactacctgtcgcaaactcgcagttggacattgttaacaattgtctgtttagtttgctttgttggatgttgagacaaacaagctggtgtatttttgtatttctctacatgcattgatcaatgaaccaaagactagcgatccctgttctactgttccactgacatgacaaatctgctgtcgatgttgtcccattacgtgctagtttcaaccttaacttatactagtttcaatcttaacttatatggaatttgactatgttgcagaaagaaatttgcc

SEQ ID NO: 21196 - DNA, 1807 bp, Zea Mays
atgggatacccaggagaccatataaagcacactaactctttttctccgtgtatgggatgtgcttttgtttgatggaaacagagtaatgctgttccggacagctcttgcgctactggagttctatggccctgctcttgtgactacaaaagatgctggtgatgcagttacccttttgcagtctttagctggttccacttttgacagcagccagcttgtcttgacagctcgcatgggataccaatccgtaaatgaaacaatattgcaagaactgagtaataaacaccgcccacctgttatatctgcaatggaagaaagagcaaagggtctaggtgtttggacggataccaatggtcttgcatcaaaactgtataacttcaaacgtgaccctgaaccgctggtttctttaagtgattcaacagaccagttgagtgatgtgggagatggggataccaatcaagaaagtgatctgggaaacatggatgacgagtatggtggtgtaatagtgaattctgagattgattctttgcctgatccaaaggaccaggttgcctggctgaagttggagctgtgccgactcatagaggagagaagatcagctgttctcagagctgatgaactagaaacagcacttatggaaatggttaagcaagataacaggcgccaattaagtgcaaaggttgagcagtttgaacaagaaatatctgaactaagacaggccctgtcagacaagcaggagcaggagcaagcaatgtttcaggtcctgatgcgtgttgaacaagaactaaaaattgcagaggaagctcgcatctcagctgagcaggatgctgctgctcagagatacgcagcaaatgttctacaggaaaagtacgaggaagctatggcttcacttgcccaaatggagaacagagctgtaatggcagaaacaatgttggaggctacactgcagtaccaatctagccagcagaaagcaatgtccccttgcccttctccaagaccatcgatgctcgacgcatcccctagtcagtcaagccagaattcatcgcaggagttccagccaagaaggaaaaacttgcttggcccattttccctgagttggcgtgataagaacaaggaaaaaccgaacaacgctgatgactccaccaacacaaagtctacaaataatgatgaaatggtagaaacctccaacacaaatgatgagaagcatagagaaacactagatctaaatagtgagcagagagcagaatcacccaaagcagatgtcaagatgagagcagagacacctgagaaagacaacgacctgccaggggtccaactagtcactgacgatttgaatgggcaccacgaacagatgcaagaaataaaattggattgataagcattaagcacaatgctcccagcccaaatatcttcgccaccacgtaagtaatatcagagtatttatgatctgatcacacggtgccagttggtgacagcactgagggtggctaagttttgaaatgatactggtccccccctcctctcccctttccctttgtggttccccgaattctttttgccaccacatctaggttacatgtcatttctctccattttttataattttgaggagaaaatgagcaagttatatatggttgcccatccgttgctgcctcccaatgtaaatgcattggaagaactgtgagaaaaaagatgagaattgtgggcaattatgacacccttattcttgtaaattatcatatcatttagagtttatgcgtgctttcaattgaagaaatccgtgctggcgttaataacaccactgaaccct

SEQ ID NO: 21197 - DNA, 3815 bp, Zea Mays
gttggttgtgcattactgcattgcatccagtaaaaaaactacagctcaaccaaatttagccgagcggagacgcacaagccggcgtgggctgcattacacgagacgatcaacaagggcagcggcccagcagcaacgaaccaccgcacaagcgccaggccgccagctcgcactctggtccagccacgcggcgccgctgccaccttcctctcaccgtgtacgtcttcggcgtacacgtctctctctctctctctcctcccctaaaccctacgctgcccttctttccctccccgtctctccctcccgtgcgggcggcggagctgatgagatcccggccatggcgggccccacctcgcggctcctcatcctcgcccgccgcgccgaccgacgcagatgcctcccttttctcgttccccgcgccttgcaggccgcccccccgaccttttctccggcgttgccgctacctccctgcctccccgcctcaacgccggtgatgagctattcaagtgcatttacaagtgtacatggagagaggccttcatcagaatatgcaaagatcaggaaggagtcactggaaacccagtttggaagaatattgggttcaagttcacgcaggcattttgctgaccgtggctttggtccattccttgctctatacagggctgctactatctcctttcatgttgtaaaactcactatttggcatttgttgctcaatgatatgcataaaagagcagaaaagtttcgagagaccttgatacgcttgggtcctttttatatcaagcttggccaagcattgagcacacgccctgatatacttcctagtgcgtactgtcaggagcttgcaaagctacaggatcaaataccaccgtttccaactcgcattgcactcaggaccatagagtctcagttgggttctcgaatttctgatttgtttgctgatatcagcccagagccgattgcagcagcatcactggggcaggtttacaaagctcatctacgatctggagagcttgttgcagtcaaagttcaaaggcctggaatggcgcccttgctgactctagatgcacttttgttccacatgattggaggacaaatgaaacgatttgctaaggctcgcaaagacctattggtggccgttaatgagattgtcagacacatgtttgacgagattgattatattttagaaggaaaaaatgctgaaaggtttgctactctttattcacatggttcaagtggggtcaattctgaagctagtacaagtatcaaggtcccaaaagtttactggaactatacatgtaaaaccatattgacactggaatggattgatggaattaagctaactgatgctgagcgcatcagcaaagccaatttgaacaggaaaagaatgatagatgagggtctctattgctcattgcgacaactgcttgaagaagggtttttccatgcagacccccatcctggtaatctagttgcaactgaaggtggatctctagcatattttgactttggtatgatgggagatattccgaggcactatcgtgtggggcttatacaaatgcttgtacattatgttaatcgggactccttaggcttggcgaatgacttccattcactaggatttgttcctgagggaacagatttacttgcagttgcagatgcgttgcggttttcctttggtgatgtcaggaggcaatcaaatgatttccagaagggactgcaaaagcactggatcctgagtttaaagttattgagagtgcatatccttttgtaattgggagactccttgcagaccccagccctgatatgaggaaaatattgcgggagcttcttatatgtgacgatggatccatcagatggaatcgactggaaaggctggtacatgcttaattattgttccttatcttgttatctcattgttatcacgattttttaccaaaatcatatgatgaaattaccaaaatcagtcttttaaataacaagaacatgctagggagttttgtttgtcatgatatacactcctgatttctctgttcgtatgtgtggaaacagtttcatggacctatcctttctgtgaacatgattactaatttgtggtagccctcttgacacatagaaccactaaggtaagattgaagggagtatccagcctatagatgtggaattattaacaacttttactgttgaccatctatttttttgggatcctgtattttgtttgggctgtatgatctgagctagctcagtttgtgggaatactcacaccactcaggttcgagttgtatttggcttgaatatgatcaacctgcaggggggtaagacaactccgggcattgcattaagaagaacttctcacacagagaggattttcctaaccctagactgaatatcctttcttgtgggagtcaaactcaggtcctgcagaggctatcaagtcacataaccatctcagctagagtccctttcacttatctgtttcttcttacttacaacatgacatggttccttctacttcggtcgactttttaaatatatattctgtgcaagtactgcagtgttgctcaaagaaaaatttgggttggtccagttctggtagtggtacctatgatctaagagccacttcataaactacagctatttgttctcctgttaacaccaatcaacgagttttcacaaccctgatggtagtgctgattggtcccaccccttagacagacaagtatgcatcaaccatcctgggtgtcctcatcacatccaggttgtctggaaggacagatgtaatcatgttgccatttaaaagggtgctaaagctgtagttttgtgttactatggtgcaatagttgcagttccttgaaactggtcctaggagttgaagtttgagttaggcacacaaaattgtattctgtgaaataatatggtgttaggatcgtaattgcaattttttaatcgtagtttattgagttaggcacacaaaattgtattctgtaaaataatatgatgataggattgtaattgcaatttttaatgttttaagcttcaaatatgcaacagaggagaaatttcgataatctgaaaattttaatgcaacaaattgggttatctttgctggaaatgggtcatggtctctatcctgttgttggttctaattcttgtgttgggtttgggtagtaacttagtgtgatgagaaattttacagatatttgttttttatttgttcctactaacaacatttggtttttagattgcagctatatctgaacagtcatcagaatcttcaagcgcatcaggagctgactccagtgagaacgccaatggaagtcctgagtggagatcatttgatatgcattctgtgattgcagctacagaagacctatttgatttcattttatcgaggaaaggatggcgggttcgggttttccttgtccaggacatcgttaatgcttcagacgtgttccttcaagaagcgacattcccatatgtatatgcgaaagtgggaaagataggggacctaaatccagagtaagatgatcaggaggctggtgaatactgtgcaatcgttccgccaagctatcaatttggctccagatgcttggagcgccatgctaatccgcactttgttgaaacctgaatcacaaaaatttgttcttgatgtgtttttggccctggctaaccattccagttacaagattccagaaacattctggctatttatgtcaagatttctaaattacttggacaaacaagatatactttaggaacggttaatatatcaattcctttttttttgttatggcttgaatttatttattttagatcgg

SEQ ID NO: 21198 - DNA, 214 bp, Zea Mays
attcggatcgccgtaccttcacggttatgaagacttggtcactgacctatacgtagaactccagtaaatatgaagggttgttaagaaattagctagtgcaggtcaagtgtttgaactagggtagaaagaactatagatacaggtaatcttacttaacctgtcaagtaaaattggatttttaaggatccacttttagtaagcatttctgcaaaca

SEQ ID NO: 21199 - DNA, 1589 bp, Zea Mays
aaagggaagtgtgcaccgagggcccctctccggttgttggagatggaaattgtgttaagaaggctgtagcaataatcactgatcgcctaaaggaaagcttacaccgtgaccgtggtcccttccgtgggcgaatgaattcaccagagcctcgaatttctcaggaagatgattatttgggtgtttcgcagatgcctgcatacgaggaatctctgggacgatctgatcagattaggaacaacactagcatggagccaccaggatatgagtttgattcaaatgatggcaaggtgattgaacatccagatatcctgtacgatgacataatttttcgaattctatgcccaaatgacaaggttgacaatttagttgcaacaaatgatggaatactggagatgctacaggctgatgttggtgttgatgttagactatctgatattattgctggttctgatgaaagggtagtaatcatcacatctagagagggaccagaccatgagcttttcccagctcaggaagcagtgctgcacattcaaactcatattgtagacctcggcccagacaaggataacattatcacaacaagactacttgtaccttcaagtgaaattgcttgctttgatggaagggaggggtcattatctgatatacagcgacagactagtgcaaacgtgcagatattaccaaaagaagatcttccattatgcgctttagagtcagatgaactcatacagattgttggagagattagtgctgctcggaatgctctgatacaagtaacaacaaaattaaggagttttctataccgtgagatgtctggtcctattcaagttggcaatattaatgtacatggagccatttctccagtagcaggctcacctggaggacccaacctcggaaatgatatgccaatgagtgcttatcaccaagcatcacaactggcaacttcatggcattcaaaagatagtggaggcagtgcaagtggctcatttgatcaaggcagcaacattattgatgagatcagacaaggtgctacaaaaagatttgccgttcctctagtaactaggagcacactagaagttgtcataccaaatagtgctgttgcaagcctcaccatgagagctggtagcaagcttgctcaaataagcgagatctctggtgctactgtaacgctagctgaggacagacctgacatcttagagaaagttgttcgaatatctggtacccctgagcaggctagcaaagctgagaatttgctgcagggatttattctaagcattccagatgacattccttcaggctagttgaagacactctgcatgtcatagttgttagttcgtaaaattcctgtgtatattcgaggtagaatatgctgatgtcatgtgattatttgtttaattgagcagcatgtattcatgtgtggatacatgctgttttccttgtagccgttaactggctgacgggggtgtaagattagcatgtgaatttacagattgattcaacattcaattctcatgtccatatgtgaccgctgaacatgaaacctccaacttatttaattctcagtctggtgcttagctgtgaaaacagta

SEQ ID NO: 21200 - DNA, 1746 bp, Zea Mays
gaaagtaggccatgtttacttgacaggaaaatcctgcagggttgcccctccacacttggggcaaataagagaaatgcagacttttttgaaagagttccagcaagagataagcaagtcagagatcttttcaatgagagggtaataagccagattgagaaagatgtggggtgtaaaatcagaatggatgagaagttcctgtttgtcagtggaaaggatagattaatattatccaaaggtgtttctgctgtgcataaaattattcaagagggtaagggtaaacatagtccaagcagtccgaaacacgatcgctctaggtcgcctgtacgaaacactactgagtttcgttccaaacactctgattctcatcgctcacctagcccaagaaattttgattctcaatggtcccatagtccaagaaatgcatcactctctcaaagtaaaggatactataatgaaagacatcgagatggtcgcttacacaacaatatgcccaagttttcgaaaggatctccacaagctcatgccaactttggagcaaaaggccgtccagcccaatcaaaatctccacgccatacctcttatcttgatgaattacctagaacacatggcgagaataaccaatttgctgcatcacgagtgcccaatgattggggaattgagaggcatggagcagatgccagttcaagtcttaggtttgacatgccatcccaccaacagaccttggaagaacttgagatggagtttaaaaaagaagctacacaattagctagagctcgtgaccaagaggaggatgaagagaactataggcatcgagagtcgctgagagtgattagagaaaattacatggagagagtgattaccttgaggaatgtgcatgcaaagaagtgggaagaatttcttgacacctttaaaagtcaacaacaagcacagccttcatacatacaaaccggatatctaggttttgagcagagaacggcacatatttcagctacacatcaaccaatggattcgaagagcacatatccgtatgcttctgatagctattcagccccaaaggctcatgcagcatatggtgagtttcaacatgagaggcatgatgatcttgggagggcctataggcgatattagctgtgaatagtgggcgattttgtgaggaatcagtgtcaatggtgcgcttagacctacttatcacccattgctgttatgtagcttgaggaggtaagcattcatatataggcagaactgtctcccaattactttctttgcagcgtctacaaccgcaacggactgtggagctgtttcaggcatcgtaacaagctgctttccaacgaactaaactgaaatgctataaaaaaacattgacctgtatgactgttttatctgcttggaaaaaatctccctgagttggcgtttatgtgaacctagtattttttttgtcaaacctggtatatcgctatgctgggtctatccgaatggttgtttgcatcatcccattgttttggaaggtttggcacacgatatgaaagttagaacatgtggaacagtcagctatttcgtgaaatttggtcagaacttgatggcactcgttgctgtagtggtgactaggccagtgccttcggattggtactgttttgtgtcaatctcaacaggcactgcactgtcccatatacattggaatgtttgattggtggatggaggttgtattgtaaatcctggctgagtgaaaatcgaattttagaagaaaaa

SEQ ID NO: 21201 - DNA, 4798 bp, Zea Mays
aaacattttgcgcgccgcgctcccttctccttccgcatgcgcgcgcgcccgccccaccgcccgttacaaatactccattcccggttcggcgcttcctctcttccaaatctctagtcttctccagttcccaccccgcgccccaaatccagatccactgcccaccacccgcctattagtctccaacgcggacgcccccgcccccggctgcactcgtcgcgccatcctctggtgcctggtctccgggattctgcaggttcagttgagtagaccagtgtttgagcaagggttgaacataggaatgcgctgtttgttcctagagtagcagttcaaaatccaaacccgcccgcgatgaaaagcggcgtcatggttctcggtgtcggcagccctgaagaggcccctgaccgcaacgatgcggagccacggcgcgatatgggccaatcgcagatgcaggtcggtggccccgttgttctcaaccgatcagctgagctcgggtcaggtgattttatggctatcgatgacgctccagttcaagcaccatcgggccagccggcggcggcaaaacatcagtctcctgctgctctgacggacaccatcatggaggtgcagaagcaactgaagcgaaagagggcttctaataacccagtgattgctgccgcggacaaggacgctctcgctgccgggtgccggcaagagcttgagggtctcttccagttttacaaggaggtttctgaccgtaaggtgcagcttgacggtggtaacctgtccgtcaacggaatggttggctgcttgcttgaggagagcagccttgggctgaccaagttggtggacgggatatatgaaaagttgaagggattggatggtgtgtctgtggcttcagtccgtggctctgtgctgctcgttgggcagaggatgatgtacgggaaatcatccttggacgctgatgtgttggaagatgatacagagtcggctctttggtgctgggagacaagagatctgaaattgatgcctgtgaaagcacgcagtgttcttagtacacggaggtctgtcagaaagaaaatccatgagagaatcactgccatctattcaactctatcggttcttgaaaacccaggagtttacgtccaagtaaatgatctaaaaaaggcatcattaagattaaacaaatcgctgaacctggaagggatcagatcaatggtggaaagagtggcacaaaagaacctagaacggggtgtgaaagttgctggatcagcaattaaggaattgaagcaagagacagaaaaaaatgaccaaaatcttagaagacttgaggatactagcgtctctgagctgcagaatggaaattcgcctgataatgaaaaagaggttcaaaaggcacaaaaacaggtggagaaggaaataaagcgccaggagaaagaagaagctcggatgaaaaaactgcaaaagaaacagcaagaagatgtcctaagagaacagaagagacgtgaaaaggaggaagctgaagctaagaaacaacaaaagaagcaggaggaggaagcactgaaagaacagaagcgtcgtgaaaaggaagaagctgaaatgaagaaacaacataaaaaacagcaagaggaagctgagaaagaacagaagcgccttgagaaggaagctgcacaactcaagaagcaactagccgtgcaaaagcaagcttctatgatgcaaagatttttcaaaagtaagaaagacaatggaaaacttcaaaaatctggagagaacaactcagctgatggtccgtgcaatgacaacaaagagaccgtaccatcaaccacatcaaaaattgattattcattgtctcaacaagagagctgggttttggaggatctttggaggttgcagatcactggttggaagaagctatctagccacaataggtcctccagatggggtgtaagatgcaaacccaagacgaaagcatttaatgaactgaagcttcagaaatcctcagatgatatggttgatgaaatactttctactccaaataaagatggctgccacacttcaagtcaggaaaatgaacatgctacgcttgaaagtgacattgacatgctacaagctattgaggtgcaatgtcatgacaccaataaccctaaacctctgcaaactagattaattagaaggaaacttctgcaatttgacaaaagtaacaggccagcgtattatggatcctggaggaagaaaagtgttgttattggtccaaggtgtccacttaagatggatcctaatcttgactatgaggttgatagtgatgatgaatgggaagaggaggatcctggtgagagtctttctgactgtgagaaggataatgatgaatttatggaagaagattccaaaattacagatgaagaagatgaagatagctttgttgtgcctgatggctatctatcggacaatgagggaatacaaattgaaagcctattggatgataaagatgaggaagccagtagctcaccaactggtcagtgtgcagaagttgaagagttcaggtctctactgcgccaacaaagagtcctgaacattttaaccgagcaagctctccggaagagccaacctcttattatatccaacctaaatcatgaaaaagctgaattactgactgccgaagacctcaaggggacagcaaagatcgaacagctatgtttgcaagttctttcaatgcacatctgtccaggaggcgcagttgttgatgtgcctctaactgacagctcatctgcaactgttgaagaaattaaccagcccaatccgaaggatggttctcctggggctgcatctgctataccagaaacagatctgccagaaattgtccaggtgataagatcatgtcgagatggtatccataaggtggtggaattactgcagcacaagtttccaaatgtttcaaagactcagctgaatcgcaaagtgagagagatatctgactttgttgacaatcattggaaggtaaagaaagaggtgcttgacaagctgggattggattcgtcaccagtgaaatccaagaagaataaaagcatagccatgtacttctcgaagagatgtttacctcctgaagaggctgtcaatgctctgtctgcttctcctgagttgcggttgaaatctagaaccattcaaaatggcaatggtggcaccgaagctcctcagatcaatctgttcccttcaaagcagtagagtttgtaacaggacaccctgaaagtcggatcaggtataaatgaggctatgcacccaggtgagcacaaagctcagaggtccatgtccctcccatggctatggaagtgcgtgcaacttggttttgcatatggatgatctggatcgattatgtttccagtgacatgttgtaattttagccagaaagtaggtttgttcatgaaggacattcagttcaaatgtttgacctattgttaaggcaaggcattgttctctgcaacatgtggtgttatgaacattatgtgcactcgtgattctgccaaataagtaatgtgtcctgtgactggtcaattgaagcgcatctcttgagagaagtggagaaatttgctatttgtcactctcggttttggtttccatctcgtgtctagtgcaaccatctgtgataatggcaatggtaaaattgccaatggctcggtgcgactggggcgagcaaatatatttttcacttgtggcttatcaaatgacagattttctcagaaatttgtttttacaacctgtttgcatcaaatctgatgaatgtgcatgcaagtagtagcaaaggcaacaaaaagcaatgtatatttgctttggcatttaacaattttggttgaacaggcacagtagtaccaaaaaaaagcaatagtacatactaacagacggcaaagaatcaacgaatcttgttcatatatcattctgaaggagctaacaccagcggacgatcagacatggtacggctgccggttcttggcctggaggtcgtcgtcgtcgtcgtcatcgaggcggagggagaaggcgagcgcgagcgcggcccactcgaggacgaagatggcggtgccgaggcccccgaccatcttgaggatgacggcgccgtcctcgtcgcggacgtaggactgaagctcggccaggaagtcggaggtgcgggtgaacgcgagcagcgcgacggccccctggaagatggcggtgagcgcggcccccgcggtgtgcgcgttgtgccactgcgcgggcgtggcgggcgccgtgaaggagcccgagcagccggccgcggagaagacggcggtgagggcgtggaggaagagcaggaggaggccgcacggggacggcagcaggcgcagcgacagcgtgaggaagatgcagctggaagcggcgcccatgaggacgtagttgcacaggaggaacgccttgcgcgtgtgcgacttgcccgccattcgactcgacgccgccggactccgcttggaagcttaccgagggagcgggatggcttgcggtcgaaggggcgaggtcgagatcgagagagggaggtttggagtggagtgggagcggtggagtggtgggaactttatacctgcgcgggcgggcggggtggcgctggcgcggaggatttggccgttggaggcgtgtcggcggcggcggcggcgatgatgaggagtgaggagcaacggctagtctggtgggtgggtccggactccggagggagggaacgtgggggtccattggcatgagaagagtagttgactgggaataggaacgtttgcgaacagctgaccgttgggtcatagaggcggggaccggaagccaccttgtgaggtat

SEQ ID NO: 21202 - DNA, 180 bp, Zea Mays
ccacgcaccacatagatccacggccaagtccgagcggcggcgagaaattacgggcaccctaatggctcccgcactccctggctgccaccaccgtgagcgcaataccacgatgaaggtcccgacccaatctaggcgccaactatctcacagaagggatttccccccgtgggggcttcctcc

SEQ ID NO: 21203 - DNA, 2041 bp, Zea Mays
atgggcgaggtggcaccggtgattccagtcacccggaggaggacgatgtctcgcaaggcagcgggggcagtggaggcggaccgacccgccgaagatgtatctgaggagaagacatcaaagattacaatagctttgaatcaggaagctgaggcagtggcggtcgcatcaaaggaggaaaaaggctgcaactttaggtcgacagtagcagcaacattgtatattaagaaatttgatagagtacaacagttttttgagagtatattaaaaaatgaacatagctatgtgtacataaacactagccctcacataacacagacaactccttcagatttgacaaaaaatgtgaacatcttgaaccttgatttgggtcttgggctattatcaaaaccaaagcttgctgacattggttggcctaggaggaggtgccgacaatgtggtgctagacggctattggtcgccaccgacgctgcattctggaggatggtcgtccatggcgatgggagattgaatggcatcagcatcggaacgaggctgacacgagtgaacagaaggagagttgtgaaccatcttgaagtatgcctcgtcaaatgtgcactcttcattaaaatcgtcttcaggatgccattcgtaaatggtaacgactgctaccttgtttatgacaaaaatatgaatatctttataacggtgtactttaaagaatgtgcccctgttatcccggattttctcttgtttaacatagatttgattctaagttgtagaaaaactggttgcactgtacctttacgactttaccatttcttgaacattgtctacaaaacaagagagtatgagttcttgaggcttaccagcctgggtgtgatcggtgctcttgtcaagctatttcagttaccagaactgtttgatgatcaagtgtcttacatggttgttccccagggcatgagaatattgaatcatcaggtggatgatgatcgcatagtgtgcctaagccaccacctcaagaaagtagtgttgaaagaaattctggacaagaattctaggtgtgggccctgctcttcgtgctattgcttcgatgagaagatgcaccggtgttgtcagtttctttgggcggatctcattccttgtcgaacacaacaatcaagcatcatatttcttcatgatagcaaaatgtcgcaggttgcagcagccacaccacagacaacagctatcagagccgatcagaagcgccaagagcgagcgcctcatgtctttatattgctctcacaccctccgtttctcgctcccacccactgccactgtacttgtgttgtgttgtgttgtgtgctgcaagaagaagaggaggaggaagagcatgtgctgagaagcctgccagcgcgctttacgacaagcatatatgggggagatcaccaagcctttgcgaagcagaagcttccgaagatggcctacgactactacgcgtccggcgccgaggatgagtggacgctgcaggagaacatggaggccttctccaggatcttcggttgatgagataagattgccaagaaacgaagtctgaggctggcttcttattcttcacctggcttcttaagtagtagcttcttattcttaagcacttgcaataagaagctactactttagaagattgccaagaagagaagtctgaggctgtcgagtaccaaaagcttcttcccataggctgaaggaatagagaccgccacaatgagagcttggccaagagaagatccaaccgccaaggcttcctctggcacctccgcttaagaatgttcagtgcttttgagatgttttcaagacctatcttgttactgcttaggtaccttatgctgctatagcagtgttgcaattgcccctgtacttgacagatttgcattagatgctcaagctatagagggtaggttcctaattgtgaccatgtactaaattatatatctgttgctaagttatagtacagacaaaataaatttagcctggccaacttgtataaaaatgtgttattgtaactaagaatatctgaattgctcctatg

SEQ ID NO: 21204 - DNA, 835 bp, Zea Mays
attttcccgatgcataggcccagagctcaatacgccaccgcctttttactcatctgttgagcacttcgcctgcttccctccttgccgtgcgatccgcctccagagactcctttgactctggattcaatcgtggagcttggagcattcaaggttcactccctccgccatcactggaagatgggaccgcagaaggtcgagacgatgcggcggccgaggcccgagagaggagaacggcggatcgacgccgccattgaccacctcgcccagtacggcttcgcaaagccccaaatccgcaaggtcatcaacgacctccttcagctgtacgggagagatggatgggtgttcctggaggagggatcatacagtatcgtgcttaaagtcctggaagaacaggcgcagcaggatcagacacaagaagcagctgctgcagaagaggcattaccacaaaacggtatggaagtctcacgagtgaatggtgaggcaccgaatgagcctccatcaacccttgaactgcaagcttcccccagcagttcacctttactgctagtgccaccagccaagggacctccttgtgcaaggactccctgctatggatggattagtgaagagtccgagtctgagagcgaatcagaggatggagaaatgctttccgatgtaactgggcctgtaattttcgccaaaaaagatataccaaatcctgtgggaacattgccttctaggaggaagtgacctagtagatgggatgtgcacaccctagctggtaatgattctgactcaccctcgctcttctctatgtaatttcgtattgctgacacaattgtcgtgaaaaaacaaa

SEQ ID NO: 21205 - DNA, 1911 bp, Zea Mays
aatcttaatcacaaaaatattgtcaagtatctgggatcactgaagacaaagagccacctccatattattttagagtatgtggagaatggctcacttgccaatattatcaagccaaacaaattcggacctattcctgaatctttggtggctctttacattgctcaggtgttggaaggtcttgtttatctgcatgaacaaggtgtcattcatagagatatcaagggcgcaaatatactgagtaccaaagagggtcttgtcaaacttgctgattttggagttgccactaaattgactgaagctgacatcaacactcattctgtggtcggcactccatactggatggcgcctgaggtcattgaaatgtccggcgtttgcgctgcttctgatatctggagtgtgggttgcactgtaattgagttgctgacatgtgccccgccatattatgatctccaacctatgcctgcactgttccgtattgttcaggatgtgcatccaccaataccagaaggactgtcacctgaggttactgattttctccaacagtgtttccaaaaggatgcgatgcaaaggcctgatgcaaaagcattattgatgcatacatggttgcaaaacttaagacgagctttgcctggttctcttcggcaacctactccattgaggaacatcgatggtgatgatgaaggctcaagaggtgataatagcttgggtttttgcgacacaccaggagatattcaaacaactattacttctaatgttgaccaggagaatgggagtaaagaaccaattatggactctactgtacaaagtaaatctgaagagcttcatgatggaaatttaaaacttactgagggcagtagttcaaacagtgtggcgcttatgaaagataatgtggtccttaataaaggtccgacactagttttacatgagaagttaccggtggaatcttcatctggaggtgctgatttgaatggcaaagtaatggcacatgaactattgcaaggtggtccgccaggtaaggtagagctggagaataaagaaagttcaagtagtgatgtgttctcctttcaggctggaagacagaatattggcttccaaaaggtggttgaaccttcagttgttgaggggccaaaacagcttagtagatttagtgacaaacctgaagatgcctctttggaagacttatttccaccaaatgataaatggggagataatggggctgaaccttcaacatcaactactgtccaagaacttaaatataatggtgtacaaaatgcgttcttgaaggggctcaatgctagggtggagaagcaaaaagaaaatgataacgagtctatgaatggtggaaagctaattgaatttgccatgcaactagaaaatattgacgcgttgggttttggtgaacatattcctggagagagtcttttccctgtgcaggctgtaaggtgtcttcagggctcaaggcgttgctgatgtgttgccaaaagcagtgagagggaaggaaccagcaggaaggcaaccgctggttccattgcttgtggaggggggggggcagcatgcaggctgctggaactgtggaagagcttacttttgtggcagtcatgttcgttcctgctcccctcactctgctcagaataccactggtagtgtgcctttacgttgctgctgctggcgcgtaattgtggtgggtacaatatgttaggtgtataacaaggcatggactatctctttgagaggaggattggctgagtacctagaaatggtgacaagctggatagtctaggaaggcagtctcttttcttgttttccttttcccttgagatgtgtatggtgtcgtgttaccttaccacctcaagtgccttgtcaatatgaaggggtttggtttgccatgccttgccttgcaacctaagaacg

SEQ ID NO: 21206 - DNA, 1777 bp, Zea Mays
ccgggtggtgtacaccggctgtacactcatgttctttaataaattatttgctaggactacatgaatggatcatatactagctcgttaagcctccatgatgtcagtgtcgacgatggacaatcagctcttgataacagcagtagaacctctagtccttttgatatcctgactcctcaagatgttatccctatcgaaacggcaaggtctagattcttggacctcgttgttgaaagctttatctgtgagcatgttactgagttggtggaatgctctagctctgactgcagccaggtggatggcaaatcaagcaagagaaagcagcaggaggttcgatacgagggtgacccaagggttgctttgccattgatgtatatagcaaacctgtacgaaaccttgataagtgatgtcaatgtgcgtcttgcggcactgattgggttccgtgagaaaactataggtctagctcttgaagcttcaggtggcttgtacaggaaactgatccagaggttcccaaagagaggccactgcagcttcaagaggagggagttagcgacttctcatgcaaccaggacaaagtttcctgaacttgtggtacaagaagaaaaacgagttcgttttgttgttattaacggattggcgattgtagagaggccagaaaatatgagaatggaagatgcggaatggttcaaaaggttgactggtcgaagtgaagttgctatttgttcaagagattacaaattctattcaccccggcataagatcaggcgttccccacaggcagcatttgacatccctgatacaagtgctttggcagaggatgagaactcttcattggtttgttcttcaggatttcgctcaccaaacgagatacaaaatcagcatcagtcaacatcaaagagacctatcgaacatctagaaaatcaaccctttttacaccttttccatcaagcagaagatgatagcatgcagcaagttcaacattgtgctcagttcccacccattcatcaatgtacgagcactccacatctatcagataacccccaacaccagcaacaggcttatttatctcaacatatatcttgcttgcaagttgggcaaggtcatcttggaggacgcatgcatattattccaaccagccctgcgaagttctgtgatgagtgtggctccccatatttgagggcgacatcgaagttctgctcagagtgtggtaccaagaggctaggaatgtgaggtgacttgatcaatgtgtatatgaatctgatgatgtagcaattgtagtcttatgtttgtaaaagggtctctagcgtaatggttaaggcagcccggcgaagttctgtgatgagtgtggctccccatatttgagggcaacatcaaagttctgctcagagtgaggtaccaagaggctaggaatgcgcggtgacttgatcaatgtgtatatgaatctgatgatgtagcaattgtagtcttatttgtaaaagggttatttgtaaaagggtctctagcgtaatggttaagttttcttttaagttttctgagtagcaactctggttgggccgttttagagtgggcggtgatatcttactagtgatgggggccagggtttggaaattttctcgagaccatgttttggtctcctttttaatataatactggaatgacggtcttttggaatgacggtctttctcttcccgaggagttttttttatgcctttaaagttgtgtgagaagtgtattcttgagatgatgactcagcagagagtatgcagccacctttactaga

SEQ ID NO: 21207 - DNA, 873 bp, Zea Mays
tgattatacttcccccaaattatatggacagaatgttttgtacttattctttggactacggctgctgtatattgcatggaaatctgacccaaagggatcccagaagaaggaaatggaagaagtagaagagaagcttgagtcgggtcaagggaaatcaaccatccgtaggttctttgcaagattctgtacaccaatctttttggaggctttcatcttaaccttcttagctgaatggggcgaccggagccaaatagcgacaatcgcgctggcaacacacaagaacgcaatcggagtcgcagtgggagcgtcactggggcacacggtgtgcacatctctcgccgtggtaggagggagcatgctggcgtccaagatctcgcagcgaactgtagcgacgatcggaggcgttctcttcctagggttttctgtttcgtcctacttctaccctccgttgtgatgaaaaggctgctgatcgaaacatagatggcgtaacaacccagatcgtaacagcacgcctcgagtcgcgggcttcgtgtaatgtacagacacattcgaacattcctgacaacaatgttctctgccatgctgccttcaagtccgtatgtagaagatgtctcattgagagcatggccgactttttattgcttgtatccgaagtattaacttatactatacgctgctccaatctcgttcaccaggaaatcatgttagtccctcgttctttcaaaagcgtgataaaatgtagaaaaggcatcaagaagcccatctctagttgtaaatccttctgctttttctaagtacagatttttattgcacatctagatactatgcacacattacagctatctatctagagaaaaaaataatcacttataa

SEQ ID NO: 21208 - DNA, 1103 bp, Zea Mays
gccatcatcaacttgtgcaatggtggcgatccccaggatttgaatactaaggatttggaaaccaacgtcattgttcttgttcatggtggtggattcggcgcttggtgttggtacaagactatatcacttctcgaagatagtgggttcaaagttaacgccattgacttaacaggctcagggattcaccattacgacacaaacaagattagcagtctttcagagtatgctgaaccacttacgtcttaccttaaaggcttaggcgatgctgaaaaggtaattttggtcgctcatgatcttggcggtgcctgtgtatcctacgcaatggagatgttcccatccagagttgccaaggcggttttcctttgtgcagcgatgctggcaaacgggaacagtgccctcgacatgttccaaaagcagatggacacgaacggtactctccaaaaggcgcaggaatttgtctactccaacggcaaggaccggcctcccaccgccatcaacatcgacagggcatcgcttagggacctgttgttcaaccagagcccttccaaggacgtgtcgctggcctcggtgtccatgaggcccatccccttcgcccctgtgctggagaagcttgtgctcacggccgagaactacggctcggtgcggcggttctacgtggagaccacggaggacaacacgattcctctgcccctccagcagagcatgtgtggtgccaacccaccggagaaggtgctgcggctgaagggggcagaccacgcgcccttcttctccaagccgcaggcgctgcacaagacgctggtcgagatcgccaccatgccgcatgtccgggcttcgtgagaacgtgtttgttcagcttcaggtttttgccggccggtgagcttacatggctgttgtacatgctgaggatgatggtatggcttgtggcggtgtggcagcgacagcgagtaggggatctagaatttcggcgtcgccttgacgaaggcatacccctccattatacactcacatctggcatcactttttttagaaaaaaaaaacaaaatcttattccagcctctatggctctagagttttagaatcaaccatttcattatatggttcag

SEQ ID NO: 21209 - DNA, 884 bp, Zea Mays
ataacttgcagagttatggcctcaaggtttcatggatagtgttggaatcaaagatgccatttatagatgaaaggagcgaagaagattatactacagccagcaaaaggttcgcagcgaagagagaatgaaaaggaagaggctggctgcagcagcaaagctggaagatggcttcccagttgtaatgcgagctggtgttgccccacaagtttcacaaccacccataacaaacaacatcacataccagattatggacagaaccaggggtttaaattttttgacagggctcgtgaaacgagctccagtggaattcctgatgacggcaacagaaatattggcgagatcaagaagaaaagaaaacctgaatacgatgttgtagatacacaagctaacctaccaaaggctcccttaccgcatgggagagaagcaaaagccttctaagcctgctgacgaggccagtgctggtagcctgccctccacgtcgacaactcaaactgtgcttggcctaccctaccatcggtgcttggtcataaccaacaacctaactgatcatttcggcatattgttggacatttggttatccttataggctcttttcagctgctgtacaaaattatggcatttccatgtgttcagcatccatggtcaaggccatcacctttccgagtcgagaggatatttgaccatttgcaattttctagcattgcttggttcctttggccaggttatctgtgccacgctgataaatatggtcagatgcagatttgcacccctacaaatatcggttgtaattatgaatcgtttctgagacatgcgttcatattgtgcgatttaaaatctcattcagcgaggtgcagatttaatatcattgacaaccgcacaaaaca

SEQ ID NO: 21210 - DNA, 1682 bp, Zea Mays
ggaaggtgtttcatcacttgggcttcccgttacgagttgcttctctgctcagtgggtggataactggattgtggattttgctaactacatgctgggttatcagcctatcataaggaaagcaaagaagagacaacaaagcaatttgttgtctctttcttaggagctggcgagtactcggcatggcagatgctagttcgaggactgacacctcgactgttttagacatggatgataagaatcaaaggttagaaaatggacagagtggagctatggccctggcttcgaattcatctgatcggtctgacagatctgacaaacctatggaccaaaaggttttacgacggcttgcccaaaatcgtgaggcagcaaggaaaagtcggctgaggaaaaaggcatatgtgcaacaactagagagcagcaagctaaaacttgcaagcctggagcaagaactccagaaagctcgacaacagggaatcttcatatccagttctggagatcaaactcatgctatgagtggaaatggagctatgaccttcgatttagaatattctcgatggcaagaggaagaaaataagcagataaatgagctgaggactgcagtaaatgctcatgcaagtgaaagtgacctccgtcttatcgtcgatgggataatggcacattatgatgagatattcaggctgaagggtattgctgcaaaggctgatgtgttccatatactttcaggcatgtggaaaacacctgctgaaaggtgcttcttgtggcttgggggtttccgttcgtctgagcttctaaagctccttgtgaatcagcttgagcctctaactgagcagcaattgatggggctatccaatctccagcaatcctcccagcaggctgaggatgcattgtcacaaggcatggaagcattgcagcaatccttggcagaaacgctggctgggtcccttggtccatcaggatcttccggaaacgtcgcaaactatatgggtcaaatggctatggccatgggaaaacttggcacactcgagaatttccttcgtcaggctgacaatctacgacagcagaccttgcatcagatgcaacgcatcctgacaattcgacaagccgctcgcgcgcttcttgcaatacacgactacttttcacgtctacgcgccctgagttctctttggctcgctaggccgcgagagtagcatcacccacgttggagtcactccatgggccgatctgtgaatgtggggctgctggctgcaaactcgcaacgcatttgcagatggctggagggtcagttctctttgtacaagttgtattaacatcttctggtctcatattgcgcttcagtgttgtacaagttagggtaaagcttgcatttaacttgtaagttatcatggattcatgattgacatattgtacaattgtattagcaataagaatagaagtacataaatgctggaaggactatccagcgtctatattggttggaaacgagcagcagaagcttgtcatgtcgattttgaatagtcggttgaagtgttctttttggggtctatagagaacaaagaaagcttcaggagaaatgtataggtattcaccagtctaccatagtgtgtgcttcggggagctccttgtgatggtaaaatttgataacgaggatgagttcagtgacattaaaaatttcgtactccctg

SEQ ID NO: 21211 - DNA, 2669 bp, Zea Mays
tatatttgtgatggaagaatgcggaggctttgataaggttgtggggccatctttcttcaaatatgcacttatatgtgcaaccacaagaacgaactcgggaggttaaggatgatgaggcccccaaagaagtatctggaagagaaaaatcatcagatgtgctcccgagaagcaaacatcaaactcattctgggcacacaattgaatcaagtgaagctactagtaggagacggagtaaccgggaatggaaagggattggtcggaagggtaatgaaaaatttccgcttcgaaatgtactaactgatattcttcatggggaggacaaaagatcgcaaaagtccaatgaagtacgaccccctccatcaaaacaacagaacgacaggaagcgtgaaagggatgatgagacacatcaaacaaagaaggactcctcatcacgctccatgcttggtgatggtgcttcccgtcgtcttctacagtttgctgtccgagatgctgtaaaagctgtacagccaaccagtacctctgctgaaccagcatccaagcgcctgtgctctgtggtcgccactacttctacagagcacatgcgtgataggagatcagaaagatctcaggactacctgaacgatagaagatcagaaagatctcaagacaacttgagtgacagaagatcagaaagaactaggccaatgctacaggtacatggagctgctttagctcttagagctgcagcggaagctgctgcagattctgcaaaggttagatctactggaagtgttttcaagcgattgggtcaagggaatgttgtgaaacagccatctcgttctcgtgaagagaagagagattatgaagattttgagccagttacgatcgcagatgaacatgattctgatcaatatgttaataatgaggaatccgaagaggaatctggagagctaaccatggcagatagggtagctggaagtggaatgtatgttgattcgagctctgaagatgatatggaccgagatgagggtattacaagataccaaacttctctttcacatgacgatactttctcaccatttgcagagaagaaaactgtatcggcaccatgcagtgttgaactagagactaatgcaataagaccttcaagtgtgaatgacgaggaacaacctgttccttcaacaccaacagcaagtaaagctgtcgctatttctgttgatgtaaatatggtggagcctcccagttatgcaacaccaaaagatgttcatgttgtggagaagccttatgttgcacccatgaattcaaatgccgccagtattgctaccaatgccaaagaattaggtcatgctgaagttcaaaaggattctcagcggtctgcaccatctgttccggtttcatatagcacagcgcatccgatggaggatgcagattcaagaacgctttatgttaacaatgttcactttgctgccaccaaggactcattatctcgccatttcaacaagtttggtgcagtgctgaaagtagtcattgtcactaatgccgcaacgggccagccaacagggtctgcctatgtagagttcttacacaaagaatcagctgaacgagcattgtcgttgaatggcacatcatttatgacccgtattctcaaggttgtccggcgaagttctcatgaagcagctcacttttatggttggcctggtagtggacggtcatcaatatatgggaggcatggtaggatggcatacccaagagctgttatccctggtggttcctttagagggcgtgctccgatgaaagctggtgctagaagtttacagtggaaacgggagccttcaggcactgattcaagtgcaggtgcgaaaactgacatgagtgtggcattttcctctgaacaggtgcttccacgtgcaacataggggagtatgttaccgctgagctgatataatgagaaccaagtggtatcccactcgtcgctcctggccctaatggctgaatatggacagcaagctgagaagattgttccttcctgctgcactgtaaaagaaaagtacaaaaaaaatgaaaaatataaaaatctaaaacaagagattctgggggagtttggcatcagattatggctatcattctggtgactggatttggtcctcttggccatatgcgagtaggctgacagcctgagcaattttctatggactccagcaatctgaaagaggattcacattcaaaataatcagagcttggatgtattggatggaagatgcttttcaagtagaacaagatgtgcagattttggaccaggtatttagtgacaatccgggcgtcatcgatgtaagcctcaactgtatagaagtaacctatctatctgtacccttgtgtgaatcaatctccttcccaacaaaaaggggggaaaaggcagcacaaaaaaatatgttctcttttgttttttcctctccatgaactgttttatttattgtactaatatagctgattattcagttggacattcatttttttgtcaaacagtttaacaatactttttttcctgtgtggtctacaattagattgaccgtgctacctgacttgcatttccaccatttcatgttttaagtttcaaaatccagtttactgtctgatcaatgcagtttaatctcgggatgtatttccatggttcgtgtacatctatggctggg

SEQ ID NO: 21212 - DNA, 4679 bp, Zea Mays
aacaacttgaggcaagaatcagaaaaaaagacaaaacaaacatgtccataatcttcagccaaaacgctaaaccaaaaagtcccatcatcccccgaccctttcgccgcgcccgtgcacaaacccgcgccgtcgaagctggccccttgcctcggagtcttgaacgcaaactcggaggatcgcctcgctactctgcgccgtcaccgcccacctcctcgttcttcaatctgctccctgtttgccgtgcagtggagaccagttatccgatttcccttgtcgttggtcgcagatttctccaagaaatctggggacgctgataggaggccgtacagaacgcagcggcagcaatggtgatgtcggagtcggacgacgacgacgacgagccccagctcaacgcggtggagagctactacttcgttgactccacgaacgacaacgagcctgtctgcttctccactctgcctttcctgttcggggacactgatgatcttcctgactgcaagaaaaggctggtgctgcgcgggactggtggtgacccgggcgtcaaggtgtacagtgaggtggtggcctggagtctggggctcgaggggaagcaaccccagtttgcggtgctcacagcagaaggcagacgttgggttcgtctcgttaggcccttgaacagctacgaggagatgatcaggactgtgctgatcacagcgcatatgctgcattttctcatgaggaagcctcatgagccagagagaacgctgtggaaccacctttgcaaagttttcaacaagtttgacgttagaccctcagaggacgatttcaggaaccacatctcactgatgaagcagtttgtggcaaaagatcctatcttagcaaaatcagagattttgcgagtatttgttgaaggaaaatctggaaaaattttcactgaggctggtgcagaccatattgatgttaagcagccattcataactgatgatgaggacatagatgagatgattgtggaagatgccgataatgaatctgatgaagaggaggatggagatttgtttgattcaatatgtgctatttgtgacgacggaggagacatattatgctgtgatggtccatgtatgcgctctttccatgcaaaagaaggaagtggtgaagactcctattgtgatacccttggctacactgaggcagaagttgaggcaatgaaattatttctgtgcaagaactgtgagtataagcaacaccagtgtttcatctgcggagtgttggagccttcaaatggagcagcagctaaggtttttttatgtaacaatgctacatgtggacacttctaccacccgaaatgtgttgcccagcaacttcatcctaataacattgatgaagcctcagaattggagaagaagataacagatgggttttcatttacatgcccaattcactggtgctttcattgcaaaggtttggaggatagaacacaagggcctttgcaatttgctgtttgcagacgctgtccgaagtcatatcacagaaagtgtttaccaagagaaatttcctttgatgaaattgaagagaagggtgtcatcatacgggcttgggaattatcaaaaatgattttgatatactgcctgaaccatgagatcgatagtgaacttgagacacctgtcagagatcatataaagtttccaaggattgaaaaaccacttcaatttgtaaagaagggagctaacttgttgcctaagaagaaaaagaggacttacagtgagtcaattcttgagcaacctcccaaagatactgtgaaaatgaaaagcaaggttcgcatgcaagaaagcgagcaaaacaaacacgacaccagagaagtttctgtgaagagtttcactcaaaacgttgttgacacacctgtaaagaaaaaaggcaagttgaaagagaataaacagttgccttatgtggccaaggatcattttgtaagcagtccaaaatctgtgaaagagcaagaacaagagttggtacctttgcccttatctggaatcaggaagagttcatttcctaaagtggacagtgaaattgaaaagagggtgattagcatactgggaaatgaaatctcttcgttgacaataaaagatgtaacaaggaactgcagtttgccatcaactcatgtatactctggcagaccaactgacaagatgccactaggaaaaattgagcgttctgttcaggctgtagaagctgctttaaaaaagctgaaaaatggaggtagtgtcaatgatgctaaagcagtatgtgaacctgatgttttaagacagcttgcaaggtggcataccaaactcagagtatatatatcaccttttattcatggcacaaggtatagttcttttggtcgacattttacgaaggtggagaaacttgttgagattgttgatagacttcactggtatgtggaatctggtgacatgattgtagatttctgctgtgggtcaaatgattttagccggcttatgaaagaaaaactcgacaaagttcagaaaaagtgccatttcaagaattatgatcttatccaaccacagcatcacttctgctttgaaaagagggattggatgactgtgcaaccaaatgaactgcctcgtggatcccaactaattatggggcttaatcctccttttggagtaaaagcaagtcttgcgaacaaatttattgacaaagcattgacattcaagcctaagctcattgtactaattgtccctaaagaaacaaaaaggttagataagaagaagataccttatgatttgatttgggaagacagtgagtgtcttgctgggaagtccttctatttgcctggttctgtggatcttaatgataatacagttgaagggtggaatgcatccgcgccacccctctatttgtggagtcatcctcattggacaaagaagcacatgcaagtggctgaagagcatggtcacacttgcatggggaagatagcttcccatgttgaaaagagaaatctgtcagatgatctgcccgtgaggaaacaatctgaggctgcaaacaaatggaactccagatcagggaaagagactacatgcaatgacagaaaggacaatctacttgatgatgttactgctaagaagcaagcaggacctgaagaagaaaaggaaactctagggaagatggaccaccatgtgaaaaaggctactataccagatagccttacagtgaagaaacaaactgaagcttccagcaaagctctctctcattgtggaaatgatagaaagattggcaggtacagcagcaggaaatatgatgactggagaagtaagcggacacctgatcacgaagagagcttcccacctgaaaagcaagtggaagttgcatatgaggagacaaaagttattattccaagcaaaaagattactcataacgaacaaagcggtgcttgccgtgaaaatagaaagaattcttgtgtggaggaaaccaagaacgtggagtacaactatgagcagcagactgcagcagggatgaggttcagagagggagaggattctgacatgagtatctcacccccctcgagaccagttgaaccctttgatatgatagctcaccccattggctctctgacaaaagaaccttttgaccctgtgctcaatagaggggctactcatcaggacagttatgcagtaaccaaagaggaatacctgggtcaatttaagaggaaaaacgaccgtacctttactgacattgatgatagctcaaggatgaggggctccagcatcgaagaagtgaccaggccctatattgctgctccaaccagtgatccctacagcttgcggtatagaggagatggcagcttctacaggcatccgagctcagaggatttaaacactacaggcatcagtgcaggatatggacaaattggtggtgacagttacccacaagcaacaggctcgcaaacacataatactagaatgcatggtggaacaagtgatgataattacctgtcggcgagatactcccttggatattcaggttctcgctttagccaaccagcttcaactgttcccgcttttgggctctcaggtgcaagttcacaacgaggctcagtaatagacaagtattcctatgggctctcgggtcccactggaccacaggattctggtattaacagatatgctccaccggacgacggaacgagcacaagatccaagagctccttggctgaacaacagtacccgttcggacaatctggctcttccggtggcgagtggcctcatatctgatcgctggaacttgttgtcgaagtttttttttcaaggcaaaaactgtgggaagttctccacggtacttcattttcatttttagaggggattacatgttatcaaaatcatgcagcttttgacctgacctgggtgtaaattggagtaaaaccacaagcatctatccatgcggggctggtgttaaaaagcaaagttgtttcttataaaactgtctacagcagtctatccatgatttacccaaaattactgttttgtactgtagactgcattgtttgcataatgaagtttgaatatagatgaggatgggtaagagatagactaaggtagtttcatcatacatataagagttgtaatgacatataagtttgaatatagatgaggatggctatccgaggacatgccctttgcacagaaaaaaattcaggactactgccg

SEQ ID NO: 21213 - DNA, 1481 bp, Zea Mays
tatgaaaatacattccatggtgcagttagtgaaactaatttgatgttgtagtgtaggtgttgttacattatcctatggtcttggtcaagactctaagttagagaagcgacttaggacaaaaccaaagggaactgtaattaggaacgaggtattcacagtagagtactctttaatttgtaagatacatgagtatgcaaaaccttatatatgcttgatggatggagtgacaatgggatttggaattgggctatcagggcatggccgctaccgcattattacagagagaacactcctagccatgcctgaaaatggtattggcctgttcccagatgttggctttgcttacattggtgcaaaagcaccaggagggggtgcagttggagtttaccttgggattactggaaaaaggatatcatcacctgctgatgctatgttcataggccttggtactcactatgtaccttctgcaaatttgggttcactcaaggagtccctgctgagtgctaacttcaccaatgatcctcatagagacgttgagtcagttctgacaggatacaagaaagaaccagagtctgaaccacaactaaaaaagcttttgccatatatcatttcttctttcagtcctgataaatcagtggctgaatctgtggaagagctaaagaaatgtagccgaagtggtgatgctgcagtggcagaatgggccaatgaagctttagcaggaattgagaaaggcgctccattttctctttgtttaacacagaagcatttctctcaagttgcatcagcatatgggactagtgaacactatttatctaagctggctggtgttatgaaattggaatatcgcattgccttgaggtcgtcgattagaaacgattttgttgaaggtgtgcgtgctgttttagttgacaaggaccagaatccgaagtggaatccagccactctggaagaagtaaacatggccgaggtcgaatcagttttcgagccattaggggccgaggctgagttgagtgtgtgaaatatggcctgccacactcagttttcttatttgtgctgcaataataatgtatacaaaacagaaatgcgatgcccacagaaacaataaatgctgtgtcttcatgaactaactggagtggttccattttctcgaaaggggcgcgtgggaatctaaggtctgttgcttgctttcctgcctctgcctgcaatattccagccatggtaccaggtggatggccaaatactctagaagcgtttgccctgggcacttgcatgtagcttgatgtgagtagtgtaagaacaaccgggtacggaaaccgttgtctggccagcagatttcaaggcgtgtttagacaagtgtacaactgacgcgcacagatgtacggagtatatattatatgaaatatggcactaaaactcttttcccaggggctttgacgcaggcccggccgcggaaaaaagaaagaaaaaaatattacaactag

SEQ ID NO: 21214 - DNA, 148 bp, Zea Mays
gtgttgttgattgtagctcgatggtttgtgcttggagcacgagagagagagagacagtcgattttctaaaggttcggccgctttgagaggcgtaataccctacttcctagggtgggtttgtatgtgtggtgtgttacaagtggcgtct

SEQ ID NO: 21215 - DNA, 2433 bp, Zea Mays
gcagtttctagcattttttcatcagagatgagtactttgcatgggggcttcatcagatatccaaagctgtgagctttctcaataatgactgcaaacttgttcatggtaatgtatgcttggccagtgttgttgttacacaaaccctggattggaagcttcatgcttttgatgttctgtcagaatttgatgctaataatgaagcctctggtagccccatgttgcaatttgaatggttagttggaacacagtacaagccaatggagctgtcaaagtcagattgggcttcaattagaaaatcacccccatgggccattgattcttggggactagggtgtttaatttatgaactattttctggtgcaaagctggctagaacagaggaccttcgaaatactgcttcaatcccaaagtctctacttccagattaccagaggctcttgaattccacaccttctcgtagactaaatccttcaaaacttattgacaacagcgagtttttccagaacaagttagtagagaccatccagttcatggaaattcttaatttgaaagacacctttgagaaagacagtttttttcgtaaactccccaatatagctgaacagcttcctcgtgaaatagttctgaaaaagctgctccctgtattggcttcttctcttgaatttggttcagctgccgctccagccttaactgttttgttaaagatgggttcctggcttcctgctgaccaatttaatatcaaggtcttgccaactattgtcaagctttttgcctccaatgaccgagctatccgagcatgtcttttgcatcacataaatcagtttggggaatcaatgtcagctcaaattgttgacgaacaagtttttcctcatgtagccactggcttctctgatactgatggtactattcgtgaactgacattgaagtcgatgctcgtattagcaccaaaattatctcagcgtacaatctcaggatctctcttaaaatatctctctaagctacaggtggacgaagaacctggtatcaggacaaacacaacaattcttcttggcaatattgcaggctacatgaacgatgggacaaggaagagagtactgatcaatgcattcacagttcgtgcattacgtgataccttccctccggccagagcagctggaatcatggcactgagtgtcactagttcatactatgaaatgacagagattgcaactcgcatcctgcctaacattgttgtgctcacatttgacccaaatagtgatgtccgaacgaaggcttttcaggctaccgatcagttcttgcaaatagcaaaacaacaccatgaaaagattcaagggttctggtacttttcatggtttagatcacagcttaatacaggagacaacagtgtggctgaaagtactggtgttaagttaaagcctggaaatgcaggtttacttgggtgggccatgagttctgttacacaaaagggtaaaccttttgaccatgccccaatatctactgcaaatgccaataattctcaagcatcaacaacctcgactgccactccagacactcaggcttccacactagcgtatgcaccatccacatccacctcgcttgatcaagctgcatcagcatcagcaaggtcgtcagtagatgggtggggtgagcttgaggatggtaatatccatgaggagaatagtagcgataaagatggatgggatgatgtagacccatttgaggacaagccatccccatctcttctatccaacatacaggctgctcaaaaacgtccagtggtgcaaccaaagcaaccggttgcaaactcatctaaaccaaacccactgaaagcgccaaagtcagaagacgatcctttgtggggtcctatagctgctgcaccacctaaaagtgcagtaaaatctgcagacatcaagccatcaacatcacataatgatgaggatgacctctggggttcaatagcagcacctccaaaatcatctgggaagcctttgaagccagctgtagcgaatagtgacgacttatggggtgccatcgcagcacctccaccagcaaccaaagccagacccttagcctcgtcaggtaggggccgaggaacaaagccagcgcaaccaaaacttggtgctcaaagaataggaagaacatcttcaactggaatgtgacgtcttatgatatcaagtgttgtacaagaatgcaaagttttcctttttttttcccctgccttgcgttgagtctgtccaggatgacattctttgtaaactagtaaaaagatttatgtatatgagcacagttttgaccaatgtattagtattattttaccattgtgtattaaaatagatccagaagatttttgcacatcacagctgcaatcatcttaagtccatattattaatatattgctatgtcttattttggcgtgataagagcaacttaatg

SEQ ID NO: 21216 - DNA, 497 bp, Zea Mays
cgcactgtttgtttgtttgtttgtttgtctttttgctacattttactggcaatcagagaagaaattgttactgacaaaacctcttttgcctcattgcaggggatgtttcgaagcacaaggttgagcatgccctgaggaagatgtgcaaggagggcgcatattggggcactgttgctggagtttatgtgggcatggtgtacggcgtggaaagggtccgtggccgcagtgactggaagaacgcgatgatcgggggcgccttgtccggcgccctgatctccggcgccagcaacagcgacagaggcaaggtcgtcaaggacgccatcaccgccggcgcggtcgccacagccgtcgagttcatcaactgcattacctagccgagcaaggagcaactgcatttgcagtgccattgtcgtgcaaaatatgaataaagtgctgcattctctcgtctctccgccgagtgagcttcatcaggaggaagaggaacagcgaaatctttt

SEQ ID NO: 21217 - DNA, 3309 bp, Zea Mays
gacccagtgaagcggagaagccacaggacaggacggcagggaaaagctacttgagcctgagcgctgcgcagaattccgtccggcacgaggtggacgagaggagggataaggaacagaagccttcgagctcacgctgatccgcctcccgcattgccttgaagcctctcgattcgggcggacccgagctgccccgcgcggagggctcgatctgggcccagatcggccagcatttcactcccgtgcttgcaagtgcgcgtgcgcggtgaggcactgaggcatggggaaggtggaagacgagtacgagtcccatgcagccaaccggcggggtgaggtgatagattggctcgctgagttgctgccggagttcgacttgccgctggattcctcagacgaggagctgcgggagtacctcattgatggcacggcactatgttacattgcagagaaactaatgcccggcattcaggaggaaatgtggggtggtaatgcatgggatcagaggtcgaacgtgaagaagttcctctattttgttgcggagatggggctgccaggcttcagtgtcaaggatctggaggaggggtctgtgtcttctgtggtggagtgtctcttggctctaaaggataatgtgactacaggattgggtcaaaacgttacaaacaatgctgctaaaacaccccttagaaggaaacttgaacttgaatctgatgggcctataatttcagttatgacaccagggagaagacctggggaggaaagatggaaaggccactgggatcctaagtctcaacaaagaagtattcttcattctggacaaaaggtccatgatgctttccaacttaagcgaggttcctacactgatcttcctgctgccaaagtttcagagatgatgcatccaagaagtctagatagttgttaatggcattctagatgagagcattgagaggaaaagaggagaaataccacatcgtgctgtttacttgctaaggaatgttgttcaagagattgagcaccgcattgctattcaagcggatcacataagaaagcaaaatagcatcatcaagactcgggaagacaagtatcgttcaaaaattaaagcactcgagacattagtaaatggcacaaatgaagaaaatgagatgacagtagatcgacttgagctagttgaggtagaaaaatcaaaacttgatgagaaaagaaaactaggtgaacaagacatggttcggctgatgcaagaaaaggagaatgcagaaaatactattgcttcccttcagcaagaaatacaggtcttgagtaggatgcatgaacagtaccacgagagaaaggaaacagaagccaggcagatggaggaacacttggctatgagacttaaggaggctgagtttcttttaatgcaatcagaaaagaaagttgaagaaattgaatctgtttcccaactgaaatctcaactttggaccaggaaggcaaacattttccagagttttatggataatcaaaaattgtccattaaggacataaggatatcatctcagtccattaagcaggaaatgtttgcccttcaaatgaaatggatagatgaaatatctagcattggacgtgagttgaaaggcttggtagatgctgctgacaattaccataaggttcttgctgaaaatcagaagctatttaatgaggtacaggaactaaaaggcaatatcagggtttattgtcgtgtcagaccatttcttcctggtcaagatggaaaaacaaccattattgattatattggtgaaaatggtgagattctcatcacaaatcccttcaagcaagggaaggatgtgtgtcgaatgttcaagtttaataaagtgtttaatacacatgcttctcaagctgaggtattctctgatatccaacctctgatcagatcagttcttgatgggtttaatgtgtgcatttttgcctatggtcaaactggatccggaaagacttacacaatgagtgggccaggcacatcaaaagaagattggggtgttaactatcgagctttaaatgacttgttcgacatctctctaagtagaaggaatgctttctcatatgaggtgggagtgcagatggttgagatttataacgagcaagtgcgggatcttctctcaaatgatattgcacaaaaaagacttggaatttggagtacatctcagcctaatggacttgttgtccctgatgcaagtttacatccagtcaaatcaacactagatgtgctacagttgatggaaattggacaaacaaatagagcagttggatcaacagctctgaatgaaaggagcagtcgatctcacagcattctgactgtgcatgttagaggggtggatctgaagaatggatctacttccagaggatgtctacatctaattgatcttgctgggagtgaaagagttgagcgatctgaagcaattggagatagattaaaagaagcacagtatattaacaaatccctctctgctcttggtgatgtgattttttctttggcacagaaaaatgcccatgttccttatcgaaacagcaagctgactcaagttctacagagctctttaggtgggcaagcaaagacactgatgtttgttcaaattaatccggatactggatcatattcagaaacaataagcactttgaagtttgctgaaagggtttctggagttgagttaggtgctgcaagaagtaacaaagagggtaaagatataaaagagctgctagaacaggtttcatctctgaaagacacaatatcacggaaagatatggaaatcgatcaactcctgaagaacaaagccaaatctccaggttcatcaatagatagaaatgacagtcgccaacagatccggcgactatcagggactggatcaagtgaagccgaatgtgaagataacatgtctgatgatggctgctcagtagcaggaaccgagtattcagtaggtggtgcttcagaggcgacagcagaacggatgcagaaggccccatcaaggatagccaggctattccacacaaagaatggacagcctgcaaactccaaaccaaaaccaagggagtctgctctgaaaccaccaggtcgcacgacatctacaggaggaagccaggcgacaggaggatctttagtgaaaccccctaagaggcggtagagaaataaagattccatcatctaggatttgccatgttgatgggggtatgtgacgatgtcactgtaacgggttcacttgtcatcaccatgatgagcagccgactgtaggctggatgttgtatgagctggacgccatgagatcgtgcagatacatgtgcttgatc

SEQ ID NO: 21218 - DNA, 1780 bp, Zea Mays
tttgcactcacgagtcacaacgtttataaaagcaggacagtcaaccatctagcctgccccaaatcagactcgttgaattcagtttcttctacggccgcctcgagcagcgcgtgccgacttgataccctgggaaagagtccatggcgtcctctgcccccggcagaggaggaagacagctgatcctactaccggccgcggcggcggctgtggcggtaatggtactaattggggcggaaccggcgttggcgtgttacccgcgcgtgttcagcttcggggactcgctggccgataccggcaacttcagattctactacggcaacagctccggcgagcccgcactccggcaaccctacggcgagaccttctttcgccgcgccacggggcgattctccaacggccgcctcatcctcgacttcatcgcggacacgatggggctcccgttcgtgcggccgtatctgagcggtcgccgcgcggaggacttcgcgtccggcgctaacttcgcagttggcggcgccacggcgctcggcccggacttcttccgctccaggggtttcgacatcggcgacggacgtgtgcacctaggcatggagatgaagtggtttcacgatctgcttgagctcctctgccgcagcggccgctccggttgctcagacatcatgagccaatccctcttcatagtcggagaaattgggggcaatgactacaacctacctatgctctccagagtgccgattgaaaagatccgctcattcacaccaaacgtcattgccaaaatttcttcaacaatcaccgagttgattgggctaggagccaagactctggtagttcctgggaacctcccaatcgggtgcgtcccgaaatatcttctgatattcaagagtgatgacaaagaagattatgagccagagacaggttgcctcagatggatgaacgaattttcagagtaccacaacaagcttctcttggaggagctggagaagctgcgtaagactaatcctaccgtgactattatctatgctgactattatggagctgcaatggaaattttccgttcccctgaacgatttggtatcgaggaacctttggtggcttgctgcggtggagaaggaccctatggtgtgtccctttctacagcctgtggatacggagattacaaggtgtgtgacaatccagacaagtatggctcgtgggatggtttccatccatcggaagctgcatacaaagccattgcaatgggccttttgcgcgggacatacacacaaccatctattgcttccaccaccagttcctgtccacagctcactgagctcggctcttctgttgaatacaagagctgcggtactgtactgcacttctcggctgtggcccaagcgattggttgggttttgttttaccttctctttttcagtcacagtgctagaattaggaattgaaaggtggtgcttttaccatccatagaacaagaggaaccacagaattatacttgggggtcccgaaactcatcggtacctctcaatgacttcaaaatggctgattaagaggagtggatgccaattctttgatcatattggctggtacagcgtagatgctatctacttcatttccatttcttgtaaatgtaaccatcagttcttccgatgcacgtgatacttagctgagcttctgcactatcaggaagtaagcagctttttagtatttcagagtcttcttgctgtcactgtctttcccttggcaactcccttattttgtgctcaatcgcacaatgagcaatttctattca

SEQ ID NO: 21219 - DNA, 3432 bp, Zea Mays
cggcgccgtgtctcaaatcccgtgaagtgcctcgccgcgcagacaaaaaaaaaaaatccccaaatccccttgagaggcctgcaatttttagcctcctgaaccctgcgattggagccggcggtggcggcgccagcgcccgcggtcggatcgtcgcatggccgagattcgcaagtacgccatgtccaaccagcccccagatattcctcagatactactggaagctcagagtaggtggctgcggcccactgaaatctgccaaatattgtcaaactacaagaagttttccattgcgccagagccaccaaacagacctcaaagtggttcgctgtttctgtttgaccggaaaatattgagatacttccggaaggatggacacaactggagaaagaaaaaggacggaaagacagttaaagaagcacatgagaagctcaaagttggcagtgttgatgtacttcattgctattatgcccatggtgaagagaatgagaacttccaaagacgaacatattggctgcttgaagagggtttcatgaatattgttcttgttcactaccttgaaatcaagggtgccaaacaaagtttcaatcatgctaaagaagctgaagagactgcaggattatctaatgccgatagtcctgcatgctcaaactctttcgctagtcagagccaggtagcctcccgatctatggatgctgaaagcccaattagtggacagatttcggaatatgaagatgctgaaacagataattctcgagcaagctccagataccaccctttcactgagatgcagcagcctgtggatggtaccgtgatgggtaacttctttggcgcttcatctccaagtgtttctgtaaataatctagctgcaggttatcttggtgaaatgcaacctacgggagctaattttaccagtcattttgccactcgcaatgacatagctagtgtgttcaatgatactggctctgagttaggaggtggtcccaaaacttcaattgattcagtactgttgggtgaaccatttccagaatatccaggcggcttcatggagtcgacactctattcttctgttgcaacattgggtaacagtctggaagatggtttgcagacatttatgtctgaggctctctacaccaacaatctcactcaaaaggaagttgatgcacttggtgcagcaggcataacatcctcgaagacagagaatgatggttatacagatcaaagtgtcaggtatccacttttaaagcagtcatcatcagacctctttaagatggagccagatggtttgaaaaaattcgacagcttttcaaggtggatgagcaatgagcttccagaggttgttgatttggatatcaagtccagctctgatgctttctggagtactactgaaaccgtgaatgttgctgatggatctagtatacctattaatgagccattggatgtatttgtagtcagcccctcactttcccaagaccagctcttcagtattattgatgtatctccaagctgggcatacaatggcacaaaaaccaaggtcttaattactggtacattcttggcaaaaaaagaagatgtggaaaattgcagctggtcttgtatgtttggagactctgaagtctctgctgaagttttagtggatggctccctgcgttgctatacaccagtacaccattctggacgagtcccattttatgtgacatgttcaaatagagtagcttgtagtgaagtgcgagaatttgagttccgtgattctgagacccattatatggatatctcagataagcatactacaggcataaatgaaatgcatttacgtatccgccttgataagttactttccctggaaccagaagactatgaaaagtatgtcttgagtaatggaaataagtctgagctgatcaacactatcagttcattaatgcttgacaataatttgtctaatctggcattaccatctgatgagaaggaattgtgcactgtacaggatcagaatcttgagaaacaggtgaaagaaaagctatattactggcttatccataagatacatgatgatggaaaaggtccaaatgtcctaggcaaggaaggacaaggtgccattcatttagtagccgcacttggttatgattgggctatcaaaccaatagttgcggcaggagtaaatataaacttcagggatattcgtggatggactgcgcttcactgggctgcatgttgtggaagggagcggacagttggtgccctgatagcaagcggagctgcatctggtgctttaacagatccaacgcagcagtatccatctggaagaactcctgctgatttagcatcagaaaatggtcacaaaggcattgctggttttcttgcagagtctgctttgacaagtcacctctcagctcttacattaaaagagtcgccaagtggcaatgtggaagaaatatgtggattaacagcagctgaaggttttgcagcatcaagttcttcccagcttgcttgtgttaattctcaggaagagtccttaaaagattcacttggtgcagttcgtaaatcaactcaagcagcagccagaatatttcaagcttttagggtggaatcattccacagaaagaaggttattgaatatggagatgatgattgtggattgtctgatgaacgcacactttcacttgtttcccttagaaacccgaaatctggacacggtgattcacattctgctgctgttcgtattcaaaacaagttcagaggatggaaaggaagaaaagagtttatgcttatccggcagaaaattgtgaagatacaggcccatgtacgtggacatcaggtaaggaaaaactatcggaaggtagtctggtctgttggcatcgtggagaaagtcatactgaggtggaggagaaagggaaggggtctgcgaggtttccaacctgagaaacaacttgaaggtccatcatggcagatccaacctgcaaaggctgaggctgaggatgaatatgacttcttgaaggatggcaggaaacaggctacaggcaggttggatagagcactggctcgtgtgcgttccatgaatcagtatcctgaagcaagagaccagtaccgcaggctgcaagcctgtgttaacagcctacgagagtcccaggcgatgcaggacaggatgctggctgattcagctggcaccgatgggggtgatttcatgactgaattggaggagctatgccgggatgatggcgatgccccgatgtcgactatttcttgacatggagcttactatagatcagttaggcagtgacatgttctttaccagactagatgtaaattgttgttactaaatggtctctactcaccgttgaacaccataatataatgatatataccagctaatacatggacttctacagattatgataattgatcagtataatttgtggaattattatattttaaagc

SEQ ID NO: 21220 - DNA, 904 bp, Zea Mays
cctcactagtcagcccacgcctcgtggatcttactcttgcgtcgaccgaccccgagaaccttgccgccagtgagatcccagctggccaaacacagccaacctcctaaccgacctctggcagccataaaaggttgcgccgaagccctgccttcccttttccttcgccgcacaccaatagccattgcccaaatctgcgagggagagattgaagacgccgccgtgtgagagcaaggcgtctaagcgagtctcccgggttcaccgacaaattcatttcgttgaagcatcgcagtgtgccctgtggatccgtaaaagccagctcggggaccttctgaggccggtgtcaccccgctcgcggcatattgctcatcagagcaaatctacgctgtgaacctgccgcaccgagattcagctcggccttatcacaacctcaactctgacgagcaagtgaccgaggagcccggagcacagcaggttgaagatactaaacaggagctcgctgaaggtgaagagcaggtgccaccggaggaggactactacgacaagttcgatgaggtctaggtgtcgtctcccagtcagcatgatggcgccaagggatgataatattattattttgctttatttattatcagttattttttaagacatttttgttatgtaataaagttggtgacatttgtctctatacactgagtcattatatgtgttgatcttaaatctgggtttgccccttaaatctgggtgtgacagtgcgcgatggcggtggaccccgggatgcgtgcgacggcggcaccatgcgtggcggcgacgacaattccttgatccagaggcacgacggtggtagctctccgatccgaaggcatggcgataccggctctccgatctggtgctgctggtggtggtggtg

SEQ ID NO: 21221 - DNA, 157 bp, Zea Mays
acctgctcaatcctataaaatggtgcaagatggctgtcaaaataattcttctcattagcagcttcacttccagggctaacccaaagctgacaaaagaaaaggaattaaaatcacaagttgttccaaacgaaaatgtattcataactgcttgattaaa

SEQ ID NO: 21222 - DNA, 276 bp, Zea Mays
cggcgcggctcccatggccgagcagggaggaaagcgtgctggggaaaaactagagctacatagagatagacgccgagctcagcagggacccaggcgcgcacccagaagagcagagtcgcgcgcagagagcacggcggccgagcttggggaagaagacgcaggacgcgcaggaccctgacaagggcgcgcgcgcggcaccagaggcctgcggccatggagattcgagctgggactcgcggcaagacgggaggccgagcgcggtgaactgcggctgac

SEQ ID NO: 21223 - DNA, 1443 bp, Zea Mays
aaacgaactgcaaaggacaaagtgtttctgcttgcattactctctcattcatcttccaataaaaaaactgtggactgcagggataaactcaaagaggaagaaactgaagagtgctgtcatggtcactatacatatggggatttgggtgacaggtgcttcgggactataggccgatgcttgacagagaccctcgtccttgtttcgcagatagcgctctccttcatccgctcactgtcgtccctttctccgttcagtatatttgcagacgtgtgcaatgtccttgccatggcaatcgttatcaaagaggatcttcagctctttgaccaccccttttcaaacagaagcgcttttaatggactgtgggcagtaccattcaccttcggtgttgcagtcttctgtttcgaaggattcagcatgacccttgcactagaagcgtcgatggcagaccggagaaagttccgctcggtgctttcccaagcagttgccgccattatagccgtgtatgtctgttttggagtttgtgggtacttggcctatggcgaggccaccaaagacatcataacacttaatcttccgaacaattggtcgtctgctgcagttaaggttggcctatgcatcgcactggcattcaccttcccagtcatgatgcacccgatccatgagatcgtcgagacaaggttcagatccaacagatgctttcggaagctcagccacaacgatggcggcgcggagtggataggcttgcacgcaagccgcgtcctcgtggtggcggtcctcactgtggtggcgtccttcatccccttctttgggtccttcatctcgttcgtcgggagcaccatgtgcgcgcttctctcctttgtgctgccggctctcttccatctcagcattgtaggctcgtcaatacccttgtggaggcgggtgctggactacggcatccttctctttggtctggctttcgctggatatggtcttgtcactgctctctcctcgcattgaacaatggcccaaacagtcaaaaaagtgcagagatcaggatatcttgtgatgacaggagtcaaatggatgctaggagcaccatatatcagatagcacggctcggattagtgcgtgattgaactgatccgcttcaacccatatagccgcagtcatccatggaagatataccttagcggattggaatggtgatttcgagaaaccaagttgacattgttctatgcatgttacaaaaatctacagatgtcatgaactttaagagccatatcttaatcgcgtatgcatgttacacatctacatgtgtcacgtttcaaaaaaaaagtttatgttgactattcgatccgatccatcatgtatgtcacatttgaataacaaaaatccattaatgtgtatgtttgcagtgctcgcttaaagggtaactggaacgtgcctgtgtaatgccacggaaca

SEQ ID NO: 21224 - DNA, 895 bp, Zea Mays
ccggagagtgccatatcccgcgacgccgcagcatccgcttgactccactttatgcaagtgtgcctccggcgaggcctctcgctagttcggcagcacacctcccgcgtccttcccccactgtctctccaccctacccgcttcttccttcaccaatccgcgtccgacccgatgggtgagggttccgttcctggtaaggacgccaaggggaaggggaaggccaagcaccccgcccaggcttcggccctggtcgctcgcgacgactcctacctggaggccgtcacacataagaggattcgcttgttcgaggagatccaggcaaggcaggccgtcgagcggctgaatatcggcggcgaagttatcaagataactctgcctgatggtgcaatcaaagaagggaagaaatggataacaaccccaatggatattgctaaggagatatcaagtggatttgcagctagttgtttgatagctcaagtggacgaaacactctgggatatggggaggccactggaaggtgactgcaaattgcaaatgttcaagtttgataccaatgaaggccgtgacaccttctggcactcaagtgctcatattcttggagaagaaaagcaaccatttgaacgcatcgaggtcagcagggcagaagctcttgaaatgtttgctgaaaataaattcaaggttgaaattattaatgagttgcccgaggacaagaccattacagtatacaggtgtggtcctttagttgacctatgccgtgggccacatatcccgaatacttccttcgtcaaagctttcgcttgtctgaaggcttcatcatcatattggagaggaaaagcagaccgtgaaagcctgcagagagtatatgggaatatctttccctgattctcgacgtctcacg

SEQ ID NO: 21225 - DNA, 558 bp, Zea Mays
ataagtagtacatatgttggactaaaggccccaagagtaacagagcgttaggtcccactttagggcgccagtctataaaaaacggcggtctgccctaaagccctctctcccaaagccatcttccttccgcggactagttttttctgaagattcggcgatggcggcgacgatccaatccgtgaaggcgcgccagatctttgacagccgcggcaaccctacagtcgaggtcgacgtgttttgctcagatggaacctttgcaagggcagctgttcccagtggagcatcaactggtgtatatgaagctctggagttgagattccgtgcacctgtggagccctactaaacgggcgggatgcaagtgcttttatgtctgcacaagtcctgtgaaactgtttactgcgacctgcagattttactcttggagtgccctgagtagattttagcaataatatccaacatgtaacatgttacggacatgtacccaaacgtgatccagttttagttaatgtgctccatgcttgacgtttttaaaaaataagaatcccttagaaaaataaa

SEQ ID NO: 21226 - DNA, 763 bp, Zea Mays
gggactgcaatgcatgctcgagtatctcagccaaacctacaacaacatccccgtctacgtgcaggaaaacggctacggggcgctcttcaacgactccatccatgaccacgagagagccgagtacttgagtgcctacatgggcagcgcactcgctgcactcaggaacggagccaacgtgaaggggtacttcgtctggtcgttcctggacgtgtttgagctgctggcgggctactactcgcgatacggcctctaccatgtcgattttcaggacccggagctgccgaggacgccaaaactctctgcgctgtggtacagcaagttcttgaagaatgaaatcgacataatagagaacgttgtcagcgatactgacgatgcgcgctcgcatgctgctgaacaatgagttagtttgctagcaagcagcaggcagcagcacacgacatatcacatatgcatgtcgtagtagcggaggaaaagaatgtttcttatccattctttttttttcacaagtccacagaagctcagaattttcagcagttggtcaggcccggaattcagtgttcgtgaatcgtagccataggcaccctctttggctgtagccctgtagtatgcgctacgtacggcaacagttgtcatgagtcactctgtcgctactgacacaataagtaatacagaaaggaactattactcttgcagttgcacgtcgacgttttggatttcttaactaatttgcctatgagtgtggtgccggcatccaccatttttc

SEQ ID NO: 21227 - DNA, 2143 bp, Zea Mays
gaaatacttgagttgacgcttggatatgttgccactcttcaggaaataagacatctgtgttcctatctccaagacctaaagaaggcttcagctgaagagatgcgtagaagtgtttacgcaaattatgctgcatttatcagaacatctaaggagatatcagaccttgaaggggaactactgtcaattagaaatctgcttaatacacaggcagctttaattcatggtctatctgaaggagttcagatagattcattgacttcaggccctgaaggttctgcagaagacgacatatccaatgttgaagatcaggagccttcagaaatacagaaatggtctgcagatttccctgatatgcttgatgttttgctagctgagcgaagagtggatgaagcactggatgcactggatgaagcagaacgggttgctgttgatgcaaaacgaaaacagactctaactgcagctgaagttttggctttgaaaagatcaatctctgataatcgtcagaggctggcagatcagcttgctgaagctgcttgtcagtcttccactcgtggtattgagcttcgagctgcggcttctgccctcaaaagacttggtgatggcccccgagctcacagcctcttactcagtgcacataatcaaaggcttcaatgcaatatgcaaactatacatccatctagcacttcatacggtggggcatacactgcagcacttgctcaacaagttttttcagtcatagctcaggcactaagtgactctgtggatgtgtttggtgacgagtcatgctacgcgtctgaactagtaacgtgggctaccaagcaggttatgtcctttgcactcctggtaaagaggcatgtgttgtcctcttgtgcagctgctggaggcttgagggcagctgcagaatgtgttcagatatcacttggccattgttctttgctggaagctcgtggtctgtctgtttcatctgtcctcctcaaacaattcaagcccagtctagagcaagcgttagatgctaacttgaggagaattgaggagagtactgctgcactagcagcagctgataactggatactcacatatcccccaactggtattcgtccattaactagattgtctgctgctaatttggcacttcagcctaagctctctagcagcggacaccgtttcaattcaatggttcaggatttctttgaggacgttgcaccactacttagcttgcaattaggtggttcaacaatggatgggatcacacaaattttcaattcatatgtaaacttgcttataaatgctttacctggttccatggatgatgaagctaacttagatggtttaggtaataagattgttagaatggcagagactgaagagcagcagttagctttattagctaatgcatctttactagctgaggagttgctacctagagcagctatgaagttatcatcaataaaccagtctatggatgatttgtgtaaaagaggaacagataaacaaagccgtgtacctgagcaacgtgaatggaaaagaaaactacatcgaatggtggacaggttgagagatagtttttgcaggcagcatgctcttgaacttatatttacagatgaaggtgatactcatctcagcgcagaaatgtatatcagcatggacaatactgttgaagaaccagagtgggttccatctccaattttccaggaactgtatgcaaagttaaacaggatggcaagcattgctgcagaaatgtttgttggtagagaaagatttgctactttactaatgatgcgcctcactgagacagtcatactgtggctctcagaggaccaggccttttgggaagagattgaacagggggctaagcctttaggccccctaggtctacaacagttctacctggacatgcaatttgtcatcatatttgggcaaggtcgttttctctctagacatgtacatcaagtcattttggacgtcattgatagagcaatggctgcattttctgctactggaatgaaccctgatagcctgctgccctctgtagcctacagtaattgcaactggcagccagtagtaacctaaacaaattgccctactgggatggttttgacttttgagaaaaaatggctattagagaatcccttgatgaattatt

SEQ ID NO: 21228 - DNA, 1667 bp, Zea Mays
agatgtaataagagatagaatgtgtaccattggatcagaaagaaaggaaggcccgctcgtagggagctcgcacctattgttgtttccaatcatatctcgtacatagaacccatattcttcttctatgaattgttcccaaccattgtttcgtcagagtctcatgatgccctaccatttgttggaacaattattcgagcgatgcaggttatatatgttgacagattctcaccagcttctcggaaggctgctgtaaatgaaataaagagaaaggcagcttgcaatagcttcccgcgggtcctgttattccctgaaggtaccacaacaaatgggagattcctgatttcgttccaacatggtgcattcatacctggctaccctgttcaacctgttgttgtccgttatccacatgtgcactttgatcaatcatgggggaatatatcgttattaaagctcatgtttaagatgttcacccaatttcataatttcatggaggtagagtaccttcctgttgtctaccctcctgagatcaagcaagagaatgcccttcattttgcggaggataccagctatgctatggcacgtgccctcaatgtcttgccaacttcctattcatatggtgattctatgattatggcacgggcaatagaagctggaaaggtgaatggctcaaattacatggtagaaatggcttgggtaaaagatatttatggtgtgagcacagcagaagcaatggacctattggaacatttcctggcaatgaatccagataacgatggacgtgtgaaagcacaagatttttgggctcattttggtctggattgcagtcctctgtgtaagaagatatttcactactttgatttaggcattaaggaatcgattacgttccgtcagttcttggttgggtgcgcgcacctgaggaagcaaccgttgttccagggtgcctgtgagaccgcctttgagaagtgccgggatcctgaaacatctgagatctccagggcacagctagccgatgtcctgcggttaagcatgctgctgccgtctggtgatagaatgctggacctgttcaagacgtttgacatagatggcgacgaaaagatcagcaaggacgacttcatgacgtgtcttgggaggttcccgttcctgattgcgttctttgcagccccgatcaatggggaagtgtacatcgagatagtctgaaggcaaggcgatgccgtgtaagagtaaccaggcgcagttcaaagatgaactagcaggcgacaaatatttgagaagggagttagtattatattgtcattacggaatctgctgtgagatacgcgctggactgatagattgtcgatggaactgagaatgcacatagaaagcatttctaatgtactcctgtaagaaaacttttttggacaaacaatgaccctgtaacctcaagttgtgtttattcttgctagatggattacataacaaagcccaacgtaggtatatccagatacataaccttttgaacattgtaacctcatgttcggcgagttgaacatttgtttagaccatttagatgtaatgtatatttagatacataacaaagcgcagcaaatattcagacgcaactttttagaaacaattttgttatgttccaagaatagcctaaacaacttgcacatagaacggatggg

SEQ ID NO: 21229 - DNA, 455 bp, Zea Mays
ctcaccagcaggagccttgaaacgaccgttcttgccttcgcctttgcctcgtcagtcttcccacctccagagatttaaaggcgaagaccgcaaggcgggtagagcaaagattggtcaaaaaatcaagatgcttgttcacctaaatcccccttccgcctaccgcaaggcgaccgcctctctgggacggaaagggtagcgggagctagaggccgccaacaaatgcgacagtggattcggggctcgtgcaccagtcggattggggaatggaatgggcgggtggcgggggtaggtgctaggtcggggctcggaaagggggatttatgacgcgacgtggacggagacggagaggcaggccgcaggcgacagctccagagtcacaactcggcaactcgcaggagaagggaagaaggaagaggaaacggtgaggatttttatctgatcctttcttttgactt

SEQ ID NO: 21230 - DNA, 1634 bp, Zea Mays
caccccggggggcggggcacgcaagaacgaaccaaaccaacccacacccacggcaccaacaccacccgaagctgattgacgctgagcgcagccaaatccagccagcgataggaatatcgccaagaattctaccgtctgcgtctgcccgtcttcctctctctctctctctcctctccctcattctggatccaccgccgcagccttagctgggtccgtcgctgtcgctccgcctcccgctcgcttgccgggcccgacacgcccgccaccgcctccgctttgtctctccggcgatccgacgccccacccggcgtctgtgcagagcagtcgtgaggagttctctgttgtgggctgcccggcgatggaccggggcgagcgtctcggccgcgcgctggacgccttcgggggcaacctgtgggcgctggttgacgcagcgctggacgcggccgctcgcgaccgccccgacgagcttcgcgcgcgccgcgatagcatcgtcgagcgcctctacgctgccgccgcgggctgtagcaactgcgccgggcgtccgccgtctgttgccgctttagcggccgcggggctggaggaagaggacggcgaggaggcggctccggcttctccgtgggcggaggctgacgcgcaagccggtggcgcggaggcacagaccgagcccgagaacgagctggtgagcttgctgcagaacctggcagacatggatgttacctacaacgcactccaggagactgacatcgggcggcaggttaatggtctgcgcaagcatccttcggccgaggtcaggcggctggtgaagcagctcatcaggaagtggaaggagatagtggacgactgggtgcgcctggacaattccggcggtgacggcagtgcctctgttatgacagctgatggtgactccccacataaaatccaaggcagaagccaccaaagccctcgggtttcggggtttcagtattctccaagcccacagaggtttaatggttcaacttcagagatggctaacaatgggtttgagtcaacaatggatgcgaagcgtagggccagccctgtaccagcacatcataactccaggcagatgaacaacaatcatcattctactactattaccaccagcacgtcatctgctccagctaaagtgacaagggagcaaaagcagagtcttgtggaccttgacaggcttgattctgccaggaagaggctccaggagaattaccaagaagcacaaaatgccaaaaagcagaggacaatccaagtgatggacatcaatgacataccaaagccgaagagcagaaacgctttcatccgcaagagcggcagcggtgggctcccggcgaggcaccgatagcctaacctccttcgtcggctggatatctgcgacacttgcgaagttgtgccctagaaccgcaacgggaaagaaaaagaagcaaacggtttcttgttctttttttccctgtaccttgactgcctaggtttacctccagtgtaatattgtcaggtacataagggtgaaatgatatgatgtttctcgaggaaaaagaaagaaattagtcactgtttttgctatggtttggttgctgttattgctgttggtcagtgctggatataatatgcataaaatgtgtgca

SEQ ID NO: 21231 - DNA, 1635 bp, Zea Mays
cgagaggctcctcgtcccactttgcattgcacccccgcaagctctcttcccagctcaactcaaatgcaagcaaagatcgagcagaaacggcagcggctgctgggcatcgcgcccgatctgccgctgcacaagctccagctcgtcgtcgccccgaccgcggcctcgcttccggcgctcgccgtggtcgccctcctcctcctcctcgccacggcgcgacgcccgtgctccttcctcgacgcgtaccgctccggcgtcgtctccctgccttccccgtccagaacctcgccgccccacctcgggcgctctgcggccgccgccagggtgccgagcgggtgcgacatcttccgcccgggccagtgggtccccgacgacgacgcgccgtactacaccaacctcacctgcccgctcatccaggagcaccagaactgcatgaagtacggccgccccgaccgcggattccttcgctggcggtggcgccccgatggctgcgacctgccccgcttcgacgccgccgccttcctggacgccgtccgggacacgtcgctggcgttcgtcggggactcgctcgccaggaaccacatgcagtccctcatgtgcctcctgtccaagacgtctcgacgacgacgaacccagagttccggacgatgcgctacgaggcgtacaacttcaccatggccatcttctggtcgccgttcctggtccgggggcaccagccggacccgcggcgccacatgtgggacatctacctggacgagccggacgcggcgtggcgcgacgccgtctcgggcttcgaccgcgtggtcctgtcggcggcgacctggttcacccggccggccatgttctacgaggccggcggggggcgcgtccgcgtcgtggggtgccactactgcctggtcccgggcgtccccgaccggacgctgcgctactcgctgcgcatggcgctccgctccgcgctccgcgtgctcacggggccccggttcaacgggacggtgatcctgcggacgctgtcgccgacgtcgcacttcgagggcggggagtgggaccgcggcggggactgccggcggacgcggccgttcgcggccaacgagacgcgggtggcggggctggacctcgacctccacgcggtgcaggtggaggagttctccagggccagggccgaggcggaggcgtctggcggggggacgaggctggcgctcatggacaccacggcggccatggtgcttcggccggacggccacccgagccggtacgggcactggccgcacgagaacgtgacgctgtacaacgactgcgtgcactggtgcctccccggccccatcgacgcctggaacgacatgctgctccagatgctcctcgcggacccatcttgatgtccgtgtgtttcttccgctagctccaatttgtcccaggaaaacaaactaatttgagcgcgcaaatttacaaaactagaccggaactaactgagctgagcgtgcacgaatccagcggccacagctgggtaaaatgccgtgccactatggcaatttgtatcagcttgatctacagaacaattggccgagcaatctccttcgtcggcctatacttgtttgtctgcgttttggcctgggttaattgagctactgatctgaaccgttt

SEQ ID NO: 21232 - DNA, 1630 bp, Zea Mays
tgtgggaacatccactctgcagtctgcatctctaccgaaacaagaatcctcaacagctacatccaagagctatactttcagagaaggtgatagggtgcgttacgttggtccagctcagctatcctcattgtcacaaaggggaccaagttatggttatcgaggcagagtgatgcttgcttttgaagataatggatcctcaaaaattggagtccgatttgacaagcagatccctgatggtaatgatcttggtggtttgtgcgaggaagatcatggcttcttctgctctgctgaatcacttcgcccagacttttctgctggtgaagaagttgagaggctagctatgaccgagttaatagaggtcatttcagaagagaacaaatctggacctctgattgtgttacttaaggatgtagagaaatcattcactggagttaccgagtcactttcatctttgcggagcaaatttgaatcgcttccatctggtgttcttattataggatcccacactcagatggacagccgcaaagaaaaggcgcatcctggaggttttcttttcacaaagtttgccagtagcagccagacactttttgaccttttcccggatagctttggtagcaggtggttgcatgaaagaagcaaagaaagtccaaaggcaatgaaacatctgaataagcttttcccaaacaagatttcgattcagcttccgcaggatgaagctctacttacagattggaagcagcagttggatcgtgatgttgaaacccttaaagccaaatcaaacattggtagcattcgcacgtttctgagtcgcaatggaattgaatgcaatgatattgaagaattattcatcaaagaccaatcactgagtaatgaaaatgtggacaagattgttggatacgcagtgagttatcaccttaagcacaataaaattgaaacctccaactcgaaggataataaacttgtactcacaagtgaaagccttaagcatgggctcaacatgctgcaaagcatgcaaagtgataacaagagctcgaaaaaatcactgaaggatgttgtcacagagaatgaatttgagaaaaggcttttggtggatgttataccacctaatgacattggagttacctttgatgatattggagccttggagaatgtaaaggacacattaaaggagctggtgatgctccctttacaaagacctgaattgttctgcaaagggcagctaacaaagccttgcaagggaatattgcttttcggacctcctggcactgggaaaactatgcttgccaaagcagtagcaactgaagcaggtgctaatttcatcaatatatcaatgtcgagcattacgtcgaagtggtttggtgaaggggagaagtatgtaaaggctgttttctcactagcaagtaaaatagcccccagtgttatatttatcgatgaggtcgatagtatgctaggaaggagagaaaatccaggggagcatgaagcgatgcgcaagatgaagaatgaatttatggtaaattgggatggactgcgcactaaagataaggagcgtgtgcttgttcttggtgctacaaatagaccttttgacctggacgaggctgtgattaggaggttcccccgcaggagaactgcg

SEQ ID NO: 21233 - DNA, 328 bp, Zea Mays
caaagtcccacaaatctgagccttctcgtgtcttccttcgtgcgtgcttcgagtccaccgcatcacggcttgggattgctctgcctgtaaggcgagattgcgagaagatggggcagacaaggaaggaggtcgtattggcgctggactctaggttcacaagcatgatgacggaccaaagaagctcgagaactccatgctgcattgctatctcaaccaagaggacttggtggaggaaggaaaggaggaagagaagaaggagaaactgagtaacatgtttgtcctgattaccgtaaaaaacagatattgaagggttggaatcaacctaaag

SEQ ID NO: 21234 - DNA, 3233 bp, Zea Mays
cccatcccctcgcgatttccacctcctcccccacccccacctccgtaacccacttccaggtgggccccccacatcgccgccggtgacacgcacctccctccctgcctcccccgctaccgaccaccacgtccacgcccccggtcatgacgacctcgccgccgcccgccgagcaggaacagcaggaggaagaggaggtgctggtgccgcatggcccgcaccaggagctgcccaatggagcgcagccaatggaagttgtgcctgctgagccagctgctaccgtggagaaccaacagatagaggatccaccaatctcgagatttacttggaccattgagaatttatcaagagttagcacaaagaagctctactctgaaatttttgttgttggaggctacaagtggcgaattttgattttccctcgggggaataatgttgaattcttatctatgtatttggatgtagctgattctggagtcttgccctatggatggactagatacgcacaattcagcctctctgtggttaatcagattcacaacaagttcacaataagaaaagaaacacaacatcagttctctgctcgagaaagtgattggggtttcacttcatttatgccgctgggtgaactctacaacccaagtaggggttatcttgtaaatgatacttgtatagtggaagctgaagttgctgtgtgtaaagttgttgagtattggagttatgactctaaaaaggaaactggctatgttggtcttaaaaatcagggtgctacctgctatatgaattctcttcttcagacactctaccacattccgtatttcagaaaggctgtttatcacatgcccaccaccgagaacgatatgccctcaggaagcatcccactagctctacagtcactcttttataagttgcagtataatgacagcagtgtctctacaaaggagctcacaaaatcgtttgggtgggatatgcatgattcatttatgcaacatgatgtacaagaattgaacagagttctttccgagaagttggaagataagatgaagggaactgttgtggagggaacgatacaacaattgtttgaagggcaccacatgaactacattgagtgtatcaatgtggatttcaaatcaacaagaaaggaatccttctatgatctccagcttgatgtcaaaggttgtcaggatgtctatgcttcatttgataagtacgtagaagtggagcgtctggaaggtgacaacaagtatcatgccgacaaacatggcctgcaggatgcaaaaaaaggagttctttttatcgacttccctcctgttttgcaacttcagctaaaacgttttgagtatgatttcatgcgtgacacgatggtgaagataaacgatcgttatgaatttccactccaattggatcttgatagagataatggaaaatatttatctcctgatgctgacaggaatgtgcgtaatctttatacccttcacagtgttcttgtccatagtggtggtgttcatggtggacattactatgctttcatacgacctacactttctgatcaatggttcaagtttgatgatgagcgtgtgacaaaagaagatgcaaagagggcactagaagagcaatatggtggtgaggaggagctacctcagacaaatcctggcttaaacaacaccccattcaagtttactaaatattcaaatgcatacatgcttgtgtacattcgtgaaagtgacaaggacaaaattatatgtaatgtggatgagaaagatatagcggagcatcttcggattagattagaaaatgaccgtgaagagaaggaacgtcggaagaaggaaaaagcggaggcacacctctatactataatcaaggttgcaagggatgatgacttaaaagctcagatagggaaagacatatattttgatcttgttgatcatgataaagtcccaagcttccgtatccagaaacagatgacctttgctcaattcaaggaggaggtagcaaaagagtttggtattcctacacagtttcaacgattttggctgtgggccaagcgacaaaaccatacctaccgacctaacaggccattgtgtcctcaagacgaagcacatactgttgggcagctaaaggaactggtgaacaaggcccacaacgcagaactgaaactgttcttggaagttgaacttggactggaccttaaacctcttcctcttcccgacaagactagagaagatatatttcttttcttcaaactctatgaacctgaaaaggaacagctgcggtatgttggtaggctttttgtaaaggcttcaggaagaccacaggacattctgctgaagttaaggatgttggcaggtttttcacaggatgatgatattgaactttatgaggaaattaagttcgagcccaatgtgatgtgtgaatacattgacaacaggcttctgtttcgatcttgccagcttgaagacggggatataatttgttttcaaaagccttcaaaaccagatagtgcagaccgatatcgatttcctgacgtcccatcctttttgacgtatatacgtaaccggcaggtggtgcacttccgttcattggagaagcccaaggacgacgaattttgccttgagatgtcaaagattttcacatatgatcaagtcgtggaaaaagtagctgaaaaacttggcgtggatgacccatcgaaaattcgtcttacatcacataattgttattcgcaacagcctaagcctcaaccaataaagtacagaggcgttgaacgtctactggatatgctgattcattataaccagacttctgatattctgtactatgaagtattggacataccacttccagaattacaagcgctgaagacattaaaagttacctaccatcatgccacaaaagatgaggtgtcagttcacagtataagattaccaaaaaacagcactgttggcgatgtgctgaatgatatcaaaacgaaggttgagttgtctcataccaatgctgagctaagattacttgaggtcttttatcacaagatatacaaggtatttgcaccaaatgaaaagattgaaaacatcaatgatcagtactggacactgcgtgcagaggaggttccagaggaggagaaaaatcttggccccttcgatcgtttgattcatgtatatcattttacaaaagacactcaaaaccaaacgtggtgtgccttcaaatatcctttcggagatggtctcaatactctcattgcc

SEQ ID NO: 21235 - DNA, 1868 bp, Zea Mays
agatgtcaattagtacgtggtatgccatgcatcgttgagtagtagttgcgctgctgtttaaaacgccataaaacagagcgggctgccgcccgcgcgacacgctccgcttccctcccactccctcaccatccctgccctgctctgctttgcttgcctaacgggtcggaggcggggacggccccaccgccccgagctctcaaccgccgatggacgccgccgggccgccatcggcagccagtggctccggctccaactccaagacctccctcctcggcatgccggttcccatcgcgatggccgccgccgcggcactcgtcgtcctgctcgtcctctccgcggttgtcgccgctgttctactcgcgcgcaggcggggcgccaggccgccctcgctgtcgcgcgtcgagcacgcgccgtcctccgcctccgcctccgcctccggctcctcccgcgccgcgtcgtccgcgcgcagggagaaggtcggcgcggaccaggtcgccggggcgggcgccacctcctcttctggcgttgccagctcctccgcggccgcgagctcgctcgagtcgccggtgaagaggaaggcggaagcggtcagggccgcggcgggcgtggacatggagatggagatggggtgggggaggtggtacgacctcacggagctggacgtcgccacgggcgggttctgcccagagaacgtggtcggggagggaggctacggcaccgtgtaccgcggcatccttgccggcggcgaggtcgtcgcggtcaaggacttgtttgatcacaagggtcaggccgagaaggaattcaaggtggaggttgaagccatcggcaaagtgaggcacaagcaccttgtcggtctcatcgggtactgcgcagaaggccctaaacggatgctcctttacgagttcgtcgaaaacgggaacctggagcagtggctgcacggcgacgtcggtccggtcagccctttgacctgggaaatacggatgaagatcgccgtcggaacggccaaaggcatagcgtacctgcacgaaggcctggaaccgaaggtggtgcaccgcgacatcaagtcgagcaacatcctgctggacaagaagtggagccccagggtgtcggacttcggcatggccaaggtgctggggtccgggtccagctacgtgacgacccgcgtgatgggcacgttcgggtacgtggcccccgagtacgcgtccacgggcatgctgaacgagagcagcgacatctacagcttcggcgtgctgctcatggagctcatctccgggcgcagccccgtggactacaaccgccccgccggcgaggtcaacctggtggagtggttcaggggcatggtgggcagccggcgcgtggaggacctggtggacccgcgcatcgccgcgccgccgccgccgcgggtgctcaaccgggtgctgctcgtctgcctccgctgcatcgacgccgacgcgcacaagcggcccaagatggggcagatcgtgcacatgctcgagggcgacgagttccccttccgcacggagcaccgctcgccgagggcgtctcaccggacgtcgatggccacgcggccgtcgcttctgtcggagaacgtaggtgccactgacgactcagacaagtccatgtggagatgaaggatctaaccctgcacgaacacacctggcgcggcatgcgaggagccggagctggggcttgggggatggactgactttttctcaactggtgtaattttttgttgttgatccacggcgggatgagcgttctaatttgctatgctgctcgtttggtttgatggtgtttaccgtaatgtatgatttggcacagacgcacagatcttcttttttgttacataaaaatcaaaagataaaacg

SEQ ID NO: 21236 - DNA, 1532 bp, Zea Mays
cccggcggcacgggtgactcgttcgcggtctgttttgtttaagggtcacggcaatgatccttccgcaggttcacctacggaaaccttgttacgacttctccttcctctaaatgataaggttcaatggacttctcgcgacgtcgggggcggcgaaccgcccccgtcgccgcgatccgaacacttcaccggaccattcaatcggtaggagcgacgggcggtgtgtacaaagggcagggacgtagtcaacgcgagctgatgactcgcgcttactaggcattcctcgttgaagaccaacaattgcaatgatctatccccatcacgatgaaatttcccaagattacccgggcctgtcggccaaggctatatactcgttggatacatcagtgtagcgcgcgtgcggcccagaacatctaagggcatcacagacctgttattgcctcaaacttccgtggcctacacggccatagtccctctaagaagctaactacggagggatggctccgcatagctagttagcaggctgaggtctcgttcgctaacggaattaaccagacaaatcgctgctgcaactatgaacggccatgcacccaccacccatagaatcaaagaaaagagttctcagtctgtcaatccttgctatgtctggacctggtaagtttccccgggttgagtcaaattaagccgcaggctccacgcctggtggtgcccttccgtcaattcctttaagtttcagccttgcgaccatactccccccggaacccaaagactttgatttctcataaggtgccagcggggtcctattagtaacacccgctgatccctggtcggcatcgtttatggttgagactaggacggtatctgatcgtcttcgagcccccaactttcgttcttgattaatgaaaacatccttggcaaatgctttcgcagttgttcgtctttcataaatccaagaatttcacctctgactatgaaatacgaatgcccccgactgtccctattaatcattactccgatcccgaaggccaacacaataggaccggaatcctatgatgttatcccatgctaatgtatccagagcgatggcttgctttgagcactctaatttcttcaaagtaacggcgccggaggcacgacccggccagttaaggccaggagcgcatcgccggcagaagggtcgagccggtcggttctcgccgtgaggcggaccggccggcccggcccaaggtccaactacgagctttttaactgcaacaacttaaatatacgctattggagctggaattaccgcggctgctggcaccagacttgccctccaatggatcctcgttaagggatttagattgtactcattccaattaccagacactaacgcgcccggtattgttatttattgtcactacctccccgtgtcaggctttgggtaatttgcgcgcctgctgccttccttggatgtggtagccgtttctcaggctccctctccggaatcgaaccctatttctccgtcacccgtcaccaccatggtagagccccta

SEQ ID NO: 21237 - DNA, 2791 bp, Zea Mays
cggaaaagaggcagcaccgcagaagccgcgtccgattcgttcacgcaaccacgcgttcgtgggccgcctctctctcataaaatccaccgccctcgtcgccaaaatccccccaatcccaccgccagtctccgcccgcgcctcagaagtcagaaccctagccccggcgacgccttcagatccggcgcccttatccggcggaatcgctcgctcctaccaccggttgccgcgtcccggcatctcggctacccggcgtcctgtacccgacttctacgccctcgatctcccccagccgtcgtcacgaggaatcgtttgctccacaggctacgtctccaccaagcctgcatcgacgactcgaaggatccgtgccgtcgtcgatcgccgatcgcctcttcgtagatcgaatctgttcagtgttctgctattcgttgtatttcatctgagatctgaaaaaagtattcgggccatctcgagatagagaggccttcataggcggagaaaaagaaacaggactcgccatccatcatgggtgttgtctattaccaatataagagtgaaaaggaaatctgttctatgcccgtgccccatgcttttatttctgtgtctgaactcaagcagcttatcatgacgagcggtaggcacggccgtggtcgaacccgcggtcgtgccacagaggatattgtcatctccaacgcccaaactggcgaagatgaaagagcatccataccacagaacacaactgtgttggtccgcagaatttccattcctgggcaactgtcagagaagattgttttgtcccctaggccggaagtcacagaagaatgttctgtaccttgcaagtcggtggttactgactcaagctcaaagtcatgttcttccacagtagtgcaagatgaagatgctgtaattgcagcagtaattgatgctgctgaactcaaatgggaacagctcccctctaaaagaggacaagacagtggaaggtttacatcaagacgtaactatgggccgttggaaggggaaacacctccacccggctatgtctgccgctcttgtggtgttccaggccatttcattcaacactgctcacaggaaaacaagatgcctccacctggatacatttgctacagatgccgaattccagggcattttatccaccattgtccaagcattggcgatcccaagttcgacaacaataaaatgagtcggtctcttgtcccagtagttacacctgtcgatggcattttggattcacttgtcccgtctgccccagccggggctgttgatgacttgccagcagagctccactgccgactatgtaaaaaagtgatgagagatgcagtattgacaagcaagtgctgttttgacagtttttgtgatagatgcattcgggattatattattaaagagtcgaagtgcatttgtggagtggagacactagcagatgacctcattccaaatcaaacacttcggagcacaatcagcaatatgttgggaacacagacaagcagtggtggtagtggtacaacaagacacagaagttcgtcaggcagcaaccctaacccaaaaatacagagccacactgcttctgttgcgtcagcaagggaggtgaagcagtctatagaccatcagctaccagcggtatctgcacctgattatgtgctccaggttgccacagaaggtgacctggtgaaccagcctctagagaaattagcagccactgctgaaatccttagcaaatatgaaggcaattctgcagaagtgtcagtagagaaggcggtagcaaatgctgaagccctcaaagtgaaggatggaagtgaaacgacttcgaatgccaccactgtttcagggtcccgagaacatgatgtcacaaggacagatcaagcaaagaagaagcggaagaaggcagacttaaccaagaacgttcagcctaacaatgttggctatggttacaatgtttcttttgaccctgcatattacaatcccttcatcaatggacatccttgggcaactgaaccctacatgtatagctcaatggggatgccgtacgctggttatccgatggatccatattgtgcaaatccaatggatccatattgtgagtatccaatggatccatattgtgtgaatccaatgcaaggctatccagcaagctaccaaaggcctgaaactgagcccatgcgtcgtgggagcactgcggctgccagagcacctttaaagcaccgtgagaggagtgaccggcaccggcccaaggacactcgtcttcagccccaatcaacagagcacaagcgacggctggtctcctctcatggaacaaggaagcggatgcccgttttctcccggagtagtatgatggtagacaaatcggtggagatcgagacggttccaggagtatgatgactcgtgagtcgtgaagaggacgcaagctacgaggaacgtaatttcaagacgagatggggtcatagatcatcaggaggcgtggacacaaggcactgtcctaaacttggcagaccaagtgcagcaatatattgctggtcaccagtgctcacctattgatcttcttatactcgtaattgtatgtatgcccctgaaagcagaagaaagattgtcacaaagcagagggaactttcggttccctagcgaaatgtattgatattaaacattttttttgtattaatgctaagagtgttgccagctctctctataatgcgaactctccaaataatttcgctatgtttccgagctctcaaattatttggtctcccttctaccctgtgagaaccgtgttgtcgttgat

SEQ ID NO: 21238 - DNA, 1485 bp, Zea Mays
tcttaggcactaactcctcacatgcaaaaacgagtagaaggatcatcaactccaaaggctggtagagtgctatgtcctactttgggtgatcagcagtagggcaccttttctgttaacctgtggaaggctgcgtttcacgacgcattcaacagaatgtgccccctcagtgctggcggacatgagtgtggctgtttaccaatattagcaaaactggtgatggagcagtgtgtagcccgtttgaatgttgccatgtttaatgccatccttcgtgaatcatcaagtgagataccaacagactctatatctgacccaattgttgacccaaaagtcctaccaattccagttggtgatctaagctttgggtcaggcgcgcagctgaagaactctattggaaacgggtctagatggctgacagataatcttggcatagatcatgatgactttgaggacataggagatgttgaagacgaaagaagagttgcagctgaaacgaaatcgtttcaacttctcaatgagctaagtgatcatctattttttagtttttcataattttcctttcatggcctccttacatgtttgatttcctatgatccatgagctgccaatcatgataacgcggtttcactatgcaggagatgaacaaggatgcagtcacaactgatgctatcggcagtatcagaacttgatggtgcttgtagactgttcatggtgcttgtagggatgatgtgtgaacaactttgctcagcagaatggaggatcattgtcactagcagcaagacctcgagcccaggcagttaaccatcagtttctttccttctttctttgggccgagagagcaaagaaggatgatgcactttccaacctgtgtagcacgttgggacaactcaagaaatggcagtggatatggacatagaaattgacaggcaaaacaaagcgctggttcctttcagcgacgacatcactgaactgaattttagactgaaaggcgtgaatcagtgtggacaccagttgctgggcaagtgatatggagccagaattcgggcagttcggagactatcgccttgattgcagaatttaagaacattgttgttttacatgtttttttgcagtgaatcaggccacacatgttgtattagtgagagaatgatgatttattttatattattatggatttcatagattattttagttttccctgaactgcaattgtttcaataacataggaggggactaccttcaatgacatttaggtgaatttttaaggtatgtccattattccattatagagcacaaagcctacttcttacaactcactgtatgttttataattgtatcaaaagcactgaacaaacatagttagctatcacgttcactgttgtctaaatagattgaaataatgtggtgaagccgtcatggactcttaagtagcttagccactgcaaaggatacaattaattataaaacaccaatgaatcaataaaaaaa

SEQ ID NO: 21239 - DNA, 1390 bp, Zea Mays
atcaatgtgggcagcctaaaccctatcttccgtcacccgcacagccgccgaggtggcttccatctcgctcgtgcgtcgatctcactgagcccccgccgttcttctctccacttcctgcgttctccagccgccgtcttcgctgataggctacgccgcctgctggcctgcgcgcgccgcagcctaaccctgtgtgcaccctgttcctaaccctgcgtgtggccgccgccgactggcttgcgtgcgcccgcgcctccgcctaaccctgctagcttgcgcgcccaacgccagaagccagatgccctgagcccaccgccggctgtctgtgcacgcaagtgaacccatccggctacctgggcacgccatccgacctccctgcgaacctctgtatcggccgtattcctcaagaacacagggcaaacaataagttctggagacagcaaaaccttaagggctactctccatttagtggttatggagtctcccaggaagcataaggccagtgccgtgccagtcaaggagaaagtgaagttagaagatggaaatgatttgttagtcaagcgcagaaagactgaattttcagggtccattgtccaaccagaacgggaaattgaagtctttgacccggagaacaaagtgcctgatggtctcccagttgaatattctactgacaaggatcccatggatgcgctcactagttgtgcagtacagaactttggtcaagcgaaaggtaacacatcagcaagttcgagactgccaaaaatatgcaaggcagctggctggaaagaaccatcatttgactttgaagaacaaggacctccgcataacagaatattcacatgcaaggtgaccgtccacttggatggactggtcaacaccattatggagtgtttcagcgaccccaaacctaagaagaaagctgcacgggagaacgccgcacaaggggcattatggtgccttgagcgctctggttatgtcaagtcatcttcagatgttcctgacctgtgcggccatcagcccttctgctagccagatctacccttgtaggagtattaatgttggtagacgggtgcagcttgttgctgtggcacagtggttatccatgcactgatgccatgatactcttgagaagttgagtcccttatgaatcttgagccggctgtgttggctcgtgtacctagtctctagctcgtttggttacatgcccaacgcctgcacttgtactgtgtaaatactgaactccggcgatcagtgcaatcaaactggagctcctagtcgagctctgtcttgcaattcgatgtccggccttctcatgttggatgttaaacaggagccacggaatccgttaatcatggggcgagtatgccatgtaaagatagacaggagtaagaat

SEQ ID NO: 21240 - DNA, 1321 bp, Zea Mays
atagttgttctttggcttctgatttcaacaaaaaaaatggtgtttctctaaaacccacaaagccctcctctgctctccatccctgtctctcgctttccctaacccacaccagaataccagatcgagcaccgatctagggttgcacctcttctgctagccggctggcgaggagccgttcggcatctggacgcggccaagggagatgaagctcgcggggctcaagtctgtggacggcgcccacgaggagtccatctgggcggcggcgtgggcgcccgccgctgaccaccgccccacggcggtgctcctcactggcgcgctcgacgagaccgtccgcgcttggctccccgacgacctcgctgccttggggtcccccacacggggccacgcgctcggagtcgtctccctcgccgcccaccccgccggctcgctcgccgccgccgtgtcgctcgacagcttcatccgcgtctttgacgtcgacacgggggcatccgtcgccacgctggaggcgccgccgtccgagatttggggcgtccagttccatcccaagggtaatgctctggccgcagccggtggtggcagtggatcagtgaagctgtgggacacggagaagtggaaggcgatcaccagcctcgccgtcccacgcccggagggagctcgccccgacaagacaggcagcggcaagttcgtcctgtcagtcgcctggagccccgacggaaggctcctagcatgcgggtccatggacggcacgatcgccgtctacgacgcggtccgcatgaagttcctgcaccacctggagggccaccacatgccggtgcggtccatggtgttctccccggtggacccgcacgtgcttttcacggcctgcgacgactgccacgtccacatctacgacgccagggagaagggcctcgtcggggccatgtcgggccacgcgagctgggtgctgagcatcgacgcgagccccgacggcctggcggtggccacggggtcgagcgaccgcaccgtccggctctgggacctcaacatgaggacctcggtgcagaccatgagcaaccactccgatcaggtgtgggccgtggccttcaggccaccaggcggtgccggagtccgagcagggcgtctggctagcgcgtcggatgacaagagcgtctccctgtacgattactcgtaggtttttgtttccttataaaccgttgcaaatgcctctgttgtaccgaccagagatttgaattcgggcatggtggttggaagaattgttgtacgcagcacagtagtcgaggtgttaaattgcaaggaaagagtttatttcgtgttaaacaaa

SEQ ID NO: 21241 - DNA, 243 bp, Zea Mays
ccgggcgcgattcacatgtgtgctgggaacaagtctcacacatatgatgacacatggtacataaacaaatgtcacatcattaatatataacgaagttctatacaaaatagttaaataattacatcatacgaagacaacaatccagcaaccatagttgaatgggagacaacggccaagaccactcacgaactcatcactacatccttcacgtgcctcatcttgtggtacctgttcttgacctag

SEQ ID NO: 21242 - DNA, 939 bp, Zea Mays
aaaccggagaacgggaagcgaccagagggcggccgcggcacgcgggtcgtccccattccagtcttttcagaacgagattgcatcgaggaaactacagaaaagggaccaaatcgaatccgtggtgcactgcccctccccctccctcacaagccgccgccgccgtgaggactccggcgaatggcgtcccgcgtcgcctcgggcctcctccgccgccgcgccgtcgccactctagggctactaaggagtcatacacatgtcagaaactacagcagtcaactttcagctttgattccagctacttctcaatgctcaaatctgacaagaagacgctattacttacctaatccatctctgtaccaagtttggagtaggtcatttgcctcagacagcggagacaagttcgaggctgttgtgcccttcatgggtgaatctgtaactgatggaactcttgctaacttcttaaagaagcctggagacagagtcgaggccgatgaacccatagcgcagattgaaactgataaggtcactatagatgtcgcaagtcctgaagctggtgttattgaaaagctcattgctagtgaaggcgacacagttactccaggcactaaagttgcaatcatatccaagtctgctcaacctgctgaaacacatgttgctccatctgaggaagcaacttcaaaagggtcttctccgccgaaagttgaagagaaatcaagggtagaggaaaaagccccgaaagtagaacctcccaagatgcaagcaccgaagccaactgcaccattaaaaacgtccccttcagaaccacaactccctccaaaagaacgggagcggcgggtgccgatgccaaggctcaggaagcgtattgcaaaccgtcttaaggattctcagaacacctttgcaatgctatctacatttaatgaagttgacatgatccataag

SEQ ID NO: 21243 - DNA, 2019 bp, Zea Mays
atcatgcattcttcatggcgacggtgaccagtttgagcttctcaggcagctgcagacacgggccacgctatactgcccggccggcggccagttctcgtagtagtcagctacttaatgatcagctagctagagcatcgcggagattacaagtggcggcgggcatggcggtggcggcgttcccttcctgcggcgccttcgcccctccttgcctagtgagtacaaggagagccttctcctcggtggtggccatggcttccgcagcccccaggaagcccttcgcccctcctcgcgaggtacaccgccccgtggcgcactcgctgcccccgcagaagcgggagatcttcgagtcgctcgagtcgtgggcggcggacaacatcctggtgctcctcaagcccgtggagaggtcctggcagccgcaggactacctgccggacgccgcctccgagtccttcgacgacgaggtccgggagctgcgagagcgcgcccgggagatccccgacgactacttcgtctgcttcgtgggcgacatggtcaccgaggaggcgctgccgacgtaccagaccatgctcaacaccctggacggcggcgtccgcgacgagaccggcgccagctcgaccagctgggcggtgtggaccagggcgtgggccgccgaggagaacaggcacggcgacctcatgaacaaatacctcttcctgacggggagggtggacatgaggcagatcgagaagaccgtccagtacctcatcgcctcagggatggatcccaagacggagacgaacccgtacatgggcttcgtctacacgtcgttccaggagcgcgccaccttcatctcccacggcaacacggcgcgccacgccaggcggtacggcgacaccaagctggcgcagatctgcggcacaatcgccgccgacgagaagcgccacgagtcggcgtacgagcggatcgtcgagaagctgttcgaggtggacccggactacacggtgcgcgccttcgcggacaccatgaggaagaaggtggccatgcccgcccacctcatgtacgacggccaggacgacgggctgttcgcgcgcttcagcgctgtcgcgcagcgcatcggtgtctacacggccagggactacgtcgacatcctcgagttcctggtccgccggtggggcgtccaggaactcacggggctgtccggggaaggccgccgcgcgcaggagttcgtgtgcgagctggggccccggttcaggaggctggaggagagggcgcacgacaacaaggccaaggatccggagttcgcgccattcagctggattcacgggcgccaggttcagctttgattaaagatgatgactgggggattcgccgactctctccgtcctcagatgatatgttgtactgtactagcatataactaagaattgattgaagttgctgtaaaatgcatcaaagtacatccgctcttgtttttggtgctagagcattgtaaaatgcagggaggccgggagagcgatgaaaacagaatggaagatatattgcctcagcgatgcacgcaagtactagtctgtatgcaacaataataattcatgaaatcagataccgaccacagacttacaaatctacagttggcgcccagttgatgtcaaacaaagtgagaaaccaagagttttgagtatacattgtactggttttttacgactcaaaggaccccaaagaaaggattggtgatggcagaattcagctcggctccagctgtgttcaggatagccttgtcgactttttcccttgccaaaaacaagtactcgttcccttcaagtttctcaaatccgcagagctccaggaactctatgcccacatgcaaatttccaaccctctcctgcaaggtgggttcataaacaaagaatttatcgatctcattattcttgaacaagctcaacagcaaagcaagcagtcaccaaaaaagatcaagattttttttcacctgaaatgtagcattggttagcctgatctttctaaatttctcctcgtcaggatttt

SEQ ID NO: 21244 - DNA, 742 bp, Zea Mays
gtcaggttcagttctagtaatgtatttgcatttgtcaagattgaaaaaaccgtgagagcacctcatcgagcagaatgccatgtctgtcagtgccctttggagtaccgcacgaaaattgagaaatcttcgtcagggcctagaagaagttgggtctacggccgggtttatctagtgaagcaagggcatcctgaaacggaaatggataaatgaaaaattctaattgattgagactgctgagggaagtttagataatcccatgagatggcactcttctggtcgactgaaacatttttcagatgccacttattttgatcagaagggcttactgtgtacgaatcatttgaaagatttgatccagccaagtgctttgtaatacagatacatttctgagatgtccagacgctgcagatgaaccccatgctgcattgtattcttttctgttttctctttagatgaatccatgatacagtttggatgaagaactactgaagaggctacgaaggtgccattgctatcaggagggagggtcactgaaaggctcacaggagggagggtcactgaaaggctcacactctgcaccaaacatgtttaatcatttgatcaaagatgcccacactcagcatgtatacagacttgctcaaatgtgatgtgttatacaagtgtgtgtgtgtgtatatatgaagttttcagctttattgtatgtatgttttcagattaatttgcctgaatctggaacccgtct

SEQ ID NO: 21245 - DNA, 1086 bp, Zea Mays
gaaaacgtaagggagtcctacttgtctgcttcccgagttcagagttcagactcagcacatcacccttctctagtctcaaatggcgtgctcactcccgctccacgcccccttctcctcgtcgccccgcatcctctcctaccgccccgcgcccagaaccctccctctgttccgccgagggctcagggttccgtaccaccgctccccttccccgcctcgcgcgctcccggacgttgctgcgggggccgtggcgggcatccgggacgcgctcgccgacgccttcttgacgtcgccgccgacgtggcggtccgccgctgccagcaacctcgctgtctttgtctccggatcgccgttgcttctctcgggactgtccgcctccggcttcgccgccgcctatctcttgggcaccctgacgtggcgcgcgttcggagcccagggtttcctcctcgttgtcgcatacttcgttgtgggcacagcggttactaagttgaggataagacagaaggaagctctgggagtagcagaaaaaagaggaggaagaagagggcctggaagtgttattggttctagcgctgccggttgtgtttgtgccctactatcgatatatcatgctggtggtacagcgtcctctgagctctggagactgggttttgttgctagtttctgtactaaactaagtgatacagtttcaagtgaaatagggaaggcttttggaagaacaacgtacctggtgacaacattaaaggttgttcctagaggtacagaaggtgcaatcagtattgagggtactattgctggaattctagcgtctgtgtttcttgcaggtgctggttatcttcttgggcaggtggatgtatcacaagttgtgttatgcgttcttgcttctcagattgcaaattatgttgagagctatattggggccactttacaagacaaggaaggttttgaatggctgaataacgatattgtcaatgtactgaatatctctattggtgccatattggctgttctaacgcagcagctgctcgtcagttggagatcttaatttttccttttgacttaggggcttcctttatttgaaggcgtttg

SEQ ID NO: 21246 - DNA, 1990 bp, Zea Mays
ctgctccgcgtggaaaacgctctagaccgcgaccgcgaccgcgaccaagagtccaagacttccccgtccgcccgctccgtcctcacaggtcacgagctcacggccaacgacacaactcacagtaacgttaccagccacgacacctatgaggctatgacccaacgtcccaaccaagaaccaactactctgccagcctacgcagtaacgcagcagcaatcccaacccaagccttcgctggcgcgcgggtccaccccgactcacgcctcccgttcccataccaccaggtccgtctccggctttccgtcggccctccgccctccgccccaaaacttcgtgcaagtagtgaccaggagcgagcagccaaggaaaggagccaagcaatggagaaggccgtcgacaggcagcgggtcctgctgcggcacctcaaccccgccgcggcggggagccccgccccgcccgccatctccgcaagcgcgtgcgcggcgggggacagcgcggcgtaccaccggaggccggccttcgccgacgacgtcgtcatcgtcgctgcttacaggacggcaatttgcaaggccaagagagggggtttcaaggatacctttgctgaggacctcttggttcctgtcttcaaggctttggtagacaagacgaagctggacccaagtgaagttggcgacattgttgttggtactgtcttagctcctggttcccagagggcaatcgaatgcagaatggctgcactgtatgctggtttccctgacaccgttcctcttaagactgtaaacaggcagtgctcttctggccttcaggcagttgcagatgttgccactgctattaaagcagggctctatgacattggtattgctgctggtttggagtccatgacagtgaacaaagttagtcttgatggccaagcgaatcccaaagttgagctattttctcaagcacgtgattgtcttctcccaatgggcctcacatctgagaatgttgcacaccgttttggcataacacgactggagcaagatcaagctgctgttgagtcacatagaaaggctgctgccgcagcagctgctggtaaattcaaagaggaaattgtgccagttcatacaaagattgttgatccaaaaactggtgaggaaaagaagatcgtaatctctgcagatgatggaatccgagtggatacttctcttgcagtcctgtcaaaactcaaaccagcattttcaaaggatggcagcactactgctgggaatgcaagccaagtgagcgatggcgctggggccgtcttgctaatgagacgggatgttgctatgaaaaagggtcttccagttcttggtgtctttaggacctttgccgctgttggagttgatccagctgtaatgggtattggtcctgccgtagcaatccccgcagcagtgaaagctgctggccttcagatggatgatatcgatcttttcgaaatcaatgaggcttttgcatctcagtatgtctactgctgcaagaagttgaaacttgatcctgctaaagtcaatgttaatggcggtgcaatggcccttggacatccgttgggtgctacaggtgcacggtgcgtcagtactcttctcaatgagatgaagcgccgcggcaaggattgccggttcggagtgatttctatgtgcataggttctgggatgggtgctgctgctgtgttcgagcggggagacggcgttgatgagctcaccaatgctcggggaatctcgacccacaactggctttccaaggacgccatgtaaagctacacccaccaaaatttgccggaactggtagcattgtttccagatcgctgtagggagcgaattggggaataaaatgattttgtatttgtcgcccctgctggggatttaggaagatttttacgccactggtatttgaacttgcttacctggaaagatgcgtgaataactcaatagtctgctgcaaggatcatacgtgcacccgcttaattttaaaatcgaca

SEQ ID NO: 21247 - DNA, 2920 bp, Zea Mays
ccggttctttctccaccccgatgcccctccccctcccccgtgtgatcccctctccagatcgatgtctgccccggccgtaacccccgcggctcaccgcacgaaaccgccgcgagatcttggagctcagcctctgacgatggctacgactacctcgccaacctccgcgagctctgtccccctccctctcctccaccggcggcgggggatccttggccatgttcctcccgaggcgccggtccacgcgcttcggcctccgcgtggtcatcaagtgacaacaatgggccaggcagccactgccctgagctgctgagggagaagaaggaccagtttgaccctgtgatcagcaacgtccacatgccggacatggacggcttcaagctcctcgagcttgtgggcctcgagatggaccttccggggattaggtactttcaccacttctggtatggttctgtctgtaatgtgccagggattattatattgtttttggtttggatttggaatggtttggggtccacaacgatgatgcgtcagagctgttccaaggattggatgatttccattcccctgctgccaattcgactaggctcgccgtctccgctctgcccaactggcaccaagcagccaatggaacttgagcagccaatggatgatttccattcccctgctgccaattctccgaactgctttgacccttcaactcaatccgcatgtacccagtaaatgttcaatctgaatttggatcattgctagcaggattctttgcttgctcttctacttctgaaaattcgcaaaatggatagataattccagttaattttaatccattacagcctattgtggcagcaaacagcgactgggtgcggaagccggaagggagaggcgcttggttgacccagaacggacgacaagacaccgccgggggttcgctgcaaccgcacgcgtggtggccggtgtgggaaggagcccactgctcaagcagcgacgacttccgtaacttctcaggccaagttgtagggagggagggcagcaaagaaagcaagcaagaaagaagccgattccactggtggttaaggttttggattaaaggagagaggtgcagagaaaaaaaggttgcaactccctgggccaagcagtagcccagcaagttcagcaccaatggcagccatatgaaatataaggcaaagcagataaaaagcttaatttttttcaataaggtaaaggcaatgacagaaaagtgaggagggtcagaggtgtacagataaggatgagggctgaaaagaggagcaggaaggcatgctccatctgtgctacaagggtcagaatggacttgataggacatttgactatacaacatggaagttatttcaagatatccttttttaactatgctgtcgttgctgatcatttgcatttttacatttttcacattatactatagttgaagatacattcctgaggacgaatgggtgcagttatgggcttcctgcttgctgccagcagtcttttggtgcttttatattgctattaatttgtttgaaatttattatggtgatgactgggaaggtctttttgaggctattactggttatggccttggtggctctttggccgtgttggtggtggtatttataccaaggctgctgatgttggtgccgaccttgtggggaaggtagaaagaaacattcctgaggacgatccaagaaacccagctgtcattgctgacaatgttggtgataatgttggagatattgttggaatgggatcatatctctttggctcatatgctgaatcgtcatgtgctgctcttgttgtggcctcgatctcgtcttttggaatcaaccatcaatttactccaatggtgtatccccttcttgtcagctctgttggtattatagcatgtctcataacaacgctgtttgcaactgatttcttcgagataaaggctgtgagtgaaatagagcctgctctcaagaaacaacttataatatccactgttgtgatgaccattggcattgcgctcatgttggcttggtcttccatacaccttcaccatttataactttggagcccagaagacagtgcaaagctggcaattgttcttgtgtgtggcggttggtctctgggctggcttagtcattggttttattactgagtactacacaagcaatgcctacagccctgtataagatgttgctgattcctgcagaactggagctgccactaatgtcatttttgggcttgctctgggttacaaatcagtcattatcccaatttttgctattgcgtttagtatcttccttagcttcagccttgctgccatgtatggtgttgttgtggctgctcttggaatgctgagtaccattgccacagaccttgctattgatgcctatggccctatcagtgataatgctggaagcttaagtctgtatgggtgcatcttatcatttatatgtatatctgaaagcttaagtatttttttaaatagaagatgtctggaaactttagtaacgacatgagtttcaggctttcagctatagcagtcttattcgcttttaagacagagaagatttttatttagagtttagaaagagtaggtgctatgggtgcatgttatcatttatgtggggaacatctctggtggaaattaatcagtaacgacatgagttaagacagagaagcttaagtattttttcagctatagcagtcttattcgcttttaagacagagaagcttaagtattttttgaatagaagatgtctggaaactttagtaacgacatgagttaatcagaagagatggaagggtagtttatcaacatgtatttggcacttcgccgaaaatgtcacttggactatcttgcaaactgaattttcagattggcttcttctgtctgaacattcagttcagtcttgcaggattt

SEQ ID NO: 21248 - DNA, 1189 bp, Zea Mays
atccgtgggttccgtccgcgggaaaaccggggtcaatggagtagccttaatttcaggcctttcaggaccgccggactcttctcttgctgctcacacccgccgctctctctgggcatcttgcccttgtggtctctgtttcctcaaattggaaacgaattcaatcatccaaccaaaaatcctgtaggttccttgccactcccgtcaagcgcacggggacatatgcttgccttgttagcaagcctgtagcactacgtctttgtcgcactaggtctcataaaagttcatccctcttcttgcttcctcggtttgtttcacgggattgttccatgccgaccaatttatctttgggctcactcgtcggaatcttcattggtgccttcatggggatgtctacagaaagcggcatgttccgcggggctggtgtcggagcagtctcgggagcagtcttctccattgaggctgttgagtcctgcatcgagatttggaggtccagccattcgggaaaatacagcattctctatgtgctggacatcatctctagcctcttcagcggaagaattgtgtgggagaaagtcagtccagcgctaccagcgtgcagtgcaaagccagatgagtctaatgagcacaccgttcatcgacaacaatgacctttttgaaactggcagtacaggaggcatgtcaagggctctgattgataggatcccaaagatgaggttcagtgctgcaagcaattgtgacaaggaaactgatagcagctgctgctcagtctgcctgcaggattttggagcacagcaatttgtgagggccctgcctcagtgccaacacatattccatgtgcggtgcatcgacaattggctccttcggcacgcatcctgcccactatgccgggccggcgttcatattgaccatatacatatgtaaataaactcgcagggtggcacctggtgtattttcatagtgaatacccgtgctcctgttggatatcacaagtatagctggatgtatacataggttttctcctttttttttgttacttctccggtcttatgtggggctatgctttcagctgcacgtttttgtcgaagtaatacctggattggctggatatgtacatcttgagaacggattgactaacaagctccctgaattatggtcctgtgtgcttcaaaaactgctttcaaaaagaaaa

SEQ ID NO: 21249 - DNA, 1555 bp, Zea Mays
aaaaccccctgtatgtcgcgtatcacgacgaggagtggggagtgcccgtgcacgacgacgagttgctattcgagatgctcacactgtctggcgtgcaagtcggggccgactggacttccatcctcaagaaaagacacgtctacagggaggcgttctccggcttcaacgtggatgcggtcgccaagtacaccgagaagcagatggcgtcgctgagcgccgactacgggctggatttgggcaccgtcagaggaaccgtcaacaacgcctgccggattatcgaggtgcggagggacttgggctcgctggacaggtacgtgtgggcgttcgtgaacaacaggccgctgtcgccgagctacaagtacagccggaagatcccggcgaagacgtccaagtcggagtgcatcagcaaggacatggtccggcgcaggttccgcttcgtcggccccaccgtcgtccactccttcatgcaggcggtcggcctcaccaacgaccacctcgtctcgtgcccgcgccaccgcgcctgctccgccgccgccgttaactgattctgctgaccaccgtccaccgatcgagagccagacgtaaggaagaagagagacctttatatataaggacacgtacaatacaaccgagaaaaaagagaaaggtagtagcctctagtagcactagaagtagtacgtagtatacggaagggagagtgctggtttgcaattgtgtgtacgtacgagtacgatgatcgagtgtgcttgtgtagattgattacgcccccacccctaattagtcaatgaatgagcttgcttgctgcgacttccgcctgcacactgcagtgtgcagtcattgttcgcgtgaggcggttagctgcaggcgtgcgctctcctcctctcaacaagctaggctgcgcagatagtgatgtgatggatggggagatgatgatgatgatgattatagagagaagcccggccgtgtgggctacctgcatgtggccaagctctgattaaaagcgcgataacagcactctcacggcaggcaggcaggccatgtggtgtggtgtcgcaggcaaacgcatgtgcgacgaagacagagagggagagacggaaacgcagggagaagagcgggaaggaaagggggactagctaggaaaggcccgctttgccggccgcgcatgtgaccctgcagctcgcgtaccttttccaatcctcaaagtgggaggacggatcggaccccatgcactccacgctagtggtgtgtttggtttgtagagtcactccatgaggtgatgcatcataagttcattacaacaattttggtggaatcaactcactcctcatgtatatactaattattagcttataaggaataaggtggtgatggatcaacccattctattccacaaaccaaataaaaaagtgaggagtgggaagaagatagatcgcttcattcctcaaaccaaacacactgtagatttttcatggtttcttgcaagttcagttcctacgaaagcgggggcacggttccggagcaggagcattggatttttgctacccgcgcacgcatt

SEQ ID NO: 21250 - DNA, 396 bp, Zea Mays
acgcagcctgcagtgcctgagctaccaagaatttcagagcaaggtcaccagaatgccttacaaaagacgacttcgacattggagggtctcattgcggacgattcacaccaccagccctcctctgcccacagcgaagatggagctgctaataatgggtctagggatatcagtggggattcttcatctgttgatttgaaaagcccagtcccactagggacacatgcagatgtcatggaagacgaaggatggatcacaattccatgcaaggcatttcctgaaagttggaacgacatatcagaaatggttcagttgcaagctctggaccgttccttcctttttccaggcgagcaggttcctatactggcgtgcctgtcagcttctaagcaagatgtatag

SEQ ID NO: 21251 - DNA, 781 bp, Zea Mays
acgtgctactcggataaccgtagtaattctagagctaatacgtgcaacaaaccccgacttccgggaggggcgcatttattagataaaaggctgacgcgggctctgcccgccgatccgatgattcatgataacttgacggatcgcacggccttcgtgccggcgacgcatcattcaaatttctgccctatcaactttcgatggtaggataggggcctaccatggtggtgacgggtgacggagaattagggttcgattccggagagggagcctgagaaacggctaccacatccaaggaaggcagcaggcgcgcaaattacccaatcctgacacggggaggtagtgacaataaataacaataccgggcgcgttagtgtctggtaattggaatgagtacaatctaaatcccttaacgaggatccattggagggcaagtctggtgccagcagccacggtaattccagctccaatagcgtatatttaagttgttgcagttaaaaagctcgtagttggaccttgggccgggccggccggtccgcctcacggcgagaaccgaccggctcgacccttctgccggcgatgcgctcctggccttaactggccgggtcgtgcctccggcgccgttactttgaagaaattagagtgctcaaagcaagccatcgctctggatacattagcatgggataacatcatagattccgggtctattgtgttgggcttcgggatcggagtaatgattaatagggacagtcgggggcattcgtattttatagtcggaggtgaa

SEQ ID NO: 21252 - DNA, 3011 bp, Zea Mays
cacaacctcaaacccagaaggccagcagtgcgtgcgcccttttcttcgctcacattcatcccgcgtgctctctctctctctctctctcgggccgtggcgtcgagtgggcgaccgccgccacccccgtgccgtgcgctctctctctctctctcgtgtcgacgggtgggtgggcgaccgtaggccgccgccgccgcctaggccaggtgcccaggtcgaccttcaacagcgacgagcatccaccagacgcaatcaagtatggcttcaatggcaatcattaggagaaggaagtatttcttggatcatgttaacacacctaccatttcatcgtctgctttctttacattccaacatggaagactcggtttggaggttgagccaagaacagaacagcgatttctcgagcatagttctggggattccaaatgcgagaaggagcaacacaatatgaatttgataaaaaaggatctactaggtcttggtaatgggttttggcaacgtccatcttatgtgatttctctttctcatggtggatttggaaggaatgaatttagattgcctctgagcctgggagctagatctttgctgcagtcggtccgcacagcatcaactgcaacagcaaggcagcctaagatggatacagatgatgaacagagcgaggaccacaagcaaaataaaaggaaaaaggaggcatccccagaagaatgtgatcaggctgtggaaggcctcagcactgcaaaagctaaggctaaagctaaacaggtacaagaatctctgaaggttggccaatcaattatacagaaattttgggcaagagtcctgggtgtgggccctgctcttcgtgctgttgcttcaatgagcagggctgattgggcagcaaaacttaagcattggaaggatgaattcgtttgtacactgcagcattactggttagggacaaaactactctgggcagatgttaggatctcatcaagattgctggtgaaacttgctggggggaagagcctttcaagaagagagaggcaacagctgacacgcacaacagcagatatcttcaggctggttccgtttgctgtgttcatcattgttccattcatggaattcttactgccagtcttcctcaagttatttccaaacatgcttccatcaactttccaggacaaaatgaaggaagaggaagcattaaaaaggaaattgaaagcaaggatggagtatgcaaaatttttgcaagataccgcaaaagaaatggcaaaggaagttcaaacatctcgtagcggagaaacaaaacaaacagctgaagatctggacgaatttttgaataaggttaggagaggtggacgtgtctctaatgatgaaatcttgaattttgcaaagctattcaatgatgaacttactctggataacatgaacagaccacgcttggtaaatatgtgcaaatatatgggtatccggccttttggtacagatcactacatgaggttcatgcttcgcaaaaaacttcaggacattaagaatgatgataaactgattcaagctgagggagttgaatctctctctgaagaagagctccggcaagcctgccgggaacgtggtcatctaggcctgctgtcaactgaagagatgtgccagcagctccgagactggttggacctatcacttaatcatgctgtgccatcttcacttctcatactttcaagagcctttactgtgtctgggagaatgaagccagaggaggctgttgtagcaacactatcttctttaccagacgaagttgtggatacaattgggacagtattgccatctgaagattcagtttctgaaaggaggagaaaattagaattccttgagatgcaggaagaacttatcaaggaggaagagaaaaagaaagagaaagaagaaaaggcaaaacaaaagaaagaagaggcaaagatgaaggaaccagaaactgctgaagaagatttagctttgaaggaaatgactgatgctactgctagggaagaactgagaaaagcaaaagaacatgacaaagagaagctctgtaatatcagccgtgccttggctgtgctcgcatctgcatcttctgttagcaaggagcgtcaagagtttctgagcctcgtcaataaagagatagagctatataactccatgctcaaaaaagagggtactgaaggtgaagaagcagctaaaaaagcatatatagccgctagggaagacccagacaatgatgctgaggctgctgcagaagaaaaggtctcgtcggcgttgattgagaaggttgatgctatgcttcaagaattagaaaaggagattgatgatgtggatgcacaaattggaaaccgttggcagctgcttgatagggaccacgatggcaaggtgactcctgaggaggtggccgcagctgctgcctatctgaaggacaccatcgggaaggaaggcgtgcaagagctcatcaccaacctttcgaaggacacagaaggaaagatcctcgtggaagatatcgtgaggctagcatcgcaaacagaggaacacaacgacgacgaagagcaatcacggcagtaggtggaaacagcccgagtatctagatgggtggcctattatttcaggaagaaaactaccaacctctcagttacttgatggctgtgcctggttaatcagaaggcagtacaggcgtttttggtgcccctagtcagagaccccggtagaataactcgttgctgtaaagatggtgtgactgtgacatgcatacaagtgatagggtactctacagagttgtggttcggcaggtagttcgcaaccgaaattttgactggttgctgtgaaagtggaaatacagttcggttttgtcttaaagctaccctcaattctaaaaaaattgtcttctcttgagtctaaaagtagacgggtgactaatgtggaaatgaattaggatgtttatgtactccccctgtttaaattatagagcattttaactttttggagattcagtatcttaaatttgaccagatctatctcca

SEQ ID NO: 21253 - DNA, 1513 bp, Zea Mays
gcaggtggtgctgagagattgattgtcgatgcggcttgtcagcttgctgcccacgatcatgatgttcatgtcttcacatcacatcatgataaaaaacgttgctttgaggagactctttctggtttgtttccggttactgtacatggggatttcctgcctcgccatgtgttctaccgctttcatgctgtttgtgcttatcttcgctgcatttttgttgcgctctgtgtgctactcagatggcccttctttgatgtcatattggtagaccaggtttctgttgtgattccactacttaaactaatggcatcatcgaagataatattttactgtcatttccctgatctgttacttgcacaacatactactatgcttcggaggttatatcgcaagccaattgacatgattgaggaaagcactactggtatggctgatttgattcttgtcaatagcaagttcactgcagcaacttttgcaaggaccttttctggtttacatgctagaggaatcgagcctggtgttctttatccagctgtctctgttgagcagtttcacgaaccccatgcttataagttgaatttcctatcaatcaaccggtttgagaggaaaaagaatcttgatcttgccatttcagcatttgctttgctccgttctgctgcttggactctacctggtgatgctctacaagaagcaacattaacagtggcaggtggctatgataagcgtctcaaggaaaatgttgaataccttgaggaactcaaaagactcgcattgacggaaggggtttctggacaggttaattttgttacatcttgctcaacatctgaaagaaacgagcttctctccaactgcctctgcgttttatacactccaaaggatgaacatttcggtattgtacctcttgaagccatggccgcccataagccggtaattgcctgcaatagtggtggcccagtggaaacagttgtgaatgaagtaacagggtttctgtgtgatccctctcccgcagaattctccaaagccatgctgaaacttgtgaatgatcatgatcttgctgtcagattgggtgaacaagcacgtgaccatgtggtgcaaaaattctcgaccaagacatttggtgatctcctcaacagctacgtcttgaacatctaccatgagaggatggaatgatctataatattgggtcagccatgccatatgaaaacaatttgttcaatacaaggttttttttgcacctttacgtctaatctgattttgatggacacacataatgacaatgacattccattgaatccctttggcatactgtagtcactctatgatctgtatattgttttcaattataacatcaaatttggcttggtccatcctagaatctgaatggagctggagtagagatggcaatggggacccgatttcctgcggggaattcttctgttagagcaacttcaaaagaacgtgtaaactaaccccaaaacagatattagtcaagaatagtgatttttttactccaaca

SEQ ID NO: 21254 - DNA, 2266 bp, Zea Mays
acgaattgcgcccaacttgggcaacttgccttccttgttcgccaccacataaaaagccagcgccaccgggcactccttccccaccgcaccaccaccaccacctcctcctcttccccaaacccgtccgttcccttcccttcatccggctcctccgccattttttccctgtcgcggtaagcgatagggttcggcttcggcgtccgacctctaaatccgccctcggatccagtggtgcagttgcttctccgcctcttcttcgttttgcttcttccggcgttctcggagcaacctttggcttcgtcgacggcgttctcggtcctttgcggcccgacatgtctccgttccagggatacagaggcgatggggttctcgccggcgtccggtcgcggaagcgcgtgttcgcgacggcggccgctgagcccgtgacggcggcggccaagagacagaagcgcagggatgagccatccctggacgcggtgccggacgagtgcctcttcgaggtcctgcgccgcgtgcagggcacccgcgcgcgctgcgcgtcggcctgcgtctcccgccgctggctcgcgctcctcgctggcatccgcgcctctgaggccgtgctcgccccggccgcccccgccgtgccggacctcaaccaggagtacctcagcgaggacgacgaggccgatctgatggaccacgacggcgacgcccgcgagaggaccctcgagggcatgttggccacggacgcgcgcctcacggcggcggccgtggccggccgtctggcttccgtctccgtccgcgggagccacccggcgcgtggcgtcaccgacgccggcgtctgtgctctcgcccgcggctgcccagagctccgctcccttaccctgtgggatgttccgcaggtgacggatgccgggctcgccgagatcgccgccgagtgccactcgctggagcggctcgacatcactggctgccctatgatcacggacaagggcctcgtcgctgtggcccagggttgcccggaactgaagtcgctcaccatcgaggcctgctccggcgtggctaacgagggtctcaaggcaattggccggtgctgcgccaagctacaggcggttagcgtcaagaactgcgcacatgtcgacgaccagggtgtgtctggcctcgtctgctctgcgacagcctcgttggcaaaggtccggcttcagggtttgaacatcactgatgcttctctcgccgtgattgggtactatgggaagtcaatcaaggacctgaccctcgctcgcctccctgctgtcggcgagaggggattttgggtgatggccaatgccctcggcctgcagaagctcaggtgtatgactgtcgtctcctgcccgggactcacggatctcgcccttgcatctgtcgccaagttcagcccaagcttgaagactgtgaacctcaagaagtgcagcaaggtctcagacggatgcctcaaggaattcgcagaatcgtccagggtcctggagagtttgcagatcgaggagtgcagcaaggttactcttgtgggcattcttgctttcctcctgaactgcaaccccaagttcaaggctctctccttgtccaagtgcatcgggatcaaggacatctgctcggcacctgcgcagctcccagtatgcaagtcgctgcgttccctgaccatcaaggattgcccaggattcacggacgctagccttgccgtggtgggcatgatctgccctcagttggagagcatcgatctgagcggtctcggtgcagtcaccgacaacggcttccttccgttgatgaagaagggttcggagagtgggctggtccgtgtgggcttgaacggctgcgagagcctcacggacgcggcggtttccgccttggcgaaggcccacggcgcttctcttgcgcaccttagcctggagggatgcagcaagatcactgacgccagcctgttcgccatctccgagagctgcagccagcttgccgagcttgatctctccaactgcatggtgagcgactacggtgtcgcggtcctggcagcggcgaggcagctcaagctgcgtgtcctctcgctgtctggctgtatgaaggtgacacagaagagcgttcctttcttgggcagcatgtcttcatccttggaggcgctgaatctccagttcaacttcatcggtaaccacaacatcgcttccttggagaagcagctctggcgactaatggttgcaccggcagatcctggctctggagaaacggccaattcctacctatctcgggagccaggccc

SEQ ID NO: 21255 - DNA, 611 bp, Zea Mays
ccggtcgtcgcttcctctgctctctgaccagcatggcggcgcttcctccctcctcctgcctgacggcaccctcgccaagggcatctgtcaccacttcgtccgcacgggggcttgcaagtatggggattcatgcagatacttccatccgaagccaaatggtgtcaatccagcattagctgcaccagggcttgggtctgggcctgcacccatggtgcagcagtctgatattattgggaaccaacccaattttgttgtataccagggagtagacataaattcttcctcagggaagatactggggggacacgcctcttggggcaacctgccgccatcactgcaacctcctcctgaaggcggctaccctcccctcccgttcatcgactggggctgaaggggcgttgtctccctgaaattcgaaccatttaatatttcataccttgattggttgtgctaaatcgcatatacttggagcgcagtagagttaaggtgatcccagtttattttgatcttaaatttatctctgtaatagatatttacagtcagaggtacacttcgcagattgcgttgatgtttgaatgaactcacatttgcatcaatggtgctcttatggc

SEQ ID NO: 21256 - DNA, 576 bp, Zea Mays
atggtgtttaaagagaagcaaaaggagttctacaagaatgctaaattaattagcaagtacaaaaagacaaagaagcaacaaagtcagtcaaacaaccatccagaaattccagtccatgagggaagaagcaccctgtgcatagtttgaaggaagagtatgagaaaaaacgtgctgaggaggagaaggctaaggaagagcgtgatgcaatggttcaggcaaagagggagcatcgggagaagtctgaggcgaagcggaaagaactgagggagaagatgttcaagaagacaagatctggccaacctgtgatgagataccggatcgagcatctcttggagactgcactgagcaagtaacgcgataccaaccatttgtagctccgtgcaaccatttgtttactgtaaccgtcttttgtcgcttcatcgttgtgtatatctttggatttgttgatcatatcactcaagagttctctgctgttggcgctgtgcgcttccaatcctgcaagtgatgtcatgtgatctgataactgactcctcgaaaaacaagcaagccttgatttatttaaaaacctacttatcc

SEQ ID NO: 21257 - DNA, 1162 bp, Zea Mays
ttccagtgaatacaaaaaagtgtacggagaataatggaagggaaccatcggatgggaatggttgctattgattcggcaacgggtactgtagcagattgtggctgtgaggtggaaatttcagagtgtgaaccacttccagatgggcgcttttatttagaggtggaaggcacacgtcggtttcgtatcgtgcgatcatgggatcaagatggagttgctgaagttgaatggttgaaagatatacctctgccagaaggttcacaagggagaagagaactaatggaactggccaatggagcttcagagctggccagggcatatatcagacatgctagagataccgtacggactgcaaggcgaacaagacatctggatcttgagggcatgcctgggccacaggacccggaaaaatttagtttctggctagccaacttgataagtttgaggccctcggatagattagatacgttacgccttcgcgacactagggagagaatttctagtagcatcagtttgctccgtgattccgaacaaggctgccgtgtacaatgacggaaacagtacaagaatcgtttccacagaccaattcgttcgtctaggagtatatcgatttggagctactccgtgattccgaacaaggctgccgtgtacaatgacggaaacagtacaagaatcgtttccacgtaccaattcgttcgtctaggagtatatcgatttggagctacaccgtgattccgaacaaggctgccgtatacaatgacggaaacagtacaagaatcgtttccacagaccaattcgttcgtctaggagtatatcgatttggagctagggatgtaatatggttcagaaaatatctgtccagatccagactcgaagatggtgaatactggttcggatagaattttcggatatccggacttttttcggataacggatataaatacggatattttattcggatattgaattcgaatacaatatgtttgatatctgtcggatatcaaatatccagatattttctcggataaatcttctcggatatccggatatcttatctggatagctgtgtgtattttgttgatttttttagaaaaaatttaataatacacaaatatcctcagaaattcatgaaaatttatggaggcataccacatgtccacatata

SEQ ID NO: 21258 - DNA, 1399 bp, Zea Mays
tttacttaattatactgacatatgtcattggagctgtgatgcctcatccatccctaaagatgtatagaattcatcgcttggatcaataagtgttgtttaacaggcagaaatgggtgcttaggatcttaccactgtttatttaaaatttagatagataaagagcactgaagattgttagttaattaggaccgacgctttgaatcattagaccaaggaatatgaatgcgcaaattcaaacgtactacaccttttttgtgctttctttttaggacaggagtaattgtccatcgtaacgggggtagaaagtgcagaacgctcattgttctctttttcgttgtctaaaacgttgagtttctgatctgtataagactacaagttgctcagagggccttttctggaaccatttccctcgaactgattttaattgtttccttcttttccttatccacaataccaaactatgttacataaaaactaaatgatacgctgactgctcagaataaaaaaagtggtgctacgatcctccgtctgacttatgatcgcttctcttttcttcagccacttttcttttttgttgtctagaaaacaaaaatatattgttagtgaccagattgtaatagaaaatattgtctgctttattttctcgtcattagataaattatatacccttaaattgcttttgccattgattctagcatatgtcattaactaatgtttttaccacctttttctagaacgcttgtttgtctttgtcactttctgcaaccttggttctgatgttgcttgtcattcatttctcagcgtcgggcttgtaacttgtgtttcgtttgcttggtccatttattttggttgtctgtagggaagagacgacgacatggatgtagattccattctttgtgtgagcactaccgccatatagttgacaacgatgaccgacactgtagattccattctttgtgtgtacaccaaggtatcggtgtctacgttgatctggcgatgcgcttttcacggttactgcgaccgtgatgggcatctaggtgctcaaaccattagttggactgaggaacacggagcagcagcaacaatatcgtaaggagagtgcagaagttggacaaatgctcttccactactggagcaattgctggtggagtggttgctggcgcagccttgctatttgctgttcctgctatcagttttgcctattggcggcacaggaaaccacaagagcattttttcaatgtatatggcttcaaagttagtctttgattattatctttcttgcaacataagggcaaacaacgtttatatgtagcaaacaaatacagtttgcaaacgttttaggaacatgtttttacaataaagatatacttatagtttcaccaatggatggccaaaaaat

SEQ ID NO: 21259 - DNA, 174 bp, Zea Mays
attatttaggtttgtgatattcctgtttatatgcattcatgtgcattatgcaaatcatttaggtacgtttattcattacgtgatatggaggaccaaagttgagtcgaccacaagatgtcgctgcgcgtaagcttctccacaagatgatgttgatggatgaacctgaaaatgtaa

SEQ ID NO: 21260 - DNA, 243 bp, Zea Mays
accagtagtagaagaagaagccaatccgggtgcaaaatgggatggggatgtatggatctcgctcaaacgcacgagggcggcggcgcgagagcgggagggagaagtgcgcctatgaaggccgaaagggacacacggcaggccgagtgcctgcgtcgtgtgcagtttcgtgtggatccgcggactggctctacgcgaaccgttggcaacgctgctcatgtcctagacaattttcgtttattaggc

SEQ ID NO: 21261 - DNA, 538 bp, Zea Mays
cagcgctgtccagcaaaaacgagcggacggatccgcccccgcccctctcgcgaccgcgcaggcgagcggccgtccagtcgcgcgggcagcagggggcggccgtccgtccaggcgcaggcgagcggccgtccgtccagcgcaggctagcggccatccgtccaggcgaactgcgagcaggcgtccgtccaaacgaactgcgagcgtccgtccaggcttccgtccagcgagcggcacaacttttctacgcacaacacattccaagaaccagggggaaaatgtcgttctagctactacactatcatcgtcaggcactcaggccacacgatgcttgctttagcgtctggttctggttcatcgtcttcatcatcccgcaacatttaccacgcactgctgcatttgcactgcaccacagcccgagaactgaacgtactggttctggttctgcctttgcccaacaccagcgacgacagccactgtctgttcgagatctgccgagtcctgtctctggtgatggacaaggcgaccaagcttttgattt

SEQ ID NO: 21262 - DNA, 1910 bp, Zea Mays
tttgaagttggcttaccactgcttgtttcatgatataatccttttattgcttactccttcagatcggcttgaaaaatatgattacaagaggtatacaacaactcattgttgcaccattacactatgttcaagataaattgtcaacaatggagtcaacagagataatcaaggaggatgcaagtgagagggaatctgatgaaatcgaagtttctagtgcaacacatgataagaaggctgaagcaataactgacgattcaaggcaaaattacaggacagcaatcgccagccattttctattcagagttcatacagatcctgtacatgaggaggctttctctatattgaagaagcttcagataattgagaaagatgttagctccagtgatttttgtacacggagggaatttgcaagatggtttgttaagttaagctcaaagtttgagaggaaaaggatgtgcaggattgttcctaataaattaacttctgacacagtccaatgtgcctttgatgatgtaaatattgacgacccagatttcctgtatatccaatctttaggagaatctggtatcgtatccagcaagttatcaaactccttggaaatgttgacaagtggctctccttgttccaagggaaataccttgttcctacctgatagttacctatctcgattcgatcttgtcaactggaaagtgcttgttgagcatccacgcgcattgagaatagacgaaaagataccgagtcaaaatgtttgcattttggatctgcgagcttgcccagatgtgtctccatccatgctcatagagctaatggctggtgaaaacaacatcatcagcagagtttttggaaatactagacgccttcaaccgggcaaacctgtaactaaagcgcaagcagctgctgcactgactagtggccgaatgaaggaagcagttcatgaagaattgaataaacttgaagcagaaaaccaagcccatctttctcttatagctgaaataatggaagagttaattagtaggggagatatacaacaacaatgggagcaaaagatgaaaaaggagcaagaacgggctcttgaagttgacaataatcttcaacatgtattgcatgagcatgcaaatgagaggacagacagagaagaggaactagcagacttgttgaaagaaagagcagctctagaatgccagaatcaggaactcataaatttaaggtcagaaattgacggcatgtatgatagattggcaactgagaacgaagaggtcatggctgatcagcagactttggaaaacctgatgtctgacatgaccagcaagcatcaagctgtcaatgaagctaaatcatatcttgaagctgagaaggaagctcttactatgttaaggacttgggtggaagatgaagcaggacgtgtccatgaacgagctgagacacttgagaaggctttgagaagatggcgaatcccagaagattgatccctccaaactaactgtgctttgcataggaaaagtcttgttcaaagtttttggagctacttggttccagagcatctgccatcagatctgaaaaattctcaatggaatggaatggtcgtgccataatgttctttgagatggttcattatcctttggtgcttcttggcatcttgttgccatcttaggggccgtctgtatcccttcattttggagaaattataatctatttaataaagtaggctatttaactttaaatttaacattccataactttccaaagttcaaatataagcctatcacaaaactatgttactttagagaaattgattttatgtatttctaaacaatgttactctgtaatttataacacactctttgactcacctcctgtagtagaaatatagcaaataaatatctctccatatggtcaacagtggtacacta

SEQ ID NO: 21263 - DNA, 1555 bp, Zea Mays
aaaaaactccaattgcggcgggtggggaaaaaaagagagaaagaaatttttttctccgttttttgaccccaattctgactgactcgccgccggcggctcgatcacgccggaaccctagtcgaggctggggtagtttcggccgtgctcgggagctcgtttacgcggcgagctcgaccgccgcgggtctccggagccggtggacggcatcatcgtctagggtttgctcttaatcatctagggtttgctcttaccggagctgctcggccgcatcgtccgcgggcctacattttgtgctgccgccgagatgccgccgccgtctaagaagttggctcgcgtcgacacgctccagctcaaggatcagatcgtcaagcggctggggcccctgcgcgctgagctctacttccgcagcctcaagaagttcctcggctgtcagctcggcaaggatgagtttgagaagatctgtgttactacattggggaaggagaacatcaagctccacaatttcctcctccggtccatcctcagcaatgcttgtctatcggatgggcctccgccaagcatgcaggcggccactggaaactcgcagactagcacggtgtccaatgggacattcagcaatggcttattgccggtgaggagggtgaggccccggactaagaggttcagtgataagccgagcccgattgggaagtctcctcttggtcatccgagtgctgggggggagtttgtgtcagctggttgcaaggttttgcaggaggtaatctctgtggaggatggcgaggaggtcaaccaggcccgtggtagcccagtctgtgtgcagagccgaagcccgataaggcccccagtgggggttccaaaggttcagaattctgagcctttgatatcttgcgctttagatgtgtgctgcaattatggtgaactgccagattctcagacgctgtccaagctacttgatgataagttgaaggctcaaggtctcagtgtatccaaagagtttgctgatgtgttgaacgctgggttgaatgcatacatgactcggatgctgaagccctgtctaggtattgcgaaggcaaggggaatcaacaggacgatgcaccaagcaaatagccgcaccactgcttcagtaaatagtgggcagaacaatggctttcctttggaatcaagccattgttatcaagcttccctgcctgatctctcgacagcagtgctatcagatgctcagttagtggggtccgtggtgattcatgagaagatttcttcctatctccacaactgatagagagcagttagtttcctccacatttttggcaaaccctatggtggagttggtcaagtttaggcagtatgttgtagggccttctatcctgctgtagaaactacagctacaggtagttaggttgaggtatagtgaagttttactataggactgggtagtgtacccatggctggtgagggtgatacttcttaggatgcagtacatgatagtgagttccatttagctgtgattattcgcaaaggaaataattataacaaaagattctggaatgtgtcgtgc

SEQ ID NO: 21264 - DNA, 1610 bp, Zea Mays
cgctgcctctcttccgctcccctcctgcagtggagtcctcctcctttcccacttgccctgccttccctcgatcgaggcccttccttgttcgtcgaggagagatcgaaatcgagatcgggatcgggagatccaaggaggcgacgcggaggaaggattcttgagccaaggacgacacgccctactcccgcctcctccgcgccgagctctttggccccgattcacccaaacccaccaccgccacctccgcagcctccgcctcgcccaacaccaacctcttccgcttcaagaaagaccactccgctcccacctcacccttcgctaaagctgccgccgcgcaccatgactgcaccgcgggatccggagacgcgccgtcgccgcagaagccacccaggaaggtccccaaaacgccgcataaggtcctggacgcgccctccctgcaggacgacttctatctcaacctcgtcgactggtcctcgcagaacgtgctcgccgtcggcctcggcacctgcgtctacctctggtccgcgtccaatagcaaggtcaccaagctctgcgatttggggcctagggacagcgtatgcgccgtgcattggtcacgggaaggctcttatctttccattggcaccggccttggagatgtccagatttgggatagttctcgctgtaagcggattagaaatatgggaggtcaccaaacaaggactggggtattagcatggagctcatgcatcttgtcgtcgggtagcagggacaagaacatactgcagcatgacatccgtgtccccaatgactatatcagcaagttttctggtcatagatcagaggtttgtggactcgaatggtcgcatgacgaccgcgagcttgcctcaggcggaaatgacaaccagttattagtctggaaccaacgatcgcaacagccagttttgcggttgacagaacatacagctgctgttaaagcaatagcgtggtcaccacatcagcaaggactcctagcatcaggaggtggaacagctgatagatgcatcaggttttggaacacggctaacggaaatgttctgaactcaattgacacaggcagccaggtttgcaaccttgcctggtgcaaaaatgtgaatgagcttgtgagcacacatggatattcccaaaatcagatcatggtgtggaaatacccatccatgtcaaaggttgcaactctaactggacatacgatgcgtgtgctttacctcgcgtcgtcgcctgatggacagaccatagtaacaggggcaggtgacgaaactctacggttctggaacatatttccatcagttagaacacagactcctgtgcgtgatattgggctctcgtcattctcaagaagccacatccggtgaggaggcggcagggcctggagggaccagatcggaggcagacgaaatgttgtactgatactgagatgttggtttattgagtgattcttttctgtatattgtgaggcccggtaatttttcattgattctttttgttgtttgtacgtgtaaaagacaagaactaaaagtgtaagcgacatttaacttcaccagttggattggtttgttactcattaactttacctaggccattctcaatgaaat

SEQ ID NO: 21265 - DNA, 700 bp, Zea Mays
gcggttttcttggcgggggcgaggacgccagcaatctaggagagattggtacattaatatatgctcgagtggtgaaagcaaatagtatcatgaatcccgagctctcatgcatggatgctactgggaaagctgccgaatttggacagctcaaagatggttatatgttcgacacatcaactggcatgtcacgaatgttgttaagttccccaacgtgtccagttctggaggtccttgggaaaaaactgtcgtttgagattgctgttggactcaatggtcgagtctgggtgaatgctcctgcagcaagtactgtcattcttgtatcaaatgcaataatgaggtcagaatctttgagcggcataaaacaaagagctatggtagaaaatctattggagagattgtcatgatgataagtcagcaagcattagtctaaagtaaaatggaggagtttccattgtgtcagttcaaagtaaaagtaggaaagtttgagatcaaagtgactatccccatcaaaagattattatgtatcacgtgtcgtagtatacagtacactatactcttttttatattaaattatcaatgtatttatcaaagtcttgcgtcccttgtttaatattcgaagggcgggtctagtgcaatcgtgagacctgtctcactaaatcaccaggtcacggctttgaagcagtcttatcatgtttgtggg

SEQ ID NO: 21266 - DNA, 2516 bp, Zea Mays
ttcgctttcttgctattcctctcacttttgtgagtgtatgtgtgtgggagtccagacggggacatgatagactgcgtgcacatctcacaccagccagcgtttgatcacccatacctcaagaaccacacgatccagatgaggccgaactaccacccggaagggctgtacgaggaatccaaggcctccagcagcggtggcgagaggcctatggctcagctctggcatcagaacgggaggtgtcccgaaggtacggtccccatcaggagaacgaggaaggacgacctgctgagggcaagctcgatgcgtcggtacggcaggaagcgccgcgccgccgcgaacccgatgtccgtcagtcccaccatgctcaacgagggtgggcatcagcatgccatagcgtacgtccagggcgacaagtactacggcgccaaggcgactatcaatgtgtgggcgcccaagatcgaacagcccaacgagttcagcttgtcccagctctggatcttgggcggctcattcggggaggatctgaacagcatcgaggctggatggcaggttagccctgacctctacggggataacaacacgaggctcttcacgtactggacaagtgatgcgtaccaggcgacagggtgctacaacatgctgtgctcagggttcatccagatcaacaaccagatcgccatgggcgccagcatcttcccgacctcgagctactccggctcccagtatgatatcagcatactgatctggaaggaccccaaggagggcaactggtggatgcagttcggcaaggactacgtgctgggttactggccgtcgttcctcttctcgtacctggcggacagcgcgtcgatggtggagtggggcggggaggtggtgaactcgcaggcggacggcgtgcacacgtcgacgcagatgggcagcgggcacttccccgaggaagggttcggcagggcgagctacttcaagggggtgcaggtggtggacagcagcaacaacctcggggcgcccaggggcggcctgggcaccttcacggagcagtccagctgctacgacgtgcagagcggcagcaacgccgactggggcacctacttctactacggcgggcccgggaggagctccagctgccagtaactggtgggctctctagctaggtagtgatgtgcgtgctgctggcttcacctttgtttgtggtagtttcttcttcttcttccgattagtcattagtgccgccgtgccgggatggcttctgaagagaagcatggcatgtggtggtggtggtgccctaccctacccttgttgtggtggcctgcctccttttcctatatggtagattcacttgttcgtccttgtggttaggactgggcatttttaacccgaaaaccgaacccgaaccgaacccgaacccgaatagaccgaataggtcggttttcggttttcgggttcgggtttcggttcatagatctcttctgttcgggtatcggtttagggttcggtttccagccagccaaacccgattagactcaaagaaccgaactatagtgatcctccctctgtccctcagcccaaaccgcgaaacctagtaacgggctaacggcccaactcaggcacaggcactccgcggtgacataggcgcagtccagtccgcacccgcaccgcacgcagcacgcacccgcaggccgcattgccgcaaccctagccgcatggcgcacgctggtccgccgccgcgccgtcgatccaccgctgctctgccgcacggagtcgcactggtcagccaccgcgccgtcgatccaccgctctgccgcctctgcgcgtcagccgcgctaggcgccaaccttccactccataccggtccaccggcgtcgatccaccgacgactccgtactcggtacttccaccgcatcgcggcaccggtccaccgctctggcgactcggtgttctgcacttctgctccgatttcggcgtcctgctccacggtgcccacgactcgctgcagaccgacccagcacgtaaggtgccgcggatcctggttgcgtccgaggagaggctgcgccggaacgcggagttcctgctcaacgaggtcgggctgccgccgcagtacatcgtccgccgttcggtgcttctcatgtacagcctcgagaggcggatagtgccccggcacctcgtgctgatggttctcaaagagaaggggttggttgagcaggaccggtgcttcttcaacgtggttctcaacgaggctgcacttctgtttgtgaattgtgatggattgatgatgaacctgttaagttatttcctgtggtgtatgaacttgcatgtagttggcattttctaagtcaatttgtcatgtatttgtatgcacttctatgcaattttgtgtgaactgtgaaccactaaacctatttatcaattatcatgtctgtgcactgttcgggttggtgaagaaccgaatagaccgaaccgattttttttggtctattcgggttcggttcctataaaaaaaattaagatttcggttcttg

SEQ ID NO: 21267 - DNA, 3385 bp, Zea Mays
atttgggggcagctgtcagcaatttctcccttttcttcctcatttacttatccctctcgcttcccgcatcccacgccgccgtcctccgcaccgtccacgccgccgtcctccgaccaccgcgactctgccgcagccgccctctgcaccgtcctcgccgcgcaccaccgcgactctgaccgtggcccgcagtcctgcctcgctgccagtactgagcccgcaggcggcgcccgcagccgagccggaggtcgccagcgccgccagaagacttgcttcgagggattccctacgggctcaaggtcaatcaggtgtggtcgcagttttccatttttagggttcagctaaactggccccccatgtcccatggtgtgcccgcccccatgttagaagagttggcgagggaggcaacactcgccgatgtgtctattcttgtagatgggaatgacgcagagctacatgtacatggcaatggcgcagaggtacatgataatggcacagagttacatggcaatggtgcagtgctgaaaagagttgaaatgccccaggatttgggagcgatttcagccaaggaggtgccgctgcatgagggcaaggaggtgatacttgtggatgataatgacagcgggcaggaagatgatgcagagggtaaggtggatgagaacacacctcgtgttgggctgagattcaaaacttatgatgacgctctcaagtactataaacaatatgctgaggattctgggttttcagcaatcattctgaagtcgtcgtatttaaagtcaggggtgtgccgaaggttggtgattggatgtagtcgagctgggagagggagagcaaatgcgtgctatctatcaagagagtcgaccaagataaattgtccagcaaggatatctttgaagttaaggcaagatagatggcttcatattgatgatgctaagctcgagcacaaccatccatacaaccagtccactacatcacttattaattgttataaaaaactaacagatgccaagaatggggtatctgcctcacgattgaagggtcgcaggaacattccagctgaaaaagagcaagggaacttcacggagataggaaggcttaaatttggggaaggagacgatgaatatatccagaagttttttgggaatatgcagaacaagaatccttacttcttctacttagtagatttggataatcagggacgtttgaggaacttattctggagtgatgctaggtcacgggcagcgaatgattactttggtcatgatgttgtttactttgacacctcatacttgacagagaaatatgatttgccacttgttttcttcactgggatgaataatcatggtcagcctgttctgtttggtactgctttactgtcagatctaagtgttgatagttatgcttggttacttagagcatttttatcatgtatgaagggtctctgcccaaaggcaatcatcactgaacattacaatgctattatggatgctgttcaagaagttctccctgaagttagacatcgcctttgcctgtatcgtattatgaaagatgtagcagagaacttgaaagaacatgcagagtttaaaacaataaataaagcactgaagaaagtaacatatggatctttgaagataccagagtttgaaatggagtggaagaagattatcgaagagcatggacttggaggaaatgagtgcctcagttccctttatgagcaccgccaactctgggcacctgcatatctgagagataaattctgggcagggatgtctatttcacagcgaggggagtctatttcctcgtactatgatgggtttgtgtacccaaaaacttctttgaagcaattttttagtaaatatgagatgatattagagaacaaatacaaaaaggagtggcaagcagatgaagaatcttcccataggtctccattgactgtaacaaaattttacatggaagagcagctggctaaagcctatacaataaacatgttcagaaaatttcaagatgagttgaaagcaacaatgtattgcgatggtatgccaattaaagttgatggccgacttgttacttttgaagtgaaagaatgctcatacatggaagatggaaaggacacagagagcaggacctatgaagtttacttttgtaaagaagaacccaaagttgaaattgagtgtgaatgtggtttcgttcagttcactggcatcctgtgtagacatgcattgtctgtgttgaagttgcaggagatatttgagatcccaaaagattatgttctcgatcgctggagaagggactataagaaattatattataatgcaaagaaacctaatgaaatgcctcttagtgacattgttgaacgctctgattatttgttcacacaatgtagtcagctgctcaatctagggtttgtatctgagagtaggtaccttgttgctctgaagttactgagagaaatggaaagatctcttctggatgatggactacctgctagagacaggcagccaatgcttctttcctttgaggctgatgcaccagaaaatggtcaaggcctttttagtcctcagttttcagagggcgtaaagaattctcagtcagcccatgcaaagcgccgtggccggccactgaagaaagtgacagaatctactgatgataccgtaacacagccaaataaagaacaggatttcctacgatcatcatttgtcacagaaaatacaaatatgatccaagggccatcttctgcctcccatcttgaaggtcctcacatgggagtgcaaggaggcattgatttaatggatggaataccaaatctctcatttggtaatcattttggaatggatattaatcaccaacatcaagtacccaaccaccaaaggatgcagcagaacaatttcatacaggtgcaggcagaaccacatgggtttgggaatcagtgggtttaccacccaatgttgcaggataatccagtgctaagaactcctgcacgaagagcagggtagtgtgtattcattgctctaattatttcagttaaactttaggcaccatgacttctcaggctcctgtaatgacttcctgagtcctgaactaacctaaggataccgaggctgtacgtggcactggcactccagaatccagatggcaagaacttggcagtgaatccaattgattctaacatttttgttatatgatactgttagctgctctcactaggatgaatgttcaaactgtacatagcactggctctataatatgatctttttatttcctgatttgcgccagaactgatattttgtggcagaggacgcgtattgtttagcatattggtttgtttcagacaaagatcagactagtatgctgtatgcctttaaaacgagggagtggcagtagctcaaga

SEQ ID NO: 21268 - DNA, 2234 bp, Zea Mays
ggcaaaccgtattgttggcttcgcctagggtctcccttctactgtcgccgcaacctgaccaacctcccttctactgcccgcctagggtctcccttctactgccgccgcaacggcgcaacctcccttctactgccgccgcaacctcccttcttcgagtcccatccgacctagccctgcaacccgccggacgacgagcagtgaggcccgcggccgagatggaccggtacctgacggtggagcggccacggaacgagtcaaccatcgaagagaacgggatccgcatcaccgcgcagggcctcatctgcaactatgtctcctacgctacctccctcctccaggtgcctgggcttgtcctcaccatcgccgtcgtatcgtattgtacttaggatgcgctgttctgttcgagtcccgtccctgtcgattcgaagagatccccagcaacgtgagggaggtgttcctgaccggccccacctccaagttcggcagggccatcgcgctctacctctgcaggaagaagatcagagtcctgatgttcacggtgtcgtcggagaggttcctgaagatccagagggaggcaccgccggagtaccagcagtacctcgtgcaggtgaccaagtaccaggccgcacagaactgcaaggtcatggtgatttcacgtccgttaggctcgagaggtggactcaaacatccaagttttgcaagttttgatgttggatgttaaatttctatgctcacccctcgtttggttattgatttgatcatagttttgcatgaactattggcgttggctatctaaaaggacagaaaggcagacatgagcaacagatcccgctccatgggctgaaactgggattcgtgatggcaggcgcccctcttagtcgtgtgtagggcgagctgctgccatggtggctttttcttgcgggtgtgagctccgctcgccgccggtcttggacgccgtggctaggctcctaccacccctccctccacccgggactccacgctgccaccgccacacgacagtacgcatacactcttcttcctcccctcgctctggatggctggcgtccgctccctcagcgcctccgcccatgcccggctcccgcacttgccggctccccgatggagatgaatgaagaaaggaagatctgcaagaataaagtcgaggcggaggcttggtttactggtcttagtgccttgatatgtcgaagacagcatggatcccaggtccaacatatagatggaatccggattgctggacttcctattgatctatatacgacattcaataattagaaccagaatgaaagctttatccatgttggagcatttggttgagcctgaccatcgtcgagttgtggaatttttccaagatcggagatgcaatttcatactgtgcaaaagcaatttcgctatgcaagtcacgcatacagaacctgaaaagttccaaggatgctttgttggatggtatagatggtggtgatgcatctgctgctgaagctgaaggaggctcagaaaaatctaccattgaaaaagagctagagcagcttactagcatattgcctgatcttgagaagaagcttgaggacctgtctgaagcaaacccaagcgctgacatggatgagatggtgaaggcaattgtgtccagggtaactgaagtgatgccaaaagctgcatcttttacttcttcccaaatagcaacctcaagcaatggattcgactcctcggttatgtctacgacagcgacaactggaagctctggaagcactgtgaactgaccttggggttgtaggcagaggcgtcaaacgagctagcatcaagccgatctctgccaaacctgttgctaagaaacctgcacttgattcaccatctctccaaggtgacaacagcatcaactctgaggttgtccctgcgacgcagactgatgaatccagctaaagctctacatttgaaacgaacgctttctgacgggggcacggcgataacacgccttctattctagtatgcttagatagattcaatgttagcgcaaacgactgatgataagtttttcagttagtattttaatttggatttagagtacacttatgtatgatttatttgacaatgcttatttatgagacattgaattgtacttatctatattacattaaatatgatgttattaaatatgtgtgtatgtatatttatcttttaaattattataatgtgacatctcaaaaatgattataaattga

SEQ ID NO: 21269 - DNA, 440 bp, Zea Mays
tgttcacattttgaacccaaactgtacctatattcagcttatcctgtatcttggattgcagatctgtatcacgggaagcacatctgctggcctacaccagattcttccatggttgtattatcacaatgtcattggtgtttcacatttctttctattagttgaaggagaggctgcaaagccagctgtcacctctgttcttgaatctattcaggatgctagaatggattggatcattcacctcgatactgatgagttgattcatcaagctggtgcccgagagtactccctgaggcgattgcttttagatgttcctgacaacgttgacatggttatcttccccaattatgaaagcagcattgaccgtatgacattaaggatccttttactgagaaatgtttcctcatggtccattctccagcatacaatgtatagccagccat

SEQ ID NO: 21270 - DNA, 2617 bp, Zea Mays
tgttttcttaacacagtggagttaccctttttcagaaaaaaaggctaaagaatgatacgtagctactagctaaaagatgtgttggcctcttttatatggcacatgatcctagctgtccttttggtaaagagattgagataaaccagcagatctgtttgggttcgggcctttcggttgagcctaaagactaaagagaagacaagatgcgtcattctgctacagagaggagattgctgtgtgcaagttgaaatatcaatgtgggcaccacttttgtcagtctcatgaatttaaatggatcattccaagactcaagtgtgatgaactgatggggactcttggactataactggtttcctcttattcttccagccaatcctgacaaatgtggcatctcaagctgatagctttaatttatggctctcttttctttatgcacattccatatgctagaggttctgacctaaacaccgataagcaggcccttcttgcatttgctgcatcactgcctcatggcagaaaggtcaactggacctccacaacccaagtctgcacgtcctgggttggcattacatgcacaccggacatgaagcgtgtgcgtgaagtcaggttacctgcaatagggctctttggtcctatcccatcaggcacacttagcaagctcgatgccttggaggtgttgagccttaggtcaaaccgtcttactattaatctccctcctgatgtaccatctattccctcacttcgctctctttatcttcaacacaataacctgtctggaatcataccaagttcactttcttccagtctaacattcttagacctgtcctataactcgttcaatggagaaataccatcgaaggtgcaagacatcactgaactgacagcattgcttctccagaacaactctctttctggacccatccctgaccttcgcctccccaagttgagacatttggatttgagcaacaataacctgagtggacctataccaccctccctgcagaagttcccagctacttcttttctgggaaatgcctttctgtgtggatttccattggaaccatgtccagggacaccacctgcttctccatcgtcgccatcgtcccaaaatgccaaaagaagcttctggaaaaagctcagccttggtatcataattgcaatagttgctggaggaggggttgtattcatattgatcctgatcctcttggtatgtatcttcaaaagaaagaaaaatgcagagtctggcataggatcatcttcatccaaaggaaaggcaattgcaggtaaaaggggagaaaaatccaagggggaatacagcagcagtggtattcaagaagcagagagaaataaactgtttttctttgagggctcttcatataattttgacttggaggatctgttgagggcttcggctgaagtccttggaaaaggaagttatgggactacgtacaaagctgttctggaggatggaacaacagtggtggtcaagagattgaaggaagtggtggcgggaaagagggaatttgaacagcagatggagctaattggcaaggtttgccatcatcagaacactgccccattgcgtgcttactactactccaaggatgagaagctcttggtgtatgactatgtcccactaggtagcctttgtgctgctttgcatggtaacaaagctgctggaagaaccccattggactgggagaccagggtgaagatagctctgggcactgcacgcggaatggcttatcttcactccgtgggtagcggcgggaagttcattcacgggaacatcaagtcaagcaacatccttctctcacaggaactcggcgcctgcgtcaccgagttcggccttgcccagctcatgtccacgccccacgtccacccgcggctcgtcgggtaccggtcgcccgaggtcctcgagaccaggaaaccgacgcagaaatctgacgtctacagcttcggcgtcctcctcctcgagatgctcacaggcaaagcccctctcaggtcccccgggcgcgacgactccatcgaacacctcccgaggtgggtgcagtccgtggtccgggaggagtggacgtcggaggtcttcgacgtcgacctgctgaggcacccgaacctagaggacgagatggtccagatgctccacgtcgcgatggcatgcgtcgcggtcgtccccgacgagcggcctcggatggaggaggtggtcggcaggatcgaggagatccggagctcctactcggacacgaagacgtccccggaggacaatccgagggagggcgctttctaataaatcaccgagtaccacacgtaccggaacggcagtgacttgccgtctacagaaagtaggtcggttggtttgacagctctgtgtccagtgaagctttgcagtcagtcagttgattattcctgatcattctttggtaaaagttgttttctgttcttggttccatgaggtagccccggaacgctggtggtggtttcgtttcattagcgctgctgattactgtagggtgttgtttgtggatcgtgccgcgactcggtttcgtattcgtttgaggcagcccgactctttcaagtttgatttattgaatgcgcataagtttttgccactttcctg

SEQ ID NO: 21271 - DNA, 1645 bp, Zea Mays
tcgccttacgcctttccgcttaaaaggtaaaaagggggtcgttcgccttaactcgtcttattgccttaataactatggtcttgtcatcgtgcctataatggttaggtaataatagactaaagcactcttttcaagtcgtccgattaatcgtccaagtcgtccgactaatcgtgattaatcgcccaagttggtcagctagaacgaccagcaagtcgtccgatttgaaagcaatggactaaagcccatccttgttttggaatattttttaatctggtagtgacatattggtttctatttgtgtttactttatgccaaagcaatttttttgaagcctttttcctggtacattcagtagtcagtactttaaatccaccatcatggcatatggtctaacttgtactctagatcttgagggtaacaccgaggggaaaattcgggccactgaagaacttgacaagctaaaagaacaaagggcagaagagcaggcaaagatgttacttgaagctttcaacaaagaccgtgcttctttaataaactctcttcaaaatgccactcaaacaactacacctgtcccccctgctgctccggatgcacggacacaagaaatgataaacgagaaactgaaaaaggcagaagaactaggtgagaatgggatggttgatgaagcccaaaaattgttggatgaggcggaagctctgaagaagctggccacccgaccacaggctgttccagactctacaaaaatgagcgctcatgtccagataactgaccaaaagctgcgcctgtgtgacatatgtggagcattcttgagcgtatatgacagtgaccgtcgcttggcagatcattttggagggaaacttcatatgggttatatgcttatacgtgagagattgtctgaactgcaggaagagaagaacaaaaaacggaagctagaccgagctgagtatgacagaaggtccagggaaaggagcggggaacgtgccagggattcgagcagggatcgctacatagaccgcagcagcagccgtgacagggagtatgaccgcagaagaagccatgatcgctaccatgacagggaaagagagagagattccaggcagtctcgtagttatgattccagaagccaccgcaggtcatattcaccaaggggaagttctagggattatgatcgatctgggcgtcatgaacgccgtgatcggtactaggagcaaggaagcctccttgaaatttagggtactagattgcgttgcctcagggctagtttggccacctcatttttccaaggattgacaaccttatttttttaagggatttctattttcctaagaaaaattagttcattttcccctgggagggaataccttggggaaatggaggtgccaaactagcctaagtgttgttcgggaattctaagagggggcttaggtccaactggagaaaggcatcagctctttgcattataactaagggataggatctgacgtaatctatgcgtatcatattgttgtgttagctggtgttcatcgtgtaaacacaatgtggtggcgacgtgtcatgctttaatacgcttatatgcatttgaattaagttaatctgcccttgccatgtgtcttttattctggtaataagtttgtactcgtacgaa

SEQ ID NO: 21272 - DNA, 1565 bp, Zea Mays
agccctttgtagctcagctacctgttgcttcaatcgaacgtctttggcgctcactccggttgcagacctgcagcaggatgtggagcttgccagaagcagatgaggtagcagtactcccaaatttaagaagagaggaagaggctgagcgcaagactggagactgtaatgtaggcaaagttcaaggaaaacacgattacaatgacatgttacgtgtctcagatgctcaccataattcacagactttggataaggcaatagcgaacttggagacagagctctctgcggcaagaactctacaagattctttcctcaatggatctccagtgcaagaagattacaaggcttcagagtctaccggtaggcgcaagtaccttatggtaataggtatcaacactgcttttagcagtcgcaagagaagggattctatccgcaacacctggatgcctacaggggaaataaggaaaaagctggaggaagaaagagggatcatagttcgttttgtaattggtcacagtgctatttcaggtggaattgtcgatagagcaattcaggcagaggataagaaacatggagacttcatgaggctggatcatgttgaaggataccttgagctgtcagggaaaaccaggacatactttgcaacagctgttgctttatgggatgctaacttctatgtgaaggttgacgacgatgtacatgttaatatagcaacacttggaaatatcttatccaaacatatttcaaagcccagggtatacattggatgcatgaagtctggccctgtcctctctgacaaggatgtgaggtactatgaaccagagcactggaaatttggggaagtgggtaataaatattttcggcatgccaccggtcaactgtacgctatttcaaaagatttggcagcctacatatcgctaaacaagcatgttttgcacaaatatatcaacgaggacgtgtctttgggagcttggttgatagggttagatgttgagcatattgatgaccgcagactatgctgcggcactccaccagattgcgaatggaaagctcaggctggtaacacctgcgctgcctcgttcgattggaaatgcagcggtatctgcaactctgtgcagaacatctggggggttcataagaagtgttcagaagatgaaaaggcgctgctgactgtttctttctaatcaaagtgcagtgctgtgtatctgtacattgtgcaaagaatgtgtccggttcataggtggctaaatggcttacaattagacaacaccactggagcaggccgcaattttactcagcgtccgctggtggcactctgaggatttaaggggtgtagagctgaccgattcttttagcaagttggccagttgggtggtcatacatgtattgacctgataaaacaaacactatccgacgagttcagccaggctgtctgagctaagacaggatgaataacggctggttgagctcatgcaagacatttatttggttgattgtacaaattaatgcagaccggtgtagatgctatttggttgactggacaaacaaataaaaaaaaatcttttttg

SEQ ID NO: 21273 - DNA, 1061 bp, Zea Mays
aggcgatgttgaagctgccgatcccgggaataaagctgctgcggaaccggtgggagatgtagctgctgcggaacacgaaagttttaatcaaggaaatggtccaagggtgcatcactggaataagctcgagaccacaagtgtcatatctcctctaatctttactctctcagggcggacaggggcctacaagatctcctcgggccaaggaatcgttcccctccggcgacctccctcctccctttcgtctcaggccttccactgtatctccatcaaagcgaaggatcagaggctactccgttaggaggagaggaaaggaattgtgagccttgtgttggagaagtcgaagactgagagtatatggtggctccattggtgtccatgttaatggctggcgtgttctagagcaactcggggttgtcgtagagcttagggagacttgccaaccttagggagacttgccaaccttgtcatcgcgtaccatgccaacagaatgcttagcttttacgcaccagcgcgtgacgccatgtgggagcaaagttgggaaaatggatattggcggtggtcgagaggtcactcttattggaagtctagaaatgccaaaggatgacatatggcttgtcacagctatcctatctggtctgattgaataatgtgcgaagatataagtcatatatttcttggcctcctatcttcgcctcaggcagctgggagtggttttatactcgctgatgacatcaagtcttaggtgcttccattgatcaataactcagggaaatatggagggatcatgatgtggttcaagtactatgatgatcaagatggctacaattcttgagtgaagagtgatgtttaggttgttgcctgtggtgtgtcacaatatctgtgtgttacttgtgtgtatgtgagaaattatgtgactctggagtctggatagtgcaataagtattactcaagtatatgattgaatcttctgtcatactattcaaattatgtcatattgtatcttttaaggtatgtaaacatccacttttagcgatgctaacaaaagaatagaacaacaa

SEQ ID NO: 21274 - DNA, 2578 bp, Zea Mays
aagtctctacgcggtatatagaagtccgggccattaaagttcccacttattcaccttccctctttttcctcccgcttccgaccgctcctcttcttctactccttccattcacactccacatgccgacgctggcggcggcggcgccggtggcggcggtggagtcgtagccgcctgaatcagcggtcttgtagtgacgccggaaccaggggcgcgagggggaaggagatggcggcgccggcttccgcggcggccgggcgcggcggggccatgtcgtcggacaacgccaagggcctggtcctcgcggtgtcgtcgagcgccttcattggcgccagcttcatcgtcaagaagatggggctcaggagggccgccgactccggcgtccgcgcgggatatggcgggttttcttatttagtggagcctctttggtggataggcatgatttctagtaagttttctttccagtcttattaaataatgaccttttataatactaaactcctctagttcgtttgttgtttatatgtatgcaattcttttctacattggggttattggtgtttcgccccaaatatacagcatatcatgttccatttgaatatttccccattattattcttgcttggcttatcaatggttctcaccctgctttgctaacactgtctatgttgatagtccttatagaaaacaaacacacaaaaaaacatattgctgagaatttgagatacatatggccggtttgttttagggagaagtaaatatctcattcaagaaagcagctttgatagtttcataggtgcctgcagatatagaattatagattttagtttttttattgggccagtacaggcccatgaaaaacatcagtacaatttagatcttatcatctgaatggaacattcattgctaacaatttgaggctgttttgttgaacttaataggaagtggatggaatgacattatgtagtgtactaagtttgctaagtgatttatgtatgcacagaactgctgctacaaccttttttaggagaacatgttactgaagctttctgaatgaaagaaacttgaaatatgtacgtacatgtgttttgtacagtgattgtaggtgaaattgctaattttgctgcttatgcattcgctcctgctattcttgtcactcctcttggtgcactcagtataatcatcagcgctgcacttgcacatgccattctacaggagaaactgcacacatttggtatacttggttgtgttctctgtgttgttggatctatcacaattgtgctccatgccccacaagagcgtgacattgattctgtaaaggaagtttgggatcttgcaactgaaccagctttcctttgctatgcggctatagtagttgcagcagccttagtgcttatatattttgttgtccctcatcatggacaaacaaacataatggtgtacattggagtatgttctcttctgggatcactcacggttatgagtgtaagagctcttggaattgccttgaagctaacattgtcaggaacaaaccaattattctatcctcagacttgggcctttgcactgattgtagctacctgtgtgagcacccagattaactatctaaataaggcattggatacatttaatacagcagtagtctcaccaatatattatgtgatgtttacttcactaacaattatagccagtgtgataatgttcaaggattgggaccatcaaaatccaacacaaattgttacagagatgtgtggcttcatgactatcctatctgggacgtttcttcttcacaagacaaaagatatgactgatagtcctggacaatctttgttgacacgacggccaaagcatgctagtcagaatgcgtttgcaattgaagtgatgccactaaaatgtcaagattatatagatgacgagaccttgacgttatcacttcccaaggttgaaaatggttacctaaaggaagagtatcttcttagatacaaggactcgagtattgtctgatagataattcttcgccaacatttgacgggaagctcttgagaatcattctgcttccagacatgattgattgatgtagaactggagttggcagttttacctcaacctggccttggatagattgatattacagattgtaagttgtcaactgtggtttgtctacatctggatgatgttttgagggaaggagcatgccagaaggatgccacattgaggccaattaagtgctagtcatctaggaattgtggttccggaaaagaatttgaagtgtacttagatacaatggtgtcaccaactatactcttttcccccctcttttctctctcattttagaacgccatgtgatagctgcaatgtgatcttatctgattcataggacgacgccatatagaaatgtcaagcatcgttttttcctgtaattacatcaaattggccagttgtcattgtgtatacttagtctatgtaaagtatatcaattcatactttatgacaagggacccttaggataaactcttgatcattctaattcatatttctcacattgctaatattttctgagcatgtgcttcattgataacca

SEQ ID NO: 21275 - DNA, 6249 bp, Zea Mays
aacgaagatgccttccccagctcccctctcttgcccaccttgcttcctcgccaccaccactttccccaccgctgcggcactagtcagtcagcaccagcaccttcgtcaccctgcgcttgtgcgcggcaacaccaacgcgcgccgtcgggatcggcggcaccgctggaaatggcgagcgccggcgccggcccgtcggggccggtgcggtccatatcccaaacggggcggtcgcggacgatggggcgtatgcccacgcgcgccttcaccatacgtccggacggatcctccggtgaggacggcgtcgatatcgtggaggaggagctcgtgccctcgtcgctcgcgcccattgtacccatcctccgcgccgccaacgagatcgaggaggagaacccgcgcgtcgcctacctatgtcgctttactgctttcgagaaggctcatcatatggaccaaaactcaagtggacgaggtgttcggcaattcaaaacatacctcttgcataggcttgaaaaggatgaacatgagacaaagcgcagtcttgctacaactgatgcaagggagatacagaagttctatgcgcagtactgcagaaaatatctagaacaagatcatgataagaggaaaccggaagagatggctagatactatcagattgcgtccgtcctatatgatgttatgaaaactgttacacctggcaaaaatgagtatgatgattatgctaaagatattgaaaacgaaaaagcatccttttcacagtacaatattctaccccttaatatttctgctcgagaacaaccaataatgaaaattcctgagatcaaagcagcagtgaagctccttgagcagataaatggccttccaatgccaaggattgaattaccacaaagctctgacagaaaaacagtgtccgacaaaatggacagacctgtggttaaggatttgcttgattggcttcggcaaacatttggatttcagaaagacagtgttgcgaatcaaagggagcacttgattttgctccttgcaaacattgacatgagacaacagggtactgccgatcatagtgagagacatgttcacatgatacgtagtagcacagtgatatatttgaggaacaaaattttccataattataactcctggtgtcgatacttacatctggagtcaaacattaggatccaaagggatgcccccacacaacagccagagcttctgtacataggactgtatttactgatatggggtgaagcttccaatgttcgcttcatgcctgaatgtctttgctacatctttcaccatatggcaagagatttacatgacataatatctgatacaagccaaggatcatttgagccaccgttccagggagaggggagtgacgatgcatttctgcagctagtgatccaacccatctatagtgttatgcagaaggaagctgcaaggagcaaacgtggtaaggtgagccactcattgtggagaaactacgacgacttgaatgaatatttttggtcaaaaaaatgcttcaaaaaacttggatggccgatggatccaacagctgacttttttgcagaacctaccagagccaagaatgaaactgagcaacatggtcacgtgattaggagaagaagggcatcaaaaacaaattttgttgaagttcgtacatttttgcatatgttcagaagttttgatcgtatgtgggccttctttatattggggttccaggccatggtaatcattgcctggagcccttctgggtcactttcttctatatttgaaccaaatgttttcaaaaatgtattgacaatctttataacagcggcatttctgaacttccttcaagccacgctagagttaattctcaactggaaagcttggaagagcctggagtgctcacaaaggataagatatatcctaaaatttgctgtagctgttgcctggttgataattcttcctactacgtactcaagctctattcaaaatcccacaggccttgtgaagtttctcagcaattggattcaaaatttgcagaatgaatcaatttataattatgctgttgccctttacatgttaccaaacatattcagtgccctgtttttcatgtttctaccaattcgacgggccttagagcgctcaaattctcgcattattaggttccttttatggtggacacagccaaagttatatgttgctcgaggcatgtatgaagacacttgctcacttcttaagtatactacgttctggatcctgctgcttatatgcaagctcgccttcagttattatgttgagattgctcctttagttgaacctaccaggataatcatgtcactggaaaggccgccttatgagtggcatgagttcttcccaaacttgcggcataatttaggtgttgtggttactgtatgggctccaattgtcatggtgtacttcatggacacacaaatatggtatgccattttctccacaatatgtggtggagtctatggtgcattcagccgcttgggtgagatacgaacccttgggatgttgagatcaagatttgaggcaattccaagagcatttggcaaaaaacttgtacctgatcatggcagtcacttgaaaggagatgaggaggacaaaaacccacccttcgataagtttgctgacatatggaatgcatttattaattcattgcgagaagaggacttactaaacaatagggagaaagatctattggttgttccttcatctggtggtcaaacaagtgtttttcagtggcctcctttccttcttgccagtaagattccaattgcacttgacatggcaaagagtgtcaagaaaaaagatgatgaacttatgaagaggataaagcaggatccttatactgagtatgctgtaatagaatgctacgatacattattagatatcctttacagcattattgttgtacaaagtgataagaaagttgttgatagaatacgtgaaagcatcaaagatagcatccaccggaaatcactcgtgaaagaattccgattggatgaacttcctcaactaagtgctaagtttgataagttgctaaatctactgaaggaatatgatgagaacgatcctgtaaatagaaacacacatattgccaatctgttgcaggatataatggaaatcatcacacaggatattatgaaaaatggaaaaggtatcttgaaggacgagggccaaaaacaacaactgtttgcaaaattaaatctggattcattgaagcatgttgcttggagggagaagtgcattaggcttcaattgttgttgacaacaaaggaatctgccatatatgtaccaacgaacttggaagctcggcgtaggatcaccttttttgcaaactcactttttatgagaatgccaagggcaccacctgtccgtagcatgatgtccttcagtgttttaactccatacttcaaagaggaggtgctcttttcaccagaagatcttcataggaaaaatgaggatggtatatcaatactgttctacctacggaaaatatatccagatgaatttaggaacttccttcagcggatagattttgaagtgaaggatgaagaagaacttaaagataagatggatgagatctgtaattgggcgtcttataggggtcaaactctcaccagaacagtaagaggaatgatgtactacagaaaggcacttgaaatccaatgccttcaagatatgacagatcctgctaaagttgaccgagacagatcaataggatcctaccaagagttgcaatatgatattgaaatggcacaagctattgctgatatcaaattcacttatgttgtctcatgtcaagtttatggcatgcaaaagaaatcaaaggatttaaatgaaaaaaggcgctatcagaatatcctcaatctcatgataatgaacccatcactacgagttgctttcattgaggagatcgaaggtctaaccagaaatggagcaactgagaagacatattgttccgttcttgtcaaaggtggtgaaaagtatgatgaggaaatttaccgcataaagcttcctggcaatccaacagatattggagagggaaaacctgaaaaccaaaatcatgccataatcttcaccaggggagaagcacttcaggccattgatatgaatcaggataattatattgaggaggcgtttaaaatgagaaatgtgctggaggagtttgagagtagaaagtatgggaagagcaaacccactatattaggcttacgtgagcacatttttactggaagtgtttcgtcgctggcttggtttatgtccaatcaagagaccagttttgttactattgggcaaagagttctggcaaatcctctcaaggttcggttccattatggccacccagatatttttgatagactcttccatatcaccagaggaggcataagtaaagcttcaaagactataaatctgagtgaagatatattttcaggttttaattcaaccatgagaggaggaaatgttacacatcacgaatacatgcaagttggtaaggggcgtgatgtggggatgaatcagatttctagcttcgaagctaaggtggccaacgatttgacttctacagaatgttatctttctattttactacagttgggttctattttagtagcatggttactgtacttactgtctatgtgtttttatatgggaggctttatctggttatgagtggtctggaaaagtctattatgctggatccacgaaatcagcagaatgtcaaggctctcgaaaatgcactggcttcacagtctattttccagctaggtctgctgcttgtcctccctatggtcatggaagttggcttagagaaagggttccgcacagcattaggagagtttgtaatcatgcagcttcagttggcatctgtgttcttcacattccagcttggcaccaaaacccactactatgggagaacaatactccatggtggtgcaaaatacagaccaacaggtcgtggattcgttgtgtaccatgcaaagtttgctgaaaattaccgtatgtactcccgtagccactttgttaaaggactggaactcttgatacttttggttgtatatctagtctatggaagttcctatcgcagctcaaacatatacctatttgtcacctgctccatatggttccttgttgcttcatggctcttcgcgccatttatcttcaatccatcatgctttgaatggcagaagactgttgaggactggacagattggaggaagtggatggataacagagggggaattggcatgtctgtggaacaaagctgggaagcctggtgggtaactgagcaagatcacctcaggaagactagcatccgagcttttgtgttggaaatcatcctttcacttcgatttttgatctaccagtatggcattgtctaccatctgaacatagcagatcaccacaaaagcattatggtatatggagtatcatgggtggttatgctccttgttcttgtagtgctgaagatggtttcaatagggcggcagaaatttggaacagacctacagcttatgttccgcattctcaagggccttctcttccttggttttgtctctgtgatggcagtcctatttgtcgtcttacaccttactatttctgatgtcttcgctagtatccttggatacttgcctactggatggtgtcttcttctgattggacaagcatgctcaccattgattaggaggaccctgctgtgggactccatcatggagctcggaaggtcatacgagaatataatgggtctcgtcctcttcctgccaattggtttcctgtcgtggttccccttcgtctctgaattccagacacggctgctgtttaaccaggcatttagccggggcctccagatctcaaggatccttgctggtcagaaggatgttagcgagttcgagttcaagtgaccaatttcatccctcttgcaagcaaaccaaactcactttcatgtatttgtttacgatgatcgattttgggtgtctgtactctagtatattttcatcacgtttactactataatactgtctgtacttgagaatgttttgcctctgtaaactgacatgtagaatttctgtaatatatttatggaatttgataacttccatccatgcactgaacgctttgaatggaccattattactaaaggggtaacaaatttatcattgtaaggtcaaacatgtttgggctggaagttttgctattcaatactccaaacatgtttgtaagtgttagatactcatttaaggtttg

SEQ ID NO: 21276 - DNA, 1262 bp, Zea Mays
ttttcctctgagccgcgacctgtctctgtctctgtctctgtctctgttcttctgccccgactccgcccacgcatctctttctcctcttcccccgcgcggcggccgcgggagtgttcgtgttcctcacttctcccgcttgcgtccccgacactccctcagatccgcggccgtttcccgatccgaggggcattccagccctaaatagcggccggtgagcaggtctccttccgccggcgcggaccacctggagggagtttatcctggagccgtcttcctcctcgcctccttttgcggcgcggcgcggaggccggagtcgcttggaggcccagctgtgtttgggttgatttcttcgtttgtcgggcctgtcttctgcctctgcttttgcttcgaagcaatggcgaatgcaagcaagcacttgcaaccttcaagtcaagcaggcaatgacaagaagtatcagggcacgctggttgcttcaccagcaaaggccatttcacctaagtgtgtgaaccgcattgtgccatcgaagcaactgatcttgggtgggggttcaataggccatgtggcatcatttctgatcaaggtcgttgctcttgaggcagtgagaagagtttctaaaacaagatgccctttcatatggaattctgttcaagcattgcagatccttgtgtatcctccatttagctggatccaaagatgggcaccgctcggatttctcgtgcagggaattcagaaactatccatgccactgttgtttctgtcagtcacaacaacagtaagtgagctgtcttccaagcatgatgatgaaccagataacaatacagaacattctgagacaccttccgaaacaaatgaattggcgtcaacttctggcacaagcgatgctgctgatggcacaaaggaaatcgtgcaagagaactggcttgtgttacttttcagggagcttgagaagcaaggcatcactttgcctgagaggtttactgaagatgagttacgcagattttatgttgctgcaaatggcgactttcaaagtttactctcttcggttaagaagacaattcattggagggaaacatttcacatacttacattgcaagaacttgatagatggtctcacttagtcttttggcatgggtttgacacgatgcttcggccttgtttagtagttcgtcttggacttgcatgctctagcatacctcctcatgatagaccccgtttcgggcaagcagtagaagggcagacctggtgcagtgatgagagttgtc

SEQ ID NO: 21277 - DNA, 4388 bp, Zea Mays
cgctcactgtgggcatcgcaaatgctcttcacatcacaccaagtaggaaacagaaaatatcgattcttcataatgtcagcggcattatcaagccgcacagaatgacactgcttttgggtcctcctggcgccgggaaaacctcactgctgctggccttagctggaacactaccttcaagccttaaagtaacagggaatataacttacaatgggcacacaatggacgagtttgaggcccggagatcagctgcttatgtcagccaacatgatctacacatgggagaactgactgttcgtgagacagtcaatttctctgcaagatgtcaaggaagtggtcatcgctatgacttgctagttgaattgtcaaggagagaaaaggacgcaggaatcatacctgataaagaaactgatacctacatgaaggctgctgctacaggagaccaaaaggctgatgtggtcacaaatcacattctaaaggtcttggggttggatgtctgtgctgacacaatcgttggaaacaatatgttgagaggcatatctggaggccagaaaaagcgagtaactacagctgagatgcttgtcaccccaggacgagctgttttcatggatgagatatcaactggacttgacagctcaacaaccttccagattgtgaactctatccgggaaaccattcacattgttggcggaacagcagttattgctttgctacaacctgcacctgagacatatgacctgtttgatgatataatcctcctgtcagatagtcaggttgtctacagtggtcctcgtgaatatgtccttgagttctttgagtcagttggcttcaaatgccctcagcggaaaggtgtagccgacttcctgcaggaagttacatcaaagaaagatcagagacaatactggaaacatggtgatgacacctaccgatacgtccccgtgaaggagtttgcagaagcatttcaatcgttccatgttggtgaggctatacgaaatgagttggctgtcccattcgacaagagtacgagccatcctgctgctctgaaaacatcaagatatggcgccagcgtgaaagagctacttaaagcaaatatcgacagagagatattactaataaaaagaaattcctttgtatacatattcaaggcagttcagctaacactcatggcactcattacgatgaccgtctttctccggaccaatatgcatcgtgactcaatatcagatggaaggatatacatgggtgccctgttctttggggtcctgatggtcatgttcaatggactggcagaagttggcctaactattgcaaagctcccagttttcttcaagcaaagggatcttctcttctaccctgcatggacatactccttaccatcatggatcattaagactcccctctccttgctcaatgtaacaatttgggttttcataacatactatgttattggatttgatcccaacgtagaaagactttttagacagttcctgctcctcttactaatgaacgaggcatcatcaggattgttccgtttcattgctgggcttgcaaggcatcaggttgttgcaagcacccttggttcattcggcattctgatatgtatgcttttgggtggattcctcctggcaagagagaatgtgaagaaatggtggatttgggggtactggatatcacccctgatgtatgcacaaaacgccatatcagtaaatgaattcctgggtagcagctggaataagcaagtaatccccggttcagcagaaccgcttggaaaactagttctagaatctcgtggactttttcctgaggcaaagtggtactggattggtgttggtgccttgcttggatatgtgctgctattcaatatactctacacaatctgcctcacattcctcaaaccatttgacagcaatcaaccgacaatttctgaggaggcattaaagataaaacacgcaaatctaactggtgaagttttagaagcatcatcgagaggacgggttgccagcactacaacaacaggtactttggacgagagcaatgatgaagcagcttccaaccatgcaacagtaaattctagtccagtcaacaaaggaatggtcctcccttttgtacctctctccatcacttttgatgatataagatacagtgtggacatgccagaggcaatcagagcacaaggtgtcacagagacccggttggaactactgaagggtataagtggttcgtttaggccaggagtccttactgctcttatgggtgtcagtggtgctggcaagacaacactgatggatgtgttggctgggaggaagaccagtggatacattgtgggcaacattaccatatcaggttacccgaagaaacaagaaacttttgctcgtgtgtcaggatactgtgagcaaaatgatatccactcaccaaatgttaccgtctatgaatcccttgcattctccgcatggctcagattacctgctgatgttgattcctcaacaagaaagatgtttattgatgaggttatggagcttgtggagcttttacccttaaaagatgcattggtaggattgcctggtgtcagtggactatcaacagaacaaaggaaaaggctaaccatagctgttgagcttgttgctaatccttctataattttcatggatgaaccgacatctggacttgatgctcgagcagcagctattgtcatgagggcaataaggaatactgtggacacaggaagaacggttgtttgtaccattcaccaaccaagtatagatatatttgaatcttttgatgagctcttccttatgaaacgtggaggtgaagagatttatgtaggcccactagggatgcattcatgtgaactggtcaaatattttgagggcatcgaaggtgtcaacaagataaaagatggctacaacccctcgacatggatgctggaagtgactagtacaatgcaagagcagataactggtattaacttcagtgaagtatacaagaattcagaactgcacaggaggaataaaactttgataaaggagctaagcacgcctccagaaggttcaagtgacctatcctttccaaccgaatactcacaggctttcctcacacagtgtttggcttgcctgtggaagcaaagcatgtcatattggagaaaccctccatatactggtgtcaaatacttctacacgacagtgattgccctgttgtttggaacaatgttctggggtgtgggcagaaaaagggatagtcaacaggacctgttcaatgccattggttccatgtatgcctcggttattttcatgggagtacagaattctggttcagttcagccagttgtatcggttgagcgaacagtcttttacagggaaagggcggctcatatgtactcgccattgccgtatgccttgggacaggtcgtaatcgaactcccatacatctttgttcagtccttaatatatggcgtgctggtgtatgctatgatcgggtttgaatggacagctgacaagttcttttggtacctcttcttcatgtatttcaccctagcatactacacgttctacgggatgatggtggttggcctgactccgaactacaacgtctcctccgttgcttccacggcgttctatgccatttggaacctcttctcgggattcttaataccaagaactagaattccagtctggtggagatggttctactggatttgccccatcgcatggacgctcaacgggctggtcacttcacagtttggagatgtaaccgagacgttcagtgacggtggggtgcgtatatctgacttcgttgaggactactttgggtaccatcacgacttgctgtgggtggtcgctgtggtggtggtcgcgtttcctgtgctctttgccttgctctttggcctctcgctcaagatattcaacttccaaaagaggtaaataaaatgtgagacagcttgattaatcccaaggcgaaaatagcgcaggcgttgcggaagaaagtggggctgtattgtatgtaaatagcgtattcgttgatcagagcttctcaagctccagacaaattgtgtagctgatagaggatcttgtacctgttggtgtaaaattagccgataatgcccaatttctacgatgtgatgaagttcagcttttgcaaagttttgtacatattggcacacactggctgttcgctgcaacactccaacgatgctctgaaatgatggatgtgtttcctcacagtagaaaatatggcgaccccaatagacctaagctgtgttgatcacgatgataacacatgtagtaattagatgtccatgttgaagtgtataaaaggattggataccttctctcatcaatttaaacttttggtttgaactgatcagtgtatctactctaacatgatatcaaatccag

SEQ ID NO: 21278 - DNA, 3143 bp, Zea Mays
attctctctctaaactcccatgtcagcccgtctttatcgattaaggtcactttaccactagttaaagacgagcgccgcgtgcagacggagtggtagaaaaagctggatgtccatcgccttgcttccaggttttctccaaccatgtccaccaacacactgatctagtactaggactagtactagatcgatcctgcctgcctgcctgcttgtaacagcaacagcagcagaagtggcgcactgtgctttgcggtggcggaggctgcgagagaggaggaacttgcaagccgacttccatggctgccgccttctccgccgctatcctcttccacctgctgctgctcctcttctcgccgtccgctgcgcagcctggtttcattagcttggactgcgggggagctcgtgatcacacggatgccattgggatccagtggacctctgatgccagcttcgtctctggcggccaggccgcgcagctgctggtccagaatggcctgcagcagacccagcagcagctgaccaccgtgcgctacttccccgcggacaacaggaagcactgctacaccatgaacgtcaggaacaggacgcgctaccttgtcagggccactttcctctacggcaacttcgataacagcaacgtctacccgaagttcgatatctccctcggagcgtctccctggtccaccatcgtcgtcgacgacgccaccacccccgtcgttgaggaagccatcatcttggctgctgctcccacgctcagtgtatgtctctccaatgccagcacgggacagcccttcatctctactctggagcttcgacagtttaacggttcgctctactacaccactgacgagacacgcttctttcttggactgtctgcgaggataaattttggcgcaggaagcaatgattcagtgagatatcctgatgatccatttgatagaatctgggaatctgattctgtgaggagagcaaattaccttgttgatgttgctccagggactgaaagaatatcaactacaaaacccatatttgtcggtaccaacgaagaaccacctgaaaaggtcatgcaaacagcagtagttggccaggatgggtcattgaactaccgccttgatttggaaggtttcccagcaaatgcttggggagtctcgtattttgcagaaattgaagatttggcaccaaatgaaacgaggaaatttaagttagaggtccctggcatgccagcactcagtaaaccaactgttgatgtggaggagaatgctcaagggaaataccgtttgtatgaaccaggctacacgaatttgtcacttccgtttgttttctcctttgggttcaggaagacgaatgattcttcaaaggggcctattttgaatgccctggagatttacaaatatgtccaaattactatgggatcacaggatgcaaatatcatggccagcatggtatcacgatatccacaggaaggttgggcacaagagggtggtgatccgtgcttaccagcatcatggtcctgggtgcaatgcagttcagaaacttctccaaggatattctcaatcacattgtctgggaagaacattaccggaagtatcccggtggaactgacaaagctatcagggttggttgagctaaggcttgatggtaattcattttctggccaaattcctgatttcagagaatgtgggaatttgcagtatattcaccttgagaacaatcagttaactggtgaattgccatcttctttgggtgacctacctaacctgaaagagttgtatgttcaaaataacaagctgtctgggcaggttccaaaagcacttttcaagagaagcattattttgaacttctcaggtaacagtggccttcacatagtaagcaatggcattagccacaccataattgttatatgtctggtgattggagccgttgtcttactgggtgttgctattgggtgctatttcattacatgtaggagaaagaagaaatctcatgaagcagcaccagctaaaaaacttggttcatattttagtgaagtggctacagaatcagcacacagattttctttatctgaaattgaaaatgctactggcaaatttgagagaagaattgggtctggaggctttggcatagtatactatggaaagttggctgatgggagagagattgcagtcaaacttctcacgaatgactcgtatcagggaatcagagaattcttgaatgaggtgacattgctttccagaatacatcatagacacctggttacattccttggttacagtcagcaagatggcaaaaacatactagtgtatgagttcatgcataatgggacactaaaagagcaccttcgtggagctgataatgaaaagataactagctggctgaagcgtcttgagattgcagaagattctgcgaaaggtatagagtatctccacacgggatgctccccaacaatcatccatagagacctgaagagcagtaacattctcctagacaagaacatgagagcaaaagtggcagacttcggtctttcgaaacctgcagtggatgggtctcatgtgtcaagtatagttcgagggacagttggatacctggacccagagtactacatctcgcagcagctgacggagaagagcgacatctacagcttcggcgtgattttgctggagctcatctctgggcatgaacccatctcgaatgacaactttgggctcaactgccggaacattgttgcgtgggcccgatcgcacatcgagagcgggaacatccacgccatcattgatgagtcgttggacagaggctgctatgacctgcagtcggtgtggaagatcgcggaggtggccataatgtgtgtgaagcccaagggcgcccagaggcctcccatctcggaagtgctcaaggagatccaggacgccattgccatggagcgggtgctcgtgtccaattgcagcaacaggatgggttcaggtagcgtggagcagaatggaggagcatctttcgacgagctgctcatgcagccgggtctcagatgagatgagaacaacctactcgtaccttgagtccattgtatgtagtaattaatgtgtttactacattttttttgagaaacaaattaagtaatgctagcaaaggaaccagtatattattattattat

SEQ ID NO: 21279 - DNA, 2495 bp, Zea Mays
ggaatgaggtgatgatggatcaactcattctattcaacaaaccaaataaaaatgtgagaagtgagaagaagatgaatcactttattcctcgaaccaaacacacccttaatgttttactctagagcccatgctaaacacgccatgagtcttggtctatttaacacactttaaatagttaataggtctgtataaacttattaaacaatatatatggatctaaataacacactccaaatagtggtactgatgcactttactctctcaacagcaaccacaaaagaaaagggtgcgtagcccctaacccatatgtgtgtaatattgactcgatactgtgtgcctaccacgatttcggagagaccgagacagcggacttccgtaccgcgcgccgccgccaccgccatctatcctggaagcctgctgctctccacgcaaccacgccggcccccgtcaaccggtcgccatctctcctggactcctgctctccacgcaacgccgggcagccccgcctcagctcctcaccctcctcgacaactctccctccggccggtcgccccccacgactccccggggcccgtcgtccgcacgggcacgggctgcacggtggtgggagcagaaccagagcagccgaggaggcacatctactccgggctccggacctccctcggcctcaacccctctggagtctggattctgccatttcataccatctccgcttcgccactgccagcgcgctggccctggagcggaggcaagaggggtgactacaaggagcttttcgtcatggcactgcctaaggacggctgcctcgatggtgccaagatcacagaggtaggaggggtcggctacaaggagcttcttgtcatggcgctgcctaaggacgacagcatcgatggcgccaaggtcgcagaggccatcggcgtcaagctgccagacgtcgggggggccataaggactattttgaatagcagagaggccagagaatttgccagtggggcactagctggtgctatgtcaaaggctattcttgcacctctagagactatcaggacaagaatgattgtaggagtaggacctaggcacatttttggtagtttggtggatatcatccaacaaaacgggtggcaagggctttgggcagggaatacaatcaacatgctccgcatcattccaacccaagcagtcgaactcggaacatttgaatgcgtcaagaggagcatggcagaagcacaagagaaatggaaagaggacggatgcccaaagatacagcttggtaatatgaaaatcgagcttccacttcacctcttatctccagttgctattgccggtgctgctgctggaatagctgccacactggcgtgccatcctctcgaagttatcaaggatcgcttgactatcaaccgagaggtttatccaagcattggccttgccttccgcaggatctataagacggatggtataggtggtttctatgctggcctgtgtccaacgctgattggcatgattccttacacaacatgttacttctttatgtatgacacgatcaagacctcttactgccgcttgcataagaagtcgtctctgagccgccctgagcttctacttatcggcgctctttcaggtcttactgcaagcacaatcagcttccctctggaagtagcaaggaagcggttgatggccggcgccctgcaggggaagtgcccgcctaacatgattgccgccttgtcggaggtgatccaggaggagggcgtcatggggctttaccgcgggtggggggcgagctgcctgaaggtgatgccgaattctggcatcacctgggtgttgtacgaggcatggaaggatgttcttctggctgacaggaacaagccacgctctttagcgaactaaacaggccgtccttgagcaatggaggcgttgctgggattcctgatctattttcagttttggaatcccggctgcggcgagtggggtacatagggcgcgtttctctcttttttgattgactgatgagtggtaagcgttttgttgtgtcatcggcacacagacaaacatcattaatgtgtcaaaaaactaagcgaaaagacaaacccttctgtatttcctgagtggaaagatggggaacctaaccctacctggagcctctgcaggaaccttttccttcatctaccaatcagatacagggagcttcaggttgacagatcgcaccaactgaaggacgaacctgttctgcgacaacaagcaggataagctgaggaacctgttttgcaagctaagttgagatgtaatttttgtcttgggctgggtggttatagtgttttctttcggcttttcttttctttctgcctcaagtctgaagcgaagtttataaattatttttcctcggctaatataatttgggtggcaaagcttttgccgcttccttaaaaaaagagtggtaagcattttgttgtgtcatcaattctgaattcttgtgctgttataagaaaaaaggatttggg

SEQ ID NO: 21280 - DNA, 1338 bp, Zea Mays
cgggcagtcaagaacagatgaacggtgatagttgtgattcccagtaggaaccctcttatccgttctcgtctcctgtcccggactcccgggaccggggaggccgggatcgagaagggcaacgagcgcgtcccgtgctcgccgctcctcgccgatggcgtcctccactctgccagcctaccccttccgtatgtctcttcccggactacgagccccggaccctgctaaggttaagcacgtatccgttcgagcccccgctcgccgtcttcccgttgcagcctccgcggcaccatcaggcgccgcggcggcggcggcgagggagcgcaggcgtttcctggagagctacgggctcaacccaaacgacttcgaggaagatgcagaggagaatccgagggaagagagaaaggacaggcggagacgtcggcagtcggggagaggggagcaaactgcggaagcggcagtgactccagcgaaggtggaggagcctcgggagactcacaaaatgctccaggtgctaggtggaaaagtccgcagaaggaaattactttcacccaaagataggaatgtccgtccaatgatggaagttgtccgaggagcagcctttgacattttacagtcagctggtggttctcctgcttcactcagaccgggtcggtggctagacttgtatagtggtactggatccgttggaattgaagctatgagccgaggatgttcagaggcacatttcgttgagatggatccttgggtcatctctgaggtcctcaaaccaaatctggagtgtactggatttattgacgtgtcacagatacatatgctccgcgttgaaaaattcttggccaatgccgaaaaatctcatggtaaatatccttcattcgattatatcagtgtaacaccaccatatctggaggtcaactatagcacactgctcgcccaacttgcaaggtcaccattggttggaaaagactgcttcatcctagttgagtacccgctgaaaacagacatggctgaatcatgcggaaaccttgtacagatagctgacaggaggtttggtaggaccaacttgctgatatatgggccaacttggtcagagaaaaagaagaaaagatgatttctgaagggggggttcaggcaaggtgtcatgataatcacggttgggaatggttaaggtttcaagatttgcacaggggatatttggcctagtgtaaggcataagaaggtggttgatcttggttcactgggcctatacctgaataacttgcacagcacagagagctcgcatttcgctttcctttgtggtcagagatccacatccgacaagagggggggggggggggggaa

SEQ ID NO: 21281 - DNA, 3216 bp, Zea Mays
cgactgctctctgccatcgctgtggcgaccccgacggagccaagcgacggttcatcttcttgcggcggcggcgacctcgagctgattgcagcgagaaggcggggacaaatcgatctcccctagctggctacacccgatggagccgagggttccttgcgttgacggcggcggcgacggcctcgagctgagggccgcgagaaggcatcgacgggagggcgggcgaatccacgtcctcgatgcgcaaatcctggagcctcagcgacagagatcgaatccattcaggaacatctttcatctattaactcaacgagaggtcttacctcgaacgaaacaccatgctaaaaggatatggaataactctccaaaatatgatcctcatttaattgagttaaggttttcagatgcagatgctaaacttggtattttatcttgggcagaatcactgtccctgcatcgctggtctgccaagtattgccctcttttgccacctcctaggtcaactattgcagctgctttcagtccagatggaaaatcacttgcgtccacacatggtgaccatactgtgaaaataatggactgccatacagggaaatgtgtgaaggttttgagtggacatcgacgcactccttgggtggtcaggtaccatcctttacattctgacattctggctagtggaagtttggatcatgaggttcgtctgtgggatgctaatacttcagactgtattggatcacaagacttccatcggccaattgcgtccattgcatttcatggaagaggagagattctggcagttgcatcaggtcacaaattgtacatatggaactacaataagagagatgatgcttctgtcccaaccatcatactaaggacccgccgttcgttgagagctgtgcattttcacccgcatggcgctccatatcttctaacagcagaggttaataatatagagtctgcagactcaccgctgactctggcaagatcatctggatattcaaactacccttcggccctgctggtgtcaaacactaattctagattctgtccacttcctgagtccaatgtgacgtcaccgtgcttactgtggcctgcgtacctcagagatgatgggattttacatgtgcttggcaatgccagtagttcaaccattgtgcagcagagatcatcattagttcaaccttccacatcagatactgcaaatctacagcttgaacagtttgctacccctatggatgtatgtcctggagagccaacttcatttaataacatatcagatgcagtaactgtgcctacttcaaatgcaattgaaatgcatggtgctggcggccagtctaacccaagactgcagggcagcagctctattagtaatcttgagaggttcagtgctagagatgctttgcaagtgtcttccctgagcagcattgagccaatcccatcaacagctgggtcttcgggatccaattcacgccgtgctatgccactgaatatgctcctcactggtggattagatgttcaaatgttccaaagaaatgtaggaagtggacaacaggatcattttctcttcggcgactcaagtaactgggaagtgccatttgtgcagggttttttgatgacccaaaaccatacaggtttgcaccctgcacttgtgaacaataatgtccttgaagacctatctggtgctggtactgcagggattaacaactcaactagggaatcatcacacatgcataactttggacgtccaggtgcttcatcatcgattccccttacttctggcagttctaggagaccaaatcgacactatgcctcacgctctgtgcctggggttgggagtttgctcctagtaggtcctcaaattgacgaagctgaagctcatgctgcttcactaggtgctggttcagaaatcactgcgtcgatgcttgctcctggtactgaattgccttgtacagtgaagctcagaatatggcggcatgatatcaatgaaccatgtgttcctttagcacctgaggcatgccgtctgacgatttctcatgccgttctttgcagatttggggatattcttgcttctagagcaataagggcagcacattgcttaacttccattcagttctcacctacatccgaacacatacttttggcatatggtcgtcgtcatagctcgctgcttaggagcatagtcgtggagggagaaaatgggattcctgtatatactattttggaggtatatagagtttcagatatggagcttgtgagagtgcttcctagtgccgaagatgaagtcaatgttgcatgctttcatcctttaccaggaggtggccttgtttatgggactaaggaagggaagctcaggatccttcaacacaatggcgcaaacatgataaacatggggtcgggttgcttcattgaggaaaatatggttgagatccagaggtatgcattggaatgctgaataagcttgaccacatcatgtgaattttaggcttacttccatgaaagacttctctgcaggcttcatctgtgtgatccgtccaagggaaaacattagatccatctccaactacattagaacagataattctcaatgggctctttcaagtgccttggggactggtctttgcaggggcggcaggagatgtaaatctacatggccaccgtcgtggctgccatcacgatgcttctttttgttgtatacttcacctatcctaacaagcggtcgatgatgcaagaaattacaaaggcgaatgggattctctgggtttgattttacacgtgataatcatgtatttttttcctgttctcgtctgggttgattaatcattaaacgtttggagtttctatatctgtatgaaatagcatctgttgcaacataagaatatggttgacactagacgtctacaagggctggtctagaatgccgtgctattgtcattattttttaagtttaccaagagctatctgaacgcgttccatttggattgaggtgtattgaagtggatggatgaggattttgattagtagtggatttattccctcttaatccttgtagatttaggagaaaacgaacatggcctaaattatttttttcatttcttccctggtggaatattattagacgccagttacatttaatgctcggtcgacaaagttgtcatgaaaatcatggaatcatttggtttctttgggatttttatttttaaccctcaaaaaaataaaaaa

SEQ ID NO: 21282 - DNA, 257 bp, Zea Mays
tagtggtagaaagaataggtaatttatgcatcaagggaaggatggacttgccttcgtcgaagctttcctggcacaaaagatctacttccgggagattgggctccggcccttcttccgaggctacgggtttcggatcaacggtccccgcttcttctagtaacacagtcaataaaacaatacatcaacagtggtttactaattgtagtgtgtcattttctaacattattattacatgtgactttaggaatcattttgat

SEQ ID NO: 21283 - DNA, 1602 bp, Zea Mays
caggtctcggtagtaaaccacgcaagagaaaataaaatgacagagagttgtatgttgtagacgggcgagtgcgacgagcggagaacgtaatgccagcgctacaccgctgacgtgtccgccccggctccgggtgaaggtcaaaaggggcaaagggcggggggaaaccgtgggccctatatagcgggccttctcgctggagctaggagaaatcgccaagccaagccaagccagaagcggcagcctcgcgcagcggtctggtctctctggtgggtgcccctcttcgccggtggccggaaagggtagtggagtgggaccgctcaaggagaggccggcgtccccaagtctcacttccgccgtccgcttcccccctgatcgaagctttgaaagaagttggggtcacagaggtggttttggctatcaactaccgcccagaggtaatgattaatttcttgaaggactttgaggataagcttggcatcacaattacatgctcccaagagactgagcccttaggaaccgctggccctcttgctctagcaagggacaagcttgcggatggatctggccagccattctttgtcctcaacagtgatgtcataagcgaatacccatttgctgaactcatcaaatttcacaagtgtcatggtggtgaggcaacaattatggtcactaaggtggatgaaccatcaaaatacggtgttgtggttatggaggaggcaactggcagggtggaaaggtttgttgagaagccaaaaatatttgtgggtaacaagatcaatgctgggatttacttactgaacccatctgtccttgaccgcattgagctgaggccaacatcaattgagaaagaggtcttccctcaaattgcagctgatcaacagctctatgcaatggtccttccaggtttttggatggatgttggtcagcctagggactacattactggcttgcgtctttatctagactcgattaggaagaaatcagctgccaagctagctactggagcacatgttgttggcaatgtgctggtgcatgagagcgccaagattggagaaggttgtctgattggtcctgatgtcgccattggacctgggtgtgttgtggaggacggcgtgaggctttcccgctgcactgtcatgcgcggcgtgcgtatcaagaagcatgcttgcatctcaaacagcattatcggttggcactcaactgttggtcaatgggcacggatagagaatatgactatcctgggggaggatgttcatgtgtgtgatgaggtgtacagcaatggcggtgttgttctcccacataaagagatcaagtcaagcattctgaagcctgagatcgtcatgtgagctctccagttttagctacagtacattcttaacttctttgacgaagggaggattgcagatccccttttataaacgatattgcttggtatcttcgatctaatgcaaacagcttcatacttggtctcttgttaaactattgacaatgtatcttgttttttgttgaaaagtttagtacttgagtgtcaatcatacgtattcgcttgctaaaaactattgacaatgtatcttgttctttgttgaaaagtttaaaaaaaat

SEQ ID NO: 21284 - DNA, 1755 bp, Zea Mays
gggaaacatacaccgaataaagggagggtgactgtgaaccttggaggtcgccccaacagcgatctccaggcccagcccacccgatttttctcaaatcccaccgcttgttccaatccaacggaccagatcgctccaactaacccccacacacaaaccctagtcagctccacctatatagcctcttcccctttcgccgcgcctccattcgcaccaccgccgcgccgcccaaaccctagccgccgccgccgccgccgccgccatggtcgccgtcaaccgccccctcgtctccgtgaaggccctagagggcgacatggtaaccgacgcccccggcatcgccttaccgcccgtcttcggggcgccgatccgccccgacgtggtcaggttcacccacaagctgctgtcctgcaacaagcgccagccctacgcagtctcccgccgcgccggccaccagacgtcggccgagtcctggggtaccggccgcgccgtgtctcgtatcccccgcgtccccggcggcggcacccaccgcgccggccagggagcgttcggcaacatgtgccgcggcgggcgcatgttcgcgcccaccaagatctggcgcaagtggcaccgccgcgtcaacatcaaccaccgccgtcccggccctcgtccaggcgcgcggccaccgcatcgagtctgtccccgagatgccccttgtcatttccgactccgcggagtccattgagaagacctcccaggcgctcaagatcctcaagcagatcggcgcccacgccgacgccgagaaggccaaggactccgtcggcatccgccccggcaagggtaagatgcgcaaccgtcgctacatcaaccgcaagggcccgctcatcgtctacggcaccgagggctccaaggtcgtcaaggccttccgcaaccttcccggtgtggatgttgccaacgtcgagcgcctcaacctactagaccttgcccccggtggccaccttgggcgctttgtgatctggacccagagcgcgttcaataagctcgaggaggtgtatgggagctatgacgccccgtcgcagaagaagaagggcttcgtgctgccgaggcctaagatgtccaacgctgacctgggcaggatcatcaactctgacgaggtgcagtctgtggtgaagccactcaacaaggaagtgaagcgcagggagaagaggaagaacccactcaagaacatggctgctgtgctcaaactcaacccctacctcggcactgcccggaagatggccacccttgctgaggctgctcgtgtgaaggccaggaaggcgaagctcgactccaagaggaccaagcttaccccggagactgccaaggttaaggctgctggcaaggcatggtacaagaccatggtctcggacagcgactacaccgagtttgagaacttctcaaagtggctcggcgtgactcagtgagcggcaagggtagttaagttttgagtagctcagcttatgttgagaggaaagaggatccatcaaatctgttttatcctgcatcatcataacaagttgctacaagtcttgcatgttcgtgttgtttgtgcatttccgcgagaacatagtatttttatattcgaaccagttgtctgaactgtgcttggatttgtgcactgatgcttggctcaacctttctgtatcacgaatgagctggtccttgctgaaaatggtttacagaaaaagaaaacaggaatactcgttacaagaaaagatgaaattagaaagatttagatggcag

SEQ ID NO: 21285 - DNA, 1740 bp, Zea Mays
ccggcatcttcttccgcgcattcggcctatgtccggcagcccctccgcagtcggcgccggcacaagcccttcaggtcggacacggcggcgcgtagtcccgactacgtaggcaggttgccggcctccgcctccggcccttcccctgcgccccgactgagtcgctgctgcagccgccaacttcacccgcggcgagctcaccacagccctccggaaggggctatcaacttggaagatggccgatgaggaacaaaccccaggctctaggaagagggttgcaggtacccaaatcaataaggataatcctgagcctgatgatgacgaaccagagcaagagatgggtacatttaagaaagctactgaggaagttatggcaacccggatcattgtaaaggtccagccttcagatgttaaaggtgacgagggatgcaatggtactgggaaaaatactttgtctgtgccagacaagaatgcaggctctggtgtaaatactgactccggtgccacaactgaagcaccacctcaacctgttggaaccagtgacaaggcagaaggcacagaggctgaatctggtggagacaaagtggtagctggaaaacccaacgaaggtagctgcatgtcatctgaagttcagggcaaaacgaaagagggagatgctgaagaaaaggaaggggcagatgaagctggaaataatggtacagttagcaaggatgatactgagaagaaagaaaattccattggtgatgcagaagaagaaaaataagcatgccaatgttaagagtaatcatgatacggcagatgctgtggtggaatttctgtcagacagtaaatatgatgctccactgaagctaaagaagaagagcaaaaagaagaaaatggaaagtagtggtcctgcagtcgtatatgaaagttcagttgttactgaagatgctggagcatctaagctgaagaaaaagaaaaggaaggtaaagggagggaaggtctctgctgggattactgatgcagaagaaattctgcatgaaaatcaaattgaagaaactagtgctgatgtcaaccaacttgcagcactgagtgaagatgtggataatgaagagcctcagaaattaaagaggggaaagaaaatggaagttaaaaaatctgggaaggccaagaagaaggacaagcatgcatcgcgtaaagataataacaacttggagagacatgttgatgttagtactgcaaacgctgatgagaatatgagattccattagttgatgaagactgctctagaggactgaaaaaatggatcttggagtgcaaacacaagagacctggcttgaaagccttgcaagaagcaatagatgaatttattgttgctcatgaggaacaacaagagaaggagaagagagagaggcccgtgcagcagaagatggatgggcagttgttcatcacaaggggaggaaaaagaccacagatgctgaaactggaatagctgttggctctgtatctcttgctgcaatgcaacataaaatggctaaaatgaaacccaaggaagttgatatgaacttctacagatttcagagaagagaagcccacctcagtggtatgtcatcattgcttaacgagacttattatttgttattccactccctgattagctacacatgatagaacccagactatatattgcacattatgaagtgcttggacttggtagttgtaatgcaatgcagttcaccagccacgataaaatgtaatctgttc

SEQ ID NO: 21286 - DNA, 299 bp, Zea Mays
ggcctctagcctagtggttaagaacttccgagtagcactccaagtcctgggttcgatttcccccgggagcgaattttcagacttggttaaaaaaattccctcgctgtgtcctatccgctctcgggttacgatgtcctgtgcgccaccctccggttgggtcgttacagagtggacagttgacgccgacccgttagtgatggggaccagggttcggggattttctcggccgggactattgtttcggtctcttcttaatataataccgggagggcggtctttctctcccggccgagtttttt

SEQ ID NO: 21287 - DNA, 1753 bp, Zea Mays
aaaaaataaaaaaaagaaaaaaaagaaaaaaagagagaggaaaaggggacaaaccaccaacaacaaccagaatatcgcatcgccgtcgcgtcgtcgtcgatctccccgccccgcccgcgccgcggaatctgacacatctctctaatctctcctaggaccgggtgcccttacatccacccgcaacgcaaatcgccgtccgagccatcgcggtgtctcgtctccccgtgcgagaggacgccggcagcagcggcgtgccagtgcggtggcttggtgggggaagaccggaggcgtcggcagagctcgcgtccagaggtgcacggcaggcctgttctcggcgtcggctgggggaagggaaggacgagtgaataatcatgagctcgatctgccctttcgcgggagccaccactggtggtggtgtatgccctgtgaaatctgataagagcaacactggggtgtgccctgcaaaatctgacaagagcatcagtggtgtatgccctgtcactggcaaggatcatggtagcaagctcaaggaaagtggtgatcatggtgaagaaaagggcaccgatcctcgtgtcgtaccagcaaaatgcccattcggctatgactccaacactttcaagctgggtccgcttagctgcattgtctgccaggcactactccatgaaagtagcaaatgcaagccgtgtgcccataaattttgcaaggcatgtatatcacgctttaaagactgcccactatgtggtgctgatatagagggtattgagcctgatgcggaacttcaagctcttgttgaccgcttcattgatggtcatgccagaatcaagcgatcacatgctgcaggggatgtggaagcagcagatggcaagaacaaagtcatatatgaggatgtttccatggagagaggggcttttctggtgcagcaagctatgagggcttttcgtgcccgaaacattgaaagtgcaaagtcaaggctcactatgtgtgcagacgacatcagggaggagttaaaatcttcagaagataacttagacctatgttcacagcttggagctgtgttaggaatgcttggggactgctgtcggaccttgggagatgttcctgcagcaatcacctactatgaagaaagtgctgagttcctctcaaagccccctgcaaaagatcttgagctggttcatactctctctgtttcactaaataaaatcggtgaccttcgctactatgatggcgacctccaatctgcaagaaactattatgcccgttcattggatgttcgcagaaatgcagtaaaagaacactctgctgtggcttcccaggtcattgatctggcaacttctcttgcaaaagttgcggatgtggatagaaatcttggtaacgaaagtaccgcagttgagggttttgaggaagcaattcgatgccttgagaagttgaagctggattctgaacaaactaccctcgaacagcggcgcctctcggttctcgacttcctgcacaaccagttggccgataagtaagacatagtcttctcctaagaaggcaccaccagcagatatctcctcatggtgcgcctctggtgaatctgggccttggatcccaaaaagtcgggaaggattcgtgtccatgtatttcttgtgagagacggttgtttgactggaagccagttctccggtggcggtcacagatctatctctggtgctgctgcaaattggagtcacttgtgaaggctatagtgacacacgtccgaacagtccgtgac

SEQ ID NO: 21288 - DNA, 1411 bp, Zea Mays
cgaattcgcccttgtttcataaaggtcagttggaacttagacacgcttggtgatttcgtgattatgagaagcaatggacagcctgtgtataacttttgtgtgacagttgacgacgctaccatgcaaatatctcatgttatcagagctgaagagcatctaccaaacacattgcgacaggctttaatttacaaagctcttggattcgcaatgccttcatttgctcatgtttcgcttattctggctcctgacaggagtaaactgtctaaacggcatggagctacttctgtcgggcagtataaaaatatgggctatctacctcaggcaatggtcaattatttagcactactgggctggggtgatggcactgagaatgagttcttcactattgatgacctagtccagaaattcactataaaccgtgtcaataaaagtggagcagtctttgatgcaacaaaattgaaatggatgaacggacaacatctaagatcatttccccatgatgaactcatcaaagcttttgaagatcggtggacggacacaggcattctccaggaatctgaaagtggttttgctaaggaagctgccgagcttttgaaggatggtatcgatttgataacagatgcggacgcagctcttacgaatctgttgtcatatccccttcatactactctaagcagcgaggaagctaaacctgtggtgcaagacaagatctccgaggttgcttggagtcttatttccgcgtacgacagcggcgaactcggccaagcgctagctgagggccgtgatggctggcagaagtgggttaaaggtttcggcaagtctatcaaaagaaagggcaaggggctcttcatgccgctccgggtactgctgaccgggaagcttcatgggcctgacatgggtggcagcatcgccctaatacacaaggccggcgtctgctgcgctgtgactccgcagtccaacttcgtgactctagacgagcggttcaggatgctcaaggacgtcgactgggagtcgctggcgaaggagcaggaaacccctgctgtccctgccgccgcttcctagactgccaggaggaggacgacgttgcgcgcaatgtcgctcttgagtttttttttaaaaaaaaaatccattttggcgtgtttttgtcaccgttcgtttccatggagtaggagaggagctcagtggtttggtcataggtcgttggtgctgtaatgtgggcaataatattgaattattattattagatgatgatgatgatgcctgtaatctgcgtgtctacagcttctcgtttgctgaatacttcatctttttttttgacaagtgaatacacgattattacaggtgttcatacgcatgataaaactgttgggcactcgggcgctgcccgtgatggacatagattgttgggcct

SEQ ID NO: 21289 - DNA, 2095 bp, Zea Mays
gagactgcgagacacaggcagcggaaaaatagagacaaagaaggggcaggagcagtgacctgccacaccagaggaaacgagagagagaaaaacagcccgatctcctcctcccactccgatcgccctaccgatcgccgcctcgtgaagcttccctgttccctccccgccgcccgcgacgccatggagccgccgcacaccgaggaggccgccgctgctgcagcaggaggagcagagggcggcagcgcaagcccgggcaccggcctcgaagggccgatgctgaggctggggctggacggcggcggggagggggaggacggggagctgggggctggggaggaggcggacacgtggcttccagagcggcctggcgaggcggactgtggctactacctccgcacgggcgcctgcggcttcggggagcgctgccgctacaaccaccctcgcgatcgtggcggcactgagtttggtggaggtgccaagaatggagcagcacaatactttccagaacgacaagggcaacctgtatgtgagtattatttgaagactgggacttgtaaatttggttccaattgcaaatatcaccatcctaagcaagatggatctgtgcaatctgttatattaaacaacaatggattccctctacgcccgggtgagaaagaatgctcctactatatgaagactgggcaatgcaagtttggttctacatgtaaatttcatcatccagaatttggtggtattccggtcacccgcagttcctggatcatatatagcaggctcatacactccaatggtgctcccatctggaatggttccattgcaaggatggagcccttatccggcaccggtaaatcatgtagcatcaggtggagcacaacaaactattcaagctggaccattatatggtataggacaccatggatcttccactgcaattgcttatggtggtacatacttgccatactcttcctcaactggacaatcgagcaataatcatcaagaacatggatttcctgagagaccagggcagcctgagtgtcaatattatatgaggactggagattgcaaattcggaactacatgtaaatataaccatcctcaagattggagcacttctaagtccaattacatgttcagtcatctctgccttccgcttcgtccgggtgctcagccttgcacgtactatgcccaaaatggatattgcagatatggaattgcatgcaaatatgatcacccaatgggtacactaggctacagttcatctgctttacccctatctgacatgccaattgctccctaccctatgggcttctctgttgcgacgttggctccatctccatcttccccagaatatatctcaaccaaagatccatctatcaaccaagtagcatcaccagtggcggcacctgaacctgttggagcaatcttgccaaaaggggtattccctccggataccattatgcgaactcagacttctacaagtgttggcagttcaagccctggtggtggtcgctgatttttctgagctggtgggagtgatcctatcagcacaatttttttctgtcacttgacacagttctgataggcctttacaatgtgaataagaagctgtggcctctgtagagaagccgtggcgagggtggttttctctaccatcagaataagagagcattgatcggttacaagcaagctcgattcacctgcaattttttgcgttgttccgttcgtgtccaaaacgggaaaaggaaggtttttttttttggatgtcaggttctatagcatgttgggcgcggttgtgaggctccaggtccattccctcggtaaataattctggggcaagaaagttttcgttgttatcaagaaaattttcacacgcagagttactgggttcctccgcctttcaattttttttgttctatgtatattgttatatatatagtacacacatatatatcttcatcagacttgagacatgtaattacgtatatatagatgtttatattgggagcaaggcgcattgtaatggaccgaaaaatgctgaattgaagagatcttgctgtcgatactgaaatggctgcatcgatgaggccaacttgac

SEQ ID NO: 21290 - DNA, 1028 bp, Zea Mays
gcccaatccgcactctgctcatctacaccaccaaacctctgccgctcttcgccgtcagcccgtcactcctctcccccgtccggccgtcccaactcccaatcgtcgccgcgcttctccccgcacgattgccagaatctctaacgcccatggcccccgtctcccccgcggccgccgccgccgcggtctcggcctctcaccacggccgccacctcctcccgtcgtccccgcgccgcctccccaggccccgcccgcgctctcgtccgcaccttcgcctcgccgcctgccacgccgacaccctcctcccctcctcctcatcggaggcccgtgcggcgccaggccctgcggtggagccttcctccgaatctgccaccgactgcttcgtcgattggctgcgcgcgcgcggccttcccccgggcaaagtggacatccgggagcgcccggtgccctgcttgcgcgacggcaaggaccagccgctgcgctacgtctccgctgtcgtcgacctccaggcgggggatgtggcattcgaggtgtcaatgtccctcgtcgttacgcttgagcgggtgctcggggatgaatcaatcgctgagttgttaacaaataacaagttatctgagctggcatgcttggcattgtatctcatgtatgagaaaaaacaaggaaaggattcattttggtacccctacattaaggaacttgaccgacatcgaggaagggggcagctagctgttgaatcaccacttttatggactgaaagtgaactggattaccttactggaagccccttgaaggatgaagttgttgctagagatgaggcaataaggagagagtataatgagcttgacacattgtggtttatggcaggttcactatttcagcaatatccttttgacatacctactgaggcttttccgtttgaaatattcaagcaggcttttgttgcagtacagtcttgtgtggttcatttgcaggagatttgtgcatccttaggctatctccagcagatctcctatcagtctatcacatcccct

SEQ ID NO: 21291 - DNA, 1776 bp, Zea Mays
ctcgcacgcaccaccccggtccgccgcgatgcctcccttcccggcggcgaccaccacctcccacctcgccctcctcgtgctcttctcatcttcctcccttttcttcctctacaaatccctccgcctccgccgcaaaccgtcccccgcccgcactgccactcctacccttctcttcgcctctgtaaccggcacctccaaaaccctcgctgcgcgtctctccgcccgactgaccgccgatgccggtttccccgtccgcgccaccgacgctgccaccttcgaccccgacgaccttccttcagtccatctcctcctgctcgtaatccccacccacgacggcgggttacaaaattattggttctcatagcggagtgaagatttgcagatggactaagtcgcagctgcgaggtcgtggagggtgttataagcactcattttacggcatagaaagtcacagatgcatggaagcaactccaagtttggcttgtgcaaataaatgtgtattttgttggagacatcacacaaatcctgttggaaagagctggaaatggaagatggatgaccctcttgacattgtgaatgctgcaattgaccagcatactaagatggttaagcaaatgaagggcgtaccaggagtaaagccagaaaaacttgacgaaggtctgtcacctagacattgtgcgttatctctggttggtgaaccaattatgtaccctgagataaatgctcttgtggatgagctacaccgaagacacatatctacgtttctggttacaaatgctcaatttcctgaaaagattaaggcattaaaaccaatcactcagctgtatgtcagtgtggatgcagctacaaaggagagcttgaaggctgttgataggccactattttcagacttctgggagcgtttcctggattcactcaagtcactgcatgaaaaagatcaaagaacggtttaccgactaacactggttaaaggctggaatgcagaagagatagatgcatatgcgaaactgctagatcttggccagcccgatttcattgaaatcaagggtgtaacatactgtggctcgtcagcaacttcaaagttgactatggaaaatgtaccttggcactctgatgtaaaggaattctccgaggtgttggcatcgaaaagcggtggtgtatacgaagtagcgtgtgagcatgctcattcatgttgtgtcctacttgcaaaggtagataaattcaagatcaacggcaaatggcatacctggatagattatgaccgtttccatgaactggtgacatctggaaagcctttcaatagccgagattacatggccatgacgccctcatgggctgtctatggtgcagaggaaggtggattcgatccggatcaatctcgtttcaagaaggaaaggcgccatggaactgctgccctcagaagttgaagttgatcttattgagaagacatggacctgctactcccgaacactgacctatgttactgctttttagaggcaaaaactttggaagcaaggatttttgaaatgttagcttccaagccatacattttctgtttgtcgtgtgaatcagtttccgaaagttcattttttgatagtttttattggaacatgtattttgttctcttgaatcctctgatgtagtgacggggcgagtttacgactgaaattctggggacctgcgcacgaaatatgtagcataacaagtacaccctccgttgtcttgaagagtgttagggcatctcgttaactcgctcgactcgattcaatagtgact

SEQ ID NO: 21292 - DNA, 239 bp, Zea Mays
cgtcggtccaagcgcacacgcgcacgcgcagctccagcggcggcgtggcgaggtcctgctgatcgtgcagggcggggaccttgtgcttcgcggtggcgtggggatggcaatcgcgcttcgcttttcggtggggagcggggctgcgggcggccgcgcgaagtccgggggcaatgctccagatgccaggcggtgtgggccccaggcgcggccaggtggagcgcgcagctgcacgggtcgcg

SEQ ID NO: 21293 - DNA, 821 bp, Zea Mays
tgcatatgtacagtgggcaggaggtcttgatcaatgcacagtatctagcttatgcataccatttaggtatagagctaacaatgatgaaacctctggtgacaaaactaagaaagtcgtggaagttctcatgataaattcccagagcggacctggtcttttgtttccaaagggaggatgggaaaatgatgaaactgttgaagaggcagcagctcgagaagctatagaagaagccggagttcgaggtgatatagtgcattttctggggtcgtatgacttcaaaagcaagacacatcaagatgcgtgctgccctgagggtatgtgcagggctgcagtgtttgcgctgcatgtaaaggaagaggccttgctcacaggcttctctgactggcacgacaagtggagcataggtgacggcggtggcggcggtgccaactgtgtgacccggcctaactgctgatgaacccatctgcagtcgtccaatttgtccatcctcccccatttcccctaggctccgacattgcgtaacgcaataaatacagtgtacttctctcgatgctgggttggtcattgacccttggatggttatcttagttattagtgggacgaggtatatagtatttatatctgatgaagacgagaattctcacaacttttaagtgtcgattctcgtgcctgtttatttctcggtttcaggtcagctgcagcctgcaggcaggcacgcaccctgcgcactttgtaactctgctcctgattctggagatgcacatcctgtgtatgaactgaactggtataacttgaaaataactgttaagtcaaccatgcat

SEQ ID NO: 21294 - DNA, 3641 bp, Zea Mays
gggccttcttgttcgcttgggtcttgtcttgttagccgatctgtgactcccccgccatcgatgccaagtttgccccgttgccggcgtcacccctcccctcgacggtgaagctcatagcttccctccaccgccggtgtcgcttctcccccgccgaccaagccgtgcctgtcgccggcgtcgcccctcccccactagtgaaactcgcggtctctccaccgcacgcgcctcgtgtagttgtggctgcgtgcaccccctgtagccccggcgataggtcctactgctccatccggtttgcttccggcaacaagatcaacaacaagcgagcgaggtagtgaaaagctgcagctgtgatctctggaggtgctcttcctactctttctggtattttgatggtggcttgatggccagtaatatgcagtcttctgggctgcctcagcctccaagacctcccatgatgggttctagcgctcagccacaaaatcttggaccaccaatgcctatgcagtttaggccagtgatgccttcgcagcatcctcctcagttcatgccaccagcagcacagcagttccgtcctgttggtgagcctatggcgggggctaacgttggcatgccagggcaaatgccacattttccacaacctgggcagcacttgcctcactcaaatcaagttccacctgtatcacaaggggttcccatggtatatcagccagctagaccaatgtcatcagcacctatgcaacaacagcaacaaactgcgtatgctgggggccatttgcccaccatgggtgctcctatgcaacccctgacctatacatatcaaccaacatcgatccctcctgtagcgcaaccctggagtacaggcccaggacagagtgtacatcatgtgcctcctctagtgccgtctgggcaccagccggtgtcagctccaacgactttgcctcctgtcaacttgtctgaacctagctcttcagactggcaggaacacactgcagccgagggaaaaaagtactactataataagaagacaaggcaatcaagttgggagaaaccagttgagttgatgacacctttggagagggctgatgcctcaactgaatggaaagaatttactacaccagaaggacggaagtactatttcaacaaagtgaccaagcaatcaaaatggactattcctgacgagttaaaggttgcacgtgaattggcagagaacgcatcaaatcaacaacctgatcgagaatcaggaatagctactagtgctcttgtcagatctgctgcctttgaaccttctactgcacctgctaatcagtcgtcatctgctgttggtataattgcttccagcgcacatgatggatcatcaaactctgttctttctggtcctcccctgccgcacaatgtggagaatacttccagttctattgttggcatgcaaaatggtggttcgagtactgctgttgttcctgttgcagcaagcacagaagttccattagttgcaacagatgcagggtccagcagaaacaacgatgaaaattcatctctgaccactggggctgacgcagaggatggtacatccgctgaagatttggtggaggccaaaaagaccatgccagttgcagggaagattaatgtcactccagtggaggagaaaacaagtgaagaagaacctgtagtctatgccactaagatggaagcaaaaaatgcgttcaagtccctgcttgagtcggtaaatgtggagtctgattggacatgggatcagactatgagagtcatcataaatgacaaaagatatggtgctttgaaaactcttggagagagaaagcaagctttcaatgagtacttgaaccagcgcaaaaagtttgaagccgaagaaaaacgtatcaaacagaggaaagcacgtgatgatttccttgcaatgttggaagaaagcaaggagcttacatcatcaacaagatggagcaaagcaatacttatgtttgaagatgatgaaagattcaaagcagttgagcgtccaagggagcgtgaagatttatttgagaactatcttgtggaactgcataagaaggaaaaagccaaggctgctgaagaacacaaaagatatgtagcagagtacagagcttttctagaatcatgtgacttcatcaaggcaagcactcagtggagaaaagttcaggaacgcctggaggacgatgaacgttattcccgacttgagaagtttgatcggttggatatttttcaagtaattattttcctaactttctgtcaacttatgcttttttatggttctggttcaattatacgttttgtatattgaaggagtacattcgacacctagagaaagaagaggaagagcagaagcgggtacaaaaggatcaagtgagaagacaagagaggaaaaaccgtgatgggtttcgtaaaatgttggaagaacatgttgctgatggcacacttaatgcaagaactcggtggcgtgattactgtgcacagataaaagattcacagtcctacttggctgtagcatcaaacacatctggctctacaccgaaagagttatttgatgacgtgatcgaggaacttggcaaacagtatcaagaagacaagatccaaattaaagaagtggtgaaatctggaaagattcctatgacaacttcatggacattagaggaattccaaactgctactctggaggatgatgctcttaaaggaatatcaaccatcaacatcaagcttgtatatgacgatcagcttgaaaggctcaaggaaaaagagcaaaaggacgctaagaagcgccagcgcttgggtgaaaatttttcagatcttttgtattccatcaaggaaatatcagcttcttcaacatgggatgattctaaacagcttttcgaggatagccaagagttcagggccttggacagtgagacttatgctagagagctttttgaagagtgcgttgtccacctgaaagaaaggttaaaagagaaagaacgtttgagggaggaagaaaaggcaaaaagagagaaagagcgtgaggagaaagagaagaagaaagagaaagaaaggaaggagaaagaacgcaaagaaaaagaaagagaccaccgggaggagagagaaaaggagaaagggaaggatcgatcaaggagagatgaaatggagtttgatggtgctgatttgaacacccatggtgcaaaagataagaaaagagataaagataaagaaaagaaacataagagacgtcaccatgacacagatgatgtaagctctgagagggatgataaagacgatgctaagaagtctcggaggcatagcagtgatcgcaagaaatctaggaagcatgcacatggctcagattcagatagtgaaaaccggcacaaaagacataaaaaggaccgagatagtagtagaagaaatggagcacatgagctggaagatggtgaacttggagaggatggggagatctattagtctttctgtttgctaccgagattctgaccaggctaaattttcatttccttcaaagtccatggtgctgtctgtgctgaggtaacagattgctcagtttgcaacgagtttctttgtgagtgatgtgcttttgggagagtatggagtgtttgatttgtcgctcatgtcatgttaaggcttgttcattatac

SEQ ID NO: 21295 - DNA, 1121 bp, Zea Mays
cacatttttcctaccaaactcattgatcgctgctgccccacaaattcccttccaaaaaagaactaatcgaccaaatctcgtagtccaccacatccatcgtccatatactcatttccatagatcaacttacaccgttggattaaagtcatgtgtcgttagattaaaatgtgcaaccctaaatagctttatctttcttttctagtccatttattcgccgccgccgccgcaactctcacctctcctacatctctacttataaccacgacacccacagacacccttcttcatcccacgccttcatagatcatcgccggatctcattcgattctttcttgtctccatatctaactagttctagagtccgccatggcccccactacctccacccccttcaaatctagggtttgaggctacaagcggagagggataagtggtggaaacttgatgtccaaatcaatcatgagcccggggtacgggccatggaatcacttcatcgatcgaacacacgacgaatcagcaccctcaaaaatcagaagctggaacccctctaggcccatgggaagattggatgctgagaagaggaaggcgatcgagggttttgggactactcatccatgcaatcagatatagtaaggaagaaaccatgaagtcctctcagctgcaatgcggttgaataagcaagagacgatgttcactctatgatgcaaacaagagtaatgaccgagctttgtgatgctcttggtcaagatactaacggcagccaggtaaaaaaaacgatactaacggcagccaggtcaaaaagaaacgatactaacggcagctgctcctgtccagaacagagatggggaacaaagaaaaaataggaatagacttacacaattgcaacatagctgcagattgtgcttgttccagtaattagcagcatatattatttctcatcacgagtggtcaatatgttccgtttctatcccgctcttgatgctgttctgaagggtcattcttagcagttagcacagtcagccattcgcaaactcgcaacatgaacatgtaatgtatggaacactggtccttcaagaattctcattaaagatttaaaggcgtgtttgagaacaaagagattg

SEQ ID NO: 21296 - DNA, 148 bp, Zea Mays
ttttcatcctaaggaacagaaacaatcctaaggatgaaagtacttaaatcgagacttgggttaggaacaggtgatgttctacctaggttgattaaggattgaatgcgtatgtaggcgtgctgatcgaggaccctttaactggtcacat

SEQ ID NO: 21297 - DNA, 931 bp, Zea Mays
cacctccaaagccgacattcctcagcaatccttgtgatcaaagtaaaggttgatatgggcgagcctatcctttctggactagacatccccacaaaactgctagctaccaagaacaaagctgttgttcaagctgaattggcagttgagggcttaacatggcatgtcacatgtgttagcatgggaaaccctcactgtgtcacatttggtgcaaatgagttaaaggtattgcaggtcgacgatttaaaacttagcgaaattgggcctaaatttgagcatcatgaaatgtttcctgctcgcacaaacacagaattcgtacaggttttgtctcgctcacacctcaaaatgcgggtctgggaacgtggtgctggagcaactcttgcctgtggtactggtgcttgtgcagtggttgttgcagctgttcttgagggtcgagctgagcgggtactggggaccaagatagaagggttggctgccactcagagcttgtgagattggttatagtatccatgaaacagagtgttctggtaccagtacacttgttcagatattcttaattatgattgcttgatttgggtagcagtagaggcttccttttgaagcattctagtgttcaccttttgtactcctttagtttgtcaggtttgaacactacatgggtaacatgtctttcccaccattttctgtttcttttctttgtaagtgaacgccaatgcagttttagtattgttttctatagatttgtcttgatgcactgggcttactacttattttctggtatgaatgctgcctatttcctgaaaatcgcaatcatctaaagtgcttctgacaagtgacaacagacaacatgggttgttggctatggctcactattaattttcacctgcaacaattaagagtgtcaaattctgtgcttatataatctccgtatttt

SEQ ID NO: 21298 - DNA, 1160 bp, Zea Mays
ctcacccacccacccgcgcgccgtcggcgtcgccatcaccgtcgcaccgcgcgctgctcccagcctccctttcccttccctggctgcttggctgggttagttgattgactcccagtaaaacgggcagcactgcacggcacgacagaacccactcggccactcccgcctctctctactatacccagctactcgcacgcagatccacccacccacccatcgttccttccgttccgtccgtccacttgccgttgccgaccacaacccgctcccggaggacggcgggatgagggggcaagccaacggagtggaggaccgccggcagcggggcgacgaccacgaggcggacaacgacggcgaggaggcggaggaagaggagggcgacgacgagggccgccaccggggccagggcccgccgcagcagcggcggcaccaggcccagaggccgtactccggcccgcagcagcagcagcagccgcgcccgccgccgccgctcgccaggaacgtcggctacgtcggcaagcatcgcctctccgccgccatcgcccgcctcgaccaggagctccagtccctccagatactcttggtgttttgtttacccatgcaggaggagctggacgagcttgagaccatggaatctgcgtccgcggcgtgccaggaagtggtcacgagtacggaagggaagcctgacccgcttcttcctgttggcccggagaactcgtcttgggacaggtggttccagcgggtgcgctcccgcagcaacaaatggtgggcatcgaaaggccctgacttctcgtagctcctgcaaacaaagcggagaccatcctcaccagtcgtgtgcagattagaatgaaacacgttgagatgtatcgtccattggtgtcctggggaaacagaacaggcggcggcggcggcgagtgcggtgtggctctcgcaacgcttgatagttttttttttttttgagagaatcattgtgtatgtagtaatccctaacgaggccgaacatcgatgcatccacatcaaggcctggttgttgtgtttcctagagattctgactcactaggtcggattcctgatggtcatgcgatctcgctgttctttcttcaaacgtgaagaataacattgtctttgaaaagtttcaaaaaaaggagaatcagattgaa

SEQ ID NO: 21299 - DNA, 2612 bp, Zea Mays
ccagattgaggtccttcgccccccattctcccgtggctttgccgctgcgatcaatctgaagctgaagatttgcaaggactcgtcggtgcgcaaggcgctagttcgtgaggccagcctgttgggggctgccaaggttgtcctcggcgtcgccaagaagaggcgtgcgatctcgtcctcgcattcagttgcaaagtactgcgcaaagaagctgcccgcaaagtgcgcggtcctcgccgtgagcaatggcaagatcgagttccggagggagtcgagtgcccattcaggcaaggtctcagcagaggttcttccgtgtgctgacgatgagatgtattgtgcagtgcggttccaagcccatgaacctaaggatggtggtgagggtggcaccacgcatgatgttggcaccaagggaagtgaattggaggacaccatcaaacacgaacagcttgtctcaagcgtggtcctccctgcggatttggcaacggatcaggtcaagatcgacgcagatctttctagcagcaaggctgtagaatcaactgtcaaacagagagatgagactgccgagcttccaggtaagggtgccagtgtgttgtactgcgtgcttcctgggagaagtagcgattctgctgcaagtacatctagtaggcaagaccaggattcagtggatgtgctgccatctgaaggcaccggggagctatattgcttattgccccccaggaatggccattcagtcaggagttctggagattctaagcgttcaaatgcgagccaaagagatgatagaccagccaatccatcgcctgaaggagatggcgatctggactgccggctgccgaggagtggacgacccagtaggagttcttctgccgtatccatggaagctgaggactcgccgaaagacgctgcacgaaatgctgaaacaccctctagttctccaatgtcactgagacggatgatagaaggaagatctgatcgcagccgccttcctagaagaatctttagacatcatagaagctcatctcttgaatgggcaaaaatctcgatggttcaatgggcgacgagacttccgagccggtacacttcagtgcacacagatagcagatcattgaaacaggatacaagcccaaggctgaactgtggttctgaacccactacaacagctgttgagccggaatcatcatcgatgttttctttcgctttctatggtgtagcatggcctcccagtgaattggaatcgcttcgagagaagtattcttcagtctgtaggctgttcagttatgaagaactgaaacttgcaactggcaactactcacctgatatgttgattgggaagggtggaaccagccaagttttcaaggcacgactcgacgatggaacgttttgtgccgtaaagattctgaaaccctcggtcgatgcagtacatgagtttgttacggagatcgagaccgtgagcagcctgcagcacgagaacatcgttgcgctgaggggattcagcttcgagaactacaaccttgtgctggcatacgattacatgccccaagggagcctggacagagctcttcacgggaagaatggtggcacggagtttcttgtttgggagagaagaattaggatagcgatcgacgtcgcaagagcagttgaattcctccatcttggcggtgtcacccagtctgtgatccatggagatgttaagtcttcgaatatcctcctttcagaggattttggggcacggctgtgtgatttcgggttagcgaagcgagtgtctgcatcgactccccacctaacgtgtaccgacatcaccgggactttcgggtacatggcgcccgagtacttttcacacgggacggtcaacgagaagatcgatgtctatgcgttcggagtcgttctgctggagatcatctcaggaaggagacccattacgccgggaagcacgaagggacaagagagcctggttggttgggccaagcctttgctgtgcggcggcggaattagagagctggttgatccgttgctggggaggaacgagtacgactgcgatgagatggagaggatgacgctcgccgcctcgctttgcacgaggacatcttctcgctctcggcctgagatgtcactggtcctgagactcctccagggcgacgacgaggcgatcggctgggcgagggcgcaggtcacggccagcttcgacgggtccgacgaggaggctgcggcggcggcccctgacctgaacatgcagtcgcatcttaacctcgcgctcctcggggtggaggtggaggacgacgacacgctgtcgcagtcgcagtcgcaatgcagcagcaccgtggacacctcggccgacggctactggagccggtcctccagtttcgactagcgctgcggtctgcggggtctcttttagtagtagtagtagtacgtttatgtacagttggtggcaattggtgagttgattgttcttgtgagtgttgctaatttattagcttggagttggttctgttgtgtggtagaagatcttaaaaaattagttcagattcagcagagtgttgatggcaatgcaatttgttcagattcgtgttattaccatctttgcgggccatgattccaaccaagttgcattgcat

SEQ ID NO: 21300 - DNA, 1793 bp, Zea Mays
gacaacaagaggagaaaatggcctgggtcagaacatgaaaagaatccagcggagaatgatattcagatgcttgtcccaacagaaaggcaacagtaactttcttccattgggtgctcttgtattccaggaaattgcctggttctactacttgaaagattcaagctatatgcatctacacatgacatgggttctcgagaaaggatgttatttgaccttaacaaactcccagcagaagttgaagaagaagctgctgctgtcgtaccaaatgaatctgctgttgttgtgtcacaagaagctgctgttgtcgcgtcacaagctgctgttgttgtgtcacaacctcagaaatccctccctgttccaatgacgtatgccccatcattgtttcagccagggggaggatcacagtcacaggggatattgaacgataataatgccttcaagcatgcatccattggatctggctttcagccctttgtgaagaacaacaaagattcaaacaatacaaaggagccgatgaaggtggaagataatcagaattctagtatacaatcaacggccatggtaaacaatcgaaccactgatagtgcttctcctaaggctgaaacttgcaatcaggtgtcacaagccgttgaaagagaagaaggagaatgctttgatgcagatagcatttctgaaaatgcagggagtagcaacaaagatgagatcactggtacggcaagcactcatttgaagaaagaatcccaagagagcgagccccatctcattaaatctggtggtgtgactaaagatgatactgctgctgaatgtagtgatgctgaaatggttgatgcgtctaaagatctggttcatggttcttctacaggatcagagaacatgcaaatttctgaatgtaaaggaaatcagcctggtgatgatctagatccttgcaacaggtcaaaggatgttaaaggagtggaagccaattatgcgtttaggtttgcgagcaatcccgcaaagagacccaagttaaatgaacacaaagaggccatgcttggcaaaaaacgagctaggcaaaccgtcttcatcggtgtagaggatgcgaaacaagctggtactatgaagacgacaacgcccaggaggcagtcgtcctttccagcaccgattgttacacgtactgtgaaggaagcttctcgtggtattggtgaaaaggctgcagaaaaacaaaatcagcaagcaatcagagatcagagacaacctgaaatgatgggatcagaacgaagcaattctgtagatcctagtgaccaacacactgaacccaatggtgacactgagttgggtacccagggctggtcaaagaaaatgaatacagaagagccagcctcagatggttatcagcatcctgcccaaagacaagcttcattaaagcaaaccatggacttcaagcagccaaagggccgaccattctcttcccaaagaacaattctaacagggcaaaacaatgctgatcagaagccagccaacaaaagaggaggctgaacttgagtgtgttcctggaagttttgaatctgctgaggagtacattagagtttttgagcctttgctttttgaggaatgcagagctcagctttatagttcgtatgaggagagtcttgaggctgtgggaagggatgcacatgtagcggtgcaagtaaaaaccgtggataaacgtgaaagaggttggtatgatgttgtcgtcctaccgatacatgaacgtaaatggaatttcaaagaaggcgatgttgctattctgtcgtttccacatcctggttcaggta

SEQ ID NO: 21301 - DNA, 1104 bp, Zea Mays
cagaggtggcagtcaccgcggcaaagaggtcatcgcccaggccgtcgccgtagtagaagtcgagtatatgtgcagctatggggcttgaaatttcctcctgcaaatttcagagcgggacaagacatgcaagcacctgttgtcctaggaaacgtaacggatcggacttgttgccattttaattacaactccacatgggcatcggcatgcgttgatgcatatataggcacgatgcaagaaacgcggcagcaaaaggatgtcgagaaggaaacgaatgaaatcgctcggttgggtttcataaaaacatcatcatcccagaaagtaggaagaggcgagcaaaaaaccgtgttgggtcagagaagcaaaattacagcgacgatgtggcagcaatcatcgggaagcatggcgggcaccaacgatcttcagcgcatggagatgatcagattggcgcgcggcgcagcttctcggatgacaacaccgaggagcaaggaagctagtcagctcccagaagtttctctgctacaattgcggtcgggagagagactgcttattccggcctgggaagaagtcctgaaagaattcggtcactcctcggaccccgatgaacggggacgtcttagctggctgtatggcagggttggacacattatcaagctagggcgggagggagacgacttacaatgcacaaggcatctgggatggccatggcggctgcgtcctcctcgaacaacatcatcattatttgtatacgatggtaccagagccgctcgatcaataatggaggctgggggagagtggagggttgatggtgtcccccatggagaacgcatgagctcgatacttatatatgcggaagggagaacaagaacaactgcacgggcatctttttttttatttttatgtttttctctccctaaccttttgctataattgggtggtgccgttggtgagacgaaccgagccgacaaacaacagcctagcctggtggcgctcgatggagtttttggcgtttactactcatatatggtgcatatattcatgcgtgagagtacgcaagtagctaggtagatgtgactgttggattagtgcagctgattactgtcgtat

SEQ ID NO: 21302 - DNA, 964 bp, Zea Mays
cgagagtcgagacgagtacggacgtaacccaacggaaggcacgctgcgcgggcacaagccaggtgtccgagtgcccctccactctactctcacgccgtacccaccacaatgtgacgggcgacctttccagagcaacgccgcagttcgcgaactgttcgcaaggaaggcagccacccagccataccaattaccaaaccactcatcaggtcgcgttgccagccgctcaagccaagacagccccactaatctccctgggatcgcggctcgggctaagctaatcggggcgccccaaccatctctcgccaagatctcgacaaggactagcccatgcgcgtgtcaactggagtagttaagcggcgccatgggtatgcggagcaggcacccaaaggcgttgggtttccgctggtacccggcggcaacccaccggtccctaactctggtactgtggagcctagcggcattggtcgtcgttgtgaatttccatcttctcatcattcataaggaggagggtgagaatatgagtacacacgagatccgccgatcgattatgagggaactggaagtggtggaggaggagaagttccggctagctcctccccggagccggaggaatccccgggctgtgcgccgcaagggagagaagaagtcgcctacaatagtggatgagttcttggatgagtcttctgcagtgcatgatatgttcttcccagaactgaacacggctgtggatccaatcaatggtggaaatgacagcatgtacttctactacccaggaagaatttggttggacactgatggaaaaccaattcaagctcatggaggaggtgtcctgtatgataagaggaccaacacctatttctggtacggggagaacaaggatggcaaaacctacaaagctcacagcaagggagcagacaggattctgttggtgaggccaaatttctaggggacgtattggaagtta

SEQ ID NO: 21303 - DNA, 5154 bp, Zea Mays
ctcgccccgctccacgcccccatcgaaacacagccaaaaagccaccccgtgcaaaacacatagagctcccagtcccaacccggtcaccctccctctcctgctcctcgcatcgccggtgtcctcgacggctcgcgccgtcgcgctctcgcaaaaccctagctctgcttccctccgtcgtctcgcccgttcgattgaatcgcgccgcagaagctgttgcctctcatctctctccccgccctcctccggaaaccctagcccactccgcgaggccgcgatggcggagaggaagctggatcgaccctcggcgctcggcaaaggtgggctgtcgcttgggatcgaggaggacagggttgccgccgccatggggttcgtcgaccactcgaaagatcagcaccacctggataacagcattcccctctctcctcagtggctctacgccaaacctgctgatggaaagatctcgctgcctcatgggtcctcccttgaacttgctgaaaaggaagtgaggatgttggaaggaactgttgacaggaaagaacgaaggagaaatgcatttgatgctgacagtggtcttcgttggcttgaagaggagagggagacaagcctgcttgggagaagggagcgcaagaaggatgtggaccgggatgtggataatcgcaagattgatcgccgatctgacaatgtttctgcaagggatatcactgatccgcgtgcagctcctgcatctgaaaggtggcatgatggttccacccgtggcctggggaacgagggtcgccgggatggaaaatggtcatcaagatggggacccgatgacaaggagaaggactctaggtcagacaagaaggttgatgcagagaaggatgaaacccatgctgataaactgacattcacaggaaggctgctgtctgagtctgattcccgtgataaatggaggcctcgtcaccggcaggaaagtcattctgtcggaacagctacgcaccgtgctgctccaggctttggatccgagaaaggacgtgttaaggactcaacaaatgttggttttgccgctggaagaggaaggggaaacccgaactcagttgcatccttcaaccggccatcatctgcaggatcaatcggtgctccagctgtgcatgggaaatttgcaaaaactgctgttagtttctgctacccaagagggaagcttcttgatatatacaggcagaaaaatatgatgtcgtcgtttgatgatgtccacatgaaactggacgaaattccttctgtgacactctctactgctgcaaaacctctagcatttgttgcaccagatactgttgaagaggctctcctggaagatattagaaagggtaaagtcattagcagtgaaggaatcaatgggattggaaacaaaaaggagagggcaaaagagctcgaagaacctgcttctggcattgatgatgacatgggcaaagccagttttgcaattgctgggttgggtcaagaagggtcgtcaggtttaatctcagtgaatgatgcctcctatgttgaagggacacttcctagtggtgtcagtacatctctgctgaagataagtctggaggaaaatgccatcagcaatcaacatgggattactgacacccaggaaggtttgaaaactgctgaaatcaaggaaaatgctgatcatgctcttggcactaagttacctgatgattcgaacaccctgtttgaggtaccatcctttgagcatcttcaagaacccactaggccataccaaagcaacaacatggatataaaagtgggtggccatgctaattatccagaagagttgacattatattatctggatccccaaggaggtgtgcagggtccatttctgggtgctgacataatctcttggtatgaagatggatacttcggtttggagttaccagtacgtctgtctcagtttccagatgatgttcctttccgtccacttgtcgaagtcatgccccaccttgcgcaaaagacgcaatcgcgtatacctctgccttgtgatggaaattctgagtctctggaatcatctcaaagtaaatttgaatccagtgtcccttctacttcctctgggaggactgaccaattttctatttgggattctgaaagcaatgctgttgatcctaaaagaggtgatcatgaagcatcaataccttctcgtagtggttggctgtcttcaccggaaacaggaaaggatatatcaaatactagtaatcgccagcaacacattcctgaatcagtgaatcaggatgctgaaggcctaacagcagcatgggtcaatccctacgagaccttgagaatgaccgtgcagatttccaatcgacaccacatgaccctcattctgtggctggagaagctaatttgctgcaacataatgtcccaagggacagtgatctgagtcctcttggcttactttggtctgagctggaaggacgtccaaaacaacctctctcatctaatgtacttagtgtaaatgaacgtagaaatcccaagcctacaacacccaaggacattccacctgtaaacatgagacaagggccacttagcagaatgaatgaagtttctagtgtgcgcgatgagtggcctgcaaactttggtcggctggacaacatgaatgatgcaaacatttctggcagaatccatcaggttgaagcggagcatcatttgaattttgatgggcacctgctgcttcaacagatccgacgggagcaacagcaacagcggcaggagcaattgatggcccataataatttagagttttctggtgcatttcccgggcaggtgtttgatcctttgaaccaacaccgacagcctatgaatcaacagattcctgatgtggagcatcttttgagaatccagtttgaacttgagcaacagcagcaacgccaactccaacaagagcagcaccaacggcagctacagcagcaacggcaagcccagcttttgcaacggcagcagcagcagcagcagcaacagcaacaacaaatgatccttgagcaattgttgcagcaacagctgcagggttcaaattttggcccaacaagtatggttgatcaagtcttacttcgtgaacatgtattaaatgaactgcaccagcagcctcaccatttgcaaaggcagcatgatgcagctattgaacagctcattcaagcaaaatttggtcatgggcttcatagggagcaccataatgatatgttggatgttctctcgcgttcaaatcagagacagatgcttcctttagagcagcaacttcttttaggccttcaacacgagcagcaacttaagtctcaacaattggcaaatgctctgcggcaacattcaggccaggaagaagaaaggcacttaagtggggtctggccaatggatgctgctgcccagtttatccgctcaggaaccagtccaaatcagatacacagtcgtttcgatctccttgagaaccttcagagatcgtcatcgtttgatcatcatgaacatctagaccgcagcttatccttacacgaacagttgcatatgggaggtcaaggtattcgctccctagagcggactggttctttgcctggtggtggtcctggaccaaacccagatgtcataaatgccctaacacgtcatcatggacttagtcagttggaaacacatggtgatgtataccctttagttcaaatgcctatgcttccttcaggtgttcatccccagcaacttaggcatcaggatcagcttcctggttctcacataggaaggcttgaaaggcactggtcggatgccaatggacagttacaaaacagtctaatggaatcttcacacatcaaccagttgcagattgaagcggagaaggagaggaggaatgtggaaatgaacctttctgttgacaatccacatgcatggggagcccttatgaataaagataggaatacagagcaagatttgactgatatgattcataaaaaacttgtccttcaatcacagcagtcccggggttttcctgatgtttctgttccggcatcatttcgacgtaaagatcactttgtgcaacctgttgtggagagccctctgagatcagtggacatgtcgtttgaggagtctctttctgaaaggtcactttatgcaaaatcagggcagttggcacaagaaggatcatctaatcttggtactttacccaacagtattgagaacactggaaaatttaaccttagatcaggatctggatcaatgcttgagcagaagcattttcttggaattgacgatgttcaaagtgactttctagagaccacaggtggtagaacatcagctaatcaactggttgggagtgtcaatgaattaacaaggggtaaaaggcagggttctagtgcgagtttggctggggatgatcctaatttggctgatgaaggtgttagtaaatggtctgattctggcatgtccaaaggaagctctcactccttactaaagcgctctacaaaccaacatactactacatctcagtctgttcccacagatctgtcagcaatcaggctgaagaaagcaggacttgcgtcctctgatgagaataagatggaagcaggatttgcctcagtagcccagggtatggaaggctgcgttcctagcaacaaagagacgggggcgtatggcatgccatcagccaccaacaatccagatgcctctggtcagtccttcagcgaagcgttgaagagctcgaggaagcctccgttgcagtacgatgcctccgaatctgcagactgtggcccaggtggtaagggcgcgaaaaagaaaacgaagaaaggaaagcagattgacccttctcttcttgggttcaaggtccacagtaaccggatcatgatgggcgagattgttcgagatgattagagtgtacatacgcggtaggaggtggccttagaagaatcaagattggctccaagccaaaccctaacctctgtacatgcccagccctggtgcccgctcacctcggcagaaattttgtgactgcatcttctcttagcctcttgctagctgtagtattgcccgatttctcagatttagaaaaaggagcctttcttatcggtgccccacagaagtgtcatagttttgttgatctgtgaagatatcgtagcactggagcatggaacgtttggtgtgctaaaaaaaacagtatcaact

SEQ ID NO: 21304 - DNA, 2463 bp, Zea Mays
gccccggcccaaagcaccagcaccggcgcggcggtccaaagccagaagcagaacagaaaacaactgagacagctagagcagagcccccttcacaccaaaaatttcctctttgcgtcgcgccccgtcagctgagtccccgcggatgggctcggtctcgcggggctagggtttggtcggtcgtctcgtcggcgtcgagggcgccggcgctgctagctagtagtagctcgctcgcgctagggttctcaggagccatggtgatgcagcgcttctcgtggccgtacggaggccggagcgcctccttgtgcggcagcttcaccgggtggagggagtatcccatggggctggtcggggccgagttccaggtcgtcttcgatctgcctcccggggtttaccagtaccggtttttggttgatggtgtctggaggtgtgatgagacgaaaccctttgtatgtgatgaatatggactgatcagcaatgaagtgcttgtggaaaacaatgtgcaacctgttgtgcagccagagccttctatcagaggaactaatttggatgagggtaccgttttgacaacaatgcccccggagtcatcatctcagaacccaggcgtgcaaatagcagttttccgccatgtggtctctggaatattattacacaataccatatatgaagttgttcctctttctagcaagttagcagttttggacactcagctacctgttaaacaggcatttaaaataatgcatgacgagggtcttgctctggttcctctttgggatgaccatcagggaaccataacaggcatgctcactgcattagattttgtattaatgttgagaaagttgcagagaaatattcgagttactggcaatgaagagcttgaaatgcatcccatttctgcttggaaagaagcaaagctacagttttatggtgggcctgatggtgctgccatgcagagaaggccattaatccatgttaaggattccgatagtttggcggatgtggcactgactataatcagaaatgaaatatcttcagttcctatctttaagtgcatgccagattcatcaggagtgcctttccttaatcttgcaaccctccaggggattttgaaatttctttgctcgaagctacaagaacaggctggaggctgttcccttctgcacaatcagcttctcagcattcctattggtacatggtctccacatacggggaggtcaagtagcaggcatctcagaactttgctactgagttctcctttaaatacctgcctggattttctgcttgaagatagagtaagctcaattcctatagttgatgacaagggagcgctccatgatgtttactcactcagtgacatcatggctctggcgaagaatgatgtttatgctcgcatcgaacttgaacaagtgactgtgcaaaatgctttggatgtgcaataccaggtgcatggtcgacgacagtgttatacttgtttacagacaaataccttgctggaagtcttagagggattgtctattccaggagttcgacggcttgttgttattgaacaaagtaccagatttgtggaaggaatcatctcattgagagacatatttacatttctccttggatagcatctgtgtagccattccatacatgaaaaagcttgttgtacttggttcaaacgaaataaaaaggttacaaatgtgatagccatcttctatcttccttcttgatttggttcatattataccgcagacactacataattgagttgcaccgaaggaaagaacaggtaggtgctgcaggatggagaagtgttcaggctacagaatcattttcataggatctttgaaacagggggattttttgaaggaaatgaatctcgtggatttttcttccttggaatgaagtcgaaggacctcttcaaatgcgagcatatatatcttttttttgtggaaacatgaacgacgtcatgcaaatgattttcttgaagcattgctgtcattccagttctataagatttgaagtgtttctgtacaattacaatgcttttcatgaccccatttggttttgctttctgttttcaaacaactctgagatttggctcatgagaattgtatatgttcaattatcagtgcatcttggtgtgagtgacattaggcaacggaattttgttatgaaagactgaactgtacaagaaattgctatcataaggaaagcgaattaaggaattttggttgatgctcgaaatatgtcaattattcgcactgtgctagtgattatgtacagaatcagggaatgtctcgcatccaattagggagtgggttggttgggttggactgtgttatactgtctttggtggatcatgtaaaatatgtgatgcgatattgtagatgataatgtttgatattgtttaaaagtttgacattgtttgtagagtgaagtttaaaataaaagatgagatagatgataatgtttgatatt

SEQ ID NO: 21305 - DNA, 2557 bp, Zea Mays
cccgtttaacggcggcacgacaagcaagcggtcacgtgagagctgatttttctcgcagcgggtagcggtagccctgtccctgacctgatcctgacccgtgcgggcgtgcggctcctcgcggacagctccagactccagagccgcctcttcgccctctcgccatcggcaggctacggtggctgcttccccgagcctgcaggtagaccaccttgtgttgattcctcgagtcttcacctggtgcttccgtttgcagcttcatttttaactaagatgtcacaagccaaggaagtgaggtacactgcacggtctattacacctcctgctgatagaaatggcacttcaaggtcgcctcctccaaagagacgcagcccttcaaggtcacctccaccaaagagtgcttcacggtccccacgtccaaggagtccaaagagacgcagcacttcaaggtctcctcctaggagacgtggtagatcaaggtcaagggataggagtcggtccaggagcccagatgatagaaatccagggaataacctttatgtaactggattgtctactcgtgtaacggaagatgatcttgagaagttctttagtaaagaaggaaaggttaagaactgtcatgttgttcttgatcctaggacaaaagaatcccgtggctttgccttcgtgactatggatactcttgaaggtgcaagacgctccatcaagtatctgcaccgcactgtacttgaaggtcgcctggtcactgtagagaaggttagatgctgactgtactgattcattccattatgcatttttctattgtattttttgttgaatagtgctagttttgtcatgttatcgttgtatagtaatgtcaagtagtctaatactagcagtagtacagttaaaaatttaaagctactatacggtcatgcatgttttttgtcttatgcttgtccctccccttcccactttagccttgaaatcactgatgtcttagtaacataaatgcattaatcttgtgcactggaaattatattccattacattaaggggcttcaatgatgctatgctctgttcagtttaaaactctggtgaaggtccttgaggtgaggtatgttatgacttatgagtagaagattacaaatatgctctttccctatgatggaagagtatattctgtaacagacaagcctggaaaccccactcaggtgaaatgtgccagagtaaattgaaaggggatcatttatgatgtgttctgatgcaatcctaatgtggtgaatggggaaaacctcttctgtggctcttcaactggggtcttaactctcatctcgtgctgacttcctgaccttccagtttaacatggtgctgggctgcctctacgtcaacctggttggtccaggctgtgcagtctccaaccatggttgtctccaaaggatgtgcagctgacgtgatggtgcttatcaccacaccctcagagctcatcaccacttgccgtcttcacctcgctcaccgacaatgcatacatgctacatcaacacgacggctgtcgccatagagcgatcttggagtcttgttgtgcatcgcgtcaccaccatcgccaccgcaacttctaccacaaccgccatcgtcaacatcacgctcgtgatccaacaggctctacgatttgtctgcttcgactaagcttacatggtgcatgctgctgccatgtcacgacaccaaccaccaagtctgatgcgaacttcatcgaccagtatcttgatttgatggacatcacgagaggcataatctggcgcttccttggaccatggctacaccgaccacggaacaagtgcacaaaagtcatctttggtttagttggcatgcaacgctaaaagaactcgtgaaaggacccctactcctggaaaatactgtggtcgaagaggaggatctcaaaggagcccatcaccttaccgccctcgcagaagggagcgttcgcgctcaagggaacgcagaagggagcgttcgcgttcaagggatcgaagggagcggtctcgctcaagggatcgaagggagcggtctcgctcaagggaacgccgaagggagcggtctcgttcaagggaccgcagggagaggtctcgctcaagggaccgccggagggagcgctcacgctcaagggaccgcagaagggagcgctcacgctcaagggaccggaggggcagttcaccccatggcagaaggcatagagatcggtccaggtcacccaccagcaatgggaaccataaggcagactaggaagcgcttttatggacttgtcgttgattgcgtgaacaaaggaacttgtaacactacctataaactggtcagactgagacggttagcatggatttttagtagtgttgctgtattttgttgtttcatacaagtactctattctgttagctttcggatcgaaatgtcggatgatgatggttgttattgttctggaaatcgtagacatgtcctccagaatacctatgaaactatggcatactcgtgtgtttgcttaaggttgctgtggtatgttctgatcttaagattgacacgttgcacggtagat

SEQ ID NO: 21306 - DNA, 2797 bp, Zea Mays
caatccctgaatcgcacacccagccagaacgaacgccagaaggcccagaaccgctacctcctccaatacactttcgtggctccgccgcagcacgaaaccctagcttctgcatctccgccccctccacctcccctccgcgaagcaggcgagatgtcgtcgggcggcggtggggggcagcagttccgctacacgcagacgccgtccaaggtgctgcacctgcggaaccttccgtgggagtgcgcggaagaggagctcgttgagctctgcaagcccttcggccgcatcatcaacacaaagagcggcgtcggcgccaaccgcaaccaggccttcgtcgagttcactgacgttaatcaggcaatctcgatggtttcttactttgcatcatcttcagaaccagcacaaatacgaggcaagactgtttacattcagtattcaaacaggcaagaaataattaacaacaagagtcctggagagactgctggaaatgtcttgcttgttactatagagggtgttcaagctagtgacgtcaccattgatgtgatccatatgcaggcccatgttaactggagaaaatgtcgttatcaacacctgcaatgggagagataccatgtttgttttgccgcctctgtcttctaactagtacattcaaagttcttatgaactcttatgtctcatcttgaggatgcaactttctaagtatcccccatcaacgcgcttatctccggtgtagggcacctcctgtttattcaagttattcatgaaaggttttctcggcctttgggtatgttcataaaatagccacctttgaaaaggctgcaggttttcaggcattgatccagtacactgatgcagatactgcttcagctgctagagaagccttagatggaaggagcatcccaagttacttgcttccagagcacgtgacatcctgctgcctgcggatttctttttctgcacataaggatttaaacatcaagtttcagtcaaaccgcagcagggattataataatccatatcttccaattaattattctgccatggatggtacattgcagcctgctgttggatctgacggaaggaaagtggaggctcaaggcaatgttcttcttgcatcaattgagaatatgcaatatgctgtttctgtagacgtgcttcatactgtgttctcatcatttggtacagtccagaaaattgctatttttgagaagaatgggggaacacaagctttgattcagtaccctggtatgtgtctacaaattgatcatgccaggctttaaatcactaagctttactggaagatgtttaagtagctgtagttgggttggtgtttgctggcggactttgtttgttttgctatcttgcttgttgtgttcagaagggttagtgcctgctgaccccttggtgatcagaggcaggagcgtgggaagcttgtgatgggaggttaatcattgaacttgtgaaaatgtgaagtctgtaatttcgttgctttggtattgaagctcggttttatcatgttggaaaaaaatcagtaggctttgatatagtgggtcaatcttgtctagaaaaatagcaaattgccccttgataccttgaacatcttacttcttttttgcagtaatcgtttaccatctgccaactctgaagtgcttggatctccctaaaaagaaaagattttccttatcagatgatgttttgccaaaacccaatgtgaaagtgattttcctgtgttataacaaaaacaagaggctttcacatatttaggaatggcatctcctgggaccctggagcccttgattaatctgcttatagtaacattgactttctcactaaacatgcagctgattatttcattttcccatgtgcttttctatagaaattattcatctgaatctgattaagtctttctttacactttagatgtaaatactgccgctgtagcgaaggaagcattggaagggcattgcatctacgatggcggctactgtaagcttcacctgtcatactcccgtcatactgatctgaatgtgaaggcacatggtgacaagagcagagattatacaattccagctggcgtaatccaaggggcgccacaaccacctggtatacaagccacgtcccctgggtggcaaggtaaccttcaagcagcagggccatatgccccacccggtgcccctcctcaaaatcacagtgccaatggacaagtgccgaactggactcctggcaattcagggtattccccagccccaggaacatatccaggccagatgtactcatctccggcacagtatgtagcatcagggagcttccttaatacctcagcggccactccgcctcagtatgcaacctcagggggcttccctaataccccatccaccgctccgtcacagtatgcagcatcaaggggcttccctaacaccacacctgccgcccctcctggtgctccatcacaaacgccgcacgcttcccagcagatgccgcatcagcatggaaatcattcaggaggaggcacgcccggaactagccaaccgccactgccagcatcatattaccgttaagttggatcttcttttgctattgtacttgacctgtgttttgaactgagtaatcatgtaatactgcaataacctgcggtctgtaactgtgtttagatgtgatagcagatggatacgagtgaggaatacatgaatatgtttggggttttcattcattttaaaaaacggatcagtgttggctcatggcgattactggcaagatcatgattgatgttggattggtggtaatgttctgaacagccgac

SEQ ID NO: 21307 - DNA, 164 bp, Zea Mays
actacataagtatgtagtgtagacgtccacaaccggtggtgcacagttctgccaccctcctccccaccgccgccgcggtttccttgcatcctgcccgcggcgctcctttccatcctcgagcagtcgcagcttccttctatggcgctcctttccatcctcgaccg

SEQ ID NO: 21308 - DNA, 240 bp, Zea Mays
cttaatatcgatgtactatatgtcacaaccttttcatgcattgaccaataacttagcatttggaatgggtttctcctttctgtatcattatgtatttatgtgtacttccagggagtacaattttcttcatgttggcgatgaaatgctacaatctaagtcgcttgatcgagattcatatgtctttggagatcaagaataaaatggttctactgaaacccctacaagatgccttccactctg

SEQ ID NO: 21309 - DNA, 331 bp, Zea Mays
atcctgtcatcatcagtttcactcctctggctgctccttgtgtgtgtgtgtccactaatgcgttcagcattgcaactgctgctgccaaatgctgagcattcgttgccaacatagatggtcactctgataaactgtcaccttcaatgggaggatgctcaggttttgagaccgaacctatatgtaccaccaaaacaatatcctaattgcaagcatttcgatggatgcaaagcagacttggttgtttgcgatggaggcttcggataaaatttggtggctggtggatctgcttaagaatcaaaagtcagacaaggtggacatcaccatccaaccg

SEQ ID NO: 21310 - DNA, 1260 bp, Zea Mays
agacaagaagaaaggaagcatcactaaaattgatctttgggacgagtctcataagaagaggaatgggaactatgtcaatcaaaatgtgcaaacacttatgggtaaggccttcgatgaattagagaacaggagaaaggacaaggggacactttctactagtgattatgatgatgtgtttgagaatgtcataagaaaagacttgaacattcgtgggtactatgatgatacgtattggagcaatggaacttattcacatgttcaatcagaggagaataaaatgattagaagggacctagagcttgctatttctgggtttaggaacattagagcattcctagaaaaaaagtttccagaagaggaattgctaagcacaattctagctactggatctagaagcaccacacaggttgatactaaagacaatgaaaatgtctcattgcaatatgataatgtagaacgatccagttatgagaaatcaccttcaccatacaatgaacagatttatactagagattataatattgccaaggtgggttgctctgatcattcagtaccaaatgacaacatagctttcagggaatcacaagttacaaggtctagtgacttgaaccaggaactcaacaatggatcactatctccagataaagaaatgtctgataaggaaactcaaagcaagcaacaacaacaaagcaaattgcaacagaataaacagaagactgtcttgttgtactcaacaaggaaaagaaaactaggccaagttgttgctgttggtaatcttatatctagagatactactcatgaaattggaggaactgtacttggggatggatattatgctgttgcggttcattatcttaacaatgttgaagatgaaagattacctcgaccacacggagatcttaaaactttggaggatgctgtgggcatgtgtgttgcttggcctcgcacacatcttaaaagagtgaagccaactactgagaagcgcacttgaatggttagaagactgaagatgcaactaatgaatgagcaagtgttatagtggagagtagttctaggatcaaaagttctagttgtcaatctacttgtttaattgtgttaggaacctcattttattcattcttgtatgtctaatctacctcaagaccacttcgtttggattgaaaatacttatgtattgttgcttacacatgaagcatttaattgatctgttatatatatgaaccttgtgtcttgtatatatatgtgcacaaattgagtgtt

SEQ ID NO: 21311 - DNA, 1241 bp, Zea Mays
gaaaggcggcgcctcttttggcacccagctgagcattgcatttccttcctccttttcccagtcggaggaatgcaatgccgtaaacgaaagtttcccatccttgtgttttggggggtgggccatcgcggtgttgataagaaaaaggcggactccttgtaccagtttggttttgttttgtacgcgcattggttcctggcttgctcaataaattgcaaccacttccttccgaattccgatctagcggactaccagttcctcccgatcttgggtttgaggaggccccgagccgagcgtcaggcatggagcactgctatttgaggcagccgatctcgagggccgaggcagtgcccgagaggaggtccaggttgtggcagatggacgcgctgccgctgccgccccgggcggaggtcctctgcccccagcctcgccgcgccgcccggatccccttcgccgtttcagtaaacaaggccatccccagtgcgcttccgccgtacagaccagcctccgcctgcgacatactcgatgatcttatcctcagcaagaatgacttctcagatggagcagattcgagcagcggccaggcgggttttttatgcggctcgcctccagtgcgcgctaacaaccctgtcgtccatgacccgcagttcggtaaaagagcgctgccatccatgtctcccctagggagcagctcccacgtcaagcttaaggttgaggcaggctcgccatcctgcggcgttagcagcagcccgaaagtgaggatcgaaggctttgcctgtggcaactcggagacccactacgcagttacgccgctccttgtgtgaatcgaatcgccgtggtggcgtagcctgatcagagtcgcgttttttgcccttctgaatctgctgccatctgaagcttcacaattgcattgagcagtatgatttatgtgtgtctagtaaatgtagctggagttgcatggataatgaaggaggagcctgtgaatagagcgtttttactttttttttggtattcgggaagtaagatgcagcatcgagttttcagttattatggatgcatctttgttttgtcatacgaaggaaactatatatgtagctttgattttttttcctagatatattcatgctgtagccaaatcatccgggcaggtcaaaattctggagcttcaatagtcttctctctctctctattctggggaacaaataacgctactggtttgtggagaaactgactgatgatggctt

SEQ ID NO: 21312 - DNA, 411 bp, Zea Mays
accatgaagaggtcaagaaagcagtgaaagaacattcaaagatggttcccgtctgaagaaggaccaagcacaccacttggcgatgttgaagcatcctcctcggtcctcacaagcaccacaaagggtgggggttaaaaagattacatccaagaagagagctcaacctcctaatgatgacatattgggtggaaccatgtaattgctgtttgaggcgatgtatggggtttaggacggagtactatgtatgaaacccctattatgatactgtggttgatgccatgtatgaaccatgttatatttctagctatgtgtgttggtagcttactgggtgtgtgaaacccctattatgatgcatgaaccatattcagtttacttggtgatatccatattatgtttctagacgtgccgata

SEQ ID NO: 21313 - DNA, 545 bp, Zea Mays
cctgaatcacactacataggcaagcggatttgtccgtaaacccacaaagcaatttgttgccacatgaaccacactgcataggcagtatgcagtaggcatgatagtgtggaaccctcagccaatgcgaggcaccgtaaatctagtatttaatggtaaaagttctttttgctaacgtggaaatgctgggatcctgcagagcttgcggctctcacaagtaaaaaaattcctgtcccgtattcaaaacaatgacagataagctgttgagttatgaatggcatggcacaatcagtattgatagggaagtaactgaaatgtgagaaggcatgatctaatggctgttcaatacaatcactggcgttatttcctttttggagcagaaaaaaacaaagtacattaaatggccccagataggaaatcattaagcaaattaaagggtagaggggggggggccacaggacacatgcaaaatttactctatggaaagatgtggaactttcaggaagtatgaatttagaagttgtttccttagaaagccaatatgtatg

SEQ ID NO: 21314 - DNA, 2824 bp, Zea Mays
cggggaagggggaagagaggggacgaagagggagaaggaactgggacttgccgcccccgcctccgaattccccactcctccaccaccgccaccactcaccccttgctccgctcggcctcctgaatccggcgtcgtcaagcaaccccactccttctgccgttatcagaaccctaaccgatcaatccgtccgattcccagctgccggtttcgcgttgggagcgccggagcaggggaggggcggagggtcggatcggcagccgcaggagcattgagcgatggctgccgtgtaggatgcagctggactccgccggccgccgcctagctgctgctgttgttgctgaagttccgatgcttcagcaaccgcgatcttaataggagcggagggtggagtaccggtggagtgggccggacggctggttgatctccgtgagctccagcgcctacgcactgggaggtggggaggtgattgccggaggcgtatggaggaacctgggagggagggggattcccccgggccgccgtgggcgccaagtgagtcctcagctttccgggcgttcgttacggcggtgggggagcgggcggtggcgtcgccttcaggctcggacaatggggattccgtctgctcaagcaacctccgcgccgtcaggaagagaccttttgttgcaagattaaccacatatatcatccaaacttttgaaaaatgcaatcctgagtttaagtactcagagtcactaaaccccaagcgctttctcaccaatcccgcagttcctgttcacaaccatggtcttgacaatgcaaactctgatctcatattgtatgtcaacctggaactgcttaataaaaagtcaagccggaggtatgttgtccaagaaatgcttggccaaggtacctttggacaggttgcgaaatgctgggatgcagaaactaacagttatgttgcagtgaaggttataaagaatcagcctgccttttaccagcaggctatcatggaggtctctttattaagattgttaaatgagaaatttgatcctgatgatgaacatcacattgtccggatgctggattttttcctctaccaaaaccatttgtgtatagcctttgaaatgcttggtaacaacctgtatgagctgttgaaaaggaatagtttaagaggtttgcaaatgaaatatgttcgaactttctcaagacagatactggatgccctgattatcatgaaagatgctggcattattcattgtgatctaaaaccagaaaacatccttatagctccaactgtaaaaacagcagttggagtgaaagtaattgattttggatcagtgtgcatggagggtaaaaccatttattcatatattcagagccgttattacaggtctccagaagtacttcttggttatccatatactactgccattgatatgtggtcattcggttgcatcgttgctgagctatatatagggctgcctttatttcctggtgcatcagaatatgatgttctttgccgtatgattgagattattggtgggcaaccaccagatgatctgctacgtgaggctaaaaacactgggaaattttttaagcatgttggaagtatctatcctagtagtgaggctcggaatggcgctagcagtgcatacagaattttaagtgaagatgagatcgaagcaagggactccaagaaaccgaaggttgggagatggtatttccctcgtggaaggcttgacagactcatatatacatacccctggaagaatttgagcgagggaaacttgccagagacagaaaaggctgattgcttggcattagttgatttcttgagaggacttgttgagtttgatcctaataagaggtggtcaccgctgcaggcctcgtatcatccattcatcactggtgaagccttcactggtccttacgagcctgttcaggagaccccacgaattcctgttggacgtgctgcagtagttgaccacaatccaggaggaggtcacttgctgggtgctggtctttctcctcagaaatggacacctatttcatgcatcatctctgggagagagtacacatactccaggtcatgtcacattggatggatacgaacacacaacttattctcagcgaagtttcccaatctatcgtgggcaaccatttcagcagtacaacaacatgacttccagttacatccgaccgatgagggctcatcacaatggtcagcctgtctggtctaattataggctgacagaacctccaccaactacaatgggtgacggaatgctctggggagggaggggtggccattcgtttgcagcgagcggactgccacctacacttaggaaagattttgggagaatcttttagtcctgaatccggaggaatgccgaatgccaccaaattgatggcatcagttgtttgcatctgcaattccgggttggattatttgctgggggtgcctactggtattgcaatttgttgtgttcctccgatgtctcccaggatgttcggttcaaatgattatatggtacgggatatgattacagtgctcgttctttgctatacctgcacgatctagtagaaaaatgtcagttgtgctacttgatgcgaatcttgctagttcgaggtttgggagagtttttctgtctcggttattgtcttcctttctctattctatttttgacagagggttaagttcctgaaccttaacatggctaagactgaagtgaaggccacgtggtcgtggtgacatgatttcgttttcgtgatacttgaggagccgactatctgtttttaagcatctttctgttgttgttttgctacaacaggttttctaagggcg

SEQ ID NO: 21315 - DNA, 2101 bp, Zea Mays
tctaaaaatcgcacccgcaggccgcaccgcagtcgtcaccaaacagcgccgcgctccgcattgcgctagggttttagaactcttcctccggtcctccccgttatccctccaaaaggcagcgcccgctagggttttagccgccgcctccttccctctcctcctccacgtctcctcaacagccgctgccacccggagccttcccgcagcgacgccatgtgggctcttcgccgagctggcaaccccctcaggttccgtgcccaaaaagttgcaagtgcccatgtctgtgcgagtcttgaggtgctgctagctgctgatgcaaagaatgtagaagagcaccatgaggcagactgccagaaaatgtgctgctgtcataaaccaagcagctgttcaaaacgatgacgggttggcatctgaagatagttctgatgaggatgctgctgacgaatttggcttgcctgatgtggatgctgatgcaaaacctgagaaggagcacactagaagattatctgattctattctcctcaagacattatctgattctattctcctcaagactgtgttggaagctccgaggcatcaagtcacttcagcacttgagaaatgggcaaaggatggcaatgcatttgataggggtgaactctattatgttcttcttaatcttcgaaagcggcattggtactccaaagccttggagcttgttgagtgggttcaaaaatcacagctattcgaatttgtagagcgtgattatgctgcacatcttgatttaacagctaaggtctatggtcttcataaagcagaacagactattgagaaaattcctgcatcttgtagggcttctgttactctacaaaaggctggacaggaagaagattgctgatgttcttgcaatgatggaaaaggaggatgtgaaaccatctctctttacttacaagattcttgtagatgccaagggttcagttggagatatagaagctatggagaaagtgattgaatcaatggagaaagatagcattgagccagatctcacgtttaatgctacaattgccagacactacatattttatggccagcgtgagaaagcagaggcacttctgaaggcaatggagggtgatgatatccagaaaaatcgtgctgcttgcaagactttattacctttacatgcttttctgggcaatagtgatgctgtggaaagaatttggaaggcgtgtgaggataatactcgcgtagctgagtccgtgtctgctatagaggcctttggtaagcttggtgatgttgaaaaggcagagaaggtttttgaggatatgcttgtgcattggaaaacactctcttccaaattctacaacgcgttgctaaaggtgtatgctgatcacaacctcttagacaagggtaaggaactagcaaagcggatggatgagaaccgtgtcaggtttggggccccaactctggatgcacttgtgaagctatacgttgaggctggagaggtggagaaagctgagtccctagtgcacaagctatctatacagaaccacatcaagcctatatacaacacatacatgacgctgcttgacagctactcaaagaaaggagacgtccgcaactcagagaaagtgttcaacaagttgcggcagtccggctacactgggaggatcaggatgtaccaggtgctgctccatgcttatgtacgtgctaaggcccctgcttatggattcagagagaggatgaaggctgacaacattttccccaacagtgttgtgtcaactttgattgccgctaccgatccgtttgtcaagaagaaatcgatatctgacttgctcgattaggttatggagtagtgtgagatccatcatgtttccgtgcaacgcatgtgctgccttttttttttttgcattctgctaaagaatacggcgggataataatgtgtcctagtcttgtaatgaactacaagtgtctttgcatttggactggttcgcttgtgagtcatagagattgctgaactcgtgagtcatggaaattggcaactgtgtgctatttgttcttattttgttgttactcatttcatcaatcaagtagaatcaagatgagccttttgcacatcattccg

SEQ ID NO: 21316 - DNA, 1753 bp, Zea Mays
cttccttggaaagaaccatcgccagattgagatctagaatcagatttgttaaagcaggtagcatggcagtggttacctttcacgtcatccgcacgaactgataaccttcaactctatcactgggttagagttgttaatggtattcagccaactggggattatcagtttgcaaaatataacaagagggcggatgttcttaaatatacggatgaagagtatgagaagtatttagttgaccctgattggagcaaggaagaaacagatcaactatttgaattatgtgaacgatttgaccttcgcttcataataatagcagataagtttccaactgctcgcagtgtggaagatctgaaaagtccttactattctgcttctcgggctcttctaattcatagagctaggtcattcgaagatgtttctgggaatccccttgtgaaggatgcctatgatgctgctcatgagactgagaggaagcgtgcattatcagcacttctctcccaaacaaagcagcaagaacgaaaggacgccgagactttagcagaagcaaaacgtatcatggaatctcgtgctgctagcaaaaatgttgatgtagctgtaatgcctccgaactctgataatgctatggtacctgttgatggtgtatctccttcaagcagtactcatccatctttagcacatccaaatacatcagctaacatcttgatacctaattcactacgaacgcttcgagtgtatttgagaacccatgcgcttgaccaaatggtccaagcagtaggtgcttcagctggccttagagttatcaaaagggttgatcagacactacaagagctagcggtgaatttgaagcctaaggtcccaacgaaagcagtttgcatagagcatattgaactgcggaatgagctactcacattgcttaacctacaaaagcagctgcaaaataaagaggctgaagtttcagctaaccgggaaagttccttcacagaggcaccaagcacacctaagcgttctaatagggacattgatcggcccttcatccctgatacaagtgggtttacaggtgaaagagcaggcaaacgggatcacaagcggaagatttatagatgcgcctccatcaccaccccagtcgaagcggcctagaaaattgaagggatctgactgatagtgctgttcaaatgtcaggatgaaaactctagtcaaacaaccaaggtgtgtcatatcatactaaagttaaactacgtgtttttcatgattatttagtcccgacttaagagctgcagattgacatttacatcacttttttgaataatgtagcacttgcagtcttacagtagagatgaactagtagaacctaataggtcagcaacggcatcaatggaaatccgttgggctggccagtcatgcaggaaccgactttcgctgcttgccctgacttcgggccatatgctgggtggaccggttttggatttataatgtatctatctattattgtcatgtaatgttacacagataactgagaggtcgaaatcgtcacttttcagcagatttctgaattctgagtatgggagaccggtaagcccgacaattccgtttttgctcctgtccaaccagcacggtcaatcggttcacccaatagacgttcaacaaacaggctttgagagcacgctagtgcctgtttgttcaccatgccttcccggaagctcatctgacagctcctttactttgtttgggtactctattatttatcttaatctat

SEQ ID NO: 21317 - DNA, 1195 bp, Zea Mays
gttggatttggatcctctgttggacttagtctgagatacagtttccgtccgtggtctgcgagcgagagcaggaggcggccacgcaagctccacgaagggaacgaaaccgacgccgagcccgagacggcgagccgttgcttcgcgacacctcgctcgcttctcttccaggcttccacctccacttccacatggccgctcccatccacgcgcgtctcctcccgctccccttgcacccgaacccaagccccagtctccacgcgagcggcacacgacgggtgccctggcccccgcgccaccgccgccgctgcttcgcgacgccgccgtcgcggaacgggagctcctcctcgccggagatcgactggtgcccggtgccgccggaccagctccccgtgaacgagtacgaggcgcttgcggcctccctgcccttctcctgggcggcggggggcctccgcgtctactgctcccgcctcgcgctcacgggcgccgccgtcgcgctcttcgtcgggctcccggtcgccgccttcgggggccgcggcggggccggcggcgacgctctgcacctcgcgctcggtgccacggggtccgggatcctcgccgtcacgctcgctgtcgtgcggatgtacctcgggtgggcctacgtcggcaaccgcctgctcagcgccacagtggagtatgaggagacgggatggtatgatggtcagatatgggttaaaactccagaagttttagctcgtgatcggcttctaggctcattttctgaaccttatggaaatacaggtggaaggtctatcccgggagtgtacagcgacgctgctgcaaggtcgtttgagcccgatgcattctgtggagaacctgatttgtcgtagcatcgtaaagcgtggagcatggaaggtttgtagatggcagtatatatggtctcacagggtatatacgggggtttctgtacggggtttttaatccatcaaactagggtaatgtaaatatttggccacacccacactagtatcgatattttagacgcaagcctcttatgaaaatttatgctgacgggccacggtgaagtgaaagggggtcacgcctgtttccgaagagcggagccgggtgcatagcatatgtgcgccagaatctatttatacacatatattgacgtcacaagtgtaatatatcaaaagaacaatgcataaaagcgtaaata

SEQ ID NO: 21318 - DNA, 2499 bp, Zea Mays
ggtcctcgtcggcgctttcgctcggccagaaccatcacgagcggcaggagaactcgcagctgaggtccgagaacgagaagctgcgcgccgagaacatgcggtacaaggaggccctgagcagcgcgtcgtgccccagctgcggcgggccggccgcgctcggcgagatgtccttcgacgagcaccacctccgcgtggagaacgcgcggctgcgggaggaggtcgacaggatctcctccatcgccgccaagtacgtgggcaggcccatggtgcccttccccgtgctgtccagcccgctggccggggccggggcacgcgcccccgcgttgccgccgctggacatggcgccgccgtatggcgctgccgctgacatgttcggcggcggcggtgtcgtcgctgctgctggtgctgccggtgccggggacctgctgctgaggggcgccgccgtgcagtcggacgccgacaagcctatgatcgtggagctggccgtggcggccatggaggagctggttcggatggcgcagctggacgagccgctgtggaacgcgcccgcggggctcgatgggtccgctgaggaggagacgcttaacgaggaggagtacgcgcgcttgttccccggcgggctcgggcccaagccgtacgggctcaactcggaggcgtcgcgtgacagcgccgtcgtcatcatgacccatgccaacctcgtcgaaatcctcatggacgtgaaccagtatgcggccgtgttctcgagtatcgtgtcgagagccgcgacgctggaggtgctatcaaccggcgtggctgggaactacaatggtgcattgcaagtgatgtcggtggagtttcaggtgccttccccactggtgccgaccagggaaagctacttcgtgaggtactgcaagcagaacgccgacggaacatgggccgtcgtcgacgtctcgctggacggcctgcgccccggcgcagtcctcaagtgccggcgccggccgtcgggatgcctgatccaggaaatgcccaatggctactcgaaggtgacctgggtggagcacgtcgaggtggacgacaggtcggtgcacagcatctacaagctgctggtgagctcggggctggccttcggtgcacgccgatgggttgggacgctggaccgccagtgcgagcgccttgccagtgtcatggccagcaacatcccgaccagcgacatcggtgtgatcactagcgcggaggggaggaagagcatgctgaagctggcggagaggatggtgatgagcttctgcggcggcgtgacggcctctgcggcgcaccagtggacaacgctgtccggcagcggcgctgaggacgtccgcgtcatgaccaggaagagcgtcgacgaccctggcaggccgcccggcatagtcctcaacgctgccacctcgttctggctccccgtcccgcccaagcgtgtcttcgacttcctccgtgacgaaagctctcgcagcgagtgggacatcctctccaatggcggcgttgttcaagagatggctcacatcgccaacggccgcgaccatggaaactgcgtctcgcttcttcgtgtcaatagcacgaactcgaaccaaagcagcatgctgatcctccaggagagctgcaccgacatgtcgggctcgtacgtcatctacgccccggtggatgtggtcgccatgaacgtggtcctcaacggcggcgaccctgactacgtggcgctcctgccctctggcttcgcgatcctgcccgacggcccatcgtcagggagcagcagcatgctgcaaggcgacggcggcgtcggctcaggtgggtcgctcctgacggtggccttccagatactcgtcgactctgtccccaccgccaagatctcgctggggtcggtggccacggtgaacagcctcatcgcctgcaccgtggagcgcatcaaggcggcggtgatctccggccagagcaatccccagcagcagtagcttcgttgaatccaacagtgttcttatcctttgcattgaaggagcagcaaaattttagagctttcgtcagtgggaagtcaagaacgcacctcagactctcctgcttgccatgtggtgctcatagttccctttactttttcgcctagtttcccccaaaatttctggggttatttcaagaaacacttcagtcgccgaaggaaacgagtcaccacgacgcaagggtagttggttcgggtattgacttcctcttcatgttggcctctcggatgctgcttcctctgaatttaggcttcttctcttgtggtgtacaaaaccgttatttagcatgtaatttgtgctgctgctgctgctgcacctgttcagacttgttcagtatccaggattcccccaatagagatttgtgtcccttaatacctctgcacagtgcttgtgtctagccgccatttcagtcccaaaaatgtgcctgtgtaacgcggttgcatgcttgcattattgttcaatgtcttcgttgctattttgcagctttaagttcacaattaat

SEQ ID NO: 21319 - DNA, 4139 bp, Zea Mays
gtcgcaactcgcaacggggaggggggaaacagcagtcagcaggcggagcagagggtcggacggcgagagagagagagagaaggaaacctaggcagctttccgtttcgggaaattcccgggcgccccgtccgcgctgccccgctgctcccgccgccggtggccaagcccccgcagggccctgcgcggctcgctcccggtttggtgccatggaagggacggcggcggaggtgggcggcgctggcgctgacgcggccggggatgtgcagattaagggtgccaaggagaatgcgcagcccacggcggcgcagcagcagcagccgtccggcagcgaggcgctggagatgccggccacgccactccagcgggacatagactggtccgagcatttctccttcttcacctcgctgggtgggttcgggggcagctcggacggcgcgaggggcctcaccagcgtcggcctgtccaattccgagtccaggccagacagtgtggcacagcgtggcttggaccacgacactgaagagagggtggaggagctcacattgaagaattgcatcaatactggtatccagcctgaggtttctgctggtgggagcacaagcagcagggataggcctacccgtattaagggcctgtggggtaattttacacggatcgcccggagaactagcgatttggccagcagggaaaacaccgcactgagttctggcgacattgcaaacttgagggctggtgatgcttctagcatggaaaagctggcgacgagccttgccagcaatatcatctcaaggaacaacaatgcgtctggcaatgaggcacctatgagtcatgttggatatgtcaataatgagttcatgatgtgcagccagcagattctcttgtctccatggtctaatcaggataatgctcttaaagtaagcagcttctcaaataggattcttaaccggatgagaagtaagactgtggcaccctcatctagggttctacgatcaccacttcaaatcaaatcaaaaggtaaaggggttgtgtgccaaggtgcacgggaggagatccaagtgcaagctaatgcaagacccagagaccctttggacaagattccgactattcctagctcaattcatgattgtatggccagagtggaccatatgcttttcagtactggtggaaatgttacaaaatcccactctgagggatctagcctgagggaactgattaagcctgggtggcaaacaatgactaagtttgagaaaatgcatttgtttaagcagatcattgatcttgtggataagtgtcatgcacagggttttactttgcagcatttgcgaccatcatattttatggtcctttcttcaaatcaagttaaatatatcggctcttataccacacaagatttgccaacatcaatcaaacaagaggttgctagagaagatcttgtgaatagaaaaagaacttttggacagagaattgatcaccaagagtctaatgaccatggaaatttgacgctgaagtatcaaaaggttgatgagcaaggctcagtcgctatcaggcaaccagcaaatacattttggaccgacaaaatatgtgacaatcaaaatgaagatgtcaatcgaggtgttttgaggcaagaaaattttagccacactgccagagaaggttttaagttggtcgaaccatatggcagtaatatatcttgtgctcagcatgtatctagttctgccacccaacaaccagcatttgaattgaggaatcttgaggaaagctggtacaaaagcccagaggagctcagtcaatttaaaggcacattcccatcaaacatctacagccttggggttcttctatttgagctcttttgctgttctgagacatgggaggtgcactgtgctgcaatgtcaaatcttcgtcaacgcatcctgcctccaaattttctttcagaaagtcccaaggaggctggcttctgcctttggttgctgcatccagatccttgttcaagaccaaaagcaaaagagattcttggatgtgacttgataaatgggggtcaggatttgtcgttgttagatgaggcaccagtttccatcggtgaagatgacactgaatctagtttgctacttaacttcctttctcaattgaaagaagaaaaggcgatgcagtctgccaagttatcggcagagcttggaagcttacaaacagatatcacagaggttgacaaaagacactcagcaagaatgagattgagtttagatgatacagatgtactgccaagttctagtgctttgtcaggagcttctgtgagtgcccttcaaggtgcattgctgtcaggtttgttaccagcgtcatacaagtcgagcatatatgaggagagggtaatgaggaatttggtgcagcttgaaaatgcatactactccatgaggtcctcgctggacacctgtgaaacaaatgtaatcaaacggccagataacgaggctttgagggcccgtgaaaatttccatcaacttcatagtgattctgatgccaaggacgagaaaacagatcgtcttggatgcttttttgatggtttatgcaaatatgcccggcacaataggtttgaggtacgaggaattttgaagaatgcagatatacttaactctccgaatgtcatctgttcgttgagttttgatagggatgaagaatattttgctgctgctggagtttcaaagaaaataaaaatatttgaatttgatgcactcttaaatgatcgtgttgatattcattacccactgatagagatgcctagcaagtccaagcttagctgtgtctgttggaacaactatataaagaactacctggcttcaacagactatgatggcactgttcagctatgggatgccagctctggtcaaggattcacacagtttacagagcaccggaaaaggacttggtctgtgagtttttcagatgtcgaccctactaagttggcaagtggtagtgatgattgttgcgtgaaagtatggagtattaatcagaaaaattgtgttgatacaatcagaaatgtggccaatgtatgctgtgtacaattctctccatactcctcccgcatgctagcttttggttcagctgattacaagatatactgttatgatctgaggaacacaaggataccttggtgtactattttgggacatgggaaagctgtcagttatgtgaggttcttggatccatacacacttgtctctgcatcaaccgacaacacattgaagatatgggatcttaaccagactaattgcagtggattatctaccgattcttgcagcctgactctgaatggtcataccaatgagaagaattttgtagggctatctgttcatgatggatacataacttgtggctctgaaaccaatgaagtgttttcttactacaaaactttccccatgccaataacttctcataggtttggttctattgacccgataactggacaagtgacaaatgaagacaaccagcaatttgtgtccagtgtttgctggagagggaagtcaaacatggtagtggctgccaactccagtggtagcatcaaagtgcttgagcttgtgtgaatgaacgagagtcatattggagaagaaggttctagtgttgccatgcgggcctgcgatgctttcgtgcccttgggcactaaaagactcgactgctctatgcaagcatcctacaacaccgatcattggttattggaagctttgcttgaaactcacaagcaaactaaagtttttttttttccaagagtatgatggcctcacctccatttttgtgtttggcattttgagacggtacctattcatcgtgatgcaaacttcttttgggctagaggtgcgcgggacttgctatgactgttaagagcaaacgatggaaagaaagggaaaaaaatgatcatgtagctcgaagaagttaatcgtgctgtgtgaatgtttcaaggagaatgtctcaaatagttttatacccccttcattattgtacatatatctagggctgcctaatgaaaggccttgtaagttgtaactagagtagaatgctgatcatgagttaagtataatgaatggtcttcacaaaagattaatcaatggaagattcatacaaagtataatgaatgattatccttttggctggaacaa

SEQ ID NO: 21320 - DNA, 6087 bp, Zea Mays
tggtacgtgcctgcgtaaaagaaaaattcagagatggtcctcgactcctggtgggtggtggcgatctcccagctgaactgaaagagcaagcgtgcgtgtgagacaaccaggtccgatccgcccccgccgagccgaggacagcagcgggggctctcggtctcctcctaggctcctacagatctcgtaccccgtcacagatctcgcgccctctccatcccatgcccaccccccctcgtcggatctgaccactccgcccctcctcccgtctccgccgccggagctgatatccgcggtcatggcgggcgccgcgggcgggttcgtcacgcgggccttcgaggccatgctcaaggagtgcgctgccaaccgcggcaagttcgccgcgctgcagcaatccatccagtcatacctcgatagtatcaagggggctacagcagagggcgcggtcatcaccgaggcgctcgggtcagctgggcgcgtgctcgacgggccgcaggccgagctggtgctgcagccgctccgcctcgccgtcgagaccaagcacgtcaagctcgtcgagcccgcgctcgactgcctccacaaacttattgcttatgaccatttagaaggcgatcctggtttagaaggtggtaaaaattccccaatatttacagacatcctgaacatggtatgtggttgcgtcgataacacctcctctgacagtactgttctccaagtcttgaaagtgcttcttaatgctgttgcttcaaataagtttagagttcatggagagccattgcttggggtcattagagtatgctataacattgctcttaataggtacctgttatatcgctaccttcttgtttgcagtatgttgccttgttgccctttggaccatgtatgataatttattcatttgtattttcttagcaagagccctgtgaaccaggctacctcaaaggctatgttaacccagatgatcagcattgtattcaggagaatggaatctgagcaggtttctgtatcgcccggaagctctgtggttaaagatatgccttcatctatcacaaatgattctgaaaatggagaaatatctactgatggccaagatgaggaaaaggttactctgggagatgcattgtccatgaatcggccttctgaagctcctccaacgtctgttgaagagcttcagaatcttgcaggtggagcagatattaaggggctggaagctgttctagataaggctgttgaacttgaagacgggaaaaaagtgtcacgtggaattgacctggacactgtgaatataatacagcgtgatgcactattgctctttcgaactctctgcaagatgagcatgaaagaagaaagtgatgaggttgctaccaagacaaggctgctatcacttgaactgctccagggattgctagagggagtcagcaatgtgttcatcaaaaattttcacttcattgattcagtcaaagcatatctttcgtatgctcttctgcgagcatctgtctcttcatctccagttgtttttcagtatgcttgtggtatgttttcagttctgttgctccggtttagagagagtctgaagggggaaattggtgtcttctttcctttgatagttttaaggtctctggatagctctgatagccccctcagccagaaggctagtgttcttaggatgttggagaaagtttgcaaagatccccaaatgcttgcagatgtgtttgtgaactatgactgtgatcttgaggggccaaatctttttgaacgcacggttagtgcgctatcaagaatagcacaaggatctcaaattgctgatactaactccatcgtgtcatcccaaacagtttctgtaaaaagctcctctctccagtgtttggtgattattctgaagtcattggctgattgggagcaacttcgaagagattcctcaaagcaagggagcattgttgaatctcatgaagaggatgcttcaaggagattgacaactgatgagatgaagaaccaagaggatggtcggaatcagtttgagagagccaaagctcataagtcgacaatggaggctgcaatctctgagtttaatcgtaaaccaagtaaagggattgaatatttgttgtcaaataaattggtagaaaataaggcatcatctgtagctcagtttctcaagagcaatcccagcttggataaggttatgattggtgaatacttgggacagcatgaggagttccctcttgctgtgatgcattcctatgttgactccatgaagtttatagggttgaaatttgatgctgcaattcgtgcgttcctgaaaggatttcgccttcctggtgaggcgcagaagatagatcgcataatggaaaagtttgctgagcgatactgcttatgttcttgcttatgctgttataatgttgaatactgatgcacataatccaatggtgtggcctaagatgtcaaaatcagattttgttcgtatgaacactgcaagtgatgcagaagaatgtgtcccaaatgagctcttggaagaaatttatgattccattgtcaaggaagagataaagatgaaagacgattctcatgatacttcaaaatccaccaagagacctgaaacagaagaaagaggccgtcttgtcaatattctcaatttagcccttccaagactgaagtcagctagtgatacaaaggcagagagtgaaaagatcatcaaacagacccaggcacttttcaagaaccagggacagaagaaaggtgtttttcatgttgcgcagcaggttgagcttgttagaccaatgcttgaagctgtaggatggcctttgcttgcaacattttctgtgaccatggaggaaggtgacagtaagcctagggttgtatcatgcatggaaggatttcgtgctggtatccatcttactcgtgttcttggaatggacaccatgcgctatgctttcttgacgtccttagtgcggtttacatttttgcacgctcccaaggagatgcgcagtaaaaatgttgaggcactgaggactcttcttggtttagctgacactgatatggatgctttacaagatacttggaatgctgttttagaatgtgtctcaagactcgagtatatcacttcgaacccttcaatttctgcaactgtaatgctgggatcaaatcaaatatcgagggattctgtagtccaatcgctgaaagagttggctggaaagcctgctgaacaaatctttgtaaacagtgtaaaactgccaagtgattcaattgttgaattcttcaccgccctatgtggtgtttctgctgaagaactaaaacaaacacctgctcgtgtctttagcttgcagaagcttgtagagataagctattataacatggctcgcattcggctggtgtgggctagaatatggtctgtgttggcccagcactttattgctgctggaagccacaatgaggagaaagttgcaatgtatgccattgattcactaagacagcttggtatgaagtacttggagcgtgctgaattaaacaatttcacatttcagagtgacatactgaaaccttttgtcattttaatgaggaatacccacaactcaaaaatccgaggtttaattgttgattgcattgttcagttgatcaagtcaaaagttggtagcataaagtcagggtggcgttgcgtattcatgatatttactgcagcagctgatgatgaggatgaatcaattgttgagagtgcttttgaaaatgtagaacaagttatcttggaacattttgaccaagttgttggtgattgcttcatggattgcgtcaactgtcttattggttttgcaaataacaagtgcactcctcggattagtttgaaggctattgctctcctgcgtatatgtgaagatcgtttggcagagggattcattccaggcggcgctattaaacctattgatgttgttccagaggccaattttgatgtgactgagcattattggtttcctatgctagctggtttgtctgatttgactttagactccagaccagaagtcagacactgtgcactggaagtgttgtttgatttgttgaatgaaagaggacataagttctcttctcccttctgggagagtatttttcatcgtgtactatttccaatttttgatcatgtaaggcatgctggaagggatgggctttcttcttctggggatgattggcttcgtgatactagcattcattcgctgcagttaatctgcaaccttttcaatacattctataagatatcacattgaaacttgtttggttggccatcgtctgactgtggcacttacaggaggtatcctttatgcttccacctcttctcagtttgctgcttgaatgtgcgaaaaaaacagaccaaactgtcgtttcaatttctcttggcgctttagttcatctgattgaagttggtggtcaccagttcagtgatggtgattgggaaacattattaaagagtattagggatgcgtcatacacaactcagcctcttgaactgctcaattcattaggattccataaatcaaacaaccagcagttactttcaagagaagaaagcaatgcacatggcaatagttaccatggcagccggggggaaccctccatcgttaataatggtgagcatagtcatgcagaggcaggtccacaaactagcctggagaattcggaaggtttaccgtcaccatcagggagaacacaacctgctgtttccccacgtggccaaagctttggacaaagaattatgggcaatatgatggataatcttttggttagaagtcttacatccaaatcaaaaggtcgagtcgatgatattgctccaccctcacctgtgaaggcccctgatgatgatgagacagacaaggctgaaggggaagagagccctatgatggaaactgtccggagcaaatgtatcacacagttgctgctgctcggggcaattgacagcatacagaagaggtattggagcaggttaaaagctacacaacagatagcaataatggatatcttgctctcactgctagaatttgcttcttcgtataactcaccttcaaattttcggacgagaatgcaccatatacctctagaaagacctccactgaatcttctccgtcaagaactagttggaacaacaatttatttagatatccttcataagtcaacagtggagcaggacaaaattgactccattgaggaaacaaatggtttaaatgtggaatctggtgaccaggaaaagatcaagtacctagcagaagggaagctggtttctttttgtgggcagattttgaaagaggcgtctgttctccagcctagcactggggaggctgccagtgcagacatacatcgtgtattagacttacgggcacctgttattgtaaaggttttgaaaggaatgtgcatcatggatgctcagatcttcagaaggcacctgaaagagttctatccattaattaccaaacttatctgttgtgatcagatggatgttcgtggagcccttggtgatctctttagcaaacagcttactccactcatgccctgaagtctggcagtatttcctcccttgcatagatcttgttggaacatattcttcgtcagcatttttgtgcaaacatggagcaccggttgggtgcttgacatccttaacgcgctttctggtgcaacagctactccctaggaacttaagagcttgatcagcgggaacggcaggtccctaggccacatcttttttttttggatgacgcaagggaagtagcttgactgatgcgcacaccgtgtttttcctagcaggcttgtactttggagctatttatctgtgcccggacagggatgatgcttccattatacagtagagtagtgttggtaatatgtacacattgttgagaacgttgtacttgaggcctgttgttattatacggcaatagtagattgtttgcggcaagcctcgttttttgtgcgtctaattctctgacttgcagaattgcggtggcaaatacccattgccctccaagttgtgcgttagcgtatttatccgtagttgacagcaatgaacatattactactgctttctgtattttctattaacgcatgcacatagtttattgg

SEQ ID NO: 21321 - DNA, 1267 bp, Zea Mays
tcctctgtcttttccaacaataatagtataatacaggcagctcacctccaagataaaatggcctgacgaaatgagcttcagggaaggccgccgccgcctactcctcgtcctcctcttcctggggtgtcgacaagccgcggcacgctcccacggtcggagacgaccaagatttcctcttttccgaggggagcacgagcacgagcaccaacgccgaccccgacctgacgcatttccaagggactcccctctgcaaatagacctgtccaccgcaatcctgacactgtcggagaacggggagctgcagcggatccatgacaagtggctcaagacaggcgactgctcaacggacaatgctgagttcgtggactcgaaccagctccgcctcgagagcttcatgggcctgttcctcatctgcggcgcggcatgcgtcctcgccctgctcatctacctcggcatcacgatacgccagtacctgagacacgaacagccggaaaaagaaagagaggggtggaaatgggatattccattcctggtacccttccaggcttccacctgtgctttctttatggataacgatgatgatgactatgaggcggccgttgtgggcgcgccattccggaccctacactccagctccactctcccatggcttcctccgccctgccttccagaaccttgcaccgccgcgcgctcccctcgtctacgccgtgccaccctgcgacggagaccttcgcccccggcgccgtctcccggcggcgagcagccgtgcggctcctctccgccgggttcctgaccgccgtcgcgccgccgccgtcgctcgccgcgaggaggggacgcgttgtcgtgccaccggaggactacgccactgcacccgatggtctcaagtactacgatcttgtcgaagggaagggaccaactgctgagaagggctcaaccgtgctggtccacttcgactgcatttaccgtggcatcaccgcggtgtcgagccgtgagtcgaagctcctggcggggaaccggagcatcgcccagccttacgagttcatcgttgggtcgctgcctgggaaagaacgcaagcgggatttcgcggacaacgccaacgggctgtactcggcgcaggcggctccgaagcctccggccgccatgtacaccataaccgaggggatgaaggtggggggaaagaggagagtgattgtccctccagagctggggtatgggaagaggggaatgagtgagataccgcctgacgctcctttgaactggacctcga

SEQ ID NO: 21322 - DNA, 2401 bp, Zea Mays
cgacgagcggataactgatactcctaagagcaaacaatccctgaagtgtccagtatgctatttttgttgtttactttagggcaatcctaatgctatcttcttcaccaacagattccatgatgagagggcgaaggcaaccatacctattcaccagaagcagcatgggctggctgctagcaggctcggcttgggaagttcggggaagaacaaggtcttcgtggcaggagacgacttgtggaaggatacacgcctagccatcatcgttactgtgttccgatcaattgtcgacctcttttatgtcatccagatgatgataaagttcaggactgcatatattaatccaagctcaaacttaggggtttttggtcgaggagatctcatcacagatcctaaggaaatcgcaaagcagtacttgagatctgactttgttgttgatttggtggcttctttgcctttaccacagatcattatttggtctgtgataccagctatcaaatattcttcgtctgagcatggcaatgacatgctgcttctggttgctcttttccagtatatcctaagattatacctcatattttccttgaacgataaaatcgtcaaaattactgggggtgtttgcaaagactgcttggcatggggctgcctacaacctgctgttatacatgattgctagccatgttttaggagcgttgtggtaccttctatctgttgatcgtcagattgcgtgctggaaaaacttttgcgatgaaactgattgccacactcgatatctatattgtgatgtaaaaccagattcaatgtggaatgggacctcagtcttttctacttgtaatgctaagaacagtaccaaatttgactttggtatgttccagccactgttagcaaacaaaactcctaacgagagcttcctgaagaagtatatctattgcctttggtggggtttgcagaatctaagttgctatggccagacattgactgtgagcaccttcattggtgagacactgtatgctatattattggcagtggttggcctagtcttgtttgcccatttgatcggaaaagttcagacctacctgcaatcaatcaccgcaagggttgaggagtggaggctaaagcagagagataccgaggagtggatggggcatcggcaactgccccatgaattacgggaaagagtgagaagatttgttcattacaagtggctcgcaactcgaggcgtggacgaagagtctatattgagtgccctacctacagatcttcgccgcgacatcaagcgccacctttgcctgtatcttgttcgtagggtcccacttttctcccagatggacgatcagcttctagacgccatatgcgagcgcctggtatcgtccttgagcacagagggcacatacattgtccgagaaggcgacccagtgaccgagatgctgttcatcatccgcggcaagctggaaagctccacgacagacggtggccggacaggtttcttcaactcgatcaccctgaagcccggcgacttctgtggcgaggagctcctcggatgggcgctcgtccccaagcccaccgtcaacctgccactgtccacccggacggtgaaggcggttctcgaggtcgaggcgttcgctctccaggccgacgacctgaggttcgtcgccagccagttcaggcgcctccacagtaggaagctgcagcacacgttccggtactactcccaccactggaggacctgggccgcgtgcttcatccagcacgcctggcgccgcctgaggaggaggaagatggccaaggacctgagtctgagggagtcgttctcgtccacgggaccgtacgaaggcgatggcgacgacgcctcctcccctgaacagagtatcacacttaggagaggagccggcagcatcatcagggagctgcctaagttcaggaagccatcggagccggatttctcggcggagcatgacgactgactgactggcggaggactgagtggctgatacattgtttgttaaggcaaaagattggtgcttctgatcggttgttcatactgtacatacatatgtagtggtgcttgtcattgtattgtagggatcccaccgtagattagaaagattgcttgtgtccgctggccgagcagattttgcttcccgggtcagggctctaccattcttttttcttcttttcttccaagtgtgaaaaattgcagcaggatgtactgttgtctgtttctcttacaccggtctggttgttgattctgtgaaattttgttgtgtgactaccgagactctgatcattttacagttgtgcctgctctcctctgtgtggcacaaatgcggttggacttgcaacagacgtttctttgttacgttgttgggtttttttaacgaagagctccggaagttcattccag

SEQ ID NO: 21323 - DNA, 3435 bp, Zea Mays
ctgcccgcccgatttcgcctcggacctcgtcgtccatggtgtgctttttcttcgtggcgatttgctgcgcctcgtcgccggcgaccttggcgcttgcaggcggccgactgcagtagggcaggtctgcttccacagacgtcttcgccgtttgagaggtggcgcccacctccaccgtctcgtctgctgcctgctctagtggtgccggacctggggtggagcggagatccacaagggcttggattgctttcgttgtcttgctggctttgaggtggagatgacactaagttgaaatttttatcacacgaggaagcaagaacaggaaaaaaaatcacatttcagtgttgcactctgtggagggttcattgttggtccaccaaactactgcagtgctggagggtttttgttgaagtcctcttcatgttcaccatttctaaattgtcataggctcatagcattgtagctgatcagtcttcaagatcttcctatgagtacatagataaatcatcatcgtatctgtgttaagtatgccaccatggtggggaaaatcttcatccaaagaagtgaaaaagtctgccaaagaaaacctcatcgacacatttcagcgtctcataagttcaaatgagcaaaagggaagcagaaaatcacgaagtagtcgtagacatggtaaagacacagctggtgacaaaggttgctggtccactgcccaatcccgctcaacatccccttcaaaagaggtctctcgatgtcagagctttgcagcagatagaccacatgcacagccacttcctcttcccaaatcacgtgctaaggtgacacgtacttcttctgatattaccaactcaaagtccactttggaaaagcatggcaaaggacaactgcttccactccctccaattcagcctaaaaaaagacctgaagctactgaacctgttactgaagtagctactgcttcggtctccagcaactgttctattgacagtgatgatcctggtgattctcagcttcagagtcctgtgggaaatgaggctgaaaatgcgactagaattactgcaacaagtagttcaagtgttgtgcgcaaagaatgttctagtgctattaccagaaagaacacaaaggaagttgcaaagccaaacagtgcttttctcagtaaccaaatcctgtcaacatctccaagaggtacctttgctgatggttatcaatccaatttacaaagcccccgacagattgccctggagagtgctccgaatagtttgatgtcaagtccttctcgaagcccaagaaatatatgtcctgttcagattccaacttcagctttttgggcaataaaacctcatactgatgtaactttccttgggtctggtcagtgctccagtccaggttctggtcagacatctgggcataattcagtgggaggtgatatgctaggcccaatcttttggcagcctagccgaggtagtccagagtgttcaccaattccaagcccaagaatgacgagtcctggtccaagttctcgggtgcatagtggaagtgtctctcctttgcatccaagagctggtggggtcactcctgaatccccaacaaatcgacatgctgaagggaacaagaagcaaacccacagattgccgcttccgccattaagcattgctaatagttctacctttttgccaaacagctctaacccaactagtcctatatctcgtagtcctggtagaacagagaatccaccgagtcctggttcacggtggaagaagggaaaattgattggccgtgggacatttggccatgtatatgctggttttaacagtgacagaggtgaaatgtgtgcgatgaaggaggttacccttttctcagatgatcctaaatcaaaagaaagtgcaaaacagctctgccaggaaatatcacttctgagccgactgcagcacccaaacattgtgcgatactatggatctgaaactgttgatgataagctttacatatacctggagtatgtttctggtggatctatacataagcttctccaagagtatggacagtttggtgaacaagccatttgcagttatactaagcaaatacttttgggcctagcttatttgcatgcaaagaatacagtacacagagacatcaaaggcgcaaacatattggtagaccctaatggccgcgtgaagctcgctgactttgggatggcaaaacatatcaatgggcagcagtgccctttctcatttaagggtagcccgtactggatggctcctgaggttataaaaaatgctagcggatgtaaccttgcagttgatatatggagtttaggatgcacagtcctagagatggctacttcaaaaccaccatggagccaatatgaagggattgccgcaatgtttaagataggaaacagtaaggagcttccaccaataccggatcacctctcagaagaagggaaagacttcataagacagtgcttgcaacgtgatccatccagccgtccaacagcagtggatcttctgcagcatccattcgtacaaaatgcaccgccacttgaaaaatcatctgcctctcatccactggaacagttgacggctatatcatgcagaacaaattcgaaggtggttgagcatgccagaaatatgtcctcgcttggtttggaaggccaatcaattttgcagagaagagctgccaaattttctttgccaaatagccccaggactacttcgggtgcttcaactcctctgactggtggtagtggagctgttcctttaaaccatgtgaggcaaccagcttacagaaatgagggcttcacggtcacatcaagaggttttgatgaccacatgcctagccggcctgttgatccagtacatggacgttttattcgagtgcagcaattttccgtgggtcggcaggagagggtagtctctgaagttgacattctgagctctcaatatggaaagatgagacatgcaaatgtgtgggatccgcatgataggccattaccttctgagcgttcctctcaacagtgctttgggaatcatgcgaagctaaaaccttcactggacttgagatctgatgctgacagttggcagtggataaagattctcaaatgtcaatctcatattcccattactctaaagaagatgagacatgccctatcaggaaggggatgttgtatactcaaggacccaaaacagtgactctgaacctgtatactcttactctcgtatctacaacaatttagttttcgttttcttctatgggtttggaggccattgtacagaagggaactctcaacaagaaatccagattacatggcacaggcgaaagcaataaatttaaaaagttcgtcccatggaatctggaaatagaagaagccacggcagcaagaagggagagagctgaccggagatgccggcggtgcagtagacgagcgcgaagatcattcctccgaag

SEQ ID NO: 21324 - DNA, 4271 bp, Zea Mays
ccatccgaccccatggcctcggcctcattccagcccgtcgcggcgtcggcggcctccgcgccgccgcgcccggccccgcgccaccccttcgcagccgctgccgccgcgcgccgctcctctctctcgttacgccccgccgcgcaccgtcccgttatcccgctccgctcctccgccgtcgcggctaacaccctccgcgccacgcaccgccgtgccgtctcggcgaggtcgaggagacgcgcgcaagggctcggcgcggcgcccgcgttggctgcgtcgacctggggcggcggtgacaagggaggttgcctctcttgcttccccaagagtaggcggggcaggtcggggctcgcgccttgcgcgctcccgcacgcgtcgggactatcgtttcgcagccggttgagcgggtcgaaggtcaggcctagccatatattgcacgccgctggtcctgatgaaccacatgttgcaagtccaacatggtccgatacttcccttgatacaactgacatggatcatgctattagtaaggaggagcttgaagatgtcctcaacactccgcttcccgagcatccgaagctaattcgtggtcaattgaagaatggcctccggtatcttatcttaccaaataaagttccagcaaacagattcgaggctcacatggaagttcatgttggatcaattgatgaggaggaggacgagcagggaattgcacatatgattgaacatgttgcgtttcttggcagtaaaaaacgtgaaaaaattttggggaccggtgcgaggtctaatgcatataccgacttccatcatacggtgttccatatccactctccaactaaaacaaaggaatatggtgaagacttacttccttttgtgctggatgcattgagtgagatagcttttcatccaaagttttcttcatctcgtgttgagaaggagagaagagcaattctttctgagctccagatgatgaacacaatagagtatcgggttgattgccagttgttgcaacatctgcactcagaaaacaaactgagcaacagatttcctattggacttgaagagcaaatacataaatgggatcctgataagatccgcagatttcacgagcgttggtactaccctgcaaatgccactttatatctggtgggggaaattgatgatattcctagagctgtgcgggaaatagaggcggtatttgaacacactctttcagaaaatgaaggaaatcctgtaccgagcgctaatccatttggtgctatggcaagcctttttgcaccaaagctcccaggtggttttacttcaaacctaactggtgaaaaatcacctgccacagataaaataaagcctgcaaaaagggaaagacaagcagttaggccacctgtagagcataagtggtcccttcctggagttgctcaggatgccaaacccccagcaatttttcaacacgagttgattcagagtttctctatcaacatgttctgcaagatacctgttagcaaagttcagagctacaaggacctgcgcagtgtactcatgaaaaggatatttttgtctgccctacattttcgaatcaatacaagatacaagagctcaaaccctccttttacttcagttgagctggaccacagtgactctggaagggaagggtgcacggtcactactctcacagtaaccgctgaaccccaaaattggagaagtgcaatcaaagtcgctgttcatgaggtgcgaagactgaaagaatttggtgttacaatgggagaaatgacccgttacatggatgcactgataaaagatagtgagcagctggctatgatgattgacagtgttccctcagttgacaacttggacttcatcatggagagtgatgcacttggccacactgtcatggatcagttgcagggacatgaaagtttgcttgcagttgctgaaactgtcacccttgaagaggtcaacactgttggcgcggaagtattggagttcatttcagattttggaaaactcaatgctccccttcctgctgctattgtggcatgtgtcccccaaaaggtgcatgttgatggcgcaggtgaaactgaattcgagatatatccagaagaaatcactgaggctatcaaggcaggtcttgaggaacctatttaccgagagcccgagcttgaggtgccaaaggaattgattactcaatcagagctcgatgacctgaaatctcaatgcaatccttcatttgttcctttaaccaaagaggagaatgcggtgaaagtgtttgacagtgaaactggtatagcacaacgccgtctttctaatggaatttccatcaactacaagataacacaaaatgaagctagggttggtgtcatgcggctcatagtagggggagggagagcaacggaagattctgaatcaaagggatctgtcattgttggtgttcgtaccctgagtgaaggtggctgcgttggtaacttttctagggaacaggttgaacttttctgcgtcaataaccttatcaactgttcactggaatcgaatgaggaattcatatttatggaatttagatttgctttaagagacaatggcatgcgagctgctttccaacttcttcatatggtccttgagcataatgtatggctagaagatgcatttaatagagcaactcagttgtatttgtcttactatcgctctatccccaaaagtttggagcgttctacagctcataagcttatgttagccatgctaaaccatgatgaaaggttcgtagagccgtcaccacattcactgcagaagttgactcttcagtcagttaaaaatgctgtcatgaaccagtttgtgggtggcaacatggaggtcagtattgttggtgatttcactgaagaagaagtagaatcttgtgttcttgattatcttgggaccgtgagggcttcgagttctctaaacacagaggagcgtattgagaagatttccttccgaccatttccatcagatgttcatttccagcaagtatacataaaggacacagatgagagagcctgtgcgtatattgcaggccctgctcctaaccgttgggggttcactactgaaggaaatgacctatttaatgtcattcggatatctgatgctgatgcagaagtatctgaaccagtgagcttggatctaacagggaagagacacgttgatgttcgcagccacccccttttctttggcatcactttgagtctgcttgctgaaattattaattctaggctatttacaacagttcgagattccatgggattaacatatgatgtttcttttgaattaaacctttttgacaaattgggtcttggttggtatgtaatcgcggtcacttcaactcccagcaaggtccataaagctgttgatgcctgcaaaggtgttctgagaggattacatagtagtcgaattgtggaaagggagcttgaccgggcaaagaggacgctgttgatgaaacatgaggctgagacaaagacaaacgcgtactggcttggtttgctagcccatctacaatcttcatctgtaccaagaaaggatgtatcatgcatcagggaattgacgacattatatgaaagtgccacaattgaggatctgtatcttgcatatgagcatctgaaagttgatgattcttctttgtttgcttgcattggaattgctggcgctgaatctggtgaagatacaaatgatgatgagcttgatgtggatcttcatggcatggctcccatgggaggccggggtctttcaacaatgaccagaccaaccacatgatcaccattgggatggccagcccttccaagacaggagccacatggccctaggagactattctcgtttcccagcaaaacggtttaaagataattgaaacattggatctgtatctggggagactattgtttgtttcctatgagccacaaccaaaaagcttggccgttgcatttccccccgagaagaagcgttggagttaatgactcgcaaggtcgtggaaaggagataatatttttcgaggtcattatgtagcttggcatgtacaggaaagcaggctgattcttgcatacagcagttgtaactaggtcgttgagggcattgaagataggatgacagtagaatcacatataagttgctggtctgcgaattcggaaataatgatgaaggcgtaggctagtaacattttggtgttattctttttttttttaatcaaaaaattgtagcctttgttaccggtaataaatagatccatagctttgatgaaaaaagaaaattcaaaaaatatt

SEQ ID NO: 21325 - DNA, 2110 bp, Zea Mays
ccctggtgtcttggcgcctccgttttgtgtcgcattggcattttggaagtgcatgggttagtgggaatgtgaggagatatcatcatttagtgaaagtaaatcagatgataaacggttttatataattactccgaccaaaacacttcaactgaggactggttgtgctaatgaccgggcgacttggattgaagcgcttgtcactgcaagaagcgaatattcttttaatggggatttatcaggtgatcagaatgatgcatcattttccacagaaaagctcagaaatcgcttgaatgctgaaggcgttggcgaggccgttattaaagactgtgagcagattattcattcagaattttcgcagtaccaaacacagatgaagcaacgttgtgaagagtatttaagctttattggcactcttccacaggatgttgaggtagttaattcagtagattcaactgtccctgagaagccacggctagagctgttcaagcatgactgctccagctctggaaaataatatagcaacacagaatcttctgatgatgttggcaagcaagagattagtgaactatcagacggagatgaatttcatttctatgacacaaggcaaagtttcagtgaatttgcttctagtcctgctgacccgagaaagggatgtttaaacaacggaaatgaagatcataaatctgttgaatcattgacggttgacaaggctgagaaatatatgctatcacattcaaaaaggcgcttacagttgcctgaaccaatagaaaaggagaaaggagttagcctttggtcaatgatcaaagacaatgttggaaaggatctaacaagagtttgtcttcctgtttactttaatgagcctttatcttctctccagaagtgctttgaagagttggagtattcttatttgttggatcgtgcatatgaatgtggtttaagggtcagtcatcatcctatggtcatggcatgtcactgtgaggggaaaggttggaaattttggggagacagcaatctgaagagcaaattctggggacaatccattcaattggatcctaatggtgtgctaactttagagtttgatgatggagaaattttccaatggagcaaggttacaacaacaattaacaaccttatccttggtcgagtatattgccatcaccatggcacaatgaacataagtgggaatagacgatattcatgcaagctgacttttaaggagcagtctttccttgatcggaatcctcgccaggttcaaggagtcgtcaaggatgctggtggaagcaaggttgcaacattgacggggaagtgggatgaaagtgtgcattgtgtcatcaacaatgatgcctctaaggtgaactctcatggtccacatcagagttctggttccactttgctatgggagaaaaatgagcctccagtcaatcctacccgctacaacttgtccgcatttgcaataacactaaatgagttaacaccagagctcgaggagaagctgccaccgacggattcaaggctgagaccagatcaacggcacctggagaatggggagtacgagaaggccaatgctgaaaaactgcgcctcgagacacagcaacggatggcaaggaagatgcaggagagtggctggaaaccaagatggttccaaagggacagcgaggatggaacgtaccgctacgtcggaggttactgggaggcaagggagcagagaacatgggtcggctgcaatgacatatttggtaacttgtctagcagccagaagctcccaccatccgctctctacacgagctgaagtatataggggtgggtaaggccggaagggcatgttcagtagttgttgacatcgcattaaccagagggtttttctctcgtttctgttgtgttaagctgtgagctaacatgtttttcttgtcaattgtcacattgaagccaaggacatccaagcataacccaaccttttgtcgatactaggatacttatgagagatcttgtggacattattgcgaaaagaattgtcgatgatactattttcttctttgcattccgcaaggacgtgtctgcatttggcccttatgttgtcgtgcttttgtgtgtttatctcgcattggtgatg

SEQ ID NO: 21326 - DNA, 1267 bp, Zea Mays
cattgaccttgcaattgtgatttaacctccatttttcaactttgtgattttacccctccgtttcgaaaatgaagctaccgtttgcccgtccctctcaacgccgagtgaaaatcaggtttattgttttaaaaaataaaaatatgaaaacaaagggtgaaaggttcgaaccaccctcctattctgtaagggcgcaacaccaacaggggtaaaatcacaattacataatataatgaggggtaaaaccacaataaattgtgtgggcatttttgcatcagatttaacactgtgtgctgcacataatggtgcatgggtatgacagcttcgttttcaaaacggaggagtaaaatcacaaagttgaaaacgaggtgcaaaataacaattgcaaggtcagagagagcaaaaaattaacaaattccttgcatacaaaagggccggaaagagctttaatgctgaagtgcgcaacaggaaggactatagaaatcctgactttttgcagcatgctgtgcgataccaagaaattgatcagatagggacctgtttcagtaaagatgtttttgatccttatgggtacgataaaggtgactactatgatgagatagaagctgaaatgaagcgtgaacttgagagaaaggaacaggagaagaaaaggaatccaaaagttgaatttattactggaggagtacaaactccacatagtgcatcaataccgaagatcccaggtttggcgggtgtctgtacactaccggtacctacagaaggtgtacagaaagagactaggccaaacaagaaatcaaaatgggataaggttgatgatgatgttaagaatcatgtagttcctagtggacacgacaacttatcagcaactgcttctgtggcactcctgacttcagctaatgttggtgctggatatgctgcttttgcgcaacaaaagagaaaagaagctgaagaaaagagaagcgatcataagtcagacagaagatcgtagcaccactttttttttttcattctgagcagtcagcgtatcatttagtttttcagtaacatagttttgtattgtgggtaaggaaaagaaggaaacagttaaaatcagtccgagggaaatggttccagaaaagcccctcagagcgacttgttgtcttatacaggtatcagaaacttaacgttttaggccaagaaaaagagaacagtgagcgttctgcacttctgccccccgttacggtggacaattactcctgtcctaaaaagaatgcaccaaaattgaatgcaa

SEQ ID NO: 21327 - DNA, 537 bp, Zea Mays
ttgggtgttccggtctctgcgcgcgcacatcaccagattgggagccgccggtgccgctgctggggttctccgtctgctcgggcgcgcgggtcacgtcggtcgcccagggagcttcaccagggcacggtgttgcagggtcggacatcaatcgcgacgtccctagctccccgccggtgtcggggattgaacatgtgccgctgcgagcgaatcagttggccgctgtcaggaatcttcaaccgcttcaacgatttggtggtgctcggtggtcgggaagcttctctggctcacccctcacatgtgtgtggccttattggacaaagatagccttccgagctcgaccaattgctcatcggtgcaatggctccaccgcgggcgggaccactgctgcagacccatttcactcccttgccatcaccggtgaggtcacgagtcacctgaagatcatcctggtacctggaatctcaagtcccaggcaagttgtgcccttgatcacttcgtttacccactcatgttctaataaatcataatgatctacat

SEQ ID NO: 21328 - DNA, 1717 bp, Zea Mays
ctcttggagtcatgtcggatctgacgcctgttcaccacgtgcctttcttcctccttggttcttcacagctctcctgccggatcagagtttactgctcaccgcacctccgttcctctctcctgagtctcctctcctcgtcaagtcaacagtcgccactgtccactgtccccacccgactgcctccataaaaaaaaaccgagcggagcgcgagctacgcgctgtgcctcgtgcctagacgaacggcataggcaccggacggtggcgtcatgtgcgtggaggagccgaaggacgccgaacggtttggttttggagacccaggggtcgaggagcccgctaagtttcccttggctcagatggagagagtttgtgaaaatacaacttctgctgatttcaggcagaagttaagcaattttgtcccagtaatccgatcgggggattggtctgatattggaggtcgccaatacatggaagacacccacgtgtgcattccagaccttgctaagaactttggtttcccatcattagataatgaagttgtttcattctatggggtctttgatggtcacggtggaaaagatgctgcccatttcgtttgtgataatttaccaaggatgattgtggaagattcagatttccctcttcagcttgaaaaagttgtgagaaggtcctttatgcagattgattgccagtttgctgagacatgctctctccatagagcatcgtcctccggtacaactgcacttacagcaatggtttttggaaggtctcttctggtcgctaatgccggtgactgtagggcggttctttcccggtgtggcaccgcagtcgaaatgtccatggaccacaggccttgcagtctcagcgaaaaactgcgcgtagaatcgcttggtggctacgtggacgatggctatctgaacggtctgctaggagtcaccagagcacttggtgactggcatctcgagggcatgaaaggagctggtgagacaggtggtcccctgagtgctgacccagagctcaagatgaccacgctgacgaaggatgacgagttcttgataattggcagcgacgggatctgggacgtcttctcgaaccagaactcggtggacttcgcccggaagcgcctccaggagcacaacgatgtgaagttgtgctgcagggaaatcgtcgaggaggcgatcaggcggggggctactgataacttgactgcagtgctggtctcgttccacctggaggccccgcctcggatcagagtggaccgtcctggtagggtggagaggagcatatctgctgaagggctcaatagcctcaggatactcctgggaaggcagtagctgcgttcttgtcgcgattttaggtgctgtgccgcattgccgagctgtaattgtttgtagtcatctcggctcctcattgtcgttagctgttacccgttgctgcgactgcgacacgtgttacgattcttgttggtgattgaaccaacaaacctgatattattcttgttggtgattgaaccaacaaacctgatactattcttgttggtgactgaaccaacagatttgagctctgtcctgtgagagattttaagcagatgaaagtatatctggcaaagaagctgtgagttcccagctcactgtgtaatgtttgccttccgttatgtaacaaaacaaaacaattcattgactgaaatgtgtcaggactgggtcaaatttcctgttctcgc

SEQ ID NO: 21329 - DNA, 5997 bp, Zea Mays
aatcgccttcaatttcctactactagagagagacggcctcccttcctctcgcttcgcttacacttctcccctccccccaacccaaacccaacacaattcccccgtgttgcctacacgcactggccacgaccaaaccctaggcgccgccgcctccggggccctcagggctgtcatacggggaaggaggaggatatcggtgaggagagaaggggatttatgtcccagcgaggtgacaggggcgaggggcacgccaggagacccggccggtccagcagcttcggcggccaccgcggaggcggagtcggcggcgcgggcaagggcggcgcgggatcctcaggccagcctcctctttctaccaaccgcagctttaggaagcccggcaatggccacggcgggcagcagagggtggtgaaccagcccgacacaaccggtttccaacctgcccccgcgcctgccccccaccaaactcctgcgcgaccgccacctgcacctcagaatgcggctgtgcatgttcccatatccgcaccatggccgcaacctcaaggtccacaagtgtcatcttcatcagctgccagcgacaggccggctaatccgccattacctaaagctactcatgctgctccaagggctccaccaaaaagctctaacccaccccttcctcagggaggatcgaaaggggaaccaccaaaggggtttaactttcagtttggtagtataaatatgaatgggctgccgcaatttcctgccaggacaagctcagctcctccaaacttggatgaacaaaaacgtaatcaggtgcttgtggaggaacttaaggttacacctacccctgtgcaaccaactccaaaacagcagctgttgcagcagcatccgcatccgctgcagaagcaacagcatcagctgccgcagctgtcgcatcagccacagcagccacagcagcagtcaacaagaaaggaaactgttggttccagccaacctaactccatcaatccccatactacatcacaactgaaaagagatgtgcacccatctccgtcggtccccaatgttacatctgttagacctaccgttcaacaaatgcctggtgttcagatgccgatccccttccaccaccagccggcacaagtttccttgcagtttggtggccatggtgcacagctgcagccacaagttgtgcccagctcatttcaaatgtcaatgggattgacaggcagtagtacaccgcaagtcccacagcagctgtatgccccgactctgcagcatcatcaattgcaacagcaagcaatgatgcatcctggccagggtatgggttatgttccttcagttgctcaccaattcccacagttgggcagcattcctatgaacattgcatcgcaatatcctcagcaacagccaaacaaacctgctgctgcacgtaaggctattgtaaaaattactcatccagacacacatgaagagttgaagcttgataagaggatggactcttctgggcagagagctgcaccgagtattgcacaacaatctcagcctggtgttaattatgctcctcatttgggcttctttcatcagccaccgaattcctacaaccagtcaggaatgtattactctactacagctagtgtgaaccaggttgctactggatcatcgggtcctagatataattatcctgtcactcagtctgcgcaagcgatgacatatatcagtccatctgcagcgcctccggtatctggtcagtcacaatatacagttaagccgcaccctatggggttgctgtctgaaaaatcaggtactcatgtcacaataagtgctccaccagcaaaatctgatccacctaagttacatgctgctggggatgctgcgtcaagtctgaaaaaggataatgaagttgtttctgggatcactgttttaaataaaccaacccttgagagggagagtaacgatcctttagtcacagtgaagcattccactgtgataagcccgtccttgccaattcatggtgaaaaaccacaaactttggtgacatcgtcgcctgttgctaattcagtctcacctgtgactggagctgatgggaaaagcaaagaacccattcaaaggtctggatcatttaaagatagtaagaaaaatgtcactaaaaaggatgtcaggaattcatatgaaccaccaaatccaacttcatttgttgaggataaggttcaaactgtaaaggttggagatggcgatctccaggaaactaaaaagctgaacaatgagttggatttgaccaactcatcttcagctccaacggttccactggcagttagtacagagaatgccgacagcacagcagtaaccactgctgatgttcctgggacagatacaagctcaagaagaccatcttctgagggtactggtgagcctggagtggaaagcttcactgtttccgctgttgaatgtgacgaaagcaagaggactcacaaagttgtgaaagatcctagcaaggataatatttcttctgatgctaccaaacatgaattgcctaaggaatgtgcagtggactctactgaacaagcatcagcagtgacttctaacactgatgattcatatgcagcacctctagtaactaatcaggagcagttgctgaaagggtctgcttctgagaaacaagctgtgatgaataactcatccatgaattccgatacttcagcacatttttttgatggcaatgatgtgggcgtgacaacttctggaacttcagagcctactgctcaaacttccaatgatgaaggtgactcagatattagtccagaaacagacctagctgtttataatgtccctctaggttcatctgagctacaactgaaatctgagagtagggcaaatgatcaacagcctgctgcaccaacagtatcagttcgaccggtatccagggaaaagcctagtacaaagtccacagctgggaagaagaagaagaaaaaggaaatgcttgctaaggctgatgctgctgggtcttcagatctttataatgcatacaaaggaccagaagagaagtctgaagttgttggtaccgtggagggtgctgataattcttcaacagttgatacaactcatgtactgtctgacgaattagaaaaggatcctagtacatctgcagatgattgtaagaaaaaagttgagcttgatgattgggaagatgctgcagacatgtctactccaaagcagccatcagattctgggaaccaggctagcatcacccaagtgttggattcagacgtaactgaagcaaacagcaggaagaaatactcacgggattttctgttaactttgcaacatcactataccggtcttccttttggatttcagatgaatgaagctgtcaatgctataatgaataatttggcaggaaagtcttatgttgctgaccgggaacctcaccctagtcctggaaggggtttggaccgcccaacttctcgtgaccgccgtggtgctgccatggctgacgacaggtggactagggcgggtgttcctctcagtcctggtcgtgatgttcacatggacctgccaaatggaccatcagttatcaactaccgtggcggcccaggaggtaatcatggtgttttaaggaatccacgcagtcaatcatcaaatcagtatggcggtgggcttcttgcaggacccatgcagtccgttggaccgcaggtacctcgcagcggctctgatgctgatagatggcagcaaaagggtctcatgccttctcctggcacacctgtacaagcaatgcacaaagcagagaggaagtatgttattgggaaagtttctgatgaggaagaggcgaaacagaggcagttgaaagctattcttaacaagctgactccacagaacttcgaaaaactttttgaacaagttaaggaagtcaacattgacagtgtagcaacacttactggggtcatttcacagatatttgacaaagctttgatggaaccaactttctgtgaaatgtatgctaatttttgcttccatctggctggtgccttgcctgacttcagtgaagacaatgaaaaaatcacattcaaaagattacttttgaataaatgccaagaggagtttgagaggggtgaaagagaagaagctgaagctgataaaacagaagaggaaggcgagattaaacagaccaaagaagaaagggaggaaaagaggatccgtgctcgaaggcgcatgctgggaaacattaggttaattggagagttgtacaaaaagaggatgttgacggaaaggattatgcatgaatgcattaaaaaattgtttggaaatcatgatgatcctgatgaggagaacattgaagcattatgcaaattgatgagtacaattggtgatatgattgatcatgtaaaggcaaaggagcacatggatgcctattttagtatgatgcagataatgtcaacaaatcagaagttgtcttctcgtgtaaggtttatgttgagagattcaatcgacctcaggagaaataaatggcagcaaaggcgtaaagtcgaaggtcccaagaagattgaggaggttcacagagatgcagcacaagaaagacatgcccagtcgagtaggttgggacgtggtccagctgttagttctgttccaagaagagcacatcctatggattatggccctcgtggaccatctgcatcagcatcctcaagttcccaacaagggagcattcgaggaatgcctccacattcgcgtggttcacaagacatccgacatgacgaaaggcaccagtttgacaatagaactgttcttccgcagcgggtagtcaaagatgaagccatcactcttgggccacaaggtggccttgctaggggtatgtctataagagggcagccaccagtatcaaatactgaaattccttctgttattgaccaccggaggatagtatctagttctaatggctataactctgcggctgattggacatcatcatctggaagagaagattctaattcaagacttccagatcgaacctctggccgaattcctgcttctagtcaatctgctgtaacttcgcagaggcctgccagccaggaaggccgttcaagaagtaaatcatattctgaggatgagttgagagaaaaatctgttttgaccattcgagaatattacagtgcaaaagatgaaaaggaggttgttttgtgtattgaggagctgaatgctccaaatttctatccatttcttgtgtcactttgggtaaatgattcctttgagagaaaagacatggaaagagagttgttggctaaacttctcgtcagcctttgcagtggtcgacataatttgttgagcaagcaacaactcagtgatggcctttcaaatgttcttgcctcattagaagataatctaagtgatgctccaagagccaccgagtaccttggacgacttcttgcaaggtttgtggaggaaagcatattgctcttgcaagaggtaggtaaattgattcaagaaagtggagaagaaccagggtacctaatacaaggcggtattgcggctgacatcctaggtgcagtcctggattccataaaatcagacaaagggaattcattcttggatgagatcaagacaacttcaagtttaaagttggttgatttcagaccacaacatcttaagcgatcaaagttggacgccttcatgtaggcacataagttattgttacctgattaccaatgggtgcggtcaccaagcagtttagtttcttcgcacctaaatacccaacggcctttttgatgtactgtaaaacctctctgctcctacttgctgtccctgaccgtacactatttataagatggaaggcgatcggccacctatgtagcacggacggatacaccaattaggtgcggacgtgcggtatcctgtatcggatacctaacagatagggataccccatgatacgtgcgaatacatcgagtatctgagtaaaaataaatatttacaaattcgatatttagagtaaatacgtatagtcttgcgcaatactcccca

SEQ ID NO: 21330 - DNA, 1344 bp, Zea Mays
gacatatgcagaagaaccttatttacaaactgcttgatgaacattgttcattttgatgattagataaattttgtttttcagtatacctctactcattctattgtaaacaattcattctagatatgtaacaaaatggcatgtttatatctttgattcataatgcatttctttcatacaccatgctgtaagagtagaattgatgattctttcatcgcattcaataatctcacaagattgtcttccattttcatagttggtaccagcagtgactgagctcattgttgcccagttgatgtaccttgaatggatgaacagtaaagaacctgtttatatatacatcaactcaactggaacggctcgcgatgatggtgaaccggtcgggatggagagcgaaggttttgcaatctatgatgcaatgatgcgtatgaaaactgagatccacacactttgtataggagctgcagcaggccatgcatgtcttgtgcttgcagctggaaaaaaaggcaaacgttatatgttccctcatgccaaagctatgattcagcaaccacgtattccttcttatgggatgatgcaagcatcagatgttgttattcgtgcaaaggaggttgtgcacaacaggaacacattggtcaaacttttagcaaggcatactggaaatccaccagagaaaatagacaaggtaatgagaggaccattttacatggactccttgaaggcaaaggagtttggagtcattgacaagatcctttggcgcggtcaggagaagtacatggctgacatgctctccccagatgagtgggacaaagttgccggagtcagacatcctgatctaatgtaatgttattcattgaaagttcaacatttggttaggttaatagcttccagggggcagaaacaggtgacgctgaacaataatgcttgattatcaatgataatggttggtaagagccaaggagtacttgtttaactaggtaaacttagagctcagggctgggggctgcgccaccaagatgttgttaatggtctctggatgagagcaggcacgtgtttctcatgaattatcgttgttccccacatcagttctagtccagattttggtatttattagtatatagtccacacattttgatagacccagtggttgaactagccaagttcatattgttatcagcacgaagcgcgatgataatatgatatgttgtccttgaaatttccatggctactgcgcccttgtccttgtgttctggacgttggaaatcctatgtatggatcatatggttttcaaccatcaaatcaaaggactcaggtttgtgtcattgttcttttattattattatttcc

SEQ ID NO: 21331 - DNA, 617 bp, Zea Mays
caatatagaagcttacaatcaacttcattgctaaaagaataatccagaacatggtatacttgaagagggagaatgcaccttcgtgcatccctctaccaacaaataaccgaggctgcagacaaacatcgaatctttaaaaaaaagcatccacaatcttgaccgtctaattaacagcagaaaacaagaaatggaatgctacctgagaccaccacatcatgatcgttatgaccttaacatttgaactctctaggattcttctcataaatgggaaaagaaatagcatagaagcaagtatgtttggtgccatatatatcactactgccagtatatacaaagatggctgattctgaccatccccaagccagctttttattgttcttgcaagaccagtaggattctcccaagtgtacgcgtaagtcactggtaaaatcacaacccatgcagcagcagatattaatttcaagacatatcgtagcttgactgcaaatgacatgcttctttttgctttccagccaaatacgagatctaggattgctgtcacacacatgatagattcattagcattaattaaatcctttctcaacataacacatatatgcaaatggaagaaaatgaca

SEQ ID NO: 21332 - DNA, 989 bp, Zea Mays
gaccagaggaagggacggcggggaggtggcaaggcgcagagagcaggttcgcttggcggacgcaccgagggaggcgtgtgggagccatgcttcttccctcttcgtcttcgtcttccgcttccgcttccaaagttccgttcccaaattgctggtgggggttcatccacaagaattcccttgcctttggaattagcagagaatgaacccatatatgtgaatcccaaacaatatcacgggatacttcgcagaagacagttacgtgccaagctagaggctcagaacaagctagtcagagcccgaaagccttaccttcatgagtctaggcatcttcatgcaatgaagagggcacgaggttccggtggacgattcctcaacactaagcagctccagcagtctcacacagccctcaccaggtccaccaccacaagtggcacaagctcctcaggctcaactcatctgcggcttggtggtggcgcagccgcagctggagatcgatctgtgctggcacccaaaacaatggcctcacaagacagtagcaagaaggccgtttcttcagccctcgccttcactgcgactccaatgctgcgcagagatgacggcttcttgcagcacccaagccatcttttcagtttttctggtcattttgggcaggcaagcgcgcaagctggcgtccataatggaagtcagcatagggttccagttatgagatgaccggtttgcgaaccatagctggtgatccaggcgtctagggtcaacttcgctgtggtgtcttagtctctcaggcaattcatccttggcttaatttctggctttttattagaaggtaccaaaatgtgttccataccgttgtggccacagagcccataaaccagggggtttgatggttggcactcctacccaaactattgttgcagtggtgtttgttagaataaaccttgactattattctgtacaatttgcctttatcttgtactgccaattattgtgta

SEQ ID NO: 21333 - DNA, 1279 bp, Zea Mays
ctgtatcatgagctgtactactactactagctatctgtaatggttagcccagacctgtatggggacaacaacactaggctcttcacctactggactagcgatgcctaccaggcaacaggatgctacaacctgctgtgctcggggttcatccagataaacaaccagatcgccatgggcgccagcatcttccctatctccaactacggcggctcccagtatgacatcaacatcttggtctggaaggaccccaaggagggcaactggtggctgcagttcggcaacgactacgtcctggggtactggccgtcgttcctcttctcgtacctggcggacagcgcctccatgatcgagtggggcggcgaggtggtgaactcggagcccgacggcagccacaccagcacgcagatgggcagcggccacttccccgaggaagggttcggcaaggccagctacttcaggaacgtccaggtggtggactccaccaacaacctcaagccgcccaggggcgtcggcaccttcaccgagcagtccagctgctacgacgtgcaggacggcagcaacgccgactggggcacctacttctactacggcgggcccgggaagaactcaaactgtccatagcccaagactgactgagctgagccgccgcctatcacactcactaccagagccgcctaaccttaacacacctcagctgtatcattcatgcatccggtcaattagtttatactgcctcagatttttaacttttttttttgttttcgttttgtttcgctctttcttgcttctacctaccccctagtttactgactcgtaccctaggtgagtgagcgtgtgtgttgttgacatgtgagattgttctctctctctctctgcctcagagagagtgagatgaaggagagatgtcggtcgtctggttctagggaagagaggaggactgtggcccgttttctgaagagaaaaacaaggcctcatggttgctgtgccttgtgcctgtcaaataattttgtttgtttcatcccatgctggactggactgctaatcctttgttttctgttatgaaaagtgggcaatcgagtgcttagctgttgggtagacgtgcaaagatgccaacttttccgtgcgcccgccgagtctgtctgttgcccacttgtgtcacctggaaaagtgcgtgtgcgggtgatcattttatatgtaaatgtgtttgttattaatattattatagcagcgtgtggtgctggtgctggtgctgctactgtaataagctggtggagttcgc

SEQ ID NO: 21334 - DNA, 2820 bp, Zea Mays
acggttggtccacctcctcctgctcctctggcctctgcggtgcctcctcccggtcccgagtcccggccatgtcgtcgccgctggaggatgtcagcgtgggcatggaggaggaggatcagcggcccctgaaccgggccctgctccaccggagcgccaccaccaacgcctcccaggtggccatggtcggctccaatccctgccctatcgagagcctcgactacgagatgatagagaacgagctgttcgaccagaactggaggacgaggcgcaaggcggaccaggtgcggtacgtggtgctcaagtggaccttctgcttcgccatcggcatcctcaccgggatcgtcggcttcttcatcaacctcgccgtcgagaacgtcgcgggcttcaagcaccaggccgtttccgccctcatggactccgccagctactggacggcgttctgggtgttcgccggctgcaacctggcgctcctgctgctggcgtcgtccatcacggcgttcttgtcgccggcggccggcgggtcgggaatcccggaggtcaaggcctacctcaacggcgtcgacgcgcccaacatcttctcgctgcggaccctcgctgtgcaggtagtggggaacatcgcggccgtatcatcgtcgctgcacgtcggcaaggcggggccgatggtccacaccggcgcgtgcatcgctgccatcttcgggcagggaggctcccgcaagtacggcctcacctgccgctggctgcgctacttcaaaaacgaccgcgaccggcgcgacctggtgaccatcggcgccggcgcgggggtggcggcggcgttccgcgcgcctgtcggcggcgtgctgttcgcgctcgagtcgctgtcgtcgtggtggcgcagcgcgctcatctggcggtcgttctttacgacggcagtggtggcggtggtgctgcgcctcttcatcgagctgtgcgggaccgggcgctgcggcatgttcggccggggcggtctcatcatgtacgatgtcagcaccgtgttcgacgacctcatgacctaccacctcaaggacatccccaccgtcatcctcatcggcgtcaccggcgccctgctcggcggactctacaacttcctcatgataaaggttctccgactctacaacgccatcaacgagagaggtggagcgcacaagctgctgttagcggccaccgtctccatcgtgacgtcgtgctgcgtcttcggcctgccatggctggcgccgtgccggccgtgccccacgacgggtccactttcgtcgccggacgggacctgccacgcgctgaaccgtttccggcggttccactgcccaaagggccactacaacgatctcgccagcctgttcctcaacatcaacgacgacgcgatccgcaacctctactccaccggcaccaacgacgtgtaccacccggtttccatggtcatcttcttcgtggcgtcctacgcgctcggcgtgctcagttacggcgttgtggcgccgtccgggcttttcgtccccatcatcctcacgggcgccacctacggccgcctcgtggcaatgctgctcgggggccgctccggcctcgaccacggcctcgtcgccatcctcggctccgcgtcattcctcggcgggacgctccggatgacggtgtccgtgtgcgtcatcatcctcgagctcaccaacaacctgctactgctgccgctcgtcatgctcgtgctgctcatctccaagacggtcgccgactccttcaactccagcatctacgacctcatcctgcgcctcaagggcctgccccacctcgatggccacgctgagccgtacatgcggcagctggccgtcggcgacgtggtggccgggccgctgcggagcttcggcggcgtggagaaggtcggcaacgtcgtgcacacgctccgcaccacggggcaccacgcgttccccgtcgtggacgagccgcccttttcgccggcgccggtgctctacggcctggtgctgcgcgcgcacctgctggtgctgctcaagaagagggagttcctggtggcgccggagcggtgcccaaaggagtacgtggccgagaggttccaggcggaggacttcgacaagcgcgggtccgggaagcaggataccatcgccgacgtggtgctgtcgccggaggagatggagatgtacgtcgacctgcaccccttcaccaacacgtcgccgtacacggtggtcgagaccatgtcgctggccaaggcgctcgtgctcttccgggaggtcggcctgcgccacctcctcgtcgtgcccaaggcctgcgataggtcgccggtggtcggcatcttgacgaggcatgacttcatgccagagcacattctggagctgcaccctgtccttctgaggagcaggtggaagaggctccggtggcagaggggcgccatggccaagtacttccgatcgctcatcgtgtgggtcgccaacagcggctgaagcagatacattgctgccaggaaactgctgctggctcctgcagattgaaggagtcatcatcattgggtatttgtgaaataacaacacgtgttgatagcttcatatacatatatgcatatatatgttcagtcaaaattttgtcgttgtcttttggtactacgtttgtataattttcattttagtgaaagaagacgagttcgccacattgttttatgtcttctatacacttgaacaggtggcgtcctttggacgccctgcaatgactaaatgaagcaagtccctgctgatcacaggcaacagaaggtttaacccacagccttagtgaatgataaatgagtaagtatgaaagagcttagaggataaatgacag

SEQ ID NO: 21335 - DNA, 2137 bp, Zea Mays
  misc_feature (2136)..(2137): n is a, c, g, or t
tttctcgctcagtcactaagtcttggttctaagccgcctctccgcatttgtgggaaggcttgcctcggtttatcccttcacgagaccccactcatgtggctggcagcctacctacggcagtgggtctgcctttttatgctttatgtcatcatctttgtcctgaacattgaaatggttgtaggaatcctactgttttgattaaatcactaccgcatcatcaaatatggaagttgatgatgacgtggaggaggatgacatagattttaaccctttccttagggaaggatctccgtctgagacctcatcaagccttacctcagaagcagaatgcgaggaacatagttctgaaaatcaaccaagtaaccatacatatcagcagaatactgtagttaatgaaaatacaagtgacagtgcacttcctcaaaatagattgtcgtctcaagatgctgttaacgaaatgtttccagaagaaacgtctacccaggttaatattgagaatgatggtcacttgaatggattggaaaaagacgttttagcaagcgaagctgcttgctctccaacagtgcaagaccctcatcatctatctctcgaaattagtgaggaagatgcaatttgcaaacggacaagggcaagatactcactagcaaactattcactcgaggaattggagacctttctccaggaatctgatgatgatagtggtctgcaaaatgttgatgaagaagaggaataccgcaagtttcttgctgctgtcctgtctggtgtaggcaatgacacacaaacattccagggggatgaaaatcaagatgaagatgataatgatgcagactttgagctcgagattgaggaggctctagaaagtgatggtgatgaaaatgttgagaactatcacaacacaaatcctagaaaagagaaagatgtccgtaggcctcagactaggcagaggcggccattaactgggatgtctggggctggtagtgatcaccaggaatccaataaaactcatttaagaccaattgtgccatatattccgtctgcattggtgactcctgcgcatgcttttggatggcaatatgctaaccagaatgcctttttcccttcatccttggtttcactaacacgtccacctttagcatgtggatttacttatcagcaactcgggcaattgcatgtgttgatatatgagcatgttcagctccttatccaaacattttccctatgtgttcttgattcatctaaacaagatgtggctaataatgtcaaaaagatgatagttgagttggttggtgctcgtgatcaagcattggccaggagctctcctcaacggcatatcttctttgaaacccaacatctctcatctagttttgtttcttctgataatttggaacgccaatggattccgttaatcaagagtcctattatatccgtccttgatgttgcaccgcttgagttggtcctcgactatttaagtgacgtcgcaactgctgtcgtgaagtatagaaaaagtcatgtggatggtactgctgacaaaacccgcaggaaagagcccctgtttccttcagcagcgattaacagttgcaaacaagtgaataatgtttctcaagatagatcaaatggtgtgcctacagcatcacctccatctgggcagttgcagcagaagaaatcgttggctgctaccctgcttgagaatattaaaaaggatacaattgctcttgttcctgctgacattgcaagattagcacagagattcttttcacttttcaattttgcactctttcctcataagtcacctccttcacctatggccaatagggttcttttcactgatgcagaggacagattattagctctaggaattctggaatataataatgactgggcagcaatacaaaagcgctttcttccttgtaaatcaaagcatcagatatttgtgagacaaaaaaatcgtagctcctccaaagctcctgataatccagttaaggtaaatgttttgcccttcatttactggaagataagatgctgaattcacttttatgtaccttttagggttcaaaatttaatattatggtcaaggtgtccattgagttgcatagtactgtaacaggttagcagttcatagtaacaaattgtatgttnn

SEQ ID NO: 21336 - DNA, 1300 bp, Zea Mays
tggggttcaacttcactgtgaatacgctgacgctacgagaagtcatcacggaaggggtctcgaagcaaggtgtgccatttgggcggagttcgcgtgagccaagttaccgcgtcgaattccatcctgttgattcaccattccatccagagaatggtcaagaatcggtaccaatggctagtcatgatgggaaacgttataaatgctttctaccagttgaagaaactaaaaccatgaagtcaatgcttccgcaaaatgcaactaatgttataatagaaagtgaaaggagaattaagccaaaggagccagatgagttacttgaggttctcaaggaccagtgcttctacaggcatgaaggttggtggtcgtatgaattctgttatcatgggaaaatcagacaggtccatgtagacgacgataaggttatccaagaatttgttctaggcgaattcgatgacgacgcgactgctgcataccatgaaaatatcacttctgagttagttgacgatgaccatcatgtgaaagatatatctcagaggtatcatgttcacttgtatacaaatgggactgtatgcgatctcacagatattccgcgggagacagaggttagatttgtctgctcggagcctactgtactgattagttcagtcaaggagatctcttcctgcagatatgttgtaacgattcaaagtcccatgctttgcaaaaacccgttattccaggaagaaaaacgaaccctctccatccactgcaatgagttgcctgctagagcggaatccagcgcggaggatgactcgcttccaaaagaagctcagatttccatcatccccgatcaggatgagctacatgatttcccagcctatgctacttgatttgcctccaataattatgtttgatgtagaaaaaaaaacaccattttggaggcgcaggggcaactgagcaacactatgtattaactatctcgtagatactacagcagaggctccttgtaaagcaggttgagacgatcattctgcagttcttattatataggatgattacgaaggtaacatgtttgggacagtaacatttgcttgaaatgtatatagtctacaacaagaataatgccagcattcttgaaatgtaggtgtgcgagcacttttacacgaagtaatattgctctggtgtgacgaacgatctgttgtcggttgagatgaaaaggcgttcgccttctattaagaatgtaaatggtacaaaaggatgtaaatggtacggatattatctgttcgtatttgaatttaatccggtttgagatgtatccgag

SEQ ID NO: 21337 - DNA, 992 bp, Zea Mays
ctgttttttgttccccatttttggcttggcaacacggaagaattttgtgcggaggtagaaggatcaaggaaacaaatccaaagatgctttacattggaagaagctgctgatacaattctcttctgtagttctattgtccacgaccttgcatacaaggctgcgactattgcattggaaaatgagaaggaatcagagtttgttgaccctattcgcccaactgttagaatagttggaggatctttctctaaggatgagagtttaccaaagctgactcacagacgaactccaaatcgtaaggtcaaaaggaaaagattggaaggtgaaacaactacaacggaaactacagagaaagatgctgttgcgaaagactcctcccctgtatgttccgcatcaggtattacaaggaattccgataatatgaaacctccaaagctggagtccaagtgcaactgtataatcatgtaagtaacttcacgtccaaggtcgaaggagttgtgatattggttgggacgaaaatccatgctttctggtttcatgtcacatgcaacttgaagcatgcctacctgcttggttaacccgctgtcagcagcaacgatggagttcaaggcagtggatcttccactagattattttgcagaggtgcatttgctgtgttttttaggtgacagaatgcactgcgagctattcttttgtaaagtcttttcttctctgttgtggaaattttctgcttgtcgtgaggtctattgcggtttgtccaaagtgtgaaagactactagagttgtgctgatagcgtatttacttgcaatgcacgtggctacttgtgaaaatgatggtcgtatactcctatgcacacggcccggatctcacttttttgattccacgatgcatctcttcattgtggagttgtgggtgttggttcttttgccccacaccaaatatggtggcgttctcagctctccgagttcattctttgagatttattttaacctgga

SEQ ID NO: 21338 - DNA, 621 bp, Zea Mays
tgtgtctgcacattttctatgaacaaaaagatgaatatacgcttagctgaagcacaagtacaaggtgaccctgaaaaattgagacttgaggcactggaaaagatgaaaaagattgatggatggcttaaggagctgaagcttttggaggacaagagagcgcctgctgcttagacaaaatcaacttcggttctgatgtagagccaccacgaccacaccatggtgccgatccagattcgaaggtgcaactgaatcaccataggcttctccgtcacccgtggtggttattggaagagcagtccagtagatgtgggtttgcgcagaacgatggaagtttttcaccgcacatttctggcgccaagtttcaagatctgtaccgcaagaaagaccgctgctaattatggggatctctgacactgggtcagaatttacttttgctctcacggcccgaattcatctccggctttaccaccattgttcaattagctgttatatcacggttgaaactgactggaagtgccggaattcttatgtctctggctccctgcctctcttcatcacatgtactacctccgttcttaataatatttatcgctggctagttcatttttaaactaaaacaca

SEQ ID NO: 21339 - DNA, 315 bp, Zea Mays
ccttgcttcacgaggagaacctcttgtcttgtagctgggaggggagggagcattgacatccgtggataacatatcacattcaggtgaaacaggtggctgtctcttatgttctgtctttatcaccaaatttgagttatgaccagaattattaatcttatctgttggatatggcttaccctcctcaacatcatggactcctttataacctctttgagaatctttttcagtttggtccactgtctcatcatccattgaatcacggccctggcacacaatctaaaaagcaagaaaatgttaatagcgcctaatgattaa

SEQ ID NO: 21340 - DNA, 4303 bp, Zea Mays
ggagagggctgagacggggaagaagccccgtaccctatcgcgctcgccccggggaggagggggagggacgggcggactggagggaggcatctggaattcttagcctcctccgccgcggcctctactaagcagcacgcgaggacgccgatccccaaagcctgggtgctggggctacaaggccgctactttgccccttgctacgcgctcgcccgcgagagccttgtgcctctcgtctccggcagacgccatggacgaagaggacgacgaccagcgcctgctgcacagcctcggcgtcacgtccgccaacatcgaggacatcgagaagaaaatcctctcgcaggtccaaactgaaccgaagcgcgatgacgagccaggagcagccgtcgatgaccccagcgggagtagtgttgcgcctgagtttgatgcgcaggccaatctgcaccagaagctgcgttccgtgcaactcgagatcgatgccgtagcttccaccattaaaagagctaagaacgccagcgttgatggacaagataaaaagaagcagaaacaagccaatcacacttctcaggatgaacctcatggaggagcgctccagcaggctcttgccactgagcgccttaaaagcctcaagaaagctaaagctcagattcagaaagagatattgcagtcggacccctacccatctggctcggacaacaggaaagataaaatgctagccatgctggttgaagaggagccaaggcgtaagaagaagtcgctaatgccggctcgagggcctaagaaaacgtcagctcctagactgaaaaccatgagttatgatgacgacgatgacttcgatgcagtgcttgatggggcttctgcaggatttatggaaacagaaagggaagaactaatcaggaagggcttgctgacaccatttcacaaattgaagggctttgagaagcgtgttgaattacctggaccttctcataggcaaaatgatccctccgaacaagctgaagaagcaattgaagcttccaggattgctagagtcgctcagtcaatgcagcaaattgcacaaagtcgccctacaacaaaattgcttgatccagaatctttacctaggctggacgcacctactgctccatttcaaaggcttggaagacccctaaaacgccctgtacctcctagttcagaaggacgggaaaggaagagacaaaggaataagaccaagaggcctttgcctgacaagaaatggagaaaagccaattcaaggaaggaatcactattggaaactgatggtgaggatgttggggactttgcgacatcagtttctgaggatgatgatcaagcagcagaaggtggattatctcctgttattcttgaaggtggtttgagaattcctggcacaatttatgaacagctatttgattaccaaaaagtgggagtgcagtggctgtgggagttacactgtcaaagagccggtggaattattggagacgaaatgggcctgggaaaaactgtgcaagttctatcatttcttggttctttgcataacagcggcatgtacaagcccagcatcgttgtttgtcctgtaacacttcttcaacagtggcaaagggaggccagtaggtggtatccaaaattcaaggtggaaatcttacatgattctgcaaatggttcgagtaaaaagagcaaggcatatagtgattctgacagcgaaggttcttgggatagtgatcaggaagaggttagacgtgcaaagcctgcaaagaagtgggatgacttgatttcacgggtagtaaattcgggatcaggtttgcttttaaccacatatgagcagctaagaatcttaggggagaagttgcttgatatagaatggggatatgctgtgttggatgagggtcatcgtataaggaaccctaacgctgagataacgctggtgtgcaagcaactgcaaactgtgcacaggataatcatgacaggtgcacctattcaaaataaactttctgagctctggtctcttttcgatttcgtgttcccagggaaactaggtgtgctgcctgtatttgagactgaattttctgtgccaattactgttggtggttatgctaatgcgacaccattgcaagtgtcaacagcatacagatgcgctattgttcttcgtgatcttatcatgccatatcttcttagacggatgaaagttgatgtcaatgcacagctccccaagaaaacagagcatgttcttttttgtagtctaactgcagggcagcgttctacttatcgtgcttttcttgctagttcagaggtggaacaaatatttgatggcaatagaaattcactgtatggtatagatgtcctaaggaaaatatgcaatcatcctgatctactcgagagagaacatgctgctcagaatcctgactatgggaatcctgaaagaagtggaaagatgaaagtagttgagcaagttctcaaagtctggaaggaccaaggtcaccgagttcttctgttcactcaaactcaacaaatgcttgacattttagagaacttcctgacggcctgtgactaccaataccgaagaatggatggactaacacctgcaaaacaaaggatggcactaattgacgagttcaataacacagatgaaatctttgttttcattctgaccacaaaagttggtggtttgggtacaaacttgactggcgcaaacaggattattatttatgaccccgactggaacccttcaacagacatgcaggccagagaacgtgcatggcgaattgggcaaactagagatgtaatggtttacagactgatcacacgtgggacaatagaggagaaagtctatcatcgacagatatacaagcatttccttaccaacaaagtactgaaaaaccctcagcagaggagattctttaaagccagagacatgaaggatttattcacactacaagatgatgaagggaatggttcaactgaaacgtcaaatattttcggccaattgtccaaagatgtgaacgttggagttccaaatgatggtcaacagcatcaggtacatattgcttcggctttgtcaagcaccagtgaagctgaaccatctaatggtgggaacagtaaagtggatgataactctgaccaagcagacgaagaatcgagcattttgaagagtctttttggtgctcaaggcattcatagtgcgatcaatcatgatgccataatggatgctaacgatgaccagaaagtgcgcttagaagcagaagcttcacaagtggcacaaagggcagctgaagctttacgtcaatcgcgaatgctcagaagccatgacagttttgctgttcccacatggaccggaagatctggtgctgctggggcaccctcctctgttcgcaggaagtttgggtccacagttaacagccagttgatcccttcctcacagccatcagaaacgtccagcagcaggaatcgaagtcttccagtgggtgctctgagtggcaaggcactgtcatctgctgaacttctggctaagattcgtggaacccgagaggcatctgcttcagatgcattggagcatcaactcaacgtaggatcatcttccaatcttgtatcaagtccatctgggaatggtggccgtgcatctaaccctcctaacagaagcatgatcgtgcaacctgaagtcctgatccgccagttgtgcaccttcattcaacataacggtgggtctgccacctccacgagcataacggaacacttcaagagtcgcattcagtccaaggatatgcttctcttcaagaacctgctgaaggagatagcaactttgcaaagaggcgcggaaggttctgtgtgggtgctgaaacctgattacacgtgatttttaactgtagttcacaggaacaaaattttggtataggagtcgttttcgatagggttttatttttaattttgctagggagatctttttttcgtggcttactgagtgattctttttctaaggagacttaacacgaagaaatcttaggcgatgtgttggtgttgtgaatacaagaataggaatcccaacatgctatgatcttggagaaaggatagcagattctttgcaggccacaaaggttggtgctcaagttttttagtagcttcttacttctggattagttggccagtattcgtttccatctggaatcttgtgcttgtttagcagaagctggtatataagatcggtcattcttggcatgtctggatcatgggctaactagactaacaactagttgctaaacttgatccatggaggatctaaataggagaaaataataagagaatagtttctctacaa

SEQ ID NO: 21341 - DNA, 762 bp, Zea Mays
ctcaagagaccctgttctgttgaatctggtactgatcctgcagaaatccgctcaagattgagagaagctcttcctcgtgcacctcaaaagcaactgtatgaccctgttctgcttcacacctcgtttgcacgaattctgggacatcccaggctccctaaagagcaaagtgcatcatcgtttgataatgtcaagttcttccatgagctagttgctcaaattaatgagaagatctgtggctttcaggcgacgatatcagagctatggtatgtcgaagagtacgatgttcttgcattggcactgaatggaaagatgaaggtgcggaggctccaccttggctgcaatcgtcagggcatctgaagctagagaggtcatggaaacgggaaaggattaggagatgcacagccaccaaacagacttttttcgcttgcatgtctcgccgaaagggccaccttggtactgcccagctgagcgagatgtgctacaatctgcctttacataccgagaactgacaagttatattgacctagactatcttcagcagattatctatcatcatttctatattcaaatttcactttacgaacattagtctatagtacagaataaactgttggacacagactaatgtttatgtaggaacagtatgcatgttttaacaatatataatacaattatttgagcacaacaactattaaagtgatgtttggttcagacattgttaagggaatggtaatgaaatctcttactggcggtaatggttac

SEQ ID NO: 21342 - DNA, 541 bp, Zea Mays
gcatagtgcccgtgctgcctgtcccttaccgcaacggtagcattcgaattctctccccaaatcgccaccctggggcacccaatgctggcagcctcccttctcgctctccgcttcctcctcgtcggcgccactgcggcggggatggggaccgggacggtgggggtgagtggtggtggccagctgtggtgcgttgcgaagaacaacgcggaggacggcgcgctgcagagcgcgattgattgggcgtgcagtgttgacggtggccgcgcggactgtgcagccatccagcagggtggcgcctgttacgatccgcccgacctccagcagcacgcctcctacgccttcaacgactacttcctccgttccggcggtgccgggagccccgccgcctgcgacttctccggcgccgccgcactcaccgcgctcaaccccagtcatgggagctgcgtgtttccttccagggcaagttagacctcagctggccgagacgaggtggcgcacagaggttaaagttgctctgctgacacaacctgaagggcttcaa

SEQ ID NO: 21343 - DNA, 620 bp, Zea Mays
tgattgcctaccaaggtctcaagtctctgtgagcttgatcgtccctttcttgcgtttgggggaaaccatcactggcagtgggcacttccccttgacagccaacgcactgaagaatgttctcactggtcatgcatcaaaggatgtgctgctgagcatcgtcaatgcgatgctgggttggcttattgctgcaccatttgtacttgccgtgctgtacgctgtttcgttcccttgtttcaaggtcctggttaacaggtttggcggcattccatcgagccccaggaccccactcaaggcggtgtaggtagtgtgtagcatgctgaatgctcctgaaattgtgtacaccaaattctttgtgatgccgttgggttgagatgggttccggcgtcatgttgctcggccatcccaggcactggcgaataaatccgacttgagaggcacgtgtcctctataattctgtatgctggcttggtaatcatatagtgagatgtgtatttatgaatttacaaactcttcatgaataaagccatgtttggataaaggattaaattttagtctctattctatcggatgttttggatatagttaaaagtattagatagagcctaattataaaactaatt

SEQ ID NO: 21344 - DNA, 969 bp, Zea Mays
ccggttccgccctggtctacgttctgtcgttctgtggctgagctccaaagtccaaagattagtgaatccaaaaggcgaccaaacagatcccccgctcctgtgctccgctcatgttagagaaccccctgggaaaacgcagcggagaaactctggagatcgaaaccccggcacgcagctaggcgaactgcacgcaactgcaggtcgacgtctgatccatttcttgtcgcttcagcttctggtgctggtcttcttccagttgcatcctggttacctgtgtcaaggggcggttggtgtctggtgtagttggagggcagagcttcgcgggcggcgaagaagaagagcagcagagagactctgctgacactgaccgagggagatatggcgaggaagctgagagagttgctgcagaagagcggcaaccgcgtatgtgccgactgcggcgcacctgatcccaaatgggcatcggctaacattggagtattcatttgcctaaagtgttctggtgttcacagaagcctcgggacacatgtttcaaaggtgctgtcagtcacactagatcaatggacggatgatgagatcaactccatgatagaagttggtggaaactcttatgccaatgctatatatgaagcatttctgccagagggctatcagaagccgcatccagattctagccaagaagagagagctgatttcatcaggtcgaagtatgagttgcaagaattcctgaagccaagcctaaggttagtttccagcaataagggctctttagaggcgaccagctctcgaaagcatatggataattctgtgtctctttctgctagtttcagcagtgaggctggaatggttgagttcattggaatactaaaagttaaagtgataagagggactaaactagctgtaagagacctgatgagtagtgacccctatgttgtactgaccctaggacagcagcattgttctctgcag

SEQ ID NO: 21345 - DNA, 1675 bp, Zea Mays
gagcttttttcaccgctgccctgccctgcccccgcgcccgttgacgtttccggcccccaattcgaaagcctcgcgctccccgttgctcccttccttgcctaggcggcaacgccctcgtgctttataacccagcggcccctcccgcgtgaggcaaccgagacgggaggagaccagaccagcagcagcccatccgaaccccgcctcctcctcctcctcccgggttcgcgtgaggctgtgtgctgctgggaggcggcgccggcgccggcgccatggaggcggagaagaagccgccggcggtgtccgacgtgggcgcgtgggcgatgaacgtcgtcagctccgtcagcctcatcatggccaacaagcagctcatgtcctcctccggctacgccttcgccttcgccaccacgctcaccgggttccacttcaccgtcacggcgctcgtcgggtggatctccaacgccaccggctactccgtctccaagcacgtcccgctctgggagctcgtctggttctcgctcgtcgccaacacctccatcaccgggatgaacctcagcctcatgctcaactccgtcggattctaccagatctccaaactgagcatgattccggtggtctgcctcatggaatgggtgctcaacagcaagcactacaccactaaggtcatatccgcagtcatcgtcgtggccgccggtgtcgggatttgtactgtcacggatgtcgaggtcaatgccaaggggttcatctgcgcttgcgtggcagtgttctgcacgtcgcttcaacagatccaaggcactgttattggaagcccgaactttgcaactcggctctgaactacagtaatacagatcaatggtaaaaagacaattggctcctttcagaagaagtacaacattggatcatttgagctgctgagcaaaactgcgccaattcaggcactttcactcattatactgggcccctttgtggactactatctaaatgggcggtcattgttgaactaccctttttcaggaggggcaactttcttcatactgctttcctgctccctggcggtgttctgcaacatgagccaatacctctgcatcgggcggttctcagcgacctcattccaggtcctgggccacatgaagaccgtgtgcgtgctgatcctgggctggatcctgtttgactcggccctcaccgtgaagaacatcctcgggatgctgctcgccgtgatgggcatggtggtctacagctgggccgtggaagcggagaagaaggcggcagccccgatcccccggaacaagggcggcatgctcgacggcgaggacgtgcccctcaaggccagggtgagcggcgtgcccgcggtcgacctcgaggacggcgacgtgaagggctagccgctgatccgttcattcttctcgttcttttgtaactgtgcgcgcgcggtcgctcgatgcaaagttgcttgttcgtcggttctcagctatcgacactacactgttaattttgttggccccttgttggggggagtctgctcgtaggtgaccccccctcccccgggttcgacgtagatgaaacacacgcgggcaaattgttaggatttttcaggcggggaggtggcgacatgctgttatagatggtgacaagactttatataatggaaatgcaggtgtttttgaggtttcgctgttca

SEQ ID NO: 21346 - DNA, 1709 bp, Zea Mays
attcagaattgcaaatttactacagcataaagggaaaaaacatagattattattggtttgttgcaaaatgtctacggaagcgactttgaacaattctggtggttctgaatctgcattgctgttactggaacagcttgctgaagtttttggaaagttaaaaactcacaccgaaacatttctgcatttgcaaaatggcataaaatgggaagatattgaagggcatttcctcagccttgatgagtcgtacagaagcaagtttgatgaactggtagagaaggagaaggcattagaagaaaagaaagctgaagcttgtaggttgattgcagagaaagaggctaaagtttctacaaaagagcatgcctcactgaatcagcttcaggagctaagggatgctgctgtctcttctctagcagaggttcgacaaaaatataaggtggagcttgctgagatacttgaagcaagtggaagcaaagacaaaaaggtatcattgaggagttggttaagcggcacaggcaaattgatgcagttcatttcatacaagcttttgggctttcggagacattcccccctgcacctctgctgaagacatatgttgaggaacaaaaggatacaattgaaaataatggcgatgcaactgcgatctcattaacggatgaccccaaatctagggagctaattgctttgagggctgtgattaagtgtatcgaagagcataagcttcagaaggagtgttcacttggacctctccagaagcgtgtttctgagctgaagcccaagggtgagaaaaggccatcaagtgatgctgggcgtacttatgcaaagaagcctcgaggccctggcatttcatttcctaggagacctgccggttctgttggttcagctgctcgcaggcctccatttccgggctatacctggcagcgtgctcctgcgccgatgccctcccgtggtcctgctccagtgccctcccgtgcccctcttcctgcccctcttcctgatagatatggagctgctgaccggtaccattacacaccaccagccccagcatacgactctggtgcattttcgtcttacagtgaacctttcagtgccccaaaaccattccagtacactccagggtcagtggcagcatcatacaattcaagcccctataaagtcgcttatggtggcccaggagcaccagtcagaagcacctatccaggttatgccagcgcatctgggccggctgcttccagcagctatgcaaattatatgggatccgtatatcgccctccccagcaaccatagattcgactcctccctcaaaaaatgttgtgctggtgatgcaagacatggaaaccagtccctcccatccaactcccatggcggagatgtaaacttgagctattttcttgtttcatcgtccacaacagtggggtttggaggtgtatactgatgctctcatgtccagctacatctacaatgtaccttgcactcttgtttgcttttagctgtgcttattcctgagtcgttgaatgttttatattttctttccacaagtctgtctcatgtagggaactgtctcatctaggaatataactcctttacttgctaccgttgcgattgagttggaaacgccgattgagttggaaacgccaaaacgtggcttgagtttaacagcttgcttatccctatctcatttcatttttcactttgtaatagtcaaatagtgc

SEQ ID NO: 21347 - DNA, 582 bp, Zea Mays
caggaatgttgtcatatctgtggaaaatcgggcagaaattctcaaagccaccaagtgaagatacatactactctcggacaagaagcatgctgcacaaactgggtcttgaaaagtatgagaagaatttcaagaggggtctcctcaatgatcaaacgttaccactccttacggacagtgctctgagagatgtgaagattcctcctggacccagacttctcatactcgaccaaattaaaagggaccccgagctggttcaagcaaagtagcagtcacaattgtcgacagctggttctttctgggttgcatagggtttgaaagcgatgccgtctctagtttcttaataaactttctaggcaagcaagcaagaatttagttgtgctgtagttaattgttttttggccgatcagtttgcatcgatcctattaaattctgaacaacaggtatttatacgcatcttattcaaatttaaactggcattctctacattatgcaaatatgttggaaacaaggttgatggattaatttggcgtgaccggctgtcgtgtatacttgagtgaatcaacgaggaaataaatattgctt

SEQ ID NO: 21348 - DNA, 7742 bp, Zea Mays
ctcctcctcgggcacactctcgtgcgcgcccaccacgcccacaaattcagctactcttgtcctgacgatcacggccacggagggagggagagtcaacggtcagtgcgggggctatggtttgctttcttcccccgagcgcaagcgcaacccccgcaccaaacagacaacagcagtacagcagagcaaagcaaagaggaacaccatttcccttgcctgcttgccaacccaccaccaccaccaccaccacccacgaaggcagcagcaacccagcaccaccgatccatccatccactcgtcattcctccgccccgccgctcgccttcacccatctccgaccccgctccgccaccaaaccctaggctaccagctcttcccaccccgtgtgctccgctcccctgagggcggctcgcgcgccatttctccgctcgatttcctaaaaccgtactctcggattcgggatcgggccgcgacggggcctcctcttgctctcgctcttccgtccggtcggccgctgaggacaataaaggaggttgcgctcatgccgggggcgccgctcaggtgacttgctggggggccatgcataggtactccagcaacagcgctgggttcagcggtggcagggacggcgcgaggttggaagcctcgcccttctcgtcctcctcctctgggtaccctgtcagctccaggcggcagcagcagctagttccatacaagctaaagtgtgacaaagatccacttaataacaagcttgggccacctgacttctatccacaaacaccaaactgtcccgaagagacattaaccaaagagtatgcacaagctgggtacaaggagactgttgaaggaattgaggaagcaagagagattgtactcagccagatcccgtacttctgtaagccagatgctgtcataaagtgcaaggaggcactaaagaagcgtttaagagcgatcaatgaatctcgtgctcaaaagagaaaggctggccaagtttatggagttcctctttctggatctctactgatcaagcctggagtttacccagagcaaagaccatgtaatgaggacgcccgcagaaaatggattgaggcccttgctcagccaaacaagcgactgcgttcattgtctgagcacgttcctcatggttaccgtaggaaatcactttttgaaggtctaattcgatataatgttccgttgctaagagcaacatggtttattaaagtcacatacctgaaccagctacagacccgacagacacctaacagtatttcagtagcgggttctgataaccaacgctctaatcagtggacaaaggatgttgttgaatatttacaacatattttggacgaattttgttctaaagagggtgcattcgtgcatccatcttttagagagcagtcatcaccaggacctactgctggaaccaatcagataaaaatgaaaactgaagcatctccagctgctggagacattgaagaacccttggtgcacttcaaatggcggtatatggttcgtctcatccaatggcatctcacagaagaattgcttgttccctcagtacttatcgaatggctatctaaccaactccaggagagagattcagttgacgttttagaacttctcttgcctattatgcttggtctggttgacaccattactctctcacaaacatatgtgcgcatgtttgtggagctactagtgagacgtctcaatgatgcttctgttgttgatagtccaaaaggaccttcagtttcttctgttatagcagagttactgcggtacatggtacttgcagtgccagatacatttatttctttggattgctttcctctcccatcttttgtggttcctgatgtatatggtagaggtgctttgttgaagataactagcagtggtggaatttcaagttctaaaaggtgtgatgcttatcggtatttgtcctgtggttatgctgtttgttcaattcaaaaacgtgcatatgatctcgcaacagttgctaaccctaaccttcaagcacgtggtgcagccaaagtggtacaggctttggacatagctcttgtcacaggaaatttgtcagtggcatattcttcactctttaatgatttatctgatacgttaatggaagagagatggattaaagaagtcagccccagtctgcagtcttctctgatgtggattgggactgttgagctatcccttatctgttctatatttttcctttgtgaatgggcgacatgtgattatcgtgattgtcgagcatctccctctcggaatgtgaaatttacaggaagaagagatttgtctcagatacatatggcagtgtctatcttgaagaataaaatggatgagatgaataatttgtctcgttctaagagtagcactcgcgttaccctgaataatatcaccaaaggttcttcactgaccgatgcttgtttgacagcagctgctgtggatgacacttctggattgcaaagtaatgcaaagaatgtggatgagaagaaggatacgaatgatatctttgaaagccctggtccactgcatgatatcattgtgtgttggttggatcagcatgaagttagcagtgttgcaggttttacccgggtggatgttctcatcgtagaacttatccgcaatggtatattttttcctcaggcttatgtcaggcagctaattattagtggaattactgacaagaacgacacaatgttggatgttgaaagaaaaaggaggcatcacagaactttgaagcagcttcctgggtcttctttatttgatattcttgaggaaactaggaccgtggaagagcaacagttatatgagatgatgtcgacatactccagcgagcggcgccttgttctctctgaactttcatgtgatcactcattttatgcaagtggcagaggcgagtatactgcaagttcctgcattcggaagcagagtgatcttccacttgcatcaggaggtgataagcatggaagagtgccagaacaagtagaagatgttaaagccctattgtcaagtctgttgggttttacatatccttccccagtggaatccgaacctcgccaaatcaaaacaagctttcaagaatcagcaacttcaacactctcacaagttgagactggagaagcaaaaagtggatgtgaggtttgtatgaggtccaaagggcagaaattggatgatactgccactcctttccaagggttttcattgattcaatcggacgaggaagatatttggtgggtgaggaaaggcacaaagttacaagaatctttcaacattgaacctgttcagaagtctgttaagcaaacttctaggggtagggcaaaagtggttcgtaaaacacaaagtcttgcacaacttgcagctgctagaattgaaggtagccaggggacatctaccagtcatgtctgtgaaagcaaaatgagctgtccccaccataaacctaatattgatggcgataatgttaaggattttgatcacacgagggtggcaaatctgactgaaattgggaagtcactaaaaagacttagattgcttgagaggcgatctgtctcttcttggttgttgaaaacagtaagacaacttattgaaggaaatgaaacaacggctgctaaagctaccaattccataagcattctttctttgcagtctgatgacaaaacgacatccaaatggaggctaggtgatgaagaactactgtcagttctctatttactggatacatgctgtgatttagtctcttgtgcaaggttccttgtatggttactagcgaaaattcgtggtggaatgggctcttcgggccaacctgggaggagttctatgcatacgaggaacagagatcaccaagtttgtcaggtcagcgaggcacttgtgttctcatctctgcttaggtacgagaacatacttcttgcggctgacatcctgcctgatgttctaagtgctttagtgaacagaaattctgtgtcagcaattgtcaggcatcctggttcaacagcttttgcttacgtacgatactttttgaagaaatatagagatgtggctggtgtggccaagtgggaaaaaagctttcggaccacttgtgatcagcgcctgttagctgagcttgataacgggcggtccattgatggcgaattgatttcttcttcgggggtttcagcaggcgaggagattgatgagcaggtccgccaaaagttgaatggaaggagttcaagacttgtgcagaatatgaaagaaatagtgcaacggcaagctgatgaaattcagcgcagtttgaaggaaaagaaagttctagcaactcccaggaatccacccacttttgagaaagaagatagctatcaaattgcacatgacattgtttcgggcttagtagaatgcatcaggcaaaatgggggtgcaaatccagatggagacctttcaacagttgcttctgctgtttctgcaattgttgcgaatgctgggcatgtgatagcaaaacatttggattttgcaggaggtaactatcaaggtgttaattctgtgagtaattcactaaatttcgttaggcacactttgcgtgtccatataaattctctttgcttgctgaaagaaactcttggggaccgcttcagccgtgcatttgaaatagctctggctgttgaaacttctggagctgttacagcagcttttgcttctccaaagatgcaccgcaatcagtttcaaccatctcctgaggcccatgatgcatatggaaatcatacaagtgatctcagcaactcagggaaaggttttgttgggagaactgctaaagtatctgctgctgtttctgctcttgtcgtgggggctgttgttcatggagctgttagtcttgagcggatggttgctgctttaaaaataaaagatggtttggatattctgcagctcctgagaggtttgaaatcaagttcgaatggtgtatcccgtcctactggaacttttaggattgaacattccacagatgttttggtacattggtttagggttctattggggaactgcagaactgtctatgatgggcttattgcagatattcttggagattcgtacattcttgcactctcaaggttgcagcagatgcttcctcttagtgtaatctttcctccggcctactcaatttttgccatggttctttggagacgatatatttttaaccgcgaagatccacagctttatcagtctctgtcaaacgcaataagcgatattaccagacatcaaccttttcgggagatttgcttccgcaatacacatcggctgtataatcttctggcttcagatgttggtgattcagagtttgcagcaatgcttgaaactcatagtcctgacaggaattcaaaaatactgccatttatacctctccgtgcccggctttttctggacgctcttattgattgcaacacaccaactattcagggagatggagcttcggagccttgtgaccccaaagataatgaattaaagctttcagagaggcttatgcaacttcttgatactcttcaacctgcaaagttccattggcaatgggttgagatgaggcttcttttagatgaacaagctcttatggaaaaagttgcagcaggcaagacagcacttgaatcacttcggtcgttatcccctaaagctgaggggtttaccctttctgatagtgaaaaagggtttactgaagtcattctgtcaaggctacttgctagacctgatgctgctcctctctattcagaagctgtccgccttcttggcaagcttcaggagtcccttgttatggatgtgaaatggattttacaagggcaagatgctattcttggccgcaggtcaacaagacagcagcttgttcatattgcccaacgaaaagggctttcaacaaaggcacaggtttggaaaccatggggttggtccagcttgcttagcgatgttattcctaataaaactgcaaaaaggaagttggaagtcacatcaattgaggaaggtgaagttgtggatgatactgttgatgctaaaaggcctagcaagactccccctcatagtgttgatagaagctttgaagcgattagatccataaataaatatttaactgagaaagcccttgctgaattagtattgccatgcatcgacagaagttctgctgatatccgtggtatactttctgttgatctgatcaaacagatggggactatcagtgaacatatcaaagcaatagcacggaatggtgctaaacaagctggttcagtcccttcaggtaatgaagtgccatcaagcaaatcaagtggtcgtaaaggaattcgaggtggaagcccaaacattggcagaagagctccggttggtaatgacccaagccctccgtcggcttctgctctgagggcagcattgtggttacgcctccaattcatcattaggttgcttccagtaatcatggcagataggagcatgagacaaacacttgcttctgcaatcctaggcctgcttgcaacgcgcatgatttatgaagatgcagatctgccccttccacctaccaatgcaactgctttaaggcgggaggtggattccctgctggagcctcccctggacgtcctgcttgatcggcctggtgaaagtctttttgagaggcttttatgtgttctccatgcacttcttggcagctacaaaccaagttggctgaagtcaaggtcagcctctaggtcgacaattagaatccaacgagatttttccgcatttgataacgaagcagccgagggtttacagtctgcgttggatcacatggaattgcctgaaacaatcaggcggaggatccaagcagccatgcctcttcttccaccatcccggcacccttctttgcaatgtcaacctccgcagttgtcgttggctgcattaacaccactccagagcagtacatctggtgtaggtccgcaacagaaaagttgttctgcgagctgggtgcccactaacgtctcaggcagaagcaaggcggcgttgccttcgcatgatcctgaaatggaggtagatccatggaatctgctcgaagatggcacaagctgcccctcaacagcatctggaagccatggcgcgagtggagtgacgggtgaccatgctaatctgaaagcgtgcagctggcttaagggtgctgtgagggtgaggaggacagaactgacctacattggctctttagacgatgacacctgacgtgtgtatgattattttggtgaattgtggaggaaattagtctcacctgttggcactggagtgaatggtggaaaccaaccatggcccttggctttaggatggttgttgttggtgtagaatacatacacatcgctgcccccgttttgttttgttttgttttgttttagggccttgtgggggcggctgtatataatggaaaaacatttgatccattactgaggcatggcccgagaagacaccttcaaatgggcttctgtgtaagcttgcttatttgagaagtaggaagccatgcagtagattttgtatccaaaagccgtgtacttgtttttgtctgatatgtaatctagcgcatgtcacacatatgtattcccttcctttgattgaagggctaatggtatgatgtcttttttttttgataaaacatgaggggtgagagcccctactggaaattaaataaaaaaatatgtacaaggagttacacgtttcttaattactcctgttctaaaatatagttttttctaaccctctttttttatgtccacattcaaataaatgag

SEQ ID NO: 21349 - DNA, 2479 bp, Zea Mays
cgccgagaaaactcaaatcgaatccccaaatccttcgccggcgattccactccaagtctcgatcggaaaagcgcagaagagcaacggaatcccaattcccaaagggacaaggcaaagctaacttctccttcttcccatccttcctcatcccgtcggatcaatgccagcgggagcaaattcgaagccgctgccgaaattgtggccggttgaccggtgtttccagcccatccccccgttgcacgcggcgaggtagaggagtttccgccgtcaactccatccgatcggcgtagggtcgcggggtgccgacaactttggtccccgctccccacttgggcgccacggtcgctgcgcatgccgcgggctcccgcgcccactggaccccggtaacaccgcacggcgcctcgctccgcgtgcccgcccgctgccagctccatgccaaccgccgcggctacataggtagctgcgcgctggctgaaggctcctgcagtgcgcgttgaaggctttcgctgcgtgttgtgcgttctgcttgaatttcggtctgagtttggatgggccagatgatttcgggtgataaatccgacgaacagacagcacgcgacgatggaatcatcaagaatggaagggaaatcctatttcaggcttttaactgggaatccaataagcacaactggtggagtattttggaggaaaaagtaaccgatcttgcggaatctgggtttacgtcagtgtggcttcctcctccaacacagtcattatctcgagaaggctatctaccacagaatctgtactgccttgactcatgttatggttccctccatgagctaaaattgttgcttcataaaatgagcgaacataatgtaagggctatggcagatgttgttatcaaccatcgaattggaactactcaaggatccaatggcatgtataatcgttatgatggcatcccagtatcatgggatgaacatgctgttacatcttgttctggcgggaagggaaacaagagcactggggataactttgatggggttcccaatatagatcatacacaaccatttgtacgcaaagatattatcgaatggttgatctggcttcgaaaatcagttggttttcaagattttcgctttgatttcacgaaaggttatgcagccaagtttgtaaaagaatacattgaggaatcaaaacctctttttgcagttggggaatactgggatagctgtgaatatagcccccctgactaccgactgaactataatcaaggtaacagatttatagtagcattcttactgactacttgagctagtgccatattttttgtcataagcactcttcagtcccttgattggcagcatgaacgatgaaggttaaattttaactattttcactatctaaaacttatgcctttattctagttatagcccccctgactaccgactgctatgtaagttgtctgacatgtgaggggtaatttacagttccaaatttaaggcagtttatttgatttctttctcatatgcttatggatgacactgactagtgtcaaaattacatcctcaaatatgcctagccttcttttgataatgcatgcttgttggtaccagacgttttggtttctttttgtctgccagatatccataggcagaggattattaattggatagataacactggaggactttgtgccgcatttgatttcacgacaaagggcattcttcaggaagctgtcaaaggagagttgtggcgtttgcgagattcagaaggaaaaccacctggtgtgatgggatggtggccttcaagatcagttacatttattgaaaatcatgacactgggtccactcagggtcattggccttttccgtcagatcatattatggagggatatgcttatatactcacccaccctggcatccccacggtgttctatgatcacttctatgaccagggtgtgcctctccatgacgaaattgctaaactgatgcaaatcagaaaatgccaagatatacatagccgttcatcaatcaaaattctggaggttgggtcagatctgtactcagcaatcatcgacgataagttgtgcatgaagatcggggacggctcgtggtgcccaagtgatccagagtggaggctggcagtctctggtgacagatatgctgtgtggcacaagtgaagcatataagtgccctcgatacagtttatttctgctctcaggaacaggagtaattagcatgttagctgaataacagcacggtaaaacatgccaaaaatgaccctcttcgaggttttacctgtacaagaggagtgcctaaatgcaatgcttaattagaaatacgtgagatcgtgcggctggtcccgaggtgagacatacattttgctaatcgcaacaactatggattacctgcaaaagaaatatatatagggcatgtgatgtctctgtggaatattttatcctggaaccagaaatttgaattatttttataaaaaa

SEQ ID NO: 21350 - DNA, 2468 bp, Zea Mays
tttattttataggttattagctaattaatcattttggaaatggttgttcacatgttttaagaaatagagacatatcacataagcgaattatttcctttgatatagtttacaagtttgggtattacagtctggttcagtcgctctttttgttcgtcggattgtgggtgataagatgatgacatttgtaactaaacttcggcaagacgaaacagttccttccaaagcgaactggtgaatattctgtcccaatcagaaacaattgaggaaggcatcccatggagacgatacacatgcagcaagaataacttggcaatgctggtagcagtgaacggatggcgaagaggaatgaagtgaccatactttgtgaaaaaatcaataacaaccaagatgcagttgtatgaagaagaggtcggcaagccttccacaaagtccaccgaaataatctgccaagctgatgagggcattggtaacggctgtagcagacctggtaaacgggttctgtccggtttagcttgctggcataccagacatgtttgcacaaattgcttcaccgcaacacacatgtcggtccaagcaaacagcttcttcatcctcatatatgttaccgggaatctagaatggccacctaatgcactggcgtaacaagctgatagcagttttctgttgtagtggcacattatggaaaatccaaactttggacttgtagcgcagtaatccctccaccaatgcgaaagtgggcaccaatgtgggatcaacagccaattgagctcgtaggtttgttgcatgggtatcctgatcgtatccagcaatcacctcggcaaaccactttggagtagctgatgaaatagctgcacaagaagcttcatgagaagatttccgtgaaagggcatctatcactcaattctcagtgtcgcgtttgtaaacaatatggtaattaatgcccaagagtttggaaaacacccgttgttgccacattgtatggaggcgttgttcgaacaatgatattaggctgcgttggtcagtaaaaatggtgaattctttgagatgcaaataagcgcactagtgagacactgctaatagaatggccatatactatttttcataagtggagaggccttgagatttggggcctaatgccttgctgataaaggctattgggtgaccatcctgaatcaatattgcacccactccagttgttgctgcgtcaatttcaactgaaaatggatgtccaaagttgggcaacttcaacacatgcgccaagcacaaggactgtttcagcacgttaaaagcatgatcatgtactgacgtccacacaaacactgaatgtttcttgaggagaagagtcaaagttttgatatgacttcgaagttacggacaaatttgcggtagtaaccagccaatcaaaggaagctgcgtagttccttcactatttgaggacaaggccaattagcgatggctgacacctttcgggatcagtagctacaccacgggcactgataatgtgagccaaatagctgatttgttgttgtgcaaatgaacatttggacagtttaatacaccacttgtctcgagctaacagctgtagtactatccgaaggtgtattacatggtcagacaaggatgagttgtagactaaaatgtcgtcgaaaaacaccagtgcactctgacacaggcaagaggctaaagttgagttcatggccgactgaaacgtgcctggagcacctgtgaggccaaacgccacgaccttaaactcatattgtccatagtgtgtctgaaacattgtcttatttcctcgccctacttcagtcagatctggtggaacctagcacgaaggtcaagtttggagaaccaagatgttgctaataattcatccagaagttcatcaataattggtactggatacttgcccttgacagtgatagcattcaagtgatggaagaagagaagggacgagctctgggttggatgatgccattggccaacatgtcacaaaattgtttctcgatttcatccttgagtgctagagcataacggtaaggacggaccgtgaccggagaagcaccatggaacaatgggattgcatggtcacatgctcgggtaggtggtaattatgtgggcacagcaaacaaagctgagaactctgataacactgcttgaatggcagggggcctcagaaaccatggcatctaattctaggcacgcgaccaacaagcataattggaccacagtacccttagaaatggaacaattggacccttgcaataagactgatactccttggtatggaagtaccatccactgatgttgctagtgtatgtgcatcggactgaattgagacaaccaatcaatccccaatatagcatcataagaaaacacatccaagattttgaagtctgtggagaaggtgaactcttggaccgaccacgcagtggctggacaatgcgctgaacactgtaaccgagcaccat

SEQ ID NO: 21351 - DNA, 1888 bp, Zea Mays
taatgttgcacgtcgtcaagatcggcaaggaacttcagacttaggggatgaaaccttagtcagatccttgggcacaaggatatgtggtccaagaaactacatggcgtgtttacccttcttatgctcatggttttcaatgtttcaggggcatttgttggtatcactattggcaatgacatgtcgaacataccaccagcaacagatatagtgtctatcctcaaagcaaagaagattcagcatgttcgcctgcttgattcagaccatcagatgttgactgcccttgcaaatactggaatagaagtgatggttggggttccaaatgatcagctacttcgtgtgggccaatctcgttccacagctgctgattggattaataagaatgtcaatgcttacattccggccactaacatcacatatattgctgtgggtaatgaggtccttactaccattcccaatgcagcacttgttctcatacctgcactgcaattcctccagtcagcacttttggctgcaaacctcgatactcaagtgaaaatttcgagtcctcattcaatggatgtgatctcgaaggcgtttcctccctctgctgccactttcaattcgacatggagctcaataatgtctcagtatcttcagtttctcaagaataccgaatcttcgtttatgctgaatgcccaaccatactatggctatgtcggaggacaaggcgtattccccttggagtatgcactgttccgctcacttaatccgaacagtcaaatttcagatcctaacaccaatctcttttataccaatatgtttgatgctataattgatgctacctacaactcaattcaagcaataaatttcacggggattcctgttttagttacagcttctggctggccatggcgtggtgggccaagtgagaaggctgctactgttgataatgctttggcctacaatacaaacctcatacatcatgtactgaacaattctggtactcccagccaaccgaataatcagtcgagcacctacatctttgagctgttcaacgaggataatcggtcagggcctgtatcagagcaaaattgggggatcatgtttcccaatgcaaccactatatactctctatcatttgaggacgtggccacaactattcctgaatcaccagctttacgtggggtgttttgtgttgcaaatccaagtgcaccccatagtgcactgaagcatagtttggattgggcatgtggccctggttctgcaaactgcagtgcaattcaacctgggaaaccatgctatgcatcagatgatattgtagctgttgcttcttatgctttcaatgattattaccatagaacacagtctagtggcggtacatgcaacttcaacggcaccgcaatgataacatcaactgatccaagccatggttcatgcgttttcgctggaagcactggcgccaacggcggaacggcctctgggcctgtaagcccagacagttttgcttcaaaatccaaaacctgctggttgactcacctagtagccacattgttgctgcccattctatttgtagtgatgtaaaacattgtaaccatgtcacattttggatgagatgcccgcaatttatcgtggatcttgtcattagatactgtagtgactagtgacccatttgggtctgctgtattcaggtagatgccatgtaatcttatcccaagatttgttggcctaggaatcagtatttcgtcaaatcatcaattttgactgtcaactcggaaaattgagctgtgacaatccgagacctctctgaaatgttgaaacttggaagttccaaatgatttgtacacctgcatagtatttagattttcagccgtatgcatatggtttaagtgaactgctggttggatatttt

SEQ ID NO: 21352 - DNA, 2815 bp, Zea Mays
aattgctggaattggtgtgcagttacggaatggattttggaacatggtggtgatcttaatcgagcaataaattcacatttcaatgatggagacagcatattgaacggaatcagtcaaaacgccatgcctgctagtcgtgatgatatgatggacctggatggaccacttgataatacatttcaaagatctttgttgccagagagtttccgtgccccttttgctctaatggatccaaatttccaggaccaattttttgacagagttggctccactgatggtgtcattcgtgaaccgctagtttcacatccaagagaggtgagggagatacctatcgaagttaaggatggtgatcctcaaacaggttcatctggccaggatgttactggaaatgagtcttcaaatggccctgaagtccctgaaactatcataattgatgatgtggacggtggattgttatctgcaccatctgttccacatcctattattcctagcaatacatctactgtgccaactgctcctccattggttcatgttaatgactatgatgaggacatagaagaggaaatgattcgggcagcaattgaagcttcaaagaaggattctgaaggactggcaaatatagtcgagcaaggaggccagcatcaagaggaagtgaatttgagggaccattcttctgataaagcaggcatggaaaccgcaaatggaatagttgagaggactagcttcagaaaaggctggaacatctaggcaaccaatagatgacgagagcttccaggaggaggctgaagatgtagaagaacagccgttagttaggcgtcgttctcggcgtgccccttctgaggacaatgaattaccaaaaatagtgcacccaggtgctagccctgttctgaacaatcaccagtataatggagatgatttcccatctgagtggggtggcatttcttctgaggaacatgatgaagctgttatgcttgaggctgcaatgtttggtggagttcctgaaggaccaacatatcctttctctatgccttctcacagaacctctacttattatcccccaatatctcattctccatcaccagcattaactgaacagcggttattacgagagcagcaggacgatgagtaccttgcatcgctacaagctgatcaagaaaaggagttaaaggccctacaggaggctgagctccgtcgccttgaagaaacagctgcgagagaagctgttcttgagaaacagaagcaagaggaggaggaaaggcgtaaaaaacaacttgaggaagaggaactagagtccagtctcacttcgaagcaagcatcattaccaccggaaccgtctccagacgcagagggtgctgtgacagttgtagtccgaatgcctgatggtagtcgacaggggcgccgctttctcaaaactgataaacttcagttcctatttgatttcttagacattgggaggacttgcaagccagggacctacagattggtgaggacatacccaaggcgcacgtttaccaacagcgagggtgacgtatcattcagtgatcttggcctaacaagcaagcaggaagccctgtttctagagcagatcacggggtagaggataatcgttaggcatggttagagataccacagctgggcaggagaattttacacaaaatacttgcaccatatcgccagtgaaaactcggtctgtcaaattggttgggttggtcgaagaaaggttaaaaattcttttgtggcgccatgtgtcgtgacgcattgcgctttgcatgcaaattggttgggttggtcgaagaaaggttaaaaattcttttgtggcgccatgtgtcgtgacgcattgcgctttgcatgctttacgttattatatatatgcgtgatactttatacctacgcatgcatgatgattcgtttcagtgagccctgctgtgcagagtgggttctgtattattgttggttctttgaatcaaagcgatgttgcacattgcacagccacaggccggtcgtgtgcgtacaagatcgcaaaagggcacgcgaccctcaagagtttgctttagcattcactacgaatgacggaatgaggacaccgagtcgactcgacgccggtggccttttattattcagcgtgtttggatcccttgccttttgcccagtgcatcgcactggctatcatcagctcattactctgcacgcatgacagcaaagagcaaatcatcagcacggcatataaaaaacgacaaataaagacacatttttcatgcgtggcggatggcggcatggcgcagtgtgtgtcattcatggcggatcagcacgacaaataactagagatggaggccttacggcagctgactggcgggaggccgcacttggccggcaggctgttgatgatgctgaacgttccgcaggcgcagtccctggacacggcccccagcgcggagcagcactccggcccgggcgccggcggaacctgccccggcaagggtggcacgctgtagcgcaagcagggggccagcccgcgcagctgccccgcgcacgtctgctgcgcctcggcgccaccgcccagccccgctgccaacaccaggagcagcagcagggacagcgccgcgggcaggccgcgcggctgcaccttgccgccgccggcggctgtcgtcgtcgtcgccgtcattattccaaactgaaaagcaccggccgacctgaccgtcgtctcgcgtacgcggaccagcagcgtgcgtgctgcttcgcacgtactggctctggactgggtcgcggtgtgcgtgtgccgtgtgcgcgcgctaacggcgggatttataggcgttca

SEQ ID NO: 21353 - DNA, 3380 bp, Zea Mays
gagggagggaggggaaagacggacagcgccattgctgccatcgcattcacagcgctaccgtctgcgtcgctttcctttcctccctttccctcgccgtaccaccacccgctcctcttctccgcctctgcctcctcctgcagaagccgccgcacaaaacccaaaccctaaccgccgcccctccgaggcgcgccagatcggcggcggcgcccactgctgctgctccggatccaatgcagcggctgccgtagcgcgggagctgccgatctgaggcggcggcggcggcgctggcgcaggtgggacagggatgtcgtctgcgccggtggcgggggcggcgttcgagcggtaccagcagcgcggaggtggcggccccgcggcggccaacggcaacacggttttcaagagtgggcctcttttcatatcatccaaagggattggatggaaatcatggaagaaacgttggttcatcctcacaagaacatcattggttttcttcaagagtgatcctagtaccttgccccagagaggtggtgaagtgaatgttactctaggagggattgatttgaacaattctgggagtgtggtagtcagagaagacaagaagttattgactgtacttttcccagatggccgtgatggtcgtgcattcactcttaaggcagaaacttctgaagacttgtttgagtggaaaacagcattggaagaagctcttgcacaagctccaaatgcagctcttgtgatgggacataatgggatatttcgtaatgacacagctgacacatatgaaggagctattccaaattggagagagaagagaccgatcaagtcattggtgacaggcaggccaattctgcttgcacttgaggatattgatggcagcccttcttttttagaaaaagccctgcgctttcttgagaaacatggaataaaggtggaaggaattttgaggcagtctgcagatgtggaagaagttgacaggagattgcaagaatatgaacaaggaaggactgagttttcagcagatgaagacgctcatgttgtcggtgactgtgtaaagcatgttctccgagagctgccatcatcccccgtgcctgcttcttgctgtacagcattattggaagcgtttcgtctggagactaaggatgctaggataaatgctatgcgttcagctatatctgagacatttcctgagcccaatcggaggttgctgcagagaattttaaaaatgatgcacactgttgcatctcacacttctgaaaatcgaatgactgcatcggcagttgctgcctgcatggcgcctcttctgttgcgtccacttctggctggtgaatgtgagatggatgaggtatttgatatggatggtgacgattctgcgcagcttcttgctgcagcaaatgccgcaaacagtgctcaaggaattgtcgcaactctcttggaggaatatgagggcatttttcatgatgaacacctcagatgttccttgtcacctgaatctcaaattgaagatagtggtactgaagcatcaactgatgatggtaatttggaagccaagggcaatggatttcatgatgcagaaaatgatgtagatcaagaaatggatgatgacaatggcgtggaacgtatacttagtgggaaattgagtgagagcagtggatatgctggcagtgacctctatgactacaaggcagtcaatgctgaggagtcagatgctgaacgccctgtgaagatgttggaaggaaatttgaatttgagcaaagtacagaacagcctttcaactgaaaatggttcagcgaatgtggatagcttactaagcgaaaataatccttctaacccaacagttggtcacgagactttgtctatgggggagatcctttcttcttttgatcctggaatttctgtaccgacccatagtcctgaatattctgtagagagacagacaaacaaaactaatggatctcacccacatgtgaagcggagtaacttttgggggaggaataatgcaaggaagggccaaaactctgaatcagtcgattcatctggagaagaagagcttgctattcaaagactagagattgcgaagaatgatctgcaaaacagaattgcaaaagaggctagagggaatgcaattctacaggcgagtttggaaagaagaaaacaagcgctacatgaacgcagattggctttggaacaggatgtctccaggttgcaagaacaactgcaagctgaaagggatctgcgagctgcattggaggttggcttgagcatgtcttctggacagttttcaagtgctcgttcgatggacgtgaagacaaaggcagaacttgaggagattgctctcgctgaagctgatgttgcaaggttaaaacagaaggttgcagagcttcacctccaactcaatcaacaacgtcaacaccagtatggctctgtagtagatgcaaatgatcgtcatcaccgcctccctggtcatttctcacagcaaaactttgttcaacaaggatttgatatgaaccttgctttctgcaatcaagagaagcagagaaatgagttcggtggagtcatcacaatggagaaacatcaagcagcatgtgctaccttatggttcttcgaggccactcacacgaaagctttcatttgatgcctcctcaagtgaatcaaggggcacagaaccctcaacaagtatgtcaacagagaacacctctgtgtccatcaacgtcccaaagctggcagagggcattgaatttgggaggcaaccaatggtcacatcctccactttggtagagctaacaactagactagatttcttcaaggagcgaaggtcgcaactgatggaacaacttcatagccttgatttgggacgtggatctgctccgcagggctttccattcaagccaccctctccttggaaccacccgaggtaggaggatgaccgtttgatttcatgattgtaaattcttcagtagtggttcttttctccccgcctggcgattgcagaaaactgcatatacgagtgtaaatgtattttgctcttcgatatggttttagctttcgtgttgtgcgaggatagctccttaagtgggatgtgtgatatagtcttttctgtataacacgttgtcatggagagatgccttttagacaagtttttccagtgttgtggcggtgtatatgtattttgtgcgacttggcgaagaaattgaataggttgactgcttgtatggccgtttgattcatgcctagggcaaaggacaggatgaggaaaactgggatcaaatgagaacccagcacgagtttataaataattcgggggtaggcttgaggctgtgttttattttatccttgcaattagttcccatcgccagtggcttgattccgctccgtgttgtttg

SEQ ID NO: 21354 - DNA, 3340 bp, Zea Mays
aatcgcgcaggcacgcgcaacgcaaaccacggccggacttgtctgctcccatcctcacctagtttcaaaatttcctctgttaaaccctacccacccgacgaatccctcgccagatccaaccagctcgccggaggaatacttcgggaggttagcgtggagagagagaagtaggcggctgagggagggttagagctgggcgacgccgtcgctgtcatggaagcgcaggcgacggcgacggcgacggtgaaggaggcgctcgcggcgctgtatcaccacccggacgacgccatccgcaccgccgccgatcgctggcttcaggagttccagcacacgctcgacgcctggcaggtagctgacagtttacttcatgatgaaagcagtaatttagaaactctcatcttttgttctcagaccctcagaagcaaggtacaaagggacttcgaagagttaccctcagaagcttttcgatcattacaggattctttatatgtattgctgaaaaagtttaataagggaccacaaaaagttagaacacagatttgtattgcaattgctgccctggctgtgcatgtacctgtagaggactggggagctggtggaattgtgaattggctaagcgatgaaatgaaagctcatccagaatttattccaggcttccttgaactgcttatagttttgccgcaggaaacttctagttataaaatcgcggctcgtcctgaaaggcgcagacaatttgagattgacctttgttcatctgctaatgttgctattgatttattaactgcttgcatggccattgatcaactgaaagaacaggttttggagggtttttcttcttggcttcgtttctgtcatggaatctctgcctctgaactcgcatcacatcctttggtccatttggcactctcttcattgaactctgatcaattcttggagccagctgtaaatgttacatctgaactgatacatgctactgtatctcatggctctggtgctattgctgagcgaatgccgctcattcaaattcttgtccctcatattatgggtctgaaagagcagctcaaagatccatctaaggatgaagaagatgtaaaagctattgctcgtttatatgcagacatgggtgaatcctatgttgacttgattgccacaggttcagatgattcaattcaaatagtgaacgcattgctagaagttacttcacttctggaatttgatatttcgtctatgacatttaatttctggcaccgtcttaagcgtaacctgatcaagagggactcttatgtatcatatggatcagaggtggcaatcgaagctgagaaaaacagaagattacaagtatttcgtccaaagtttgaaactctggtctctctggtcagttttcgagttgaataccctgaggactatcacaccttttccgaggaagaccgcagggattttagacatgttagatatgctgttagtgatgtgctacttgatgcaactgaagttcttgggggtgactcgacgctaaagctactttccaccaagctagctcaggcatatgggagctgcaacaatgagcagaaccccaagtggcaacctgtagaggctgctctgttctgtatacaagcaattgcgagatcagtctcaattgaggagagggaaattttaccacaggttatgtcactgcttccctgccttcctcaccatgagcagttgctacaaacagtttgttcaaccattggagcattttcaaaatggattgatgctgcaccagctgaattatctattctaccacctttagttgatattctcaataagggtatgagtacatcggaggatacagctgcggctgcttctatggcctttaagtacatatgtgaagactgtaggagaaagttctcagggtccctggatggcctcttccagatataccatattgcaatcagtggagttggtggttataaagtttcttcagaggactcgttgcatttggttgaagccctaagcaatgtgaaacaaccagaagtagttgctgaagctgtatatagatattggccgacactcaagagtatctttgatcaacgagcatgggatacccgtaccatggagtcaatatgccgatcttgcaaatttgctgtaaggacatgtggaagggtcatgggaatgacgattggtgcaatgcttgaagaaatccaaactctctaccaacaacacaaacagtcttgttttctttacttgtccagtgaagttatcaagatttttggatctgatccatcttgtgcgggctatcttactaacttgatacaaatacttttcagccatacagtgcaacttctcagaacgattcaagattttactgccagaccagatatagctgatgattgctatttgttagcatcaagatgtatccgttactgtcctgatctatttatacctacagaaatgtttcaaagattggttgactgtgcaatggctggtataactatacaacacagggaagcctgtaaatcgatattgtcttttctatctgatgtcattgaccttccaaactcatctgacgggggacagtaccgtaaagttattaacacaatcatacttcaccgtggcgcaacccttactagaataatgattgctgccttaacaggggcgctaccatctggtcgtctggaggaggtttcttatgttctgctgtcacttagcagagtctttggtgagaacatgctgaactgggcaagggaaagcattaatcttataccgccacaagccctaacagatgcagaacgtttgcgcttcttcaacaccatatctgatgctgcttctgggtccagtctccataccataacagatagatttggtgaaatctcagatgtctgtagacgaaacaaaacagtgcaggacctagttcagagtgccttgcggcctcacgatttgaccttcacagtggttccacaacagatgtgacaactggatgtctctgcaagttcatacaggtttgagttgcggcggcatacagttcagatttgttcagagcatagatagatcacgcggaatggtgatctaccatgggcctgattttgcgttggccggtcagcttgtttttgtaaagtgaggtggccatcgattttatcatataagcttataccggctgttgaaggaagatcaagtttgtgtaccctttatgatccccaaatgtgatggccttctggtttgatgatcagaacggctgcagtgttaagctcaccttgaatcagggcagacgtttgagctaatttggctagttgcatctattcgttaactagtgtgtcctcgacaaggtttcgtcccgtgcttgcaggatgacagcaacaggtagcat

SEQ ID NO: 21355 - DNA, 3290 bp, Zea Mays
tacagtattttatccagtaaagaagcaaaggtggagaaagagccatgaaaacgagcgctgctagctcacgttcctctgtgcgctggccggtgcgctccatttggaatccgagctcccccacattgaccgcctccgtaccagcgacagcctttccttcaatcatccactgccaactcaattttcttgtggaggccgggcccccatcacccgattcatccctgccactttgcatttcaggtttcagctcacctctcgcgttccttctttctccctcccgctcaccgccagcgccaccatgcccaccgagccacccattgctctcgccgcactaaactctccgccgtagccatcgcccttttggcagaaccatgtgtaattacaactgaagacgctagtatgagccaagaactacaggggaggtcggcggacccgatggcggccgatcacgcgctgccattggcgtcatcagcgccgtcctggccggtctcgacgcacccctccgccgcttccgccgccgccgccgcggtctactacttcggcctttctttcgctctagcgcaggggagagcttccggcgggttcgatcttggtggcgcgaggcggcgggggtgccggtggtcgcgggccatggagctggcgctgcaggagaaggtagccgcgcttgagcgccaggtcgcggagctccgctgtcggcgggccgaggacgccagggccaacgagaaggtggcgggaattttcgcgtcccacgaacagcggtggttcgccgagcgcaagtccctgcgccggcaggtgcacgccgtcgtcgccgctgcgcgcgcgcgcgaggccaagcgcgaggaggagaccgcggagctcaggcgccagctggaggagcagcgggacacagtggcgctcaaggacagggccctggagcaggaggtgcagaggcggcaaggcgcggaggagcgactacgagccgcggagaaggcggaggaggagctgcgggagcgcgccggcaaggaggcgatggagcacgccgcggaggtgcggaagcacaaggcggcgttcgtggagctcgtgtccgcgcagcggcagctggaggcggacctggcccgcgccgcgcgcctcgcggacacggcggaggccgagctccgggccgcgctggagcgccgcgacgaggcggcctccacggccgccgacctctccgccgaggccgcacgcctgcggcgggacgccgaccacaaggacaagatcctctcggcgatgctgcgcaagtccaagatcgacatggaggacagggagatgctggtgcgggaggtcaagatgtgcaaggccagacggaagcaggcggagctggaggccgaccggtggcgcaagatgtgggagtcccgtggccaccgccggggctcctccagatcgtcggcgcggggcgtggccgacctgccggccgggagctcagacaagctgctggccaccgacgccgccgtggcgtgcgccaccaatgaaactaagatattgttcgtggaccacgcggagggcgacgccaagaaggaccaccggaagacgccggcgaaggaactgaacgccattgaatgcgtcgaccgctatgctagccatgtcgtcgacgacaagcccgctgtggaggaataccaaggcctgcaggagtggttccagatggagacggagaagtacacggctctgatacaacaccggcacacggcggagatcgaggcgttcacggagcagctccggctcaaggacgagaagttggaggcgttccggtggcgcgcggtgagcatggacgtcgaggcggcgcgtctccggagccggatccacgagctggagggccgtctagcgcggcacgagaagcacagcgccgcgctggaggccctgctccaggacagggaaagcgagaacagagcactcgaggagcagctggagacgctccaagcgcaggcgcttggtgtggagatctgcacgccggcccgtggcagtggccaagacgacgggctcgacgaccagtgcatcgcgtgttcgcccgtggatgccgtccagagaacaatgtcatccggaagctcgcggcaccaagagggcgccgaggtcagcaagtatgagacgaagctggacgagctagtcaccctctccccagaagatcacaaggaggatgcaacagaggcgcttgtagtctcggtcggggatctcgcgtgcgccgtcgccgcggcagcaacgtccgtggaacacgagcgaagacatgatgccccggcgagccggcagtctttcaggtctgagatcgaggaggaggaggaggtgtacaccgagccgggcaatgcacacacgacaggtagctcccaagaggcgacgtctgagctcgcgctcgtggtcgtgccgcctgggcacaagagctctgcttggaagacggacatccacgccctagccgtgtcgtacaagatcaagaggctgaagcagcagctgcttgtgctggagaggctggccaacgaatgcaaggatgaggaagccgcggcgacgaagccgtcagggagtgaagccagctgcagcggcggcggcggcagcaggcagcagccgaggtcgaggtaccacacgatgatgtcgttcctcagcaagcacgtcaggcggtaccagtccctcgacgacaagatcgacgacctctgcgctagaatggaggagagcaagaggagcgcggggcggggcgcgggagaggagagccagagccagagcgcggcgctgggccagttcctggaggagacgttccagctgcagcgattcatggtggccacggggcagaagctgctggagacgcagtccaggatcgcggctggcctcgcgcgcgatcgctgctgctgtggcgacggagaagacggcgtggatatgaagaggctcatggaggtggctggggcgctgctgagggacgtgcagcgagggctggaggtgcggatcgcgcggatcatcggcgacctcgagggcacgctcaccttccacggcatcctccgaagcacgcgctgatatatatacacacacgcacaggcacacacacccgacgctgtcctccagacacagtaaggccccctttgggagggctcctggacggctccggctctagctctttgctggagccctcccaaacgcagcgtccaaaaacagctccggaggaggagctggagccaggaaacgggcaggagccggagccggaaattttggctctgcacggctccgttcgacacttcgcgtagtctgttcatctaccaagtttctttagtgtagttagcaagtagtttgaatgcagtttgaactcc

SEQ ID NO: 21356 - DNA, 1426 bp, Zea Mays
gaccttatccaccaacctccggtccacggtgactggccgcaagctcctcctctcccgcaaacacccacgcccactccattgctcctctcctccaacatcgctcacgcggtctcctctccccgctcagctccgctccgctcccggagacacgcaagcttcccgttcccgggaacgcgcactaaagatgcctccagccttcgccgccgcaccttcctcctcgatatgtggcgttcgcatcccaactgtgcgccgtttcgaagcgcaaagcacggtttccacgcccagatttatgcgtaatcgggtggcagcaaaaacacggtctacatcagcttggtccttgaaggctggcttgtgggattctctcagatctggccttttgaagaataatagcagtacagagacagtagagccaccaccagcaccacttgaagtggaagagcctttgcctgtggaaatagtactcctagaaagaacactacctgatggaagcacagaacaaattttattttcttcagccggagatgttgatgtatatgatctccaagccttatgcaataaggtaggatggccacgcaggcctctttcaaagatagcagcctcattaagaaatagctacttggttgctacactatattcaataattagatcttcagaaacagaaattcatttttctagatgatgaacatcttagtgtacttgtagaagttatttgacagagggagaagagaagaaacagctcattgggatggcacgagcaacctcagaccatgccttcaatgcaacgatttgggatgtccttgttgatccttcataccagggtcagggtcttggtaaagcactcatggagaaagtaattcgtactttgctccagcgagacatcaacaacattacactgtttgcggataacaaagttatagatttctacaagaacctggggttcgaagttgatcctcaaggcatcaagggcatgttctggtaccccagattttagcaccagcagccagatatatcgttcgaggggttgttgtacttgaagcatctccccgttctgaaagggtaattgacaggtcagggctccacgccctgatggatctcgcacttaatatttcatccttggtgagaagctgtaattttcttcaatgctaaaacgaccatgtgatcggctcaactctccgcacccctgttgtaaccataaccccaacaaaacacgctatttgtaatacccgtgtttcatacatgcgctctagactcttgccatctgtatgtaacgtacgctttcaaatttctacattcgaaatggaaaaaaaaactgtatccatcagttatccatatgcgcacaccatcagtttttactgtctcttggaaagaatttgctttccatcaacatccacttgctgttgctggaactgtaacttaagttgagtcg

SEQ ID NO: 21357 - DNA, 1584 bp, Zea Mays
gaaaactcctcacttggggttctgctgatgacatgggccaaagttatgtgactgctgggaagcacgaggagactccagaggcttttccacttcctagaggcgtcgcaatagtgcgggcagatgctggatgggctcactgtgttgcaataacagatgaaggtgatgtttatacatggggttggaaagagtgtgttccaactggaagggttattggagaccaatcttcagttggaaccaaggagaaggatgaaagacaaatggcaatggccactgaccaagtgagccccaggtcgcaggtgtctaggacaagcagcggggcagcatctggtccttctgaaagcagaggcactgatgatagcacaaagcgacgaaggttgtcttcagcaaaacatggccctgagagctcgacatccagtgacgaaagtctttccgcacccccttgtgttgtgacatttaatacaggagtgaaaatagtgtctgtagctgctggtggtcgtcatacattagcactgtcagatttaggtcaggtatggggttggggatatggaggagaagggcaactaggtctgggctctagaatccgaactgtttcttctccccatcctgtaccgtgcattgaatcagcactatacagcaaggatcgcccatcagctatgaaaggtaacaaggctgctgaaggacatgtcagtaaagtcttgggaaattgtgtgagggccattgcttgtggaggtcgtcacagtgctgcagtaacagattcaggagctcttcttacatttgggtgggggctgtatggacagtgtggacaagggaatacagatgatgttttaagtccaacgtgtgtatcgtctatcctgggatccaagatgcaagacgttgctgcgggtctgtggcacactgtatgtacatccgtagatggtgatgtttattcctttggaggaaaccagtttgggcagcttggcactggttctgatcaggctgagactgttccaaaattggtagatgctaccagcctagagaataagaatgccagatctgtttcttgtggagctcgccatagtgctattataacagatgaaggcgaggtattctgctggggatggaacaagtacggccagcttggccttggcgactcaatggacaggaacgtgccttgcagtgttcctgtggacgcttaccaccccctaaacgtgtcctgtggctggtggcacaccttggtgctcgcggactcgcctacttgaaacctgacaaagaaattaccttagattgacaattttgttaggaactcgtaggctcgtgcagatgcggtgatgctgcatttcatcgtgtacatacatggcagtgcatgcagatatgtgtattcattctttggcggtgcactcttcaacctgtgcaacgtagacaaagcttgtatcgcaccgcgtatacagttgagtaggattgcctcgacaaattgtgcatttcctccgttgctgctaatgtacaaaattccacaagctagacagggcaaccgatgcgttcctcgttgcagaagacagatctccaaaataattaatgtttgtgtatcgtgatggttgcgattccgat

SEQ ID NO: 21358 - DNA, 1628 bp, Zea Mays
cgatccccaccacttttttgtggtcacacgcgccggcttctccttcagtccttctcccgcttccgcttccgcgatggtatcctaccatccctcccttctccgtccatccgtcctcatcgcccaggccagcggcatcggccggtgcccaacactcaacgccttcctttccacccccgtcgtctccgcggtgccacttcgcctgcggcctctgcgcgccgccgccggtggagcagcctcgccggtcagtggcgatggaggcaaacgcgctgttccgccgcctgccgcgctgcttgtcttcgcgcgtagcaacttcctcccgcttgctctcgttagtggggtgatatttggtctcctagatcctactcttggatgccttgctcacaaatactctctgtcgaagttcagcacttttgggatattcattatgtcaggactgaccctgcgaacgaaggagcttggtacagcattagaagcttggcctgctggattatatggattaggatctgttttgctctttacgcccttcctttctcaatttatcatgcaagttcagttctcccctcgtgaatttatcactggattagctatattttgctgtatgccaacaacattatcaagtggagtcatactaacacagcttgttggtggtaattctgcacttgctcttgcgatgacagttgcatccaatttacttggcattataatcgtacctctttctcttgcaagatacatcggcactggagctggggtgtctttgcctactgagaagttatttagaagtctggtcaccagacttctaatccctcttattatagggaaggtattgctgattttgttgatggaaaccaacaaggattttcagttggaaacgcggtgcttcttagcctagtcccatggattcaagtaagtaaatcaagatcactgatcttatctgttcaagtggaagcttttgctgctgctattactgttggagtgcttctacatattgcactgttggctttcaacattgcaacgttgcatatcttgtcacatcttgaaaagaaaggggattcagtctttgcaaagaaagagtacacacgagctgtcattttggtgactagtcagaaaacattgccagttatgataacagtggttgagcagcttggaggagccctcggggagtccggacttctagttatcccttgtgtttttgcacacattaaccagatcattatcgattctatcatagtaaattggtggcgccggagggatcaacaatttagtaatccaaagtaactccataattcaattttggcgtgcaaaacagagaattagtcaggaattgctgactgcgaggctgattttgtgaagatgtaattgtacttgtccagcaagttcagtaatggaagaattgctgactgcaaagctgatttcgtgaaggccgttatatatgtcttcaaagcaggaaaatgaattcatctccaattgacaggcttatttgtttgaggcctgagtgggtgctgttgtagtggccgttatgttttccttcacatctaaaactgaatctccacataaacattattaaatgtccagatttaggttaagtaaaacctacgcccctctttggtagtgctccatacggatctagc

SEQ ID NO: 21359 - DNA, 1482 bp, Zea Mays
atggctccaccaccaccgccgtccttgctttccccacgggtagaagaaaaggcgagcgagtaactgtgactgagtgatgagtatccatccggtccggcagcggcagtagtagcatttggtgacgccgattgacatggatctctagcagtagccggcaccgagcagtcaccccaccccagacacacacaactactcctagaagtctacctgaagtgacgggtgaggaggcgagagccgagaggtggaggatgcgaggctgctagcacgtgcactacttgagtcagtgttgcctgaggtagccgcgctgaggtttgagcgggagagggacgcagctagaggcggggggctctatattacaatgcagcagtgaagaccatggagtgctcccgggggaggcagaggcagatgcagaggtggaggtggtgtggcagatccatgctaaagctggcggggttgtgcgtcgccgttgccatctgcctgtgcggcgttcggtcctgggcttgcagtggcagcggcagcggctgcagggggagtactgtgttgctccgttcagagtccttgagacgaggacgagcggcagcatcttgcggtaatcaggggtgctacacgactgggcaatggcggcggctgctggcggacggtccggggtcatacccgccacggtgcacgtccaagtgcggcgactgcagcccgtgctacccggtgcacgtggccgtgccgccgggcgtgcctgtcaccaccgaatactacccggaggcgtggaggtgcaagtgcggcaaccggctctacatgccatgagcccatgagcgagcaaggaggcggccagccggtgaagaatctctcgagagcgccggccgctggggccggcgctgcattattgcgccgggccgggtgcctctcgcctgcgcgcggtgtcgtcgtggtcctcgccgcgcgcatgggcgggatctgcgctctgcagcgcgcgtggtgacctaccacaggcacactgaccggctgccggctgggatactgagagactgcatgtctttttccgtgccgcgcgctggaattcgcacggccctaccacgagcacgtgccgtacggggcgtcagcgcgtgctggatcgaagagggatgcgagctgagagagcgcgcctgatgagaggctgagacgagacctgatgcggcccacacctgcacgtgtccgtataatctgttcagagtgttcataatcgatcttttcaaatttttctcaatgccgttttccgcatctgagtcctgttacacaaatttcctggtgaactctgtagccaaatgtagtgttgccgtgttggatactagcactatatatcgtggcagcatggaacagttcctggttggtctccccgcgctgtacccaggttcagtataccaataagtaaaagcacatagatttggaccgaaaaacttttgagatggctttctgatttatgtttatgtttatcatagcactgcctataaa

SEQ ID NO: 21360 - DNA, 1015 bp, Zea Mays
tgtagttgtccacaacaggttaacagatcaaagaaggataggaaggtgatggctcagactggtgagatccggtgcgccatggatcacatcctcgaggccgagaggaagggcgagatcaaccacgacaacgtcctctacatcgtcgagaacatcaacgtcgcagcgatcgagacgacgctgtggtcgatcgagtggggcatcgccgagctggtgaaccacccggccatccagcacaagctccgggaggagctcgcctcggtgctgggcgccggcgtgcctgtgacggagccggacctcgagcgcctcccctaccttcaggccatcgtcaaggagacgctccgcctgcgcatggccatcccgctgctggtcccccacatgaacctcaacgacggcaagctcgccggcttcgacatccccgccgagtccaagatcctcgtcaatgcctggttcctcgccaacgaccccaagaggtgggtgcgccccgacgagttccggcccgagcgcttcctggaggaggagaagtccgtggaggcccacggcaacgacttccgattcgtgccctttggggtcggccgccggagctgccctgggatcatcctcgcgctgcctatcatcggcatcaccctgggccggctggtgcagaacttccagctgctgccgccgccggggctggacaagatcgacaccacggagaagcccggccagttcagcaaccagatcgccaagcatgccaccatcgtctgcaagcccctcgaggcctagaaatcaatgcgtgtttcctgcacgcgcccccgcagatgaagcactatgtattttctcttttttttgtgtgttgtgttttttttactaagaggagatgtatttcttgttcgtaaaatgcacttagtcaaatggatcgagattatgttgatcattaaacaccaaaatcacttagtcaaacgggtcgggatccattttcctcacaatgtcaacctttgactgatgacaatataatcaaagcaagcaaatattaaat

SEQ ID NO: 21361 - DNA, 641 bp, Zea Mays
ggcccggcccaaggtccaactacgagctttttaactgcaacaacttaaatatacgctattggagctggaattaccgcggctgctggcaccagacttgccctccaatggatcctcgttaagggatttagattgtactcattccaattaccagacactaacgcgcccggtattgttatttattgtcactacctccccgtgtcaggattgggtaatttgcgcgcctgctgccttccttggatgtggttgccgtttctcaggctccctctccggaatcgaaccctaattctccgtcacccgtcaccaccatggtaggcccctatcctaccatcgaaagttgatagggcagaaatttgaatgatgcgtcgccggcacgaaggccgtgcgatccgtcaagttatcatgaatcatcggatcagcgggcagagccctcgtcagccttttatctaataaatgcgcccctcccggaagtcggggtttgttgcacgtattagctctagaattactacggttatccgagtagcacgtaccatcaaacaaactataactgatttaatgagccattcgcagtttcacagttcgaattagttcatacttgcacatgcatggcttaatctttgagacaagcatatgactactggcag

SEQ ID NO: 21362 - DNA, 2405 bp, Zea Mays
cactcccccacttcgacccgggggcgccctctctctgtctccggaacccttccagccttctcgctcctggaacccagacctcaacccttccgtccccgaccatcgacccccgaaggacctggcggtgtccagatttccagaagcatcccccatccagcccccggcgatcgtgcggaacctggcggctggggacgcgggagaagcggcgagggctagctggagatggacacggcggagaagatgcggtggcccttttcggacggcagcgtcaccgatctcctggacgcccgcagcctccacggctcccccgacattaagaaaaaagcacagtttcattcttctctagtgcaaaagcttgctttggaaaaggagatggagggtcatgttggttgcgtgaatgctatcgcgtggaactcaagtggttcgcttcttgtatcaggatcagatgacactagaattaacctctggaattataataatcgagagctggtgcatgatattgacactggccattctgcaaatatcttttgcaccaagtttgtccctgaaacatgtgatgaagtagtagtttctggagcaggagatgcagaggttcgtgttttcaatatgtctcgattaagtggcagaaggcctagagaaatttctatggaaccaacaatggtttaccagtgtcactcaaaaagggtcaagaaactagctgttgaacttggcaatcctaacgtagtgtggagtgcaagcgaggatggtactctgagacaacatgattttcgggagtgtagttcctgtcctcgtgcaggatccgctaatcaggaatgtcacaatgtgcttcttgatctacggtgcggagcaaagaagtctttagccgatttacccaaacatccattggcactgaagtcttgtgacattagctctgtttgtccccatcaaatcattgtcggtgggagtgatgcatttgctaggctgtatgataggagaatgcttccaccattgagctcgtgccaaaccaaaacgaagccgccaccgtgcgttaaaatgttctgcccattgcatcttgctaacagtaagaacagaaatggatcaaaatgggcactcctaaagcgaatacacatggaaaattacgctcattgagtgagatattatttagacctgatgttggtggttcatcagaggaggggcgagaagattcagattatgatgatgaaatggagttggactatgagacatcagtatctggtgatgaaagccgagagaatgatcaagatatcttacggggcagattaagttaccgatttcatcaaagagaggatcaaaccaatgaacacactggtgagaatgggtcaatcgagttcgctcaaaacgatgattttgcttttcagtcagatgttgccatcgatatgaaacaaagatatgttgcacactgcaacgttggaacagatatcaaacaagccagctttcttggtgagcaaggggagttcattgccagtggaagtgatgatggtagatggtttatatgggagaaaagaacaggaaggcttattaaaatgcttgcaggggatggagctgttgtgaactgcatacagtctcatcccttcgattgtgctgttgcaacaagcggaattgataacacaataaagctttggacacccgatgcaaatgctacatctatggttgctggaccagaacttgatgtattaagtgccatagagaataaccagcggacgttatgtcggaagcgtcaaattgtactgccttttgaatttttggaacgagttcggatgcgagagttttcagaaagtttcgagtgtaaccagagctgatttactatcgctggagttgctgagcttcttcaggaaaagggtaatagttggaagaatgatatcatccaagctacaagcagcctatgtttgaagtagtgaaatcgcaaggccttgctacgaatagagtgtagacacacctggatagataagcaggtgtgctggtgctgaaactattacttgagatgtcaataaacattggaattatgttgtggtttggggtggtataatgattcatacgtgtgtaatgcagtgtggattcattccctttacagattgtagatataggtgaaattctgcagtaagtgaaaatcacaaatgtaaatgtgcggtattgtctctgcgtgccgcaggcaggtcatgctagtttgtggttgacgattggggcatatcttcccgtatggcttgttcaattatttctaatacatacggattcctaatacatggggattggaagattgggagggattttgatttactagggatttaaatccacccaattctcttaaacctttagtctttgtttgtttattttaattttatatggattgggtgaaattaagatgtattttgatttgttatggatttaaa

SEQ ID NO: 21363 - DNA, 1841 bp, Zea Mays
gagaaggaaaaagcattccaacgctgcatctgcactgcacgctacctgcgggagctgagccgtgctcggtttggcgaaattttgcacccctcttgtgctaggaccacccggttcaagctgttcctcgctcctcggaaggatcaggtcttcaccggtgctctccggcgccggatccaggtttgtttcggcgagaggtcgggctcttggcgggggccagcccagcttcgagctcaatttgccggcctgagatggaatcgcgactgcggtgccggtgccggtggctcagctagtcgcgtcgagtcgacgcgcgattcctgccatttgggtgggccagcctttcctggcaatctcggggggcgtttcgcctcgctgcgtggcagaaaggtgtgacgtgtgatgcatcccaaggcacgaatccacgccgacccggtgcgcgaggtcgaccacttcgactgcctgccggattcgctcgtcctgctcatcctgaacaaggtcgaggacgtgcggtcgctcggccggtgctacgccgtgtccaagcggctctgtgggctcgtttccctcgtccatgatgtgtatgtcaagattgaccgcgtcgttgcggtcgacggcgacgccgagggcacgctcaacctgtcctcgccgaagcctcggagcatcttctcgcacttcctgaagctgatgctcttcacaatcatcaagccgttccacaacatgcgcagccctaatggtactgcgaggccattgttcccgcagctctcgcagcactcaccggcacaggtgctcaggaacttcacgcacgtcaggaaccttcggatcgagctcccctctggggatgtgggtactgaggagggagttctcctgaaatggcgagcagagtatgggagcacacttgagaattgtgtgatcctggggggtacccgggttgaccgcaagcctgttggtggagagcatgagccagctttggaggacaatggaagcatgccagagtctttctataccaatggtgggctgaaacttcgtgtcgtctggacaatcagctctctaatcgcggcatcaacaaggcactatcttctccgctcaatcatcaatggccatcccacactacagagcttggtactgacagatgctgatggccaaggcacattgtgcatgggggcaaagcagctggaggagttcagagagaaccagttgtcgacctcggcatgttccaacaggactcaggtcccagcctgcaacatgaagctcaagtatgctccatatgttgaactgcctggtggtatggcgttgcaaggcgctactttggtggctatcaaaccctcacctgagggaagcaatggaagccaccctaaccgcaaggaagccgaaggattcgtctttggagcattcgatgggccatttaaagctgctgtgaaggcgctgatgaagagacgcacttaccttctggagatgaatggcttctaggaatcttggtatctagcttgttggtgctatgcatggtacatttagctgagtgtctcatatgtgtaatattcaagaaggcaccatctctagttttgatgcttgctgtctgctgttttagctatttgtacagtgttaacatttggttagataaagatcatatcaagtcctctagcgcaatagtgaatctctctacagttcactattctggcccatgatgtcctgtgtgatatggaagactgaagcatcctactgttaactcttttcaagtgaaacagccttgtgaccatctaatgtgtcagcactgggattgagatattcagatgctctcaccagtggacacaagttattatatatataatgtacatttttctcctctttca

SEQ ID NO: 21364 - DNA, 4456 bp, Zea Mays
gggttgtacatgttccgctggttattgatccgcgatttgctggctcattcagcagcatcctgattcgttaggcgtgccgcgtgagccttgctcgctccaatcgatttcgtcgtcgtccgctcgtcgctagctccttcttggtcgctccttcgcccctgctacaatcgatttcgtcgtcttcagcgaggagctggggagtgattgaacgaagccagcgctccctccattgtcgccccgcagatcgatcgaagtcagcaaccagatcagaaagagcaaaagaggcgcccgagtctctacggcggaaagccatggacggcgccgccaactggcgtcccacgcagggagccgaccctgccaccgtcgctgctgtcggcggcgtcgaccctaacgcggctgcccccaccggaagcgactggcgcacccagcttcagcccgaggcgcgccagaggatcgtcaataagataatggagactctgaagaagcacctgccagtatcagtaccggaggggctgactgagcttcacaaaattgccgtgcgatttgaagagaaaatctatactgccgccaccagccagtctgattatctgaggaagatttctctgaaaatgctgtccatggaaagccagaaaaagacacaacagaaccctggaaatgctcaagtgattccaaatcaaaaccctcctggtccagtaatccagcacagtcatcagctatcccgttgatgtctcagcaacagacacggcagccaaatgcttctacatccgttcaaggttctcttcctagtgttggtcagaacttgtcgagtgtcagccagacattgacgctgcagaatctgtctggcatgccacaaaataccatgaacaatggtttagcacaaggtactccacaagatatgtatgctgcacaaagacaaatggcaggtaggcagcagcagcaacaacaacagcaagcacataatcagtttatgtatcaacagcagaaattgttgatgaaccagaaattgcagcagaattcacgtatgcaaccacacattcagcagcagcaaactttgttgcagtcaacacagatgcaatcttcacagcagcccatggtgcaaatgtcatctggccttcagcctgggcagattgccattccacaaactcaatccatggcgatgcagtcagctacacagagtggtattcaacagaatgcactgaattcggtacaacaacctgtgcaatcgttactccagcagcctacaccgtctgtggtaaggcagcagcaacatccacagtccatgcaccagcagtcttctctgcagcaaactcaaccaactcaacagcccaacattcctttgcaacagcagccacaacaattaatgggccatcagtcaaatttacagcaaaatcagttagtgaatcaacagagtggtgctgtggagatgcaacagcaacaaaggctaccagttcagtcaactaatcttttgaatatgcatcaaacgcagcagatgatgaaccagcaatctatgcccttgcaccagccacaacaattggcaaaccagggaaatgtgtcaagtctaaatcagcagcagcagcagcttcttggaaccgtgccaaatgtccgtatgcatatgttacagcaacaaaagccaattcagcaaccacagcagcaacagcatgctcagcagacatcaatgggtttgatgcaacctcagtctcagcagaatcagcttcagcaacctcaacaacatatgatgtcgcagttccagtctcagcctaatcaaacgcagcaacaattgggaatgcaacaaaggctccagacttcagctggcatgctcttgcaacaaaataatattgatcaacaaaagcagtacgttcaggcacagaaggtcctccaagaagcacccagtacatctgtggattccactgctcaaactggtcatccagggacaggtgattcgcaagaggagttatatcaaatgattaagagtttaaaggaccaatactttgcggaattgaatgatgtgtacaataagatatccatgaagatacaaaatattgacaaccacatgcccgctcaaaagtcagcggagcagtatgaaaggctgaaaggctttaaaggaatgttggagcgcatattgcatttcctgcaagctaacaagagcagcattcagccaggttttagggaaaaaatctctattttcgagaggcaaattctcagtatcatgagttcacaaagaaggaagcctgtgcaggcacctggacagcaaacgtttcagcaatctggtgggcaagctcctagctctaatatgtcacagcagcatcagacttcccaaggtttgcagcagcatgatagtcatactaatcagatgcctcaagcaagtttaccaagtatgaacacaggagtaccgacctctggagcacctggcattcagcatgtacctgcgcctcaagcatcaaactttggtgttccaacaacacagcaaaatgtcacaaatgcaccgcaggctgcctctaatccggagaatgctcagggaaataattttaatcctgtgcagcatggttcaatgggtactgcattgcaacagggaagcactggtcccatgcagggtgcattgaatgcacagcatcagtccaatagtaacatgatatccaacaatgcaatgagtacaatgcagactaataccaatgccatgcaagcaaacgtgaattcattgcagcagctaaagcaacatcaggagcatcagatgatgcaaaatcagcaaatgaagcagcgtcagcagatgctgcagcagatgcagcaaaagaaaatacttcaacaacagctcccaatacaacaactacagaaacaacagcagcaagggccgattcaggttcaacaacttcattctggaaatgatgtgaatgagctaaaggtcaggcaaggagctgcaatcaaatctggaatgtatcaaccgctgaaccagcgtaactattatcagcagataaaacggggggatgtctttccaatttcttctccgcaaaacctccaagcatcgtccccacaaatttcacactattctcatgttgatcagcacagtctgttgcaatctcaagtgaaaaccgggacaccgttgcattcagctaactcaccatttgtcccatctccatctcctcctgttgccccatcaccggtcccactggattcagataaaccactctccaacctatcttcactcactagtgctgggcaggctggacatcagcaaacatcccttgcacctctaacacaatctatagctgttaacacaccaggtatatcagcgtcacccttgcttgcagaattcacaagtgctgatggaggtcaggttagcgtaccaactcaagttccaacaaaatcaagcgcagcagaaaggcctctcgatcgcttgcttaaagcattgagaacaacacagcctgagtcccttagtgctgcagttagcgatattggatctgtcgtgagtatgattgacaggattgctggatcagcgcctggtaatggttccagagctgctgtgggtgaagatcttgtcgctatgacaaagtgccgcttgcaagccaggaacttcataacccatgatgggagtggtgcatcaaagagaatgaagcgggacacaggtgctatgcctcttaatgtgtcatccgctggaagtttgaatgacagcttgaagcaatcatatactgttggcactccagagctacaatcaactgcaacctcacgtgtcaagtgtcaaagggctgaggtaaaccatgttctgttagaggagattcaggagataaacaaacagcttatagatacagagctccatgtctctgaggatgatgctgagtccttcactacatctgatatggccgaagggacagtcattaaatgcacattcactgctgttgctgttagccccagcttgaaatccatgtttgcttcagcgcagatgagtccaattttgccgttgaggttgcttgttcctggtagctacccaaaatgctccccggtgcttctagacaagtttcctgatgaacaatgcaggaactcggatgacctgtctacgaaggccaagtcaaagttcagtgtgttgctccggggtctagctgagcccatgtcattgcgagaaatcgcaaggacgtgggatgcttgcgcccggaaagtgattgcagagtatgcccagcaaactggaggaggcagtttcagctcgagctatggttgctgggaaagctgcgttggcgcttcataagtttattgtatctattactccgtagtatatttattattctttattacactaagcatttatgtgttgagcaaaagaaaataacagtttatcttccttttggtatcgagtcactgttagcttgataaataagatcgtgtacagtacagtgtatggagcaagcttgggtgcttcagcccggttaatatttactatcttgtatgctttgcctctacttacataacttgcgcg

SEQ ID NO: 21365 - DNA, 831 bp, Zea Mays
gatattttgaaaatattacacacagagttattaatagagataaacagagatcagcacgtacaaagttatcccgagtaaaaattcttcatgagtgtcgactgctgcgggagcggctacaagactgcagtgctaaatttctagcagaagaacaagacaactttactattgatccatcatccttgcctgatgcattagatcttctagcaacatcagacaatagaatacgcctactcgttgctgaggctcaacttctagcacgagatgatgaacaaggctcttctgatggtggcgacgattctgatagtagatcctcattaactatgagcagtgaagatgcaaaagttaccgatgaagatactactaaaatgctttctgatctgctcattgacaatgcgcagctgagactacgcctcaatgctgtcatccgcaatgctgtaaatacttccgtgaagccagagaaagaaggtagtggcgaggttctccccaaaaagacagtccttaactggttgttggacagatgagagaaccaccaatatatatttatgtggattagttcttcaaacttacgcggcttgaccaaaattatatgatgagcgtacctatagtgccagggtagcatcaggaattcaggataaaaccttccctccatggagggaaggggagcctggaagcctttgtttctgttgcacgattttttatccacgcatggaagtcacggaggatggtatatatagggccacggctttggctcctaaaaaatgactgtctggcttctcttccagaaactctataaaagctagtgttttttaacaaatcgtttggcaaagcggg

SEQ ID NO: 21366 - DNA, 1412 bp, Zea Mays
ctactactccatttggcgcctatgcctatcccatccgtttctccagtttcgtcttccccgctcgctgcagctccactcagagcctccgttcccaactcgaatctccccagatcctccgcatcatctgaaaacccagatgcttctcctccagcccagtgcagtccctgcgcctgctctgcgggggaggcctcggccacgtcggcggctggtgccgcctcccctcgcctccgcgcccgcttccatcgtcgtcagctccgacgaggacgcattcaccaggtgctccgggtacctgttcgaggagggcgcggccaccgagtcggagctccccaccgcgtacgacctccccggcatcgcggccgtgtaccgccgccgcccgctcctcgtgctccgccgctccctgcagatcggcacctccttcggccggtggttcgcgctgcggtacctcgatcgcgtcaacgagcgcgccgacgacatgttcgagcttcgggcggctcagctcaggaggatactcttggagcttggcccggcatttgtgaagatcgcacaagcagtttcgtcacggccggatgttgttccacctgcataccttgatgagctctcactacttcaggaccgcatagcaccattttcaaacgatgttgcttttaatattatagagaaagagcttgggcttccactggatatggttttctctgagataacaccagagcctgttgctgctgcatctcttgggcaggtttaccaggctaggctccgctccagtgggaagattgttgctgtcaaagtacaaagacctggagttcaagcagcaatttcattagacatatatatcttgaggttcctagctagtcttgcaaggaaggctgccaagttgaacacagaccttccagctgtgcttgacgaatgggcatcaagcctattccgggagatggattatagagaagaagcaagaaatggacttaagttcagagaattgtttgggaaatttagagatgtgtcggttcctgaaatgtatctggaacagacaagaaggcgagtccttatcatggaatggatcgagggggaaaagttatcagaagtcagagatcaatatttggttgaggttggagtatattgttcactttcacagctattagaatatggattctatcatgcagatccacaccctggaaatcttttgcgtacagttgatgggaaattagcctacttagattttgggatgatgggagaattccgacaagaacttcgtgatggatttattgaagcttgtcttcatcttgttaaccgtgattttgatgctttagcaaaagactttgtaacccttggtttacttcctccaactgcccagaaaggtgaagtcacaaaggcattgacagatcaggagtcatgtcatattacttgtccaattggaa

SEQ ID NO: 21367 - DNA, 408 bp, Zea Mays
ggccacagaacaggaagtgcaaagtgtcgatacacaggcgcgaagacaaggaagaggtgcaggaaagtaaatgcaaaggttggagcaaaacctaaaatctatgttgatgacgatgatcaacgcggggagtcttctgtaccaaaacgacgtagatgacctatttttgtagagcaagttgaaaatgcaagcacgacaccagatgacttgcaactacatgagggaactaatgagtcccaagaatgggctcaatttgcttcatcttctggaaagaagctaacacctaggaggaaaccgattgtccaagttgaacatgatactaagtcaggtgaaagacgaccgtcggatggtgatacctttgaggagttacatgcaagaactgcaagtggtggacaaaattgttaatgattc

SEQ ID NO: 21368 - DNA, 214 bp, Zea Mays
gtcacgcttagcgaatagcgttggctgatggctacaggcctcgagagggagcgtggtaagctccacagaattttctgagttattgtttgtcggtgtcggtcgttgctgttgaaagggaatggattgagggtggtggggctttggagcgtgtaggcttgggatttgtggttaattggctgtgaataaaggagagattgagagggacagaggagga

SEQ ID NO: 21369 - DNA, 347 bp, Zea Mays
cacagtcatacgtacagcttctgctcggagtagcggtggaatcaaggcattgcatcttctagcttccaggcactgccctacgtaccatgcgtctcgtgtccaggatccaatccgatagcgcacgccgtatcgagagacgcacgtcacgcaccgcctggatcggtcgcggcgctacggttggcggccgggcagttaagcacgacatgcccagcgccccagggaccatgtgttccgacgggacgtgcggggacccggtcgccgcctgtgtgggcggccgcgagcacggtgtccgcctgcctccgggcaggcacctaccggtggcgcacactgcgcctgcctgccttgcg

SEQ ID NO: 21370 - DNA, 4449 bp, Zea Mays
ggcccggccaccccagcaggcttgggccgtggtctgctactctgctcgccctctcgcctcacttccactctcacccaccaccgcctttctccttcccccgcgccgatcacgccacggcggccacgccatagggctagggtcggagatccgctcgcccggtgatcgattcgcacctcctcctctacccggatttggaggttagagtaatgaaataaaatgctgctcaaaagcaagtttaagttggccacaaccattggcatcgtgctgtcgatgctatcgctgctcgtgcacctttttattgctaattattcagctgggggcattacaaattacagcatgcacatggacgatatccttccatttggactgaggcctcgaccacggaggctgtggggtccattggtcccactcgatcacttgcatccttttgcgaaacctagcaaaccatatgctgctcccagtaagcataatggttttatttatgcaaagatatatggtggctttgagaagatacagtctacaatctgtgaccttgttgccgttgccaggctattaaatgccactctggttattcctgagatacaagcaacaactcgtgcaaaaggcataagtccgaagttcaaaagcttttcatatatatacgatgaagatcatttcatacatgcactttccagtgatgtggttattgtgcatggcttgccaaaggatctcagagaggctaggaaaaagataaaatttcccacactatctcctaggaattctgctactccagaatactacatcgaagaagtattacccagacttgtaaaatcgaaagttcttgggataattgttaatggaggtaattgtcttcagtcaattctccctgcaagcttggaggaatttcagaagcttagatgcagggtagccttccatgctctaaggttgcgccctcaaattcaggctcttgggagccaaatagtaggaagattgcgagcatctggccgtccttatgtggcctatcacccaggactgcttagagatactctagctttttatggttgcgctgaactgttccaggatattcatacagagcttattcagtatagaaggaatcagatgattaaacgaggaacagtaaaggagcagctagcagttgattcagtgtccaggaagatggctggtttgtgtccactcatgccagaagaggttggacttctacttcaagcagtaggttacccaccaactacaataatattcttggccggttctgagacttttggtggacaaagaatgcttattcctctacgagctatgttcgctaacctagtagaccgcacttcattatgtagtcagagggagctgtttgatttagttgggccagaagatcctcgaaccccagatttgccacagcctccacctcccaaaagtgaaaaacaacttattgaagaatggaggagagcagggcctcgtccaaggccgctgcctccacctcctgcaaggccattctatgcacatgagaaggaaggctggtatggttggattggtgagaatgacacagaaccggatgcttcactgatcgagttcaggaggcaagcacaccagttgctctgggatgcacttgattattttgtttctgttgaagctgatgccttcttccccgggtttcacaatgacggtagtggttggccagactactcaagtttggtcatggggcaccggttgtaccaaacaccttccggtataacctacaggccggacagaaagattattgctgcactgtttgaagatgttaatgatcatcggtatcatccacctcggaattggacaattgctgcacgtgagcacctcaacaggagtgcaaatgtggagggcgtagtgtcatcagctatgttatcaagacctgtatcttttctcgcccaccctttgccagagtgctcttgcagcacatcgaagtcacctgctgttgaaccggtgaaagatagcaatggcagattcctatttggaggtgaggaagagtgtgctggttggatggcacgcagccctgcgatggcgtctgccaggaataatgaacctcaaattgaggactatgaggataatttgcctgaagaaggctctagttcagacatgcaggaatctgacagaagtgactcgaataaatcttcggagcaagatgaggagatggatctggatgattagagatatgtggagcatggatgtatggcacacctttcaaccgctaccagctccaggtccaggctactcgaagacaagcatacatacgctcagaatctcctggacaggtgggaatcatcttgcatcgcgcagcgacacatcagcatctggattagtcccaggatcacaattcacaaggtcatccagcgtgggagcttgcctggaccgtactcggtatacaacaaggctttaatacgaaactaacactttgttcccttcttcattcacgtgtcattttttgtgggacaacattgcaattgtttgtgagttttattgatcgccgaagagtgtgcttacacggatggagttggttcttctgcatgacctgtgctatggatcagaaaatcgtgtatatctactttggctacacgaaaagtttgtgtttcacatgagaagtttttgagtgaaaaaccttctctgaattcggctggctgctgtagtcggatcaaactgttgcatcttacttgttcttgttcatacagggagtgaacagaatgcatcgctgttcagtatatcgaacgcaggattccaaagtttggacatttcaatgcttgtaataaccagtggcagatcttaaaaaggaggccatgtctcctccccagttttaaaacacacatctttgtcaagctccgccactgcctataactgttaaatacatctcaataatcaacattggccatgagacttgacaaattgagattcttctgtctgccaggtcatcatgctattcatttcaatctcttctcatcccaagagcatcaagtgtatgttgctgctttgtgtgaggaccgaattgaaaatggtgtgccacttatacaaatctggatgggtatgcttgctgtcttagatgtcaaaagtgagcttctcgttgttcatggcagctgctacaacacaatggcactataggaaaactgaatataggaacacgctactcgtcgaacacaaagttaggatcctcaacaacaaatacaaagggaggggctgggagagcgcggcgcgcagtggaccgaggtcatctcgtgggagccaagggcattcgtctaccacaacttcctgtctaaggaagagtgtgaatacctaattggattggccaagcctcacatggtaaaatcaacagttgtcgacagcactactggtaaaagcaaggacagcagggtccggacaagttcgggcatgtttcttcaaagaggaagggacaaggttattcgagtaattgaaaagaggattgcagactataccttcatacctgtagatcatggagagggactccaagtactgcattatgaagtcgggcagaagtatgagcctcactttgattattttcttgatgagtttaacaccaagaatggtggtcagaggatggctactcttctgatgtatctatcagatgttgaagaagggggcgagactattttccctgatgcaaatgtgaacgtcagttctttaccatggtacaatgagctttcagagtgtgccaagagaggcctttctgtcaaaccaaagatgggagatgcacttcttttctggagcatgaaaccagatgccaccctggacccattaagtttgcatgggggttgtcctgtgattagaggaaataaatggtcgtcaaccaagtggatgcatatccacgagtacaaagcttgagccttcaagactcgagagtcgagcgtaccaaagatggatctctatgcatgtgacttggggctgtctactgggttgacacccatgtatgctttacagacccactgaagctgtattctttgctcctttgttggaggggggagaattgcagataataggggccaataagcaggggccttgctcatccctgcagtatttttgggtctgatccttgctgacttggcttttgtcttttcttttctttttcttaccttgccgtaccccagctatagaggaatggtgtagtgtctgggggcatagagtttgagattttgttttgtgccacacctgtgttactagtataagctttggtactaatgaataacgaggcctaagctcacatctactacatgaatggtgtaatattgttgaagatagaaagcatctaatgttcggtggttttcgttatggtttcggttattacgacacaagattattgtgacaaaaagtgtgttttgagagataatagagctcacatctagtacatgaatgttgtattactgtttaatgatgacacgagattatttgataattatgactgaaagtcgcctagag

SEQ ID NO: 21371 - DNA, 193 bp, Zea Mays
taacagaatgtatagagataaatgtcacaatatcataaaagtaattattatatagcggaagtcttacaaaataaaagataaatataaagcgaactaaagtccatccttggcgccataaagtcgtctaggagacgccacctagatcaagtcgaactcctcgttgtgcggctcctcctgggccacctattcttct

SEQ ID NO: 21372 - DNA, 2577 bp, Zea Mays
ccctatttttgtggggaatgccggggtgggggcttgtgatttttgagccctcgttctagtgcttggccttttggggagtgttgatgcggcgttatggggcgatggatctgttgtgaaacgcgagctcgtagcactagcactagcttgtccgggaccgggagcctgcgagaaccttttgtagttctattgctaacgtggccaattgatctttcagatcaggagctggggattgccctgccactctgctgaaagttttggagaagttgtggtgtttccctgcctattagagtctgcgcttctgtgttcctgatcaactgctactacgcgattgttgtcttctcaatctgtctggccaagcatggctggccagacgtcaaaggcaaaggaagcaggaaaagatgacagagaagaacccggagctgaggcggcgaaagagaagttagtgccgtctcaccagcagcaagagtctccagcttctgtggtggacaaggattcttcaggtgtgtcttcagttcctggtgatgagtcaccggtcctagaaggggattctgttgagttgaaagtggaggaaaacttggatggtaatgggaataaggaaaataaaacgtcccagaagagcagtacaagtgatggctttgcttctgctaaagtgagtgatgggacaagtagtttgaggaagaccagtggtagtgtggccatgagtactcgggctgatttcactgagagtgggaagagcagcatgtgccgtgcgagcaccgccagtgacattagcgatgagagctcctgcagcagcatgagcagtgccaccacgaagccacacaaggggaatgattcaaggtgggaggctatccatgtggtgaagtccagggataaagttcttggactgaatcatttcaggctgcttaagaagttgggctctggtgatataggaagtgtgtacctatctgaattgagtggtacacggagttactttgccatgaaggttatggataagacttctttggcaagtcggaagaagctgcttcgagctcagaccgagcgggagatcctgcagtccctggaccatccatttctaccaaccctgtatactcactttgagacagataagttttcatgcttggttatggaattctgccctggaggggaccttcacactcttcgccaaaggcagcctggaaaatatttttcagagcaagcagcaaagttctacgtagctgaggtgctccttgcattggaatacctgcatatgcttgggattatataccgtgatctcaaaccagaaaatgtcctcgttcgggaagatggccacatcatgctgtcggacttcgatctatctcttcgctgttcagtgagcctaacggtgatcaagtccgcaaatcctggcctagatgcattgcagaggaacaatgcagcgtactgtgcccagcctgcttgcatcgaaccatcctgcattcagccctcctgtgtagctccaaccacttgctttggcccccggttcttctccaaatccaagtccaagtctaagtccaagcccaagaaggagaagtcgaagcctgatggtccaaaccaagagaacctcttcccggagctgattgctgagccaactgatgctcgctcgatgtcctttgttggcactcatgagtacttggccccagaaataataaaaggggagggccatggaagtgctgtggattggtggacctttggcatattcttgtacgagctgttgttcggcaagacccctttcaaaggttccggcaaccgggctacactcttcaacgtcgtgggccagcccttgaggttcccggagtccccgatagtgagcttctctgcgagggacatgataaggggattgctcgtcaaggacccgcagcaccggctcgggtacaagcgtggtgctaccgagataaagcagcaccctttcttcgagggcgtgaactgggctctcataaggtgcgcgagccctccggacataccaaagcccctcgagctcgagtgtcgcccaaagcaagtgccatcagcaaacggaaaggtcgcgccggtcgctaaccaaaagggcccagataattatctagagttcgaattcttctagttttttgttttgtttttgtttttgtgatttctgaactgcaagagtgcgtctgggctgatgctgtgaaagaaagtgaaagatgataacctactctaggcatgcgcttcgctggatttttttcttcttctgccattagactgtactacgctcgtttcaggatatccgagttatttttttttctctgttgaactgcttaactctaaggtgtactcaatccatcatgtatgttgcaattttcagaacctgcctatggtacttgaaatgtatttcagggctgtgttattgctattgtaactttgtaattgatgcctcctcttagaacatgtcttcctctacactacaaacgctgatatctgaacatggcattgctacttatctttattttattccattttagtctctaaatagctaaataccgaaacaaaaagtctaaaatagagttttaattttcatatttataaactaaaatagaataaaatagaggg

SEQ ID NO: 21373 - DNA, 1068 bp, Zea Mays
gctacctggagccttccttctgggatgtaaaggaagcaagatgggttggggaatatcaaggttgattggactgaaggctgctgtcctgctttctgtggcgtgttttttccaaggattaggagtgatccttatctcatttcctctcatatatgcatccgtgattgcaatactagtctccatagcttcccacccatcaattgatcttcctttacttcttggcaaggcatccgatggaagttttccgctgtggtcatggatcatcttctcaccatttcttcttttcattcacctgtttgtgctgatacgaagatttgtgaaaaacgagcccttatacactgaggttgcagatggagtgtttgttggaggatggccttcttcggttgaacacctgccaccaggtgaccctgcaatcatagattgcacgtgtgagttgccaaaaagctcaactatatctaacaatgcatatctgtgtgttgctacctgggatacgagggctcctcaaccatcacaaattgagtctgccgtgcgatgggctgtgagacagcggtcacagaacaaacctgtctatgtccactgtgcctatggtcatggcagaagtgtctgtgtgatgtgtgcgcttcttgtcgcattaggattggctgaagattggaaagctgctgagcaaatgatccatgagaagcgaccttctattagcatgaacactcttcaccgcaaaagcttggaggaatggtcaaaacatttgctcccctctaaaagaagtggggaagcagatgtgagttctgttatccattcggattataaccggaaataaaattagaccagcaagagacaggcgtgttcagatatttaagatgcattgtacatttggttgtattgtttgctcctgtcctagtgaatgcctatggttcaagttaccattttgtggtaattgtgttgtaaaaactatatgtatcgaattatattagtactgtagctttacacagttagttctttacggaagatttatgaggtgtttggtttgatgaatcactctatccaaaatgaagtggtgcatcatgggtccattcc

SEQ ID NO: 21374 - DNA, 745 bp, Zea Mays
acccatcgcacacccctgctcacgaaaccgtaggcatcgccgcctccccatacctacgaaactagcatcccgcggcggcgatggccaccggcgacaacgacaagcccccgtcgcttgacgcagacgtcgacatggccgacctagcttccctcgacgccacggccgctacatccgccgccgcgggcggcgcgccttccacccgcttccgtcccaaggccaaggggaagcccaggccgaaggctgagcctcccagacccgtaccagttgccgtacccaagccggagccggagccagagccagaggcggttccgatgccggagcccgatgccaaccccgcgccgccaccggaggacacgatggaggtcgacggggcggtggacgctcctggacatggggagggggcggtggaggaggacttcgtgttgcgcgagatcgatgtgtacttcaaccccaagcccttcgaagacgacacccagctgtacattatgcagtaccccctgaggccatgttggcgcccatatgagttacatgagatatgtgaagaggttcgtgtgaagccattgagttcagaagttgaagttgatttgagtatcaatacacagagtgaaaattatgaccaagaggcacctttgaggctgacaaaacagacactatcgtcatccaaggcagttgatgttactaattacgcggttggagttcttaatggcaacttgtatatttcagggacaatctagcttcttgcctg

SEQ ID NO: 21375 - DNA, 372 bp, Zea Mays
cttgcatcgactgagccagacatttccgaatatgccgattttcgcattagtggattggaacccagcagggcttgctatactgtgcacttacaaatacggaagcatatcaatgggcctagagtcatacagatatgcttgcaacgtgaaatggctcggggtgagaggaggtgatctgcatcttatccccgaggacgcgtttcaagagctgaagccacgtgatctgcagattgccaaaagcttgatgtcgtcaaagttcctgcagagctgagctggcgctgatggtggagaggggcaagcgtgcagacatcgaagccctctactcccacgggttcgatttcttggggaagtacatcgcgagaaagatccgcaggg

SEQ ID NO: 21376 - DNA, 3025 bp, Zea Mays
gttgcttttctatacttccagcaacagaacttgtcccaggagatatagttgaagtaggagttggttgcaaagttccggctgacatgagaatggttgaaatgttaagccaccaattgcgtgttgatcaagcaattcttacaggagaaagctgttcagtggcaaaagaggttgaatcaactccagcaatgaatgctgtctaccaggacaaaacaaacattcttttttcgggcactgttgttgtagctggtagagcaagagcaatcgttattgggattggttctaatactgcaatgggaagtatacgtgatgctatgctaagaacagaggatgaagcaacgccgttgaagaaaaagcttgacgagtttggtacttttttggcaaaggtgatagcaggaatctgcatacttgtttgggttgtaaatatcggacatttccgagatccttctcatggtggctttgttaggggtgccatccactattttaaggtggctgttgctcttgccgttgcggctattccagaaggtctcccagctgtggtaacaacgtgcttagctcttggtaccaagagaatggctcgcttgaacgccattgtcaggtcacttccctctgtcgagacattaggatgcacaacagtcatttgcagtgacaaaactggtacccttacaacaaacatgatgtctgtgtcaaaggtgtgtgttgtgcggtctgtgcaccagagaccaatgactgatgagtactccattagtgggacaacatttgctcctgatggttttatttatgatgctgatgggttgcagttagagtttccccctcaatcaccatgtctcctccatcttgctatgtgttcagctctttgcaacgagtccactctacaatacaatcctgataaaaaatcttatgaaaaaattggagagtccactgaagttgctctgcgtgtgctggtggagaaggttggtcttcctggttttgactcaatgccttcatccctcaacatgctaactaagcacgagcgtgcatcatactgcaaccattattgggaaaaccagtttagaaagatatctgttttagagttctcccgagaccgcaaaatgatgagtgtcctctgcagtagaaaacaccaagaaattatgttttcaaaaggtgcccctgaaagtataatggccagatgcacacatatattgtgcaatgacgatggttcttcagtaccattgactatggacattcgtaacgagttggaagctagatttcaaagttttgcagggaaagacacgctaaggtgcttagcattagcattaaaacggatgccagctggtcaacaaagtatttgttatggtgatgaggccaacctcacatttataggattggttgggatgcttgatccaccaagagaagaagtttgggatgctatccactcttgtatgtctgcagggatccgtgttatagttgttacgggggataacaagtctacagcagaatcgctgtgtcggcaaattggtgcttttgagcacttgaatgacttttcagggtattcctatacagcatcagaatttgaaggattgcctcctttggaaaggacaaacgcattacaaaggatggttctgttttcaagagtggaaccttcccataagaagatgcttgttgaagccttgcaagcacataatgaagtggttgctatgactggagatggtgtcaatgatgcacctgctctaaagaaagcggatataggaatagcaatgggatcaggaactgcagttgctaagagtgcttcagacatggttttggcggatgacaactttgccacgattgttgcagctgttgcggagggaagggccatatataataacaccaagcagtttatccgatacatgatctcatcaaatattggggaggtggtttgtatttttgtggcggcagtgcttgggatgcctgacacacttatacctgtccagctactctgggtgaaccttgttactgatggattacctgcaactgcaattggtttcaataagcctgatggcaacatcatgtcagtcaagcctcgaaaggttaatgaagctgtggttagtggatggctctttttccgttatttggtcattggagcttatgttggtcttgctactatagcgggttttgtttggtggttcgtttattctgataatggccctaaattaccatattctgaattggtcaactttgattcatgttctacaaggcagacttcatattcttgcagtatatttgaggatcgtcatccatcaactgtttcaatgactgtgcttgttgtcgttgagatgtttaatgccttgaataacctaagtgaaaaccaatctctgcttgtcattcatccatggagtaacctgtggcttgttgggtctattattctgaccatgcttcttcatgtagcagtcctgtacattgaaccactatcagcccttttctctgtctctccattgtcgtgggttgagtggaaaattgttctttatctatccttccctgtaattttgattgatgaggttttgaaattcttctcaaggagaagcccacgaggtcgaagattccctttaaggttgtggagacgtgagatacttccaaaagagtcgagagacaattgattttaggcttcagcatatcagatgcatacaatgcaaagcgaaaagcttgtcttctggccgagcatcttcgagaatagagttcgcgactacacaattcattggggggggggggggggggggttctcagaatgctagttttgctcagaaaacatagagaagcttcgaaagccttctcactagttatagacggtgctacacttgtatcagaatgtcagatgcttacaaaaggatgagttcatgcaacacccctttctcccaaccaatgaaatcactgtacgcatcaggttctgtcaaattttcagggtgacagacgccgttctggtatttctgccattttatacatcgcaaaagttttgcaccttgatattgttggaaacaatggcatgttcggctgaaatttacaaccactgccg

SEQ ID NO: 21377 - DNA, 217 bp, Zea Mays
cacctgtattgatcgtcgggtagtagcgtgcagccgtgcaggtgcagcagcgagatcgccgccgcctccgccgccgagccgctgccccgggcgccagatggaaggggcgcaccaaaatttcgaacggcgcggccgcccgccgtaccaatcgtgccggtgccgcggcagccgccaacgggattcggcactcaggaggacggccacgcttcaatctgct

SEQ ID NO: 21378 - DNA, 442 bp, Zea Mays
ccggaaagagaccaaatatttcgcgctctgcccagccagcctatccactccagctccacttcttccccgcacaccacagtcacacgcgcagtgctagacgacgaacaccagagggcaggcagatgatgatggcgtccgttctcgccgtctcccggtggtcgtcgctgcttctccccctcctcctcctcctcctcctcctcctggtggcgacggcgtcgcaggccctcaacgtcggcgacctgctcgggacagcagcgccttcggggagccagggctgtagccggacgtgcgagtcgtcgttctgcatagatgactacctgaacacgcggtgcaacgagaacctgctgagctgcctcgacggggtgagcccggcggggccgacgttcccggggaacgagtgcgacgtcggccagacggcgtccgtcatacgtgggagatccta

SEQ ID NO: 21379 - DNA, 3986 bp, Zea Mays
gtcagccgccgtgcacgctcatcatatggcatagccccaagcccccaacggatcgagcgcctccccgagtccccgttcccctgccccagctgaccgccgccgagacgtgccacaccgcctccccctcccgccgccacaaccttcgcctccacgcaattggccgcactcctttccacctcccgctacaggatagcgtgggccggtcggcggcgccgacgggtggagaactggagatccacccgcacgcggactgcttccttcgctagtcgatgggaagtaagcgttgttaggtctcatgatttcttttgggagatccggagctgtggtgcctgtctgactcatcatctctgggacactgccaagtacgattaagagaggctgcgtcgaatccaagacctttggctcagtgggaagacttctcaccactgcatcagagattcagaagaacttttgcaagaagggaggtcttgtactttggaactactcgatagccatatttttagaggttagcaaaaggagatcagaatgactaatgaaactagaaaacatcgttccaagtgggacacaaaagaaggatctgatgtagttgagatcagtgatgatgagtctcctgataagacaggtgttcaccgtaaaggtggcgatttacacacaaaacctgacacatccatgcaccacagaggcgctggacatgagaaggaacatgctgatgggtccaatgaagatatgaaggaaatgcaacataaggcaccctctgaaagatcacaacctcttagaatggttgatgagcgtgataataatgagtggagcaaggcaactggtaaccaaggcacaaacagatatgcagatgacagaagacgtggtgatggatggggtacagctcctagtcgtgattattcttctgctagggcgccttctgatccagatgcatggaggcagcgcagccgaagtccatctccaagaggggtttggaacaaatcacgcaggaacaggagtcgttccagaagcagaagcagaagcagaagcagaaacagaagtaggagcagaagcaggagtatagggcgaggcagaggcaggagcagaagtccatatattgctgaccgtggatctgagtggagggttgagagaggcagaacatctggaggacctgttcggccctgtagggattttgtggctggtaggtgcagaagaggctcaaattgcaggttccttcatgaagatggtgggcacaggccatttgatgatcactatcctgctgacccaagggaaaggtatggttatcagagcaaggagtttatggatacaagaggaccaaatgactatttgcggagtaggcaatctcgagatcgttatgatgataggccttgggagagatctgaacctcgaagggattaccggtatcctgaacaatgctttaattttgccaaagggaaatgcatgagaggtgctagttgcatatttgcgcatagtaattctgcttctcatggtagatggagagatgagactagggaaagtgcccatgatagatttggccctgattcatcctatgggaataggactgagcaccgtagggtaaacaaaaacccttgtaagttttttgctgaaggttgttgtcgccgtggtgaaaattgttcatatctccatgaggaagctccccatagtcagataggagtgagtgcacctgatgaggctttgaattacagtgatgggcatgcagcaagaggaaactattcaaactggggtgaacaaaataatgctgtgcatgcaacctctcagattttatccagggatgacagggaaagtcctatttctcagagtattggcagaaatgattctcgcaatgattatgaaaaccagcattcaaaagatgctggaaagagccagtaccaaattattcatcaggaagattttggttcaccagggcaaaagaaacatgaagatgctatttcacaacagccacagttattgactcctgtccagactactgctcttagcatgcataatgaaaaggtatctgaaatggacagtcagaatgctccttcaagcattggaggtttgagcatgcaatcaggggttcgtagtgctaacattatagcagagcaaagcctgggtcaaatacttcagagacatgatccaattcctcatattcctgggccacaaacgcttccgatcaccacacaaccacagaatgttacgtcttcattcccatcaaatagccacgtgcaacaaaataactttcctatacatcagaacaggcaagagcagtttgtagttccacacgcagctgcaaacatctcaactcccagcatgcagagccagccaattgcttctcacatggggcacatccaacgtggcggctatggtatagagccacaggcattgcccaatatctccacacataacgggcataatttcaatgttgccagtcaagttccaccaaacattccaacagctgtgcatgctgggcagactcaggtgacaattgacatgccaaggttgggtcaagacagtggtcctcaaagcatacacaacatggagatgcagccaatgtctccaaacgtgcaaagccaatccttgcaggggttaccccttgtgccggcttccagctcagctgatatggccggagttcctgttcctcacaacgctgtgaaaagcgaagaagttagccgagttactgcatccctggcacaatactttggaaatactgctttcggcgctggtacggttggattacaaccgtcgcagccgaatatgaatgcaagcctgatggccactccacctgtggtaccaccacctgtccaacccaatccgtggccctgggcgcagcaacagacagggatagtccaacccggtctccctgttccacctcagcagcagcagcagcaacaacaggctccccagaggcagcaacaacaacaggctccccagagcttccagacgctgatcgccgttggtggcagtaatggcaactctatgctcatacctaacgcaggcgcatcggttggtcccgccaccgtggcggcgaaggaaaccgcgcctccagagagcaagaaaggagagaagaaaaatgcagacgcagaaaagaaaaatggcgacgcggagaggagaaatgccgaagcagaggcacaggaagacggcgacaagggtaagaagggcaaggactccaagcagctgaagatgttcaaggttgcgctcgcggacttcgtgaaggaggcgctgaagccgacgtggaaagacgggcagatgagcagggaggtccacaagaccatcgtgaagaaggtcgtggacaaggtgacgagcaccgtggagaacacccctccgaccaaggagaagatcgacgtctacatgacctactccaaggagaaactgaacaagctcgtgcaggcgtatgttggcaagtacgccaaggcgtagtagcgtttggccaagaacacactgacgcccattttgtgccccgaggtcggaaggatggaaagcaccgcgtgcatccgtgctcagaggtttaggatttgtgaaggcgcgcgaggttggggggggggggtgcctgggcttgtctgcagtttcagagagtttagcgtgtggtttgtgggcaaatggcgccgttccaacatctggctgtaacttttgtagaattgttttattctgggatttagaacatggtgtagcggaatcatgcatggcgtggatcattttttatggatagactatataggaggcatgcatggtgtggtgcccatcgacgtgctagtgttatagtattgttgatcggaggaccagaccagtcaaggaacgcacggtgtccctcttgatgagaagtgagttgcttgctcatcgttcctcatgcatggtgtgcagcagcgtgttttatcgtctatctatgagtagtaggtggaaagcatgtggaaccaaaccaagtaagaacttggctttctctgcctgattctgtggttgtgccgacgactagccggccaacacagattggtcga

SEQ ID NO: 21380 - DNA, 1157 bp, Zea Mays
agttaaccggccgagttgaacccaagagaagatggtctgatggtatccaccaagcagtagaagcaaaagaaggcctaaaaatccaggcagactcggtaattgtggctcaaatcacatatcagtcattgtttaagctttatcctaaactttctgggatgacaggaactgctaagacagaggaaaaggagttttcaaagatgttcaagatgcctgttattgaagtacctacgaatctgccaaatatacgggtggacttgcctatccaagcttttgcgactgcaagaggcaaatggcaatatgtacgggctgaagtagagtctatgttccaattaggtcgccctgttttagttggaactacaagtgtcgagagttctgaatacttgtcagagctacttaaagttcacaagattccacacaatgtccttaatgcaaggccaaagtatgctgcaagagaagccgaaataattgcccaagctggaagaaaacatgctattacaatatctactaatatggctggcagaggaactgacattattttaggtggtaatccaaaaatgcttgcaaaagaaatagtagaagataacatacttccatttttgacccatgaacctcctaatattgacatggaaggggaatccacatcccacaagggtctctcaaatgtagaacttagtccatcatcagtaggtctgcttgccaaagctgcaatcatgtcaaaatatattcacaaaagcgagagaaatgaatggtctttgagtaaggcaaaatccactattgctgaatctatagaaatgggtcaaatgattgggatggagaaactgcaagagcgcatgactgaagagtctgagatgtaccctctttgtgatgcaataggacttgcttatctcagtgtcttaagggattgcgaagttcattgttcttttgaaggtgctgcagtgaagagattaggtgggcttcatgtagtaggaacctctttgcatgagtcacgccgaattgataaccaactgcgcggcagagcaggcagacagggtgatcctgggtcgacacggtttatggtgagaaatttaatctggacactgaatgggccgtgaggctaatatcaaggataacgaatgatgaagacatagctatcgagagcaatgttgttgtgaaacagg

SEQ ID NO: 21381 - DNA, 1292 bp, Zea Mays
gtgcctccctccccacgaaacccccttccccaaactaccttcgccgctctccttgatccgcaattttctcccacatctctcttctgcccacttgcctccatcttggcctccccctccactccccacccccgaacatccggcgccgtccacacccttgcaccccgactcccctcgtccttcgtggccacgatgggggcgtccatggcatcgccttaggggcgatcgatctgggagaaagtgctggagcacgtggcgtcgtaccaccagcagcaacggaggcagaagctacgcaagagcctcacctacaccggcagtgagttctcgttcgctgtccggggtcgtggggacgaccccgcctccacgtccgttggggcacagaacgaggacatgcctcttgagcacgtctttaaaatcattagatccgatggcaaaagtgtgtgtttatggttcctgagtcagatgatctttcttcagttttagatgtgatagatattagtatgaaagataaaactagaatgctatgtctgtcaaaggagctttcttcagtttcagaacacacctctccatctttcggtgctaggtggatcaccgtctaaacaatccaccaccagaaccgccctaccccaagatagctccatctcagtcgttgtacccattcaatggcgagctggtggcagcgatgtaggagatgatccatgacgaggtgcacaagtacatgttagtggacgacacctgccaaagatacacaatttctactggtacacattttattttttcatgtttttcagttggagaaaacatttaagacaatattttctcgtttgttctccatatggggcttgttccacgccacttgaaggaagaagggaatggtggtgttaagttcggacaatacatctacacatcttggagcatcggcatcaatgttttcaatcttctcaaatttcaaattattctggtctcttcgtgcaaccataaaagtttattaagtcacttatctgagtggtctaaaagtctagcatatttttgttcctctgcctgtcgagacggatcaactgacatgaataatatccagtgaatactgcaagagctattcatgatctgccgtgaactagctagtatgatataactcagtttgtggagtgctaatgcacaaacaggaaataggatgatacttcatgtatatttttttatttcatgaaaatgaactataggatactgttcacaatccataccaagcttctgcagttatcaacatgttttctatgttcaaccttgttaacatattaaaa

SEQ ID NO: 21382 - DNA, 462 bp, Zea Mays
ggcgaggagacgaaccgaagattggccaaatctcgcttgcgtttctggggtggtgtctctgactctctggctccgtccccggcaccggcgggcggtggcgtgatggcggactgggaggggatcccgccgcgggagcggcggcagatggaggagatcctgcagctcgacatggaggagctcaacgtggaggtcgtcgacgacaacgaagaagacgaggaggaagaggagggtgacggcaacgaggaggactacgacgtcgatgccttcctcagagataacaatggagatggagtggctagcacctctggaccattcacattcaataggtctctagcttcactgcacacataccttggcgaggttgacgatactcggggtagagttactcttttagatggtggcacaatcctcaacttgccaatgttttatcttcaagtaaatataagacatgcgaaattgaac

SEQ ID NO: 21383 - DNA, 1201 bp, Zea Mays
cacggccacagtaccacacagaacagtagcaccgggctccgggcaccagggcaggcgaattcctaggttcgctggagcctggtccgagggatggccgccgcctcgctcgcgttggcgagtcctctccggcttctcctccgcgtccgtcacccgcgcggagccatcgccgtcccgtgctacttcatctcgcgaggacggtatagcaccgccattgccgttgcagcagcgagggatttggcggtgaaaggaagcgtggacaggaattcagcggaggaagtcaggaacattctgaatatggcagaaagggcttcccaacgaagaaatgtttttcacaccaattttcttactccacctatagtgaaagaggctatgctggcacttgaaaagtttgcagataccaaagcagtagctcagggtggctaccctcaggctgagaggtgccgaatatctgttggacacccggacgtcatgacaagtaacccagatgtggttgctgctttgaggaataacaagggagaaagttggagatattcttttgcagggggaacgaggtgcccaggtccttgttgacccagaacttgttgactatctgatttctacccttgaaaaggtggggaaagttggtgtttcatgcactcagattcctttgcttgctctagaatatgaaccaccaaggaccaattcatttaaaactgtagaatcatcgctcagggttgatgcccttgccagtgcaggatttaaaatctcacgcacgaagcttgctagcttgataagttctggtgatgttcgtgtgaattggacaccaacaacaaaaaatggagttaccctcaaatctggagatgttgtttctgttagtgggatgggaaggttaaagattggggaaattgtgactacgaggaaaggaaaatatgcggttgagttgattcgctatttgtaatcatggaactggtctactttcatgtctgaaactctgaatttaacggtacacattttctcctatatgtgatgagaatcatgtattaagtattacttctcagtgaagttgaaagtgatgcacaaatctgagtatatttgtagtattcattgactgctttagcttcgtaatgcaaatattcttataggtcaagaatttcataaagtcgtcagtgtacattcattatttcaaataataagcaccaaagggccaggttgctttggatct

SEQ ID NO: 21384 - DNA, 2247 bp, Zea Mays
gttcagtggagaggaacactctttcttctgtgccctgagtctgtgtgcgttgcatccttcgcctgcttggagcctatagcagtgcctgctcatatgcatgtcttacggcatcagttttgcattcgttccttgaagaacacgatgagtccataaaaggagggtcatgtccatgtctatcgatgaatgatgcatattgctctgtctgcttgggagtattgctcccaaccttccatcgagatgaaggtctggagacacctaatggcatttctcatattgacaacatgtcttcagtaatatctcaagcagtgcacggggagagttaccaagttgatgagttttctctagaaatttcactaccgccggttatagccgccaatgagcgtgcagttagattatatatgaaacaaaaatatggcaatgagaattggttcaaggacaaaatgtttgcacaacaaacaatgtcagtgaaggaagccttgcgacttttgatagcaccatcactcgagaaactaatgaatgctaaacatggtaacaattcatttagaatccgcttaacatatactcatggtgatgcttcacaaaagcttcatagtttattgccaaatgagcacagccgtaaaaggaaaccagattcaagaaaaggaggtgatgcttcgaatgaggcccataaaaggaattcagcagatggcaaccctatacaaacaagtgaatcagattcattcatctacaagagtcttgagggcatccaagatcaagaattctgtaatgcatttcagttgcctcctgaaaaggtgtttaaaccctgccatcttttaatatcgtgcttgagatcacctacatatcttggtggaagatatttgaagctttcaaggaacgtcagtcagtcatgttggataatagatgatgagagaatgggtgaagcttcagttgaggagataattggggagaatgttcgtgccatctgcagaggtgatagctgcaagttccatgctgctgggagagaagacattgatgtacggatgcttggatctggtcgtccatttctagttgaagtactgaatgttcgatccattccatctgaaactgaagttcaacaaattgaagagagaattaacaactctgaaaagaaatatgtcatagttcgaaatctcaagttggtagataatgaaatatggaccatgatgcgtgaaggagaagcagagaaacagaagcagtacactgcccttatatggacttctcgtgatctgacagatgatgatcttcataatatttctattatgaaggaaatggaaattgtacagaagaccccaataagagtacttcatcgtagaagccccttagagcggaagcgcatcatacactggatggagattgagaaaatcacaggcagctcaaactactacttgctccatctatgcacacaggctggaacatacatcaaggaatttgtgcatggtgatcttggacgcacgcatcccagcatcggagccataatagggtgcagagctgagatattgcaactcgatgtcactgatgttaagatggactttctcccgtagccggaccttcagctgtttatagcatggatagcatgcagtcccaactcctgcagatgatgaggtggtgcgggataacgagctcagaagaacctcatggcagattctgcacggtgcacgcctacatttttgctaaccgagccaagctcaactggtttggtggaaggtgtaatcatatatccagtccccgaagtcttctccaactcaaaacttggggggcgtctattttcctctaatactaacattttcgctagatcctggtcacattttcgctacctttttcttcaaagaaagaaacatttttcccaggtagattgaagtgcaactcccatagtaacatttttgtctacattgtggagaagatcatcccaactcatttggatccattgttatgccttaggttgttgtgcaatgaaattttatgtactttctccgttccaaaaaaccagtctttttagttcttagtttttatctttatttaaatggatgaaaataaatctagacacacatataaaacacatatatcaagtattgtattaacttattaattaattaaaacgaattttaaattttagtctataaattgctaaatatagaaattaaagattttagtttctatatttggtaattttagaactaaaatgaaataaaatgtagagactaaaaattaatccttagaaaccaaacacac

SEQ ID NO: 21385 - DNA, 2783 bp, Zea Mays
gctgtcttgtggctggggaacatatcattctgtgtgattgataatgaaaaccatgtggaagttgtttcaaacgaaggattgtctactgctgcaaagctattaggctgcactgcaaatcaactagtgattgctttgtccacttgtaaaatccgagctggaaatgacagtattgttaaaaagctaacattaactcaggccattgacgcaagagatgcactagcgaagtcaatctatgccaatttatttgactggattgttgaccaaattaaccactcacttggaacagggaggcaatttacatggagatccataagtattttggatatttatgggtttgagtgtttcaataagaatggttttgagcaattttgtataaattatgccaatgagaggctgcagcagcacttcaacagacatcttctcaaactacaacaggaggaatacttggaagacggaattgattggacccccatggaatttgtggataacactaattgcttatctctctttgagaagaaacatctagggctattgtcattattggatgaagagtctactttcccaaaggcatccgatttttcctttgctaacaagcttaagcggcaattaagtggtaactcttgcttcaaaagtgaaaaagaaggcacatttaagatttgccattatgcaggggaggtgacatatgatacagctgggttcctggagaagaacagagacccattgcactctgagtcaatccaactactctcatcatgtacatgtgaactttcaaaacattttgcctctgtcatggttgctgattctcagaataaatcaagtctgtcatggcattcagtaaaggatacacataaacaaagtgttgtcatggaatttaaggctcaactgttcaagctgatgcagcagttggagagtacaaccccacattttatccaatgcattcaaccaaatagcaaacatcatcccaggttattcgagcatgatcttgttttgcaccagcttaaatgctgtggtgtgtttgaagttgttcggatatcaagaacatgctatccaactaggatcacccaccaacagtttgctgaaagatacagatttcttctcttgcgttccattgcatctcaagatccacttagtgtttcaattgctgttttgcaaaagttcaacattccccctgaaatgtatcaagttggctacacaaaattatttttccgtacaggacaggttgctgcactggaaaatgctaaaagacagatgcttcttggaaccctccatattcaaacacagttccggggtttgcattctcggcggggatatcaacgactaaagaaaggggcgatgaatttgcaatcatttatacgtggtgaaagaacaagaatacactttgataatcttgtcaagagatggagggcagctgttctcatacagaaacacactaggcgtcgacttgcagctaacatgttcaatgatcaactgaatcatgtcattcttcttcagtccgtgacgcgtgggttcctggccagaaggaaatacaagtgtctgcagaatgaaaaggagtcaaaggccagtcacagcatagttcaagggaacacaaggaagaataactcagagtcaagaatatgccatgaaatgaatgggcattatcctcacgaaccagtcatcactgagcttcagggtcgtatcacgaaagctgaggctgcattgcggggtaaggaggaggaaaatgtaatgctcaaacagcaattggaacagtatgagaggaaatggtcagaatatgaagccaaaatgaaatgtatggaagaggcatggaagaggcagctctcttctctgcagctgagccttgttgtcgctaagaagagcctagctgctgatgatgcagccactagagcagctcggactgattgtactcctacacatgcgcagtatgactctgaagatacattatccaccgggactcgtacacctgaagtgatcgagtcgaaacacgacaaccacaaccctgaagctaaagtttcagcaggaaactcggataggcgagtgaatgctgtgaaccacctagcaaaggagtttgaagacagacgacaggtgttcgaagacgatgcgggcttcctagttgcagtcaggtccggtcagattggttcaaatatgaacccagatgaggaactccggaagctcaaggaccgctttgcgacatggaaaaaagactacaaatctcggttgaaggagactaaggtaaaccttagtaaggttggcacccatgatgagaaatcacggaaaagatggtggggaaagaagagctcgaagtgaaacgtgtaagagaatctccacaacattttgcaacgacactgggtcaaggaaagtggccaggaatgccagggcaggcgagaagaatctgcctctgatcccaaaagcttggtgagatgatgaactcccatgttggtggcagtgccgttactcatctgatgtcacgagtgtcgaaaagatcaaagtagacaataggtgaagccagagttctgtacatgtatattagtcagctctgagtcatcacttgacagtgtgtttatgtcatcgtgtatgtagagtgataaatccgaggcgtggaagggtaactaaatgcagattatccaccatgagcgaagagatgcgaaagcagagtactgtaatatgtgtacagtgagaacattgttgaaatgtgcaaggcattttactctgaaaactgtgattgcatcgccccatattttgcactatcttttgagacctttacacttacacatcagttttattttttt

SEQ ID NO: 21386 - DNA, 1684 bp, Zea Mays
gggcttgctggtgcagtacttgagggaagagaggtattgagaaacagcctttccagcttcctgacttcattgctgcaactggaatagaaaagataagacaggcttatattgagaaagaggatagcaagaagttgaaacagaaacagcgtgagcgtatgcagcccaagatgggcaaaatggatatagattatcaggttttgcatgacgcgttcttcaaatatcagacaaaacccaagctgtctagtcatggtgatctgtattatgaaggcaaagaatttgaggttaaactgagggaaatgaagccaggcatgctgtctcgtgagcttaaagatgctcttggtatgcctgatggcgcccctcccccatggcttataaacatgcagcgctatggtccacctccatcttatccccaactgaagatcccaggtctaaatgccccaatcccccctggtgccagttttggttatagaccaggggagtggggaaagccaccagttgatgagcatggacgtccactctatggagacgtttttggtgttctgcagcaggacgaacctaactacgatgatgaacctgttgatcgcagcaaacactggggagatttggaggaagaggaggaggaagaagaggaagaggaggaagaggaagaaccaatggaagacgaggaaatggaagacggaattcagtctgtcgataccatctcaagtactccaactggtgttgaaacacctgatgttatcgaccttcggaagctgcagaggaaggagactgacaagcaggcagaacggccgctgtaccaggttcttgaacaaaaggaagaaaggatcgcccctgggactctatatgggtcaagccatacgtatgtgttgggaacacaagataaatcatcagctccgaaaagggtggatctgcttaagaatcaaaagtcagacaaggtggacgtcaccatccaacccgaggaactggaagccatggatgatgttctggcagccaagtaacgactgatgtctttgttcagttgagatataagtgtttttttttgttcttccgaagtcagacctgttctcttccgataatgcaacaggtatgaagaagctcgagaggaagagaagcttcggaaccaaaaggaggacttcagtgacatggtggcagagaatgctcacaagaggaagaggaagcaagagaaggaaggcaagtcgaagaagaaggaattcaagttttaagggcaggcgggcgatgtaggtcatgaggcaccgttgtagctgttccaaatatgactggctgtatggtttagttgctgcgatcagacagttccgttccgtgttccaagttccaaccgagaggtcgggctcattcgcttggttaacacaaatgtcgctttggattttcactggaatatgcttaattactctgtaagaaatcgttgcgctgttgaaatatcacgtgctggaaaggcggtctttgctatggggggggggggggggtgctttgacctgccgaaggggttatgcggcgcgatgatctatttcggtggagccaacaagacaattgattatggctagtgtgggaacattttcccgtgtttttcttagaaaaaatgaactaatttcttttgagcaaatgaaaaccccttaaaaaaaatagggttttcaaaatagctctggtcagaagagaaaaaaataca

SEQ ID NO: 21387 - DNA, 2836 bp, Zea Mays
cgccaccccgcgcacggcctctctcctttctcgagagagcgaagtaaacgggacagcggctgcagccacccagtcttgcaaggcgccaaggacggacggaggcgacgactcgcaaggtagctctgctcgggcgaggcagcagcagcacgcagcagtactccgttcagaatcaggagagaagacgttgttctccgggcactcgagtcgaagtcctgacgagatggacggcaatgcgaggtcggcggcaacgaatcagaagaagcccgtcgtcgcggacgacgacctcgtggagctgctgtggcacaacgggagcgtcgtcgcgcagccccaggcgcaccagaggccggcgcccacctacgaccccgaccgcccgggcaccagcggcctcaccggcgaagagaccgccgcgtggttcccggacaccctcgacgacgcgctggagaaggacctgtacacgcagctctggtacagcaccatcgccgacgccgccccgcagcacgagggcacgctcccgggccctacctcgcagccttcgccttcgccgcccgttgggagcagcggcgtcgagtcgagctgggctggcgacatctgctcgaccttctgcggaagcaaccaggtgctcaggacgccggcaaggatcagggggaaggacgcggcattgcagtcggagttgccgagcaataccggcgcgcacgacggcacatcgtcatccggcgggtctggaagcaactatgggggattcgggctgcccagtgacagcgtccatgtacagaagaggaaggggaggtgtagagacgactcagatagtccgagtgaggatgccgagtgtgaggaggcaagtgaggaaacgaaaccatcaaggcgatatgggacgaaacgccggactcgtgcagctgaagttcacaatctttcagagaggagaagaagggaccggatcaatgaaaagatgcgcgcattgcaagagctcatcccgcattgcaacaagactgacaaagcgtcgatattagacgagacgattgagtatctgaagtccctccaaatgcaagttcagatcatgtggatgacttctgggatggcgccaatgatgtttcctggtgttcaccaattcattccacagatggctctaggaatgaatccaggttgcatccctgcagcacagggcctaagtcagatgccaagattaccatacatgaaccacaccctgccaaaccatatccatctgaactcgtctccagctatgaatctaatgaatccactgaacgccgcgaaccaggtgcaaatcggtcacctcagggatgcaagtagccacttgcttcacctagatggcgggcgagcagcagtggtacctcaggtaccaggaccaggaccccatgttcatggacatcaaatagcacaagccgaagaacacaataagatactggaagtggcagctagtactgttataccaacttctaaggcagggcaaccaccaactttacatagagtttagagtgaccaaaatcatgccttgagctgtatatctgtacagaagtgtcagaagcatattctttgacatgtaagcttagttctagagttattatcaggagtcttgtataggttacaagataacagcctgtctaccgccgtattctatctacggaagaactcagctgcatactgctgtgcagactgcagtacagcgttcaagagagaattgaatgggatcaagaaagggtctttctttttctgggaaccgctgaaaatactgacgtgatgaggagcggatggcatctctgtagctgcgctgcgctgcagtgtatctacatcaatatggcaatgcttgtctggacacgaatgctacatctacatgtaaatgcagagttgcaggtagatagcaacccctctcccctgagatgccaactccgactcctgtcctactgtatgtactgatctgtacagcaagcaatattcaatcagcagtcaattcctaggatgtcgtaaggagatgagctcgccagacagtccatcacactgccggcttgattgcatcttcacaggacgtggacttgtgggcacatgctccacgggcaacggttcggcatcctcctggcgttcttgtggctggcagcagccgcgagaatctgtgtggagccctgggctgggctcgttgcaagatatgccagcctctcatcttcagactggaggaggaggggggggttccctctccaggctttttccatgatgttacaggcttacagcattcagagtgcatgttacactcacggccctatcagcacatgctgtgggcagccggtgatgataggatcagatgctcatatctcctgcggttttctgtctaccgcatttggattggatttggaccccccctgtactgtacttcctccttgctcccctgctgcttggcgctttgtccatgtgcctggttggaattgctactatacatttttggagggtaattgtttcaccggaacatgtagcgtggacgtgtggtaataacaattgaattgatgcctttactgtctgagtaataacaaagggaagcgatgagcagcacatggtaagcttccggtgccggttggaggcttcgatgtcgatgtctgcattgagtttatttgatgctgtgtgttctatagctagactaggctagagtttggatagagttcatgggacaatgttgtctgcatcttcatctcccctttagtttaggacttatctgagaggtacggttctttgcatgacagaacaaaactagcagcagcaaaaaaaaaaaaaaaaggaaacaacgacaaaatataaaaaattggcttcgcccgggttcgaaccggagaccttcagt

SEQ ID NO: 21388 - DNA, 2801 bp, Zea Mays
tcaaccgtttgtctcttgcacgcttgatgctctaactctcttaaagtctgtggattcaacgtatgaaatggctgaggacatttggcaggtccttgcaaaggcaaaatacttagattgggagaagcattccactgaacgactatggaggatggaaagtttgaaggaagcttgtgaaactgctctgcaggagcatcactttctaactggtacacttgaggaagactccaacaggtcagacaacgagtattcagagcaaattaaactactatcagaggtcttcagccaagcgacagtcgccgatacaccaacagatgtgcccgattacctttgctgtcagataacattcgagatcttccgagacccagtgatcacaccgagtggtgtaacatatgagagggctgtacttgttgaacatctccacaaggttggcaatttcgacccggtgacgcgagaacctctgaaggagcatcagctggttccgaatctggccatcaaggaagcagtgcaggcctacctgaaagagcacagctgggcccacaagttgaactaattggatgccgtgtgctttgctgactgcagatgctgataaatcggggatggcctgttattagagttagattttatgttgtgttggaatgagattgattggatagctcgattcatcgttcttagtattgattgggtaacttgacctgtaactgcaattctgcaaacactcattggatggatgtaatgaagcaagtgtacatgaaacattggttggttcagctcactgcatgtatatggttgcagcattatatatggttggtcgtagacccagtgggcctcaaacaagttaggcctagtttggatactctagtaatgagtgggattgaagtggattaagatgtattgagagagtatttgatgtattggggatttacaccctctccaatcccttcaaaacactccaatcctaaagtatccaaactaggccttaggtgggccggcctctatccaaggcccagccttttacttggcgctgacaagacaaaagagaggagacgagaaagaaaacaaaccctagcccgctacccctgccccttctctcttcgtcgcgcctccgcctccgccgtcgtagcatcctcctccgccacctcggccatggcgacatccccagcgctcctcttcccttctccctcctcggcatcctctgcgccttcgtcggcgcgggtggaggcagtggtgcttttcaacgtctgcgacagctacgtgcggcgcccggaccaggcggaccgcgtcatcggcaccctcctcggttccctcctctccgacggcaccgtccacgtccgcaactcctatgtcgtcccccacagcgagtcagccgaccaggtcgccatcgacatcgactaccaccataacatgtacgcctcgcaccagaaggtgaaccccaaggaggtcatcgtcggatggttctcgactggatttggtgtttctggggggagtacgctcatccacgagttctattcaagggaagtacaaaaccccatccatcttacagtcgacactggcttcactaggggggaggcttccatcaaagcctacatctcatccaatctgtccctcagagatagtcaactcgctgcacaatttcaggaaatccctctggatctgaagatgattgaggcggaaaaggctggatgtatgttaccggtgaatagcagatatataccttctatctgggggagatctcattttgcacctgtattagttggtccttctgttactgtgttgaacttctcaggaatagtcacatcagtagttggatttagtaataatgtctctgtttctatttctgtttctgtattaatttctcgtagacaactgatgtttgtaagaaccatattttgctctgctacatcctcagttttagtagcagaacattttgaagcttccatcactcttactaccttctgttacagttgagatcctgaaatctactatggtagagaagctccccaatgatctggaaggaatggagtcatcgatggggaagctttacattcttatcgatgagatctacaaatacgtcgatgatgttgtggaaggacgcgtggcacccgacaacagaattggaaggttcatctctgattcttttgcttcggtgccgaaattgtccccggctgctttcgataagcttttcaatgacaagattcaggataaccttgcgctggtatacctgtcaagcatcacaaggacacaaatcagcatcgccgagaagttgaacactgctgctcaagtgctgtaggtttggcggtgtggcatctggtttggacgtggatggcttgatgctatctgtgatgcttggcgtaagtgtgattggtgacagaaatgcatttttgtactcattattattattgctaaatgagagacctgatggaaagggttagccaacgatgagatcccataatgttgccagaatgccagtagagtggtggatggcgagatgtttctgtttggatagtattctgtgctccaggttgaatatttgtaatgctcgttggttttgtgtagcgacacatcggcaatgtggagcaatgaagagatttgctccacattttacgtcgtcatttagaggtgtggtggcatgcaatgtgatgctgttgttgcaggaaaatcggttttgctgtcctgttatagcaagctttcctcctgcggccctgcttttcatttccctcttgattcttgcctctgcccttcgaaaccggtctaggccgggaacaatcacgtcatcccatgttatgtgtctagcctgaacgaac

SEQ ID NO: 21389 - DNA, 1957 bp, Zea Mays
ccggccgctaactctcttcccattctgaggcccggtccacactccatcctcaaacggccgccgccaaagtgggcgtggcccaacgagagcgcggattaaccgctgcccgctgcgtaaatcgcaagcagagaacacacggtgacacggaggcagtccgcttgaaagctaagctaaactgctctagcacgcatataaacccttgacaaatcaagagtggagaaaaaaaaacacgaacccactagccctctctgcttcctctccgtttctcctccactcaccagtcaccactcctgattgctgtcgagtctcgatctgccagcgcgcggcgcgatggccgacaaggcggcgtccccggagaagaagtcatgggccgacgtcgaagaggaggaggaggccaaggctaaggcgaccgcggcagccgaagcggcggcggcggccgccgcggcgtcctcttcctcctccatcaccgagccggcggtggaggagcaggccaagcagatcgaggcgctctccctcgccccgtcggtggacgacgccgcaggcgaagagggcccgcccctcctcgatgactccgacgactcgcaaatccaagccgtgatttcgggtggcacggtgtacgagtcggccaccacgttcgaggatctgaagctgtcgcccgagctgcttaaggggctgcacgacgagatggggttcagccgcccgagcaagatccaggcgatcaccctgcccatgatcctcacgccgccctacaaggacctcgtcgcgcaggcgcacaacggctctggcaagaccacctgtttcgtcctcggcatgctcagccgcgtcgacccgcaacgcaagataccccaggctatctgcatttgccccaccagggagcttgcgcagcagaataaggcagttctcatgaggatgggcaagtttactggcattacatgcgcctgtgcaatcccgccagctcaaaaagactacatgccgatctcgaaaatggctccgatcactgaccagatcgttatcggcacatctgatcatatgcttgctgaggatggctttaggagtgattctgaaaggatgatgagggatatacaaagaagcgctggtggttgtcaggtgcttctcttttctgcgaccttcaatgatagggtgaaggattttgttacaaaggtcattagggatggaaatcagatatttgtgaagaaggaagagcttactttggaaaaagttaaacagtacaaagttcaagtacctgatgaatcggcaaaaatagaggttataagggacaagatatttgaatttggacagaaagttggccaggttatcatatttgttagaacaaagcaaagtactaagaatgttcacaatgctttgacgagggaggactatgtgtgctcctcaatccaaggatcccttgaccaatcagagagggaaaagataatacaggaattcaaagatggctacaccaaggttcttatatcaactgatgttcttgctcgaggttttgaccaagcacaggttaacctcgtcatcaactacgacatgccaatcaaatttggtacaagagatgaacctgattatgaggtgtacttgcacagaattggcagagctgggcgcttttggccggaaaggtgctgtgttcaacttgctgtgtggtcaaaccgataatgttgtgatgaagaagatcgaggactatttccagcacagtgtgcctgaggggttcggaattggcaacgtgaagaagattttgaggctgctctcaaggatgcaggtttactttaaagtaaccaccgaaacctgtggtgagcagcgctctccggctcaggacaattgaccggtgattttttttgtcgagcctgctgcacaacgttagtgtgctctttctgctcatcctgttcgcagcaccgattttcagggtgatttttattgttttttgatgagcgtgctgcacagcgttgctgtgcta

SEQ ID NO: 21390 - DNA, 2217 bp, Zea Mays
tcgcggttgactcgttgacccatggcaaggtttctgttgtcaaatgtgtcaggggaggcgaaaccggggaggctgcttgcactaatggggccatcgggctctggcaaaacaactttgctcaatgtgctagcagggcagctcgccgcatcgtcttccttgcacctttccgggtttctgtatatcaatggtcggcctatctcgaagggcggatataagattgcttttgtcaggcaggaagacctgttcttctcacagctcactgtgcgggagacgctctcacttgctgctgagctccagcttcctgacttgtgggctcctgagagaaaggagagctatgtcaatgatcttttgttacgtatggggttggtcaattgtgctgattctattgttggtgatgcaaaagttcgtggaataagtgggggtgagaagaagcgcctctcacttgcatgtgagttgattgctagcccttcagtcatctttgcagacgaaccaacaacaggccttgatgccttccaagctgagaaggtcatggagactcttcgtcaacttgctcaggatgggcacactgttatctgttcgatacaccagccaagaggttcagtctatggcaaatttgatgacatcgtactactgtcagatggagaaactgtatacatgggacctgcaaaagaagaacctctaacatacttctcatcattagggtaccagtgtccagatcatatgaaccctgccgagttcttggctgatctcatttccattgattatggctcaactgaaagtgtacagtcatcacagaaaaggatcgagaatctcattgaggcgttttctaacaaatctgtggtcactgaaggtaacaatttaattgcaattccagaggatcctgaattgtctgccaaacttgttcggaagactacagtgaagaaaagacatggttggtggaggcaatttcgtttgctttttaagcgagcatggatgcaggcttttcgtgatggaccaacaaacaaagtgagatcacgaatgtctgttgcttcagcagttatatttggatctgtgttttggcgaatgggaaaatctcaaacatccatacaagacaggatgggactacttcaggtggctgccataaacacagcaatggctgcattgacaaagactgtgggagttttcccaaaagaacggagtatagttgacagagaacgagcaaaaggttcctatgcacttggaccatatctttcatctaagttgttggctgagattcccattggagcagcatttccattgatatttggatcaattctctatccaatggctaaacttcacccaacattttctagatttgccaaattctgtggtattgtgactgttgagtcatttgctgcatcagcaatgggtctcactgttggagcaatggctcctacaactgaagctgcaatggctcttgggccatcccttatgacagtgtttattgtatttggaggatactatgttaaccctgacaatactccagtcatatttcgttggatcccaagaatatctctcattagatgggcctttcaagggctttgcattaacgagttcaagggtctgcaatttgagcaacaacattcatatgacattcaaacgggtgaacaggccttggaaaggttttcattgggaggaattcgaattgcagatactctggttgcacagggtaggattctgatgttctggtactggtcaacctaccttcttctgaagaaaaacagaccgaagtatcagcagctccttccaccattggaacaagataaaaataagccgcaggtggaataagcttttcatttgcagacttcgaaagaataaattaaggtagggcatctttgaatcaatcatttctttgcagtggtcctaattcaacaaaaaggctttatgtggggggaacatattgcaattagcaacgcaatcaatgtactatattgaatctccattacttctatacctttctgttcgttatcgtttccttcactaagtttttctcatgggaaaattatcgccaataaaacttgccctgggccctggttagagttaatggaatatgaactcccagtctcatgatgacagttctgccatgatatagttattacagtatctggttattccctatagtttatagttatttcagtgtctggttattccctatagcccctgtttgtttcggcttttcgcagcttctggccaccaaaa

SEQ ID NO: 21391 - DNA, 806 bp, Zea Mays
caggtgagagtcaagcgacaactcggggcatgagacggggacgagtgtggaacccgagagaagccaagacatcgcatcggagctggcgaacaagttacacgataacgcgcagcacatacatgccatactgaaggaagaggctgcccaggatggtggccagaaccatgatctcggtagttcgatgctgcctgacgcaatggaggccgcccgccgaaaagcagatgagctgatccaatcgctcggtgggctcgtcagctacctgaaccaattcaccgagctggtcaaggaaactgggtttgagaacatcgcgacctgattgatgcgtgagacgcagggcttcctttggagggttagatcttagcgctgtagtttcgtttctgtgtgtccgtcatctttgtaaatatgacggcgctgtatgacgaccaccacccaacccgactggtgtagggtttgtagcagacactgtctaggtgtctcgacaccgctgctgttctgagggcttctggccccctgattagtgagatgagatgctcacttctgttcgtttcagttctgtccctgaaagaaaattccctgatgctgagagattagttaatttggtagcagtagcagttgttctcagatgcatcacatattcacatgtgagacataatatgggagggtgacgcaggtgtagcatcgtccacagtgaggatttgtgaaggaggtaggtgtcctgggatatggcatttgtttttgttgggacctgctctatttcagatgtctgaaatatagtatgtttatagataccgatctttatcgttaga

SEQ ID NO: 21392 - DNA, 219 bp, Zea Mays
tcccgtgcgacgcggggctggatctcagtggatcgtggcagcaaggctactctgccacttacaatgccccgtcgcgtttttaagtcgtctgcaaaggattcagcacgccgcccgttgggaaagggagctttctaggcggcccgccgcggcgcgtcggccgggcgggctgagccaatggcatgggcccttggggcgcgaacgccctaacgtgggtcgggg

SEQ ID NO: 21393 - DNA, 845 bp, Zea Mays
cgaattcgcccttgtttcataaaggtcagttggaacttagacacgcttggtgatttcgtgattatgagaagcaatggacagcctgtgtataacttttgtgtgacagttgacgacgctaccatgcaaatatctcatgttatcagagctgaagagcatctaccaaacacattgcgacaggctttaatttacaaagagtaaactgtctaaacggcatggagctacttctgtcgggcagtataaaaatatgggctatctacctcaggcaatggtcaattatttagcactactgggctggggtgatggcactgagaatgagttcttcactattgatgacctagtccagaaattcactataaaccgtgtcaataaaagtggagcagtctttgatgcaacaaaattgaaatggatgaacggacaacatctaagatcatttccccatgatgaactcatcaaagcttttgaagatcggtggacggacacaggcattctccaggaatctgaaagtggttttgctaaggaagctgccgagcttttgaaggatggtatcgatttgataacagatgcggacgcagctcttacgaatctgttgtcatatccccttcatactactctaagcagcgaggaagctaaacctgtggtgcaagacaagatctccgaggttgcttggagtcttatttccgcgtacgacagcggcgaactcggccaagcgctagctgagggccgtgatggctggcagaagtgggttaaaggtttcggcaagtctatcaaaagaaaggtgttcatacgcatgataaaactgttgggcactcgggcgctgcccgtgatggacatagattgttgggcct

SEQ ID NO: 21394 - DNA, 7361 bp, Zea Mays
gagaccagcagcaggccaccatcaccactaccaccagcagcagcagcaacgcagtgatcgacctcgcttccgacttcttcccgctcggccggcggggggtggggagtaccaggccactgccggcgacgctatcttttcttcttctcgctcttccaggcagacaggcttgccggccggcggctgagtgaggacaaataaaagaggcttcccccaccccggtgccgtcgcggagcgccttgattcgtgctcatgccgggggcgccgctcaggtgacttgcttgggggtgggggtgccatgcagaggtatgctgggttcagcggcagcagggacggggcgaggttggaagcctcaccgttttcgtcctcctcctcctctggttaccccgtcagctccaggcggcagcagcagctaactccgtacaagctaaagtgtgacaaggacccacttaataacaagcttgggccacctgacttctatccacaaacactaaactgtcccgaagagacattaacaaaagactatgtacaatatggttataaggagactgttgaaggaattgaggaagcaagagagattgtaataagtcagatcccatacttctgtaagccagatgttgtcataaagtgcaaggaggcactaaagaagcgtttaagagctatcaatgaatctcgtgctcaaaagagaaaggccggacaagtttatggagttcctctttctggatctctattaatcaagcctggagtttacccagagcaaaggccatgtaatgaggacacacgtagaaaatgggttgaggcccttgctcagccaaacaagcgactgcgttcattgtctgagcacgttcctcatggttatcgtaggaaatcactttttgaaggtctcattcgatataatgttccattactaagagcaacatggtttattaaagttacatacctgaatcaggcccgaccggcacctaacagtacttcagtagttgcttctgataatcaacgatctaatcaatggacaaaggatgttgttgaatatttacaacagattttggacgaagtttgttctaaagagggtgccattgtacctccatcttttaaagagcagtcatcaccaggacttgctgctggaaccaatcaaataaaaatgaaaacggaatcatctccagctggagacagtgaagaacccttggtgcacttcaaatggcggtatatggttcgcctcatccaatggcatctcacagaagaattgcttgttccctcagtacttatcgaatggttatctaaccaacttcaggagagggattcagatgatgttttagagcttcttttgcctattatacttggtctggttgacaccattactctctcacaaacatatgtgcgcatgttcgtggagctactagtgagacgtctcaatgtcgatcgtccaaaaaggttttcagtttcttctgttatagcagagttactgcgatacatggtacttgcagtgccagatacatttgtttctttggattgctttcctttcccatcatttgtggttcctgatgtatatggtagaggtgctttgttgaagataaccagtggtggtggaattttatgttctaagaggcgtgatgcttatcggtatttgtcctgtggttatgctgtttcttccattcagaaacgtgcacatgatcttgcagcagttgctaaccctagccttcaagcacgtggtgcagccaaagtggtacaggctttggacaaagctcttgtcacaggaaatttgtcagtggcatatttttcactctttaatgatttatctgatgcgttaatggaagaaagatggattaaagaagtgaatccctgtttgcagtcttctctgatgtggattgggactgttgagctatcccttatctgttctatatttttcctttgtgaatgggcgacatgtgattaccgtgattgccgagcatctccctctcagaatgtgaaatttacaggaagaagagatttgtctcagatacacatggcagtgtctatcttgaagaataaaatggatgagatgaataacttgtctcgtcctaagagtagtactcgcatcacccttaataaagttgccaaaggttctttgaatgatgcttgtttgacagcagctgctgtggatgattcttctggactgagaagtaatgcaaaaaatgttgatgagaagaaggatacaaatgatatctttgaaagccctggtccactgcatgatattattgtgtgttggttggatcagcatgaagttagcaacgttgcaggttttacccgggtggatgttcttatcgcggagcttatccgcaatggtatatttttccctcaggtttatgtcaggcagctaattattagtggaattactgataagaacgatacaatgctggatgttgaaagaaaaaggaggcatcacagaactttgaagcagcttcctgggtcttctttatttgatgttcttgaggaaactaggactgcagaagagcaacagctatatgagatgatgtcaacatactctagtgagcgacgccttgttctctcagaactttcatgtggtcattcattttatgcaagtggcagaggtgagtacacttcaagttcctgcattcggaagcagagtgatcttccagttgcatcagaaggtgataagcatggaagagtgctagaacaagtagaagatgttaaagctcttttgtcaagtctgttgggttttacatatcctcccctagtggaatcaaaactttgtgaaatcaaaacaagctttcaagaatcagtaacgtcaacgctcacacaagttgagactggggaagccaaaagtggatgcgaggattgtatgaggtccaaggggcagaaattggatgacagcgccactcctttccaagggtttccattgattcaatcaggcgaggaggatatttggtgggtgaagaaagggacaaagttacaagaatctttcaacgttgaacctgtacagaagtctgttaagcaaacttctagaggtagggcaaaagttgttcgtaaaacacaaagtcttgcacagcttgcagctgctagaatcgaaggtagccagggggcatctactagtcatgtttgtgaaagcaagatgagctgtccccaccatgaacctaataacgatggtgacaacgtcaaagattttgatcacacaagggcagcaaacgtgactgcaatagggaagtcactaaaaagacttagattgctcgaaagacgatctgtctcttcatggttgttgaaatcaataagacagcttgttgatggaaacggaatgacagcttctaaagctaccaattctataagcatccttcctttgcagcctgatgataaaactgcatccaaatggaggctaggtgatgaagaactgctgtcagttctctatgtactggatacatgctgtgattcagtctctggagtgaagttcctcatatggttactagtgaaaattcgtggagtgggctcctcaggtcaacctgggaggacttatatgcttatgaggaacagagatcaccaagtttgtcaggtcaacgaggcacttgtgttctcatctctgcttaggtatgagaacatacttcttgcgaccgacatcttgcctgatgttctaagtgctttagtgaacagaaattctatgtcagcaactaccaggcatcctggttcaacagcttttgcttatgttcgatattttttgaagaaatatagagatgtggctagtgtggccaagtgggagaaaaactttcggaccacttgtgatcaacgcctgttagctgagcttgataatgggcggtccattgatggtgatttggtatcttcttcgggtattttagcaggcgaggagattgatgagcaggtccgccaaaagttgaatggaaggagttcaagactcgtgcagaatatgaaagagatagtgcaacggcaagctgatggaattcagcgcagtttaaaggaaaagaaagttcttgcaggcgcagcacccaggaatccactcacttttgagaaagaagatagttatcaaattgcacatgacattgttttgggcttagtagaatgcatcaggcaaaatgggggtgcaaatccagatggagacctttcaatagttgcttctgctgtttctgcaatcgttgtgaatgctgggcatatgatagcaaaacatttggattttgcaggaggaaactatcaaggtgttaattctgtggctacttcgctaaattttgttcggcacactttacttattcacataaattctctttgcttactaaaagaaactcttggagatcgcttcagccgtgcctttgaaatagctctggcggttgaaacttctgcagctgttacagcagcttttgctcctccaaagatgcaccgcaatcagtttcaaccatctcctgaggcccatgatgcatatggaaatcatacaagtgagctcagcaactcagggaaaggttttgttgggagaactgcaaaagtatctgctgctatttctgctcttgttgtgggggctgttgttcatggagctgttagccttgagcggatggttgctactctaaaaataaaagatggtctggatattatgcagcttttgagaggtttgaaatcaaatacgaatggtgtatcccatcctactggaggttttaggattgaaaattccacggaagtttcggtacattggtttaggattttattggggaactgcagaactgtctatgatgggcttattgcagatattcttggagatccatacattattgcactctcaaggttgcagcggatgcttcctctaactgtaatttttcctccagcctactcaatttttgccatggttctttggagacgatatatttttaactgtgaagatccacaactttatcagtctttttcaaatgcaataaacgatattaccagacatcagccttttcgagagatctacttccgtaatacacatcggctgtataatcttctggcttctgatgttggtgattcgaagtttgcagcaatgcttgaaagtcatagtccggaccggaattcaaaaatattgccatttatacctctccgtgcacgcctttttctggacgctattattgattgcaacacaccaactattcagggggatggtgcttcagagccttgtgatcccaaagataatgaactaaagctttcagagaggcttatgcaacttcttgatactcttcaacctgcaaaatttcactggcaatgggttgagatgaggcttcttttagatgaacaggctcttatggaaaaagttgcagcaggcaagacaacacttgaatcacttcggtcattatcccctaaagctgagggttttgccctttctgatagtgagaaaggatttactgaagtcattctatcaaggctacttgctagacctgacgctgctcctctgtattcagaacttgtccaccttcttggaaagcttcaagagtcacttgttatggatgtaaaatggattctacaagggcaagatgctattcttgggcgcaggtcaacaagacaacagcttgttcatattgcccaacgaaaaggtctttcaacaaaggcacaggtttggaaaccatggggttggtccagcttgcttagcgatgccattcctaataaaactgcaaaaaggaagttggaagtcacatcaattgaggaaggagaagttgtggatgacactgttgatgctaaaaggactaccaagactccccctcatagtgttgatagaagctttgaagggattagatcgataaataaatatttaactgagaaagcccttgctgaattagtattgccttgcatcgacagaagttctgctgatatccgtggtatactttctgttgatttgaccaaacagatgggggctattagtgaacatatcaaagcaatagcattgaatggtgctaaacaagctggttcagtttcttcaggaaatgaagtgccatcgaacaaatcaagtggccgtagaggaattcgaggtggaagcccaaacattggtagaagagctccggttggtaatgacccaagtcctccttcggcttctgctctgcgggcagcgttgtggttacgcctccagttcatcattaggttgcttccagtaatcatggcagataggagcatgagacatacgcttgcttctgcaattctaggcctgcttgcaacgcgcatgatttatgaagatgcagatttgccccttcctcctaccaacgcaactgctttaaggcgggatgtggattccttgctggaacctcccctggatgtcctgcttgaccggcctggcgaaagcctttttgagaagcttttatgcgttctccatgcactgcttggtagctacaaaccaagttggctgaagtcaaggtcagcctctaggtcgtcaattaaaagccaacgagatttctcagcatttgataacgaagcagccgagggcttacagtccgcgttggaccacatggaattgcctgaaacaatcaggcggaggatccaagcagccatgcctcttcttccaccatccaggcgcccttgtatgcaatgccaacctccgcagttgtcgttggctgcattatcaccactccagagcagtacctctggtgtaggtcctcaacagaaaagttcttgtgtgagttgggtgcccactaacgtatcagtcagaagcaaggcagcattgccttctcatgaccctgaaacggaggtagatccatggagcttgctggaagatggcacaaactgccccccctccacagcatctggaagcaatggctcgagtggagtgacgggagaccatgctaatctgaaagcttccagctggcttaagggtgccgtgagggtgaggaggacagaactgacctacattgggtctgtagatgacgacagctgatacgtgtatgattatcttggtgaattggaggcaaagaatttggtctcacttgttggcatttgtgtcgtgtgcaagttaaaagcaccaactgcatcgaattctttgagagctctgtaccacaaggtggaatggaaaccatatggcttttggttggttgttgtagtgttagaatacatcgctgcccccgatttgttttagttagggcctgtgggggcggctgtatatagttggaatccatttctggattcaatgggggagcttatttgagaatcaggcaggaagccatgtagtagatttctagccaagagccctgtacttgttttttttttgggtctgagatgtaattgtcatgtcacatatattcttttgatctaaggctgacggaagttgcattgcctatttgctttagctattactagtgcagcctagacatcatgagtttggatcgttctatgactaaaccgtcctactggtttgctgtttg

SEQ ID NO: 21395 - DNA, 4088 bp, Zea Mays
gtcgcaggccagaccgccagagagagagggaaggtgaccgggatagagaaagaaaagtagaaacccaaacccccggcgaggacgccaccgtggcgacggcggatgcggcggggctggtccccgcggacctggagagtcgggtgatggaggcggtgaaggcgtcggaggcgcgccgcgacccgccgctgctgcgggcggtggagctgtcccgcgtcgtcgccgaagagggcgcgggcgccgagctggccgggatcctcgtctccaacctctgtttcgcgcacaactcgccctcgctctggaagctcctgggccaagccgtcgcgtcccgcctcctctgcccgctccacgtcctcgcgctcctcacccctagggtgttgccgcagcggcgagcgcagcctgaggcgtatcggctgtatctggagctcctcaagtgtcacgccacgtcgtcgttgctggcgatggaggctgggcctaaccgtgacaagatagggaagtccattgctgaagctttgcaactatccaaggtttatggattttctggaacagagtttggacatgttgtcattctgtttgtgttggctgttgtcaataaactgattgatagcatactcgaggattgtggctttccatctgtgatggcagaggggcaagagagtgtatatgccattgaggggccacagcctatggacttagacattaaaaggggatctactgagaaccaaaatgagcatcgcgaacagttacgccggaagaacactttcatggctttggacgtgttgcatatgatggctgctgatagaaagattcaatcatttctgagcttgatattcctgaacatgcctgaaaagttcagttctctacgccagaggttgagttctattgaagcacacaaggctatcaaccaaataacaaacacattctgggtgttcttggtaatatgggatccggtggctcccttctgggccagcttactggagctgggaggcctgcctgctggataatatttgatatatatgtggagaatgcaattgatgggaagcatctaagtgttacatcagctatcgggattataaaagaaatgaccaagacaatgcaagtgcttaatgaagcaagctggcaggaaacatttaaagctctttggatttccacccttcgtcttgtacaacgggctagagaacctcttgaaggaccgattcctcatctagatgcaaggttatgcatgttgttagctcttataccattatcaattgccgcgattcttcaagaggaaagtgatatgtttggagttgaagggaacaaaattcttccacaaagacaagggcttatatcatctctccaggatctgatccagtattcaggacttcttgtaccaccttcatcagtggtgaatgcagctaatgctgcagcctcaaaagcagcaatatttaaggccaactataaggctggggctggcaacactagcatgatggaccagactgactcttcaatgaaagctggactttaaaagatacagctttgccccaagaatccccctggctgaactttatgaaagggtctcaactttcagaaccccttattgatgctctggtcgcaactcctgcttcaagtgttgcggaattggacaagttatacagtgtagcaacaaatggttcagaagaagaaaaaacagctgctgcaaagattctttgtggcgcatcacttgttcgtggctggaacattcaggaacatgtggtcagtatggtggtcaagctattatcagcttctttaccctcagattcctcaacttcaactcctgggagcatgagccactaccttgctcatatgtctacgttgaacgaaatcttactcggtgtgtcttatggtgatgtcatccacattctttcgttgtatggaatggttccagatgttgccgtggctttaatgccactatgtgaggcttttgggtcaatagcaccgccacctaatcacaagtctaccattcttggtgaaacatctgtttatttggtcttctcctgtgcatttctttgtcttcttcgcttgtggaagttttatagaccccctcaagagtattgtcttactggtcgtggaggctcagtaaagctggaactgactctggactatctgttgttgatgcacaataatcgcattttctcaaattcgtctgcccctaatagggattcttacaacagtatgggctcagtcaatgaggtctctgctcagccgatttatattgattctttccccaagctaagtgcttggtatttccagaatcaagcttgcatcgcctctacactttctggtctttgcaacaaaaaccctgtccatcaagttgcgaacaaaattttgaatatgatttgccgaaaaatgaataaaggtggagtatcatctagtaatctttcatctacttctagtagtagcgttagtggttcttctgtaagtgcatcggatgattcttaccaaaggcctgctgttcctgcttgggaatttttagaagctgttccttttgtacttgaagctgttctgacagcatgtgctcatgggcggctttccagccgagacttgactacaagcttaagggatcttgtggactttttgcctgcttctcttgctgcaattgtaagctacttctcagcagaaattacacggggaatctggaaacctgttccaatgaatggaactgaatggcccagtcctggtgcttctcttcattccattgaagctgaagtaaaggaaattcttgcatctgctggtgttcagattaacagctgctatccacgtggtgtgccgccaatgcttcctttgcctatggctgcacttgtcagcttgacaattacatttaagctagataggagtttggagtacattcaaggggtcattggacatgcactagagaactgcgcagggggaagttcctggccaagcatgcccattatcggggcattgtggacacagaaagtgcgaagatggcatgacttcattgtcctctcttgtatgcgttctccatttggcagagacaaagatgcagttgcgcagctcatccgaagctgcttttcgtcctttctgcagtcatcatccagtggttctgacataatcgcaaaccgtggagttggggctttattaggggactcaatcacggatcaaggtcttaggctcccaatggcacctggtttcgtctacctgagaacatgtcgaactttccatgacacatacttcgttagtgaagtgatcctcaagcaagtgattgaatgggctcacaaacttgcaaatggatggtctttcaatgggcctccgcagttgaaatcaggccggacaccactatcttgtgcagcatctatggcgcatcaggtcgcgatgcttggtggtggtctcctatgcatagcaggtggaccacttgtggtccaggtgttgtatgaagacacactaccgacactgctgctgtcagccagagaacagagtttgaaagaccctgggccagtttctagcacactccaaggttacgccatggccaacatgctcttttactgtggtagcctactttggggagcggacaggagttctcctgtcatgaaattgtctttcctctcgaggcggccacgggtggtgagaaaccacatggatttcatagctggtgtactggacggacacattcttctgggctgtgacccgggtacctggaaagcgtatgtttctcagtttatgttcctggtggtgaagtttgttccatcatggttgccggacataaagctggacacgctaaagaagatagcagctggacttcggagttggcatgaacatgaccttgctctatcccttcttgagcgaggaggaccacaagcaatctctgttgtagtcgagacctttctgtgatcctgccatttggacattttgccccccacctgacatcgcagccgctgttagggtttgaagtcggtggtctgaggtctagctgaagtaatcaggatgacccttccagaattccacttgagcaaccaggataactgatgtttttctcatattatttgaaggagacttttggtgatacatttcgagttgtcagccaattgtcgagacagtaaaacctcctgttg

SEQ ID NO: 21396 - DNA, 1040 bp, Zea Mays
ttagtacatcacctgacgaacactgatgatgtcctcatagccaatcaagcagccgttgaagcttgtcagcagtttcatgaggcaaagcatctgccttctggaagtccttccaaagacaagatcatttctgctccagcagaaatgaagaataattctccaccagtggaggtgaagaacacttgcggtccagtaaaaattgagagcttgtgttctccagttgaaggagaaaacacttctgatccagcattggagcaagaatcgttccttgaaaagtcaccctcgaggcagcctgtatccccggggaacaagcaggagctgaaacctaagaaaagacggaagaagaaaggctctttatttactaagaagcagcggaaggtggactccagaacacctgatgcaaaggaaaaaactgagggcacgccctctgatgtagcagaggaaactgagagcccactctctggtgcaacaggaccaggaaccatgaggtcttgctgtgctggaaagaagcgcaaatctggaaatgaacctgcagatgcaaataaaactgggaagccatcctcagcagtgaagaagcagaaaactgaaaacccgactgcagctgcaaatgcgacaaagaagcgggccacggagaagaagctagagagcgcgagtgcctcccagaagctgcaggttgagaaagctgtgcttgtcgctgtaaatagcaggaggagccaaagggtccgtaagcccaaagtttttgctgactgaagaagcaggtagaaagtcttaggctctctattgtgtatgtatcttgtagccccgtcatcaaaatcggtggccatagcaacataggaagtgcctggatcgcctcataagttagtgtacatatatcagctatgtctcacccaaattgtagatttgttagtttgttgttcttaacccttctcttctgggctgccagattaacaatgtcatgctgtgttagcgttatatcaaaaagaagaaaaaaaaaggagaaaaatatgccatgcaactgcaacttggcccgtcgcatctttgtg

SEQ ID NO: 21397 - DNA, 1538 bp, Zea Mays
gcaatcgagagcgtcacggcgccagcctgcctgtgccaatcatcatctgctgctgctggtggtggtgtggtggcgtcgtctcaacaaaagcgagccgagcagagtgctgaggcacaaacaagtacaacaccatcccctctctaccttcttatctcttctcctcgtgcaccagcaacaaaggtggcaggcacagagagagctagctttggccaggcgtccacagcagccagcacaagtttgcgttcttcagatgtcgacggtggtcatgggggtggatcttgagtgccacaagtgctacaagaagatcaggaaggtcctctgcaaggtccaagacaaggtgagcatcaggaccatctcctacgacgagaagaacaacacggtgacggtgtccgggcccttcgacgccgaggaggtcgccgacaggctcaccgccgacgccggcaaggtcatcaccgacatacacgtcgtcgggggcttcggcttcggcttgggcgggggcggaggcggaggcggagggaaacaacagaagcacggcgccgtcgctcccggcaaggcgcccaagccagggaaggccagcggcaacgggcacggccagggcgggcacggaggcggaggccatggcggcggcggcggaggcaacgggcacggccatggcgggcacggcggcggaggcaagccgggtaagaataagcacgtcaagttcgacgacatggacatggacgacgacttcgacgacctggacatggacgagccggccggccgccacgcgcacgcgcacgcgcacgggcacgggcacggcgacggcaagccgaagatcgtcaggacgacaaacacccccatcgcggcgcggctggaggcgccccgcacgggcccggcgatgtcgatggccgcggcggcgcccgtgaggatgccgatgccggcgatggcgccaatgccgcagcagcagggcatggggggcgcgccgtccatctggccgcccgcccccgagtggggctacagcgcgcagccatacggcagctacagcggcccgcctactggcgggtactacggcggcgggggcggccccgccgggcactggccctatggtggcggctacggccggaacccgtacggccagcagtactacgaggacgaagagcccagcgctgcgtgcagcgtcatgtgatgtcaccggctcgtctccgctacgcgacatctcgtgtcacgcgctctccgtgtccacgaccacgaccactgctgtaaaattattcctagtgctcgtgtatgtatgtatattaagctgtatttttattttcgccagccctattttcactgtttttttatggcgtttggtttgcttcatgtgttgtcagagtatcttgtttgtttgtgttgtgtgtgtgtgttttggagtggataaagttcgtcatagattgacggtacggtagtaggacctaggacgaacgaagctccatctccagactccagtgtgtatatgtatgctacactcttttatgttcttcttaaactgtgttaatgcacggacaactgcactaaga

SEQ ID NO: 21398 - DNA, 3134 bp, Zea Mays
gcctcgcggcgcaggcggaggcggcgccggcgctggagggtgcctgggtatgggccacggcggggaggcgcagatcaagggcacgcacacgcacggcggccgctacgtgcagtacaacgtgtacggaaacctcctggaggtctccgccaagtacgtcccgcccatccgccccgtcggccgcggcgcctgcggcatcatctgtgctgctgtgaacgcgcagactcgcgaggaggtcgccatcaagaagatcggcaacgcgtttgacaaccagatcgacgccaagcgcactctccgagaaatcaagctgcttaggcacatgaatcatgaaaatgtgagtagccatgtatatgtatatatttctctaccttgtgatgaacatatatatttatatatatactccacgctacaggacttttttttgtcattgtatgtatttattagctatatatacatgtatgtatagttcattagctatatacataatacatccgtgcatatatgtaacagagcaacaaattctttttccctgcaggtcatttcaataaaggacatcatacgcccgcccaggagggagaacttcaacgacgtctacatcgtctacgagctgatggacactgaccttcaccacctcctacggtcaaaccagcaactaaccgacgaccactgccaggtcgtcgatccaaatccaacgctgttgctgtgccgtcctctgttctctgttcctaaccctttttttttctttcttcttttacgacgaccggccggtgcagtacttcgtgtaccagctgctccgcgggctcaagtacgtgcactcggcgaacgtcctgcacagggacctgaggccgagcaacatgctgctgaacgccaagtgcgacctgaagatcggggacttcgggctggcgaggaccacgacggagaccgacttcatgatggagtacgtcgtcacgcggtggtacagggcgcctgagctcctgctcaactgctccgagtacacccaggccatcgacatgtggtccgtgggctgcatcttcggcgagatggtcaccagagagcccctgtttcctggcaaggattatgtccaccagctgaggctgataaccgagctggtaggctcacctgacgacaccagcctcgggttcctccggagcgaccacgcccgcagatacgtgaggtccctgcctcagcatcccaagcaacagttccgcgtgcggttccccaccatgtctagcggcgccatggacttgcttgagaggatgctcgtgttcgatcccagcaagaggattactgttgatgaggctctgtgccacccatacctggcgtcccttcacgaggtaaacgacgagcccatctgtccggcgcctttcagcttcgacttcgagcagccatcgctcaccgaagaagctataaaggagctcatctggaaggagtctctcaagttcaaccctgacccgatccactaaatataatagctccctcccagctgtgtacacacgagcaaactaggacggcatgtctatcagctagctccatggggggcgaaaggcatatatagcaggatgactgtacaagtgaccacccctcatcatcatcaccttcatctcattcgcatggcttgtcaatggtgcgacaccctaacgtccaagtctggtcaataatttgtagtggagaaaactggcagcgccttgttaggttgtgtctatcttccttcgtttgtatgcttaagaagcttgtcactgcctgtgaaccatggtactactgcagttgtccacacactacagacagcagctcaccacgtcaccttacccgaatttgttccagcaattggcaccgttcccctgggcattacgcaaacattgcccatacaacagcataacgttcttcaaaccacaggcgcatgacaacaagctaggtcacacaccaaaactattttttaatagcaccaacaacatgcgtagcaacacgtttgttttaagggcactggcatcaagctttaatagacacatgaattgaacaggtaatcacaaattgacgggacaagcagacacagatctagagatatgattcggactctcttcccagctgggatgatcccaatcagaaacatgtagagcaactgaaaggtcaataagcactagcgagactgttgcattgaaacaatcctatattccagatgctaaatccagaatggaaatagaagtacatgcagtatagatcagccaggactaaaaagaatggaaattggagttatgttgttggcagcctgccaactttgactataccataactatcagcagacaaattgaactgcttaataagttactcaaggacatgctacctggtaattagaaaaacatgaatgtttacaaaactaatcggatgactgtaaaacaaatccacaagagtatagataaagcaaacagtattttaagaatctaaaattgaaatattctataaatcataaggagttgaagaactacacaggatgtaacatgtatcacaaaagactgtataatgcagggattgaaagaacctgtagtaaacaactggtaaaggtctattaaagagcatatggacatcctatgtaaaacaaatcaagaaatttgtgaattacagtccgttcacattacagctacagctacagcatcattcctttgcaacattccatgagttatgatgtcaacaactaacatcagacatgaagcccaaaatgattgctgatggcattagtgtacaagatgtcagacataccacaatacaatgctgtcacttgaggggaaccatatcttagcatccataaaactcagccaaacctaacaacagatgaaaattttcaaacataaaactactatatgatacattagaaaatggaatgtggataaaaagaatacctggctgccagcagaaaatggtcctccaggctacataaaatgaaaacagtaacctacgtaatatttaagtgtcaaagctaaggcaaacacaatcacacagcaatggaaaccaagtgtaataacctgcatgccagcttaaccctgaggtattttgccgttaccacagctactgaattactgtccagaattaataataccagaccaaaagtcatcatatcattgtcactttgtgctggaatagaattg

SEQ ID NO: 21399 - DNA, 2134 bp, Zea Mays
gtcactgtcttttcatgataatgctgcaactgtgaaattggcaatggctatggtgtacctggaggcggtgcttattatgctgcaaacttgccaagtcctcaaatgaataaacctagagatgaaactgataaagctaaatgtgcaaacgatctccctgattttttaaagcagaggttaagggcaaggggaattctcaaagatgagactacaaataagaattacacgagtacgcagactgtaagttgctaatttctttccaaactgaagtgcgaaggtggaagctaagtactagtagttgggagaaacttgatctagtgccagcacaatcttattattcagcagtaggcaagtatcattaccctgcagttgtgtctgagtgcctgattcaggtctttggtcgtagtccttaggtgtagtcttcttcatttgttccctagttctgttctttacaaacttctgtattttcattttattaatggaaatggggttatccttggatcgaaaagaaaaaaaaatgccacatggatatggaaatctatcatatgaaatgatgaaaactgtatggttgactaaaagtgcacttacctacataaataaaaagaacactgggaaatttgatgatactgaaaaatgttagaaaggatgccttttgtctttagcattagcttgcacatatgacaaacttgatgtgcaattgatattttatccatcacatttttttgtgttaattaatgtgtcattcatttggtgccactgagttacaggtggattctcaagaaatcgagaacaaatctgcacaagagttgcctcctggttggattgaagtgaaggacccgacaactggagcgccatacttctacaatcaaagcactggagtgagtcaatgggatcgccctgacagtgttgtgaatatcatgcaacatcaagtttctccatccttgccagagaactgggaggaggcaattgacaaatcaacaggccacaaatactattataacacgaagacacagaccacacaatgggaacctcctacttctgtgaacaccagtgttagacctccagcttccaccaacactgcagttgagccagtcgctcaagctgcagatatttggaactctcaaatgcagagatgtttgggctgtggtggatggggagttggtcttgtccagccttggggatactgcaatcactgcacaagggttcaaaatcgtccttttcaacagtacccatcttacacaaataatacgatgcacgccagtggtaacaatgctcccaaagctcaggggaatgtttcagctaagaacagatcaagctcaaagccacctttagggaaaccaaacagaaaagaccaccgcaaaagaaatcgccccgaggatgatgaacttgacccaatggacccgagttcttactcagatgctccacgcgggggctgggttgttggtttgaagggtgttcaaccacgagcagcagatactaccgcagctggacctttgttccaacaaagaccatatccctcaccgggtgctgtgttgagaaaaaatgcagaggtagcaacccatggcaagaaacgtggtggtatggctccgataacaaaaagaggagatggcagcgacggacttggggaggcagattagtcttttggtgaactgaaatgttgtgctatccgaatctccttggtggttgtctctggagctgctaaactatcattgcacgcctgaagaaaatcgaaaaaatattggctgccagatctggaatgaggaaactcactacagttcgcgagtttttgcagcgattaacgctagtgtactcgctggacctcgaggctagagcaatgcgagctcaccccggcttgctgatgacacattcactgagttcactgcggtttgccgatgacattcaatgtgcccttggtgtgaattttatatgaaaatgaactataatctgtaattggaaagagtgatttcaatgtaaggaattaacttttgtggggtgatgaaccatactagcgatgcacttagccaaacaagagaaatttggatttgtaccattaaaagattacaactttagatatatagcattgctatctcactaacatgtgtggtccacatgagacatgagtcaataacatgtggag

SEQ ID NO: 21400 - DNA, 1123 bp, Zea Mays
atttagttcaataagttgtcaatattaatgaatgtgcaaaaatcaagagtttcatcttcctgtttattccatggtatttactggaaaagccagaaatggacgtgactcaaattcaattcaactattcaatatttttcctgaatgcactttctgcattcgcattgaacatatccatattcttagttattggaagaactggagctgtcaccattcgagttgctggtgttctgaaggactggatacttattgctctctcaactattatcttccctgaatccgttattacaagtctcaacataattggatacgcagttgcgctctctggtgttgtcctgtacaattatctgaagatgaaagatgtcagagcaaaccagcttccagcagataataattctgatagggctacaaaggacaagaagtcttctagtatgttcaggcctgacaattccatggacaacagtgatgggactgtagcaggaggcctggcatcagaagctgcagcagttgatgaggaagcccctttgatcccttctgcacgcctctcctacgttacacggacccaaacaggcagctccagtaacagataaccatggtgtacctgttctgtgggttgaccaccatatatttttgttccggtgaacctgaaagaggtgctggtatacgtgtggaaaagaatatggttaaggaagctcctgcaagtcgcacctcatctcataccatgacgacacctggatgtctcctctcgatgtacctttttcgctaggcgtgtatatttcggggagatacctagaggtggattagagaacttgaagagataggctataacttttgcttagtatttggagaaacacgttaggccatgtgttggctatagtatttccttaaccaaacatatggaaatggtgttaaacgttagatgttgtgaagcacttcataggctctaatttgagtgttagtgttgtttccttttcggttctttcattgttcccttaagtactagcggattaccaagtgtgcatccggcaaattttgcaattgtctggactctgatatgtttttaggagtacacctactgcaggctgccgtattgctgcataccctaattttgcaagtgaagttctac

SEQ ID NO: 21401 - DNA, 688 bp, Zea Mays
cccctcaacatgttcggaggctgttaattcttccataccgacgatatgaagctgaccaaggtaatttttgcactgtttcatcgggatcatacaaacttgtgtgggacaattcatattcttcattcttcaaaaaggtccttcggtacaaggtggatgctgtgccaccggttgttgagccggccttgtcagccacggaactctgaagaggtctgtcttaatataatgatgtaacgagggccgatgcatgcccgagtatagctgtacaaatgtttctgaaggccccacacggtgctgttactgattattccatcgaatgctttgcggtgttctgatcgcagcattccctgatagctcgctgtcagagcgcatggatatgtactttgtgtgcacatggctgcggccacttgtcaccgacgaatgcctgaatataacagaaatgtattatatcgaccaataagagcatgtctgattggaagctgtcgtggtttgtttttattttttttctcgaatacggagagctgtgtgtcattgcaccaggaagaggaagagctgtggacgtgctccctggaaagagcatcccctttggctaccaattgttgaatttgccagtccatattttagcgcttcggatctgctcagatcccgattctgtttggatgaattgagctttgctttccccaacgaaaat

SEQ ID NO: 21402 - DNA, 833 bp, Zea Mays
agattttttgggacagaggaataggagttgaagaaatcaaactttacggtgctgaagaagataatgaaatgattgcagattctacagaaagtaactttgaagatcttgaaaacgtgattgcaaatatatttccgaagaggggaaaatgtcatttactgtcagcagctagatacgaaaggggggaaaagtctatttactgcttatcctgtttaatttctcttattgagcaggatagttcttgagcgtcctgaatatggttatgcaacatacttctttgaggtggtccaatcaaggccaatagaatggcagatccgtaggctggttgttgcaatgaagcttagtggctgtggaaggacagctcttattgaaaacaggccgttactggttggtacagatttaacagaaggcgaggcacatgttttggaaggatatggctggctaagaaacactgggcttggcacaatggtcaactaccgtgatcgtgtggtccatgacaggtggactgagaaatctgtttctgattggaggtcgaagatagggaaacttctaatggttggttatgctgagggccaatcaatcacaactcttggcccgaagaaaatactggacatgctggaagctactggggatgctgaatttgaagtgaagttggaggatccttattgagagatccgacgtgtataggtacaatatgtacgtgtagttctgaatgcgtccagataaacttagggtaggagctctctgatgaaataacgtggcacttgtattctaaattctaaatcacaaattcgttcgtgattattttaatttcacggaagttagcattatctcca

SEQ ID NO: 21403 - DNA, 2632 bp, Zea Mays
gccgccgtggtccgctgtcgcacacgccctcctgcccctctgctcccctcccagatcccgtgatccgctgccgtgatccgatgccgcacccgccatcaacgccctcctccccctctgctcccctcccagatctcgtgatccgctgcgaggccgccatcaacgccctcctccccctccgctcagctcccctcccaggatctcggcgcgctttcatcgccgccttgatggtccacggctgcacccacatacgacatcgcctgtccgcacgcaagcttctgcctgcgcccacctgtgtgcatagatgtgtgcccccgcccacctcttctgcgcccaatctttacccgtcgtccgcgccgctgttccatcctcgcacccacgcccgagatccacatgtgccgcaccccagccgtgctccggatgctgcaccgcccttccatcctccgcatgcagcaccatgttggccgccgccctgaaacctcgctaccacggagctgcaagcccccgcttccaaaccagcaccatgcagacttccaatttgttttttgtttggagcactgttgattttttctcgtttttttgagaacattacattgcccgtctttcactgttcaacttttcttaattaaccatttacatttaccaaaaacttattcaacttttcactgttcaagttcaatttgttttgtgcagtattgatctgttgtgcagtgtatactttgaggttcggttggccgatcttgcgatcgaataccaaaaacttgtgcggtactctgttgctgaataaaacttggatcaggttaccccaaccccaatggcatttaccgagccgatggaggcgaacctgctacgccaagtgctggactatccccccagtgctctgtccatgtccatccctccttcagcttcattgatggttgcactgctctactatactataagtgaattgagttaaagcattttttgttcgactactgtttggtgcatgcaacttaatatggctgatttttagtctttctattttagtttataaattgtcaatcacagggattaaaagagactaaaagtaaggtttcaggttctatttctatccatctttaattaagggctgaaacgatactgtcttgattcctaattcacctaatattcctagaccaagaacgactcgggttaatggtcagggatgccaaattgtttcagtaaaactaagcaagctcgtatgatgattatgtacctacttgagaacaaattgtctaaaacatatctgctactacacttcagtaaaacaattgatcacacacaagaagttcagatcagaaagcaggctgtcgctactcccgtcaggttctcggatggttcccgtcaagggctgaccatggagaagagcacagtggtggtcagtgtccctgttgttgtcatggccgagactgctgagaccgactacagctcgagcttctctattcatggttacgaaatgtattggggttctatatttttggtgctagacttcttgtcgtggattcacatttgctacctggggcacctttgcaggatgcagagtcccagaaagatgttgggaagggtgataaatcaagggataagggaactgctgagaagtttgcaatatatcagaagcatcgttcttcgttggcagacactgttcaattcaggaggccagctgctccaacttccagtgtgaatgctgatattgtgggaacatccactctgcagtctgcatctctaccgaaacaagaaccctcaacagctacatccaagagctatactttcagagaaggtgatagggtgcgttatatgggtccagctcagttatcctcattgtcacaaaggctcctctccttttgctggcttcgctgttggaagcgagacatcatgtggtgtggataacgtccttgcagagcacgtgaactcaaatttcactctaatgccagctagctgctacatagtgcacttctgtatattatgagaagagagtggctcttcactcccatcggattgacaaaaacacactcggacaaccagtgctggtattaatcgagatgtcgcatcaacaaacgctcatgcagagccagattctactcctacagtcctacgtctacacgagacgacacaagtgcatctataattgatcttttcttttcatctactattctcaacagacacagcagaactgcatgccagcagaggaatgcatatctagtggagataaactgtaatcggccgcctggatgacacgataggaccacgcgtaagaacaaactgggaccaaataataaaagacgaacggagaaaacgtgtcgttgcagatgcccaggttgtcgcactggctccgtcactgtctgatcgagtatctgcaaagtagggattaggtttgtcaccgttgactttacatgcgcctgcacattattctcaagtagtagtacttgtaatcacccctaggccctagtcaatgtgcacgagggaggccaacgtggcttcgcccttgctttaaaatctgactgttttttttcttcactttctcataagaacgtacttttcctgtatcagtcgcctagatagttattttaaacttttacaagaattacagcgggaggtggtgataacgattacagttaaa

SEQ ID NO: 21404 - DNA, 2488 bp, Zea Mays
ttgcacgccacggtcggccgcccccagtataaaacgggacccaggcgcctccgtctccaacacagctcgccgccgccgagtagctgctcttcgtttctttccagttccagctgaaagccttctcgccgtacccagttctgttcttgtatctgttgtttctggtctctgtttcgatgccagttttggttcggttctaggctgctagctgttgattctgctttctgtttcgcttctgtttacgacacctgaaccagtttttggtaccggtgggggagcactgtcccaatggctggccgccgttcgccgtcggcggatcccggtctcggtcactgcgaagctcccgaaatgagatccggtggcgctttagagccctcgtccgttccaatacgcagtcggatgctgggttacgctcgcctctaaatctaagcttattatttatgcctttgcttcgtattcgtcagatctgatttcgtatttctgtctcgaccgaaattttgcgcggtgcagtgattataaaaacattcctcgtactgatgggtcatcctcgtgaacgactcctatacacccatagaatctgagcacccaaaacacatctccaaattttttttactttcgtgctctattttgtttgtttgttatactatttaggttttttaaaagaaacttgacttccgcgctgttttgcaaatctgtatttttcttatttgctttataatttgtattggatggttttgaattacttggatttatcatgacaatacattgttgtagcactcaaaacactgctagatttatcttctagcctgtggtcaagtcgtcacagcgagtggctctatcgttcatctactgcttgcccagtgcccagttgacacccgtccttcctgcgttgctattgtcgatcgacgaattcttcatgagatcttctatctggtcgcaaggtggaacttttggttccgatgctaccgcaacgtcagcatcgcatcaacttttgtattgacacaatgtattattaaaacaaatatgttattgataatgtaatgatgaaaattaaaatatgtaatttatgaaacatataattttactagttgtaggggttttattaaatcatttttagttaatcgttgtccgcattatcaatcgaagggtattgtgcggacctctctttgaaaaaaacgtctctaaacttttacaatgtccgtggagcaacttcaaactagataaagtgaattcggatttttataaaaaatgtaaccaaagagttatccaattgggaagtcacggccgtgcaaatattcagtgttttttaaaaaacagtgaatgttgttgtttaaatgactctaaatgttattttagtctgttctgtccagcttgataatattgcataattctctgggatttcagcatcaaaacttaaaatgggctccgaatcttaactgaaccacccacctaaactttctcggtggaatgtggagctttaatctcccccataattagtctattttaataagaatttaatacatgtttattggaaatacttgataacaatatatattataatcctataaatattgaagtatttttaaaaattacaaaagctaatgtataaaaggtaaatatcttagttcaggaaagttgagttcaaaagggaatggttggtgaggagaattagagggaagaatagttaataaggtatttaaatataaatagaaagacgaatgatgtgatttgatttgagagagatggttggagaaatctacctacaaacgttagacatctaaattatacaaatgtcaagtatactcaactaaatatcattgcaaaatttctagccgtgcttcaatcatctatttaataaaagcttctcacataaaatgtatttttcctaaaataaatatatagtaatataaaaaactgggtagctcaaaacatagattcgaatcttgaaactaaaatttaagctagaggcattccatctgttcattagtacctttgtaaactatataacaagctttaaaattgtttattttataaaacgattcttggtaaagattatatattaccttcctctaaataagtgaaatggtggatattcatttctgagttagcttgaaattttatcgcacactcacaagtaatagtctcttaaaatgaaataatatatgtacataatatacctagagcttttaactaaataaaggaccataacaaatatacagagagggtaagagtccggcggtgtccaggcgaccaggcgggtcatgggtctggcgcgctggtcccgtggtggcagcgcgatgaggaattgggccaggggagtttgcgcgtgactaggattgggccagcacgcgcacaaggaaaaagaggaatgggccaaaaggcgcccaaatcgaccgatgtaggttttttctcttttgttttttttctgttttagattcctacttcaaatttaaattcaaatcagagtttcaagttctagtttaaatgcaac

SEQ ID NO: 21405 - DNA, 1622 bp, Zea Mays
cttttagacatgaccaatgccctatgcacaatatgctgccacagtctaagctggtgcatgcgcagcgatggccgacggaaagaaaaataaggaaaagaagcaaaccaacgcgagcgtgtgacccagactggcagactcccagtcgcagaggccgcacgagagattaggatggtctgcccatccgtataaaaggcgcggccggcgattgcagccccctccgtcctcgttctcgtcttcgcgccgcctctcatcttccgtgagccgaagcttcggcggcggcggaatatggcggggaaaaccaagggtgggaagaacaaaggaaaggcgcagggcgctggtcagtccgcctctgctgagccagaggtgccggcgactgacggagccgaagtggtgaatccagagaatggggaagtaaacgaaccccccgtcacggaggatggtgtgaaaaatgttgagaaaggagacggggatgccctggaggttgtgcagcctgcaagaaagccagctgaaggagagcttcatctatacgctgttcctgtcaggacacaatcaggtgaaaagcttgagctgcagctaagcccaggagattctgttattgatgttaaacaattccttttggatgctcctgaaacatgcttctatacatgctacaatttgatattgcatactgaagatgggtcagctcatcagttggaagactacaatgaaatatctgaaatagcagatataacttctagtggatgttcactggagatggttgctggtcacatctccgacgtgtgagggagctactatctctgtctagtctttatgtttccctatcaacatccttagctctgcatcaggagtctgctcaaggaaaatctgcaggtcctgaaaaaggccctattcaggagcttgatggtttaaatttcatggaggatagtgctggcgctctcactaatttattggcttctgcaccagcagagataaaatgtgttggaagcattgttttttcgtctttcaatcctccgcctagttatcggaggttacatggagatctcatttatattgatgttacaacactagaaggaaataaatactgcattaccggaagctccaaatttttttatgttaacagtagcaaaggaagtatatttgactcgaaacctacaaaacaaggactggaggccagcactctcataggcctactacagaagatcagtaccaaatttaagaaaggttttcgtgaactcttggatcgcagggcatcggctcatccatttgagaatgttcagtctttgcttccagtgacttcttggttaggagcttttcctgtgccagagcatagaagggatgaagccagggctgaggactcggttgtgttgtcgtatggcaccgaattaattggcatgcagagagactggaatgaagaattgcagtcctgccaggagtttcctcatggcaatcctcaagaaaggatattgcgtggcagagcacgctataaagtaacatgtgattttgtggatgctgcagtaaaaggtgcagttggtgtcattaatagatgcatacccccaataaatccaactgacccagaatgttttcatatagtaaacaatgtcaacaggttctatgttgcatga

SEQ ID NO: 21406 - DNA, 4295 bp, Zea Mays
cccctatcctctctcctcgcccaccggaaacgcaacgcaacgcaacgcaaccagagggggaggggggggggggggaaagccggagccgactgcccgcaccacccacaggaacgccgcggggcaggggggcaggaggaagacgccggcggcggcggcttaaaagggcagggcgccattacctgcttccctgtcttccccttcccctcatgtactatagtactgcgctgcgccctttcatttacccggagtagtaaacgagaagaggaataattgtgtcgcaaactaatccgtttcgccgctgcctgctgcttgagccaatcttccgcgggtcggggccgatgacctgccaactggtactgcttgccccctccccctttcctattgctacgatttagcttcatatatgtgattttgctgcaactattatgtacgtaagctatctcggaccgattgaattaagctatctcggaccgattgaattaagctatctcggaccgattgccccctccccctttcctattgctacgatttagcttcatatatgtgattttgctgcaactattatgtacgtaagctatctcggaccgattgaattaagctatctcggaccgattgaattaaggaattctgtccgtgccatatagacgatcttttagtgctcattacatgtattagactctgtttgaatgtactagagctaatagttagctactaaaattagcttaaagatatccaaataatctagctaatagttcagctattagctacttttagcaaattagctaatagttagttatctatttgttagccacctatttccactaataattttttagtcaactaactattagctttagtgcattcaaacacggccttattgtcgccttggtggagtttctattgggttgtcatatactagtcgcttcttgtttccgcatacataccctattttcacctgtcatgagtcgtcatgctttgcgtttggtgcctcatggtaggctcaacaacattctaggccgatttattttgatgtacaaacaaagcaaaaggaaagcgatttttgcccccagtgatgagttatgaacgattctagtgtacttgttatcgtcctaggcgtgactctagcagtgccgatttatcatacatcatctcgccaatattatgcaatagcgttccacgatactatatttgtcaagtgcacaactgatttgaaactggtctttaacaaaaagaagatcggacaggtgatctgtaactgagtgcagtatttcttttctatttactataagtaccagcgacactctggtcatcagcgttcaactgttaattagaaaactattttagtacatgttctagagaagtgtttgtaaagtttattgttaaatgctacaattctggcctaacgagcataacaagctttgcacgtcagggaccccagggtcgtcgtcatctatctatatttgaggtttttgcgtcaacatgacaaggtgcttttactctcaccaaaccgttactggggttgtccctgtgtctgtcatttctttgtcctaggcaatggccacagagaagagccaaagacatgatgggtattttttacaacacggacgtgctggtaatgtctgtggcggaggcagggttggcttctgtctgttatggtgttctgctgcctccccgtgtggctgtggcagccatcagctctaccaggagcagctgtatccagagatggtgtgaagcacacacaattctactctgcgcagggtaaagaatcactctggcagagttgttttactagtcgtattcgatttgcaaacaacaaaactccctggactcaaataagcatcaataactttttaatatcaaatgatatggacattggggggaaaggtccttacctaccttaagaacaaatagcaatatgttaacaaggaaagtttcgaagtcgataactcatgcattttgtgccctataactgtaattgtaagataaatgtttacgcacaacactttaattcagttctactattgtgctcttcgtgtatttatttcattcattttatttccttttttcctttttggtctcaggtctgtttcacttgccattttggataggatcgctcgttttggaattaactttatgctaacagaatctaggtgtcattaagctagattaagcttgctgcttgacttagtagtgtaaatctgtaaagaaaattacctggtttgggtttagtctctataaaagaaatggaacagaggaatgttctggcattgggtgaacatgttctaaaagctactgtttggaagcggaagcataagactgctatggagcaccctgaaggcaatgatgtgatggtgttctctcagcatgatcaaagaaagcaccctgtgatatttgacgacagagctaaatgtaagaagtctaaattaatttcctgtgggagtggagttatattggagtcatattggaactttaagacaagtgggctgcctgtgcgcgtgcttttctaccaacatggtgactggagtgattttccagaggatgttgtaaatctagcacaacaggacttccagttgaagaagccaattacaactgctgtgttccagaacaagcacatcctgttggacttcattcacatgatttgcatagattatgagatgaccatagacaaaccactagcatgggttgatgataatggcaaacgcttctttccagatttatctgctgggctctacacatctaaaccatctcagcatgagaatggtgaagctgatgagtgtgatggaacgcctacaagtgtagctgaaagttctagttcggtatctgttggtgaagtagtttctcatggtccttcattccatttgaatgaatattctagtggaaccatacaagctactggcaagccaaacgattgtcgacgtattgattcagctgtgcggaatttgttgctcaaaggattaggtcagccgtttagtgaggaagatattattggtatctatagaacaccactgctagatcagcgagggcaagttcgttgtggtctcttccagaaggagatcgaagagaccaggagtcgtcgggggaatgcaaatgtacgttatgcttggcttccttgctcaagatataccatggagcagatggcaatgcggggtgctctggaaatcgcgaagcctcataaggggtccatttgtggtgttgggacttgtcttgctcctgcaaactgtacaaattcatgtgccagatattctgattttcatgaagatggcatcatcagaatgatgttgtgccgtgtaataatgggtaatgttgaggttgttttgcctggatcaaagcaatttcagccatccaatggaagttttgataatggtgtggatgatcttcaaaatccacagaattacatcgtatgggatgctaatgtgcataaacacatatatgctgaatatgctgttattgtccaagcacctctcgtgaccaatgaatgttcgggcttgaaggatagcgtgcccaacatatctgagatcataagttctggttctcgagacaatctaaccaaggaggataggttcgcgccttgtggtgtcgaacaagaagcacctaggctggggcgtgctccaagggccccctcctcaccatggatgcccttttcgatgctttttgctgctatttccacgaaagtgcctcgttcggacatggagttggtcatcagatactatgaagaattcaagaggaagaggatgagccggagcgacctggtggtacggatgaggcaaatagtcggtgataagatattggtttctacaataatgaggcttcaccaccagaagaagcccccatcgatggcagcagcagcagctgggctagcaagagcactcgcaaggggggaagagggagggggagtagccgagtaagattagtttaagccgccttgtcttttgagaaatttatggagcacatatgctttgtcgacatggccagacccaaggtgtcaaaagggagggagatgagctgagcaactgttgtagtgtagtctcaaactcaaagcgtttaggtcttgacatttgacaaactaaaactcagaaacattatcatgagtagtgtttttttttcgtttctctttcctggatttaactattgttattgctatttcgtggatatctgggcactgaaggccgtgctattgttggttaatgatggtatgattaagggtgcgcttgccattttaaccctttgaccacatccaaacaatcacggctccttgtgccagctcaaaggcaacatctatcatgtgaaaatttaag

SEQ ID NO: 21407 - DNA, 2337 bp, Zea Mays
ggtccatttgtttcatccatcgtttctcaatgatgtctatgattctcttaattgtggcagttggagacccttctgttgcagaaggatacctacatgaactacagtcaggcgctaagttacacaagccaagcactaagtcagaacctagcaggcttaaggaaaaagagtccaattcgcaagataagtaccacattgagttactatttggaggataattggaaacgcctatgggtgcttgcattatggattggaataatggctggactgttcacttggaagttcatgcagtatcgcaacaggtatgtctttaatgtgatgggctactgtgtgaccactgcaaaaggcgctgctgaaaccctgaagctgaacatggcaattatcctcctcccagtatgccgtaacaccattacttggttgagaaatacaagggctgcacgggcattgccatttgatgataatattaacttccacaagactattgcagcagcaatcgttgttggtataatcctccatgcagggaaccatcttgtgtgtgattttccacggcttataaattcatcaaatgagaaatatgctcctctgggccagtacttcggtgaaacaaagccaacatactttacattggtcaaaggagtggaaggcatcactggtgtaattatggttatctgtatgattattgctttcactttagctacacggtggttccgtcgtagcctggtgaagcttccaaaaccatttgacaaactgactggcttcaatgccttctggtactctcatcatttattcataattgtgtatttggctctcattgttcatggccagttcctttacctcattcatgtctggtaccgaaaaacgacatggatgtatctggcagtgcctgtttgcctgtatgtaggggagagggtgctgaggttcttcaggtctggcagttattctgtcaggctattgaaggtggccatatatcctggtaatgtgttgacactgcaaatgtccaagcctccggctttccgatacaagagtgggcaatatatgtttgttcaatgtccagcagtgtcaccctttgaatggcatccgttctcaattacttcagcgcctggggatgattatctaagcattcatgttcgacaacttggtgactggacacgagagctcaagagggtttttgcagcagcttgtgaacccccagtgggcggtaaaagtggccttcttagagcagacgagacaaccaagaaagccttaccaaaacttctgattgatggaccttatggttctcctgctcaggattacagcaagtatgatgttcttctacttgttggattagggattggtgcaactccttttatcagcatactgaaagatcttcttaacaatattataaggatggaggaagaggaggatgcttccactgatctttatcctccagttggtccgaacaagccgcacattgatctcagcacacttatgacggtcacatcaagaccaaagagggttctaaggaccacaaacgcttacttctattgggttacacaatattattgagatgcacaactaccttacgagtgtttatgaggaaggagatgctcggtcagcgctcatcaccatgcttcaagctttgaaccatgcaaagaatggcgttgacattgtctctggaactaaagtccggacacactttgcaagaccaaattggaaaaaagtcctatctaaaattgcctcgaagcatccatttgctaagatagcatttttgtcttggtatgttcatctggagttctggacgaacatgagagcaaagtggagaagctaccatcaaatgcttaacagctgacggcctgcactctttgttaactgctcctaaatgaaccagaccaccaagaagtgggatttttgtgtacatatacatgtgatgtccaaacgtccatctgcagattggacccctcaactgtgaagagattcctcccaggtggtcaccaatgtacagagcacacatgaagataaagagtagttgggattgtcggtagcatgctattcgtataggacaggagggataccactagtcacaacacacaaggctatttaattgtatattttcatgcagctgatgccctgcactttctgctgctggccaatgcggcaaggacagaagcattttttctcatttgtaccgcatacagaaaaggcataacaaaaaagaggtgaaagggagaatagcattttagcacacttatgggtccctcgatttatttgaccctgcggtgctacgagcctacgaggaggagatgaagtagaataaaattgtcatttcattaaataaagcaaatgtttagaatattttaatat

SEQ ID NO: 21408 - DNA, 916 bp, Zea Mays
gtcacattgtcattgcaatatactaatagtatactatctctgcatgaggaaggtaaagatcaggctctctattatgatgctcatgtccttgatgctcaaaggagaaggcatgacgttagaggttgccgttgtagatttcttgttcgctacgaccatgattcttctgaggaaattgttccactgaggaaggtgtgccgccgaccggaaactgactacaggcttcagattctgcatgctgctagagcggcagccactaatgcagatgttcacactccacccaaagaggttaaggtggagttggcgtccactgataagagcccagccgagcagaaaccccataagcagcacaagatgatggacgtgaacactgatgaggtgaccatggtctccaccttggagcaagatgagacaccaggcaagactgtagcccccgtaccgtcagcaactgcagaaacccgcaattcaagttcggacacagtgatgaaaggtgctgaggcttcctcggtcgttgaagatgacgatgaagtgcaggcagttgacaagatgaaagaggggtagggttttttttttctgtcaccttttgttatctaggtcagtgcctgtcttaattaccatgtagcatcttaatggcctcagaagcttgtttgaaggcctatgtgagcctttgccttgcctacacctttttgtttggtcgatgatatggtgaaatggaacctggctgggatggttctgtttctccgagggacttttgttatctgtggtcttccttctccagcgtgggcagaggggcgccagagactgcgggtttcgcttcaggatctcagggtaaaatgtgtagctgttcgattgattgtttgcttcactccattgagcgttgttcgtcaataataatttattggagtagtccttgctagtt

SEQ ID NO: 21409 - DNA, 2482 bp, Zea Mays
cgccccggcgcctccccggaacgacctcccacgtggtgggccctcccccgcgttccacctgttttctccgttgacagcgcatcgagccttgcactgcccccactttccagtgtcacttgcgtaactcacctcgctgggtggggcccaccgggagccccgtgcgccgcgcgcgcgcgaggggtcaaactaccgccgcgttgtcgcgctcatcgtcgccgcgtgctgtgggttgcctcgtcctcctcgctgtccacatggcgcgaatcctcatgcggctcctcctcctcgccgcggcggcggcggtggcggcgggggacggctgcctcaactccggctgcgtcgcgctgggctcctacctcgtcgcccggaaccagaacctcacctacatcgccagcctcttcggcatcggcgactaccacgcgctggcgcgctacaaccccggcaccacaaacctggactacatccaggccggccagagcgtcaacatctccttcacctgcggctgccacacgttccccaactcggacgccacctacctcggcggctccttcccgcacaaggttgtcaccggcgacacctacggcggcatcgcccagaactacaacaacctcacctccgccgcctggcttgccgtcaccaacccgtatcccacgaacaacatccccgacaccaacaccgtggtgaacgtcacggtcaactgcacctgcggggacccgaagatctcgtcggactacgggttcttcctcacctacccgctcatgggccagaccctcgccgccgtcgccgccaactacagcttcaactcgtcgtcgcagttggacctgctccgcaagtataaccccggcatggacaccgctacatccgggctcgttttcatccccgtcaaagatggcaatggaagttaccatcctttaaaaccaccaggaaacggaggttctataggagctatagtaggaggagttgttggtggtgttgctattctggtcctgggcgtcttgttatatatcatgttctataggcgaaaaaaggcaaacaaggctgccttacttccatcttctgaagattctacccaacttgctactacatccatggataaatctgccttgtcaaccagtcaagctgatagtagctctggagttccaggaattactgttgataaatcagtagagttctcgtatgaagaactttttaatgccacagagggatttagcatgagtaacaaaatcgggcaaggtggttttggtgctgtctattatgctgagctcaggggcgagaaagctgccataaagaaaatggatatgcaggcttctcacgagttccttgctgagttaaaagttttgacacatgttcatcatttgaatctggtgcgcttgattggtttttgcaccgaaagttccttgtttcttgtctatgagttcatcgagaatgggaacttaagccagcatttgcgtggaactggttatgagcctctgtcttgggctgccagggttcagattgcactagattcagcaagaggtcttgagtacattcatgaacatactgtcccagtgtacatacatcgggacatcaaatcagcaaatatcttgatagacaagaactaccgtgcaaaggtcgcagattttggtttaacaaaacttacagaagttggtaatacatcactacccacacgtggaatcgtgggcacatttggttacatgcctcctgaatatgctcggtacggtgatgtttctccaaaggtcgatgtttatgcctttggcgttgtcctctacgaacttatttcggccaaagacgccattgtcagatcaaccgagtcttccagtgattcaaagggattggtttatctgtttgaggaggctctcaacacaccggatcccaaggaaggccttcaaagactgattgatccggcgctcggcgaggattaccccatcgactcgatcctcaagatgacggtcctggcaagggcgtgcacgcaggaagaccccaaggcaaggcccacgatgagatccatagtggtggcgctgatgacgctgtcgtcaaccagcgagttctgggacatgaacgcgatccaggagaaccaaggtgtcgtgaacctcatgtccgggagatgactcctgtccctgtgggctgtggtatatattattgtacgtcctacctgccttcccctgggcaattgtacattagggctcatttgtacggcccgttgacggccagagaggagggccactgtaggtatttacaatgtaatatcttgtcactcaagggttttctcccgtgtttaggctccctttggaacaaaaaggaaatttcctgaacctgtgttttttgctgtattttttaactaatttctatgaaattcttatagcattcatgtgaaattcctgcattctaaaggatcggaaggtcgttgagagccgcgtgtgagttactggggttatgtacaactctgaagatacttataaaagttattaatatttacttattt

SEQ ID NO: 21410 - DNA, 2037 bp, Zea Mays
accaagttaacattcaacaaaccaaacacgttaagctgtaagccatagtgggaaactgagcctgacagaatcaagttaacattcagcaagaaacggtagaaagcaagaacctggaggggtccaataaacaccagcgaatcaaatttgatcccaggcagttaattaggagatataaccagaaaaaaacataatgagcagacttttaagttcaaatatcaaacttcataaggattcaagccatactgctgcagaagagttttgggtacaacacagaggacacaacaggtccattaaaccaacgaagccacaaccacgattcatgacacacaaaccacagatgtttattagacgacgacatccatatagaggtacaccagagggcaccagacgacgcagatacccaggtacagcagcagcttaaatgaaccatggcttactgaccaccgcggaggcggagcaccaggtggagagtgctctccttctggatgttgtagtctgctagggtgcggccatcctccagctgcttgccggcgaagatcagacgctgctggtctggggggatgccctctttgtcctggatcttcgccttcacgttgtcgatggtgtcggagctctcaacctccagggttatggtcttgccagtcaaggtcttcacaaagatctgcataccacctcgcaagcggagcaccaggtggagggtgctctccttctggatgttgtagtcggcgagggtacggccatcctccagctgcttgccagcaaagatcaggcgctgctggtccggtggaatgccctccttgtcctggatcttggctttgacattatcgattgtgtcagacgactccacctccaaggtgatggtcttgccagtcaatgtcttcacaaagatctgcatgccacccctgaggcggagcaccaagtggagggtgctctccttctggatgttgtagtcagccaaggtgcgaccatcctccagctgcttgccggcgaagatcagccgctgctggtccggtggaatgccctccttgtcctggatcttggccttgacgttgtcaatggtgtctgaggactccacctcaagggtgatcgtcttgccagtaagagtcttcacgaagatctgcatgccacccctgagacgcagcaccaagtggagggtgctctccttctggatcttggccttgacattgtcaatggtatcagaagactcgacctcaagggtgatagtcttgccagtcagagtcttcacgaagatctgcatgccgcccctgagacgcaacaccaagtggagggtgctctccttctgaatgttgtagtcggccagcgtgcgcccgtcctcgagctgcttgccagcaaaaatgagccgctgctggtccggagggatgccctccttgtcctggatcttggccttgacgttgtcgatggtgtcagaagactccacctcgagggtgatagtctttccagtgagggtcttgacgaagatctgcatgcctcccctgaggcggagaacaaggtggagggtgctctccttctggatgttgtagtcggcaagtgtgcgcccgtcctcgagctgcttgccagcgaagatgagccgctgctggtccgggggaatgccttccttgtcctggatcttggccttgacgttgtcaatggtgtcagaggactccacctcgagggtgatagtctttccagtgagagtcttgacgaagatctgcatctgcataagaatcaccaaacaacagggtgactatcaacaaaaaagaacagtctcaaaggaaataaacagcatatgaactatgaaggcgccatgcatgctcatcacactgggtattcaaaatctacacatagctgcagcatatgccaccatacaagtacatcaaaatcataataattagaagacatactgatatattagaatatataggtactcaagaacgattaaatcatagtagcatgttacttcatgtatctaagcatgtatatacatctatctaagtaccagtaaaatcaagataatttaagacatactgatttattaga

SEQ ID NO: 21411 - DNA, 2008 bp, Zea Mays
tttaatagcagtggcggttgcactcctcccacgacggtggccatagtttagtcgcagcagtacaggctccacttgggagcgaggacgaggaggcgggtgccgctcctgtggcttcgccatgtgctctcgccccgcgtcctcggctcctccctcctcggtatctacatgccattatgccaagatctcccactctccgatctgaccagggccgggccaccgcagccatttgcgtctgctcttcccgaatccctgtctcgctttgccctccgtttctccagctataaagccggggggtcctgtggcgtgtgacctttttataccggatgtgcagcgcagggtcaacttcgtcaggtttcttggctccaacaaccttcctgggtcactctaaactgtaaagagatggggtgtggcccatcaatccccgacaagtacacgataggtgggaaggggcgcaagcgccggagcgtcatacaggaggttgccgtgttcgtgcccaccatccgcatcccagtggcctctgacatagctcatccgctcaggggaatagtttccaaggatcttgtcgaccgactctccacactccgtgcccatgtcgcctcgctggctgaagaaatctatcacgcggacgtatcagctgttcaagaactgcagcatgcgctagaggagtacttgccagttgttcttggtttaacaacgaaagagagccgtcttgaatcgtcagtacagttcagatggaagaccttagacgacgaccaggagtgttgtctggcgagcgcgtggtatgaggtgctctcggtggtccacatgatggccatgcttgcgttgtttgaggctaacctattgctcatcccaaagagcagccaaggtggtggtgaaaggaaggtagcagaagacgcaaagaaggatgtcgtcgattcattgctcagggcgtcgggatgcttagactactccgtgcatcgcatacttgttcagatacctgcgcaagtcaagaagggttttcccagttacttgcaggagggcatgcttgaggccatctcaattcaggcattggctcagtgtgtggaaatacagcttggcttggcttctgaatgtgagaaggcaacgctgtcagtaaagaggaggctagcttgtgagcaagtcagctatttttctcaggctcactattgtctgtcgggatgcgatacgagtgactcgtacgggaagaagcttctgctgttcctcaagtggaagtggatggaggccaaggctgtagcgtattactaccatggtctggtgctcgacaagggcggcgaaccggcaaaccatatcagtgcagtctgctgcctctctgcagctgatgacctgctctcagacagcaaaagggcttgcttgagtttttgcttggcaaatcctgtcacgagggtgcctcctccttggggtgtcatgaaaaacatgcacaaaaagatcccagatgtcgcttacaagaagttccaagcgcacgggcatctgtttgagcaaaacaagaacagcgcactccaatccgttcctgacctaccagagtttgcgctgtcgctgagaccggatggatacgagttgccaagcactgattcgatctgggataatgttgatggccaacctcagattcaaagcctcaaggagcatatgatagatgacgaagatgaagtaggcacaaaatgatagttctcacttccaaatgcttcttttcattgtaccaccaaaagtagcagagctcaaaaacgcttaatccaaaatgttttggattcagcatatggctcaactgaaaaaggaatcgcgatctctgtattattgcaagtattaccatatgatatagtaaagtcttatgtgtaatagaatcataaataatagttggtttcttgctgtaatcgcctttaattttattttcccaactggcagaatagagcatcacagaaaaaaaaaatacggcacgcatttcagtagaacaatagtctgcgtgtttggttgggtggctaagtggagaatgtagaag

SEQ ID NO: 21412 - DNA, 289 bp, Zea Mays
accggaccattcaatcggtaggagcgacgggcggtgtgtacaaagggcagggacgtagtcaacgcgagctgatgactcgcgcttactaggcattcctcgttgaagaccaacaattgcaatgatctatccccatcacgatgaaatttcccaagattacccgggcctgtcggccaaggctatatactcgttggatacatcagtgtagcgcgcgtgcggcccagaacatctaagggcatcacagacctgttattgcctcaaacttccgtggcctaaacggccatatccctct

SEQ ID NO: 21413 - DNA, 2003 bp, Zea Mays
cgggcgcgtctcgcgagtcttgcctcgtctctctgcaaatgggtgccgtccatatataaactggacgcggcagtggtcctcagtcttcacactccccactcctctctctctttctccctccctcgtcgtcccatcggaactcggatggggagcgggagcgaggcgcatctgccgcggagccgttcggtctccgcgcagccttgagcgccgcaccgtgtcttcgggctgtccagcttgcgtcgcgaggggcgagacgctacgcgagagcgcgacagggctcttggatccccccagagggccacagagcccacacaacagcagatacccgccgcgcagtggagcctagatagagagagagagagagagtagtgcagccgctaccgctctcgctcgctcggccgtcggcgacatggacaaggagaagaggaggaggagctggatcgagcgcatcaggcggctcttcaccacctcgtcgtccgaccccaagcccgcgcccaaaccagcaccagacaagaaggccaagagcaagcggtggctgccggggaagctgcgcgcgcagcagtcgttcgcgctcccggcgcccgcgcccgcggccacggaaccggaccagatcaggcgggcggaggacgagcagagcaagcacgccgtggccgtcgccctcgccaccgcggccgccgccgaggccgctgtcgccgccgcgcacgccgccgcccacgtggtccgcctcaccggccaggcgccggtggtgccgcccttgccccggcaggtgcgggggcaggagaaggagcgggagcaggccgccgtcgccatccagtcggcttaccgcggatacctggagcagcagcaggcgagcaacaagcggtgggacagcagcatcttctccaaggaagagatgagcgccatgacgaggagcaaggaggaggcggccctcaagcgcgtgcgcgcgctgcagtacgcctccctgcacaacgagaagctgggcctccggcggccgccctccccctccatgtccagggacgacgaggcggacgcgctgaacaaccagcgctggagctggctggaggagtgggtcggctcgcagcccttcgacaaggacgtccccgtggcgcaccagtccccgtacacccgcagcgccagcaggggtgagcacgacgacgtcgtcgaccggctcggctgctcggcccgccgctccttcgcccggccgacgcgcacgccgccgaggggggactgctacggcgacgcggcgcagttcccggggtacatggcctccaccgcgtccgccaaggccaagttcaggtccatgagcacgcccaaggagcgctccgccgccggctacgacgcctactcggagcactgcttcccgttcgccgaccgcctgctctcgccgatcccgtccatgtcgcccatcccctccgtcgccagcgacatgggcttcgccaggccgcccgtcgcgcagcggtcgccgcgggtgccggccaagagccccatgacgcccgcgagggcgcgcacgcggaggtcgcacggcggccaccacagcttcggctccgaggctgcgctgcaccagctgcagatggagcactacaccccagtccgctgaacgtttgctctttttctgatgatgcgatgcaacgagcaacgatgccgtccgtcggtcctttgtgaagatacaattcttttgtttgttcgacttccttaccataaattggtgggttcaaatgttggatgcaagacgatggaactttcaatcgcactgtaggtgacaatgcaccgtggatccatgatgtaagagcgcaaactatatgaattgtgatctgggcctagtcagtcctgaacagaggcacggtcccctttcccactgtctagggaataagagtcgccaacaggagtatgtaaactccttgattgcacgcttcctgagtcgccaacagggaataagcacaataattatcttctttgcatgttagtacttggtatctcaataaaaatactagactcgccaacat

SEQ ID NO: 21414 - DNA, 690 bp, Zea Mays
cccacacccacgtgagcagaggatatttccgccgccaggagagaaggtgatggccatcaccttggtgcttcacctgcgacgccacatggtgctgacccacgcccccaccattgcatagcctagtagtgtggttctggagaatcttcagtgtgcacggatcctgtgttcagtcagatgagccccatagccaagatcaccgtcgttgtggagcgtgggacgcgatgatgggttactgcggcatcgggcttattgggtggtcctggaaagtcaccataccactccgcacctcttcatggcctccccgtgcgaagctatcgaccaaagcgccaccagtttcacgccggagttggtgctccaccgtgatgcctccttgctccgcggactggctactccacaacacattcgcaggttatgagtcatctgaagatcatcctggtatctggaatctcaagtcccaggtaagttgtgcccttgaccactttttacccaataatgttctttaatatcatttattcatgcctaggttaattttgatgggacccaataggttaccctagattgtttatctcattaccttctttacccctgaatcacttgggtagtttgctattgctttacatggatttgggataattatttatcatatctatgttccagttattttgttattctatttatgttcatgtcaag

SEQ ID NO: 21415 - DNA, 5135 bp, Zea Mays
ggtttgcagaccataggagtgatggtgaccttcagcagaagtttggtggttcttacctgcaaaacacttcacacgcagggactgggcttgaacacaggcagacggcttctcagcctgagactgaggctggcaatcagcctgcagtggcaccacagaaagagggggaggcacagtgtgaacccaagccgatgcatacagaggtgggatatggggagagcaatgccacttcccagttcgattccagagctactgctgagggatacggggatcggagcgctgatgcgcaggtggagtacactgatcccagatatctagagagcctctaccctggctggaagtacgacgaggccacacatcagtggtatcaggtagataccctcaacacacagacttatgctgctcgtgatactggtggtgctgtggcagaccttgcgagtggcggtagtgttcagcagcaccaacagtttagtggttcgtacatacaaaacacttcacatccagagcctgctcttgagcttacagagccgacttctgagtcaaagcctcagcttgagcctgcggcggcccctcctcagaccgatgcttatcctgcggtggcatcacataaagaggagcagaaagagcatggatctgtaccggtgcatactaagcctgaagctcaggagattcctgccaatgctggtgatactgccacagtgacagagggtgggtccccagggtcagagaaaggcatccataccgccgtcaagcaagtgcagtggaacgactttggtgccagcactggtggggcggatctatttggtgacctcctgcccgatggagctgaagatgacttctttgagggcaccgtccctgtcagccaagacgtctcatccttggtaggtgctacaaatgttagcgcaccagatcacagcttctctgcaggagtgtataacactgccatgattagtgctggacacagcttctctgacggagttgataaaaatgctaactctcatttcggtcccagtggaagtagtgcagggtacggggatcaaagcactaatgcacagttgggctccactgatcccaaatacctggagagcctctacccggggtggaagtatgatgaggcgacacagcagtggtatcaggtagatacccacagtgcacagagttacgttgctgataatactggtgctgttgtagccgttgggagtgacaatacacagcaacatcagcagcagtttagtgcatcgtacttgcaaaacaatttacatgcagcacttgaaaccattgcggaagagagcagcaccaatgccatgagctgggtccagggtgggaccaacacaggacccccagaatacccaccgaacatgctgttctacgcagaatacccaggatggtactttgacaccaacactcaacaatggcaaacacttgagtcataccagcaaagtgttgcacatgttgcaactactgcagcagcctcagatgggttcgcagggacatgccataatgtagctcattacactgaggattcttatgcaagtagctataaccagcagagccagtggcaaccggattcgttcggtaataccatgcaggctgatgttttggggggcaagagcttgctaggtagttcctatggttctaatcagcaggctgggaatcagattgggcaacaggccaatgtggactctttaaatcacgagcctcatgtaaatacatttatgccttctacagggaatcagagttggtacagtggtttggagcattctacaagtaaggaattaaggtacaaaggatttgaaccttcaacaggtttccagactagtcgcaaggaattccagcctcctaaagatcaccaggctggtcacatggcagatgaacctttgacaagatatgggtatggtagttcaaatggggtcgtcaatacacaaaatttcgtaccaaaagagggtatgcacaagacacaaatgcatgatgactccactgcgcatacttatgctgcaagcaactattggggtactcagacctccatgggcagtgctcagcagcaactgactggtacaaatggtccatcccaacagtttggtttctcaccacatgagcagagatcatcagctggacgcccaccacacactgtggtatcctttggatttggggggaagcttgtagttcttaaagaaaccagctctatggctgcaaactttgacagcggaaatcagggcaattctggtcgaacggtatcagttcttaatattccagagattgttgctgataaaattgatcattcaagcatcgctaacggtggtgcatttagctacttccatgctttgtgtcgccatcctattcctggccctcttgttggtggaagtgctgcatcaaaggatctgaataaatggcttgatgatatgagtggcgtatatgaatcttctcagacagaattccagggaggggatgttcagaaggtgcttatttcgttgttgaaaatattgtgccaacactatggaaagcttcgttcatcctttgggtctgacccgtcacaagagggtatagatggcccagagatggcagtgacgaaacttttctcatcttgtaagagcagtgctaatatgaaagggtatggagctgttgtccattgcatgagaaatcttccctcagaaagccagattcagactactgcccaggaggttcaaagtctcttggtttctggtagaaggaaagaggcccttcaccaggcacaagaaggtcacctttggggccctgcactgatccttgctttacaacttggtgataagttttatgcggatactgtgaagaaaatggcccactgccattttgtttctggatcacccttgaggacactgtgccttcttattgctggacaacctgcagatgttttcagttttgagaatcctgttaacagtggtttgtcttctccccaacagcctgtagaggctgctcctaaaggtatgctggatgactggcaagagaatttggctattataacagcaaacaggacaaaaggtgatgaccttgtaattacccgccttggggattgcctttgggaagagaaaaatgaggttgcatctgcccactcgtgctatttagttgctgaactaaatattgattcgtactctggaagtgcaaggatgtgccttattggtgcggaccacttgagatgtccgcgcacatttaccagccctgaagcaatccagagaacagaggtttatgagtatgcaaaggttcttggtaattctcagtatatcctcttgccatttcaaccatacaagctgatatatgcatatatgcttgcggaggttgggaagatttctgattcactaaagtactgtcaagcatctctgaaggtgctcaagtcctctggtcgtgcacctgaactagaagcatggaagcaactgtttattaccctggaggaccggatacgtacccatcaacagggcggttatgcaacaaatcttgcccctggaaagattgttggaaagcttttcacatcacttgataaatctttgtcccgaatgatgggtacacaatctgcaccgttgcctcaactgccgcagggtgctgcaaatgagagaggtgtttattcttctcctgatacaaaagtagtaaatagtcagtcagtgatgtccatggcaccattagtgtcatctgcttcagagcagtctatgagtgaaattggaggaaatagtgtctatggcagggaagttgcacataacagaagtatttctgaaccagacttcggcaaaaccccccaacagggtgctgctgtatcaagtaaggcacagagcacatcaggttcaggcagttcacgctttggatggttggtgcagaagacaatagggcttgtttcaaaatctcaccgccaggcaaagctaggggaacagaacaagttctactatgacgagaagctgaagcggtgggttgaagaaggtgctgagatccctgccgaggagcccccacttcccccacctccaacaaaagtgccattccagaacagcgttccagatcccaactccaatgctcctcccactggtggaggttattcctcaaatcctcccgagcctagttccgggatgccaccgatgccacccacccagaaccagttctcagcacgtggaaggatgggtgttagatcaagatatgtggatacttttaacaagggtggcggtggtggtggcgcaaatgccttcggagtagcaacatcttatagcaaaccagcagctccttcaatgtccggtgcgaagttccttgtgccaactccagtcaatgttgcttcagaacagatggctgagctaggtgcccacagtgaaaccgcccgacaggatgaatcgtcgtcctcaccagcgatggaaacatcatttagttcgccgccatcactgatacagatgcagtcaagcattccgcggtacccaagcggtgacaacattccacggtacccgagcggtgacaacattccgcggtacccgagcggtgacaacattccgcggtacccaagtatggataacgtcagctcccccacaggcagcattaacagctcgatgtcaaggtcaagagcgtcatcatggagcggaacgtacccagagcagttgagcagcactgccgcttccaggtcacctgatggacagatgacgcagtcaccatcgatgcctggaagaagacctccgcacagccgttccaacagcgcgtcttcttccgcccagctcaatggtttgggtgaggatcttcacgaggtggagctctgacacctggccgcagattttgaccataatgtgatttatattaatagctgcatgtgtctagagagcaaagcaaaggaaattaaagtgcggtgtccctttttcaatttttttacatgtgaaagactgtggatgccgctgcattgtacagatagttgactcgttcgccagatgaaaaatgtataacaagagtcgtaggttcaagatagggagaagatgaaaccgtgatgattcatcattgttaaaaagatggactgtctgttggaaaaataaagctgattaataaccgcaataatgtcggtccgcatcttggtgttcatattcttatttgtgtgtatgcatttctttgttcctgtgtattatattactttgttattttgcgagtcactggag

SEQ ID NO: 21416 - DNA, 762 bp, Zea Mays
agccatgtgtttgctcttatcctctcttgatacactaaaatcaactcaagctatgggtgatgccatgaagggcgttacaaaggcaatggctcaaatgaacaggcagctaaatctgccagggttgcagaggataatgcaagagtttgagcggcagaacgagaggatggagatggtgagcgaagtgatgggagatgccatagatgatgctttggaaggagatgaggaggaagaagaaactgaggagcttgtgaatcaagtacttgatgaaattggcattgatatcaaccaagagcttgttggagccccgtcggccgctgttgctcaacctgcttcagcgggaagggttgcccaggctgaaagtgctgggaatgctgacactggaatcgacgccgatttgcaggcaaggctggacaatctgaggagaatgtaggtgctacaccagcaaaagagtagtgccttctagctctgttgcctgcgaatgtgaatacctagtcaatcaaagcaaaacgtttacaagccagtgtgtatgttgaaatgaatgaagcgttcgatatgccggtagtaatgacaaatgttaaatatacatatttacaatttcttcccctctgagttcatgatggattgatgcctgcagatgcggcatgtcagctgcgtgctaactgtgatttgcaagctgttgcttaaatacacagcagatatctaagctttaaattgccatgcttcctttccggcgattcaacgtcgtcgaagctccgaatcgtt

SEQ ID NO: 21417 - DNA, 2736 bp, Zea Mays
ggagtataaaagctagctccggtccccgggggccgcggcctcgggctgccgctggttccgaacgcgtggtgcgacccgggattccctcgcgcttctctgtgtccccttcctccggcctgaggggaggaccccgcagatcccatcgaaattcacggccggcctaacccaagccggtcctccccgactcccggcgacgaccaatttctccttgaagcagattagctttctggtgcatggttcattgattggtggagccatagagaatcaccaattacttttgaatataactgaacttcgtaagtgcttgacttggagtccaaaccacgttagttcatctaattccttactggccagaaacgagaaacttttatttgtcatgcacacgctgggtcatacatgctgcgcaatacgacagacagttgcatgtcattttcggtatatctcggcttgagtagtatgatttgtttggataattggttgtgaggtgatgacttcagcattaattattgtatctgatggagtgtcgcgacccatgcagatgccctggaggcatcaattgcgttgagagctgactgttttgatgctgagtggttgagttgcgcattctgggtggttgtttctagagggatatagtgagctgcaagctgttagacctgcgaataattgctttatttgatggtgtgtctaaacttgaacggatacactatagctactaatcatcttgagtgctgagtttttatggcaaagtggaagtttgtcactactcactagatgttcagccaaacagccacgtatttgcggctgtgcagcctcatgcagagttacagagaagatgagataacagtaaattctgagattttgtatgtgactgtgtttcccactgatatgcgtggcagaaggtgatgtcatgtccccctaacggcagattgttgctgtgcatggttgttaagcttctgatggaactgaatcaaagtgatagtgtttctttcaagtagagtatgctagctcttaaatcttagatagtacacttacatctgatcagtaatcttgatttttcttttgcagttctcgcccctccaacccttcatgatgcttagataatatacagtgctgggttttagcactgttttgagtttttaaattgagctaaggcttcagtgttagtcttgaaagatgaacggttcaagtggttcccaagggcatcatgtcagtggagagaagaagcaagtgtgtcatgttagccggcccattcttaacaatggaccaaagcaccgtccattgacccccatgaggcgatgccgtggtgtagcatgtgtagtgattatactgtcaacagcattcctgttggtagtttacttggctcctattactacttttgctgtgcggctgttcagtgtgcattacagccgaaaggcgacttcctttctatttggaatgtggttatctttatggccgttcttgtttgagaagataaacaaaaccaaggttgtcttctccggtgaaaatgtgcctccaaaacgacgtgtattgttatttgctaaccacaggaccgaggttgactggatgtacttgtgggatcttgcactgaggaaaggccatttaggatatatcaagtacatacttaagagcagcttgatgaagttgcctatttttagctgggcatttcacatttttgagtttatcccggtagaacggaaatgggagattgatgaagcaattattcagaacaagctatcaaaatttaagaacccgagagatcctatctggttggcggtttttcctgaaggcacggattatactgagaagaaatgcatcatgagtcaagagtatgcttcagaacatggcttgcctatgctagaacatgtcctccttccaaagacaaagggcttcatttgttgtttgcaagagctgaggagttccttagatgcagtttatgatgtcacaatagcatacaagcatcgactcccagattttctggacaatgtgtatggcgttgatccttctgaagtccacatccacgtcagaatggttcagctccatcacatccccacaacagaagacaagataacagaatggatggtagagaggtttaggcagaaggaccagctcctggcagatttcttcatgaaggggcactttcctgatgaaggaactgaaggagatctgtcgacgccgaagtgcctggcaaacttcttaacagtagtatgcttgacggccatctgtttgtacctaactcttttctcatttgtgtggttcaaggtctatgttgtagcaagctgcgcttacctctcatttgttacctattactccatactaccaccccaactgataggttcaccagagggtgatgtcaaggccaaaaaggttgtgtagatgttgatgtaacttgccatgaaaactgtacatccgcaaacgatttttactgctggagtttctgccttgtgacatttaaggttccctttctgcagtaggaggtatgaatgtatgatagtgcgtatgtaggaattttctgtgattcatcagtgtgtgagggccctatctgaaggcagtaaactgattttagatatatgttcttaacatttttataaacaaaactagaccacatttgttacaaatattgaagatttatttatttattttatttgatctttgttctgatgcaaacaatcaaacattagctatatccaacttgaatatattaatacaaacaaccaaacaaaaacaaccaaacaaacg

SEQ ID NO: 21418 - DNA, 1279 bp, Zea Mays
cccccatcactaacgggccggcgtcaaccgtccactctgcaacggctcaaccggagggtgacgcacatgacataacccgagagcggatggggcacaacgaggggacttttttaaccaagcctgaaaattcgcccacgaggggaatcgaacccaagacttggaggtgctactcgaaagtcattaaccactaggctagagaccctttcacgctttatctgctgaagaaggtttataccgaagcattcacatgcccgtgtgtaaggtaccacccacgtgaagcatcatttgttgcacagtccaatgggaactacattgctattttttcagcaaggccacccttcaagctgaacaagtacacgcggtttgaaggacatggagtgtggggtttccctgtgaagtgcagcttttcccttggcgggagagaactcgcatctggttcatccgatgggtccatttacttctatgattacaggtcggcaaggcttttgaggaaaatagaagccttcaaagaggcgtgcactgatgtcgcgtaccacccagtaatgcctaatgtgatcgctgcttgtagctgggctggtgaaatatctgtctttgagtgacatgattataatgctgtgtggagaagcatcagcagttcagaaccgctagcatatatatatatatatatatatatatatatcttctgtgactcaaacaccagttaatggtcatagcagattccaaaataaaaataatttgctgtatggagttcatcgtctgaatttcagtctcagcctcgcctatgaacagattatttgtggtttcaaacaaagccttgttctttctgttcaaagtagatgaaacatcatagcacattgattgtagtggcaacatggaccgagaagaagataagtgagttgaagaggctgctgagcgggcaaagcgtatagctgaactttcaccgccgcctgagccgtatgatcccgaagtcgatccggccatgaaggaagcattagaaacgataaggatcgccaacgaagctgtcaacagactcctaaatgaagctaccgataagatattgaaagaggactgaattcttgtgtactaaaaaatgtaatattcgtgtatgagtcgaacatcgaacgtttgtatgtatattaatgtaatatatttcttttgcgatgcatgaaatctatgtacataccgttttgagccttcggcgaaaaaacatcttaccttcttttcatgtttcgccaagaaaaattgccacctctattgattgaatacttcgtacttttgc

SEQ ID NO: 21419 - DNA, 2030 bp, Zea Mays
acgacaaagctaaaaaagatttagcattttggaatggagtgagttttattttatcaaaatttaatatcagtatcaggtcgtgtgtgttggtgactaccttttgttttatcttatgtgttatctggagaactttggtgtttgctagtataaattcatttttatctcaagaaatctaatgattgactcttgactttcacaactcatgtttatttgagtttcaattattttcagggagtttttatcaattgtgcattggttgaaccatttggactcaccttgattgaggctgctgcatatggtctacccatggttgccacccgaaatggtgggcctgtggacatacatcgggttcttgataatggaattcttgttgacccccacaatcaaaatgaaatagctgaggcactttataagcttgtgtcagataagcacttgtggtcacaatgtcgccagaatggtctgaaaaacatccataaattttcatggcctgaacattgccagaactatttggcacgtgtagtcactctcaagcctagacatccccgctggcaaaagaatgatgttgcagctgaaatatctgaagcagattcacccgaggactctctgagggatattcatgacatatcacttaacttaaagctttccttggacagtgaaaaatcaggcagcaaagaagggaattcaaatgctttgagaaggcattttgaggatgcagcgcaaaagttgtcaggtgttaatgacatcaaaaaggatgtgccaggtgagaatggtaagtggtcgtcattgcgtaggaggaagcacatcattgtaattgctgtagactctgtgcaagatgcagactttgttcaggttattaaaaatatttttgaagcttcaagaaatgagagatcaagtggtgctgttggttttgtgttgtcaacggctagagcaatatcagagttacatactttgcttatatctggagggatagaagctagtgactttgatgccttcatatgcaacagtggcagtgatctttgttatccatcttcaagctctgaggacatgcttaaccctgctgagctcccattcatgattgatcttgattatcactcccaaattgaatatcgctggggaggagaaggtttaaggaagacattaattcgttgggcagctgagaaaaacaaagaaagtggacaaaaaatatttattgaggatgaagaatgctcatccacctactgcatttcatttaaagtgtccaatactgcagctgcacctcctgtgaaggagattaggaggacaatgagaatacaagcactgcgttgccatgttttgtacagccatgatggtagcaagttgaatgtaattcctgttttggcttctcgctcacaggctttaaggtatttgtatatccgatggggggtagagctgtcaaacatcaccgtgattgtcggtgagtgtggtgacacagattatgaaggactacttggaggcgtgcacaaaactatcatactcaaaggctcgttcaatactgctccaaaccaagttcatgctaacagaagctattcatcccaagatgttgtatcctttgacaaacaaggaattgcttcaattgagggatatggtccagacaatctaaagtcagctctacggcaatttggtatattgaaagactaaatctttgatctttgctggtcagcagaggaatcaaagcaggaatgtaggatcgaggagagtgacaggacttcccctctgtgcacttcgccgaaaagtaataatgggattgctatgcatggcccttgttgtacactagaaaattgggcacgcaaacttgtgtcagtttttccgctgttgcgaaattcagtgatggtgtttttgtaactataccaacctgtgtcagttttgccgttgttgcaaaactcagtgatggtgttttttgtaattattatacatccgaataataagactggtgtttccagacagactatgcaagctaaggggaaatcacgattttcctagatcaaatatgtaatatgttcttttccgatgca

SEQ ID NO: 21420 - DNA, 505 bp, Zea Mays
ctcactctctccctcccaggctcatactctttgtatgaggtccttccagaacctgaagagggagcatggagtcctcaggcagaagctggaatcctacttccagctgctgcgacaagccggtcctgccgtgactgcaaccaggcctagaggcatgtaaggaacggctgttggcgtgcagggagcagtgcaagggacagacagcgtcatagcgatgctccactacgccattgttgaggctagctgtaacgatgggccacgaataagaagtttgcctatggcctgtgggggagttccctgcgggttttaaagtgtaacacccttcataatcgatgccttaagctggtgctgccgagtgccgactagctaggccggcatgtaagagcagcctagactgatgttgatgtggtctggcagacgtcctgtgctgtgcctgcctctgtatttcggtcaaataaataaactagatggagtttgcatgtttgcatcatgggatctctgttttttc

SEQ ID NO: 21421 - DNA, 866 bp, Zea Mays
ccgcagcagcttttggtggccagaagctgcgaaaagccgaaacaaatagacacatgggcccaccacgttggcgaaggcagatattaaaacatgaaaacattttctactcttatttttgttcttgaaccgagttctcatgcttggttcacaaactcaaacagttattgggaggccaatactacctgatgctgctgttcatgctgttgtggaagagcatgccttagatgcaaaagtgatcatattcaagaagaaacggagaaaaaattaccgccggacaaagggccatcgtcaggagttgacaaaactgagaataatcaacattgaaggaatagataagccagagactgctgctgttgctgcctaaattcatgggaaagagaaaattagcagcataccagttaaatgtcggtcagtcagatttcgatagttgataccagtgaaatgtcgcttcttttcttgttaattcaaacgttagaggctgtcagcattatgactcgggtaaagtacctgacatgaagcctatgtaccgagcagtttgggtggtgtggatcagctgatgtagtttacctagtgacacatatttttcatttttggttagcttttctgtgcacatcctttatatatgtgtactcagcctgttcgcctgactttaatttgtactgacttctaattctacagtgtttttgtctctatgcattgaagttgtagcagtccaaatagtcgactttaattttaagcgaacagccccgagcttctactgcttagttccacgttagactgctagagtgtaatagtgaaaccgcccttcggttccatgttagaaagagttaataatgaaaccgcggtgcttcgtttctccctggttc

SEQ ID NO: 21422 - DNA, 1303 bp, Zea Mays
aatcaagtcagttcttgcaaatcaaactttgcgacacttcagccatggcaaagaatgtttctagggcagcttggaacactgtgtatgagaaaggtctggttgatgtgctccttgaacataaggacaacccaaagttcaaaagtcaaaatggttggactgctgagggatggaacaatatcacaaacaagttcaatgagaggtatcctcttgcccattactccaaacagcaaatgcaagacaaagataaggagcttaaatctcattacaaggcagtaagagattcaaggaaagaaagtggggtgggttggaatgattccctatgtatgatagtggctgagccagaactttgggaaaagctcatccttgctcacccaaaggtagcgaagtaccaaaagaagccatttccattgtactactctttggaagccctccacgaaggtagtgtggccacaggagatttgaatttcacatacactcagcaaatgccacctccttctttcattcctgttcgtcctcttaatgcccctcctggtggccctcttgctgcccctcctagtggccctcttgctacagctttcggttctgctactgctcattcgaacaggagtacctctgaacaaagccactctcccttgcaccccaacacaaacccattctccatggatttccaagaaatatcaaatgaagctcaatcaggacatgtagaaggtggaaatgggagaaagcgcaagcaaagccaaattggagcagccattgaaagttttgtggattttaagaggagcgccacatccaaaacgctcgaaggtattgaagaagtgtctatggaaaagtgtctagacaagttggatagaattgatgggttcacagatgaggatagatcatatgcaatggaggtctttgaatctgcgataaaccgagaggtgtttatgaagtcaaaaaaccacaatgctagattactttggttgaagaggaaaattagtgcttgtagagcgctcactactatcatgtgatgtgaggtgaatgtggcgatgaagagataggcttacaggaattcactgaataaaacaatacgcttgttcttgcacaagaatgccaatatgtttcttatcttattgtaatgaaaaggtcgttttgatattattgagctgttcaagtttttgaaaaggaactgtatgagcttaagaaatgattgtctaggttacattgaaacatagaactgtatggctggtacaaacgaaatgtgtggctggtacaagtttctaaagtcttgttcctggtgctgacaaattaatgaagtatttgc

SEQ ID NO: 21423 - DNA, 1053 bp, Zea Mays
cactgcatcacaacacacgccagccagccatcgtcacactggtgagctctgcactctgcttagctccgagcttcagtgccttcgttgtttgctccacagtccacacacacacacgtccagctagctgcactgcaccaatggccgccgtcgaggtccaggtcccgactgccgctcccgtcgaggaggctgcccagctggccgccgcctccgccgtcgagaccccgaacgaggagaccgctgctccggcggtggagaccgaggtcgtcgtcgctaaggagccggagccggtggaggcagagcccaaggaagcagagccggaggccgccgcgccggcagcagagacggaggctgctgctgccccggtcgaggctgctgagccggagatagccgccgagaccaaagaggtggcggctgtggaggctaacgaggaggaggaggaggcagcgcctgctgttgctgccactcctgaggtcgcagcgaccgaggaggaagcggcggcccctgctcccgaggccgccgtcgagaagtccgtcgagtgagtccagcccagcgccggacggcggccgatctagctcgctgcgtcagcctgtcacctggcgactggcgtgcgccgcgctggtgccactgccacggcaacagcacggcatggcgccggcataggtcgctaggaaaaacctgcttttgtgttcgggttcacgtcgtgtcctacgtggcgcggcgggccccgcctagtaaaggagcgtcgttttgtgttgtggtcgaataaataatgtgtctgtgtgctgattccgtgtcgggttagtgggcccagtgtcggtgctgatgtggcctacctttacagcacatcggtgggactgggccgttgagctcctgtgtcgtttaatatgtgtacggtgtacccatctagtatgtgtttcgagtgtgtagtaagtatatttgtgtcccatccatctttcgaaactttctttttgttaagctcttgaagcgtgaactctgttacgagctgctcgccctattctaaattataaaatattttagtattttcggcatata

SEQ ID NO: 21424 - DNA, 2468 bp, Zea Mays
  misc_feature (2467)..(2468): n is a, c, g, or t
tcgttcctggctgtcctgaaaaccccaaaccaatcaggcaatcgtgcccagttccgcttcccctcgccatttcgccccgcctcccgcccctactccctacaccttcaccgctgtcgggggaggcggctcgccgtgacatcgacctcaccccacccccagcgtagcatcccgccactccatcgcactgtccatggaggatgacgagtacgaggaggggatggagatgggctacggcgggcatcaccagcacggcggcggccacgcggggtacggcgcggaggaggacgacgaggtggggtacggcggcgggggcggggaagagatggatgaggatgcggacggggacgctgagcagcaggaggatatcactcaggacgacgcctgggccgtcatatccgcctacttcgaggagaagggcctcgtgcgccagcagctcgattccttcgacgagttcatccagaacaccatgcaggagattgttgatgagtccgccgacatcgagatccgccccgagtcgcagcacaaccctggccgccaggccgaatttgccgaggatcagctttggtcaaatctatctcagcaagccaatgatgactgaagccgatggagagacagctactttatttccaaaatcagcaaggctcaggaacttgacatactctgcaccactgtatgttgatgtgtcatacagagtaatgaagaaaggacatgactgtgaggaagttacagagactgcagagtatccaaaagtgtttattgggaaggttccaatcatgttgcgctctagttactgcacactgtatcaacaatctgagaaggatctcactgaacttggggagtgtccttatgaccaaggtggttatttcattatcaatggaagcgaaaaggttcttattgcccaggagaagatgagcactaaccatgtctatgtttttaagaagaggcagcctaataaatttgcatatgtggctgaagtccgttccatggctgagaaccagaacagaccagccagtggcatgtttgtacggatgctttcacgagcaggagcaaaagggggatcatctggtcaatatatccgtgctactctaccttatattcgtgcggacattcccattatcattgtatttcgagcattaggatttgttgctgacaaggatatactggagcatatatgttatgacttttctgatacacaaatgatggaattgctacgcccatccctggaggaagcttttgtcattcaaaatcaacaggttgctctagactacattggaaaacgtggcgcaacagttggtgtcactcgagaaaagagaattaaatatgcaaaagaaatacttcaaaaggaaatgttgcctcatgttggtgttggggaattctgtgaaactaagaaggcatactattttgggtatattattcaccgcctactgatgtgtgctcttagtcgaagagctgaggatgaccgagatcattatggaaacaaaagactagatcttgctggtccactgcttggagggctgtttagaatgcttttcaggaagttaacaagggatgtgagatcttacgtgcaaaagtgtgtagataatggaaaggaagttaatttgcaatttgctatcaaagcaaaaactgttaccagtggcttgaagtactcacttgctactggaaactggggacaggctaaccaagctggaaccagagcaggggtttctcaggtgcttaatcgcctgacctatgcttctaccctttcacatctccggaggctgaactctcccattgggcgtgaaggaaaattggcaaaaccccgccagttgcataattcacattggggaatgatgtgtcctgctgaaacaccagaaggacaagcttgtggcttggtgaaaaatcttgccttgatggtatatatcacggttggttctgctgcaaatccaattttggagtttttggaggagtggggcacagaaaattttgaggagatatcaccagctgtcattccacaagctgctaaaatttttgtcaatggttgttgggttggaattcatagaaaccctgacctgttggttaagactcttaggcgtttaagaagacagattgatgtcaacactgaagttggtgtggttcgtgatatccgtcttaaagaacttcgactttacacggattatggacgctgcagtcgtccattatttattgttgagggccagaggctgctcatcaagaaggcgcacatccgagccttgcaacaaagggagactcctgatgaaggctggcatgaattggtctcaaaaggatatatagagtatatagatactgaagaagaggagactaccatgatctccatgaccataaatgaccttcaaaatgcaaggcacaacccagaagaggcttactctgaaacttacacacattgtgagattcatccttcattgatacttggtgtttgtgcgtcgattattccgtttcctgaccacaaccnn

SEQ ID NO: 21425 - DNA, 1245 bp, Zea Mays
ctgatcctttgaagtcagcatgtccccaaaattaatggagaaatcccatcaattgatgaagccactatggaccatgaaaggctgacagaaaggttgaggctgtatgagctggttgaaaacaaggtgaaaggagatggcaactgtcagttccgagcactatcagatcagctttaccaaagtccggatcaccatgaatttgtgaggtcgcagataattaaccagcttaaaactaaccgtgacgcctatgatggatacgttcccatggcatatgatgattacttggagaaagttgcacggaacggtgaatggggtgaccatgtgacgctgcaggctgctgctgacaagtatggagtaaaaatcttcgtgatgacatcgttcaaggatacttgctacatcgagatcctgcctaaggttcagaagtccaacaaagtgatactgttgagcttctgggcggaggtgcactacaactccatacatccgcagaacgatgctccgaggtcgcagacgaccaagaggagaagatggtggccgttctcgcagcaccaccaccattgatggcgggttcagctctcttggggctggatggatgttcaggatcaggtggtggtcccggtcccggccatcgtccagatgatactacaagggacgtacgacattatgattaatatatatatacccagagcggagcagaaagacctgataagggaattagttgggatgaatgaaatggaataaacatgggatgggatgggaatcgtcgtcccgtatatagtttagagtggaggccggtgagcgccaactcaaactctttgtattgttgtttatatctacaaattttgccggaacgaggctagaattattggggaacaattatggtaataataaatcggttaagaattgagatgacccagctgttggcagagctcggatcatcatatgaccagaatcagaatggattccccagtgcatctagttttcctctggaagaacagaacaacataaaagaaaaacgttgaacactgaagtgggaagctgtaaccagaaatcttagatttgagcccaactgctctttttggaaggcaatatctagtttttggcccatgagtccaggacattttcagagggcccatgagtcatttcacaggtgaacaaccattgtagccattatacatacagagtaggctggtgtcttattttcgggttcaattgtaaatgattagtcaatgccatacagtcatttttggc

SEQ ID NO: 21426 - DNA, 1820 bp, Zea Mays
atccctggtggcagagcccgagcagcgaccgccgaggttgagacttgagagacctatgaaaccgcgaggcgccgcacaccaaccaacccccgggctgcccgtaaatgcggacacaggcgtgggggcgcggggcggtggcgcgcttgatgacgccattcaatcgccgcgcggcccacgcctcttctccccacctgctccgcgcctgctcatccgcctcttataccatcgctctcgctcgcctccgacgccacttcacctcttctgcttccttctccccagcatacagtgccagacaggatacccacacattcatggaggtggttcaagaagtccttaggcatggctcagcagatagtgtccgtgctgtcataagagctaacaaaaagagctacagccttgtccagctcattgcagcctcttttgatgtctacaacattttgtgcagcaaaaatatgacaccaaatgggatgcaagattcttcttccaaaggaagaaatggaacaggattccttcatggagctcgtgttggcattgtggctaaaccctctcctgaatttgttgctggggtatttggaacctggctttctggtggagttgcagtaccccttgcccttagctatccagaagctgagcttcttcatgtcatgaatgactcatataccttcagaaatcaatcctcaagaaccttcaagcaatgaggcgatttcatcagtctctactttaataactgagaccaacagttcaaagaaaatcaaaggcgatgaccctgctcttatcctttacacaagtggcacaactggtaaacctaaaggagtagttcacacccatgagggcattctttctcaggttcagattctatctgaagcgtggggatatcgaagtgaagaccaatttctgcactgtctcccgctgcaccatgtgcatgggcttttcaatgctctatttgcgcccctttattcaggatcagtggttgagtttataccaaaattcagtgtaagcgggatatggcagagatggcgagaatcatatcccaacgatgcgagtaaaagtacagaggccattacagtatttactggagttccaaccatgtatacacgtctgctgcaagggtatgatagtatggatcctgatcaaaagtcggcctcttcttacgctgcaaagcatctgaggttaatgatgtgtggatcatcagctcttccttccccacttatgaagaggtgggaggaagtgacaggccatcgtcttttggaacgctatggtatgactgaggtaaaaaatattccccatctagtcaatacactaattaactgtatgactcctgatagacttaatattggttacagtttgtcatggcactgtctaatccattgcatggtatccgaaaagaaggtacagttggtaaacctcttccacgcattgaggccaagatcattatggaggacggggctgaaactacaactggagttggcgagctctgcattagaagtccatctcttttcaaggagtattggaaaagaccagaggtcaccgcagaatctttcattgatggaggattcttcaagacaggtgatacagtaactgtagatgaggaaggatacttcataattttgggaccatgatgctgtactggaatgtgctgtccttggcttgcctgatgaagcctatggggaggttatatgtgcaataattgtgcctaaggaggatgcaaagaaaaaggctggacaggactcaaagccagcgctaaccttggaagcattaacaagttggtcgaaagataagcttgctccatacaagtacggtatgatgttgttagcctccat

SEQ ID NO: 21427 - DNA, 920 bp, Zea Mays
gtcgcagcgccgctacgagggggaggggatcgaactcgaaggagaatttccattcgaccccatccacttctcacctcaatctcgcgagaaccggagccggagccggagccggaggcctagtagatgaagacgttcgatccgtggccggtcttcttccgccgggagtggaagcgcaattggcccttcctcacggggttcgccatcaccggcttcatcatcactaagatgacggccaacttcaccgaggaggacctcaagaactccaagttcgtccaggagcacaagaagcgctgaccaaccaggctccggggcagcgcttggaccagagtgcatggtgattggagctcgaaaacggagaaagcgaggggtgtgataggtcgaacacaacaacaaatgacaattagcactggaggatgccaagtattcaaagggtgcattattataatgccaacagagcaattactgtcttcatgatgccaatagtctgaagtccgatgaatcgagtgccaaaattgcaaaaatctctccatcatgcgggagttagtttcatttcgcaacagcagtgattcttaggttcttatttctggtggctattgtagcacttatccattaacgatgtcattatcacattagtgtattttgggaacagtaatctatgacatggacgccggatggcactggcagagggatggtgtacggtgagtggcttcaatctatcgctgatgcaatctgccattggtgctggcgtgctgtaggtctgttttgcgtatatttcatttgacatgctacataaaaatttccaacaattcctggtcggttgttgacaccactgctaggaggtgggcattttttttaccataaaccaaaaaccaaaccgagccaaaattgtcgtttttaccataaacaattcttgattataa

SEQ ID NO: 21428 - DNA, 2180 bp, Zea Mays
gccccgccatttatttatataaaaactcggcacggcacggcgacacggcgtgcaccgtgcagcagttcgtcgttcggctccgcctatcccgcagacggagccaccgcttcggtcaaacgtggccgactcactcgtagatccttaggcagcgagcgcgcgagcggcggcggagaccgcgaggggagggtcccggagggtgatggaggcgaggtacgaggtgctgcggcgcgcgacggaggaggtggccgcggtggacgcgcacgcgcacaacctggtggagcacggctccgcgttcccctttctccgctgcttctccgaggccgagggggacgcgctcgcgctcgcgccccactccctctccttcaagagaagcctgagggacattgctgcattgtacaactgcgaggcctcacttgagaaggtggagaagtttagaagtgctgaaggattgaaatcgattggctcaaaatgcttccaagctgccaacatatctgttatacttatagatgatggcatagcattcgacaaaatgctagacctggagtctcacaaggcatttgctcctgtagttggcagagttctgagaatagaaaggctagcagaaacaatcatcaatgctgagtcattcagtggatcaagctggacactggactcattcactgaaagctacatatctaagctgaattcagtttctaaccaaattgttgcattaaaaagcatagctgcatatagaagcggtttagagatcaatcccaatgttagcaagactgatgcagaggatggtcttcgtaaggagctaacaggtcctaggccatttcggattacaaacaagaacctgattgactacctatttacctgcagtcttggaattgctgtttcacttagcctgccagtgcaaattcacacaggttttggagataaggacctagacttgcgaaagtgcaacccactacatttgcgcgctgttcttgaggacgaaagatttgctaagtgccaaattgttcttttacatgcttcttatccattttctaaggaagcatcctatcttgcatctgtttactcccaggtttaccttgattttggcttggcgattccaaaacttagtgttcatggaatgacatcgtccctgaaagagcttctggagctagctcccataaagaaggtcatgttcagtacagatgggtatgcttttccagagacatattacctaggtgcaaaaagggcacgggatgttgtttaccgtgtcctatctgctgcatgtgaagatggtgaccttagcattcaggaagctatcgaagctattgaggacatctttagaagaaatgcattgaatttgtacaagttaaatgttgtcaatggatcaataaatcatgaaactgccatagttggtaaaagggtgtcattgtcttctgttgaggaagatgtgctctttgttcgaataatctggtgcgatgcttctggtcaacatagatgccgcgtcgtgccagctggacgattttatgagattacgaggaataagggtgttggtctgacttttgcagcaatgggaatgacctcattttgtgatggcccagcggatgggtcgaaccttactggtgtaggcgagatcagacttgtaccagatatgccaacactcgttaggctaccatgttcctatgctatttttatgggcaactactactccctcaattccaaattgtcaaggcacgaggaaatggtgatggctgacatgcaaataaggcctggagaaggctgggaatactgtcctagaaataccttgaggaaagtcacaaaagttctgttagatgagttcaatgtgacaatgaaggcaggttttgaaaatgaatttttccttcgcagaaaattagtaagtaatggagttgagatgtggattccatatgataataccaattactgctcaacttcagcatttgatggtgcatcatccatattacaagaagtatattcttccctcaaagattcaggcattgttgttgaacagttgcatgctgaagctggaaaagggcagtttgagatagccttgaagtatatcttgtgcactgttgcggctgacaaactcatatatgctcgtgagactattaagtcgattgctcgaaagcatggactggtagcaacatttcttccaaagtgaaaaacagtaaagtgaaattaagtcctct

SEQ ID NO: 21429 - DNA, 2435 bp, Zea Mays
ccaaaataagcgcctgcccccagcggaaagcgaccgccccctctgcctccccctcctctcctccgtatagcggcggcaggcccgctggagctggcggcgagggcaatgccgcgagtccgccggcggtgccggggcgcgatgctgctgctcctcgtcgcgtcggtgctcgcgcccctcgtgctgtacggcggctcccccgtctctgtcgcgcccctcccggactccaccgtggcgagcggcgcgttcgacccggagggcgcgtccaatctggtgtggtcgcacatggcagcgtccgcggtgtctctggccaaaggtttgataactgaaaggctcggggagcacaaaaaccgtgtgctatcagcaactgatcactggcaggtggttgaggcagggagcaggaaccgtgcatctggaaaatcaggtactgctggggtcagggaggaccatcacttgccgaattcggaagaggaaggtgacctggttgtcgtggagagtggcagtgctaggtttgggcaggaggacgtcattaaggaggttgtgggaagccagagaagggcagatggatctggtgagcccggggatagcatggaggtggacgagcagaaggcaaaagaagttgggatagagttgcctcacgcaactgatgtgctgcacaaaaacgggtcagatggactagaaatgaacgatgtttctggattgcgcactgttggaatcctgaatacatcttctgcgaaggaaagtgacgttcatagtttatccaataagatgaaacatcctaatatttccagagagcagcaaacaaggacaagtaacagtaatgctgctcaccatgcaacaaatagtattactgatcaaaccacagctttgccagatgctacaattcgcatcatcaagaaccagcttacgacagcaaagatgtaccttggattgtttgcttctaggggtaatcatggcttcacaagggagctccgtgcacggatgagggatatacaacgagcactaggcgatgcaaggagtgatcggcaattacctcataatgtccacagcaaaactagagcaatggagcagacactggtgaaggtcaggaaaattcatgatggctgctcaagtgctgtgaataggctccatactgtccttcactcaacagagcagcaactcgaatcaaacaaaagacaagctaactatctagcacaagtggctgcaaaatctctacccaagggtctccattgccttacactgcggcttacaaatgagtactatttcactaactcaaagaataaagactttccctacgtggagaagctggaagaccccaaactctatcattatgccttgttttcagacaatgtattggctgctgcagtggttgttaactcaactcttgtccatgctaagaaaccagaaaaacatgtattccacattgtgacagatagtcttaactatgctgcaatgaaaatgtggttcctggctaatccctttggtaaagccgctattcaggttcagaacattgaagagtttacatggttaaactcaagctacagtccagtgctgaagcagttggaaacgcggtttatgattgattactacttcagaactgggcatgctaggcacgatgaaaatcccaagtttcggaaccccaagtacttgtcaattctcaaccatctgaggttctatctccctgagatcttcccaagacttaacaaggtgttatttctggatgatgatactgtagtgcagcgagacctaagtgcgctttggttggtagatctcaaaggcaaggttaatggtgctgtcgagacctgtagacaggacttccataggtttgataagtacctcaacttctcaaaccctcttattgccaagaattttgatccacatgcttgtggttgggcatatggcatgaacatgtttgatttgtccgactggagaaagcaaaacatcactgaggtctaccatacctggcagaagttgaatgaaaacaggctattgtggaagctaggtaccctccctgctggccttgtaaccttttggaaccgcacgttccctctcgatcgttcgtggcatcaattaggacttgggtacaacccaaatgtcaacgttaaggatatcaggcgagcggctgtcatccactacaacggaaacctgaagccctggcttgagattggattgccgaaataccgcaagtactggtcagcacacgtcaattacgatcaagtgtttctacgggagtgcaacataaacccctgaacagcaaatagtggtgccagcaggttggcggtaggcttggatcatacaaacagttagtagccaaaggcatatcccgttttgtgcttataaatgctaatatggtagataatttttgactgtatgtatgaattgaatgctatgttagatgccctcgcaaacagtacagtttgcgacgacccatttccact

SEQ ID NO: 21430 - DNA, 1112 bp, Zea Mays
cacaacccaacccaacccaacccaactgaatccaacgggacacgagagcgacgtcatggtgctggaggtgggcaccgccgtgggaatacgaaccacctccacttgggctgcaggtccagccgcccggcgcagatcacggggccaggtcgtctccttcgccctcgctcccgcgtcgtcccgccgggtccggcaccgttgccgcgcgatgcaacagcacgaggaggagcaggagcggccgccgaccgtccgcgcggtcaccatccccttcgccgacctcagggtgccggacagggaccttggcgacaagatcgaggaaggtctgggtccccatgggctcggcatcgtcaccattgccgatgtacctgagtttccagagctaagaaaaaggctgctgcgcttggcacccaggattgcaaaccttcctgaagaggtgaagaaacagcttgaagatccagatagcagatataactttgggtggagtcatgggaaggagaaactcgagtccgggaaacttgacacatttaaaggttccttttatgcgaaccctgttttggatgtccctactactgatgatgtgcttgtaagtatccatcatattgccgaccaaatatatggccaaacgataatcttcctgagcttgagatagcatttaaagatcttgggaagctgatgatggaagttggtttgatgttggctcatcattgtgatcgctatgtaatgaggcaaggagtagggtcatatgatggtgacagtcttgagcagacaattgctcgttcaaggtgtcacaagggtcgtctgttgtactatttcccacgacagtttagcaagcagacagacttcgactcggtttcatcatggtgtggatggcacactgatcatggatctctaacagggcttacatgtggcttgtttacgaagaattctatggaggtaccatgtccagacagtgcagctggactatacattcggactcgtgataaccaagttgttaaggttgtgttcgacgaggatcagctagcttaccaaatcggggaaactactgaaatactgtcaagaggttatctatgtgcaaccccacactgtgtgcagtttttttaatgctattgtttcta

SEQ ID NO: 21431 - DNA, 692 bp, Zea Mays
gtttgactcaagacagtaactacctcaaaccctgtttggaatgtgggaatcttgtagtaattctgaatgatttgtaacatgtcatgcagaatctcgtgtgtttcagacaggtacgtcctatcttgtgggaaagattctcgtgtcaagttatgggaagttggcactggacgacttgtgaagcaatatgcaggagcaattcgcagacaatttcgttgtcaggctgtcttcaatgaaaccgaggaatttgtgctatcagttgatgaacaaaacaatgaggttgtcgtctgggatgcacttactgctgaaaaggttacaagattgccttctggcagcactggtgctcctagatggctcgaccattccccagttgagccagtttttgttagttgtggaaacgatagatcgatcaaattctggaaacaaaccgtataagcttgtagattcaaccacgcaaatcaaaagagtatgttttcagtattactgtttcaggaggaatgtgctagtgtaactttagttgtatatgggagaaatttgcataagcgatttttttttgaaactgcataagcaattgtttgacctaatagcaaatcccaatcagatgtttttttttggttctgcagatgccagttatatgaaccattgacctgatttttattggtcagcctcctttcgatgttctgttatttttatcc

SEQ ID NO: 21432 - DNA, 437 bp, Zea Mays
ctcgggcgtactgttccaaatacagttgaatttgctgactggattggtcgaacaaagcagaagaaaattcgtgtgacttcgaaatcggagacatcgagaactggatgaagatcatggacttcgattgtaaaagtatcaatgcagccatacgcaatattcaccagtcatgactctgcccgcgattacaatttcacgatttttaggaagtatccgtgtcattacgttctctgattagaattattgggtctggaaaccctctttttatggaaccgtgtctcctgattttcccatgctatgagtgtatgtacccttcaatttcaaagtgatgatatatataggatcaaaatacacctgtctgaggatgtgttcctagtggtgttagtctcgtgccattatcagaacaactgttgcccatcagcttgcatgttcaagaatca

SEQ ID NO: 21433 - DNA, 736 bp, Zea Mays
gtcactaacccccggcgcaagactaaccgtttccaggacatcccagagttgaaggcacgtcatgtgttattgctgctctgtcaatttataaatcacatggaggtggtccggttgcctgtatactatccttctcaactagaaaaggaagatccgaagctctacgcaaataatgtcagaaaactaatagcaatggaggtaggctaaacccaaaactgagtcaaacaaccatgcaaagatcaaacaacctcttcgtaatatatgtatccaccgagggttggagagtatgattggcctcccacctgtaaaggccccaagagctcgagaaggctcgattctaatccctatggatggctctgctgtcggaaaaaatattgccaagtatggggacgaaggggcaatttagttctttctaatattgggctggcagagaagcgcgtgtaccatgcagcactgactggaagtagtctacctggcgctagacatgagaaagatgattgaaagacgttgcgtcgctttttctgtaatagacagacgaggagcacttaaaaatgtaactgtgtgcgtgtttttttatatctgtaatgtggcactttctttgtttgaggaggttgttgagtacccttctcatactacattgtacaaaaacgatgtccattatagttagatgaggttcgtgctctcgtacgcggtccttcagatttcgatttcgagtgctactgttttttttttcttgaat

SEQ ID NO: 21434 - DNA, 7891 bp, Zea Mays
tacatagagcctatccattccaccgagggagaaatggaccaactcataggttttcgatccgacgaccacgtccttcacacggagttgcttcgccttgacgcaccctccgcgatcacgctgcgtgccgcagccagttccctccggaaccgccaccgccgagttttgaggcccaaactctggtgggtttgaggcccaaaccaccaaacctgccgtgagcaccgcacttcgtgcacgtcctccacgatcagacgcgtgtcccgccagtccctgaccacaccggcaacatggtccattccaccacgtcctcgcataagtgtgtgtcacaggtgtcagccaccacgattggtcaattgactgctttgatccgccagtcaagacccatcactcgtcccttcaccgctccgggtccatcagtacgagcccgcatgactttcacctcagtcgtcgaccaccgttcctgtgctccacacctgcacaccacaagtcgaccgacatggttgcacaagcataatctcacactctggactaacatgcaaatacggcgcaaatctatggtgcaatgtggaaaagcgttggtcggtaagggcccgataaaatgagacctcctctcctccgggagagggatagagtgcgtccgtcttcgttccttgccccccttccttcagaagagcgaggccgcggtcgcggaggaggctttacgaacaaacgagccattagtccccaaaagccaacacacaaacccaggcgatagcgagcgcgcccgcgaaggctacgacgcgagagcgcgcgaggtgtggagcccccaatcccggaagcttccttggccgcgcgcagggcgcgggagtgggagctcgccgccggttaccgagccctctccgccgcggatctcccgatctgagacgccactcgtcaattccccgcagggttttgcggtgccagcgacggacatgagcgtggagagcccaggggagctagggttctgaagcgcaccgtggggcacagcgtggcgaacgacggcccccgacatcctgctaggttttccatgggagatgggggagtcgcgtgcgccgtccgctcagtcgagagcttccgtgccggcgccctcgtgaggagaggaggagcgggagaagcgatgccggacaagggggagagggcccatggccaccgccaccagcaccagcactggaagaaccagcagtcggcgacagctgctgacctggaggagggggagctgcttaatggggaggccgggaccaatgggttgcccgagaggagcatgccacctaagaagtggaggaaggtgctggcagcctccgcagctgctgtggaggtggagcctggggagattgtgagtacaaagcaagcagtgccattgaagaaggaaagaagaaacggggacgttgagaaggtagagctgctgccagagaggcagaggaaggaaaagtcttctgggaagagcaccaggaagtctatcaaggatgatgtggagccaggggagattgcactgccaggaaaaaggcgggatgccaagtcccaactggcccatgataacagcaggaggccaagttcgtctgcccagaaaggctccttgcgggattctgatgaagaacctggtgaaattaagccagagagcggcatcagtggcagtgtaaggaagaaccggccaacagagcctcatagcagtaaccacaagcaccacactgacacctctgaccagtcaggatcaaaacatcgcaggaagggagaaggaaagagttcatctgctgccagacatttgtctgggagaattcgtgaggtctcgccaccaacacgggatcggcgtgataagcacgagaggagcccaggcatcttgggccgttttcctcatgaccgttttcgtcatgacaggtatgacaggagcccgagccgcttggagcgttccccacatcgcactcgccactatgatagcagagaccgcagtccatatatttcacctcgacatagagctcgtccgccccaattcagggataacacaccaagtcgtgttgataattcccctcgtgggagggtccagcatgaagatatcagagaccgtagcccatttcgtcatgacaggtcgccttctgaacgttgtcgtcctactgacacgcatgaagcaagcaagaagagcagaagtagcaacaactcagagaagtcacatcacaaaagcaaatcagcgaagcaatcttcaaaaatcaagagtggtagcaatgggaagaatgaggagaaaatctccaaagaaaagcacactgaaagcagtcagtacactgaactgccaccaccacctcctcttcctctaccaccgccaccaccaccgccgccgccaccgccacccctgccgcctgctgtaccacctccattgcctccatcaccagaacctgagccacctggagttctagccgaggatatgatagaagacatggatatctgtgacaccccacctcacactagtgcagtacctgaacccacagaaccaatttgtgatatagggaggtggttttaccttgatcacttcggtatcgagcaaggaccttccaaacttgctgagctgaagaagctggtgcaagatggatatcttctttctgaccatctgataaaacatgctgatagcaaccgatgggtgactgtagagaatgcagcttcaccactggtgccatctgatttcccctctttatattcggacacttcaacacagttggtcaacccaccagaagccccaggaaatttgctcgatgaagctctagaggaggcttctaacttggcatcaggagctgaggataaacaaatggaggaaacgtctgcagaagatagtgaagaattctgcattgatgatagggttgaagcactgatggatggatcaattttggtgcatggccaggagctcgagatcattggagagcttttaggtgcagattttcagcctgctgattggcaaagatggagtcgtcgtgaagattttactaggctcaatgtgcacactgaagtaaacaatgaaatcaatggaggcacagaaaatagagcaacagatgcttatggtcttgtttctgtggagaagaactttcatcataacgctgagtctagcgaatggttttctggtagatggtcttgcaaaggtggtgactggaggagaaatgacgaactaagccaagatactccattcaggaaaaaacttgttctcaatgaagggtatcctctgtgtcaaatgccaaaaggtagctgtgaggatccacgccggccctgcaaggatgagttgtactaccctgtacgtgctaaaaagtatgaactgccattgtgggcattctcattgacagaagaagatattgatagtgttaatgacaccactaaaagcggtgttgtgcctgggaggccaggtcagaccagacagccttctaggggagtgaagggcatgatgctttcagtggttaggataaattctcgtgttgttaaagatcaatcatctgttgaaccccatacaaaacccagaggaactgatcgaccactgtcgaggtcttcacgctcccattcaattggagctgagagaagttctgtccatgaaggttcgtctcatttcaggaagcaccatgaccatgattcacaaagttcgcacaagtccaagcctgttccaaacattccaaaggaccgtgtatgcactgttgatgagctgtcagtttatcggggtgactggtattaccttgatggcactgggcatgagcatggtccattttcttattctgaattgcaagaattagttaaaaatggcactatcattgaacaaagtagtgtgttccgtaagattgataacacatggtttccagttcttaaggatttaaaacctggaagctctgttcccagtgcagcacgaagctcaagttttactgctgctcttatgctcccagaccaatataattttggtgtgaaccaaggatcaggtagcttcaatcagttgcacccccagtttgtgggttatacacgtggtaaattacatgaactagtcatgaaatatttcaagagcagggaacttactttagctataaatgaggtcttggatccctggatctcagcaaagcagccaaaaaaagagtttgaagcatacttctcccacaattcagcatctagaaatttgctgccagaagatggtgggtctgcaaaaaaggcaaagttgctacctgatcagagtgatgaagatattcatttgtcacaagacattcttgccagtcggaaggaggacatctgttttgacgagctatgtgatgcagaaccttctgttgataatgattctctgaatcccggagcaggaaatgaaacctggggtctactaaacggccatgtgttagcaagaatcttccattttatgagggcagatgtgaaagcacttatttcttctgcagctacctgtaggagctggaatgctgctgtgaagtattacagaaacatgtgtagattcattgatctgtcttctgttggccctctttgcactgattctgtgttttgtgatattatggctggttatgagaagcaaaatattaggacccttattttagctggttgttcgaatcttagttcgcatgcccttggcagagtacttgagcagcttccacaaatatcttatgttgacatccatggttgcggtcatctaggggatctgaaaaataaatttcagcatgtaaaatggatcaggagctcattgaatccagaggagtcatatcggaaaattaaaaccttgaagcagataggtgatgggaacaactacgcatccaaagttgcaaggaacttcaccaatcatctggatggttctgatgagcttgatgggtattttgctgatatttcaaatagagagaatgctaacctttcatttggacaaggtttctataaacgatcaaaattgcttgatgctagaaagtcctctgcggttttgtcgagggatgcagaaatgaggcggttgatgcagagacaggcagagaccagttacagaaagatggaagagttcatcataaacagactgagagaaattatgaggagcaacagatttgattttttcattccaaaggtttccaagattgaaggtaggctaaaaaacgggtattatgctcgccatggctttcgtaccatcaagcatgacatccgtaccatgtgccaagatgcattgagatataaagatggcaatgattcgggagatataaagcaaattgttgtctccttcatacagctagcaaagagactagggaacccaaggtacatttctgatagatatggagcaggagcccaggacagcctggacattaatcaatattcatttgatactaaactcaaaaagaagcaaaataaaataagaggagcaaattcattggctgctggagcagataattcatctcgtgcatttgaccttgaaatcaaaagaagcctatctaaattaaagaaaaaggatgtctactctggtagcgaaacatctgatgatgatgatggctactctgaagttgatgaaactgagagcgaaactactgtttctgatactgagagtgaccttgatgtaaattctggagcctgggatttaaaaggaaacagtctaaagttaattgaacctggggaatctgtgaccgatgatcgtatattgggtgcccgcatgacaaaggccagccttgttcctccagttactaggaagtatgaagttatcgaggagtaccttattgtagcagatttggaggaagtacagcgaaaaatgagagttgctttacctgatgactattctgagaagttgctgtcacagaagaatggcaccgaaaacttggaacttccagaggttaaggattatcaaccccgaaaagtagcaggagatgaaattcttgagcaagaagtatatggcatagatccatacacacacaatctactgagtgacattatgcctgctgatcttgagttgtcacctactgacaagcatatctttattgaggagttgcttctgaatacattgaataagcaagttaggcatttcactggttcgggaaatacccctatgacttacaaccttaggcctgtcattgaagagatccaaaggtctgcagaggataatggtgatagacgaacttcaaagatgtgcttggggatgctaaagaccatgagaaatcgctctgaacagaacttcgttgcttatagaaagggtctcggtgttgtttgcaacaaaaaaggtggatttggtgtagatgactttgttgtagagttctttggggaggtttacccttcttggagatggtatgaaaagcaagatggtattaaacatatacaaaacaacagtgaagatcaagctcctgagttttacaacattatgttagaaaggccaaagggagacggagatggatatgacttggtttttgttgatgcgatgcacaaggccaactacgctagtagaatctgccactcctgcaacccaaactgcgaagcaaaagtgacagcagtgaatggtaaataccagattggagtttacacacttcgaccaattgcagaaggcgaggaaatcacttttgattacaattctgtaactgagaagcgccagttccttatagaaataaacatggattctgagaagaatgatgctgaggttcaggcagagggagtattaaattcaagattacaacaaatagtgcatacacttgacaaggtgagatatgttatgagatgcatatttggagacccaaagaatgctcctcctcctcttgtaaggttgtctgggaaaagtctggtatctgccatctggaaaggggacagttcaatagttgctgaactcattcagtcgatggaacctcatgttgaagaagaggtacttagtgatctgaaggccaaaatccgtgctcatgatccgtcagagtctgaagatattgagggaggcatccggaattctctcttgtggctgcgtgatgaattgcgaactctttcatgcacttacaagtgccgtcatgatgctgctgcagatttgattcatttgtatgcttatacaaagtgcttcttccgagtccgggattataagacagtaaaatctccaccagttcatatcagtccgcttgacttaggccccaaatatgctgataaactgggaccaggctttcaggagtactgcaagacatacccagaaaattattgcttagcccagcttatctattggtatagccagaattcagaacctgaatctagattaacaagagctagaaaaggttgcatgtcgttgccagatgtctcatccttctatgtgaagtctgcaaaaccatcacaagagcgagcttatggaaacagaactgtgagattcatgttatcgcgcatggaaaagcaggcacaaagaccatggccaaaggataggatatgggtgttcaagagtgatccgagattctttggtagtccaatgatggacaccgtgttgaataattccccgcttgacaaggagatggtgcactggctcaagactagaccaaatgttttcctaggctagtaaaaaaggtttgtaggcagataaggtggtatttggttctttctcctttttggagattttagtctacatgattctttttccgactcacaccttggctacctgatcatggggagtttagcttttagatagcagggtagtctcaccacccccatctgtacattcctctctccctactttccttgtagagatgtatctggttaataactgatagattcgtcattgatttgatgtagtgaattttccccataggaatgctccctcttttgtttcatgtaaatgcagaacaatttcaatcttgaattcagtaatgtgttacaggcatgttgcatttctgtggttcagttcgttgtttcaatcaataaaatgttttaggggcttataggtttcattcataggaaa

SEQ ID NO: 21435 - DNA, 1777 bp, Zea Mays
tataagcccgtccctctccgatccctcggcccgcgctctctgctcccatccccgcctcgtccgttaccataaatctagcttgggctctaatctaaccgagggaacaggtgggatatgaggaactcggtgtcggagcggagcttcctcatcgagagcgacgatgacgacgatgccgccgtggaggacgggaagcggcgcggccttggcggcggcggcggcggcgacgacgacgacgacgggtccgactcctcgtcgccgtgcgacagcccgcgggtggtggcggcgcggtgcagccagccgagttcgtacacgcagcaatggccgcagagctacaggcaatccattgacatgtacagcagtgtgcactctcccaacctgagcttcttgggcacgccatcactgagccggttgtccaactcgttcctcacaaactcattccgggggaagccacctgagatcatctccagcttaatcaagccattactgccgacaagcattgcttccgccagcgatgaccagcagcagcagcagcatgaggacgtccggaagagctcccattacctgccaccatcacgcaaggcgtcgtcgctgcagaggatccccgaggaccagagacctatggttgggggccatgaggtgggtccctaccggcagtgctcctatacccaaggggtcatgaacggagtgaatgtcttatgtggtgtggggatcctgtcaacaccttatgctgtcaagcagggtggctggcttggactggtgatactagcggtattgggtgcactggcttggtacactggcatacttctgcgccgttgcctggacagcaaggatgggctcgagacttaccctgacatcggacatgctgcctttggtactgctggccgtatcatcatctcgataatactgtatatggaactatatgcatgttgcattgagtatttgatcttagagagcgataacttatcaaagttgttcccaaatgcacacctaaccatgggtaacttgactctggattcacatatgctatttgccatcttgactgctcttgtcgtcatgcctaccacttggcttcgtgatctcagctgcctcagcttcatttcagctggtggagtcattgcatctatcgtcattgtctcctgcttgttctgggtgggacttgttgatcacgttggcacagtcgagagtgaagggacggcactgaaccttcctggaatccccattgccatcgggttgtatgggtattgctactcaggccatggagtgttcccaaacatctactcttctctgaagaaaagcaaccagttccctgctgttcttttcacctgtatcgctctgtctactgttctgttcgctgctgctgcaatcatgggatacattatgttcggtgaatctacagagtcccaattcacactgaacttacccccaaatcttgtggcttccaagattgcggtctggactacggtgacgaatccaataaccaaatatgcgctgaccatgactcctctagccctgagtttggaggaactgctacctccaaataagcagacatacccgaacataatgatgcttagatccgctctggtggtatcttcccttattattgctctgtccgttccattttttggacttgtcatgtcactggtcgggtcttttctcaccatgtttgtggcctatattctaccatgtgcctgctttttgtctatcctcaggagtaaagtgacctggtatcagatttttttggcagaaaaatacagtgttccatgtgttcttgattcag

SEQ ID NO: 21436 - DNA, 143 bp, Zea Mays
caagaatgcagcagccccacgccggcgcatcaggtcccaacagcgggcactcctcggcggccaccatcgtcggctcgtcggcggcggctcgtcagcagcagcaagaggcaactcacgcccgaaccctcgatccgtggccccgt

SEQ ID NO: 21437 - DNA, 2357 bp, Zea Mays
atgagggggtgggggaagggggtggtgtggcggcctccagtggcggtggctaggaagggccaacgactagggtccaaacctacaagttcataccactggtttatcaaattgcttcgagacttgggagcaccaaagatgctcaggggtcatttaactttcagattgcgttagcttctcttttgaagaaaatggctgttgatcacccatatcatacaatattccagcttttggctctagcaaatggtgatcgtgtcaaagacaagcaaagaagtagaagttcttttgttgtagatatggagaagaagcttgctgctgaaaatttgttaaaggagctatcttcctgtcatggacctctgatttgtcagatgaaacaaatggttgagatctacattaagttagcagaactggagaccaagaaggaggacactaacaaaaaaattccgctgcccagggaggcccgcagcattggtcagcttgaactagttccagttgtgactgctaccgttcctattgatcctagctgtcgttatgaggaaggctcctttccacatttcactgggttggctgactccattatgatcatgaatggaattaatgctcccaaagttatagaatgttttggctcggatggtaacaaataccgtcaacttgcaaaatctggaaatgatgacctgcgacaggatgctgtgatggagcaattttttagtttggtaaatacattcttgcaaaatcaccgagatacttctaaaaggagattgaaaatccgtacatataaggttgttcctttcaccccaagtgctggtgttgttgaatgggtaaacggtactgttccactaggcgattatctaattgggagtactagaagtggtggagcacatggacgatatggaattggggactggacatatcttcaatgcagagagtacctgatgagtgaaaaggacaaaaggagggcatttcttaaaatctgcagcaactttaggcctgtgatgcaccacttctttcttgaaagattcttgctgcctgctgattggttccaaagtagacttgcttacacaaggagtgtagcagcaagctcgatggtaggatatatagtcggtcttggggatcgccattccatgaatattctcatcgaccaagacacagctgaggttgtacacattgatcttggtgttgcatttgaacagggtctcatgcttaaaacacctgaacgggttccatttcggttgacaagggatattatagatggcatgggtgttactggtgttgaaggtgtgttcagaagatgttgtgagaaaactctctgtgtcatgagggcgaataaagaagcattgctcactattattgaagtcttcgttcatgatcctctatataaatgggcactctcaccactgaaagccttacagcgtcaaaaggaaacagttgatactgattcatgtttggatgactcccaagaaccttacgatggcaacaaggatgcagctcgagctatacttcgtgttaaacagaagttggatggatatgaagatggcgagatgagaagtgtgcagggccaggtccaacaactcatacaggacgcggtggatgttgatcggttgtgccaaatgtttccaggttggggaccttggttgtaagctccattgaaagggatgtaaattttgatcgaaggcaagagcaacttttttcactgcttatgaggttttattctttggtgtgtttttttccctcaccaccctgtcaacattcctacaaagtacagcaaacggcttttggtaccctgtaaattgatgggaaggcaaggacgacatttgagtgcaggtgggttgtaccactcctgttttagagcatgtccagactagaggatgggtgattgcatagtgaggccacagttttctttttttgttgagcttcattaataccccctctgtctaaaagtcctcatcgtttaagcgtcccgcaccaagaccaaggatgcccctccgcattgcagccgctgtgaagttaattatctggcgccgttttgtattttcaaaacacgcatatgtaatgtcgcaaaaattcagctgcttcgatggttggccggccataggggcggtatccatacatcacaccatcgtgcagcgtacattcagctgcttcgacggttgcataccgtagtttttgttcaggatttactttgtaaagaagtgaggctgttttgtcatgtatgtaaagggcttgtttcgatgtagcatgaaatacgaagaattatgatgcatttgaatataccgtgctcccctgagcaaaaaacaaatcaacagaagctaccacctggccgccacgctcagagtcgtcttggctgaaggatttcttgggtg

SEQ ID NO: 21438 - DNA, 1695 bp, Zea Mays
ttcattgaacatgataatattgctactctgatgactatgattttgcctacgagatctagttatattttatgaacaagattggaatcctcaagctgacaaacaggctctacagcgcgctcaccgcattggacagctgaatcatgtcttgtcaataaatttggtgtcacagcgcacaattgaagaggtcataatgcgaagagccgacagaaaacttaagcttagccataatattattggagaagaagacgggactgatgggaagggaggagatccaggaattgaagctagtgacatgagatcaattatctttggcttgcacctgtttgatccagcagatacagctacagaaacaatcgatgaggatataactgctgagacattcagtgtcgagaaactggcaaagttaaaaacaatgtctgaaaaggttgtcatgatgcgtagccatgagtcttctgaaaaggatgaacgagcatttgagatcaatccaaatatgactgatgacagtggaactgtgattagaagggcttctgattctatccgcattgatcctgggctaaatgaagctgcatacctatcctgggtcaagaagttcaaagaggcttccatttctagtgaagatgccacagttggatttggaaggcaaagagcagcgcctgaagaaaagctcctgaaacatgatgttaacaagcaaaaaatagaagaaaagagattggccaaatgggaaagtttgggttaccagacactagcagttaaggaacctgatatcacagcaagccagaatatttcagacgcgggatccatccaatttgtatatggagattgtactaatccttcaaaagtttgtcccgcaaagcctgccatcatattcagctgcatagataattctgggacttgggggcatggagggatgtttgatgctttgactagtctgtcgacatgcattccagatgcttatcaccgtgcttctgaatttgatgatctccacatgggcgatcttcacttgattcagcttgatgaaggcaactgtacccggagtttggatgcacctttatgggttgcactagctatcgttcagtcttacaatccgaggcgtaaagttccgagaagtgaaatctccatgtctgatttggagctctgtatatcaaaagcagccttctcagctgctcagcattctgcggctatccacatgccccgaattggttaccaaggtggctcccaacgatcagaatggtatacaatagaacgcctgctcaggaaacactcatctctccatggaatcgacatttttgtatactactttcagcgacgacagacagattgccagattgtaacccaggtaggtcatgctgacgattcgacccaagcgtagggatgtctctgtaaaaacccactacatcagaagaatctgggattatgtgtagctagctgcaacaatttgtcttttctttttcttttactgccccttctctctgggaccaaaacgcctatgaatagatgagggagccaaatgaattaggttttagtacatttagctaagaggtgtatgtatgtacaagtgttgtttgcatctgcagtctcttttgatgaaaatctatgtggcatttatattgcttgatttttgttttttgatttggtctattttagacctctttttcttcttcttaacatatatgatgcgtagcgaaaaaatcttac

SEQ ID NO: 21439 - DNA, 2323 bp, Zea Mays
gcttttggattctggtttctctcgtctttctcctccctctcctgacttttcttctagacatctcgcgggtcttatcgactccaacaagaacacactacacaccagccagcgagatagcgaacgctaggaacccagtggccatctttggagcggccatgacgctggatcagaaccatgccatgccgatgcagcccccggccctgcagcccggaagagcatatggagcagagggcagtgctgtggtgcatggttccatcagaacagtagcaggaggccctactcttgccttgaatgagtgccagattttggtacagcagaaaccccagggagattcacgactgctggcctctaatctgtggtgtgttttaactgttctatatctggttgctctctgctagagcatctgagctatcactagcagtctttgactgatagtgttgtgtgcttgatgagtgagttacccttgtgctgtggtgtgtttttacttgttctatatcgatctggctgctctctgctagagcatctgagctgtcacttgcagtctctgactgatagtgttgtgcgcttgatgagtgagttatccttgcgctgtggtgtgttttaactgttctatatctggctgctctctgctagagcatctcagctatcactagcagtctttgactggtagtgttgtgcgcttgatcagtgagttacgcttgcgccagatactgaagtgatatctgtttctcttaacatggttgtctactctgtagaaaattatgcaatgtgttcaaaattaaatattagtaggtttacaatgacaaatattgtatctgtttatgcaaatatgtttaatgtgtaggaccttttgattaaaaggtcaactaacagcgtgtagggagcaaaatagtatctgtttctgtggaggtgatgatattaccatgtttgaacatttggtattctgagcactctaagatgaggagtgggtgagatagtcacctgttctgttttaacgttttgttattttgattgttctctgcttattattgcatggttattattagtttatttctggttgaaatagtatacctgttggggcatttttgttattttgcttatttgtacttcattgcattctcgatacagtgttctatgcgacgcgagtactaaaatttacttcgtcaattaagcaggaagaagcgacctcgcagatcacgagatgggcctacgtcagtggcagctgtcatccagcggtgggctgagcgcaacaagcatttggagtatgaggaatctgaggaggcaaagcgaccaagaaaagcacctgcaaagggttcaaagaagggctgtatgaagggaaaaggggggcctgacaatactcaatgtggataccgtggagtgaggcagcgtacttgggggaagtgggttgctgaaataagagagccaaatcgtgtcgacagactctggctgggtaccttcccaaccgcggaggatgcagctagggcctatgatgaggcagccagagcgatgtatggagacttggcacggactaacttccccggacaggatgcaacaacctctgcccaagctgctctatcatcgacctctgcccaggctgctccaacagctgttgaagctcttcagactggcacgtcatgcgagtcgacaacgacatcaaatcactcggacatcgcatccacctcacacaagcttgaagcctctgacatctcgagctacctaaaggaaaaatgtccagctggatcatgtggtatccaagacggcacacccattgtagctgacaaggaggtctttgggccgttggagcctatcacaaatcttccagatggtggtgatggttttgatatcggtgagatgctgaggatgatggaaagcgatccacataatgcaggtggagccgacgctggcatgggacagccctggtatcttgatgagctggattcgagtgtcttagagagcatgctccagccggagccggagccagagccagagccattcctgatgtctgaagaaccggacatgtttcttgctggcttcgaaagcgctggtttcgtcgagggtctggagcggctaaactgaatttctgatgtttgaccgttgatcctcatcccacttcatgtctgagcttgtgaattcggaggcaaacattggcagaacttataagctctagcaattctaggctttacattcctctgtgatagttctctatgcatgggaactgggtttgcttcacaatttttgtaagaccagaagtgatgtaaatagttcccaccttgtggaaggacaagaaaaaaataaataaaaagagtgcttgctttcgttcctt

SEQ ID NO: 21440 - DNA, 901 bp, Zea Mays
tgatgccttcctcctcaagatattctttgacttgaaggttcttgaactcaaatccattattgctccttatctttttcacctttagctaaaattcgttttgagctctccttaagaagcgctttagagttccttgagtttcagatttttcctgcaaaaagaaaacccaagtgaaacaggaaaatcatcaacaatgacaagaccatacttacttcccccaatgttgagataagcaacaggcccgaagagatccatatgcaggagttccagtggtcttgatgttgtcatcacgttcttgctttgatgagtacttcccacctgcttccctgcttggcacgctgcacaaggtctgtctttctaaaaatagtcgtcggttagtcctaacacatgttctccctttagaagtttatgaaggttcttcatcctaacatgtgctagacggtggtgccagagctagcccatattagttttagcgattaagcatgcatctagatcggcattctcttttgagaaatcaacaaagtagagcttgtcgtccaatacaccgttaaaagctaatgaaccatcacttctcctaaagatagatacatcaatatttgtaaataagcaattataacccatatgacataattgtcttacagacaacaagttgtacccgagcaattctactagaaacacatttgaaactgaatgctcggttgtgatggctattttgcctaagcccttaaccttgccttggttcccatctccaaagatgacagtgtcttgggaatccctgttcttgacataggaggtaaacattttcttctcccctgtcatgtggtttgtgcatccgctatcaataatccagcttgagcccccggatgcataaacctgcaaggtaattaagcttgggttttaggta

SEQ ID NO: 21441 - DNA, 3089 bp, Zea Mays
tcaacccgctgggtgccagtgtggtaccggtacccttccctcactctcccggttctttcccggcgctggattcagatccgcacgcttctccatttccgtaaagctccgtgcctcctcctcgtctcttcactccaaatccaccgaggccatcgcctgggccccggggaaacccctcgcgctcgtggccctgtgagcagccgcagccatggcgcagccgctcgtcgtgaagaaagacgacgatctcgacgaggaagagtactactcgccattcctgggcatagagaagggcgccgtgctgcaggaggcccgagtcttccatgaccctcagctcgacgcgcggcgatgctgccaggttgaggctacagaggtcttctttgcaacgaccaagctgttccagtctaaagatgcgggccttaggaggatggtgtacctcatgatcaaggaactctcaccttcagccgatgaggtcatcatagtaacaagctctttgatgaaggacatgaatagcaaaactgatatgtaccgtgcaaatgctattagagttctttgtcgtattattgactcaacccttctcacccaaatcgagaggtatttgaagcaagccattgttgacaagaatcctgttgttgccagtgcggcccttgttagtggcatctacttgcttcaaacgagtccggaagttgtaaaaagatggagcaatgaagttcaagaggctgtgcagtcaagagctgctcttgtgcaatttcatgcccttgctcttcttcaccaaattagacaaaatgatcggttggctgtcagcaagcttgtcactagcttgaccaggggttcagttcgctctccgttggcccagtgcctacttattcgctacactagccaggtgattagagagtctggtgtgtaccaaggtggagatcgtcctttctttgatttccttgagtcctgtctccggaataaagcagaaatggtcatacttgaggctgcaagagcaattacagaactgaatggtgtcacaagccgagagcttacacctgcaattactgtgctgcagttgttcttaagttcatccaaacctgttctcagatttgcagctgttcgcacacttaacaaggttgcatcaactcatcctttggctgtcacaaattgtaacatagacatggagagcttaatctctgatcagaacaggagcgttgcaacccttgcaattacaacactgttgaagacaggcaatgagtcaagtgttgatcgtttaatgaaacagatgaccaactttatgtcagacatagctgatgagtttaagattgttgttgttgaagcaataagatccctgtgcttgaagttccctctgaaatatcgctcattgatgaacttcttgagtaatattctacgggaagagggaggattcgagtacaagaaagccatagttgattcaattattatactcattagagatattcctgatgcgaaggaaagcggtttatttcacttatgcgaattcatagaagactgtgaattcacctatttgtccactcagatacttcactttttgggaaatgaaggccccaaaacatcagatcccagtaaatacatacgctatatatacaatagggtgatacttgaaaatgctacagttcgagctagtgcagtcagcacattggcaaaatttggtgccttggttgactcactcaagcctcgcatatttgtgctcctgagacgctgcctgtttgatggagatgacgaggtgcgcgatagagcgaccctttacctcaaattgttaggtggggaagctacagtgggtgagacagagaaggatgtgaatgaatttctcttcggctcacttgatgttccattagtaaacttggagacgagtctgcggaattatgaaccttcggatgtaccttttgatatttcatctgtttcgaaggaaacaaaatcccaaccccttgcggagaaaaagtctacaggcaagaaatcagcaggtccagcatctgctgtcagtggctctgtttctacagttgatgcttcgtatgagaagcttctttcgtccattccggaattcgctgattttggaaagctttttaagtcatctgcacctgtagaattgactgaagctgagaccgaatactcagtgaatgttgtgaagcatatttttgatcgacatgttgtgctccaatacaactgtaccaatacaattcctgaacaattgcttgaacaggttattgttttggttgatgcttctgaggctgacgaatttttagaagttgcttcaaagcctttagaatcattaccatatgattctcctgggcagacctttgtggcttttgaaaatccagaaggtgtcattgccaccggcaagttctcaaatatcctgaaattctttgttaaggaggttgatccatccacgggtgaagctgaagatgatggtgtcgaggatgagtaccagcttgaagatcttgaaatcgtttctgctgattatatgttgaaggtgggagtatctaacttccgaaatgcctgggaaaacatggatccagagactgagcgagttgacgagtatgggcttggagtaagggagagtttggctgaggctgtaagtgctgttataagcatccttggcatgcagccttgtgagggaactgacgtggtcccaagcaattcaaggtcgcacacttgtctgctctctggtgtgtttattggcaacgtgaaagtcttggtgagactgtcatttggaattagtgcaccgaaggaggtggccatgaagctggcagttagatctgacgatccagagatcagtgacaggatccacgaaattgtcgctaatggctaaaaacaatggtagtatcttttttttactccttttcttttggctttcatgctacgggaagtttgaggggattcaattaattagagtatatgtaagtttggtttccagtcgaatctatcattcgttgcaccatcattcttccttgacacagtacaccagtttttggttgttttggatctgtacaattttccttatatactgaggacttaaaatagtatacgcaataatatgcaggtaaagttttgctggaaaaaatgagcatattgccccc

SEQ ID NO: 21442 - DNA, 2928 bp, Zea Mays
tttaccaaatagtaaatagttcagattatacgcaactaaacaataatcatgatggaaaaccaccctgtgactttgtgagtgagcatcatcaacctagcagcactgctcctcaacacagagagagagagaaggaaagagaccggaaagggcgccccccgacgcccgagtcgaccgcaacaagaatcagccacgccgcgtctcacccatctcccgtagcatttccgccatctcctgcgggttgagtacggccgagtcctgctgcccttcgctcgcttcttctggtaaattgcagtttgttaccgcaattgcagctgctagtggtggcgaggcatgggccatgggagaaagactagttgttgctggtgtttggtagtagtagccgcgtaggtctcgtgggtgtgcgcaccctgccttccccgtccctatccgcccgtctcatcgtcatccccttcctgtcttcaacttcaccttccctgtgtttcctccccgcttccttccgctctaggggtcagccaggcagtccagataagatttgctctggttaggctacctccgcgccgcgctggaactccctcccggtgaggttgttgaaaccgacaaggaacggggacgtggggcccgaggaaggtcacgctgctagtttttttccttcgcgatcgatcccttccgcctccggattcgccctgctcttgttcctccgctgttttctcgatcggttggctggtgactctgcccctgcccctgcccctgccccggccccgattcgggggaatctgattcgccgttgggcgggcgggagagattgggttcttggttctggtgccggtgcgcgcggcgtaatttggtagcagatagaagcaggaagggggagcatcggcccttggctgcgctgctgagaatcgcggtcgggggaggctgatcttggcgacggtggcccggcggggaccggtggcggccgcggcgatggccgacgggctggatcggtggcgcggcttcttccgtggcgccggcgctggcatctgcgacgtcatcgagaacgccatcctcgtggcggcggccgacgcgccgcgggacttcctgcaccgccgcgaccgcatcgctgagaggctcttcaccgcgctccgccgcgacgcggcgccgccgtccttcggcagcgccgcggcgtccaccaccccggccactcccgttgaggaggacaagggcagcgtgcgccgcgtcgccgagaaggagtgcaaggtcgacagcagcagcaacggtacccacggcggcggcggccatggccatggccacgccgatgaggacgatgattctgactctgacgacgagcgcctccgccgcgccgcagcgagcaactatggccacaactacgatgatgatgacgaagatggcgaccaacaggaggaagatgagcagcagcatgccgcggatgatactgaagaaggggaggaagaccacgacgctgaggagctcgaggcgctcaccaatgagatcgatgaggagtcacagatcgtcggcgaggtcctccgcatcaaggaactcctcctgcacaaggaagaccattcggatgccactttgttcgattcactgaggaggctgcagttgatgcaattgtccgtctctacgctaaaggctactgagattggaagagctgttaatcggctgcggaaacacaactcacgagagattcggcacctcgtgtgcactctcattgaaggttggaaagttttggttgatgaatgggtcagtaccacaaatgctgccctgacagagaactcccctggctcttcaaatccttctgttgtggatgaagaagaggaagggcttccatctccacctttggacgaaggggccttctttgccacccaaaccacttctattcaactctctgagttctttgacgaaatggatgaagatggaaatttgagacatagtaatgacccgagccttggaaacaagaggggtaacaatggtgggagacttgcaagccattcaacggttgcaaggcaagatccacctcgctcttatcctggagtcgtcgaaagagttcaacccaggaggctagaactggcaaggcaagagccaccaatgagtctaataatccctcaagttatgaatctggaccggggagaccagtaaaggcagctcaacagagaccatttggtgacatgaaacctaaacaaactcgagagcatgttgctatcgagagaaagcctatggcaagccagacagataaatcaaggcccggcgctcgaccttcggcaggagccaagctagagttggcaaagccaaaggtttacgatgatggtctggataacaacaggaagctggaagcagcgaagcggaggctccaggagcggtaccaggaagcggagaatgcgaaaaggcaacgcacgattcaggtaatggagctgggtgacataccgaagcccaagaatcaaaacagacaaccggtggtgaagtccaggaatagccttaggaattgggcgaacgggcggcgctaactcctctgtgaccttttttttttttgtttacctcacctgatgaattgttgccatgcctggccttgtcggatcatgcgtttattatgctcaacgaggagcagatgaacaatcttttttttctttttgcacagaaccttcaatggagggttcttttgaagtggcaagagttgcacttgatgccatgagtggagacgagagtttagccatgtctggataatggacatgtagctggatttgtatcggctggttctttccttctttctttcttcttgttcttcttcttcaaaggaagctgctgtagataccagatagaataatcagcaatgtttggtacaggtacagccacctctttttctttttcttttctttttttttaccgtcagtcactttgatcgcggaaccattgacaaaaatgcaacaaactttg

SEQ ID NO: 21443 - DNA, 1554 bp, Zea Mays
gactggagccccgagagcccagcactatttcttcccccgtcgtcactcctctccctctctcgtcactccactccagcccctcctctagatctctctcccccccctcctcacacgcactcactctcgtcactgaggctagctactagctggtactggaagcctggaacacgcactgtcacttgctcgtttcaaggacctgccctgtgccaattaagtagtacgccgtcgtacggtttgctctgagctagctcttcgtgttcgcgatggcgtcggagtgggaaatggccatgggggtggagctcggcatgggaatgggcggcacgtaccaccacaacgcctccagcatcaccaccgcgccgatgatgatgagcagccatccccacagccacagcggcggcgccgccagctactccacgccgcaccaccaccattactacggcgggatgccgcccatgggcgacgccatgcgcgtcgacgacctcctcgacctctccacccccggcgccggcgcccatgagttcttccccaccgcggcgccggccactgacaaggggcaccactcgtcgggggccatgggtgagccctcacccaccgccaactcgtcggatcaccggacgtcggccctctccttcgccgatgagttctacatacccaccgaggaagctgcggagctggagtggctatccaagttcgtggacgactcctattcggacatgccgaattactcgtccgccacgcatgcggcgatggcggcggcggctgctgctgctgctaacgcggcaggcaacggaggaggcaccacctcggccggtcaagacagcggcgtcgccgcggcgcctggccgcggcgcgcgcagcaggcggtcccgcgcgaccgccgcggctgccgcggtgtggcactccctcgtgccgcgcccgccgtctcagtcgtccccttcatcgtcgtcctgctcgtcctcggacttcccgtcgtcgaacaaggcggcggcgtgcggcggtgcacgcactgcgcgtcggagaagacgccgcagtggaggacggggccgctgggccccaagaccctctgcaacgcgtgcggcgtgcggttcaagtccgggcggctgatgcccgagtaccggccggcggccagccccaccttcgtgctcacgcagcactccaactcgcaccgcaaggtcatggagctgcgccgccagaaggagctcatcctcatccgcggaagccaccgcgacgccgccgcaggatccgccgccggcgggccgaggccggagctcatgttccgtgactacggcgtgtgttagcccgctgcccggcaaaccggcaccgaggaggctcgcgtcgtgcgttgcatgcatggagctttagatccttttgcgaaattctgccgtttctgccttttttttaatctttccctgcgcgttccagatatttccgtttctttctcttttgttaattcttaaattgttggtacctacctacctcatccctgcttgagagatcaatgaattctgttggtataaatcgtgatcgtttgtgagtaatcatgctcctaaagccg

SEQ ID NO: 21444 - DNA, 599 bp, Zea Mays
cttacactctccttttgtcaccttctcttcgttcccctcctcggctcctcgcgatccttctttactgcccgagagttctgactagccacatccagtcaagcagtaaaggcgcaccatggaggcggcggcggagaataaggaggccgagcaggagcagcagcagctaccgcacgcgcggaaggataacgcgcccgccgccgccgaggaagacgaagcggattcggaggagaccgagcgccgcaaccgcgacctcaagtccggccttcacccccttaggcacaaactcgtgctctggtacactcgccggacgcctggagcgaggtcgcagtcgtacgaggacaacatcaagaagatcatcgatttcagcacagtcgaatcgttctgggtttgctactgccaccttgcgcgcccttcttccctgccgagccccactgaccttcatctcttcaaggatggcatccgtcccctctgggaggatcctgcaaaccagaatggtggcaagtggataattagattcaaaaaggcagtttcaggtcgattttgggaggatttgataagaaatgagggacatgattatgccattagaatcatgtgatggc

SEQ ID NO: 21445 - DNA, 1478 bp, Zea Mays
gttctccgcacttctcaagaaagaaatagttggaaattccccggatcgtctgcgcttggcttggctagagagagtgtgaagattgagcatgagaaaaagctttctactctgcagagcctggagtacagaaggagggatagcgcaaagctggacaagaccaaggcctccataaacaggctgcaatccctgatcgtagttacgtcgcaggctgccacaaccacatcatcagccattgttagagtccgtgacaatgagcttgcaccacagcttgtccagctctgttttgcgctactgggcatgtggaggtcaatgaaccatttccacgagatacaaaacgagatcgttcagcaagtccgcggcctggtggacaactccatggccgagtcaacatccgacctccataggcttgcgactcgtgatctcgaggccgctgtcgcggcatggcactcgaacttcaaccgtctcatcaagtaccaacgcgactacatccgctctctgtacggctggttgaagctcacgctctgccaggtggacagcagcgtgccccaggaagtccatgcctcgatgatctcgcgcgagctcaccagcttctgcgacgagtggaagcaggcgctggaccgcctcccggacgccgtcgcctcggaggcgatcaagagcttcgtgaacgtggtccacgtcatctacaccaagcaggccgaggagatgaagatcaagaagcgggcggagacgtactccaaggagctggagaagaaggccaactcgctcaggtccatcgagaagaagtactaccagtcctactccatggtcggcctcggcctccccggcagcgggcgcgatggcatcgaaagccacgctgcgtacgatgcccgcgaccctctcgcggagaagaagaccgagatcgcccagtgccgccggaaggtggaggacgagatgacgaggcacgccaaggccgtcgaggtcacgcggtccatgacgctgaacaacatacagaccggcctgccgggtatattccaagccatagctgggttctcggggacagtggtcgaagctcttgatgtggtctgccgccgagctgggtctgtgcggtagaagaagctctttcccatcaggattaccaagagaccatttgctgcctctctctctctctctctctttctgggtgattcagtagtttatttatatagggaaactgcaatatattatatatatagctcaaagtagagtggtcaagtatagaagatggttccccggatgttttgccctgtcacaggatggtttcagttgtagttgtagataatgtgattttgcccaggatttgttggtctcctttttctggggcgagtgcgaggggagagatttataatgtacagacattaaggttgccttgcactctagcctcatcatgatcaagcctgtgtttctgtttagcaaaagcgctggtgtcctactttctttatatatatatatatatatatata

SEQ ID NO: 21446 - DNA, 1561 bp, Zea Mays
aacgcgaagctttctgccgaaacagtggggtttgggcgcttgtccacggccgccgccaacaacgagttcctgacctccgccgtctcttccccgctccctcgcgctcgcagtcgcagctccggccgccctattttgcggaattcggtagatttgtttccttcatgggtcgcaccatcaagaaggccaggaaagcgaaacccaagaagtctaagaagaaaactgaagcgtcttcatcgtccaatcatgcggttgcctctggtccggctaaggtctggcaaccgggtgtagatgcactggaagatggggaggagcttcagtttgatcctgaggcttataattatctccgaggttttggcattggctggtcttgcttgaggcggagaaagcttcattgaattatatcggtgttttcaagctttctaacataaatgggaaaaagcgggaacctataccagcttcagcagttgatggtgacactgatgtggatagtgacagcagcagtgatgaagaagatgaagaaattaacgaggatacaaagcccatcctacatctaaaaaaggtggctcatgcggggtgtgtaaatcggatacgctcaatgactcaaaagccacatatatgtgctacttggggagatactggtcatgttcaggtgtgggacttgagctccttccttaattctttagcagagtcaggggcatctgcacccaaagaagacgatataatccacaaacacttacccatgaaagtttttagtggccataaagatgagggatatgccattgattggagtccacttgttactggaagacttgtttctggtgactgcaataagtgcattcacctatgggaaccgacttcaaataactggaacgtagatgcaaacccatttgttggacacactgctagtgttgaagatctacagtggagtcccacggaagccgacatatttgcctcgtgttctgtggatggtacgatatcaatatgggatgtacgtacagggaagaaaccttctatttctgtcaaagctcataaagcagatgtgaatgttatctcatggaacaggcttgctagctgcatgatagcttctgggtgcgacgatggcagtttctcagttcatgatcttagatcaattcaggactcgttggtagcacattttgagtaccacaagaaagcaattacatccatcgagtggagcccacacgaagcatcatcattagctgtaacatctgaagaccaccagctcacaatctgggacctttcattggaacgggacaccgaggaggaggctgagttcagagcgaagatgaaagagcaggcaaacgcccctgacgatttgccgcctcagcttctctttgctcatcagggtcagagagacttgaaagaagtgcactggcacccacagataccgtcgatgatcatatcgacggcaatcgacggcttcaacgtgttgatgcctagcaacatcgatacaaccattcctggcagcacagatacagcaatgccgcctgctgagccatagggtagattttgtgtccacattatagctgagcaactctttcat

SEQ ID NO: 21447 - DNA, 4671 bp, Zea Mays
cggatttctatcgtgcttaaacagttaactgcgtacatacatatggaaaagagtgatagactataaaaacgatttgtatatttcagcttgttttgaaataagttcgtaaaaacccccaacgaaaataccaaataaacccagaaaaaaaagaaattacacaggaacaaaaaaagaaacgaaccaaacaagcgcaggcgcaaacgcctcccttcttccgttcccttcctcctccggccctccggggcgccctccctcggtctctcccgcgtctcgagctgtcgacgtcgccgtcctcgcaccgctcccttctccggcacccgagccgtagccctgccctccgcatccacaatttgatgcggtgggcgcggccgccatgtcgtggggcctggcctggaagcgcagctccgagatcttccacctcacgctcaactacggtgactacgacgacaacgacgaccgccaaccctcgtcaccgccccctccggcgtcctcttcccctcccgcctctgcatcgtcgacccctgtatactcctcctcgcccattgccacccgcaacggcgaccttggcttccgcatcgagcttgactggtcggcgggggacgacgaggatcaggtcgcgctccgcctccagtcccagctcatggtcgcgctgcccccgccccacgacgccgtctccgtcgatctgaccccgagggaccacggggaggaggaaggggtgcggatcgaaatgcgtgtggtcaggaggcgggaggcgctccggtccgtgcgcgtgtcgcgggcccctgggtctgcgctgggcagcggcgatggcgcgggggtgctcgcacgcctcatcagatccaacctcgcgcccgcgcctgccgtggatggccccacagccgcctcgggcgtgcccgtgcttgcggatcactggcgccccatcaccatggtcagcctatgcaactgcggaatgtcgatgcttccagttgagttaactcgccttcaatttcttgagaagttatatcttgacaacaataaattgtcagttttgccccctgaagttggtgctttgaagaatatgaaagtgctgtcatttaacaacaacatgctagtttctgtccctgcagtagaactgcggcaatgtgttatgctggaggaattatcattagaacataacaagcttgtccggcctctattggatttcaggtcaatgcccaagctccgaattttgcgcttgtttggaaatcctctagagttccttccagaaattttgccattgcataacctcaggcatgtcacacttgcaaatattagaattgaagcagtggaaagtcttaaatctgtcactgtacagatagagactgagaatagttcctacttcattgcggccaggcacaaacttagtgcctttttctctctagttttccgtttctcttcctgtcaccatcctttgctagcttctgctttggtcaaaataatggaagatcgtagcaaccacattgcaattagcaaagaagagaatgctgtcaggcagcttataagcatgataagcagtgataatcgtcatgtggttgagcaagcatgtcttgctatctcatcactggcatctgatatttcttcagcaatgcagctgattaagtgtgacattatgaagcctattgaagctgtactaaaatcatctgatgaagaagaactagtatcagtattgcaagttgtagtcaccttaactttcgtttctgatcatgttgctcaaaaggtgttgacaaaggatgtgttgaagtcattgaaagcactttgcgcacacaagaactctgaggtgcaacgtctatctctgtttgcaattggcaatttggctttctgtttggagactcgtcgcatcctcatgcattctgaaagcatgtgtgacctgttaatccgattaactatttcacaagagtgtcgtgtcagcaaggcagctgcgcgcgctttggcaatcctaggggagaatgagaacttacgtcgagcaataagaggaaggccagttgcaaagaagggtctacgcatcctatcaatggatggtggtggcatgaaaggccttgcaactgttcaaatgcttaaacagatagagcaaggaactgggaaacgcatacatgaaatgtttgacctcatatgtggtacatccactggtggcatgcttgcaatggctcttgggatcaagcagatgactttggatcagtgtgaagaaatatacacaaaacttggtgattcccttttgccttttgaagtttccttgccaatgccaatgttgccaactgaacttttaattttcctaggaaaacttgtatttactgaacctatcccaaaggatgaagctgctacgtggaaggagaagattgatcaacttttcaaaagttcctcacaaagttttagagtggttgtacatgggtccaagcacagtgcagatcaatttgagaggttactaaaggaaatgtgcgagaatgaagatggtgaccttctaattgaatctgctgtaaaaggcattccgaaggtctttgctgtatccactttagtcagtgtcattcctgctcaaccgtatatattccgaaactatcagtatcctcctggcactctggaggtatcaccaggaatggcagaaagtccatcaattggtgcaattggcacggctgtttctggtgcaccagttggtattaaacgtggtgccttcatggggagctgcaagcatcgcgtgtgggaagccataagagcatcgtctgcagcaccatattatctggatgatttctctgtagatgcaaatcgttggcaagatggagctattgtagccaacaatcctacaatctttgccattagagaagcacaacttttgtggccagatgcacgaatagattgtctagtctcgataggatgtggctcagttccaactaagagtcgccgaggtggatggcgctacttggacacagggcaagtgttaatagaaagtgcatgctcagtggagagagttgaagaaactttggatacactgataccgatgcttcctgaaatgcaatatttccgctttaatccagtggatgaacggtgtggtatggagttagatgaaactgatcctactatctggctgaagttggaagctgcaactgatgagtacattcagaagaactttctgtctgtcaagaatctttgtgagcttctggtcccaaggtaccaagaggaagaaaagccatcagatatttacaaatctctttcattttcaagactgacatcgttaaatcaaggtttcagtgaaagtaatcctatcttaggatggaggcgtgtggttttacttgtagaggcttcatttagtcctgattttggaaagaaaataaatcatgcacgttcccttgaatccttctgctcccagaatggtattaggttagctctaatgaatagcacttctgggtttgggaagccagccactgcacttcctaccccaataacttctcccttgtttactggaagtttcccatctagtccacttctatatagtccagagggcactcaacggatcagtcgaattgacctagttcctccacttagtttggatggccacccaactacaaagtcctcacctccaacatcaccattgaagtcaagacagccatctgcacatgttcggtcattgtatgataaactgcagaatatgcctcaagttggtgtgatacacttggctcttcaaaatgattcaactggttcagtattgagttggcagaatgatgtatttgtggtcgctgaacccggggaacttgcagacaggtttctgcaatctgtcaaaactatcttgtcaaccttgttgcgtgggtgtaatagaaagggtgcatattccctgtccaagatttcatgtttatctgagttggttgctgaatggccatcttttgaaatcggtgggatacaccaccgctatataggtcgacaaacacaagtaatggaagataaccaagaaattggcgcatatatgtttaggaggacagtgcctgctgttcacatggcacctgaagatgttcgatggatggttggagcatggagggagaggattatcatatgcagtggtaagtatggccttgctcatggcctggtcaaggcattcatggattgtggtgccaaagcagtcatctcgtcgtccatcgagcctccggattccaagacaatagtctaccatgggatggatgtcaatagaagcctagagaatggcaagtttgtcatccgtgatgaagaagcggacgaatcagagcctgaacctgtcagccctataagcgactgggaggacagtgatgtggagaaaggcggcaaccatgacgtggatgatgaggagtacctggctcagttcatgtgcctgatgtatgacaaattgttccgtgagggtgtgactgtggatacggctctgcagcaagcactccgctcacatcccaagttgaagtacagctgccacttacccaacgttttgtagttagggacattattgacaaaccatacataagtatagcaaaatggacatggataacagggaatgaataaggattgggtggattttttagttgggttatagaggtctatactttgttcgttgtgcaggcatggtgacagaataaaagcatgaaggcattgcactgcatgtgcatttttgctgtagttgtgagaacgggcattttgtttcgcaaatac

SEQ ID NO: 21448 - DNA, 634 bp, Zea Mays
agacgaaaaaccgagcccacgcgagaagaaaaaaagtggctaaaaatggaggcgtccgcggaggcggcggccgccgccgccgctgcgcgaacgttgaggtgggctggccgcgcggggcacctgggcggcgtcccgcgcgccgtcgtgttcgccgcggtgggcgcgttcgccaaggcgtgcgcctcgctgctcaacaccaccacggtccacaacgccgacgcgctcctccgcctcgtctcggcgcgggctcccgggacgccgctcctcaccgtcagcaatcacatgtccacgttagatgacccgcttatgtggggattcaagggttttccaacttcggatgcaaagcttggaaggtgggtgctgacagcagaagatatatgcttcaagaatgtagtcatgtcctacatgtttcgacttgggaaatgcataccaatcacgagagggggtgggatttatcaagaacacatgaatgaagcccttgacgtgcttagaaatggaggctggcccaagaagatcagccgattagaagattgaagtggggaacggccagtcttattgtccgagcacctataactccaatagttttgccaattgttcactctggtttcgaaaagcacgctgccatctacttcca

SEQ ID NO: 21449 - DNA, 4801 bp, Zea Mays
tgcttactcatgggttgcatggaaatgagaacatcccacttgaggaagtttttgagaatctgagatgcagtcgtggggggctcacttccgagcaggcgcagcaacgcctgcaattatttggccccaacaagctcgaagagaaggaggagagcaaatttctcaagtttctgggattcatgtggaacccactgtcatgggtcatggaggctgcagctatcatggccatcgcactggccaatggtgggggaaagccaccagactggcaggatttcgttggtatcatcacactgctgcttatcaactcaactatcagtttcatagaggaaaataatgctgggaatgctgctgctgcgcttatggcccgccttgcgccgaaagccaaggtgcttcgtgatggccgttgggccgaggaagaggcagccgtccttgtgcctggggatgtaatcagcattaaacttggagatatcatccctgcagatgctcggctccttgatggagatcccttgaagatcgatcagtcttcgctaactggagaatcgttgccagtcaccaaaggtcctggtgatggtgcctactctggttcgactgtcaagcagggtgaaattgaggctgttgtgatagcaactggtgtccacactttctttgggaaggctgcgcatcttgttgactccacgaatcaagtattgacagccattgggaacttttgtatttgttcaattgctgtggggatgtttgttgagataattgtcatgtaccctatccagcatagggcgtatcgtcctgggattgacaatcttttggtgctacttattggaggcattcccatagcaatgcctacagttttgtctgtgaccatggcaattgggtcccatcgcttggctcaacagggagctataacaaaaagaatgactgcaattgaagagatggctggtatggatgtactttgtagtgacaaaactggaactctgactctgaataaactcacagtggacaagaacctcattgaggtttttgaaagggaagtgactcaagaccaagtaattctgatggctgctagagcctcccgaatagaaaatcaagatgctattgatactgctatagttggcatgctagctgatccaaaagaggcccgtgctggtattcaagaggttcatttccttccatttaatcctaccgacaaaagaactgccttgacatacattgatagtgatgggaagatgtaccgtgttagtaaaggtgcgccagagcagattctcaacctcgtctacaataagttggagatagaacgaagagttcatgctgtaattgacaagtttgctgagcgtggacttagatcacttgctgtagcgtatcaggtagtgccagatggaaggaaagagagtcccggtgggccatggcattttgttgctcttatgccactctttgatcctccaaggcatgacagtgcagaaacaatacgaagggcattgaaccttggtgttagtgtaaaaatgatcacaggtgatcagctagcaattgggaaggaaacaggacgtcgcttaggcatgggtactaacatgtacccttcctctgctttgctgggacagaataaggatgagtctattgctgttttacctgttgacgatttaattgagaaagcggatggttttgctggcgtattccctgagcacaaatatgagattgtaaaacgtctgcaagcacgaaaacacatttgtggaatgactggcgatggagtaaatgatgcccctgccctaaagaaagctgatattggtatagcagttgctgatgccactgatgcagccaggagtgcttctgacattgtcctgacagaacctggcttgagtgtgataattagtgccgttcttaccagccgggcgattttccagaggatgaagaactacactatctatgctgtttccattacaatacgtattgtgctaggatttatgctacttgccctcatatgggagttcgatttcccaccatttatggtacttattattgcaattctaaatgacggtaccataatgaccatatcgaaggatcgagtgaagccttcgcctctaccggacagctggaagctggccgagattttcacaactggaattgtgcttggtggatacctggcagtgatgactgtcatcttcttctgggctgcatataagacaaactttttccctaggatcttccacgttgaaagccttgagaagacagctcaagatgattaccagaaactcgcctctgccgtatatctccaagttagcaccatcagccaagctctcatcttcgtgacgaggtctcgcagctggtcattcgctgagcgcccgggctttctactagtgtttgccttcctggtcgcgcagctgatagctacactggtagctgtatacgcggactgggggttcacttcgatcgaaggcattggatggggctgggctggtgtggtgtggctctacaacctcgtcttctacttcccgctcgacctcctcaagttcctcatccgatacgctctgagtggcaaagcgtgggatcttgtcattgagcaaaggattgcgtttacaaggaagaaggacttcgggaaggaggagagggcgctcaagtgggcacacgcgcagaggacgctccacgggctgcagccaccggatgccaagctgttccctgacagggtgaacgagctgaatcagatggccgaagaggccaaacggagggccgagattgcaaggctgagggagcttcacacgctgaaggggcatgtggagtcggttgtgaagctcaagggcctagacatcgacaccatccagcagtcgtacacagtctgatgaccctggattaagtacatacatgtatatctagttctggcaggtggcagtcgcctgcttgtttgtatttgccatataccataacacatcatgagaactggtagttggtgccgtcggttgtcttcgcgtgctccttgcgatgttattgtgttacgccggtttcaagcaacataggtcacggatcataaatcagatatccgacggatatcaaatccgtgtgtcatctccccgcgtcctggttgccccgcgtcgggcgactcggacgctccccataatccctagtagccgccgccgccccttcgtgggcctctccctgccgcgccgctgcctgagctggccgccggaaggttcggctgcttgcggggagggcggcggcggggcatctccgtctccctctggtggatctgggcgggcacagccgccaaggtcaccgtgagttgctcgtcggcgtggtcggccccggcttcgccccctcgcgactcgggtggctgccaactcccctccctccccatctctttgccttgccgccgccggagctagctggtgggttgctcgcacggctaggggtgaaggcgtcgggcgggtgcttgctgccttgtcgtgcgtccaacccacggtggcggcgtccgcccactcaggcaacgggcctgtggctgggtgcgcgcccgcgaggctagcccggtggcggcgcctgcgtgccgcgacggcaatcgctgctgctcgggggttggaggtgtgcctggactgtgtgctcgcgtacctgatgcgcggagggctggatctggcgcccccagggggagcggcgttggcgcgcggaaggctggatctggcgcgcgaggttggcggcctccgcatgccatccgtcggaggcggcggcaggctggtcccgggctagcgcatgagccggggtggaggtcggcgttggtgcgccggcaggcctgcgcagtcggccggaattgcagtggcgggacctcctctcgtctggggcagcatcggctagtcgatcgggctagcgcagggtggtggtggcggcaggcccaaaatcttcatcatttgtgtggtacgtcggggtaccggcgacggcggaggcagcttgctgtgtctcgaggtttcggccagacgttgtgctgggggctcttgggcgaaagtctcggcgacggtgacgcccatgggcgtcgcttcccctgttaagggcgtcacaccccagtgctatcttccttgggtgaaagctcggtccatcacggacaggtgacggtggcgtcacagtgacgtcactcccttcctgaaggcgtcgcttctgaagttcgtctcggccaggactttgccttcggctgttgcttcgcttctcggtgcctggtatgcgagtggaggtgggggttttgcaacgtgaagtcggagctgctacatcagtggatgtggctcggcaacgataacacgaggcgaacctcccttcttcgtggtccagaatgtttcgaaggtcgggcaaaaaccggaggcagggcagagggtcaagattggaagtcgaagctgctttgtgcctgagcccggcaacgatgacttgttgagacctttcgcttcgggttgtctatctgctttttgtttggttcgcctgttggctgctttggaaagtcggagttgttggatgctctgcatctttgcttgataacgatgacctttagcagttttgtgctctcgtgtggggttgccgctgcctgtgttgtttgggcactctatgtcgacggtgagtgtggtgtcgtgttgatgtcctaatccaaccgacgagttgagttgtatggtgttggcgtgttgatgtctcaatccaaccgcatgttgtttgttgtttagtccggtccggaccacttcttaattaatataatcggcagctctcatgtctggttcgtttcaaaaaaaaaaagtgtgtcaaattgtcatccctagctagacagagtagccatgggctgctatttggagctggtctggcc

SEQ ID NO: 21450 - DNA, 2515 bp, Zea Mays
ccatttcactatctcagctgataacaccaccagacccatgcttaagaggccgctttatgctctgtgaggattgtacgaaaagttccagacttggcagaaattttcatgagtgccgccacatcattactgaaggaaaaacatcacggtgttctgatatctgctgttcagctttgcatggagctatgtaatgccagcaatgaagcattggagtacttgaggaagaattgccttgaaggactggtccgaatactgagagatgtatccaacagttcatatgctcctgaatacgacattggtggcatcacagatccattcttacatatccgagtgcttaaactcatgcggatactgggccaaggagatgcagattgcagcgagtatatcaatgacattcttgctcaggtttcaacgaaaaccgagtcaaataagaatgctggaaatgctattttatatgaatgtgtggagacaataatgagcattgaagctacaagtggtttacgtgtgttggcaattaatattttgggtcggtttttgtccaaccgcgataacaacataagatatgttgccctaaacatgcttatgaaggccattgctgtagacacacaagcggtgcagaggcacagggcaacaatattagagtgtgtcaaggatgcagatgtttctattcgtaaaagggccctggaacttgtttacctacttgtcaacgatacaaatgtaaagccattgactaaggaacttgttgattaccttgaagtgagtgatcaagatttcaaggaagacctcactgctaagatatgctcaatagttgaaaagttttccctggacaggctatggtacttagaccagatgttcagagttttatctctggctggtaatcatgtgaaggatgatgtatggcatgctcttatagttctagtgagtaatgcatctgaacttcaaggatattcagtcaggtcattatataaagcattgcaagcatctagtgaacaggaaagtttagttagggtggctgtttggtgcatcggtgaatatggagaaatgctggtcaacaatcttagtatgttggacatggaggaaccaattacggtaacagaatatgatgctgtggatgccgtagaggctgctcttcagcgctactctgcagatgttactactagggctatgtgtcttgtctctcttttgaagctttcctcccggtttccaccaacatcagagaggataaaagaaatagttgcgcaaaataaagggaatactgtgcttgaattgcagcaaagatctattgaattcagttccattatacaaagacatcaatcgatgaaatcatctttgcttgaacggatgcctgtattggatgaagctaattatttggtgaagagagctgcttctatacaggctgcagttccatctgtaaattctgctccagcagtcacttctggaggcccatttaagcttcctaatggtgttggaaagcctgcagctcctttagctgatttgcttgatttgagttctgatgatgctccagtgactacctcggcccctacaacagcacctaatgattttctacaggatctgttgggcattggcttgactgattcgtctcctataggcggagctccgtctacaagcactgacattctgatggatcttctatctattggttcatcttctgtacaaaatggaccaccaacggcaaactttagccttcctggcatagagactaaatctgtcgctgttacacctcaagttgtggatcttcttgatggtttgtcctcaggcacatctcttcctgatgagaacgcaacctaccccacaatcacagcattccagagtgcaactttgaggatcacattcagtttcaaaaaacaacctggaaaacctcaggagactacaattagtgcttctttcacaaatttagcaaccactacattcacagatttcgtcttccaggcagctgtgccaaagttcatccagttgcgtttggacccagcgagcagcagcactcttcctgccagtggaaatgggtcagttacacaaagcctcagtgtcaccaacaaccagcatggccagaaaccacttgcaatgcgtatccggatgtcttacaaagtgaatggtgaggacaggctggaacaagggcaaatcagcaactttcctgctgggttgtagggccacctgtgtctatagggtttgggttgctctttcagacttatgcttgcctgctagtgagttgtgtacactggtagttggtttttggccgtccattatctctttatatatatagtgtacagtagatgacagcgattaatgatatatcctcagttttgccgaaatgtatttttatcttggtgcatatcggacttcagggtaaccaaaattttcacccttttccccgcgtaccaagcaccaaaggaatgtgttgtaccatgatattccccaatgtaattatttatttttctaatcattgtacaagcttattgtgcagacaaattatttgtttttcatgtgcgtttcttcaggc

SEQ ID NO: 21451 - DNA, 2196 bp, Zea Mays
cccaaccaagccatcgctcctgtcctgcatctccatgagccaaagaccaaggaaaaagaatagggagaaaacacaccccgaaaaacaaaccaaaaatccccaatccatgaagcccaccacttccgccgccgccgccgccgtggcggcggttaccgtcaccaccgatgacccatccccttcgccgtccgactcaacgtcggcgacgttcacggtcgaccgccgtggggacgcttccgcctcctgccggtggacgctcccggacttcccccgcacccgcgcccgcaccttctacagccgatacttcgaggtcggcggcttcgactgccgcctcctcctctacccgcggggcgactcgcaggcgctgccggggtacctctccctctacctacaggtcctcgaccccaaagccccggtgtcgtcgtcgtcatccaccacgaccaccacctcctccaaatgggactgcttcctcagctaccgcctctccgtagtccaccccaccgatccagccaagtcgctgggccgcgattcctggcaccgattctcgtccaagaagcgctcccacggatggtgcgatttcgcgccctcctcctccgcccccttcctcttccagccccacgatgccctcgtcatttctgctgacatatctgtgctgtctgaggcggcctctttctccgatgccgacggtcgttttaactggaaggtgctcaattttggcctcttccgagaaatgatccgcacacagaagatcatgagccctgcattttttcctgcatctgcctctgctggcgggactgactgtgggctccggattagcgtctatcagagcaatgtatctggcgcagagcatttatctgtttgtctggaaagcaaggagcctgttgtgcaggtagcatccgggtcatcggcattggcatcaggtggtacagggagtggtgtgccagatggtgatcgtgggtgctggtgtcttttccgcatttcgatccttaatcagaggtctggtgggagccatatccacaaggactcatatggtcggtttggtgcggacagtgccagtcttggttggggagaatacatcaagatggatgagtttttggctgctgacggcggataccttgtagatggagctgtggtgtttagtgcctcagtgcatgtcataaaggagtcaaactcattcagtcggagcttgccaatggttcctggaatatgtggtgctggtggtgggcgtgctggggctaggaagtcagatggacactttgggaagtttgtgtggaggattgaaagcttcacaagacttaaggagcttctcaaaaagcgcaagatcgcgggtctgtgtatcaaaagcagacggtttcaagttgggaatcgagattgccgtcttattgtttatccacgggggcagtctcaaccgccatgccacctgtcagtgtttctggaagttacagatccccgaaatacaactactgaatggagttgctttgtgagccatcgtctctctgtcatcaaccaaaaagtggaggagaagtcgatcatgaaagagtctcagaatcgttactctaagtcagcgaaagattggggttggcgggaatttgtgacattaactagcctctttgatcaggatgcaggttttcttgtgcaggatactgttgtattttcagccgaggttctcattctgaaggaaacagcaactatgcaagagcttacagatgaagattctgaaacttgcagttcaacttatggatgtcagattgaagctttaccaaagcggccatcattcacatggaaagtggaaaatttcgtgtcttttaaggagattatggagtccagaaagatttttagtaaattttttcaggctgggggctgcgagctgcggataggtgtatatgagtcgtttgatacgatctgcatatacttggagagtgatcagtcatctgggtatgatcctgataagaacttttgggtgcactataaaatggctatagttaaccagaagaattctgcaaaaactgtgtgcaaagaatcttcaatctgcacgaaaacatggaataattcagttctccagtttatgaagacttcggacatggttgacactgacgctggctttcttgtccgggacactgttatttttacttgtgaaatcatagactgctgcccatggtttgatttctctgaccttgagcacatgcagatgaaaacaat

SEQ ID NO: 21452 - DNA, 5051 bp, Zea Mays
aaaaagggggtttggtttttattggctgcacacaatggcagcagcgatccgaacccaatccccatctccgcagcgcgtgggtaataatcccagttcgagcagtcgccacacgcccgttgctgctgttcctggcttgcggcttcgccaatctccgccacacccctatcctttcccttcttcgtcgcctcacccaccaccccatccgctgcggcggtgttcgtggtgttcaagtaattgtttttggtggtgtcattattccttttcctcctcccagttcaagccatcggtgctgggtattcttcgccacggggatccagccgcacatcgattctcctttttccaccccctcgctccgcgacgcggggtataatagcgactgcgaggcatttggtgcgggcagacgctacgaggtggggtgagaaaagtttctgcgccttgctttgcagaaggtgctcggatctaggtttcaaggccgtcgatcgccgccatggacgccggcggggacgaggacggcgccgggaaggcggcgctggagagcactgccgaggccgcgaccctgccaccggcgtcaacagtggcggtcccgtccccggtcccggcttctgcgcctggggcggccacggggacctcagggtcgggggagaagccggtgaagcggatgatgaagaccccctaccagctcgaggttctggagaagacctatgcggtggagcagtacccgtcggaagctatgcggctggagctgtcggcgaagatagggctgtcggacaggcagctgcaaatgtggttctgccaccgccgcctcaaggaccgcaagccaccgtccaagcggcaacggcgggaggaagagtccgcgctagtaccagtgatgcctccaccgccagtgttaccagcacctgtgatgcctctggcaagcagtgaccttgtggtgggtgctcctgggccgtatgatgagccgctgcacccacttcactcgcgaaggggtgctgggcgtgggcggtcctcagcagtccccaggatttccatgccggatattgggaggaggtattacgagccaccaccaattatgatagcgccgcctatcccgtcgatgcagctcacgcaatatgagctccgtgtgattaattctgtggagtcacagctcggggaaccattgagggaggatggtccagcgcttggcgttaattttgatccccttcctcctggcgcctttggtgcaccgattgttccagagcaacaaaagcagcctgtgcgatcttatgatgcggagatattttcttggcatgatcaaaaactcttaaaggcttcagcatttttacctaatatggaatccccatttgttccaaattcgtttactgggaagagaaaatcaccagttggtaattcagccatagttcaacctcatgttggatcacgggctgttcatgagtatcagttccttcctgagcaaccaagtgatacatatgagagggcaacccgatctcactactatgacactccagtggaagtttcaaatgctaggataccttctatcacatcaggatcacaacttctccatggatctgaggaggctgcgcctagttatgcttttcaaggtcacacatctggttctagcctgttgcctccgtccagcaggccccaagtgtttccagcagcaccaacagattatgagatgactcagtctaatagcaaccttagttctgttcctgttgaaggacagtttgatatttctcaggttgctgcatttgaaaacccacctgtatcatctgaaataatagcttatcatgatgaagatacttctcgcgtggaaagaaaacgaaaacatagtgaagaagcaaagattgcaaaggaagttgaagctcacgaaagacgaattaggaaggagcttgagaaacaagatatgttgaataaaaagagagaggagcaaaggcgcaaggaaatggagagacttgatcgtgagagaagaaaagaggaggagagattactgcgtgagaggcagcgagaagaagagaggttccaaagagagcaaaggcgcgaacatgagcgtatggagaagtttttgcagaagcaatctagacgagcagagaaacaaaggcaaaaggaggaactccgaaaagaaaaagaagcagcaaggcaaaaggctgccaatgaaagggctactgcacgtaggattgcacgggagtatatggaactggtggaagatgagcgtttggaatcaatggaattagctgctcaaaacaaagggttgccctcaatgctgtatcttgacagcgacacattgcagcagcttgattcctttcgaggcatgctaagtcaatttcctcctacaacggtgagaatgaagttgccattttctataaagccttggactggatccgaggataacgttggaaaccttttgatggtgtggaaattcttaattactttcactgatgttctgggtctttgtccagttacacttgatgagtttgttcagtctcttcatgattatgattcaaggttgttgggggaactgcatattgctctgctgagatccattataaaggatattgaggatgttgctagaactccatcaattgcactgggggtgaatccaggaggtggccatccacaaattgttgaaggggcatatgcctggggattcaatatacgtagctggcaacgccatcttaatcttcttacatggcctgagatattaagacagtttgctttatctgctggttttggacctcaattaaagaaaaggaccgtagaagattcttactatcgtaatgataatgagggtcatgatggtgagaatgttatattgacgattcgaaatggtacagcagcagtgaatgctgctgctaagatgaaagaaagaggttacaccaatcgccgtagatcccgccaccgtctcactcctggaactgtaaaatttgccgctttccacgtgctttcgcttgaagggagcaatggtctcacaatattggaagtagcagaaaaaattcagaaatctggattgagagacctcacaacaagcaagacacctgaggcatccatagctgctgccttgtctagggatacaaagctttttgagagaactgctccttcaacatattgtgtgaagtcgccttatagaaaagatccggctgattctgaggctgtgttgtcagcagcgcgtgaaagaattagggcttttcagaatgtgctttctgactctgaagctgaaaaggaggtagatgaagctgagagggatgatgattctgactgcgatgatggtgatgatgaccctgatggtgatgatgtgaatactgaggtggaagacgacaaggatcctcttcttgctgtcaagtcacaagatgaagtaccgagtacaactacagttattggcataaaggccaatttagatggtgtgggtaatgcattgaactcatcaagtagttttactaaatcagcaaaaggcgctcctctcccttctttaggcaggtccaatgcagcagatacttctaatgatttgcctcttggagtctcatcagctaatcatgaagtagtacctgatgattctgaaaatacacaaattgatgaaagcaatcaagccgagccttgggtacgtgcactagcagaaggtgactactgtgaccttagtgttgaagaacgccttaacgcactggttgctcttgttggtgttgccactgaagggaactctattcgtgctgtacttgaggagcgtttggagttagcaaatgccttaaagaagcaaatgtgggcagaagcgcaacttgacaagaggcgtttcaaggaagaatttactagcagagtacaatataactctgacatgggtttgaagcctgatatatatcaagaaaacaacgtgacagagattacttcaactccagcgtgtgatgcttatagagagaatgatgaacatgtcgggacaatcaacaattgtgagatgcttgatcagcataatcagggtaatgctggtagtctaccttatgagagaaatggcgtatgccaggaaatcctcgcaaccccagatacttcgtatgttcagcagtatgcttatgctgataaaaggcgatctcagttgaaatcgtacattggtcaccgggcagagcagctttatgtttacagatccttgcccctaggtcaggatcggcggcgaaacaggtattggcagtttacaacttcagcatcaccaaatgaccctggctcaggaagaatcttttttgaatccaaagatggatattggagagttatcgactcagaggaggcctttgattctttattggctgccctcgatacacgtggcacccgggaggcacagctgcattcaatgttgcaagtgatcgagccaaccttcaaggaagctattaaaagaaatgtgagtatagaattatctgctggaaggtatccaaagaatggagctactgacatgataagggcaaattatcacagtgaggttggaagctcaagcagtactcctagtgctacatctgacagtataacagcatattctgattcttttaaagtagagcttgggcgtaatgattttgagaagacagctatctcaaaaagggcagatatatttttaaaatggatgtggagggaattctacaatcaggaattgacatgtgccatgaaatacggcaagaaaagatgctctgaattgttgcattcgtgtaattgctgctatcagatttacctagcagaagaaaggcactgttcttcttgccataagactttcaaatccatttacaatttttctgatcatacaacacaatgcgaagagaaacagagaacagaacctttctggaacatgcaaaacactgattattctgtcccaataggaatggtattactcaagcttcagttagtttcgattgaggcatatataccatcagaagcacttcaaccattttggactgatgtgtatcgaaaatcttggagtgtgaagctgtacactaccaaatctattgctgaaatattccagatgtatgtatagcttaagacctgcttggtttctctcgtggcgttgcttgccttgtcttgctgcgccggtgcaagct

SEQ ID NO: 21453 - DNA, 3101 bp, Zea Mays
agactgacgcgctagttgcccgcacgactcggcctcctcgcccccggctttaaatagtggcgtacccccatcccatagaagagactctttcatttccttctaccgcagcctcagaattcccccctcccccgtagcgaaaccctagccgccacgccaaaaccaaatcccgccgagcccgaaaaattccggcgggttccttgccgcgaatcgattgatttcgagcgattcgattccttgtgatctctcggcggggtagagcgcggtcgaccgtcggccatgtcgaggtgcttcccctacccgccaccggggtacgtgcggaacccagtggccgtggccgagccggagtcgaccgctaaggtttgttgaaccttcggatttacacacgcacgtgccagatcgtttgttcaatatgtaggttttgcgcggatctgtggtttgcgcgtgcgtgatgtgggtattgcccgtgcctaagctaaccgagctgaggaagtgtatggatcttgtgtagctgaacgaggtcctccaaatcgattgaaaaatttaagttgtatggccggtaggccaagattgggttagtccggttttcgaaaactggtagcatggttatcggggacattgaaagaatgatagaacatcaaattcgattcaaaactgtgctagatttgcatatttagtcgccctaaaattacgtggacgtgggtgatccgaattggttgttgtatgatggttggaatatgagccatctagtgcttccgtgactggccaattttttttgtttctcaaagttttctttgaaaaactgtttgtcgagcgtcaattcgtatttacctgaatttactaattcttaatacagtatgtcgttattttgggctaagcttgtgtaagaagggtcgtttgacattttgtactgtattaatgctgttttgtgtttctttgttcggagcagcattcaatgctccttttgttgtttgagagaatctgatatttgccatcgtaccgaaagtccgaaaccaactattcaaattgggatttcatttctttttttttctactgtttttagagttctctttttcgctgctgtgctcttgtgggtcagtacgtgcatttctctctttttttcttttttttttctgatgttactcttctgttgaccaaaggagttcagaattattttggccctgtatatcaatttgcaaccaacaccatttattgagcccatttttagttttcttgttctgtagagttatgcattgtttcaggtcttaactgttgtcagggaagtaacgtgttcaacatgattgtaaacgaatacaattctgttgctaactgtgtaatgatgagaaggataattgaatagtctttgtgaagtattactgtctgaactgtacgcaaatgctacattcattctgtgttcatgtaaatatcattatacataaaaatgctgcattgcattcccgtcgtccgttctaaatcagaactgacgattgctctggtggctgaagctcctgaaagaaaaggaaaaggccgaaaagaagaaagagaaaaggagtgacaggaaagatcccaagcagtgtgagacgtccaaacactcaaagcacagccataagaagagaaagcttgaagatgtcatcaaagctgagcagggtcccaaaagagtacccaaagaatcagttgagcagttggagaagagtggactctcagaagagcatggagctccttcttttgtacatacgatacgggactctcctgagagctcacaggacagcggcaagagacgaaaggttgtcctgtccagtcctagccaacctaagaatggaaacattcttcgcttcaagattaaaagtagtcaagatccccaatcagctgttctggagaaaccaagggttcttgagcaaccattggtccaacaaatgggatcaggttcatccctgtctggcaagcaaaattcaagccatcataagatgaatgtgagatctacctctggtcagcggagggtcaatggtgactcccaagcagtacaaaaatgtttgattacagaatccccggcaaagaccatgcatagacttgtcccccagcctgcagctaaggacacacatcctgttgatccccagtcagctgttaaggtgccagttggaagatcgggcctacctctgaagttttcgggaagtgtggacccttcgcctgctagagttatgagaagatttgatcctccacctgttaagatgatgtcacagagagttcaccatccagcttccatggtgtcgcagaaagttgatcctccgttaccgaaggtattacataaggaaaccggatctgttgttcgcctaccagaagctgcccggcctactgttcttcaaaaacccaaggacttgccttctatcaagcagcaggagatcaggacctcttcctcaaaagaagagccctgcttctctggtaggaatgcagaagctgttcaagtgcaggatactaagctctcccggtcagatatgaagaaaatccgcaaagctgagaaaaaagataagaagttcagagatctgtttgttacctggaatccggtattgatagagaatgaaggttcagatcttggtgatgaagactggctgttcagcagtaaaaggaactccgatgctatcatggttcaaagcagagctactgatagttcagtgccgatccatccaatggtgcagcagaagccttctttacaacccagggcaacatttttgccggaccttaatatgtaccagctgccatatgtcgtaccattttaaacatctggcgaggtagatgagaattagatgagatgttgggagagagctgtgtggatgtgggagataatgggttccctgccgcagttttccagctttgttccatagtgtttctttgaggccaatagagttctggcagaacttataatgtaatattgattaattatttcgctcatgtatgtaagcagttgaactgcaaaatcttgtttctaggatgttactgttttatgacacgcagtatttgttatattgaccttttgcctcgtttatttcagttgcattaatttcgagataatgcgaagaggtattttgttcttatgattcatgtaatatgct

SEQ ID NO: 21454 - DNA, 260 bp, Zea Mays
tcaggttataattttgttctgttgtggatggtgctaagtgctggtgggctcggccttctcatatgtataagtatatcctatctatagtttctttattgaggattgtcacttaagctagcatgcatttcaaacttacaaatattttatgacaattcaaagtgtaactcttttgaaacactttcttttgtaatcaactccgataattgtataatgtaaacttattataacttgtaaccattttgtaataaagaatttctgct

SEQ ID NO: 21455 - DNA, 1315 bp, Zea Mays
tataaagacgtctttggtaaagttctctctctctctctctctccgtatctcgcttcgccaccgccggcgagagctagggtttcgtgcgccaccgtcacttccgcccgccatggccgagacctccacgtatcagattctggtgcgtctcctcgacgggcgtaccagatgtctccgcttctccacgcccaccgtttccggcgccgtgctcctcgacgccgtcgcgtcgatctctcgcgttcccgccgccgctctccgcctcgtcaccggcggcatcgacgtatcgccctcttccgtcctcgcctcagcagctgatggccagttcccctatgcgtcagcgctcctccgccttcgaggaggcaagggtggattcggctccctcctcagaggggctgcctccaaagcgggtcagaagaagaccagcaactttgacgcctgccgcgacatcaacggccgccgcctccgccacgtcaacgctgagcgccgcctcgaggaatggaaggccgaagccgccgaccgccagctagaaaagctcgccgagaacttcatcaagaagaaggccaaggaagcgggccgcggtggcggaccctcaaccgctgaggtggacaaatatctagagaagtaccgcaaggatgctgagatctgcgtcaacgtggttgaggaatccgtgcgtgcatcacttggaaagaggaagaccgcacctaagctgccctctggcgcagacgctaagaagcttaagttttggttaggaaagaacaaagtagaagaagatgaaagtgatagtgacactgatgtggatgatgaggacattgaagatcttaagagcgcagatgcaaaatctgtagtagttgatgaaggcaattactcaaatggatgcagaaaaaatgaggagaagcttgatcttggttctgtttctgggtcatcacattcagaaggagagtcttcaggagaaaagtcccaactgacaacaagttcaggagctgaaggtggtgactttgaatctggtgatagtgcagagcttgaggtaggaatgttggatcatcccatttctgttgctgctgcttcagaagaagtgacagcagatgaggataacactgctttagctacttcaaaccaaaataatccagaggtaccacaagttgaagaagtgcggaaagcagacaaggataacactgcttcagctacttcaaaccaaaacaatcaagaggtgccacaagtagaacaacatgttggcatcagcaactcttattcagagccgttggaccttgcaaagtacagttcatctgcagaattggagcctctttgattttgctgttgc

SEQ ID NO: 21456 - DNA, 1211 bp, Zea Mays
tttctggctcatcagcttatcagtagggcactaaccattccaggcacatcggtccattggtacgcaaagccagcaaaggaagatgggtcatattacaattgtggggccttctaagataagtgtaaaatcacgcttggacaacttgctgcaaagaaactcgtctgatcccaaggaagttagccctcgtgttgctattataatggggtcccaatctgatcttcctgtgatgaaagatgctgagagggttttgaaagagttcgacataccttgtgagctaactattgtttctgcacatcgtacaccagagcggatgtatgattatgcgaagtctgctaaagacaggggtttcgaggtcataattgcaggtgcaggcggagcagctcatttaccagggatggtggcttcattgactcctcttcctgtaatcggagttcccattaagacttcaacactatcaggatttgattccctcctatctattgtgcaaatgccaaaaggtattcctgttgcgactgttgctatcgggattgcagaaaatgcaggtttgctggcagctaggattctggctgcaagagatcctgagctccaggacagggtaactaagtaccaggatgatctgagggacatggttttggagacagcagaaaggctggaggaccaaggcccggaggaatttctgaagggaatggattgaccccttttgaagccctggctctggggcctgggaggaatacgaatatatgggtcggcgataactcagtccactcgattatggtttaagatcgggagtcatcaaaaagatactttaaggactagttccggagctacaaaacctgaggggattgggggctagaatctccgtgactcttagagctgttttgatgaccaagaatcacgaagggatccataggcttggctgccttattcagtgattttagcctctctaatcccatgcggttttgtggttttcaaactagcactaataggcttggctgcactcgattttccttacaattcttttttgataattgtgctatcttaacccatcgcaacatgtccttttccccttctaatatagggtatgaattgggtttagaggggaaaaaagaacgggagtaaacgttgtacgtacgaaaagtaaaacggttgcctggatttttcagccgcacaaggtgctttgagtcaagtagttttacatattccctccgtaa

SEQ ID NO: 21457 - DNA, 636 bp, Zea Mays
ccttagcctactgccagaaggtcttgaaactattcagcggcgccggggtcaacaaaccgagaaaccgatcctacttacgggaccaggaaaggttggacaagctctgggcctatccactgactggtcgaaccatcctctctacgcgcctggtgggttggaggtactggacgggccagagccggagagcattttggttggtccccgcgttggcatcgagtacgcgtctcccgagcatgtcgcggcgccgtggaggttcgcgattgccggcacgccgtggatcagcgcccccaaaaacacgctacggccacgctactgaccggtgtctgaacaggaaccgttcgagtcccgttccaacccgaattgccatgtgtttgtatttgcttgacacttcggaatgctgcctataactggctcttgtaaatgtatcacagtgtgttcgacaaaaaggcctacgaactctacgagggcgggtgcccgggccgaacattctcaaatgttaaaagcgtggagtgtgtttgaagggctgagaaagatgactagagagaagtaaataagagtcaattaactatttttttcctgaaatagccgttgtcctagaaaactcaaatcaaaacatcgaactgtgtcactccgttt

SEQ ID NO: 21458 - DNA, 210 bp, Zea Mays
aagcatagtccagcaaatgttacattaatattctagcaatgtttttacaatagctattcttcttctttcaaaactttatctgcagcttcggtcaacagttgggtaacgacttcgtctataatagttttggccatgttaataatctctgttgattcctttgcctctgggtcggccagtgactcgaagggctctggggaggagatagttcag

SEQ ID NO: 21459 - DNA, 1831 bp, Zea Mays
cgcaggcagtcgctctcgcgcggcggctctccccgcctcgttcgcccctaccgcgccatcaacgtgcctccccgccgcccctgtcctccccatgcccgccgctcccacccgagatggttagcgcccctcctccttccggtcccttcccctgcctcggccggccagccatggattcaccaagcgggctctggtggcggccggcgccgtcgtcgtgtcctccattcccgtcaaccccctcgatgtcgccaagatatgtttaccagacgaattgatatctaggctatttatgtggttactaattttgactcctctaagacatatttacacagggttggtcgttatgggagatatgggcaccttggtttggcagtgaacttgaccacttacaaagattgtttcaacttatatagtattgataaaaaaaacttggaacggaaattaagacaatacccccacaaattgacctgtttgtatactgccaatgatgatagcgacagcttcatgagcgtcaggcacattttatttattttgacctgtttgtatactaacttaacacaagcttttttgtcaataacgtgggattcggaattttctgagctttgtgtagtggaggaggaggagaggcccatgtcggtggagctggaacccatcgccagcgagcagcagcttaactaggtccttggagaggcgtagcagctccagctcctcatcgtcctgctctgtacaaaagatgatattgattttgtggctggtttcatttgttggaatgctcttcaactttcttacgctcatttacattggtgagttctctgtccatgttaattttaagtgagtatgtaactatatgctctcatacgctttagggatccgctacgagcagcctacacatttatcatctgttcccatgcttatttttccttttttttattagtgatgggaatcgtatatccataaatagatctggagactggagcagtttttgttgggataaactttgtactggaccggagcatcttatctctggatgtgagtgccatgaaagtgatacccaacaaacaactaactctggaacacctttggtatgtcgggtaggcgcaaagccagcaagacaacaactgcttgagcagctttggccagttttgcttgccaccatgaatagccatatgttggccatcacatggtaccttgttcgtcccaaactagaccagagcattacaagcaatgactgccatatctaaaattgaaaacatgtgcggcttataagtatcctaaatttgctccacttctaagtatccaagatctactggttttgatgcgttccattgcttgcagcttttctctgcggtaaattgctggcttaaatgcatgctgcttgaaccctataatcagatagaccatcccgaatgcaagtcaaggcctgatagtggtctttctgcaattacagagctggaccctggttatataacaggatcagtaagagttaatggcccagtgacggattcaaggtatcctgctcaccaacagatcccacaagcatacggttaccgccaaatgcctgcaaggttggacagtaccaacccatcacaggccatgggaggttacacgctgcagtcacagaaggaaacattatttgaagagttgccattttgaagagttactcgaatccaatattttgctcttttgaattccttggtgtacactggcaaatattagcatatttgaagagttgccatttcgatcatcatcttcatttgtactttttgggtcagatctaataaagcatcagcattaaatttacaatgatcacctaaatccatggtttttattgcct

SEQ ID NO: 21460 - DNA, 1637 bp, Zea Mays
cgaacagtggcactaaatcaccaccaccctgtactttgtgctaggatagcagtgctatgtcaaaagctccagatgatcatttacaagcaactgagcaggaaggaagtgtccatccaagtcaacaagcagggcaacaacatgtgaatgcagcataccagttctcgaaaacagaactaactgaaggttcaaaaaatgaacagcctgtccaagtagagcaactgagttcccacctacaacaagcatatccagaaattcaactacagcaggctgaaacagatagcttccagttagctgaaaaagaaacagggtattttggtcaacagagttttgcaggcgccaaggtggatgtagcccagccttcagtagttcagcagaatgtaaagcaaactgttggtcaacaagcatcatctggtacccaggatacaaggaaaggaccatcgataccatttaatatgttaattccaatcctacaggcacatcttgacagagacaaagatatgcagcttcaaactgtttgggcaaaacttaggcgtaatgaagtcaacaaagatgatttcttaagagttaccgtgaatattgttggggatcaaatgctcaagcaggcagctcataaagtttttgtacagatgcaagcacagatgcaaagaaatagccaggcaaattcaagtcagcagtctttattctctcaactttctgcacagcagatggcttccagtggttcagcacagttacatgatcagaaaattcggccacctggaccacccaaccaaggccagaaaaaccaggtgtcatcttcacctcaggcttttgcaccaccatcaggtacccaaccgcagaatagtgtacactatcttgctcatgataaccctaaccaaaaccctgatgcaaagggaacaaatgttgtaccaaatcaaccatctagaatgaacacatcagttccattgcaaacaaaggacaaacagcatcaaccaacacagttgcagcaggcctcacaacaaatatatggagcaaataatcctggtgcccaggcttaccctcggtcaatcactggttctcttagatcaccgagtcctgttccagaaacacagccatccatgcatgctcctggaatggctcctgcaaaaatggttcctcctcctactcatccaatgatgcagcacaatgcaactgcatggaaaatgcatcaaaacagggaattgaaaactaacgctccccctccaaatgctaatatgaagcaaaattctgaatctgttggcaaagtgcgcatggctggcacaggaaattcttcagctaaaggaaagcagggaactcctaactctacaccgaatgctagtggaggtacaaagagtagcaagaaatcgggcgggcagaagaaatcattggaagcagcaggctctatgcaaccttcaagcaaaaagcagaagaaatctggagccccccaggaacaaagtatcgatgaactaaatgatgtcacagccgctagtggtgttaatattagggaagaggaagaacagttactgtctgcccctaaggaagagagctttgcttcacaagaagcacgaagaattgcacaggaagaagaaaatattttcctacgtaagggtccacttctgaggaaactagcagaaatcggttag

SEQ ID NO: 21461 - DNA, 1868 bp, Zea Mays
ggcaaaggagttcaggattattttggccgtgtatagcaatagcaactgacaccttttgtgttcattgaaagtttttgttctagagtgtgcagtgttgcaggtcttaactgttgtcaagaaagtaatgtgttcaacatgattgtaaactgaatgcaattctttggctaactgtgtaattataagtcaatgataattgaacaatctttgtgaagcatcactgtctgaactgtgcaaatgctacaaccatttcttgtgtccttgtaaatatcaaaattcatatattgcaaaaatactgcattgcatcccgtcgtctgttctaaatcagaattgacgattgctctggtggctgaagcttcagaaagaaagggaaagggctcacaagaagaaagataaaaggagtgacaagaaagctccccaactgggtgagacgtccaaacattcaaagcacaaccataagaagagaaagctcgaagatgtcagcacaggtgatcaggagcccaaaaaagtattcaaagaatcagctgagctattggagaagagtggactctcagaagagcatggagctccttgttttgtacagatgtttcgtgactctcctgagagctcgcaggacagcagcaagagaagaaaggctgtcctgcccagtcccagccaagctaagaatggtaacatcattcgcatcaagctaaaaagtaaccaagatccccaatcagttcttttggagaaaccaagggttctggagcaaccactggtccaacaaatgagttcggtttcatccctgtcgagcaaacaaaattcaatcaatcgtaaggtgaatgtgagatctacagctggccagcagtgggtcaatggtgactcccaagcagtacaaaaatctttggttacagaaaccctgtcaagggcaatgcagagaactgtcccccagcctgcagtgaaggtcacacgtcgggctgatccccagctatctgttaaggcgccggttggaagatctgacctacctccaaagttttcgggaagtgtgggcccttcacctgctagagtgaccggaagattttgtcctgcacctgttaagacgcaacagagaattgagcatccaccttccatggtgtcacagagagttgatcctcaggcgaaggtgtcacagaaggaaatgggatctgctgtttgcctgccacaagctccacatcctcctgttttgcagaaacccaaggacttgcctgttcctaaacagcgggagcctatcaactctttgccaaaagaagagccttgtttctctggaaggactgtggaagcagatcaagggaaggaagctaagctctcccgttcagatcggaagaaaatccacaaaactgagaagaaaaataagaagttcagagatctgtttgttacctggaatccgctattgatggagaatgaaggttcagatttgggtggtcaagactggctgttcagcagtacaagaagctctgatggtagcatggctcaacccacagtacctgatggtttagggccgattcatccgatggtgcagcagcagccttatttgcaacccagggcaacttttttgccggaccttcatatctatcagctgccttatgttgtaccgttttaagtctgttcgtagatgagaagtagatgagatgttgtgaaggagctgtgtggatgtgggatataatggttccctgccgcaattttccagctttgttagcaagattgtaatgtaatgttggttaattattttgctcatttatgtaagcagttgaactgcaaaatcttctttctaggcagttactgtaatacgacacgcaatatttgtttttatccataataatagccttgccacaatataaatggattaattgcagcaa

SEQ ID NO: 21462 - DNA, 3562 bp, Zea Mays
ggtggcaaacctttcttcaagtgtattagaaatgaatgaaaaacatagtaccggctgacagcggctgcggcgaagctatctgagcggtagcggagtactaaggggtggagagagggagcactgtctcatgcatgaaataaagtctccaaaacaaaagatttggtccagagcgcggccacacgggcccaacaatagcaacgtcacatggtggttgccattgtcacgtcgagctctccctctccaccaactaacagttcctgacggtggagcagaaattcattaagagcatatagggattcacaagtgattttgagcccaacaatcttgctgccatcgatactcctggttcgtatatttggttactcaaaacatgagatgatcctctgaagtagaaagggaaacaccgaatatgctcttgctgaaatattctatagaaagacacaattccattttggcagatgcaagtgtatggttattctactcatggaagatctacagggaagaaattgaggtagcatataactgccgcaagggaaaatatggtgtagcagatgaggatataatcttatatggtcaatgtgtttgaattggtccaaccattgatatttcttcgcggttgctagacttgagagtcgcagttttgcatagtcctatattctatctgcactaagagtaatatatacagccaagcggacgtttggtttaacatttacaaggtatgtttggtccttttgttttttggaattaatggttgtccgatgcttgtcattcatatgagttctaatatcatgcccccttaaagtactcatcatcaaaagtttccatgtgaatgttttaaatgtagatttaaagggttgaaagacatcaaacagttattcaaacatgatcttaagtgtcgtgaaagactacaagtgaggttcaacttggcaaattgtttttctagtaactaaggagcaacaatgctatgtattttagcttgacttatatatctaagtacttacatttttggaatcgggcaaacagtgatagtttgaatcacatgttttgccaaaaggaattattagaactgttcaaaagttaggaaaaaatacatatttatgctttcttatgcacgggtaaattgctctgttcatatataaaaaaaataattgtagtattattgcttatattgattttaaatgatgaccttattagatgtgccatcgagaccacatatattagcattttgtaactaaatacaatgcatgaatatatatagatagcctttacatcgtgctacatgcttcctagaaataaggaaccattacaacatatatatttttgatgatgtacaacttcgtcatcggatataccgttccttcttttttacatacattttgataagaatgtcaaaatgttaaaaaaatagcgcgcgcatggcgcgcgttagacactagtagatttcagaactatcatgaagcgcgtgctcgctggttgttagttgttacagagcaacagcccagggaggccaagatgctacttagctactaaaaccaactgacaacaagtgcacagcccagtgggccgctaagctgcaagaaaaccctcgcccctcgttctggattgagattctctgcagaggctgcgatgttgggccgtcctgccctgcccggtgggtatatgtaagctcagaccgccaccggaaccttctcgagcccgcggccgcacacctccgcccgaagccgccagtcggactacgaacggcggcggcgcctcggctcccctgatctccctcaccggaatggacggccaggctccgccgcttctcgacgccgtcgtgctcgagccccttgcagttggcgacgagctccatccgcggcgtcctgtcgaggtggaggacgctccggccgccgctccgccctccggtatggacggccaggttccacctctctacaacgtcacgcgggatcctctgaccgtatccgacgagctgcagcccacgggcgaggtggtggatgacgccctactcgtcgcgcccgatatcgtcaagggcgaggtgatggaggacgacatcctacccgtcgcaaccgacatcatcaacgacgccgcctcggagtgccccgaggctggcagtgatggcgtcgtgctcaccgacgagctccgcaatcgcatcgtcaagcaggtggagtactatttcagcgatgagaaccttcctacggacgagttcctgctgaattatgtgaagaagaacaataagggctttgttcctattgagatcatcgcatcatttaggagaatgaagaaactcgttcaagacctctcagtaattgaagctgcactcaggacatcatcaaagctggttgtaagttcaaatgggaaacgggtcaggaggttacatccattgccacacaaagaattgaaagattcaaagaaaagcactgttttggtcgaaaatctacctccagatttctcaatggagagtattcaggaaaaattcgcaacagtgggcaaagttgtgaacataacaattaatgatccagaatcagtgaaagaattttcaactgctaagaagcctgacttcaatttaagttttaaggctcatgtacttgttgaatatgaagcagtggaggctgctgagaaggctgttactgccctaagtgatgagagcaactggagaactgggatgaaagtcaggcttctgtctaaacaaagtgtaatgggaccaggaaagtataaaaaaccttctaaagaaaatcaagatgcagtttccaaaatgattgatcagaatcaacattcaaaagaagaccagcttaaaaccttggaaaagatctccggtgctgatgcagtggggattaccaaggacagagataatttgaaacctgtttttatcactgagactgagcaccaagatcagaagccaaatgctagaggacgaaaaggatggtacaaaggtcaaggtcagatgcagcaaaatgcaaacaaacaaggcagttgtggttccgagtcattaaacaagcctatttctggaccgaggatgccagatggaacaaggggcttcacactgggacgtggtagatctcttccactacagaagtctgagaaggctgaagagtagagctaccaaaaaaggcctgttaagaaccttatccaaagaagctgggtaaaatctaacagaaaacctttgcttttttttttttgaaacttaagatcatcgaagccgttctttgcatggaatgggacacagaagaaagggaatcttggaatggctttctctctgcaagaaatggaacacaaaagggaatctgggaatgacttgtacagaaacacaattgtctgggggtagttccgagttcactcgtatggaacacagtagaacctttgcatgtttcctgacttgcattgtgtcatatactcgtatcatgctgcatgcagcattgcagccctgtttgcaatttcagcagccgggggctggggccgtgagcccgtgaccctgcaccatccgggtctaccacgagcccccctgttctgcgaggcgtttggcccctcatccctatggatctgtactctgtaggctctccttata

SEQ ID NO: 21463 - DNA, 725 bp, Zea Mays
  misc_feature (725)..(725): n is a, c, g, or t
caagaaacgtacccatcattaccggctcaccgtccggcgtagtgaccacttgcgtataatatatgtgtcccgtcttcttagtatttttgcccacagtatttcccttggcttgagatgaatttccagatccttgctaattatttgactggttctgctttggataagggcaatccttgataaaatgcccagacttccacaattgaaacatccagttgatgagctgggcaaagcagagaatcgagtgcctggggcacccggctgacttgatgcagtaggggcattattgggacgaataaagattggccgcttaaaagggaaggagggtggacgagagaaagaacaattctggttggaggccggatgacaacccgttgcttcttcaccgggccctgactagccctgtcacctccaaaacccttggattttccagcacctcaatactttgcttctactgctagtgctgtactgacagctcttccataagtaagatctatgcaggttgccatctttctttgcagtcggtcatttaaccctctcataaagcaattcttcttcttcttcaaatcaatgttcacttgatcgattgcatattgtgacaaatgattgaatttattgagattctgattaacagtatcccctccttgttcagcttcataaattcttcttgcttcatgtgaagaacaccttctggtatgtaatgttcgcggaaggccaacttgaattcn

SEQ ID NO: 21464 - DNA, 536 bp, Zea Mays
tgaccaacttattaaaagcaatgctcatctttaacccttattgttgatcagctttacacatcacatgaactcccacctttggtgagttcatgcacattattccccacaacttgttgagcgatgaacatgtgtgagctcacccttgctgtctcacacccccacaggttaaggacaagtaccacatggtgaggcgcatggatgatgttgtgatgtgttcgtgagagatctaggtcgacgtctcccagttgactttttggcgccaaggatggattttagttcgatccatatttatattttattttgtaagacttccgctatgtaataaatactctgatgttattgtgacatttatctctatacactctgttattatatatgttgtcttctttggtgcatgtatgagatgcacctggctttgttccttaaatccgggtgttacaccaatggcttagggccatgcatgagcaacaaagtccaagtggacccttccctctaccgggtgtaatattgggtgtacaaggccgaggcaattactg

SEQ ID NO: 21465 - DNA, 4331 bp, Zea Mays
ctcagatcggaggggagaaactaggctagttggtctggtgcccctggcactcgctgcacctgcagtttccttctccgggatctcaattctcatctgggagagggcgggcgagatccattccagtcgcccccattcactccccttcctcgtccgtcctcttcctccctccgatccaccgctccccctacccgccgggccgccgctacctcgagcgagcggagatctctctcctcgaacggggggggaggaagatgctcaccaagttcgagaccaagagcaaccgggtcaagggcctcgccttccacccgcgccgcccatggatcctgtccagcctccatagcggagtcgttcagatgtgggactaccgcatgggcaccctcctcaaccgcttcgacgagcacgacgggcccgtcaggggcgtccactttcacgccacgcagccgctcttcgtgtccggaggtgacgattacaagattaaggtctggaattacaagactcaacgctgcctattcacacttcatgggcacctcgactacattcgcactgtgcaattccaccatgagtgcccatggatcgtaagtgctagcgacgatcagacaatccggatctggaattggcagtcacgcacatgtgtggccgtgctaactgggcataaccactatgtcatgtgtgcctccttccatcccaaagaggatctggttgtatcggcatcacttgatcagaccgtgcgtgtctgggatattggggctctgagaaagaagtcagcatcacctgccgatgacatcctccgcctcactcagatgaacacagatctatttggaggtattgatgctgtagtcaaatatgtcttggaaggccatgaccgcggggtcaactgggcctcatttcatcccactttgcctctcattgtttccggggcagatgaccggcaggtgaagatatggagaatgaacgataccaaggcttgggaagttgatacgttgaggggccacatgaataatgtgtcttgtgtgatgtttcatgcgaagcaagacatcatcgtgtctaactcagaagacaaaagcattcgtgtttgggatgccacaaagagaactggcattcaaacatttaggcgggaacatgaccgtttctggattcttgctgctcaccctgaaatgaaccttcttgctgctggtcatgacagtggcatgattgttttcaaattagagagggaacgcccggccttctgtgtcagtggtgacacagttttttatgtgaaggaccggtttctaaagttctttgaatactccacacagaaggaagttcagttggctccaataagaagacctgggtcagtcagcttgaaccagtcacccaggacactatcgtatagtccaactgaaaatgctgtcttgatttgctttgatgctgatgggggttcatatgaactctacattgctcccaaggattctgctggcaaggctgattacttgcaagaggcaaagaagggagctggtggttctgctgtatttgtggcacgcaacaggtttgcagtccttgagaggagtagcaatcaagttttggtgaagaatctgaagaatgaaatcatgaagaaaagcccccttcctattgcgacagatgcaatatattatgctgggacaggtaacttgctgtgcaaggctgaagaccgggtggccatctttgatcttcagcaaaggctagttcttggtgagctacagacacctgctgtcaaatatattgtttggtccagtgatatggaatctgttgcattcctgagcaagcatgttgtggttatagccagcaagaagcttgtccatcaatgcacactgcatgaaaccacccgtgtgaaaagtggtgcttgggatgagaatggcgtgttcatctacaccacactgaaccatatgaagtactgccttcccaatggcgacagtgggatcataaaaacccttgatgttcctatttacataacaagggttatcgggaataacattttctgcctagaccgtgatggaaagaacaagctgattgcagttgatgcaacagagtacattttcaagctcgctcttctcagaaaacgctatgatcatgttatgagtatgatcaagaactcccagttgtgtgggcaggctgtgatttcttatttacaacagaaaggttttccagaagttgctcttcactttgtgaaggatgagaagaccagatttaacttggcccttgagagtggtaacattcaaattgcagttgcttctgcaaaggagattgatgacaaggatcactggtacaggttgggaattgaggccctgaggcaaggaaatgttggtatcgtggaatatgcataccaacgaacaaaaagttttgagaggcttgcttttctgtatctcattactggttacttggacaaggtgggcttcatgtacaaaattgctggacagaataataatttgatgggacaatttcacaatgcattgtatcttgggcatgttaataagagagttgagatcttggaaaatgctgggcagctgcctcttgcttatgttcttgctgtcacacatgggctcactgaaattgctgagaggattgctgctgaattaggcgagcatgttcctttgctgcctgaaggaaaatcacactcgttactgatcccccctgcacctctcacagcctgtggtgattggccattgctgagggtagtgcgtggtatttttgaaggtggactggattctactggaagggcagagcttgaggaagatgatgaagcttctggtgctgactggggtgatgaggacttggatattgttgatgcaagtgaggtggtggcaaatggtggcgattattttgatgcagagggtgaaccaaacgaggaggagggtgaggaaggtggctgggacctggaagatctggaacttccacctgatacagagactccaaaatctgctggcaatgctcgctctcctgtatttgtcactccaacagcaggcatccctgtcagccaaatttggactcaaaaatcttctctggctggggagcatgcggctgcagggaactttgatacagcaatgaggttgcttagccgacaattgggcatcaagaactttgctccgctgaagcccttgtttcttgatctgcatatgggcagtcattcatatctgcgtgcccttgctgctgctccagttatatcagttgctgtagagaaaggttggaatgagtccgcaagtcctaatgtaagaggccctcctgcacttattttcagcttctcacaaatggaagacagactcaaggctgcctacaaagccacaactgagggcaggttcccagaagcactgaggcagttccttagcatcttacatacgattcctgtaatcgttgtagactcacggagagaagttgatgaagtgaaggaattaattgagatagtgagggagtatattcttggtctgaagatggaactcaagagaaaggaattgagggatgatgtgacccgccaacaggagttggccgcttacttcacaaattgcaagcttcagagaattcatatgaggcttgtgctttctagcgccatggctctttgcttcaagcagaaaaactatgctactgcagcacactttgcaaggatgcttcttgagaacagccctcaagaggctcaagcaaggaaggctcgacaggtgctgcaagcttgtcaggataaggatgattctcaccaactgaactatgactttagaaatccatttattgtttgcggtgctacatatgttccaatctaccgtggccaaaaggatatttcttgcccatactgtggatcccggtttgctccttccatcgaagggcagctttgtaccatatgtgagcttgccatagttggggcagacgcctcaggcctggtctgctcccctacgcagatgaagtagacgcagcaccatctcgcaatgatgcctggatgtcttgatttggaggggatgaaacaattcaccgaacaccaaacttatcaacgccctccatgtcattccaaattttcgtctggaggggattcatcttggtcttgtctcaattatcgcagctgcgttttcagctctattttgtaaacatattgatgtacgatagctgatgtgagtgctggttcactgaaacgattttctgttatggcatatgccattttaatctctacagtttcagtatattgcacagtagattgtactcaaacatttaaaatttgattgtaccaaggattgagaccagtgttttaacactgaaaaattatgattgatacacaaccttttgtcactgaattgatgggtagtaattgcaatatcaatatattttttgtccactttata

SEQ ID NO: 21466 - DNA, 709 bp, Zea Mays
aaatcacgtcttgatacgtacaagcaaaattctgaagctattcttcctacatactctgatttgcttaataagattgatggaaactgcccagccgaagttgtttttcaggcgatagatttcctgttacagaagatctgtgagaacacttcagcgagcaagttgaccaaaacaaatggaaaacgaccagattctgcggatacaggttcaaaaaatgagtggcgtggaattccaacgaggttgaataacattccacattctagggaaattagggaatacttctacaacgacgtgttaaaagctacaaaacttgctattgaagataaaaagactcggttgcagatagatatcaatattcctgaacttaaccctgaaatggatgtttaccgcataggaaccctcatggaacttgtaagagaactttctctatcctttgcagatgatgggaaacgtgtcaaggtctgtgttcaaggctccatggggcaaggtgcatttgctggcatcccacttcaactggcaggaaccagaaaaattttggaattcatggactggggtgactatggggcgaagggcaccttcattaatattggagcagtaggtgtgtatgtgttgcccacttattctatacttcagacaatatcaattatcaaatgaaacgaagcatcgtagctttaggttgaatcatcatgcttgtgtacctaggtcgcctcca

SEQ ID NO: 21467 - DNA, 641 bp, Zea Mays
ctgatgattggttccgagatcaacccaacagaaatatcacacgtcaagaaaaccataacgagcgagtggtatgcgtgagaaatttaccgccagaggaaatactcctgcaagccaccaggctaaggaactctctgggcaggaaagtggtgaagctgcggaccagacatgtaacgaaacgccccagtgttcaggggacgtggacgacggaactgaagatgtgaagcaacaagccaaggtgtttcattgttctttggtggtctgattgcagaaaatgtcagctgtgtcgataactttggtagagctgccgttaggcttgcctgtttgaatagctaaaccgtttactccatttgttccggagtacaatctggtaataacataggagtacacttgactttcttagaccaggccgtcacatttgatatttcagtctggtgatatctgtctcctatattagaccagtacaatgtttcaactcgcgagatactgcgaacacagaattttgctatgctatggccattaccaaggttttttttatcactggtataagtgaaaaaaaatggaagacggaaactgtcatcagatgcagccatacaatatgctgacagccagccagtcaatcttgtgtacgaaccattacggtg

SEQ ID NO: 21468 - DNA, 2927 bp, Zea Mays
gatcgcgctgaagaggcgagtgctgttgcctgattggtcaccgctgtcgtcggacatggttctgatagcccattgcaccttcctacataaataaatgaaacacacataacaggagaaaattagaggacttagttaagaatggacgacaaccactgctcaaatcatacaattaacagtgtactgactgaaattgcgcatttactgggattctagttctaaatttttctagtgaaggcgtgcaactacagatgtaacaaacaaataagctactgtgaaaacaatatgcatatgtgcacgcatcgagcaatgcacagacttcggaacttactcgatttggttcctgatcagaaaacaccatgcttatatgcattctctagactataagaaataccgctggactttgaaactcagttgggcggtatggtgtatatgaaccacatagcttttcaccagcggatgatgaatgaatgagaccgattgctaggactcccctcccatgaaacatgcatcaaacacactgatggatcagtacattacatccacatgatgctgctaacagtttcagttacgcaaacaaacctcgagtgcctgcgcaaggaaggagattttgccctcagcaaacagagggtccccggcttctcccagcggcaggagacggcagcttccctcccaacacggcgcgcagcagcaagcctcgatccagagcactccgaccagcacggcgagttggcagttccatcgcataaggggagagttgacatatgccgccgccggatattgaccaagcatctgccgatttgcgctgcaaaattagaacaaaaaaaaatcaatagatccttccgcggccgacgtaatataggacaatagatcccgtggtctgagccggccagggcaaggcaagtggactcgacaggcaggagaagcgtgagaaggaagcgggggtgctgacctgtagagtagagatgctcctcgtcaactggtgtcaaggccacggagccggcggtcggccgcggcccgtgtcggagagggatgaggtggttggatggagcggctcgcggacgggagtggccgacgacgagacgagtctgtgagggctgggcggcgaatggaccagctggccgagcccgagtcagcaattgttgggctgggcctgggcctgttgggcccaaatggacagcattttatcctctagcccactcccagggggtgaggaggaagagggctttacactgaaccccagcgacccaggcgtcagcggcgtgatgcagttcctccgaggcagcggcggcgggggcgggggcggtgggttcccgggggtggcgtgggaggtgttgcggcggcacttctctaagaagcggtccgtggacgtgaggcggatcaaccccaaggtgcccaaggaggaggccgtcgccatttccggccgactcctccagatcctctccgaccatgggcccctcaccgtcggcaacacctggaaccacgccaaggatgctggcatcgctggtctgaacagcaagacgcacatgaagatcctgctgaaatggatgacggggagaaatgtcgtgaagctgacctgcgtgcacgtgggcaacgcgaagaagttcctctactccccgtccactgaaagcagcagcagcgccggcgcatcaccgtcatccacatcggcctcgcagtgacgatttggattttctgttccacatgttttttctcgcacgatactgcaagcttctggaggagaactcatttagaggaagaactgccgactttttttacatgctcttgtttggtgctactgtcctaactagcattgttctgattggagggatgataccttacatttccgagacatttgccagaattctgttcctgagcaattcattgacgtttatgatggtttatgtctggagcaagcacaatcctttcatccatatgagctttctgggcctgttcacctttacggctgcatacttaccatgggtcctattgggcttctctatcctggtgggaagcagcacatgggttgatctcttgggtatgattgctggacatgtgtactactttctggaagatgtatacccacggatgactggccgccgtccgctgaagacaccgtccttcatcaaggcgctatttgctgatgacaatgttgtggtggcacagccacccaatgctgggattggtgctggtgcaaggtttggtgctatgggtctagatccccaggctcaatgatatgaattactttcagtgacctgaggctgtgactgatctgagatgcggcagtctgttcctctgcgcaagttgcggaactgtacaagtcattgttcttgtatttatacaggctagatgagaattcttgtgcataacaaaagattagtagtatccgaggcggccaaaagtttctcacctgttagcagggcccgaaggaaatggtttctgatgtgccaacaggccaaaacccctgtcgccgaaacttgttcttgcaacggtttaacatctgacctactactctttcatgcatcagtgagtttagtctaggaaactgttccaaccgaagttgaagtttgttgctttggcagcgagaatttgtatggagcgttatgatcgcagaattgtgcaaggaatggctcctaacattgtggatgcttggatggtggttcttttccctcctgatcatgttgtgctcatcgatgtggtctcctgcaaggcaagctgctatagaatactactggcggtttcattataaaacgtttcagttcaatgaaacagtatcggatgtataaataaaatgtttcagtttgatgaaacattatagtatatactcggtaagtcgttttagttttttttaagtacgtagatcttactatgcattagacatacactaactataaatctagaaaagcaagctaaatctgtcatccttcgacttt

SEQ ID NO: 21469 - DNA, 4111 bp, Zea Mays
tcgcgctcgagctcgagccgcatctcccaaaccctacccatataaaatattaagcccaacgcccgagtctctctctctctcaacttcccttcccaccaccctcaccctccccttcccgccgccaccaccagttcaaccctctctccctcaaaccctagccgccgccgcgctcgttccggattcggttccgatccgatggcgtccgccgaggaccaggccgcggccgccgcgctgctggggggtgacccggcggcgttcgacgcgctgctctcgacgctcatgtcgtcctccaacgccgaccgttccgccgccgaggccgccttccaccgcctccgggcctcgcacccggagcccctcgcgctgcggctcgccacctcgctggcggcgcccaccacccccgccgacctgcgcgccatggcgggggtcctcctccgcaaggtcctctccccggccccgtcttccgacgcgtcctccaacaacgccacgcccccggcgccgctctggccgcagctctcccccgcggggcaggccgcgctcaaggcgcacctcctctccgcgctccagtccgatcctcccaagcccatcgccaagaaggtctgcgacgctatctctgagctcgcggcctcgctgctgcctgagaacgcctggcccgagctgctgccgttcctcttccgcgccgcgtcggggcctgatgcgcacaaccttcaggagtcagcgctgctcatcttcgcgaggctggcggattacatcgcagaatctctcctcgaccatctcatgactatccacaacctcctcgcctcagccctggcgcatcccacgtctcctgatgttcggattgcggccctgggtgccgcagtcaaccttgttcagtgcctgccaaccaactccgacagggataagatgcaggatttgctcccagcaatgatgagggcgctcactgattgcctaaactctggccaggaagtctctgcgcaggaggcactggagctgctggtggagctcgctggcgccgagccaaggttcctgaggaggcagattgctgatgtggtaggggcaatgttgcaagttgctgaggctacacagctggaagatgggaccagacacttggcggtggagtttgtgattactctagctgaggctagagagcgtgcaccaggaatgatgcggcgactcccgcagtttgttggtaggctgtttgcagtgctgatgcagatgctgcttgatgtcgaggatgaccctgcttggcactctgctgaaactgaagatgaggacgcaggggaagggaacaactatggagtggcgcaggagtgccttgaccgcctttccatcgccattggtgggaacgcaattgtaccaattgcttctgagctgctaccacagtacctgtcttctgctgagtggcagaagcaccatgctgcgctcattacacttgcacagattgcggaaggatgtgcaaaggttatgcttaaaaatttggaacaagtcgtttcgatgatattgaatggatttcaacatccccacccacgtgtgagatgggctgctatcaatgccatcggtcagctttctacggatttgggcccagatcttcaagttcattaccaccagcaggtgctgcctgcattggccaatgctatggatgatttccagaatccacgagttcaggcacatgctgcttcagcgattttgaattttagtgagaattgtacaccggaaattttgacgccttacctggatggaattgtgaacaaattacttgttcttcttcagaatggaaagcaaatggtgcaggagggagcattgacagctttagcgtcagtagcagattcatcacaggatcacttcaagaaatactatgatgctgtcatgccatacctaaaatctatcttgatgcatgcaactgataagtccaataggatgctccgtgccaagtccatggagtgtataagtttggtaggaatggctgtgggtaaggacaagttcagagacgacgcaaggttatggaagtacttatggctttgcaaggagctccaatggaaactgatgatccaattaccagctacatgttgcaggcttgggctaggctatgcaaatgtcttggacaggatttccttccttacatgagtgttgttatgcctccactgcttcagtctgctcaactcaagcctgatgttacagttacttcagctgaatcagatgacgatattgcatcagatgacgatagcattgaaacaattacacttggtgacaaaagaataggaattcgaactagtgtgctggaagagaaagcaacagcttgcaacatgctgtgctgttatgctgatgagcttaaggagggtttcttcccatggattgatcaggttgccccaacgttggttcctctgctgaagttttacttccatgaggaagtcaggagagctgctgttgcggccatgccggaacttctacgctcagcaaaattggctgttgagaaagggcaggctcaaggacgtgatgagtcttatgtcaaacagttgtctgactacataattgcagcacttgttgaagcactgcacaaggagccagaaacagaaatgtgctcatccatgctggattctttaaacgagtgtatgcagctttcgggtcttttgcttgatgaagcccaagtacgagctatcatagatgagattaaaaacgtcattatagccagtgccacccggaaaagagaacgctcggagagaacaaaagcggaagattttgatgctgatgaaggagagctactcaaagaagagaatgaacaggaggaggaagtatttgatcaggtcagtgagtgcctagggactttgattaaaaccttcaaaggttctttcttgccgttttttgaagagctctctatgtacattacaccaatgttgggaaaagataaaacacctgaagagagaaggatagctatctgtatttttgatgatgttgcagagcaatgccgtgaatcagctctgaagtattatgacacataccttcctttccttttggaggcatcaaacgatgaaaattcagatgttcggcaggctgctgtctatggtgtgggtgtatgtgccgagtttggtggtcatgtttttcgccctctagtaggagaggccttatcaaaattaaacaatgttataaggcatcctgatgcacgacttcctgataatatcatggcatatgacaatgctgtttcggcgcttggaaaaatatgccaatttcatcgggatggtattgatgcagctcaggttgttccagcctggcttagctgcttgcctataaaagacgacaaggttgaagctaaagttgtacatggacagctttgctccatggtggagaggtcggatgctgaaattcttgggcctcacagtcagtatcttcctaaaattgtttcaatttttgcagaggttttgtgcaatggaacagaacttgccactgatgaaactagaaacaggatggtgaatgtcttgaggcgtttccagcagactttgcctcctgattttcttgcatcgacgttttccaacttgcaaccgcagcaacagctactgctacagtccatcttgtcgacatagttgttttttctgtcgctgcaaggtgggggtttgttatttttcttgatgttttatcagccaattctttatgtcgtatctttttctggtggggtactttgtgaatgcattgtttgcttcaacgaactggaggctgtcaccacacatggttttgatagagtgtatattgtctgtcttgtattcgaaatatggtttgagatgtgctgcaacagaggtgcaagggaaacggtgggatttattgtcggatgggttggacatttgcagttttttggtaatgagatcactataagtggagttactttctgcttctctttgaagccattttaattctgttgaaaattattaaaatgtgctctgttggaagatgcagaagctcctccgggttcatactggtaattggtgaaataaaaagcagtcttatctttctgaatgaaccttgggttcgtgtgtatttaagctggatcgttaatttattctgagataaaaccgtagcaattcgctaatgtgttcggagatcaaaccgttgcaaatttccatctggc

SEQ ID NO: 21470 - DNA, 3523 bp, Zea Mays
ccgagttttggagctgcgtgctgttgttggggataaacttgcgtattttagaataaaggagctcaaagatatcttaaatcagctggggttaccgaagcaaggaaagaagcaggaccttgttgacagggtattggctattttatcagatgagcaaggtcaacatcatcatggatggggaaggaaaaatgctcttacaagggaggcggtggcaaaagttgttgatgacacatacaggaaaatgcaagtatgtgctcctgaccttccctctagaagccacagtggatcagatttcagtcatttcaggcccaaagaggaagcgcctgacttctaccatgtggatactaaggtccgctgcctttgcaatagcacattgctaaatgacaatatgattaagtgcgaagatggcaaatgccaggtgtggcagcatattacctgcgtactcattccagataagcccacggagggtgctggccctgatattccacctcatttttattgtgaactgtgccgactgaaacgggcagacccgttttgggtgactaccggaaatccattactacctgtgaaatttatgtcatctggtgttggaaatgatggagcaagtgtacctcaaattgtggagaagactttccaactttcccgagcagatagagaaacagttcagagacaagaatatgatctccaggtttggtgcatccttataaatgacaaagtccagttcaggatgcaatggcctcaatatgcagaattgcaagtgaacggtattcctgtacgagtaatgaccaggcccggttctcagttactagggataaatgggcgggatgatgggccactggtaaccacatgcagtagagaagggatcaacaaaattagcttatctagagtggatgctcgaaccttttgctttggagttcgaattgttaggaggaggactgttcctcaggtattaaatttgatcccaaaggaaggtgaaggggagtcttttgaggatgctcttgctcgtgttcgtcgctgtcttggaggtggaggtgctacggacaatgctgatagtgatagcgacctggaagtggttactgaatctgttacagtcaaccttcgttgccctaatagcggatccagaatgaggattgctggaaggttcaagccttgtgttcacatgggctgttttgatcttgaaacttttgtggaattgaatcaacgctcacgcaagtggcaatgcccaatatgtttaaagaattactctctcgagaacttgatgatcgatccttatttcaaccggattacatctttgttgcacaattgcagtgaagatgttaatgagcttgatgttaaacctgatgggtcatggcgtgtgaagggtgatgccgctaccagagatctatctcagtggcatatgcctgatggtactctttgtgactcaaaggaagatacaaaccctggtgtcgttagtgttaatgagttcaagagagagggtacttctgatggacatagaactttgaaacttggaattaaaaaaacccctaatggattatggcaggttagcagtaaaccagatgataagaaacccgtggttagaaatcacatccaaaacaacacggggtactcaataccaaacatagtacctatgatcagtagccccactgggagttgcagagatggtgaagatgtaagtgtgaaccaagaagggggtggtattcagtttgatatatcattgaaccaagagtttgacagttttgcgcataactttggtcaaacatacaatacagaggataggcaacaagagccacaacataatgctgcagatgtcattgttcttagtgattctgatgaagaaaatgacccgattgttcgcctgccagctgtctatgcaaatactcctacaaatggtgacagtttccctttcgtcactgatgctgctgtatctggatatcctgaagggtaccaggaggatgctggggttggtacaagtggccttggtttattgagcaacaatactggtgattttgaaataaataactggcaaatgcattcttatccacaaccagagcaagggttccagttttttgggactgatactgatgttggcaatccttttgttggtccgcataattcctttagtattacaccagaagactactcccttgactgtaatgttggcatagaggatccatctgcagctcacgatgtctcaatttgccgaaacagtaatgatgtgcatggaagcttggttgataacccattggctttagcaggtgacgatccatctttgcaaattttccttccaagtcaaccttctactgttccccttcaggaagaactgagtgagcgcgctaatactccaaatggagtccaccctgatgattggaggatatctcttacgcttgcggctggtggagggggtaatgaagaacctacaagtgttgatggcctaaaatcacagccaaaagttccatcaaaagaggcaggagttgaacctttacttgatgctgcctgtcaaccatttccaggatcatcgaggttaacttttgaaggcaggcatcttagcttctgctctcccaagcatgaacaatgacagatgtaatggatctaatctaaacccgagaaggattgaaaatatattttctcatcctcgccaaccacggtctgttaggcctcgtttgtgtttgtcattagattctgattcagagtagttcggacatcacactgggatagctgaatttgctattaatctggcaaagttggcttccagaatcttgatttttattgtggagggctatcaagttattctggttgatacaaagagaaacaccagtgtggatgctttattgcattaacctggtaagattcaagtgttctatatgatccaagtgggatctccatagagttcatctaatggttggtacaggatattttctaactgggagtggtttaacgtggctagtggagcaggctgtacattttccctgacatttactgggtataaggaatagggggccatcacttggcacaagacaaatacatgtgaatgttttgtgtgtaccatcattgtatttagggttcgggtgttaatttagatgtttatgaccctgatgtttgatggaaaataaattattccttgatgaagcggcggtcaatgaacagagcccttcggttttcagtcggagctactgacccttcatctgttcctgtggtgaagtggttgctgccgcttccgtggtgggaccaaccatgccgaagtcgtgtctagcagagggcaatcaatctccttggtgtctagcaggtttctttgtgcatcatgctgtattattctggtgtcctttgcaggtggtggtggattgtatcggtgttgtgaacccttctgattgaaaggtgctgggatggagtactggtatgaagaacttatcttctttcagaacatggcagcgcgttgtcggagcatggatgacgaaatcaccctgcgcacaaatgtgtcttgatgccagctgatcggtaggcttaggcctgtttgagcaaaaccgtcccg

SEQ ID NO: 21471 - DNA, 1563 bp, Zea Mays
cctgcctcctgcatcaattagaaagaaaaggaggaattttctgagcacacagcgtcgcagtcgttcatcggggtcaactacgggacgatcgcggacaacctgccgccgccggcgtcgacggccagcctcctcatgtcgacgtccatcgccaagctccgcctgtacgagccacagccggacctggtcgcggcgctcgcgggctccaacatctccatcctgctgggcatacccaacggcgccgtcccgaacctcgcgtcctccccggccgccgccgcgtcctgggccgccgccaacatccccaccacgcttcccgtctcctccatctccgtcggaaacgagctgctcaactccggcgaccccacgctcgcgccccagctcctccccgccatgcagaacctgctcgccgcgctcccggctggctcgaccaccaagatctccaccgtgcactccatggccgtgctgtcggcgtcggacccgccgtcctccggcgcgttccacccggacctcgccggcagcctggacccggtgctggacttcctgcaccagaacggcgcgccgttcatgatcaacccgtacccctacttcgcgtacgcctccgacacgcggccggagacgctggccttctgcctgttccagcccaacgcgggccgcgtcgacgccgtgtcagggctcacctacaccaacatgttcgacgcgcagctggacgctatccgcgcagcgctggacgccaaggggtacagcgacgtggagatcgtcatcgccgagaccgggtggccgtacaagggtgacgccgacgaggccggcgccacggtggacaacgccaaggcctacaacagcaacctcgtggcgcacctcaagtcccaggtcggcacgccgcggacgccaggcaagtcggtggacacgtacatcttcgcgctctacgacgaggacctcaaggggggcccggagtccgagcgctccttcgggctgtacaagactgacctgacggcgaactacgacgtcgggctcgcaaaagacaatggcacggcggccccgaccagcttgactccggttccggcacagggcacgccgcagccgagcaaagggacgatgccgacggggtactgcgagaccacgtccgccgtgcccggcaccacgcaaggccaacagttgccgcagagcagctcgtgctacattcccggcggagctgagtcgcggcacgccacatggcagcttgttttattgggtgttttgatgtgcttggtcaaggtagccggcatctagttacaacatctgtgtgcgacggaacgagtacagggttcgctctccacagttgtgcgtatggattcaccactgtaatagaattcacgaaagctgctaggcacgatcgaatgttgagccacacggttgcactgctttggcctccacagctccacttgcaactccttttatgaatgatagcacaaataaaatttccgaagccaaaagccgtcggacataatcactaagccattctatttcggccggtcgtaacgggacggaaataaggtatcgtaacgggtcaaaaataaggtcgggtcgaaa

SEQ ID NO: 21472 - DNA, 564 bp, Zea Mays
caacatcatacacatagtaggctttggggactggataagcacaagtgaggtagaatttcaaggttctcattatactttattttttcctggtacacaatggtgaaaaagcagggccagtcctagagttccctatgggttaaatatcttgtgtagtcatttgttcaggaagccagaggccttgctgctggaccaagattagtccaaaggttatctggttttggggaccatcgatctgcagacaatgtggcaagagtggtagaggaggagcttgcacatgcctctatggtttgtattgatttctcaaagaatgccaagtgatgggtcgtgaaccaagcaatactttccaagacttgataaaggagtacgaagttgtactgaagggtccattcaactacacggctcgtgatgaagctggtataccccgagaatgtttggtaaaaaaaatgtattggtgaaagcgaaatgtgcctttgggccatttctaagtattttggtgatttagtgtccaacacaagtgtttaggtgttaatctatgacaagtgatggactaagtgcaaatcaaga

SEQ ID NO: 21473 - DNA, 701 bp, Zea Mays
gttagttgccatgtgccaactatcactttgtgattgtgtttgccaaaattgtggtatcagctcaaggcttactccagcgatgcgtcggggcccagctggtccgaggtccctctgcaatgcttgtggcttaatgtgggcaaataagggtactctacgaagtcctctaaatgcacccaaaatgactcagcagcttcttgccaatccatgtaacatggtagatactgatgacaaaaactcaaatgttcttcctgtggagcataatcaagccacacccaaaactgactcgatgatgccaaaagaggagcagaagctggacatacgcttgcccaccgaagaagatacgaaggcagtttcatgacaaatgctcaaacatgtatatagatcgagacaggtttctgagtttaggatgacatataaatcagtaaaactaacaaaggcagcacaaaaaaaattacatgcattgtgttgccacatttatctccgtacccgattcatattgtattgctaactgatgcagttcttactccttaccctgtgtcaacctgaccaggtgacttggcaggaactcaaaatgttttcaagaatacgacgcattcttgagaaacgttttgtttattgttgtaaaaaccacttcaatagtaatttgcatcaactttgatgcaatttattttatagaaaaacatgtgatattttggtatttc

SEQ ID NO: 21474 - DNA, 238 bp, Zea Mays
cttgatcccaaaggaaggtgaaggggagtcttttgaggatgctcttgctcgtgttcgtcgttgtcttggaggtggaggtgctacagacaatgctgatagtgatagcgatctggaagtggttactgaatctgttacagtcaaccttcgttgccctaatgaggattgctggaaggttcaagccttgtgttcacatgggctgttttgatcttgaaacttttgtggaattgaatcaacgctc

SEQ ID NO: 21475 - DNA, 652 bp, Zea Mays
atgacatatttgatagcgggccgcaggctaagccattccttctaactgcaactgctgctcctctttgtctcccccgttccgttctccactgaactcctcgccctcgtcgacccgtgacccgtgagcctcttccactgccgccgtcgacgagagctgcgttagccgctagggcttggttgacatgaacaagcctcctgaaatgatatctggcaacatgacagcagccatgtgcgtgtattctggactgttcatgaggtttgcatggatggtacagccccggaattatttgcttctagcatgccatgcttccaacgagagtgttcagctctatcagctgtctcgctgggctagggctcaggggtacctggagaagaaagagccagagacacaacagtaaagagggtatgcaacactgcagtgacttgttcctttagtgaccatgcagtatgccgaggagatttcatatacctagcgccgttacaagcttctgcttgcttacttttctgtgcatttggtttttacaatgcgttatgcaatgagtttcccccaaacacgcaatgagtttgggcactattttcgttttacctggctcatgtgcccatagtgctttgtaaaagaccagtcgttgcaaaattttggtccggtcctcggc

SEQ ID NO: 21476 - DNA, 3254 bp, Zea Mays
ctggacttcaaaaccacgcgttggatacactccgaaaccgcggcttgatttcacttggccctctagcgttgtttggtcaatcctctctctcccttccccatctccccgtaccccaaaccctaggacgcagcgccgccgccgtagcacccccacacgcagcaagatgaggccgcgcggcaggggcgacgacgtcgaagacgacgaggatgagtacgaggacatcacgccccctcgaagaacgccagagcctgaggccgaccccgtccgctcgccctcgccctcgcccgctcctgcccccgccccaccacatcccgcgcgtgcccctctcagcagtctcgttgtcaggccgccgccgcagcaacaggagaacggcggcggatcctccccgccctcatcctccgcccgctcgctttctcccagcaccggcggacaccgaggccgcggggcctcgcccccgcggcgacggcgggacttctcaccgccgcctccccgtggttgggtgaggcgccggtcgccgctgccgccaccgccggagaggcggcgtcctgggagcccgccgccccagcgccgacgcttcagcccaccgccccggtcccacctaccgcggcatccgcgcttccacgatgagcaggaagtgtaattgccaagcactgcaatctccagtaaaatatcaaatgaagtatggagtttgctgttgtactggaacactttccaacttgagttgcttggatgccattccttttcaaggaggacattattgctgatgctttggtattgtgctacctgatggtttgattaaattttccagcatagtgatgtggaagtattctgcctcgctgacacaaattttatgaaaaggcagacatttgcatgtgcagtatgtcgcgctctgaagttttggagttttgagaattgagataacatcgagtgaaggaatgagatggacttgaggtcatagtattaacacaacttgggcgtgttagtgtttaggcaatgcctagcaacataatgagtggaattagcttgaccatggatacgtagaaacttgaggaggacatcatcactcgccagttggtccgtactgtcatcaatatttcaaccgttgatttttggagatcagggcagaaatcaggaagctgtggttccagtgcttatctaaactaaagttgcatgcttgatgttgttagtatggaactgggtttagacatttataatatgaattcgaaaatgaccaacccaccctttcgagtttttttttggtaatttgtgttttctgcacaagccaagtcatcaggtatattttagacgtaggattatgccattttgtttgccagtctttgaacaacttgttagatgcttcagaggctgggacaatgacgttgggagaagaatgtaactagctgttctagaggcttatttgcaagtgaattgctgggcatattcacatcttcatgatttgaagcctcaaggatgttcatatagcatcgatattggagctgtctcctgtgcaatttcaggttggaagttggaactcttcaagtaggtcccagtggggattagcttcgtggcacttggtgctttcttaatcttgtgcagtcatgtggagggagaagtattcggtcttgaagcgacctccttgattctaatatttgagatgccatcaagaatctgttgcagtggtctatatgtcattgacctgtcaaatgtttgtttgagttaacttgcaaatggaattgtgggatcctacattggctaaaggaattaagattttcttagcaacatcaactccactctttggacacgtagctactaattacaccgtgaactaccagaaggccgctattcagttgagctgcagtggcaatggatatggaatgcatgcaggcccttcgccaccacgcagagcagaagccagcaaatttgatgatgatgttagtccacgttacactcatggatatcaagggggtggtagaggaggtgcaaggttccgagagggtcctccaccatatggaagaggtagatcatatgggagaggttatggtgctccacatggaaaggatttgattaatattgatggagaatatgttcaccgaaatgacccaaatctgtcgccaagagaaggtgattggatatgccagaaccctaattgtggaaatctcaattttgctcggcgaactcactgtaacaactgcaacaagttccgctattcagcacgtgaagcatatgaacctaggcgcagccctcccttcaggagttaccccagccctccacgagggcctccaaggatggttggtccacctggtgatcgagcccctgcaagagagatggccaggtacagatccccacctcatggttggggagcaagtgatcccagggcatatgcaggtcgatcccctccagaacgtgcaggacggtttacagatccatcaactaagggaagaatgggcttccgtggtgagcgtgacccaagggaccgtgtgaaatatgagtggtctgccactgatgactacgttcagagggagcgcccatatgatggttatcttgacaggagtcggcgtcgctcaggatctcctcgtggtaactggggaaatgatctgcgtgacagaagccgctctcctgcacggaacaggcctatgaagagttccttcaccggaagaggtcgacctgacgactatgctgctgatccatatggcagccgagggagacccaatggtatggaggccggccgtgggcgtgggcatgcttacagagcaggcagtggtccgtaccctggtgagactcgaggtgaccaacgcgctgctccacgcgctaggaacgaggatggctattagatcttcatgaagctgagtgacgtcattttgtctttgttggtcaggaaaggagaaccttagtcaagctggagcttgagaatatctgcagcttgtaatattaaagatcgtgcacacatcctgttcctgcatgttgtggagttatggttggcttctctcatgctcagtggtgggatctattaaagggtcatgggtggacacatatacacccaataatttctgcaaaaaaaattagtactcatcaagtagcaaataacgttctattgccgtgattctaagcgtctgtttagaagtatccagtttttaagaaactggtttatgtaaattgaggtggtttatagaaattggattcccatttcttaaaaaccaagaagctggccacttctaactaaaaaataaaattgcttccaaataggaccaaaatat

SEQ ID NO: 21477 - DNA, 2788 bp, Zea Mays
taagcggccatgaggaggacgcaggcgaaggagtatggcggccccgtcattcgcgccaaacggacgaggatgggtggctcctgcagcagccgcgacggcgagcagggccagcgccgcccacgctgatccccggggcacaccgcccctgccacatcacctacgcagcccacgcgcaaccaggtctcctcgacccagatctctgccccaggagtggaggcgacgccgtaagcgccccaatgcggcgagcggcaatggccggtgcgtgcgcggacgtcgacgccgccgcctgggctccgggcggcgaggcgcgggatctgcggctagggttttggcgcgcaggaggattcgggagttgcttcggcgcgagggagtgggaacgaatagggagagctggagcagcggggcgacgaccgatgaggttggaactcagaagggggagggaaaaaaatcgaggggagcagagcacgcacggacgaggatgggcggggacggggataagatatggttccatcgatccattgcagggacagtgcaagcggccgggtccggcgacggagacgaagccgaggaagagaaggccttcttggtgccgagcgccgcggccttcccccacggcatgtccgccgccgccgctggcccgtcgctggccgtggccaagaaagaggagttcagcaagtcgccgtccaactcgccggcctcatcgggtggcacggacggtggctcgtcggctgtcccgtggccggagcagatccacgcgcagaacagcagcccgacgctgttagaaccgagtcgccaagccatccctctggagttcaaatcgatggccggttgcttcttcaggctagcagaattttaccaagacccagagttcggcatgttgtggcaatggaaagggctggcgttggcttcagagaaccaatctgcatgacgttgattctatcacccatatccttgacgaccaaatggaggtcccaaaaaattgagcaaccaagcaagggctgtctgactctgtcaaaggcccagcagagattgttcacacaaagtaagcgagcgaaccgaagaagggaaggacaatatagtcacgtcacgtgttaagtaaaaaggaaaaacataaaaataattaaaaaaaaggttagagtactgttttggaggaccaaatcacttataaatactattagacagaaggttaacttgtgagtattataatgagaagcctgttaaaaggagtaccataatagcaaaaaaactcctctggagcatcgaccgactctccacctgaggaccgccagctccttcctccgcctcgacaagcgttggagagatggtgaagagaagcaagaagagcaagagcaagcgcgtcacgttgcggcagaagcacaaggtgctgcgcaaggtgaaggagcatgacatggaaaaaatggttacaaaggctgatccaagtaaacggattgtactacttcacaacaagatagatcttgttcctaaggaagcggtagagaagtggcttacatatctgagagaagaaatgccaacaattgcgtttaagtgtaatacccaagagcagcggaccaagccgggatggaaatcttcaaaactagataaaacaaacagcatcccacaaagtagtgattgccttggtgctgagaatctaattagattgctcaagaaatattccagaagccacgagctcaaactggcaattacggtgggtattgttggactccctaatgttggcaagagcagtctgatcaacagcctgaagaggtcccgagtggttaatgtcggttccactccaggggttactagatcaatgcaagaagttcaattagacaagaaggcgccgatggaggccatggagctcgtcgtcgcgctcaccgcctgcgccgactccgtcgcagcctgcaaccacgacgtcgccaactactacctcgtgcggctgggcgagatggcctcccccgcggggcccacgctgatgcaccgcgtggccgcctacttcgtggaggtgctcacgctgcgcatggtgcgcatgtggcccagtcgagatctggtcattagattcaatagtgtggtactggtggcatgtggcccagccgagatctgacagttcttagaaaaattcagctttcatttccaatcgttacagctttaaactattatgatcgttactttttcattggcattattacttgagaaaccattcaaaacatccactttgcttttgataaccatgaatttgtaggttcatgcaaaagcatttaagtttgctaagttgcattctaagaacatgtatcaataatgattggaaatgaaagctgaattttttaccggcgagaggctactggagtttgcacctggtggtgtgagctgcgcaccacctccttcataggcagatgtcatctatatggaagcggcaggaggtggaagcactatatatgacacctctatcgctcttgttgattgctggggtcaacatgtgccgctgctgcacttggtgggcctagggaattctaggactctgggctggtttggtgggtagtgaaatttaaatagcaagtgattttctctctggatctcatctattttcttgtccaccgaaccagccttaagatttgttctgtctggatagcacaaaaattgtccatcttgcttgcacccataacactgctctgaacagaagatgcatgattacctgcatgcattaaacgatatactagataaatgtcaccggtatcacaagcttacatctcggagacaccttactatatgatttatgttgtcacaacacacg

SEQ ID NO: 21478 - DNA, 3726 bp, Zea Mays
tggtgcgtgcatggaaagcagggcagcgtttgcactgcagatgaatcgttgtgcttgtgcatgccatgcaccgctgcacgccaacattcttccctctgctgctgctggggctgggctgggccttggctttcttttgtaggcaggcaggcaggcactcgatggatcatcttttgccttttgcttttgcttttgcctttgcctttgcctgcttttatatttgtcgcgggtccttctcctatctgccaacggcagcagcagacacagctgagagctggatcacctctcgattccaggagcagtacgtcgtctcctattctactccatccatccaccgcccttgaaaagaagagaaaggtcaaaggagcaccgctgatcgcgatcgtacctcacttcgcgcgctctctctctctctccctctctctctaccgccgccattcacctaccaacaagtgcgtgtgtagtgagaaagaaaccttattggctagctcagctgagctcgccggccggcagcttcaccatccaatacagcgaggagcaagctctgctctccgaacccggccacccatggctctcgtcctcctcctcctcctgcccatcttccttctctcatcgtcttcctgcctcgtcctcgccattccaacgctagccagccaggctgccaccctgctctccctcaaggactctttctcgcctccgctcccgccgcagctgcgcagctggaccctcgccaactatgcctcgctctgctcctcatggcccggcgtcgcctgcagcaaccgcaccgtcgtctcgctcgacatctccggctacaacctctccggcacgctgccccccgctatcgccgacctcgctggcctccgtttcttctccgccgccgccaactccttctccggagacattccgcccgccatcgccgccctccgcgacctccgccacctcaacctctccaacaaccagttcaacggcaccctggacgccctcgacttctccgcgatgcacagcctccaggtgctcgacctctacgacaacgacctcgccggcgcacttcccaccctcctccccgcggccgcgggcctccgccacctcgacctcggcgggaacttcttctccggcaccattccacccagcttcggccgcttccccgccatccagttcctctccctcgccggcaacagcctctccggggacatcccgcccgacctcgccaacctctccacgctgcgccacctcttcctcggctacttcaaccgcttcgacggcggcatcccggcggagctcggcaggctcaccagcctcgtccacctcgacctcgccaactgtggcctgcagggccccatcccggcttcgctcggcgacctcaccgggctggacacgctctacctgcagacgaaccagctgaacggcaccatcccgccgtcgctgggcaacctcaccggccttaggttcctcgacgtctccaacaacgcgctcacgggggagatccctcccgagctcgccgcgctcagggaactcaggctgctgaacatgttcatcaaccggttccgcggcggcgtcccggacttcctgggcgacctccgctccctgcaggtcctcaagctgtggcagaacaacttcacgggcgccatccccgcggcgctcggccgcgccgcgccgctccgggaggtggacctgtccacgaaccggctgacgggggaggtgccccgctggctgtgcgcgcgcgggcagctggagatcctcatcctcctcgacaacttcctcttcgggccggtgccggaggggctgggcgcctgcccgacgctcacgcgggtgaggctgggccagaactacctcacggggccgctcccgcgcggcttcctctacctgccggcgctcaccaccgtggagctgcagggcaactacctgacgggacggctggaggaggacggcagcggcggcggcggcagcagcagcagcaggctgtcgctgctgaacctgtcgagcaaccgcttcaacggatcgctgccggcatccatgggcaacttctcgtggctgcagacgctcctcctcggtggcaaccagctgggcgggcagatcccgcggcaggtcgggcgcctgaagcggctgctgaagctggacctgagcggcaacaagctgacgggggcggtgcccggcgaggtgggcgagtgcacgtcgctgacgtacctggacctgagcggcaaccgtctgtccggcgcgatccccgtgcggctggtgcagatcaaggtgctcaactacctgaacgtgtcgtggaacatgctgagcggcagcatcccgcgggagctgggcggcatgaagagcctgaccgccgccgacttctcgcacaacgagctgtccgggcgcgtgccggagagcgggcagttcgcctacttgaacgggtcgtcgttcgtgggcaacccggggctggtggtggtgaatccgaagcagcaggtgatgggaggagggccggggatcctcggcggcgcggggacgcaggatgaacgtggctcttcttcgtcgtcggcggtgatggggcgcctgaagctgctgcttgcggcggtgggcctccttgggttctccgtggcgttcgcggcggctgccgtggcgacgacgcgttccgccgccatgctccggcgccggcgtcggtcttcgtcgtggcggtggcgcatgacggcgttccagcaggtgtctttcgggtgcgaggacgtggtgcggtgcgtgaaggagaactgcgtggtggggcgcggcggggccggggtggtgtaccgcgggacgatgcccggcggggagtgcgtggcggtgaagcggatcgtgtcggcggagggcggcgggttccaggcggaggtggagacgctgggtgggatccggcaccggcacatcgtgcggctgctggccttctgctcggggcccgaggcgaagctgctggtgtacgagtacatggtgaacggcagcctcggggaggcgctgcaccgcgctggcgctgatgatggcggcggcggtgtggtgctgtcgtgggcgtcgcgtctccgcgtggcgacggaggctgccaaggggctgtgctacctgcaccacgactgctcgccgccgatcctgcaccgggacgtcaagtccaacaacatcctgctggacgcgcgcatggaggcccacgtggcggacttcgggctggccaagttcctgggcggcagcggcgcctccgagtgcatgtccgccgtcgcaggatcatacggctacatcgcaccaggtacgcgtacacgctcaaggtggacgagaagagtgacgtgtacagcttcggcgtggtcctgctggagctcatcacggggctgaagccggtgggggagcacctcggcgacgacgcggtggacctggtgcagtgggcgcgcgcccggagctctgcagggggcggcgtcctggcgctgctggaccctcgcctcggcggcgacgtcccggtggcggaggcggcgcatgtgctgttcgtgtcgatgctatgcgtgcaggagcacagcgtggagcgccccaccatgcgcgaggtcgtccagatgctgcagcaggcacggcaccagcctagctaggacgacgactggagaaacgatgtgaaaatgtgatagatagacagaggtggtgttgtgtacgttgtcattgcattcggtaactatatatatttttagcagaaggtcagctgtaaattaaaaatatgacctgacagcggcagcccagccacccaacgcccagccc

SEQ ID NO: 21479 - DNA, 159 bp, Zea Mays
gcccaaacgaattccaggaaataacaaataaatacagaaaatgagttttagtgtataagtaattcctacaaacttagaaaattcataaataattaattttaactcctttttaatccgttcaagttgcattaattttgtttcaatattgtttatcaccta

SEQ ID NO: 21480 - DNA, 1982 bp, Zea Mays
ggaagggataaaccgagacaagcctttcctccgcaaatgcggagaggctgctttgaagtttgaacccatgacctggtgactcagtgagctctcaccattgcaccaggattcacttagcagattgttggcagtggtgcaataccatcagcggatttgtgcatcaaggatgattttgataaaaggtttcaagaagatcttgatgaagcagtgcgccaaagccttggatacgatgcttatcctgctggtacaataagcacttcaaatgaaacagaagtgtatggcactggccttaaaaatgccgctggtgaatacaattgtttcttgaatgtgattattcagtcattatggcatataaggcggtttcgggacgagttccttaaaacatcatcactgcacaagcatgttgaagatccttgtgctgtctgcgctttatatggtatcttcattgacctgagcaaagcagccaagggacacggagaagctgttgcgcctacttcattgaggatcgctttgagcaaatcctacccgaacagcaaattctttcaggagggccagatgaatgatgcatctgaggtactgggtgtaatctttgagtgtttgcataagtcatacacttcgcgtactgtctgccatggtaaacctcatgagaagaattctattggatcatgggattgtgcaaatatttcttgcatagcacatagtctttttgggatggacgtatatgaacggatgaactgtcacaattgcaagatggagtctcggcggctcaaatatacttcatttttccacaatattaatgctagttcactccgaaccgcgaagattcttcatttgatgaacttttgaaggttgtcataatgaatgatcaactagcttgtgatcaagacgttggcggctgtggaaaaccgaatcacatacaccacatcctttctactcccccacatgtctttacagttgttttgggatggcagaacaacaaagagaatgtggatgacatatctgcaactttggctggtatttcaactgagatagacattagcatattctaccgtggcctagatcaaggaagcaaacacaccctggtgtcagtggtttgttactatggccagcattatcattgttttgccttcaaggatggacgatgggtcatgtatgatgaccagacagtcaaggttgtaggtagttggggtgatgtgctcgtgatgtgtgaaaagggtcacttgcaaccccaagtgcttttctttgagtctgcaaattaatcattcttcagagtcgtaaagtgttgtgcagtggttaacatgccctcaaatatagggtttttacctgtggccgtgaagattagaaatagagtagcaaattcgttttgagcgggggtatagagtagcaaattcaacagctgcgttggtctctgagctttggtcgagcccctcgtaataagtagtcacctgaggattaaaggagagctgtttacccctctgtttttttaacctttggtatacttgctgaacttcggatccttcatctgccaatgagatttcactgccgatcaagttggtggggacgcattcgacatgaactgccatccaacaattctagccggatctgcctaaagctcttcattatgcaccagttatgtatagaattttgtgcttacaatgaggtgacaggtataggagtgtgactgttttgaggccagaaggtttagagaatggaaggaaatggaattgttggtgcggtgtgtatctgtggagtactgtttgaaaagaggaacgatatctggaatacggtagactttgagaaatctgtagtacacgagtctatgtaaacagggactcgatgagattatgtgagatgagtatagcgatgaataccagactccttatcactactgtttttatagttaaattcttattttttttatttagctaaagattgcgcgcctaagatataaaagaaaccgttgaagtgacaaaagactcaga

SEQ ID NO: 21481 - DNA, 1118 bp, Zea Mays
caggggcaatgtttcaaagtgacaaaaggatagcaaactgagatttaagccttgagatatatgcaccatggtgtggtcattgtcaatcgctggaacctacttacaacaatctagccaagcatctacgtagtgttgactcccttgtggtagccaaaatggatggtactaccaatgagcatccacgtgcaaagtctgacggatacccgacgattctcttctatccagctgggaagaaaagctttgagccaatcacttttgagggggagcggacagtggtagatctgtacaagttcatcaagaaacatgctagcatccctttcaagttgaagcgccaggagtcgagaaccgagagcactcgggcggagggtgtgaagagctctggtacgaactcaaaggacgaactgtaaagagctcagggttggatgtgtgttggagtggatcagggtgaaagtttccatctcaatacaagtagatcgatcttggtggatgcgagtgcagtgttggcctgagggaggagcagcagagatgagtgcttactgcttagagagaggaatgaaatcagcaactaatcaaataaaatcaaattccattattccttttatgcgtctgttttgctgtctttactttctttcatcagtatacaatacatggagactggatgtatagctggagtgactctacgcagggctaccatgcagatgcggcacaccgcctcctcggccgcgatgtcctcttgctcttggtcttcctggtcgaccatcctaccagaggtgatgatgaagaacagaccagcgaaggtgacacgttcactacgaagaagcaacaggagggagtagctgtccagacacggccacgtcgacagaagcggaacaacgtgagagtggagtgtatatatgggcctaaatgggtcgtttaactgggccgtggagcttatatgcttccctatctctggaaggagggtatcgagaaaccagtaaacaaacactacggcagctatagccgcccccttccctatcttcttccgcacgccgatctcccctgctctcctatccctatcttccatggagcgctaacaatctggtatcagaggtcagacaagttggatcccatcagcaact

SEQ ID NO: 21482 - DNA, 580 bp, Zea Mays
aacgacggcggcgcctagcggcgacatcgtccccctcgactcctcctccatccccgatgcggcgcgccagcctgcaggtacgtttccttcccagtctccacggctaaaccagggcaccagtccatctcgatcttctccccagtccccagtggcccagtcccgttcatctctacaggtgttggatacttggattggattcgagtgctctggaatatagttgttagttgtttgccttgttcaaagcctgaaatcttccagttttgtccatgtttgggcgtatggctgtttgccttgttcaaagcctgaagccatgtccatggacgtataggcgtatggctgttgcctgtttatccactgcagttcaaagtccgaagccatgtccaaaccctaatctccctcccatcttgatctcgcgtcgcattggcgatgtatcctgttcccggcttccggcggctcgacggcgatgagcggctccgtgcatcagtgatgccgcgtcacggtggccaagacgtgcgggccgtggctgcagcggcggtgcgccgctcgcatcggcgagccacactgcgcatccgcgattcca

SEQ ID NO: 21483 - DNA, 1995 bp, Zea Mays
cgccgccatttagcgtgcccccggtcgtctgctccgcgccctaggtttctctcttcgtttcctcctcatcgaatcggagcttcgcatagtgtccctcgtcgccgccggcgccggcgccggcagccatgtccatgctccttatacagaaacaacccctccctctctccgttcgtccccgcacgactctccgccagtgccgtctccccacgactcgattctccgccgccgccgccgactcggctagccgcgctgcccccttcgccgtcgaggactacctcgtcgccgcatgccacctaaccccggcgcaggcgctcaaggcctccaaggtgctctcgcacctcaagtcaccctcccgacccgacgccgtgctagccttcctctcgggcctcggtctctccgacgccgacatcgccgccgccgtcgcctacgaccccaagcttctctgctccgaggtcgagcgcacgctggccccgcgtctcgcggagctccgggatctcggcctctctccgtctcagatcgcccgcctcgcactcgtcgaccccgcgcgcttccgccgccccaccgtcgtctccaagctgcagtattatgtccccctcttcggttccttcgagaacctgctccaggctctcaggaacaacgcctaccttctcagctcggacctcgagcgcgttgtgaagcccaacgtcgcgttcctggtggagtgcgggctagatgcttgtgatattgccaagctgtccatacccgtccctaggttgatcaccaccaacccagaacgcgtccgggcaatggtggagcgagctgaagctgtcggtgtgcctcgtggcactgggatgtttaggcacgcactgctggctgttgcattcctcagcgaggaaaagatcaaagctaaggcagagtttttgaagacaacatttcggtggtcggatgctgaggtgggcgttgcggtttccaagctgccattggtgctcaagcactccaaggacaggctgcgccgcatgtcagagttcctgatcaccaaggttgggttggagccagagtacattgctcacaggcctgctctgcttacatatagcttggaacgccgcctcatgccccgacactatgttgtgaattacctgaaggaaaatggattgttggagcaggaccggagctactatactgctgtccagatgagtgagagtgccttcatggataagttcatatgcccctacaaggaagctgcaccaagcctcgccctagattatgctgctgcttgcagaggagaggtgcccactaccttcttggcaaatgtttaacccttcagtgtaaagcaatgttttgacacttagcagtgagctggtaattttgtttctttccttgcctaactgctacatcccgcagctgtgtctttagaattggctctggtacataagatgtgagccatggttattaccagggctagatttatctttgctctctgttattcaagctgatcaagtattccaatttcacctgtcactgtatggtatggatttagttggggaaaactggaagccattttgaaccaaagacgattcagaaataagactgtctgggagattaatccactctggacttcacaaaagcacttgttatcggaaagttttgtattggattatcttaaagttggccaaacctgctacctacaacaaggctctttcggtgaaattctgaaagcaaattggcgaggaacacccattgctgtcaaacgcattcttccatccttatctgatgacaggctggtgatgcgcaggccaatgcagaaagtgttcactctgaagacgccccaacttgttcatacagtagtgtactttcagttattttgtttttgttattggtttgtatgaatgctgtagttggtttcatgtttggatatgcttgtatgattattaatctggaaatggtacaaacaattcagatgaacatttttagtgtacgaaaatatggtttaatttgtttatatgcctatatatttga

SEQ ID NO: 21484 - DNA, 1212 bp, Zea Mays
cggcggccgcatcctctccccccgcggccgagctccacccccacccacccacacgcacacactttgccggcggcgagcaccaccaggacagcagtatcttttattgcaacaccatgaactcccatggtgctggttcgcattcacggcttttggacctcaactatccccctgctgaaggggctggtgagggggcttcacgtttcagcagtatccctgtctctcatagagagggttcaagcagcatgcctgtacaacacatccaggcttcgagtagtacaccaccggctactggtgagcctcgcattggtatgcgtagttgccccatcgatgtggaagccatcgatgatgatgccgttatctattcttcaagaccactgcctcgagcaagacagcagttgaccacgacagaaagtattactatcataatagatgatgattccgaaacaaacctagaaacagcaggcgatgctcttgacgagcatgtgaacttactgctatctctgggcatagaacgctcgcatgagcctacaagtgcaaccaacaccttccctggaataagcatggtggacacaccaaaagtaaacaccttcaaggtgcctcctgaacctgtgaaggaggttccgaaggaaccgaagctcagctgcccgatctgtatgaacgagataaccgaagcggcgtcgaccgtatgcggtcacattttctgccagccgtgcatcaaggctgccattaaggcccagaagaagtgccctacctgccggaggaagctcactccaagacagcaacaccgggtgtacctcccatcgccttagtagcccagtgcagagtcattttgctacaagttctgccgtgccgggggctgtatgttggaggcaactggggggggggggggggggagcatagaggtcctgtttggttcgttcatttagtgtcataatcagttaacagggtaatctattaccattgctttatgtttggttagactatactgtaaacgattgcagtgggatgcaataccagccaatacaaaattattgccgctgctttttgactgttagccaactccgatccgtctttttggatcccacgttgcaaccaaacatagactggtaaccgttcacagcaaaggatagcaggtgcaataagttccattctcattaccactacctgttgccgaaccaaatagcacgtcttagtgttacgggaaaaaattgc

SEQ ID NO: 21485 - DNA, 2642 bp, Zea Mays
gcttgatcctgaagatgcaacaaggttagcgatttggaaagccagattgataacttcgaagcagagattgaagggctttcaattaaaaagggaaagcaaagaccgcctcgattggtacatttagagacgtctattacgagacataaagctcatataaagaaattggagtcaatcttgcggcttttggataatgatgagttgagtcctgagcaagtcaatgatgttaaagattttcttgatgactatgttgaacgtaatcaggaagactttgatgaattcagtgatgttgaggacctctatagcacattgcccatggagaaggttgaagcacttgaagacatggtttcacttgctccttctagtcttgtgaagggtgttgctcctgtttcgactactgcagttttgagcacaaagagttctgttgcaacttcacctactcagcctacagtatcaacagcttcttcacaaagtacatcacaggatcaaacagaggagacagcttcccaagaaagcaatcctgaacctacgccacaaacaccacctccaaaaggtggaaaccctggaccttcagtaccagctgtgcccattgttgtcagtactggtagtgcggctgtttctgtacctgcagaaacaattagttcccctgtgcgactaactgtacccgccacagcagccacagtgctttcttctgctattccacgaagtgctcctgagaatacacttgctgttacctcaattcctgcaaacttatctaccactttgaaggatgatgaaagcatgagtgttcctccacgacgaccatctcctgctactgaaattggaattggcaggggcataactcgaggaacaactagtcaggcattaggtacagctcccataactattggtccagtttcaggaaatggatcggttagtgcacttcctgcaataaatgacttgtccaaaataaatatattgaacactgacgagaagattaacagtgatggtctttctcagcagttggttatgcctcttggtagtaaagttcaaccccagcaggttcccaggactaatgatgcaatcggctctgattctgctaacacaaatgaaaaccctattcttggtggaagagtattttctcctccagttgtttctggggttcaatggagacctcaagctgctgctgcatttcaaaatcaaattgaaactaatcagtaccgtggaaggcctgagatttctgctgatcacagggagaagtacatacagagactgcagcaagtacagcagcaaggtggcagccttctgaatgtttcccatataactggcataaatcagaagcaatttccaacaccacagccaaatccccttctacaacagagttcctctatatcttcccaagtgaatcttgggcttggagttcaaggatcagacgcggggcatataaaaagtgaagatcaacaaattttggctgaagatgttggtgtggaatcttccgcaacaacaggagcaaataaacaaacaagtgaagatgacacaaagattccatattcgaatccttcagcacctgcagcagaaaacactcagctgcctagggatactgatctatcacctggacagcctttgcaacctggaatgccatcatctggtgttggtgttatcggccgaagaagtgtatctgatcttggtacaatcggagataaccttactggaacttctggtagttctggtcatgatcagaattattatctgcaaatgcttgaagctgcattccacaagcttccacagcccaaggactctgagcgtgctaaaacttacattccgcggcaccctgcagttacccctgctagctacccccaagttcaggcatcaattgtatcgaatcccaccttttgggaaagaattggtagcgacacattagctaccgacatgctgttctttgcgttctactaccaacagaacacatatcaacaatacttggctgctagagaactgaagaagcaatcatggagatttcaccggaggtacaatacctggttccagcggcatgtggagccacaggtcacgactgatgagtatgagcggggatcatatgtatactttgatttccatgtcactgaggatggctcaggatggtgccaaagaatcaagaatgacttcacatttgagtacaactacctggaggatgagctatcagtacaaacaaactaaagtgccatggcagtaggtctggtcaaacctttatgtccaatttgaattttgtagttctcataagagcttgttcggttgcttctggatcaaagaaggttggaggggattaaattccttctagtcaaaattgaatagaaattgatttaacccccctcaatctcctttatccagacgcaaccgaacaatgcctaaggtgactgactgactgttataatctggacccttgacaaaatctccagctgtaaactaatgtgtgaagttggatgcaccgaacatgctgaaattataatcgtgttatgccagccgaatctgtttgacgcagctgtacattgtcgttattatctggatgcgcctgaaaaatattttggatctttcttggcgcctacctgtttatttttagctaactcctggctggcgctttcgatctttctggttcgtttttttatcaaaaaaaa

SEQ ID NO: 21486 - DNA, 357 bp, Zea Mays
ttcagttttacaagtcaactggcgcgcgccagcgcgcgtttagcttgtttttgatgttatacgtttttatcaagctaaatcaaatggttttatttgtatataaaatatggcaacatgttctaccacctaatgagtttatagatggttacatgacatagtagtatatatagatatcatatagcacatccagaataaggtttgcttcagtaatgacacataatatttggagacaaaatgaagaacatgcttcgtatgttcaaggttgtgttcaaaagtattcttacacccaatataacagtaggatatttcaatcgtagagcgaagttttggtttatttgaagttctagttgcatcgtt

SEQ ID NO: 21487 - DNA, 2292 bp, Zea Mays
aatcgagcagcgggcatagttggaggtggcccaaatgacttctttcctgctttacagttgagagcccaatcccatatggtagaggcccgcacgtttccccttgcgacgtcaacctcgttctacccaccagccaccagccggcacaaattctcccttcccacaagaacatcacacggcgatagcaaaaccttccgtcggaggatggcttccgccggcgctggagaagggaaggagacggctgccgggagcagcctccacagcaagactctcctcaagagccaaccactgtaccagctccaggcaaggcccgaactggggatttccgatcccaagagcccccaccaagcgctcccgccgatcccaaggactcctgcctccgatgcggcaactcatcccatccggcttctaaagccgcggcccctgtggtcaattccggtggccggcggcatggattccggcgccaacagcatcggcgagtcggtgggcgagtcgccgtcgctggcgctggcgccggagccgcagacacggccggccgagccggtcaccaagggtcgcgggctccgccggtggcgccgtatcccgcgcgagcagcaccaggaggggtctccgggtagccccggggccgataccggcgttggagctagcgcgggtgaggacttggcggcgcagctccacaagcgtcgttacggtcctgccgccgacgagcccaagggaaagcaggacccggctgcagcagaggaggtcgagagctcggtcgcgtccgtggagtccagcttcgtgccgctggaggcgtccccaccgccggcgccgactaggttggacccgaatctaggccacctgattgccaccgctggtttctcggtgggcgccggcggcgccgattcggacaacagcgacgaccgcaccagcaagttgtccacggccgccagcgcgccgcgccacgacttctcgtccgtcggcttcggccgggagcgcgacagggcgcggtcccgcgcccccggcgctgctcacggcaagggcatccgtgctgcacgtgtgcgcggcgccactatgcgtgttgcctcttcccctgctgaagcggggaattctcgctccagcgtcgagtccaacctccggagctctaacgctgctcatgcgcggcgatctagtgctggcgtcacaagcaacggtgttcacaagattctgttccctgatggtcatcaaagtgacgatgaacctccaagtggggacatgcggtatggtacaggacgtttctacaaggagaatgggagtatagaagggagattggggaactgtgactccgactccaaccatcatacctttgatgaagcgagcgtgggcaagttgagaatggagggactcattcaggtttggatctgtatggtgagtcgatgggcgttacttcagtcggcacaagaaagcgcttgagaatgagatccaaaagtttgtggaaatcaggaaagaaactgacgaagattccacagctcaccaaagtgaaatcgaatggagcagctcacctgtagaagaactaaatgagaagataaagatgctcgaattgaaactggaagaggccaccatgctcatcaatgagcgggattcagaaatacttgaactagatgcactcagccatgtacaaccacagaatacagtagcatgtaacaactatccgctgtccctacagtctgatgtagaccggctgttcctggagaagatggaagcagagattcagtgctttatccttacaagagcttctcaggactggaaactcctgacaatggatcaatttgctcttaacgaggcacagaaatcccttctgtcggatcacaaatccctagaaactaaactgaggcacgccgagaacagggcgatgatgctggaggagatggtggataaactagagtcgcaatgcaaggcgctgtctgagacttcagaagttctgaagctgcaggccggagctagcagggcctctttgttctgctcgatccagtttgtgctgctgtgcatagccattgggaccctcctcgttcgcttcctgtcctcttctccggagattgtacctacttgaggttagagaattatgccagtcagcctttatgtaggcgttgttgaacggttgtttactgtaacttattagggcatcaatcgccttacagattttcgttttttgtaccatcaactcgattttgctagtaatttctttatgaatacgagtttactccacttctgggttctctggattctggaaatgccacatgtgtagttttttttctatggtcggtataatgttcgaaa

SEQ ID NO: 21488 - DNA, 1386 bp, Zea Mays
ctcgcctcgcctgccagcacagcagagcgcgcagacgcataccggcggaccggccggccgtgccgctcgcgttgccgaagcccggcctcggacgacgacgccgcgctccgtgtctcgggcacaagaccttcgcctgtgactccgagccgcatcggcatcggaatgaggacttgaccggcgggcgcgccggggttcgtcgcggcggcggcggcggcgcgatggaggcgagccggcgcgggcggttccaccgccacgatgggcccgccgcgcccgtcccggtggtggaccaggcggactgcacggcgcagacgtgccggtcctgcgtggcggtgacgctggcggacgccatcgcgctcggctgctgcccgtgcgcggtggtcagcctgctggggctggcgctcgtcaaggccccgctcgccctggcgcgccgctgcctgcggcggctgcgcggcgagctgcggcacaggaagcgggtgcgcgacatgcacggccccgccgacaaggccaagtgccgcagctccgacgccggcgccgcgtcgaggggcgcgtgggccttggaggcggccgcgcgggcgagggcgagcaactcgtcgtcgtcaggctcaggcaggctcgacgcggagaaggtgtggatggaggagatgtaccgggtggggcactgggggttcggccgcctgtccgtctccgtctccgtctccgtcacccctcccccgcccgtctggcccggacgcagccccgacggcgacggcggcggcggcgggagaaaggacgtggacctgcggtgcgagtcgtgacaggggaagccgcgcgaccgttcgtccttctgccggacagctccgtggcaatgccggaagttgtcctctgactttgcacggtgaaatgagagtgcatggtccgtgcatcggagctccgaggagaatctgcttgggggaagaagcgctaagctatgattggacccgggcgtggggattgctgcttgattcgccgccttggcggcaggtcgtcgtgtcgcgcagccccagcccagccagaacgattcatcagacttccagtgcacagcggcaaacccggagggccttctgcagttgcccttccaagtggccgtgtcgtagtcgtagcttccatttgtttttcctcctcttggttctggaaccccggccctgtatttttacaagctgtacatattcgagcggccgagttcttccatgctgctgtaatttttttgggcgatctctgactctctgtatatactcgcctttctttttatttcccggaaataatgtgcatccgtggctcgaatcgaatcggatcacttcccggaaatgctcttcatacgaaattattgccttcgtccttgtgtatttatgtgctgaaactggagcatgg

SEQ ID NO: 21489 - DNA, 2276 bp, Zea Mays
ctccgctcggtctcggtctcgctctcgctgcactcgtcttccccgcccgtcccctgatctcagatccagaccaaacgaattccacactaaaccccccctgccccagacgtcgcgcgcatgaaatgaaaccctagtgagtagtgaccctgtccggatcactgcgtggcgccgccatggcaccctccgctctggcctccctcccggcgccgctccggtcactgcggctcaagacgaagcagcaggagctactgctccgcgtctcggcgctggcgctcatctacgttctcgccttcgccgtccgcctcttctccgtcctccgctacgagtctatgatccacgagttcgacccctacttcaattaccgcaccacgctcttcctcaccgagaacggctttagcgagttctggaactggttcgattccgagagctggtacccgctcgggcgcgtcgtcggggggactctcttcccgggtctcatggtgaccgccgcgctgctccaccgcctcctccgcgcgctctccctcgctgtccacatccgcgaggtctgcgtcctcaccgcgcctttcttcgccgccaacaccactctcgtcgcctacgcctttggccgcgagatctgggactccggggcggggctcgtcgccgccgcgctcatcgccaccgtccctggctacatctcccgctccgtcgcggggtcctacgataacgagggcgtcgccatcttcgcgctgctgctcaccttctacttcttcgtgcgcgccgtcaacaccgggtcgctcgcctgggcgcttgcctcggcgttcggctacttctacatggtgtcggcatggggaggctacgtgttcatcatcaatctcgtcccgctctatgtgcttgtgctgcttgttaccgggaggtactcacaaaggctctacgtggcctacaattgcatgtatgtgcttgggatgttgcttgcgatgcagatccgttttgttggattccaacatgtgcagtccggagagcacatggctgctatgggagtcttcttccttttgcaggacaaagagcagaagtccacagactacttctgggaaaacaactggctcaaagtcagctgctaagggtgtagttgatcaatctttaccattccaacacaatgctgctattggtcttcttctgggtgccttttacttgctcagtaggtatgccatacactgcacttgggtgacatctgaggcttactcttctccatctatagttttggccgcaaggggtcataatggtggaagagttatctttgatgattatcgtgaggcatactattggcttcgtcagaacactcctcctgatgctaagattatgtcttggtgggactatggataccaaattacagctatgggtaacagaactgtcattgttgataataatacatggaataacacacacatagctactgttggacgtgctatgtcatcttatgaagatgaagcatatgagatcatgcagtcacttgatgtgaactatgtgcttgttgtatttggaggtgttactggatattcttcagatgatatcaacaagttcttatggatggtacgtattggtggaggggttttccctgtaatcaaagagccagattaccttgttaacggggagtatcgtattgacaagggggcagcaccaaaaatgctgaactgcctaatgtacaagctttgttactaccgatttggagaacttaccacagaatatggaaaacctccagggtatgaccgtgtacgaggagtggagattggcaacaaagatataaagcttgaatacttggaagaggcatttacaacttcaaactggatagtgcgcatatacaaggtgaaacccccaaagaacaggtcctgaggcgtcatcgctagtgaagtggttggagagctattacctcagacaagtacatattgtcaaaaaatctgaatctgagtggcctcaggagagggcggggtcgttgttatgggcacctgctttggcgagagtgactattagcagccatagcatcagttcagctcgaagtcaagaacatctttcccctcattcggtttaggtgtaatcggtgaggaaccaattgtggcaacagcgagtaatttttaattgttgagcatccatggccgaactattaaagtttttgtaggcgcaatgacatatttgaatagaaacttgtctttgatcaatccaaggcaatggattttttcggcactaaacacaaaatatgaactgttaatctgttctctctattattatatgttttcatggtccaa

SEQ ID NO: 21490 - DNA, 2981 bp, Zea Mays
tagcccaggggtagttttgggaaaaaagatatttggatgctggcgaatgtgacggccacgtctagtggaagcgcgtataaatcgtcccttctttctttcctcacccgcccctgatccactctccgcttcccgctccgatcgacctgctccctccccaccaccgagcccatggcggaccagctcaccgacgaccagatcgccgagttcaaggaggccttcagcctcttcgacaaggacggggatggtaaggttcccttccctcctcccctcacacccctgttcgtgttccttcggatcggatctcagtggtgatgttagacgtccgcggctgcctacgtagtggcattgccgcccgaaaggtttgtttaggtggggtagatccgaaacaggccggatctggaccatgtccgcggcggggcggcgggacttgatcgcgtagctgtcgtgtgcatttctccctaccagtggcggaatcggcgatgtggacctaagggctaaggcttatctgctgccttgaccatttcgtcgctgacaaaaacaaagtgacaatcatgccgttctctgtttgtttatctggatcgttattacgctgtgaatcctgcgatatgtggctaagtgatttttcttctttttctgggggcagtttagcctttgacccagtcctaggtgtggtcactaggactgtgtagcatgatgagtgaggttgcagcaggctgattgctagtggacgtttttttccccaatttgttaggttttcacgctccaggttgtgcaagtaattttgctagtgattgtgtgatccatcttcaacgttgaaccttgtttttccccctaaaacccccaacaggaaatcttgccccgacttctattgcaaaaattgtaacgcttagcaccctgattgactcaattcctgtcactaggcatgctcggtcaaaagcagatgatttaccacttagaaactgccctgcccctgctttccacatagcatttcgaactttttgactactattgacacccccctaacttgccgaactatttctctcttcagctactatttacctagttataattacataaatgtttgtgtgtatcttgtgcaggttgcatcacgaccaaggagctgggcactgtcatgcgctcgctggggcaaaatcctacagaggctgagctccaggacatgatcaacgaggtcgatgctgatggcaacggcaccatcgatttcccagagtttctcaaccttatggctcgcaagatgaaggacaccgactctgaggaagagctcaaggaggccttccgtgtgtttgacaaggaccagaacggcttcatctcggccgccgagctccgccatgtcatgacaaatcttggtgagaagctaactgatgaggaggtggacgagatgatccgtgaggctgatgtcgatggtgatggccagatcaactacgaggagtttgtcaaggtcatgatggccaaagttgagctcatggagcaggacaagagagccaaggtgctgtgcctgcacggcttccgcacaagcgggagttttttgaagaaacagatcagcaaatggcacccttccatatttcagcagtttgagatggtcttccctgatggcctcttcccagctggtggaaagtcagagatagagggcatatttccaccaccatacttcgagtggttccagttcaataaggaattcactgaatacacaaatctggacgagtgcatttcatatctatgtgattacatggtgaaaaatgggccttttgatggcctgctcggattctcccagggcgcaacactttcggcccttttgataggctaccaagcacaggtaatttttactcctaaattctgtaatatttgctgtaatacttgtgttctaaattatagaggtagcacaaagtacaacaaacagaccaccttttaccatgcaataaagctcttatttagggcaagttgctgagcaatcatccaccaattaagttcatggtctcaatatctgggagcaagttcagagacccaatcatctgtgatgtcgcttacaaagacccgatcaaggtgaaatcagtgcacttcattggagaaaaggactggctcaaggtaccttccgaggagctggcttctgcctttgatgagcctctcatcataaggcatcctcagggtcacactgtccctaggcttgacgacgtgtctgtgaaacagctttctgaatggagctcacacgtcctggaagacctcaagagtgcagatgttcctgaggccttagattcaggcaaaccatctgataaggaggctgctggtgcggaattcacagaaaacctggtgaaagcttgaggcatgctcactagtcacttcagccttgttcgattatttctatctcacatggattgacatcgaaacgaacaatcccttccatggcatggctgcatctgggacttgtaccgtttttactatgatctgagtagtgcgtggaacttgtttgatcgcgtgtgtattgcatttggcaaagcaataaatcgttatttagagctacaactgaaataaatggatccaaacaactttttttttttgcgagcgaagtttcaccaaccaacaaatactctattctagaatgctatggagaaaattgaaccaatgaatatgaatagctcaacaccatattcagtgtttcactacaaacaaccagccttctgttctgtttccatctacctcttcattcaccccagaccatcattagcaggtctttgtctagcgaagcctataatatgtacactgggcacaaaacttgtcctttggaacgaacaagagctatatgtacagcgaaactgacaatgtattcctcatctcgcaactgtttcatggcgaggagcttctgtcctggacctcatcatcacgcgcccaaacgacgtccttcagctccgtggacagagttttgtagaactgtggaggagggtagatgtgagtttggatactgaattatt

SEQ ID NO: 21491 - DNA, 172 bp, Zea Mays
atatggaatgcgcgaataatcaaaagaaaagtttgagttaaccgtcttttgtttgtcgtggtcgtcgtccttttgggaagaagaggactcatcgctgtcgtagtagacgatctccttgatgcatcttgtcttcttcttcttcccatcttttcgcttgtggcccgagcccgag

SEQ ID NO: 21492 - DNA, 965 bp, Zea Mays
atatatatttagtgacccatatagaagcccattagttcagcacagcacatcttcctcgcagcgccggcgctccatcttccgctccctcccccaccttcgatcggcacgcaggctcggcgtcgtcgtcagcggttcctcctcccgcctctcgccagtagcctcgcgccctcgccgactggcgaccctgccttgaaggggctggcaagatgatcggcgtagggaaggcgaagcagtacgccaacgtccttgacaagcccctcagccgtggcaggcaggaggtcagtttgagtgcatttgcattcttgttctctgagttggttcagtacaaccagactcaagttgacaacattactgagctggaacggaggctggaggatgctggttatgctgttggtgcaagggtgcttgaactactctgtcacagggagaagggaaatagacgagagacacgacttctgggcattttatcattcatccacagtactgtttggaaagtgttgtttggaaaggtggctgactcacttgaaaagggaacagaacacgaggatgaatacatgatcagtgaaaaggagcttcttgttaaccgtttcatttctgtgccaaaagacatgggagcattcaactgtggagcttttgttgcgggcattgtaaagggtgtattagataatgccggctttcctgccgtagttactgcacattttgtgccaattgaaggccagcaaaggccaagaacgacaatcctgataaagtttgctgaagaggtattacacagagaagcaagactgggctgagtttttatgtatgtacacaaaacctttgactagcctatttgtaaggtgagatcgcaggtgcttcatcagtcttattgaaatccgaccgaaactgctgtattaatgcttttccttgcattcaccttgtattaaaggaatccttcatcttttgatttttcgtattttgtagcctgg

SEQ ID NO: 21493 - DNA, 3086 bp, Zea Mays
cttccccttcgtttattgctcttctccggtccttctccgcaacccctggccctgtcaagcagacgcagggtgacaccaggcagcagcccacctccacgcgaacacgccgcaccacaccatcaccggcaccgcagcacggcagccagtcaccaggactccaggagtgatctttgatccccaccaggccgccacgctactgtcggtaaggccagggaccctgctgcatctgccggctgctcctctccccgcccccggttccatgagaggtcggcggtttcgataacacacaccaactgctccctccactccttccccctgccttcagcccttcccgcaccactcccaactcgtaaacgctgtgcgccaacgccgtcgcccttccggatccgtcgtccttccgccggcgccgtgatggacccaagcgattccaactccgccgcaggaggaaagacacaaaatgtttcagtaccgcctgttgaaggtgtagctggaggaggaactagctatggatgggtggatggaggtttgcggggtacaaatattggtgctggtgtgattgatcctacaaaagtacactcagatgatcttttgcacgtctggtctatgcccagcacagcaaatgttagccagcaagaagcgcctcggcctctagagaaagtcaaccttttggcagcaagaaatgaaagggaaagttttcaaattgctttacgcccaaaggtttcatgggcaacttcaggtattgcagggtctgtgcagatacaatgcaccgatctctgctcctcctcaggagacaggttagtcgttggtcagtccataactttgcgacgtgtggtgcctatcttaggtgtaccagatgcacttgttcctattgatccactcagtcctcaaataagtattcaaccaggggagacagctgcagtttgggtatcagtaaatgttccatgtgggcaaccgcctggtttatatgagggtgaaatattcattactgcagttaagacagaattagattccagaacagaatctctaccaaaatctgaaaagtgtaggctatacagagaattaagaagttgtcttgacctcactggacccagagactactcgtcaccagaggaaatggtacaaagactaacatcagcttctactgtactaaggagggtgttggataatccagcactccaggactgtcaagagaataatggatttggagacatgatggatgaagatgttataaacaatatttcagttcgcttgaagttaagccttactgtttgggacttcactctcccagtgacaccttctttacctgctgtttttggtgtatcctggcaatattcctttttactgtgttctatttccatttctgtgctgtgcaactgttatgggactgggtgcaatgggctgcgcttaatgggcctgcttggcccagcagaactggcagcaacagaaggcagtgttgggattgctgctgccctagccaaaccagcagcagggacacccgatcatccgaaggctaatgaatattactctgacccaagattagcagcatatgctgtaccctatgcacctatcctatcgtgtacggatgctgcaaaaaattccctgaggagagaggttgaaatcttaaaatcgaagcctcattggtccaaagcttacttctatttgtgggatgagccattaaatgtggaacagtatgacatgatatgcaacatctctaatgagctacggtcatatgcacctgatgtgcgaattttgacaacttactattgtggtccaagtggctctgaactggctccctctacatttgaagcttttgcaaaagttccaaatgttctgcgtccgcacacgcaaatcttttgcacaagtgaatgggttcttggcacaagagaagacctagtgaaggatattgttgctgaattacggcctgatcttggtgaggagtggtggacatatgtttgtatgggtccttctgatcctcaaccaaactggcaccttgggatgcgtggaacccagcaccgggcagtgatgtggcgagtgtggaaggaaggtgggacaggatttctttattggggttccaactgctatgagaaggctatgatcccaagtgctgagatctgtttccgacgcggccttcctcctggcgacggtgtcctgttttaccctggtgaagtgttttcttcgtcacatgaaccagttgcttccacccggctagagcgcattctcagtggcatgcaggacatcgaatacctgaagctttattcttcacggtatgggagggaggaaggcctggcccttatagagaagactggcatgtaccttggaccggatcgatatacgctggatcatggaccggtagatgtgatgaggggtgaggtgtaccgcacctgcaggtcttagtgtagcaatgcctgccagatgctgtccttccagtctagggcgtctgttgtattatatatggtggtatgtgatctatgtagcgaattaatctacccttggtgatcgatcagatcatcaaacctggactaaactagtcctggtgcatcttttgaatctggctcgagagttgcatcaagtcgggagaaaaaaaacccaagagatctggccaagagatggagcgacccaggtccggctctggtacaaggcccagttagctaccggaagtgggccctatctgctgcaacaggattgagacgagattggcattgtcctctcgattccatgacgctgtgcccgcatacagctgaagctgaaatattctcctattagctgttaccttccatttcctttctgcgatttgcaccgcaggttacaccctccaaaggcgcattcgtttctaccgtgtgccgtgacgaggattcccgtctcagcaacggacgctgccgccgcgatgccctgtctctttcgaggtcggtagcgccatggcctaacgcggagctgtgtttggttggaagggaataatgcatgcgatgcatggtgaggaaggatgagtctatcccgagctctgtttggtccagagacatgaaaattaggtccagactgttaagtaaccctagttagggttatgtgggcaaatacctgctttgtccctg

SEQ ID NO: 21494 - DNA, 2822 bp, Zea Mays
ccggcgtaaatcagaagggtccaggcgtccagccgggcaaccgccaaccggccgaggactcgaagcacaagcaccacactaccacagtcatcacggattcatggcagcacgtgagtacatggcgagggcaccccacaaccacaccggacgcggcacgctggcgggtggttggcaaaagccaaagggtaggctttcatcgcctccgcgtcgcgtcgcgtcgcgtcgctttggatgcgactgacagcacgagtctcccgagacctgagtcctgagatgagaagaaagcactaaagcagagtgggatgccgcggtgaggactgaggactgaggactggacgcgcggcgcgggtgcgcggcttcggagtccgctagactacaccacgcgggttcggcaaatggggatggcggcggacgcgacgacggccatgaccatcgacttcctccgcgcgcgcctcctctccgagcgctccgtctcccgcgccgccaaggagcgggccgaccaccttgccaagcgggttgtggagctggaggagcagctccggacggtgacggcgcagcggcgcaaggcggagcgggcggccgcggaggtgcttgccatcctcgactcccagggcttcggccgcctctccgacgccgcggacgattcaggctcagagtacgaggccgacacgggcgatcccaatgccgtcgagagggacggaggcggcgggaatgcagcggaggacgcgctgtcggggtcggagctgggagccccggcggcggcggctgctgcctctgctgctcaggccgggggcttgtcgtggaggggccgcgccgcgagccccgaatgcgagaggcggcggccgcagcaccaacagcacaagggcaggcagctaaggcagaggcacggccacggccacggccacaggaggggttacttttactgccgcgccgcggattcgtcgcccaagtaccacccagggcagtcttgccggaagatcaagaggaaggagctgagatctcagacagaagaagaggagggcaacgacaatgcagtggagagcacggaggacgggcaggagagatcagattgtactgtttgcactgatcaaccggctgatgttgatggcgaggtgaaccaagatgggcatggctcttctagtaatggaagaggggaggatcgtgatgatcttgccatggtatatgagaaggatggggagatggagagggtactcgagaagcaggctgagctaattggacagttcgaggctcaagaaaatgctcagagggagtgggaggagaaattcagcctgagccgggattcagttatggataatgttaacttattaaacaacaagctaaatcaggctgaaaatgcttgtgggaggagggaaactgctcgggttgtagataaagaagtggtttgtgaacaggcaagatcaagtgacaataatttccattgcatcaacgacccctctgaatgtctaccaaatggccctgtttcagaattgccccaaaatgtagccaaagatagtgttactgaacaccggaaatttgatgggtttggtcatgattgtgtagtgactgctgcagcagtaatttcaagccacggagaactgcaggttaggaaggatgtgctgacaactaaaagctatcctgaaggaagtggcaataatcttgggaaatcagctctaccaccacaaggaagctgtggtagcagactaaatgcaggacatagaaatggtcaaggagatgaaagttcagacagtggttcaagctaccatgtgaatgctcgatcttctgagcaatacataaacacatcatcagttgggagccagctaagtgatactcctaaaagcgaagtctcagaatggagctcctcttgctttcataaccataccgataaccagcttgatacacaacttcatcaatcatcaaacaaagatgtaggaggggtgctagaggcccttcgacgtgccaagatgtctctcagagcaaagctgagctggccaagtctagccagcaagaacatattggcacttgaagcaccggatgatttgccagtcaatggcatggaactttcactctgcaggacagcccatgtcagtcaggaaatattcgcactaccaacaccaacagactaccttaacaaggtattaccgcatgatgatgtgaaggtaccaataggtcctgctggtttgtttcgtttgccaatagattcatttcccagagatgagatgaccacaagggatggctatggttcatggttcagtttgacctcggtgagtccaccctacgtgtcgccaagctatcatgctgatcatattatgccagctctatccttgtctcagtatggttctgggttgtcactaaatccatactatgatcctcatagttccatgttgctatccatgcccactgctggtgggcgtagcgtccctgtgtcagatttcagaataggggatggttccttcctccgagaagttccacggcctgacaattattaggggatgccttctagagacaactgcacacttccagtatggtcatggtcacgggaactctcataatgttcaaatgtatcttcatgctttgtaaaaactatcaaaaagttcaattgtacctgttcatgcttggaatctcacgtctgtgatggtgttggatgccatttgctgcatcgattctgcattacgttaggtactgatgtataccatgtagtgttgcaaactaagaacatgttctgtttgtaagcagtatcggtgtttgaaatattatttcgtccgtccgatgtaagttgtgataaggtactaggatggtaataaagctaatttttttaactgaaa

SEQ ID NO: 21495 - DNA, 987 bp, Zea Mays
gcaaggagtattcctacagttcttgatccatcattagctcccgaaggacaccatatacttcatatatttactactgcaggcatagaagcctgggagggtatttctaggaaggaatatgaagagaaaaaagagatggtggccaacgagattataagaaggcttgaaaagaagttgtttcctggtcttcaagattcaatagtcctcaaagaggtaggctcaccaaagactcaccggagatttcttgctcgaaatgatggtacatatggaccaatgccgcggggtaaacccaagggcttacttgctatgcctttcaatactacttcaatagatggcctttactgtgttggtgacagctgttttcccggacaaggtgtaatagctgtagcattctcagggatcatgtgcgctcaccgagtcgctgcagatattggactagagcaaaaatctccggctctagatgctggtcttcttgggctactcagatggttgagaacacttgcatagaacgatatcagacagttgaaaatggacttcatttttccccccggaaggctgatgtttcaccagagttaggattctgcacgatctgttatgatgatcttgttatctgtaccatctcagcatcgatttcttgaaactcctaacggaaaaaaaaaggaatacgaatgggtgtacaggtttcagattttgaattatatgattacggtgtcagggccatggcatattggtatgcatataaagactacatcatagagtaaccagatggtgtacatcatctgattaccgcaataagcagagcactacatttgggagcaatgtaaatcatgttacctaggattttgaaagttctgttttgagatacccttcaactttctgaatatgcataagcttcattgttcgtaaggcatgatgaaacctagaatgacacatcgtctaagaaaatttaaaactatgatgaaatagtttcacatattgcctagttttatc

SEQ ID NO: 21496 - DNA, 2442 bp, Zea Mays
tccttcctgatacattcgtgtctcccatcgccaggtagatccctttcctcacgccacgccgagagagaaaagatagagggagaggcaagagtcgcatcgcagacccagaccacgccgccgccacctccgccgccacttccgccggtgatcgagtcgcgtcggcgctaccttcaagctagaagacaataagcatcggcagacatgttcggctccaccaaccgctcacagacagcagcaccaacttttggacaaccacaatttgctaatcaagctggaggaaccagaataaaaccttattctcaaacaccagatgttgacagtgctactagtggtactcagcctgctgcaaaacttgattccatatcagcaatgcctgagtacaaagagaagagtcatgaagaattgaggtgggaagactaccagcgtggagacaagggtggaccgaacacttctggaactcaaacattggcacctagctttccatcaccaatacaacataacacttttgcttcgacaagtaatccgttctcaacgaacccattttcaacaaacaacccgtttgctcctaagcccactacaactactagttcaccattcaacacctcatttaacaatgcatcagttgcaagttcgagtctattcacatcatcccctggtaccacaatgtttgggcaaccaggtgtttctacacttccagctccagcaagtaattcaccatcattatttggaaatatcaatcctgctcctgctacatcgtcaatatttgccacgtcagtgacgaataatccaagtccattcggcactggcacatcattggctaacactcaatcagccccactattttcctcagcatttgctcaaccgacatcaagtacaccggctttctcctctgggagcctatttggctcaactaatcctggcagtctgtttaccagcagcggtccttcacttttttcaacaccaacatttcaaccatctgcccctgctcagagttcgaacatgttctccttccaacccccaattcaaccagcagcttctaccggtggactcccttttttccccaacacaaatcaggccttgacgggacagccaacttctagcctgtccagtatggtcatgcagtctgctcttgtttcaaatccatttgggatgcttccagcaatgcctcagatgtccatcgggaatggtggatcttcaccttcagttcaatatggaatatcaagtttgccggttgcggagaagcctcttccaagtagatcattgtccatggcggttcctaggcatttgtcacagagaaggataaaactgctgccaagaaaatataatccaatatctgatggcaaggttccattctttgctgatgatgaagaatctccagcaacaccaaaggcagatgcttttttcatccctagagagaacccaaggaacctggtaattcgtccaattgagcagtggtcttcacggagagaaactggccggcaatatactgcaaagaatgttactgattcgaacaaatatgaagatgcttccattgaaagtgagcgtggtaagtctgccatgtcaccaagcagcaggccacctgcagtggaaaatgacaaacagcatgaggccagggccatggctcaacatgcgaatggaaatggtacttcagttgagaggctgttgcctaagcttccacgtgcagattacttcacagagcctagtatagaggagcttgcggccaaagaacgtgcggagccaggctactgcggtcgagtgagggacttcgttgtgggtcgacatgactacggcagcatcaaatttttcggggagacggacgtgaggtgcctcgatctggagtcaattgtggagtttaacgaccgggaggttattgtgtacaaggacgatagcaagaagccccctgtgggcgaggggctgaacaaggctgcagaggtgactctactgaacatcaagtgcgtaaacaagaagaccggggagccgtgccagggggcaagagtggagaggtacagggagatgctggtgaagaaggcggaggagcagggcgcagagtttgtgtccttcgacgctgtcaagggagagtggaagttcagggtgaagcacttcagcgcctacgggctttggtgaaatcctggggagttaagtagtttgtttgttctgatggaacaacgctttacgctcttgtcaattaccatgcttggatctgttgtgctgcttctgtacaatgttgctgctgttaaaatgcttgcaaattgcactgctctgctgctgaaaacaggagcagcagtagaaactaccgcaacaggagggcgtgctacctgctactgttatgtattattattattatactatattctaagtataataagacttagttttttaaatacatgaatattactttatgcacttagatatatgctatgtatggagagaaaataattatat

SEQ ID NO: 21497 - DNA, 536 bp, Zea Mays
gccctctatgcacctcgcggacaatccgccacccatacgcggatggttcacgcgcctgtagagaagactgggtctctttgcacagttgcggacggtcaagtcgctcatcgcagatggtctgtcctcacgaagagaagaccctgaggtctcgcgtgtcgtacaccgaccctaggttttgtttggtgattggccccaaaagcaagccaacacactttttgacgactccgctggggacgaagctgtctagatcaaccaaaaatcaacctccaaatggccggttctaaggatcacaccgaggtctccaccagcaacatcatcaagccgaccctagaggaactatttgttaatgatcaacaacgctttgaggatatcatgaagcaaaatgagaaagaagtgttgcaacaactcgtgaatgacgtaagaaggaaaaggagaagtacttatcacaattcacgctggatcgccaccagaagatcatccgccaaggggtgatcgagatagcatctctccaaccttcgcctcaggcccccactgta

SEQ ID NO: 21498 - DNA, 1851 bp, Zea Mays
ttttggattgaactgctattgtgttgaagaaaggtagcgatgcatggtggtatatgacaactgaggaacttcttccagatagatatcgggacaaagcatctgaatatcgcaagggaactgatacaatggatgtttggtttgactctggctcttcatgggcagctgttttagcaaaaagggacggtcttaattttcctgcggatatttatcttgaaggttcagatcaacatcgtggatggttccagagctcattgttgactagcattgctacaacagggaaggctccctactccagtgttattacacatggatttgtactggatgaaaagggtttcaaaatgagtaaatcaattggtaatgtagtggacccagagaaaatcattgttggtggcaaaaaccatagggaagaacctggctatggagcagatgttctccgtctatgggtttctagtgttgattacactacagatgtgttgattggcccacaaatcttgcgccagatgtctgacatgtatagaaaactacgaggcacgatgcgatttcttttgtcgaatctccatgattggaagccggataattctgtgccgtacaatgatctgccaaaaatcgacaagtatgcacttttccatttggagactgtcatgacttccatgaaggatagttatgaaagttatcaattctataaagtataccagatccttcaaagatttgctactgttggtttgtccaatttctatttggatgttgcaaaggatcgcctttatgttggaggccgagtcagcttcacaaggaaaagttgtcagactgtgctcatggcacatctgctctaccttgttagggccatttccccgattatgcctcacctagctgaggatgtctggcagaacctaccctttcaatacaccttgcaggatggatcccttgcaaactttgtttttgatctgaaatggccagaaaagaatgaagaatggctctcggccccgaaggatgatgttgatttcctgggtgttatcctggagttgaggtcagaggtcaacaaaattttggagaatgctcgcactggaaagttgattggttctagcttagatgcaaaggtttatctccataccgaaagttcagatacggtattaaagctaaaggagctatcttctgcatccaatgatgcagacgctctgcatcgcctgtttatcacatctcaggtcgatattcttccaatcctaaatgaagagattacatcatctgtaccatacacaggaaagttcagtaacccacgcactggagtcatatggattggtgtgactcgtgcggatggtgcaaaatgtgagaggtgttggaattacacacaggacgttggatctttccatgaccatcctactctctgcgttcggtgctatggtgtcattgagttgcagacacaacctgcggccgcagctgtcagttgaaaggagtgatgttaacgtatcctatcgaaccatctaattttgaggatcattggtggaattcattcttttggagagctttcacgctaccatgtggcggtagcctgggactccagcttgaatcaagttttgcatgcagcaagctgtactttagattcttcatacataggtcacgagagttgtttggagcttgggtcatcgcttactttcccatactactggggggcttatttggaacagttttttacacaaaactcctgacctgtaaatcaattttggaaaaccgtatccggtggtcgatccatgtattaatagagtaataatgttactatgttcatccaaatctcaaagacgtgatggttgtgttgaaaaaacagcttgaatcacttgcttatgctcaactgttttttct

SEQ ID NO: 21499 - DNA, 3888 bp, Zea Mays
ccgttggccattgacggacaaacgcgttctccctgaaaagcatgctgtgaggctcgatatcgctgcggctgtcgtgctcccgcagcgcacaggaaggtgagtgaggaggaagaaaccgcatgcaaggggacgggagtacgggaccggcgggcggaagacgaacgggattccaaaaaaacgacttgtcgtggcggagcggaatccacaatagcgacgagccgtcggggtctgccggcctggatgcaaaccagtctcgtcgtcacggactcccggaataaatactccctcctgcgtatagctcttccctgtcctctcatacactttctctgctcgcgcaaagctcttcctcgtgtaaagacgacgagaaatttatgtactctcgcaccacctcacaaacagacctgatcctctccgtttctttttgtttcccttttccctcttccgcgattccgtcgcccggttcaatttggacgcgcgcggcgtagggcgcccggcggaaaccgccgaattcccctcttcctcgcgcgtgctcagcgattcgagaaaaaaatactaactgtcttactaggagcctagagtgtccgaatttttgccattgcttgtcctgacttgccaacctacaatgggatggggaaacactattaccagacgcctcaaggttttctctatggccctgtttatctacttcgactataaggctgttcagaagagagttcaatgggttagcactggtaaaaagagtgctatatggaagaaaacacatgagcgaaatgctcgccgtgtcctcaacctgatgatagagttagaaggtttatgggtgaaactgggccaatatttatccacaagagcagatgtacttcctgaaccctacataaatgtcctcaagcagttgcaggattcgcttcctccacgaccttttgaagaggttcgtgaaacgatagagaaagaacttggagaacctatgagtgatctatttgctgattttgtcctagaccctctcgcaaccgcatcaatagcacaagttcatcgtgcaactctggcagatggcagagaagtagttgtcaaaattcagcatgatggtgtgaaggagatcatattagaggatctgaagaatgcaaaatcattgattgaatggatagcgtgggcagagcctcagtatgattttaatccgatgattgatgaatggtgcaaggaggctccaaaggaacttgatttcaaccatgaagcagggctgtctccaggaatcttagtcgcaaaagtgactgtgggagtggcagtgtttccagtactgttgatgtactcattccagaagttattcagtcaactggcaaggttctaattttggaatatatggatgggattcgtttaaatgataatgattcattggaagcatatggtgttgacaagcaaaaactggtcgaagagataacccgtgcatacgctcatcaaatatacattgatggcttctttaacggcgaccctcatcctggcaattttcttgtgagcaaggaacctccacataaaccgattctccttgattttgggctcactaagcgcatatctgaatctatgaggcaggcactagcaaaaatgtttttgtcatgtgcagagggagatcacgtggcactgctgtcagcattttcagagatggggcttaaactgcgggttgacatgcctcagcaggctatggatattgccacagtattctttcgtcagtcaaccacagcaagtgaagcaaaggagaacataaaaacacttaatgaccaaagagagagaaatgtcaaagctcttcaagaaaagatgaaattgaacaagaaggaggttcaacgctttaatcctgttgatgctttccccggggatgccataatatttatgagggtcttgaatctcctcagaggtctttcagcttcactaaatgttaggatagtttatctggacatcatgaggccatttgctgaatcaactttgttagggagtttgacacacggacaaatacctaacagtcagtggatttttgactcacctgctaactctgatgtggagtctaaactgagaaattatctgcttgagttgggaagcgacaaaattttaggaatacaagtctgcgcatataaagatggaaaggtcataatagatactgctgctggtatgctggggaagtatgatccccgacctgttcaacctgattctctttttcctgttttctcagtgactaagggtatcactgctgggatggtacattggcttgtggacaaagggaagctgaagtacgaggaaacagttgccaacatatggccgaattttggaactaacggaaaggagttaataaaggtccatcatcttctaaatcacacatccggtttgcacaatgcactgggtgatgtggtaaagaatgatcctttgttggtatgtgactgggaggagacactaaaccagattacgaagagtacacctgagaccgaacctggttcagcacaaatttaccattacctctccttcggttggctgtgtgggggagtcatagagcatgcatctgggaagaagtttcaagagattctagaagaggctattgttcgtcctcttcacattgagggggagttgtatgttggcattccaccaggtgtcgagtctcggctggcagcgctgacagttgacaccgaggagctccagaagctatcaggaatcagggcaggtgcagatgtgccagcagctctgctgaacaacatcgcgcagatggcgtccggtgtgcccgctattttcaacacgctaaacgtccgtcgggccatcatccctgccgccaacggccactgctctgcccgcgcgctcgctcgatactacgcggcgctagcggccggcggttctgttcccccgccgcactcttcgggcgccatgccgcccctcggcagccacgtgcacacccccaagttcccgaccgcgccgctcaagaagaagaagaagggcgccggaaagaagaagggcgccggcggcggctccatgggagacctcaaggtccaggatataagcggcggcagcagcgacaggaacgggtactgccagctgcgcaccagcgacgccgacagcgaggcggggagcggcagcggcggaggcggcaggatgttcggcagcgacaggatcctcgacgcgttcatgggcgtcggcgagtacgagggcatggcgcaccgggacggcaagttcgggctcgggttcaggaggtacgacgacgccagcagcggcagcggcaggctgaggtgctttgggcactccgggatgggcggctcgaccgggttctgcgacgtggagaacggcttcgccatcgcggtgacggtgaacaagctgtctctgggcagcgtcacgcgcggcgtcgtccggctcgtcctcgaggagctgggcctgcccgtgccggacgagtactcggccaccggggagaaggggcctgacatgatgctcaacctgacgacaacgacgacgactacgccgccgcaactgagatgacgacggcgaaactgagattatcaggttgggttcgtaataatctgtggaacaagatatatagcgagcagaaggaaggttggggtacagggatttggtggacagtatatatacgcgtgccattttgattttgacgtggcatgtaaaactcggcaaattctggtatattacgaagctgggtgctgggaattgtggccagcagtacaagaaatggacatgctagtttgttgacctgtgttttttttatggcggaactttttgttttgtcttctgggcttcactaggtctatgctcgtgcgttgccacggaaaacacatgaaatcgtaatatgtgtggtatcgtaaatcaaacaatatatcatgatatgacttctcgtcctaaattaggtatatataaaat

SEQ ID NO: 21500 - DNA, 2152 bp, Zea Mays
cccgtttaacggcggcacgacaagcaagcggtcacgtgagagctgatttttctcgcagcgggtagcggtagccctgtccctgacctgatcctgacccgtgcgggcgtgcggctcctcgcggacagctccagactccagagccgcctcttcgccctctcgccatcggcaggctacggtggctgcttccccgagcctgcagatcgggtggtagatctggttggcctagtcgctgtcggatgcagttgccgagctaggtcgcggctgcgcggcggcggtcggggtcttgcgtcgccagatctggataggaaaacgccgcgcacaagctgagctaaattctgttcgattcgagttcttataggggttcttgtggctgcgtgttttgaattttttcccactggttctggggtgccgagaaagggaatcgtggctgactcttgttgccgtcgtcgagccagatctggtcatgctgctaccgtggatgtcttattgcttgatctcctttgttttttaattccttcggttcaagaatagcatcattaccatgagcatacataccagagaaacggagacagattcggaaattttcatttattgctagcttgtagttttggggtcctataatatttttcttggttctcttaattaattgagctagtaaatcaacaaatctgccactacagccgtcacgggcaaacataaaaaaactgaacaacaccaaattgaggcgcctagtccacaaacctgaactgctgaacttaaatgtctggaagccacagtttctgatttctgatggtttgtttttatgctcatttactctttctttcttccaggtagaccaccttgtgttgattcctcgagtcttcacctggtgcttccgtttgcagcttcatttttaactaagtctgtaatttattggctgtttatctgagtgacactacactctctgttttttcttattagatgtcacaagccaaggaagtgaggtacactgcacggtctattacacctcctgctgatagaaatggcacttcaaggtcgcctcctccaaagagacgcagcccttcaaggtcacctccaccaaagagtgcttcacggtccccacgtccaaggagtccaaagagacgcagcacttcaaggtctcctcctaggagacgtggtagatcaaggtcaagggataggagtcggtccaggagcccagatgatagaaatccagggaataacctttatgtaactggattgtctactcgtgtaacggaagatgatcttgagaagttctttagtaaagaaggaaaggttaagaactgtcatgttgttcttgatcctaggacaaaagaatcccgtggctttgccttcgtgactatggatactcttgaaggtgcaagacgctccatcaagtatctgcaccgcactgtacttgaaggtcgcctggtcactgtagagaaggctaaaagaactcgtgaaaggacccctactcctggaaaatactgtggtcgaagaggaggatctcaaaggagcccatcaccttaccgccctcgcagaagggagcgttcgcgctcaagggaacgcagaagggagcgttcgcgttcaagggatcgaagggagcggtctcgctcaagggatcgaagggagcggtctcgctcaagggaacgccgaagggagcggtctcgttcaagggaccgcagggagaggtctcgctcaagggaccgccggagggagcgctcacgctcaagggaccgcagaagggagcgctcacgctcaagggaccggaggggcagttcaccccatggcagaaggcatagagatcggtccaggtcacccaccagcaatgggaaccataaggcagactaggaagcgcttttatggacttgtcgttgattgcgtgaacaaaggaacttgtaacactacctataaactggtcagactgagacggttagcatggatttttagtagtgttgctgtattttgttgtttcatacaagtactctattctgttagctttcggatcgaaatgtcggatgatgatggttgttattgttctggaaatcgtagacatgtcctccagaatacctatgaaactatggcatactcgtgtgtttgcttaaggttgctgtggtatgttctgatcttaagattgacacgttgcacggtagat

SEQ ID NO: 21501 - DNA, 4647 bp, Zea Mays
acgtccaggaaaaatatcgaaacaaggacgaaaaacacgaagaattacggaagagcaccccatcttcggtttctttcctccggacttcttcctgcttgcggcgtccgccaattcccttccctacccaaaccctagagcaaagctgaatggccctcgccacgagctcgcgagagactctgcgccgccgccggtgactgctgatccgcccgccgccgccgcgcccggtgctttgtcacgcaggaggcgacggtatggcgtcgaggcagcacaatgcacagttccacaaatccaagacgctcgacaacaaatacatgctcggagatgagatagggaagggggcgtacggccgcgtatacaaggggcttgacctggagaatggcgatttcgtggccatcaaacaggtctcgctggagaacattccgcaggaggatctcaacataataatgaatcttaatcacaaaaatattgtcaagtatctgggatcactgaagacaaagagccacctccatattattttagagtatgtggagaatggctcacttgccaatattatcaagccaaacaaattcggacctattcctgaatctttggtggctctttacattgctcaggtgttggaaggtcttgtttatctgcatgaacaaggtgtcattcatagagatatcaagggcgcaaatatactgagtaccaaagagggtcttgtcaaacttgctgattttggagttgccactaaattgactgaagctgacatcaacactcattctgtggtcggcactccatactggatggcgcctgaggtcattgaaatgtccggcgtttgcgctgcttctgatatctggagtgtgggttgcactgtaattgagttgctgacatgtgccccgccatattatgatctccaacctatgcctgcactgttccgtattgttcaggatgtgcatccaccaataccagaaggactgtcacctgaggttactgattttctccaacagtgtttccaaaaggatgcgatgcaaaggcctgatgcaaaagcattattgatgcatacatggttgcaaaacttaagacgagctttgcctggttctcttcggcaacctactccattgaggaacatcgatggtgatgatgaaggctcaagaggtgataatagcttgggtttttgcgacacaccaggagatattcaaacaactattacttctaatgttgaccaggagaatgggagtaaagaaccaattatggactctactgtacaaagtaaatctgaagagcttcatgatggaaatttaaaacttactgagggcagtagttcaaacagtgtggcgcttatgaaagataatgtggtccttaataaaggtccgacactagttttacatgagaagttaccggtggaatcttcatctggaggtgctgatttgaatggcaaagtaatggcacatgaactattgcaaggtggtccgccaggtaaggtagagctggagaataaagaaagttcaagtagtgatgtgttctcctttcaggctggaagacagaatattggcttccaaaaggtggttgaaccttcagttgttgaggggccaaaacagcttagtagatttagtgacaaacctgaagatgcctctttggaagacttatttccaccaaatgataaatggggagataatggggctgaaccttcaacatcaactactgtccaagaacttaaatataatggtgtacaaaatgcgttcttgaaggggctcaatgctagggtggagaagcaaaaagaaaatgataacgagtctatgaatggtggaaagctaattgaatttgccatgcaactagaaaatattgacgcgttgggttttggtgaacatattcctggagagagtcttttccctgtgcagtctgtggaatacaacaaaatagtagcacaactgagaccaggggaaagtgaagatgtaatactgttggcatgccaaaagcttctatcaattttcagttaccgccctgagcaaaaacatatttatatggcacaaaatggtttcctcccgctgatggaactccttgaaattcccagaaatcgtatattatgctctgttctgcagcttatcaacaacattgtaaaagatagtacatgcttcctagaaaatgcttgccttgttggccttattccagtggtgatgaattttgcagagccaaatcgtccaaaggatgttcgggtgcaagcatccttgtttcttcagcagctttgtcaagccagcaccctgacattgcaaatgtttgttgcatgccaagggatccctgttttggtaagctttatggagcctgactatgcaaaatacagggatatggttcatcttgcaattgacggcatttggcaggtcttcaagctccagcattcaactccaagaaacaacttctgtcgtatagcggcaaaaaatgggatgcttcctaggctggtgaatacactatatagcctgaacgaagcaacaagatttgcttcagtctcagggtcaggtgcttcagtaacacagaatggctcaaccccccgacgaagatctggccaattagacccttcagttcttgaaagttgcaaggcaaggctggatcatcatcattcatctggttctctgcaatctctacaaacagacgcagataagcaccatatattaatggactcgtcatctcctaggtttagtgataaaaccggcagtaacttggagaggaatgataacgacttggttattcggccacagaggcttagtgtttctgctggaaggacatctacagacagatcaccaaagcatgtagaactagtttcaaatggtcatattagcggtcaaaatgaccaggtccgacctctactgagtttgttggagaaagaaccaccttctcgacatatatctggacaacttgattacgtttgccacataactggattggaaaggcatgaaaccattttgccactattacatacatcgacagaaaggaaaacaaatggtgaacttgacttaatgatggattttgctgaggtctctagacatggaagagagaatggccatctggactcgagtataaaagtttcaaatagagttcatagtatgaaatatgcaccttcgacaagtgcctctaatgaaggagcatcaacttctggagctgcatcgcaaacagcatctggtgtgttatctggatcaggagtgctcaatttaagaccagggagtacaacatcatcaggcccattagctcagatgttctcttccatgagcgcagatgtggcacgcgaatatcttgaaaaagtagctgatcttcttttggagtttgcacaggcagacactgtggtaagatctctgatggccagccaaagccttcttacaaggctttttcagatgtttaacaagatagaacctcctattcttcttaagattcttaggtgcattaatcatttgtcgggtgatcctaattgtctcgagacacttcaacgcacagatgcaatcaaacatctgataccgattcttgagctttgtgatggacctctggtttttcaaatacatagtgaggtcctcaatgctttgttcaacctttgcaagattaataaaagaagacaggaacaggcagctgaaaatggaatcattcctcacttgatgaattttgtcatgtcagactcacctctgaggcagtatgccctgcctttgctgtgtgatatggctcatgcttctcgcaactctagagagcagttgagggctcatggaggactagatgcgtacttaaatctgttggaggatgatgtatgggcgtgcacggcattagattctattgctgtttgtttggctcacgataatgatcatagaaaagtggagcaggcactgttgaaaaaagaggcaattcaaaagttagtgaagttcttccaagactgcccagaacagtattttgtccatatattggactctttcttgaagataataatgaaatcttctaggctaaacacagcaatggccaccaatggcttgacagcattgctcattgcaaggcttaaccatcgagacgctattgcccgcctgactctgctgaaactcataaaggttgtctatgagcatcatcctcgaccaaaacaggtcatagtagagaatgacctccctcagaagctacaaaacctgattgaagaacgcaggggtggacaacggggcggccatcaagtgttggtcaaacaaatggccacctcattgctgaaggcgctgcacatcaacacagtattgtgattttgatgggtcatgtgttttcctctcaagttagtgtttacgttttcgctagaggaagaaaaggggcgtccttctctttttgcctccttttctgctgtggtggcttctcacgagcaccagactcatttgttgtacctgatccctccttttttgggagaaaggttcaacgttttggtgcaggataaaatgggcttgctatcctccagtgctgtgtatatctagcgtatgttagtgaagaaattgcaaattagacaatctaattaaaaaaatttaaaccatattgacattttgttccgtgtgttagtagattttccctagcctgacccacttgcaccaagcaaaatggttgatatcgtggacgtctttaacaggatgcaagaaagcatcacatagttcttttgatgcattacattac

SEQ ID NO: 21502 - DNA, 699 bp, Zea Mays
ctcggtgcttctcggcactcggcagactggtaaatggaaacacacccagacaccctacagtttcagttcgattaacaaacgcaatacgccaatgaggcaactcatggcgggtcccccaggcttggccatggcccctctacaacttccctctctctctctctctctcctgagaggcggatcggcgacagaggggagacgctcagtctacacacatcggcaaagggcactcgagtgggtggagtgtggcgaggagggggacgacggcgccattgcgacggagcgaggggacaggtcacaggttctccatattgcaactactgctcaggagaagatgaagtcgtggtggaggatttccaggagttccaagagtacgatgagttctaggcgtggattagcggtaaacccccagtcggctgcctgtgaaggccgtgtttagctacgtttcgtttttgcactttgatatatgttaatgactatgtggatgtctcggacatcatgatgtaataaactattaccctcttttatgttattatttgagcactgtgtgatgatgttcggttatgtaactgctgtgtacgtgaattgctgatcctgacacgtacatggtttgcattcggtttgccttctaaaaccgggtgtgacatgtttgccccttggggaggagtgcggtacatttagaaaacctaacgggcgactaca

SEQ ID NO: 21503 - DNA, 2230 bp, Zea Mays
gcactgcgtccttgtgtccgaggaggacgaggaagcaacgttcgtggaccctaagctgcgtggaaggtactgcgtctgctttgatcccctcgacggctcctccaacatcgactgtggcgtctccatcggaacgatctttgggatttacatcatcaaggacaaggacaacgtcactctggaggacgtgctgcaacctggcaagaacatgctcgccgccggatactgcatgtacggcagttcctgcacgctcgttctgagcactggaactggtgtcaatggcttcacgctcgacccttcacttggggagttcatactaacccatccagacatcaagatacctaagaaggggaagatctattcagtcaacgaagggaacgccaagaactgggacgcgcctgttgccaagtttgtggagaagtgcaagtaccccaaagatggctcgccaccaagatctttgagatacattggaagtatggttgctgacgtgcaccgtaccttgctatacggcggtgtgtttttgtaccctgctgacgagaagaacccaaacggaaagctccgtatcctgtacgaagttttccccatgtcgttcctaatggagcaggcaggaggccagtccttcacaggcaaagaacgggctcttgatctgatcccaaccaagatccacgacaggtccccgatattcctcggaagctacgacgacgtggaggagatcaaagcgttgtacgccgagcaggcgaagtcgagctcggcttcatcctaagtgagggtgtaaatcgacttttcctggcttaatttgttgcttacctgattcagacattcgtttccgtttcccttggtgtcgtcgtaagtgtgacattcagtgcaatatgtatagcaactaagggactccgtaaaagttacatgcatctctagcacctaaagcattgcgttataaccaacctaaaaagaggtgatcaggtgtcatagatgatgaaactactgtcgcaggctctgcaaaaatgtattgcgcatagagatccctgcaaaaaaaaaatatggccgtgtcataaattgttcgatacttggaagaccatagtcgatcctgtgtgatgtaaggcctgaaaacgctcgagttggacactgacatggagtgctggattatggcatttcaccaaagctgccctgtttggtttgttcatattcttagaagggctactgcaactcaaggttcaggttcagtgaggtgttccaaacacatctgggtgttgtttggttcaagaaatgtaacgcaaatggtaatggtttacgctatcaaacatgatttaacgttatcaattacccattacgttacaaatatgtgaaccaaacggcaccttggagaggagggaaagatacgacggcccttcttgagtttcttccacagagagggcggcagttcacccactctatgatcagcaaacagcccgctgtgcaaactctcttctgcagtagccgcaagaagagcttgcggcgggtacaaggacacggtttccaaatcgtagccagaaaatctgatccacgttgcctgccaaactgtactgcacacaagccgatcttgccgtgtactcacctgacggttcaagggtccaaacggtcgtgtcatcctccagatcgtcggccgagaaaccactgtcagcaattaggggccataggcggaagtagtcgctgagaaggtcccccttgtcttcgaagttatggtctgcaagtatatatcaatacaagcaaggcatgctactactccatatttctattgccatcagacggaactgtgtgcatacgtgctagcaacatgtgcaaatacaagtcagctatggtgctgccacgaccgatgtgctgctgttcacgggggtccatgcaaacgtgcacagacaccttggaatatttatgacagaaagaaattacaactccagcagccccatatgcacaaaaaagagtatcgtcaggtactacaatgtacaattcaatgcaatcgctacaatatatacgatataacatagaagcttgcataaattattttcacagcttaaactgtaaactactgcagttccagcactaaaatacttccagccagctttaggctatctccagcaatctacccatccccgtacctatattcaaactatagtctgtgaatagtgtggtctaaaataatgcagaacacagtgcttttggtgatcatatgggttaattactggatacagtcttatatcag

SEQ ID NO: 21504 - DNA, 3268 bp, Zea Mays
tacctgcgactgtgatctgactgcaaaacgattctgcggaggaagatgagttgacttgctgaagcccaatgcgacagtgatcttgcgcaatgccaaaatagacatgttcaaaggatcaatgaggcttgcagtggacaagtgggggcggattgaggctgtagagccagccagtttcacggtgaaggaagacaacaacctgtctctaatagagtatgaattggttaatgtggctgagtaactgtccaatccaagcgtttctgccccctttatttcgtgccataagaaggaagtaccatgaatgaacattataaagcctcttgaagcgaagcgagtttatttgctacggtggggtagataaaggtcaaggctgtatggcctgtgttagaactttggataaattaagatgaattgcccttgcatctatgagattgttatccatctttgtactgctcgtgttgctttgatgcaagaaatctgaagcaggaaatgcgtacccagtgctctggacactggcgtctgttgtaattgtgtggctaccccaaaagtgtgcaattaatatctttcgacggggtgtgatttagtactgatttaaactggttttttggtatcaacaatcacaaacggaatgtcgtttggccaagaaaggaaaggaggaccctgtggttggcagtccactaatctgttccctgaatcctaaaaaaagcagtgcttgtgttggcggaggccaggccatgcccccggtttgaggagaggcctcgcaagcatctcaggcgacgcgaggggatcaggggacatgggcggcggcgagcatgaccatgagcccgatgagcctgagcctgccagggacaaggagcacgaacacgatgaggcgtcggtggaggcgctcttcgctgggcagtcgccggcgccgtggtggcggcaggtgacggtgcgttccgtgacggcgagtgtgttcgtgggcgccgtgttcagcttcatgtcgatgaggatggggctgaccatcggcctggtgccgtccttcaacatgtcggcgagcctggtgagcttcttcgtgatcagctcgtggacgcggctgctgggccgctgcggcgtggccacccagcccttcacccgccaggagaacgtggtggtgcagacctgcgtcatcgcctgcgccacgctgtcgctctacggcggcttcacgtccttcctgccggccatgtcgccgcccgtggcgaaatcggccggggccccggggacgggcaacaacgtgtacacgctgcatctcggcaagatgatggcgttcagcttcctcaccggcttcaccagcttgttcatcacgctccccttgaccaaggtctggtgggtggtcaccatctgtcgtctcatctgattccattcatcaacaagctagagaataagaagaagaatgatgatgctgatgtacacgcattgcaatgcaggtcatgatcctggactacaagctgctgttcccatcggggtcggccatagctgggcttgtcaacagcttccacacgccagcgggagcagcaacagcaaaattgcagatagccactctgctgcgatctctaggcgggagcttcagctgggcggtgttccagtggttctacacgggaggcgacggctgcggcttccaggctttccctctcttcggcctcgaggcctacaagaagcgcttctacttcgacttctctccaagcctcgtgggcatcggcatgatctgccctcccatggtcaacttctcgctgctcttgggcgccgtcgtgtcctccgcgatcctctggcccatcctgcagggcaagcgaggggaatggtacgacgccgacgcctcgccatccagcctcagagggctgaacgggtacaaggtgcccatgggcatctccttggtgctcggggactgcctcttccagctggctgccgtcagcatcagggcagcgcggggcttccatcaccgccgtcagcatcagcaggatgaagatgacggtggtcagcagtccctgtcgtacgacgaccggcgcaggatccacaacttccagagcgaggggatgcccacccacgtgtcgctcgcgggctacgcgatcctggcaggcatcgccaccgtgttcctccccggcatcttcccgcagatcaggttctaccacgtggccgtgtgctacgccatggcgcccctcctggcgttctgcagctcctacgcttcgggcctcacggactggtccctcggcaccatctacggcaagctcgccatcttcatcttcggcgcgtgggtcggcgaggcgtctggcggcgcgatcgccggcctcgtggccggcggcgtggtggtggtcgtcatcggcaactcctccgagctcatgcacgacttcaagtcggcgtacctgacgctgacctcgccgctgtccatgttcgccagccaggtgatcggcaccacgctgggctgcatcctcaacccgctcctcttcctgggcttccaggagatggccggcggcgcggaccacctgggggaggccgggtcgctctacgccgcgcccatggccatggcctaccgcggcatcgcggacctgagcgtggaaggcatcaagacgctgcccaggcactccgtcatgctctgcgtaccttgcttcctcgtggcgctgtgcgtggatgccctggcggccgtcgccgcggccaacggctggaggatcaagggctacgtcccaaacatcatggccatggccatccccttctttgtggggccgaccttcgccatagacatgtgcctggggagcctcctagtcatcctgtggaggagaaggaacaagcaggcagcgaacctgctgtcggtcgtggtggcgtctggtttgatctgtggcgatgggctctgggcgctgccgtcttcgctgctggccatcttcaaggtggagccgcctatgtgcatgaagttcctgtccaactaccagactgagcagatgcggaagcacctcatcctagcagcagctgcacgccgaagaacaagttaattgttgtacccttacttgtttgagaacgaggaatgagaatggattgtttagtagctagccacacccacacactcctccttgttttccaagataaaataggcttgatagctcgatctagaatctagatagataaaacagcacacacgtctcttgcttcttgcaagcgtctaaatcaccagattatgctttatgattctacttgtacaaacatttagctcctgctatagtaaaactacacaatagtttatagtcaatgaaaaacatataaaaaggtc

SEQ ID NO: 21505 - DNA, 1243 bp, Zea Mays
agtcagtcaaccggacctggaagcggaccaggaccggcaaattcactcaagcgggctgatgctgatctcctttagcggctgcgtttgcacttccacttccacacggcacaaccttgtcttcgtcgcggcttccttggctcggcacccagacctcagtgcggtgcggggccctgccgagtgccgcacgcgcacgcgcacgcacgccccgccgggcctataaatccttgtcgccttcgcccttactcgccgccccatccccatccccatccccatccaagaaatactacgcccatcggatccaccgccgaggcaggcagaggagcacacaccccaggagctgaggaccggtttcgccatggccgccaagttcatcgccgctcgtcatgcatggctggcgcagaagctggtgctcaagctggacctgcacgacgacaaggacaagcagaaggtgctcaaggcggtctccaccctccacggtatcgactccatctccgtggacatgaagggctcgaatctgacggtggtcggcctggcggaccccgtcgacgtcgtggccaggctgcgcaaggtcgccgccgccgaaatcgtctccgtcgggccagccaaggaggacaagaaggagggcgacaagaaggagggggacaagaagaagaaggacgacgagaagaagcagcaggtcctgtggtacccgcacccgtggcacgccgccgccgcagcgcagcagtaccacccccacccgtacccgccccagtacgccgtccacagcgccgaggaggaccccaactcctgcgccatctgctgatccgaatacccggtcccgtcttctttttgtacatctagctcgcctgcctacctacctacctacctacctacctacctcaggctcgatccaccacgtcgtcggtgatcgccgggataggggccagaccgccagagcggctgtgttggttgcctgctgctctgctcatctctatcctgcgggcgtgggcggtgggccgtggggttggtcgttggcccgtccacaggtcgttatacgatggctcgtgcaaaatcatacacgcgaccccccaaccataaccatccaagagtagctagctgttggggtttttcacttttcaggctgttgctcatcagtgtcgttgtatagtgtgcagtgcatataatatatgtggtttgtgtccttgctatttaggtgtttgtggcacgaaactatatatatagagaaattttctctcaaaaacaa

SEQ ID NO: 21506 - DNA, 2875 bp, Zea Mays
ggccacgcgctcctccgctcatgccgctgctgcccactaagcccgcacccgcactcaatccgttcctcctcccactcgcctcccttgccttgccgcgcgccctcccgcccatccgcctccacgcaaagaagcgcctacgcggtctcagctcggccgccgtctcggctgcggcgtccacctcctcttccgcggacccgagcacggagctgcgagcgctctgctcccatggccagctcgcgcaggcgctctggctcctcgagtcctcggcggagccgcccgacgaggacgcctacgtcgcgctgttccgcctctgcgagtggcgccgcgcagtggaaccggggctgcgcgcgtgcgcgcacgcagacgaccggcacgcctggttcggtctccgcctcgggaacgccatgctcagcatgctcgtcaggttcggggagacgtggcacgcgtggagggtgtttgccaaaatgcctgaacgggatgtcttctcctggaacgtcatggtgggcgggtacgggaagtccggtttgctggatgaggcgctggacctgtaccacaggatgatgtgggcaggtgtgagaccggacgtgtacacgttcccctgtgttctgcggagctgtgggggcgtcccagactggaggatggggagggaggtgcatgcacatgttcttcggtttgggtttggggaggaggtcgatgtcctgaatgcactcatgaccatgtacgccaaatgtggggacgttatggctgcacggaaggtgtttgacagtatgaccgtcatggattgtatctcatggaatgcgatgattgctgggcattttgagaatggtgaatgcaatgcagggttggagttgtttcttaccatgctacatgatgaggttcagcctaacctcatgacaataactagtgttactgttgcatcaggcttgttatctgacgtaacctttgcaaaggaaatgcatggacttgcagtgaagaggggttttgccggtgatgttgcattctgtaactctttgattcagatgtatgcgagtcttggtatgatgaggcaagcaagaacagtgttctcaagaatggatactagagatgccatgacatggacagctatgatatctgggtatgagaaaaacggcttcccagataaagctcttgaagtgtatgcacttatggaagtgaacaatgtaagtcctgatgatattactattgcaagtgcccttgctgcttgtgcttgcttggggagtttggatgttggtgtcaagttgcacgaacttgctgagagcaagggattcataagctacatcgtagttacaaatgcaatccttgaaatgtatgcaaagtccaagcgtattgataaggctattgaagtttttaagtgcatgcatgagaaggacgtagtgtcatggagttcaatgatcgcaggattttgcttcaaccataggaactttgaggctctttactatttcaggcatatgcttgcagatgttaagcccaattctgtcacttttattgctgcgcttgctgcttgtgctgctactggggctttgaggagtggtaaggagatccatgcacatgttttaaggtgtggtattgaatatgaaggttatttgcccaatgcccttatcgacttgtatgtaaaatgtggccagacaggctatgcttgggcacagttctgtgcacatggtgcaaaggatgttgtgtcgtggaatatcatgattgcaggttttgttgctcatggtcatggggataccgctttatcgttcttcaatcaaatggtgaaaataggagaatgcccagatgaagttacatttgtcgctctgctatgtgcttgtagtaggggtggaatggtcagcgaaggttgggagcttttccacagcatgactgagaaatactctatcgttccaaatctcaagcactatgcatgcatggtggatcttctaagtcgtgctgggcagctgacagaagcttacaacttcataaatgaaatgcctatcacaccagatgctgctgtttggggagccttgctaaatggatgccgaatacaccggcatgttgaacttggggagcttgctgcaaaatatgtccttgcattggagcctaatgatgccggatatcatgtcctattgtgtgatctgtatgctgatgcttgtttatgggataaattggctagggtgaggaaaaccatgcgggagaaaggactggatcatgattctggatgtagctgggttgaggttaaaggagtggtccatgcatttcttacagatgatgagtcgcatccacaaatcagagaaataaatactgttcttgaaggaatatatgagcggatgaaagcatctggttatgctcctgttgaatctcattgtcctgaagatgaagtattgaaggatgacatcttttgtggtcatagcgaaagacttgctgttgcttttggtttgatcaataccacacctggcacctcaatttcattttaaggatggaagttgttcgtgtggagatgaaggttttggatgaagttcttgcagaggggaggcaagcttaattatgttgcatatacggatatacccttgtgctattattcatcttgtacacgttcatcctgtcaatacaatgccatggcgatacaatgctgtcaatactaagcagaacacattgcgttctgtatagcagtttgtgcagatactcaacctgttacatggcagtagggaaagttatactcaagtaatgggacctaagattctcacacatgtcatgaaagtctctttaagaattgattcttggagctgatctttgcttgcaacaacttgccaaaaaagaaacaaccaagtaagcttgagctatacaggatagtctagttggtgtctaatgttgtgttgaatagaac

SEQ ID NO: 21507 - DNA, 902 bp, Zea Mays
aattagccagagcccagagcccagagcccggaacaggcgcggcggatataacacactccaccctctccgcgactccgcctcgcggcggagacgttccgcggccattcatacggcgtggctaggagcactccttcgaatcggcatcgcaattcatacggctacaacgtctattctgtgggcacttcgtctccgatcgattcacggcaagagcgagagttcatggattcgacagggcccatgagggtctccatcaaagcccaccgccccgactggaaatcggagcttagaacaaattgcctcagaagagttagaaaggacagaaatgacttgctttggaagatcaggaagcagggactgcccggcaatgtcatggaaaaggtcagatctgctgtcaggagcgtcatatctgatgaggtagagaaactcaaacagtccaatacagaaaacgaggaccaagaaatggatgtcatatgggagtatcaaggactgcatgctgctaagcctgctgaaattgaaagtgaagatatattgcttgaaatggaaagacttgtttgtgaagatattagagaagaagtaatcagaaaacgtgtggtgcctataacctctgttattctttcattcccactgcttactgaccagcaatctgtttgcccatcttattgctggagtttagctgcaaaaacaacctgattaactgtttttgcatagttgtgcggttgtgccaattctatgatacttattttactcattggtccggaatttttcatcagttaatcatttgcagaactagaggcacttgatgaggaagatgcatatttagctcaaagtgttttggatcatatgcaactaaatgacattgagggggagtatttgttaaatctgcacacttcgattgtgatatg

SEQ ID NO: 21508 - DNA, 1061 bp, Zea Mays
cccagagtcacgtctgcctcgccggtgtcgaaaccacagccacacaggcagccggtgctgggcctcggcactcggcagccatggttcgccttgcgaagttctatctcgtctgctacaactccctccaatcgctcggatggttcgtctccctcctccgcctcctgccctgcctcgtccctcccttccctgtccactccgcgtacgtggtcgccggcgacctcatctgtttcctacagacatgtgcgatccttgaaacggtccacgctgccatcggattggtgccgaccgcgccacttcttgctttcttgcaatggggagggaggatccacttcatcctggctgttgtccggcaaattcccgaggttcagagcagtccatctgtgttcataacatttatagcttggagcatatctgaggtcatccgttactctcactatgctctgactaccttaaaagtttgtccagcatggctgacttatctcaggtacactgcttttatcccgctgtatccaatcggggttggcccaggagaaatgtggacaatgtaccaagccctcccgtttgtgaagaagagggacctttactcaggtttcttcgagaagttctccatgagctaccgttcctttctagtgggtgtgctggtgctctacccgttcctgtggctgaagctgtaccagcacgtgttcaagcagcgcaagtccaagctggggaaggggagcaggaagaaacgggcctgagaaaatctggctctgctcagctcagctgccacttgttgctgtcatgtgaaacgctaacgggtcattgtggatttttgttttggaagaaaatctttgtgagttgttgtctgatgcgacgggggcagttattggattacgctttgggttctctgtttgtttcaattgctctgcgttttatgtctgtattaacatacatcaagcatatataatagtcatgttgctgctgcgagtctaatcaatcttgcgatcctggttttctcgctcaattgcctacactgaatgaggctgatcacgctgctctgtgcctacagcaggcgattgtca

SEQ ID NO: 21509 - DNA, 357 bp, Zea Mays
gcagggcccggagggcgcgtaggcagcgggtttgggcatgatgaccgtctggccgggcggaggaggcgcggccacggcggggctcggctgttggcatggagcggaagatgcgaggagggcgtgccttgtgctcgtcccctgggcctgatccgctgctagcgctgttcccggctgccactggctgctccaccgatggctgctatggtgcgaaggcggacctgaccatcctttcggggtctccgctggtggtggctgcggcgacggactcctgctgctagttgagaggagctgctggttgggaggagcgggaacctgtacgctttcattattgacatcatctccgacgagttttttttc

SEQ ID NO: 21510 - DNA, 722 bp, Zea Mays
gccatgtacccaactcattattaatctactttttggacatgcatcttgagagcactattttttgtcctacatgaaatgtgttacacccagctccattcagtccatcattgggctgacagtagtggtttgatcgcacatgttcagttctagagttgtagtcatcttttctagcctttagatgttttgatccagtgaagtcttagatactattccatgttttacaactaacaaatcaatatattttgtcaatgtgtcttgaaagcactagcctttctatcctgtgtagaatattttacacccagctcagtttgcttcattgttaggcttgcagtagtgggttgatcccacatgattagttctagatttatagtcttactagggttccatgtcgatcttaggaaaccatcaatagcaactggttcaacctttttaagtgtatctgtttgcaacaaatagtgttatattatgcaatagtgaggtcagatactgctcctgacccacggataatcatatccgtagcatgaggtgcatggttgcattttttctgcatttcaatttcattttgcttttgtgaattgtgaaaactgttactactttagggtattgatgatgttgattatgcacaccaagtttagaactatagacaaaacactagtacctccatccacaagtataatggattctagtggacaaaggtgatatgttcactgaggaacaaaatg

SEQ ID NO: 21511 - DNA, 2171 bp, Zea Mays
gcagaggccagtgccactgctggcaggcgctgaggcgcccgagggccctcaagtggcgcgcgagccgcacgccaacgcccgcgacgcgacgaattatctttatcccctttccctctgccgtcctcgttcccggccgtccgtgccgaaggaagtatctgctgagtgctgacccagcccatgcccatccacctcgctccctcgaccgacccacccagcccagcgcgcgctcgcatggcgatgctgctccgcaaggtgtggggctccgtgctggcgcgcgccgcagcgccgggggccgacccgcgagcccgccgcgcgcaggcgcatcgcgcggagcagtaccagtaccacggctcgctatcgctgggcgcgctcgacgccgtccccaccgacgtgctcgcccagatcctgcgcctgctgggcccgctcgacgccgcgcgctccagcgccgtctgccgcgcctggcgcgtcctcgcctccgacaacggcctctgggctttcttcctccgcctcggccccgagccctaggacctcgtcgtcttcgccgagacgcacctcgccgccggccccgcctcgcacccgtggctgtactacgatagctcgccgcagctctcgttcaaacagatttacggcctccgagcgctggtcccgggtactctcatcgtggatggtggatctggttattgcaagtatggctggagcaagtatgctgctccttccgggcgttgtgctacattcttggaattcggtaacattgaagcacctatgtatgcaaggcttcgtcacttcttctctacaatatatacgaggatgcaaataaagccttcgactcagccagttattgttgtccttccactgtgtcactctgatgataccgagtctgctagggcctcaagaaaacaatacaaggagacgctgtactctgtcttgtttgacatgaatgttcctgctgtttgtgctgtcgatcagttctatctttgtatgcttctaaacggacctctggtattgttgtgcacattggattcaatacgacttctgttgttcccatctttcaaggtagggtaatgtatgagataggtgttgaaactgtggggcaaggtgcccttaaactcactggatttctcaaggagttgatgcagcggagaaatatatcctgtgagtcactgtacactgttcgaaccatcaaggagctgctgattatgaagctgaattgcgtaaagatacacaagcgtcctgcgagatcgatggtgaagggtgtttcactctgtcggaagagagattcaagactccagaaatcctatttcagccccatatgggaggaatgtgcgaaatattcagatattgtttgatttgtgcatcgattacagtttagttatggttggtcaatgttgatcttgcccttgcaggcgtgctatgggcttgcataaagcagtatctctatgtatggatcactgctatgtttcaggaacggttggtgatgacagctggtacaagacggtcattttagctggtggttcgtcgtgcttgcctggtttaccagagaggctggagaaagagcttcaccaacttcttccaccttatatgtcagaaggaataagagtactccccccttcatttggcactgattctgcctggtttggtgcaaagatgatcagcaacgtgagtactttcactgaggcatggtgtgcaaagaagaaacaattccgtcagaagacaggccggagtggtacattgtttgccaattcctggtaatgaaaatctcagacacaagtcacgagcaagaaacttaaagagttccccgcatcaaaaatacggacataacatccggtccatgctccactgagcctccaccagtatatagaagcatgagcattcatgcccagtatatattcacgtccatatcatgcatatatggattatgagccagtgcatcatttggtggtgttgttataggatgttttggtaagttcgttgtggttataggttgttggcaaaagcgcagttgtctcgttttaattttaagtggaacgattaattagttattgagcatgagtctttgtttatagctatatatgtctcatgaaatttggtacagttctaaatgttgtaaaacgcaataaatcattttataaatgagatatgtctttattgctgttgttcttggattggtaatg

SEQ ID NO: 21512 - DNA, 1261 bp, Zea Mays
tgttcctttcagttgttcgatggttatgcgtaggagcaaatcttcggaattcagattaggcaagattgttgcaataagagatatcatacctcctccattgagggaggcattcaatgatgtgtatattgcctatgaattgatggatactgatctgcatcaaattattcgttcaaatcaagctttgtcagaggagcactgtcagtattttctttatcaaattcttcgtggcttgaagtatatacattcagcaaatgtccttcaccgtgacttgaagcctagcaatcttcttttgaatgcaaactgtgacctcaagatatgtgattttgggcttgctcgcaccacctcagaaactgattttatgactgaatatgttgtcacaagatggtatagagcaccagagcttttattgaactcctctgaatatactgctgccattgatgtgtggtctgtgggctgtatatttatggaactgatggaccgaaaacccttgtttcctggaagagatcatgtccatcagctacgtctactaatggagctcattggaacaccgaatgaggctgatcttgattttgtaaatgaaaatgcaagaagatatatccgccaacttccctgtcatgctagacagtccttccctgaaaaatttccacatgtacaacctttagcaattgacctagtggaaaagatgctaacttttgatcctagacagagaataactgttgaaggcgcacttgcacacccttacttggcatcacttcatgacataagtgatgagccagtctgctcaatgcccttcagcttcgacttcgagcagcatgcattatctgaagaacagatgaaggatctgatctaccaagaggctcttgcattcaacccagattaccagtagccaaagttcggttccagccgggtgattgccttcattgacatggagatttttatcccacctgatgtcactgcaaaaagtccccaactccgattgctagctgtaaataattgccttccccgaagaccccccattccttccttgattaaaaaaaagcaggagacggtgccattcaagggtagaagcacagaggatgaggaagccagcacaaggcgaaggcagagcaggtcaggaccaagacaccaccaacagcagatgcaacagcagacgagtcagtatatatacaccaccaacataccagcctccattagtagatacagcagcaacaaaccagctagtaggtacaataggagatacaactcaaacaccacatcctcc

SEQ ID NO: 21513 - DNA, 1335 bp, Zea Mays
acccccgacccgtccgatgcccctggcttttaagcgccgctttcgcatctttcccccactggcttcctctgccgctcgcagtctcgctccacaaccacaactatccatccactaccggctccctccctcctcctgaaaaccccgaccgcgggcgaaccaaaccctagcgagcgaggcgatcagcgtccggcgaccggcgacagagcgcaatggagacgcgcccggcgccttgcgacctcgaggcggccgtgcccgcgggctccggggctgcaacggcggcggcggcgcagcaggaggcacccgcggcgaagaaagtggcggaggaggaggatccgcgcctgcgctgggccttcgtgcggaaggtgttttggaatggaccaccgatcgcggttttgtttgtgcagtcatgttccccatgctcaagtacagggagaagcaccccaggaacctcgtcctgctcgccgtattcactctctgctgcagtctcagcatcgccgtctccgcctccaccaccctcggcacagtggtcctgcaagctaccatcctcacagctgctgctgtcctggggctcaccctcttcaccttctggggcgtcaagaggggctacgacttcaccttcacgttccccttcctgttcgcctgcctcgtcgtgctgctggtgtacatcatcatccaggtctgcttcccgctgggaagggtagccatgaccatctacggcgtcctggccaccgtggtgttctcgggcttcatcgtctatgacaccaacaagctgctgaagcgccacgcctacaaccagtacgtggtggcagccatctccctctacctggacgtcatcaacctcttcatggcccagatggccatctccttccagtgatggattgcgggtctcacctgtacggctgtaccccatgcatgacggcgcctcgcccgtctggtacatggtggatcacacatccacatagcttcgcaagtcgagctgtctttcattatccttatcctaatactggtagtaccaatagcattacagtcctacagatctgtaattggctggccacccttcagctgagacagtatatatatcgtatatggcacctcaccataaatgacgttggagaccatgagatggttggtcgtgcttcggcaccgtatagttgtgacggtgacatgctgatttgaggtcaaagtaggatgacgttttctcgattttttaggatcatgccgccaacaaatattgtccaacgaatattgttctggtgtcgtgagatgggagatgcttactatgttggataacactagtagcggtaattttttactctgctatagcggttgatggac

SEQ ID NO: 21514 - DNA, 4287 bp, Zea Mays
gccagccccgcctttggctggcttggtggagaaccagatgcctttgatgtgtgcctgatgagatagtggacggacaaggaagtgaagtttcttgttctatccacctgttgaacttaccaacttggtatgctggagtgcaagaataagagcaggcccaatcgcttcacagctattgggttctcggtgccgactgtagcagccgcagatctggagggagcagcgaaggcgttcatcagatgttatccagtgagcacccttcaggcccctcatgttcctccaagtctggtggcccgggtgtgagcgctgatccggcgacgtccgcggcggagcagccagcgtgccaggatcccagagatctgatccaatcgtatcccaagttctccataagagattatgtttttgcttcaaggagcaaaggcatcaagagaagctggcctttccatccacactcgttgcagctttgcctggagcatggtgtgaaggatccattgcctccatttgagcctcccgatttgatccggtctcagccattaaatatttccacagacattaagcaatctgctgcgtgctcagaacccatcattagtgttggtctggtgaagaccaaagatgccggttcgtcaaacgagtatacaggcgatatcaacttccagtcatgccagccagtagatgagtcacctggaccttcgccatacacatcaccggaggatgggaaatccggtatcgaccaagtgggaagtacaaatgaatcagatcatactgacgaggctataccaatagatctgcaagataatagctgtacaagagcaagtcggcgaactgaggttgctgtgcccttgcggcggttgagaaatcttgactcatcgtgcgagccatctgaaaagaagtgcaaatttgttgtcaagttaggtgcctcggcagatattcggcggccagaggatatagcatctaactctagctcagtttcagatccgatggcttcaaagacttgtcctgtgtgcaaagtatttgcttccacttcgaacaccacattgaatgcccacatagatcagtgcctttctgttgagtctaatactgagcttgttgaaactgtccttgtaaagcctaaagtgaagccaaggaagaagcgattaatggtggacatatacaagactgctcttccatacacccttgaggatcttgatcggaggaattgcactaattgggcagttgagttggctatgtctccagtgagcaaagaggtttgcactgagaacggaagcccagaagtggtatcatttgacagaagagatgatgaaagagaaggagatgtttatgttgattctaatggcataaaaattagaattttgtccaagtgtaatgatgtacctttggtgttgaaagatgaccttggttctagcaaagttgcgaagcatggaactggaaaaggtatactgatgagcaaaaagatgctgaagtcaaagcttttgaagaataagaagctgaagatgcatggaaagaagtacaacaaaacaagccatttgaactcccaggttcaagcagacccgcatgacgatattaatgaggaaacctccgaggaggagaggaatgcatggaatccttctgaaagcaccagcaattgtggttccaggactatgcagcagtgggtatgctccaaacgatcagatatcaacaagaaattaagcaaaaaccatagtggtaaaacatttgacaaagtggcacctggagcacagaaatcggataggagcagcatgtttggctttaatgattctcaagttccagaaagtcctgttggggtgttttcttctgagtcattatacatggccacaacttcagaagccactggtgttgagcagagtaatggtccttcaaaagtgcttagatcgattcctacatggtcttcaaaaactcatcttcagagcagtgtcataccaaaagtacctagatcagctgctgctcttgcaaagagaaaaattaaggagattgggaggagagaagctaccaaactagataattatgatgtagtgaggaatcccacttcagtgaaaagatttgaagctaggactctttccttctccactgcagggccaagcaatggaccaaacaggtcagcatctacatcaaagaagatccggaagcaccgatctccgttgaggactggcaagcgtgcattttcaccttctagtactagattagttcatggctttggtgacgagcatgaacctgagaccagacatgtaaataagaaattcaggattactagtaatgaggctcccaagaagtttttgaagcatactgaagaggatactgcagataatgacttctcttttgcaagtgacatgccagtatcgggacaacagaatgatcaatatgatgttgcacaggaaacagagggtacacaaatggattgtgaaggtgaagatgctgaaactgatgtgccatatgattcagtatccagaagtgatcctgctgagtgttgcaaccaaataagtgatgtttctctgagtcctgaaaactacagaacagcagacgatgatgttttggttgaaggctgtagtgtagctgtggaggatccaaactccagtgagcaattagcacatggccatgaatccaacagtgctgccaataatgaaatggatgaatggcagatggatcctacttcaacaaaggaatctagtccctgcttaactagtaacagggacatgggccctggaggtcatcaagataactcatcaataacatcaaatggagaagaagactttaatgaagagcatggtctgccactcggaaggggctcactagattctcccatttcgactgcctcaactatggcccttccagctgctttgaaggattcaaggactaatgaggaagaacctggcccatctactggtaggactgttgaagagcaaaccaccgggtgcttgaatcaagaaaccaattcaatacctatggccagagaaggtgaactgcccagtgagaagccttttcgttgttcttgccaggaaaacattgccagagagtctcgtcaaagtcctgttgccagaccaatgctgaattctactgggaagcaggttccgcaattgcacattggttcgagggcatcatcatctttcagcacgtaccaaagaaccagcgcaaagcccaacccttgctttgatccacatgatcatcttttagcggctaaggtcccagcagaatctgctatcagcttcccttactccacagactgtataagcccctcattccaaactcagcttccttcaccatcaaatcctgtcttgaggctgatgggtaaggatttgatggtgatgaacagtgaagagagtgtgcatcctcaagcaccaagttcagactacatcttgagagggaattatccagcacctgttggtttcatgcctccaaactaccaacatctcagtaattctgcatttatcaacatgccgccgaccacagccagccaccagatccctctaccaagtgttcaagctagcggcttcgttgctcctccattgcgtggtggttctgtgatgcaatctgaccatcactcccagcagaagccctacagaaacatcatgcctgccatgcatcgcccaacctacatgatgaaagaagtgatcgtgatcaacgactctcctgagcgcagaagtgagccacaaggtagcatgctgttcccccctgctccgcctccaccacttccggtagtaccaaacaacatgccaccccgtccgttctactgctttccaccgcagagcccagttttgccaagggagaggggggctgttgggtccatgctcgtgtacgcaaacgttggctcaatggtcggcgtcaattcgtcgagtcaaggaagccaaacggaagtcgccagtccttacatgccaaacccgttcttcgtgcagtctcgagccggttacatgaacccgccagtgtactactcgcagaatctggggtgatggtttctcagtaactcgaatgaccaggagaactccatttggcttgccggtcgtcatcgctctgtaaaagtgggggtacatgggagtttcgtgatgggtctaaaatgctgagactagtcagcctgcaagatgtctgagtttcatgaggattttcacataggttgctttagattttcttttcttttttttggttccgacttaaaggtacaacatgtttgccgtcaaaagtgttttaattacttccctgcaaagtcgcagtaaattatagtatgcaattcccaacagttctgcaaaggaatatatctcagtatttatcgaaaaggcagctagaatc

SEQ ID NO: 21515 - DNA, 939 bp, Zea Mays
  misc_feature (1)..(1): n is a, c, g, or t
nactgaagagggaaggagaagcgggtggtctgacatggatccaatgcgacgccaggctccaccaccagttataaatgcaggcagcctagccaagcagaagtcgcctgttcggcctgagacatcaacatcgaaagatgctgtgttcgacttttttgggacgttcaagcggatcgtcaaggcggcctgctgtatctagtagccgagagctaagcactgaagcggagcaaacacgtagccgcacaactgacgcgagcccaggggcattccagaggtctggagctccacggtggagcccgcagatgcctgattcctcggacggcaggcgttcgtcttccagcaggcgccactcatctaaccccaagaactacgagtctaccattaggggcatgcagggcctaaactttgatggcgatgacagggtgcactattagcatctcatctgtctgggagggtgcatcgcctcccctccccatagatggatgtaccaaggacggccagataataagaggtttgggtgagtgagcccgagcagtccgggtgacgtctcgtaggaactgtgtatgctgcttagcctctgttgttgtacaggcttgtcatttgtttggtctgcgcttaccggtagggcgcgccttgtccggtgaacgatgatggtgtattatgagagggatttcttaaggggttcacgtttggtgtgcttgggttgctttgatagaaacatttgggagaggtttatcgcgcctgctctgctctctcatgtaactccagattgctgagctggcacctgctctgctctctcatgtaatgtaactccagattcctgagctgctatgtttttttttaatcttgtgtctctgagatgctgttgtgctgctggtgacaggtcctcagctcgttgctgttaacctgtcctagtgttgtatttgacgggtccagttttgg

SEQ ID NO: 21516 - DNA, 941 bp, Zea Mays
atggcctgcgtggtgacagtgaggtatgaggcggagctgacgttgatgcaaaattcatgtgatcaacttgctattgggaaggaaacaacacgtcgtttgggaatgggtactaaatgtaaggatgagtcacttgcttcattgccaattgatgaattgaccgagaaggctgatggctttgctagagtctttccagatctatgttgaatcaattaccatctgtattgtgcttggttttatgcttcttgcgctgatatggaagtttgacttcccaacatttaccgtccagatcattgccatcctcaatgacgtacaagcagcatattaggtaaactaacaacatcaacctggcgacatgaataagtaccattgtggctatctcgaaggacatagtaaaaccacctgcacaacctgacagttggaagttatttggtcgtgatgactgtcattttttcttctgggctacgtacaagactgacttcttctcgaatgccactctgattgttgtatatgccaactgggcatttgctgctattaagggcattggatggggctgggccggtgtcaaatggctctacatcattgtcttctacttcctgctgcgcatcatcaatttcctcatcctgctatacgctgagtaggagggcatggaacctcgtccttatgtatatactaggtgtgtgcccgtacgttgcaacgggagtatgttaggatgagcatcgacacatatttgatcggatattatattttttgggatctggagaaagtttgctcggaagccaaacatgttaagacctgagcatgtgtatgatatgcaaaggctggggctcgaacgcgcttgtatgagtcttgttaatttgcatgtctcgtgcatagtctctcaccatctattcactataatatacaaaatctgtgtctatctatatttattttaagcttctaac

SEQ ID NO: 21517 - DNA, 535 bp, Zea Mays
ggaacggttacggatagtctaacgcggttgcagcttgcagggttttccccttccgttctgcattcctcgtccagtccgcccccgatacggcggccacacccccacacccccacacttctccgacaagggaagggaaccccagatctccgccgccccgccagccgctatgccgactgccgccaaccccgccgccgcgctgcccctcaccctcgacctcgaggacttcaagggagacttctcattcgacgctctgtttgggggactggtggacgagctgctcccggagtaccgcggggaggacgacgccgcgcccgcgccacctcctccgccgcccgtgctcggggcggccccgcccgtcttccccgctgtcgacgagcttcttgggctgttcaagcactcatgcaaggagctcgtcgacctccgtaggcagattgataagcggctccagaatcttaagaaggaggtggcggtgcaggatgccaagcatcgcaagacgctaggggaggctgagactatccagtatccaacatgttct

SEQ ID NO: 21518 - DNA, 2042 bp, Zea Mays
tgcgcagttggggccggaccgctttcgcacgccaactcgcctcgctttcttccccgttcccacctctctctatctctctctcacacacacagtcacacacacaccgtcctccctccttggtccttggctccccttgctaccttgccttcacagatctcccactccccaacagaactgtcacgtctcggcgcccgggggccgtggtattacggctcatcgcggctcggcagtggtggcgcgcagctgaccggatcgagcagcggatggacggcggcggcgggctgggcggcctgcggtggaccgcggaagaggcgtcgacgatcggaggcatcgccacggtgtcgctgctgcactccttcatccccacgcactggctccccttctccatcgtcgcgcgcgcgcagcgctggccgctctcccgcacccttctcgtcactgcatttggaggtgttcttcatgttgtttctacggctcttcttgggataactgcagttactatggcaaatactatagctggcgaagaaacagtgcataaacttgcctcgctgttgctgatttttcttggagcaagttatatcctcttgtttgccttaggaaaaggtggtcatagccatgcccataatcatccaatggaaaaaatggcagtcgccggtcttgtacttgtacctgcattatcaccttgtgcaacaactcttccagtttttcttgctgttggcaactcttcctcaatgatgattcttgcaatcattgtgctcctcttcagcaccatcacagtgatgacatccttggtggccctttcattctacggtgctagccagatcaagttccactgggtggagcgttacgacaagatcctcgtcggcacggtgctgtgccttgttggagtcttaacatatgtgttccatcatcacgatggtgatgagcatgtgcaccagaaactcgtatctccctagatgcatacatactgaagttccatctctgttgctccctatttgtatacaatcctgattatcgacttactctgccgctctggttttgctggagatacgtatcatctgatcaagtgaatatatttgagcaaactgcgtgaagtttgtatcgttgtggtggtagtggcctctttttcggcactctgaaatggcgttcgatgggcaaccactaccagacgctgggtgtccggcaggacgccaccaaggctgaggtcaaggctgccttccgtcgcagcgcgctacgcgaccaccctgaccgccacgccggctccaccgacgcggccgcccgtgccgacgccgccagccggtttcgccaggcgtccgacgcgtactacgtcctctccgacgacagacgccgcgccgagtacgacctccgtcttcgcggttccacgtcttcctacgcgcgcacctcctcctctggttgggcctcctcgtcggcttcctacgggtacggccatggcggcggttcgtggcgacggactcctccgggtgcaggtgccggcgccggcgcctcggtggggtcaattgattgggaattcttactgaaggcggtcactcggcgagggttccttatcaatctgggattagccagtgtattgctatctggggcaacttttcttgattggactattttagaaatttggaagatgaataacaccgggaaatcatttgaggatgcgatggagaaggtcggaaagacgcaggaggtagatagagcttgaatctttttcatggtacattagtgtatatatatatacactaatgtacaaacctatgtgcatatcgatcgttgtccacatcctcctgatgttactttgtaatatgtatagatctgaacagttttttctatcacgactcacgagcttgtgcttgatccatagaacccctgctgtcgccgtcgtagaaactgaaccatgtaggttcttcgacagcgaaagctcaggttatgctctgattcttttgctgacgaaacgaagtaactgttgaataaattgctgtaattcaagtacgcttcgaggccagctacatggtcgcaggaataaaataataaaa

SEQ ID NO: 21519 - DNA, 1355 bp, Zea Mays
ctcctctcctctactctgcttcacgcctcgccggccgatctagctagctatcgcagaccccgccggcccggccctcatcgatctctcgtcgcggcaatggccatcacaccgcgcgctccccgatgattgatccactccggtcgccattcccgccgccatcatcagctcctactatatattagcccgacgaccccgttcatcttcctcttgtagttttgtccagcgcgctccgctgacgcaatgaccaacaacaacaacggcggcaatgacacgaacgccgcggcgagcggctggctaggcttctcgctgtctcctcacatggacgagcaccagctccagctccagcagcagcagcagcatggcctcttcttcccttccgtcactgcgggcgccgccgcctcgtacggcctcggcggcggcttggccaccagcgcgtcgccgtactacacgccgcagctggcgtccatgccgctcaagtccgacggctccctctgcatcatggaggcgctccggaggagcgatcagcaagaccaccacgggcccaagctcgaggacttccttggcgcggcggcggcgcagtcgcaggccatggcgctgagcctggacaacccggcggccgcctccagcttctactactactactacggaggcggaggcggcggcgggccggggcaccaccacgggtcgttcctgcagccgccgtgcgtggacctgtacggcggggcctcggccgggtcccagctggtggcggacgacgaggccgccgcgacggcgacggcgatggcgagctgggtggcggcgcgcgccgagaacggcgcactgctggccgccgccgggcagccgcaccagcacgcgctggccctgtccatcagctccgggtcgtcgccgtcgagctgcgtgacggcgcaccccagctccgagtacggcgcggcggcggcggcgtcgatggacggcgggcgcaagcgcggcggcgcggcggggcagaagcagcccgtgcaccaccgcaagtccatcgacacgttcgggcagaggacgtcgcagtaccgcggcgtgacgaggcataggtggacggggaggtatgaggcgcacctgtgggacaacagctgcaagaaggaaggccagagcaggaagggccggcaagtttatctcggcgggtacgacatggaggagaaggcggcgagggcctacgacctggcggcgctcaagtactggggcccttccacgcacatcaacttcccgctggaggactaccaggaggagctggaggagatgaagaacatgacacggcaggagtacgtggcgcacctcaggagcggcttctcacggggcgcgtccatgtaccggggagtaacaag

SEQ ID NO: 21520 - DNA, 128 bp, Zea Mays
gtttttttaaactgttgatacgttgcagggtcgggcgaagggcaacttgttgttgtttcgcctgcggttgcgaccgcggcggctgtcgtggtgcctagggcgaggggtagcgctctcagcgccggtgg

SEQ ID NO: 21521 - DNA, 155 bp, Zea Mays
acaggagaagaacaagtggttcaagtggagccacaacgaggagtttgattcgatctaggtggcgtcttctagttgactttctggcaccaaggatggattttagatcctgttatatttatcttttatttttgtaagtcttccactatgtaataaat

SEQ ID NO: 21522 - DNA, 1477 bp, Zea Mays
ggcgcgactcctcaactgaaactgtgtcattgtctgtcagtgctcgccgcgcggatctagggggaggggggccgtgcccggcgcggacgccgggatgccgatctgcgcgccgtcgtccgactcctcggcctcggcctcgtcgggcttgggcgcccgcgtctgggtgctccacgggctagcgctcggcgcggcggccgcggccgctgccgttgcgtacctgtaccggcggccgaccgggttccgcagccgcgcggtggggatcatacccgcgcgcttcgcctccacgcgcttcgagggcaagccgctcgttcccatcctcggcaagcccatgatccagagaacatgggaaagagttatgctagcttcttcgttggaccatgttgttgtggcaacggatgatgagagaattgcagaatgctgtcgaggatttggagctgatgttataatgacatcagcatcttgcaaaaacggatctgaacgctgctgtgaggcactaaagaagcttgataagcactatgatattgttgtcaatattcaaggagatgagcctctcattgaaccagagataatagatggtgtagttatgtcactgcagcgagctcctgatgcagtcttcagcacagctgttacttcactgaaaccagaagatgcattcgatacaaacagggtgaagtgtgttgtggataatctgggctacgcaatatacttttcaagagggctgattccattcaataaggaacgccaatccaaaatatccatatcttcttcatcttggaatcgcgggctttgattcaaaatttttgaagatatatccagaacttccaccaacaccattacaaatggaagaggacctagagcaactaaaagttcttgaaaatggctataggatgaaggtgatcaaagtggaccatgatgcccatggtgtggatgcacccgaggacgttgagaaaatcgaagcactgatgcgaacgagaaacattcagtagaaaacgaagagaaagcaagtgctttgcattgctatcggcgttggcttggtgggatacttttggttgtgctttcccgtcttctgaatagcatgataccaagtgaagttggtgcatcacttcttgaagttttgtgcttgctaaaacgttcagtgattggatatgtcacttgcattagtcctcaatcagcagttcagcgcgcaggtggattgtatctgtacttcagtagttagtagcattactttcagtcttctttacattgaaaaacaaatcgtttctggagatgaagcaattggacagtgtaaaacaaaaggctaaagacccatccatgccgcgaggcgtgattgatataaggccagactcatcggaactttcattagacttccatttacatgtaataagttttcatatatacaatgttgatgatgtatacaattttaatgacgtgacggtgtttttttttaaaaagtgaaaattggttttatgagtatgaa

SEQ ID NO: 21523 - DNA, 1016 bp, Zea Mays
tctggtccagctagtcgcttcgggtaaaatcatgccaaatggcacaagagatagtacactggaacttcttctgggtgataacggatgggttacccattatgaaaatggcatctgctattcacttgatgcaacaaaatgcatgttttcttctggtaatcgttcagagaaacttcgcatgggacagctaaactgcagagatgaggtggtcgtggatttgtttgctggaattggatattttgttcttccatttcttgtgaaggctaatgccaagctagtttatgcatgtgagtggaatccacatgctctggaggctcttcggcgcaatgttagtgacaacagagtggaggatcgatgtattatacttgaaggagataaccgggtgactgcacccaaaagtgttgctgatcgagtctgtcttggattgttaccctcaagtgaatgtagctgggccactgctgtcgaagctttaagggttggcgggggcgtgttgcatattcatgggaatgttaacgactctgatgagacacgctggttggacagtgttgttgaatccatcagtaatgtcgccaaaaatcatggactatcttggaacgtgtcagtggagcatgttgaacgtgtcaaatggtacgggccgcgtattcgccaccttgtagttgatgttacatgcaggcaaatctagcaaagcagatgcgttcacagaatctttgtgcactgtcaggccttggattcttggatagttggatgcatatatcattgcagattgtaatgctcaacagcttgcatcgtttgtgttttagtcttaagtgggttacagtactcttagtcatcatggagccctctgttgtgaccttgaaagcatgttcaggttcttgacgacagtttcgcaactgtattgctactgtaaagttgtgttcttggaccgagtgtatttatcttatgtatcttttgttttcttatataagatgctttattacgttgtttgaacatcttagtaccaccttttgcattggctgatg

SEQ ID NO: 21524 - DNA, 1846 bp, Zea Mays
gaaaaagatctattttctaggcaagagcctagaacatctttgcattttggagagtctccactcggagctattgtacagtctccatccctttcaacgagatggcacgtcagtctgctctctcgcttgtgagggatcgagcaaagacgggagcgctgaagcgtctgactctgagttcatcgaagacggctgggaggaactcgtctgggcgcatcacctctttccaccgtggtggaggggccaagaggttgcagaggaaggtcgatgtgaaacgcgacgcctgttccacgggtattgtggagcggatcgagtacgacccgaatcgctcctcgagccttgctcttgtgcgatgggtgcaaggggtgcatttccgccgccccaagagtccacaagaactcagtgccatgtctcaaatccaacaatctgctacagctgatgtctccggccggttttcccttgctgcattatctagtagagtgcataaagataaggaagcttctgcactgtactctgctctgggaaatggagatatttctgcatctcttaaatctggtgcgtcatcgagcttaccgaggatagctgtagctggtgccaagcccacattctttgctcaagccaaagcggatgaagaaggaaaacatacattttcctttactgagattcagaaatgggcaacagatgatgtgctttgggcacagagaatgaagcgtcaagctgcactctcctggcagaatgaactgaagaagaaacatttgcttaagacacaagctaacagcttcagtagcttggcagcaaagactagtggtacgagtaaagggccaaagggaaaggctgattgcataccagtgtcttatatattggccagtcaccagtgcatgccaggtagtacagtgatgaactataattcctcgaagccttctaagagttcagcctcttcaccatattccttggaaaatcagttcgatataattgatctcaactcaaaggttggaaattgtataccattagccaatgcacgaattggaacctgggtgcataatattgaatgtcgtcctggtcagggtgggaagatggttcgagcagctggtacatatgctaaggtagtccaggagccaggcgccaagtgtgtcctgcgccttccctcaggtgctgagaaggctgttgattcaagatgccatgctacaattggtatagtctccaacccaagccatggtacacgcaagctaagaaaggcagggcacagcaggtggttaggcagacgccctgttgtccgtggtgttgctatgaatcctgtggatcatccccatggtggaggcgaggggcgtactaaaggaggcaggccttcagtttctccctggggaaagcccaccaaagcagggtaccgatcaccaagtgtggccagtcggaaagcgtttgctggaacaaagctcatacagttcagaaaataaagaatatgtgtttgtggcagagggaactgtgataatcgacttgattctggtgcagcagaagaaatggttgttatcactccaatcgacaacacagaataaatgttttcactccaatggttgttatcgctacttttccccttttgtcattctgcagaaactagctcttcatgaaacctgattagtgaatttcttcctgtatttcttttgcttctttaacacttggcaaatttggctatggttccacggctctgattgagaagggatgctcttacctttttggtcaaggcctgtccaaaactaagaaacacatgttggtagtatgatttttctctctatatttcgcatgctgtctgttaagttattgtttacattttattgtggctatgagcgtgattggatgc

SEQ ID NO: 21525 - DNA, 2504 bp, Zea Mays
taccaaacgacgctgcgctcccgttcccccgtcacaaacacacacactgcggagaggaccgcaacgcgagcccaccccaggccgaacgccgagagcgatccctcccgtccgtgttgccctttgcgctccgccttcctcctcttccaccccgtcacttccgtgccatccgcggctcgcctccccaccccccattcccgccgccccatgcctccggctcgaccgtagccgcccgacgacgaccgccatggccgccgattccggcagcgggatggccggcctggagatcgggccggcgtcgccgggctcggagggggcgccatcgccggcgtcgagcgtgggcgcctccgtggagcggcccgagcagtcgtcgccgcgggtgaccaagcgcccaggcctcgtcatgtccttctccgggaagcggctggaccagtcgccggccgggtcgccgtcgccgtcgccgtcgctgtcgcgcccggtgctggtcatgtcccactccagcaaccgcctcgaccagtcgcccgcgcgcccggtgctcgtcatgtcccgctccagcaaccggctggaccagtcctccccggcgtcgtcgccggcgccagtgaaggcgcccgtgctggtcatgtcaggctccagcaatcggcttgacagctcgcatccgtcgccgtcgccgtcgccgtcgccgaccgccgcggccgccgctgcgccggttctggtgctctccaactccggcaagcggatggaccaggtggggcggaagaagtacgtcaagcaggtgacgggccgccacaacgatacggagctccacctcgccgcgcagcgcggggacctcgaggccgtgcgccagatcatcgccgagattgacgcccaaatgaccggcaccggcgaggagtttgacaacgaggtcgccgagatccgcgccgctatagtgaacgaggccaacgagatggaggcgaccgcgctgctcatcgccgccgagaaggggtttcttgacatcgtcgtcgagctgctcaagcactccgacaaggacagcctcaccaggaagaacaagtccggattcgatgctctgcacgtcgctgcaaaagagggccacagagatattgtcaaggtacttctggaccatgatccatcccttgggaaaacgtttggccaatcgaatgtgactcctctcataactgcggcgattagaggccacactgaggtggtgaacctactgctggagcgagtttctgggttggttgagttatcaaaagcgaatggaaagaatgccttgcactttgctgcccggcaggggcatgtggaaatcgtgaaggctttgctagatgctgatacccagcttgctcggaggactgataagaaaggccagactgctctacacatggcagtaaaaggtactaacccggaagttgttcaagcgcttgtgaatgccgatccggcaatagtcatgctacctgacagaaatggcaacttagctctgcatgttgcaaccagaaagaaaagatcagagattgtaaacgtgcttctgcttctcccggatatgaacgtgaatgcgttgactagggaccggaagaccgcattcgacatcgccgagggcctcccactatcagaggagtcccaagaaataaaggagtgcttgtcccgcgctggcgcggtcagagcaaatgagctgaatcagcctcgggatgagctcagaaaaacagttacagagatcaagaaggacgtgcatactcagcttgagcaggcgagaaaaaccaacaagaatgtctacggcatcgcgaaggagctaaggaaactccacagggagggcatcaacaacgcgacgaattcagtcacggtcgtggcggtgctcttcgccacagtggcgttcgccgcaatcttcacggtgcccggcggcaacaccgacgacggcgtagcggtggccgtgcacgcgacatccttcaaggtgttcttcatcttcaacgccgtcgccctcttcacgtcgctagcggtggtggtggtccagataacggtggtcaggggcgagaccaaggcggagaggcgggtggtgggggtcatcaacaagctgatgtggctggcctcggtgtgcacgacggtcgcgttcatatcctcctcgtacatcgtggtggggcggcacttcaagtgggcggcgctcctggtgaccctgatcggcggggtgatcatggccggcgtgctcggcacgatgacgtactacgtggtgaagtccaagcgcgtgcgcaagatcaggaagaaggtgaagtcgacgaggaggagcggctcgaactcgtggcaccacaactcggagctctcggattcggaggtcgaccgcatctacgccatatgagggggccggtgcagctggttccttccttcagaccgtctggccgtgatgcagcacggatgcatactgtaaacatcgaatcacggcccttgagatggagatgcgctagggggtggttaactctgtacattccaataagctggtgtaaactgccattccccttaaaaaacaa

SEQ ID NO: 21526 - DNA, 1900 bp, Zea Mays
gtgcattgtttccgccttgttcctaaggagtgggatgctctcatgctttctaattttgctttggagcagcagcttcacacagcaagacaagaacttagtcatgcactctaccagcatgacgctgcctgccgtgttatagccagattaaagaaggaaagagatgacgctagagcacttttggctcaagctgagagacagattcctgcgtcagttgcaggagctgctcctgcagctgttgtttccaatggaaaaagagtaattgaagatgaaattggccctgacgggaagaagatccgtcctggtatcaaccctgtcatgattgatgaacttacagagtgtaatgccatgctttcagcacagcgcaagaaaagacaggttcctccaactctggcaccgatcgatgcactcgagagatacactcagatctccagccatccccttcataagacaaacaaaccaggcattttgtccatggatattcatccttcaaaggacattgttgcaactgggggtatcgatacaaatgcagtaatctttgatcgttcatctggtcaaatcttgtgcacgcttgctggtcactcaaagaagataaccactttgaagtttattccacgggatcaactctttgtaactggatcagcagataagactgttcgcatctggcaagagaatgagaatggaaactataactgtgtccatacactgaaagatcatactgatgaggttgaagctgttacagtacatgtgactcagaagtattttgtgagtgcttccaaggataactcttggtgcttctatgatatttcaacaggatcttgcctgacacaggttggcgatgcttcaggacaagagggatatacatctgcgtctttccatccagatggtcttatccttggaacaggaactactgatgctgttgttaaaatttgggacgtgaaggctcagtcaaatgtcgcaaagtttgagggtcatgtcggaccagtcactgctatgtctttctctgaaaatggttacttcctagcgactgctgctcatgatggtgttaagctttgggatcttcgtaaattaagaaattttaggactttctctccctatgatttggacacgccaaccaatactgtggaatttgattttagtggaaactatcttgccattggtggttcagatataagggtctaccaagtagctaatgttaaggccgaatggaatcttatcaagacggagtagacgcgaaatacatagccataggttctatggaccgcaatctacggatatttggtctccctggagatgatcaaatggaggaatcaaacacagcggccgagtgatgggaattcatggtgcctaatttgtttcttctgccatcatcctcattatactgtggtgatggatagactgattgcacatggatacatcaccgtcacaagagggaagggtcctggcggggattactggtctgagcttcggctggtgtaaaacaagctgtgatattgttgtactgtaggccttactaattcttctgatgaggatacaatttgttttgttgactacgatgctaaacagctaaagttctctgcgcagattccagtgattcaaaacgaactacttgcttcttagcttctttattacataggtcaatggaagcactataagatgtgcccatgcgagtgtgtccagcgtgatctgtgaagattggtgatttgtacaattcattttgtttctgagtttcttaggttgtgcgtgtttaggatcagttacaggttaagccgctgtctttcatttgtgtatctggccactatcgagacaagatacatggcgtgcctctagaagtcaaaagtctgaacagttactcagaatcagctggaatactatctaactatcttgtgcttataaaaggtcg

SEQ ID NO: 21527 - DNA, 1718 bp, Zea Mays
gtggtccaaacaaccaaacagccgctatatagcggactaggggctcgttggagagaaaacttattacaaccgaccaacgcgctttgtaacgcctccgctgcaatcagcccccgcggcgagcttgccctgcccctgattgctagttctcgccgttacgtaaggcttcttggccttgcgtcctccgtctttcgttgctgatacatcgaggcatggcgatttatcggtccaacggtgacgccggctccgtcgctttcgtcgtggtatcttatctcgacctggtggccctgttcgcctgcttgcgctactacgagcagttggatcagcagcactcccaaaagcgcgcgagggtcaaggctggggtttggagcctcacgaccctccttactatcatgttcagttacaaggtggctgagattatgcccctgccagtcaaacttgttgtctggtcgatggcagccgctaccacctgtggcggcttctacgctttcttcgtccacagcgagaagcctgtcatgccagcggtggcgccacggcccgccgcggccaaggatgcagcctccaactaggttcgtttgccaccacaaggcgcatactgccggccttggttcggcaccgcgcgttagatcccagggccaactagcttgccggcgtggacagactggcagatctggagctcggcgcgaccagatccggtgctgctgtgcccgatggcagaggagatctctctggtttactctgctaagagtcaaagaggagctgatgacgacaactaagcttgggttaccgataattgagcctgttctctgcacgagaagaaatttccggcctcacctagtactaataagtatgctggatagtcccccagcacgggagttaattgtatcaagagaagtggagaccaagggcagagtagaactacagaggatatctttgtatatggaggctacatgtgaacaagaaaggagaggaggaagactgtatagatctgaagaacctaaggagaaacaatcagagtacttgctggaacacatatatcttccatgataaaagttagatttcttgtttggtgctcatgcatgggttccatatgttcttcccgtcttattagaacatatctattggactaccatgcataaaaagccgtcgtttcataaactattgggactatacggcaccaatgaagctattgatgctggccggcaagctgacagcgaggtgaaagcttttcaaaacgatattccgagtggaagagaaaagaaaataaaagaaatagcaggttattttagaaaaaaatagttggcccatatgtaacgcgcggtagctttaagattattatgtccagcagcttattcatatattatacatatattcaaatttcactctgtgaatagtagtctaaaatacagtagtgttttgagtaaactatggataaactgctggacaaggtctaagataagtgctgcgtggtggcaacaaacgacacttagtcttgtttggtggcaatgatattggaggggctaaagttttttcgctcctaaacaagctcctaaacaagctcctaagaatcttacgtgttatgttgcattatggaatatctatgtatctgcaaactctctgtagtctgtatgtacctcggatgtgctctatgtggctttgtaattctgaacggaggaagtaataataagataaatggatggcgtaacaagataaaaaaaaga

SEQ ID NO: 21528 - DNA, 1272 bp, Zea Mays
cgccacacggatggtataagagtaaagacaaccttttcgccgaaccccccctcggaaggatggcggcggcggtttccagggccatctgcgtccagaaaccgggctccaaatgcagcagggacagggaagcgacctccttcgcccgccgaacggtcgcggcgccgaggcccccgcgcgccaaagccgccggcgtcatccgctccgactccggcgcgggacggggcccagcagtgctcgccgctgagggcccgtcgttgacgccgcgtcgatacagacgaccaaaaagagcaaatggcgcctcagtctcccgcgcgcaagctacaacggttcagggtccggtgctgcggcggctgagccgtctaccgtgggagacaccttggaacgggaggagggcggcggcacagaggcaggcgcttcggctgatgagtcatccaaccggaagcagccgccccctgttgaccccaagattgagaaggagctcaagaaggtagttcagaagactgcggcaacctttgcaccaagggcgtccacgaaaacaaagaaccctgctgtccctggaagtaccctgtacaccgtctttgaagtccagggctatgtttccatgctgttgggcggagcactttccttcaatctcatattcccatcgaatgagccagacatctggaggttaatgggaatgtggtccatttggatgttcagtaactataccttcgcttcgggctcgtgactgctccaataaagagaaagaagctctcaactacttatttctcctgattcctctgatcaacgttatgattccattcttcgtgaagtcctttgctgttgtttggtcagcagatacagttgctttcttcgtgatgtatgcatggaagcttggatggctgcaaaggttgaaatgaagatttttggtgtgctctcttggtgatgtgtgtatgaaagcttggatatttggtttgaaaaggtggagtcggtagcttttttgctgagagaaacatttgtcctcaaaattttcacatcttttggagggagctgcatgattagtttattccaagatttagttcatatagccttttatatcttgtgtatatgcagggagtacgaaaaaacagccttaagtgataaatatatgtacctgaagtctgaacatttttgttgactacgaactgaacagctctaaatggttcttgatttctcaatactttttgtcccagacaatatctatgttgactgctttttctgaaaatgaaacggggtaccagtggagtttggaaa

SEQ ID NO: 21529 - DNA, 3004 bp, Zea Mays
cagctctccagagcctccgccggcgcatccggcgactgatttgcagggagtgcttgaagatggctttgttgccgtcaagaagttatactcgtatattgcaattgaagacgaaccatttcatcgtgaggttgattgtctaatgaatattaggcaccacaacatagtcttgtttgttggttactgtgctgaaacacaggaagtggttgtgcgtcaagaagggaaacatatttttgcggaaaaacgagaaagattactttgcttcgagtatttgcataatggaagccttcacaagcatctgacagccgaaccatgtgggcttccatggcacatttgttaccaaataataaaagggatttgcctgggcttgcactacctacatgacaagaacataattcatctagatctgaaaccggacaatatattgcttgatgatgacatggtgcccaaaatcacggacttcggtttgtcaagactcttgggtaatggaaaaagccacaccattacacaaacaagaataggaacatggggttacatggcacccgagtacttggatgatggagtgatcacaatgaagacagacatctatagcttgggtgtgataatcagacacatggtgaagggacgtaactcggcagacaccactgatgaagaagtactggcaaactggttgattaggctggaaaaggatccatcacagatgatgaggcagcagacgacccgattattatttgaaacagagtacaaagagcaaataaaagcgtgcatggatatatcatggaggtgcacgctgcgtaaaccaatggacaggccaacgacgcagcacatcctacttacactggaggaaacagaagcaaagatcaaatcggtcgttgggcctactccaccaaatgccgggcagcttcagattgccaaatttgggccgtggggtggagatggagggaagacgcgagacataagaatgacgccttgccatttgcatagcgtaacaattagcagtggaactattatcgattctatcgggttttcattcactgatcactatggtcagcaccacacaacagggccttggggcggtaaggagggtacgaataagcttgggggactacatccaaatacattccagcatagcatgcacatccaaatacgggtagccagcatgatgattgaactaggcccttcggagtttcttacaggagtatctggaacaagcggcccattcaaaaatctaacaaatgttgtaacgtcacttacgtttgtcaccaatactcgtagttacggaccctttggaaaagggcgaggaacaccgttccacatccaaacgcagaacaacggcaggatcgttggcttctttggccgttctggccagtatctctatgcgattggggtctacacgaaccaagatgtgctgcaaatctagctagtccatactagttttatcgatcttatttaatatttatgttttcattcaaacatttgcttattagtccggttcacttccaggctagggtcgcaaggatcgggcgacctttgggtggagatgaaggggttcttcatggcatcacagacctcagtgggcagcagcgcagcagaggtggaggtccatcgggagaatgtggagacagcgacgacgagcccaacggtgatttcgccaaattcggcccgtggggcggcgacggaggacagccgcaggacatcggaacactaccctgccgtctagacaggatcaagatcagcagtgggcttatcatcgactcgatcgagttctcgtacgctggccctgacagccagtaccgcaccgcaggcccttggggtggtcatggaggagacaacagctcttttcagctagctggttcagagttccttacaggtgtgtctgggtcaatcggcacattcaacggccatgcaaacgtcataacgtctctgacgttcgtcaccaacgctcgtagctacgggccgtttggaagagggcgaggcacatccttccacatcccagtgcagggcaatggctgcatcgtcggtttctttgggcgctccggacggtacctcaacgcgatcggtgtctacacggcgccgaaacccgaaccaaaagcagttgggaaacaagatggtggtgatgaggccgtcgtcgccaggattgggccttggggcggggttggaaatgctctccatgacatcgcagagaggccgcatcgcctgcacagagtgacgatcttcagcgggacgatcgtaaactcgctggagtatctgtacagcgatggcgacgggcagcagcacaccaccggtccgtggggcggctgcggaggaactggtcgaaagattcatcttgcccctgaagagttcatagtggaagttactgggacattccatccatgcgcgtgggacagaacaatacccagtgtcgtgtcctctctgacgctcgtgaccagcacgggcaaaacacacgggcctttcggaacgcagctgggagccgcgttccaggttccggtgcagagcgacagcaggatcgttggcttcttcgcccacggagacaattacatcgaagcaattggcgcctacgtgaagaaattgacagaatccagcaaccgttaactcttggaacaacttgcagctgttcacactgtttcttgggccattgctccttaaatttagtccagatggccaaggagcaaccaaacagaaatcgctatggcagggaagatggactaaactggactgtggcacctccagcatagcctgctcttagattagtgaccagacatcatcgagatatttcgatattataataaatgaggaacccatctcagatgtttatgttagctcctcagtttttgcttctgaatgattaatttagatcttccttatttttgcaataaatgaggattcttttctgtctcttctgaatggatacgaatcatgcatcacgtatcagtgcacctattgcagtgaggagatgaggacaaggtgctgacgaacttattgtcctgagctcccacttgagtttctg

SEQ ID NO: 21530 - DNA, 899 bp, Zea Mays
agacaactagatcgctcccacttcttcctcttgcctcctctgtgcttggatctatgtttccccacccccaatgctgatccttctcgcctcgatgtccaagagctccgatatgtcgtccaccgagccccggtgctcagatcacaacacgtgcgtgtcctcactctctctattcgcttacgcgtccgaatttgatgagctcggccggggtggctggctgtggtgggggcgcagatgccaaaggatttggcgggcgtagcagggtgtcgttcccacgggcatccctggatcaggattgtggaagtgagtgccatggggcaggagctagacgtgaaggtgccattgctgcatgatgagggtgtggattccatgaaagcatatgactgaattgagcttcttctaagcatttttttatgatggggcattcaaagctggtgaattggactagatattgagtttacaggagcagtcagggataatatgcatggttctgtaattagtgtggaaacctgagcaagacgcgtgtttctaaaaatgttcttaggaccagtaaatctacggacaacaaggaagattgtgcaacagaaggtgaaggaggatagaaggcagaagggggatggacgggcgacaacgacattggtgcggcgataaagttggtgagcacagaaggggagctaggtgtgccagtgacactggggcaacacagaagggggcaggcgacaaagtcagggtgagtacaataagggtacggcgacgacggagtcgagcgcttctaccttgtgtcgatccgatacaacgataatagaacagaagtggaattggattgttttagagagttgtggagttggattgtttggcgggatggtggatgtgtgctgtatttttgtcttcacgtatttatt

SEQ ID NO: 21531 - DNA, 1607 bp, Zea Mays
aaaaaatccaaatttctccactgttggatggctgttgggccggccgataaacaattttcccgttcgagcgtctcgcttctcccgttcccgatcccgatcccgatcccgatcccgatccctgcgtcctttcgcttatcccgttgatccggcgttcactcgtgcgatctcctgtggcgacaactgggcgatcgacgccgccgctgctgtcgccgtcctatacgagaggtgcgcaggcgttcgttggtcccttcgccaggcttttgtctacccttcgccgacgacgagcacaagccagatttctttgtctgacttgtggaagcctcttacaactattgtacaaggctgctgtattgaagatgtctgagttccttgacctagagctacaagatgggataaggatgccctggaatgttattccaggcacaaaacaggagactgtgaactgtgtgattcctgtttccgctatctacacacctttgaaaccaatttctgatatccctgttcttccatattcacctcttcgctgtcgcatgtgtcgttccatcctcaaccctttctccattgttgactatgttgctaagatttgggtctgttcattctgctttcaacgcaaccagttccctcaacactactcttcgatctcagaaaataatctccctgcggaactctttcctcagtacaccaccgtcgagtacatatcttcaactgaaactggtcctatagttccaccggttttcatttttgttgtagatacttgcatgattgaagaagaaattggttatttgaagtctgcactggcacaagctgttgagctattgccagataattctcttgttggattcattacgttcgggacgtatgtgcaggttcatgaattgggttttggcttattgccaaaatcatatgtattcaaaggaacaaaggaggtcaccaaggagcaaatattggaacaaatgtgcttttttgcggggaagaaaatgcctaccacaggcgtgattgctggtaccagagatggcctttcatctgagagcatctctagatttctgctgcctgcttctgaatgcgagtttgtattgaactcagttatagaagaaatacaaaaggacccttggcctgttccagctgatcagcgtgcatctaggtgcactggagctgccttaagtgttgcagccaatctccttggggtttgtgttcctggatcaggtgctaggataatggcatttgttggtggtccatctacggagggccctggtcctattgtatccaaatccttatcagagcccattcgttcacacaaagaccttgataaagactcggcaccactctatgataaagctgttaagttttatgatcaaattgcaaagcagcttgtgcaccaagggcatgtgctggatttgtttgcttgtgcagttgaccaggttggagtcgctgaaatgaaggttgcgattgagaagactggaggaattgttgtccttgctgaaagttttggtcattctgttttcaaagactcacttctccgcatctttcagtcaacagatgacaaccttggtttatcattcaatatccttcctaacagaagaattgagctctctaacattccaaataag

SEQ ID NO: 21532 - DNA, 1255 bp, Zea Mays
catccctctcgcccacgcgcgggtatcggagtcggagcatggcgtctgcagtggtggtggacgccggcgacgcgccggagcccacggttcgtaacctcctggaccaggagtccctcaagtgggtcttcgtcggcgggaagggcggcgtcggcaagactacctgcagctccatcctctccgtcctcctcgccggggtccgctcgtccgtgctcgtcatctccaccgaccccgcgcacaacctcagcgacgccttccagcagcgcttcaccaagttccccactctcgtccgcggattcaccaacctctacgccatggaaattgacccaaaggtagaaaatgatgatttatccaatgaaggaatggaaggattcctgtcagaactgacaaatgcgattccaggagtagatgaagctatgagttttgctgaaatgctaaaggcatacattacggttgcttcagttcccagcaaccctagagaagggtcttgagaaaatgatggagttgaaaaatagatttggcggtctgttgaatcaggccagtcgattgtttggtcttggtgatgagctgaacgaggatgcaatgcttgggaaacttgagggtatgaaggatgtgatcgaacaagtgaacaggcaatttaaagatccagacttgacaacttttgtatgtgtttgtatcccggaatttctttcattgtatgaaacagaaagattggtgcaagagttagcgaagtttgagattgattcacacaatattattattaatcaagttatatttgatgaggaagctgtcgagtcaaaactgctaaaagcacggatgaaaatgcaacaaaaatacattgatcagttccatatgttatacgatgacttcaacatcaccaagcttcccttgctttcagaagaggtttgtggtgttcaagctctccaaaacttttcccagcacttccttacaccatacaagtctactcttaaaaggggcaccgtcgaggagctcgaacagagaataactatattaaaatctgcactgcaagaagctgagacagagttagatagggttaggaaagggaagcagtcagtgtgattttttttccacaggtcaagtgtgtaaaaccagagagacgatcaattttttcgtgtcattacactcttgttgatttcactatcatgtttcctcatcgaggagtttagacttgtaatagctatcggcagagaagtgtttgattcacacaagatatatagatccattctttttgccggtt

SEQ ID NO: 21533 - DNA, 1131 bp, Zea Mays
atgcctggacagtttctctctctcgcttcgatagctaatttcgccgtcacccgccggacagacacggaggtacaggagcgagggggaaagtgggatggtagtgggggcatcatcggtgtccggcgccgcggcttccggaggtacctctggtacggctccgccgcggaaggggaagtcgtgcaagggctgcctttactactcgtcagtgctcaagtcccgcggctacaacccaatctgcgttgggatcccccgttccatcccccaagttcctaactacgtggtggatgagcctaaggaggacgcgacagcgcaggggcatgatctcaggcggttcaggtacgggtgcgcgggttactccatattcgtgaacagggacggccaaggtggtgagggcgagggcaagacgttgttgccgtattgcaggggcctcgagttattggtggacagcagattggtcgagagaaaaccatccgcagctgaacaagctccagcacatgttacaaaggatgcagcagctaccacccgctctcaccaacaaggacaacagagacctgcgaacttgtcgaggcaggaattcttggagaggaaagttactgtccatagcttttctctgtccccagcccccactaggatatattgccttgctgatgtatacggatggcacaggtttaagaagagtgctggactggtcgcttcaggggtcgcgaagaatctaaacaaaacggccaattatatcaaggaaaatattcatgacatattgtaccacgatcgtcgcccaccaaagtagtagccatgccgacttgctgagaacgaagcacagcagccccagctccgtcactgattatgcaaatggagccttccaggattccaacttcactcgctttacttgcataatcttgtaatttagggctgcatatgtacatgcaatttaacttgctgcttgtttgaagcggaaaatcagatttcgtttggtgtaatcggaagacgatgatattggttgaattttgactgaaaattcgagaaacagcatttctcgatgaaaatacacggtttctcggttgagaatgttagacagcgcaggcagacttgagaatgttagacagcgcaggcagacgcatcgcgtgctgctcg

SEQ ID NO: 21534 - DNA, 1905 bp, Zea Mays
tcgtgtgctgccccacttgcagttggactcgccgccgctcgcttgctgtggcctgtgtccgagccggcctaccccgcctctgaacaccgcctcgccgcccgcgtgcgcccccctccaactcctatggccgcgccctcccacctccacctccacctcccgggctgcccccaaaccctagccctgcccctgccctccccggggggtttctccgcttggcccggcctccgctcctgctcccgctcccgccagccccgcatccgcccggtcgccgcgctcggacccgccgacgccggcgacctgctcggccgcgttgaggcgttcctctacaccgttgcggacgccgccgttaacgcggagcccgtcgcggcagccgcggacaccgggaccaaggaggccgccgccggggactggctctccggcatcaccaactccatggagaccgtgctcaaggttctgaaagatggtctatcagctctccatgttccttattcatatggctttgcaatcattctcctcactgttcttgtcaaggcagctacatttcctctaacaaagaagcaggttgagtctgcacttgcaatgaggtcactgcaacctcaagtgaaggccattcaacaacgatatgctggtgatcaggatgcttgcctacccttgtgacaataccagtttggattggtctatacagagctctctcaaatgtagctaatgagggacttctgactgaaggctttttttggataccttctctggctggtcctacaacaattgctgctcgacaaaacggccaggggatatcatggctttttccttttactgatggccatccacctcttggctggtcagatactttggcatacattgtgttaccagttcttcttgtcatttcacagtacatatctactcaagtaatgcagccaccacagagcaatgatcctaaccaacaaggtgctcaggctgtaacaaagttcttaccattgctaattggttattttgctctttccgtgccttcaggactaaggctgtactggcttacaaataatatcctcagtactgcacaacaagtgtggcttcaaaagcttggaggtgcaaaaaatcctgtcaaagaatatattgacaagctttcaagagaagaaacgactactgttcagaagaatgattctactgttcagagtgaacctctctctaaacatagtaaaccccagcctagccaagagccgaaaccaagtgggccacaacgtggtgaaagatttaggaaactgaaggaggaagaatctatgagaaaagaggttatgggacaaggtaaacaatcagaacagtcaagttctgaatctagagtcacggatggaacacaaaattcggatgtgtcttctggagaccaaaaagaccaacaggggtctcatgaaaatggaccggttgtagctagtataaatggtggagtcaaccatattcgaaatgaaaagactcagaacttatcctcagaaaaggaagcagctgacgatcactcacctgatgtccacaaattaacggaccgagagaatggcaatgacgcggtatagagtggatgttagcgatctactgctctctgaagatcagtgagtatcgtatctgcttcatcgacgtatagctgggagatagtgaccaacagtttcacgaacagctactacaggagagttgagaatcaacacgaagaagatgcaaacaggaggcaaaattgtgcaaaccatggtctaggtctaggctcatttatttatttttgtggctgtgctttaggttatgtgaagcatatggcatatatatatatatatatatatatatatatatatatatatatatatattagtagataaatgtacacctggttttgaccgtgcaattcgatattttacctcatgtaaataaataaaa

SEQ ID NO: 21535 - DNA, 1875 bp, Zea Mays
ggagtagcgacgaccttagctagcaatagcagccagcaggaactgtagattgctgctgggcaacagactgagagttgcttgcgctgcggcagcggagaagagagatgattgctgttcgatgggcggcgctgctggtcgcgctggtggtggcgtgcggcagcgctgctgcaggtgcagcggcgggggaaggacctaactggctgggcgggctgagccgggcggcgttccccaaggacttcgtgttcgggaccgcgacgtcggcgtaccaggtcgagggcgccgcgtccaccaacggccgaggcccctccacctgggacgcgttcgtgcacaccccaggaaacattgtatacaatcagacggcagatgtcgcagtggatcaatatcatcgctacagggaagatgtcgacctcatgaaaagtttgaattttgatgcctaccggttttcaatctcatggtccaggatcttcccagatggcgagggaagagtcaatccagaaggtgttgcctattacaacaatctgataaactacctgcttcggaaaggcattacaccgtacgccaatctttaccattccgatctccctcttgcgcttcagaacaagaaactgttcacagactatgccgacttctgttttaagacttttggcgaccgtgtaaagcattggtttacattcaatgagccaaggatagtagcactacttggttatgacgctgggtcgattcctcctcaaaggtgtaccaaatgctctgctggtgggaattcagcaacggaaccttatatcgttgctcataattttctcttgtcacatgctgctgctgtgtcaagataccgtaacaagtatcaggctgctcagaaaggaaaggttggaatagttctggacttcaattggtatgaagctctcacaaactcaaccgaagaccaagcagcggctcaaagagcaagggatttccatgttggttggtttgctgatccattaataaatggacattatccacagataatgcaagatattgtgaaagagaggctgcccaagtttactccggagcaagctaagttggtcaagggctcagcggattacattgggatcaatcaatacaccgctagctacgtgaagggccagaaactgctccagcagaagcctactagctactcagctgattggcaggttcaatatgttttagaacggaacggcaaaccgatcggaccacaggcgaattcaaagtggctttacatcgtcccagaagggatgtacggttgtgtgaactatctgaagcacaagtatggaaatccaacagttttcataaccgagaacggaatggatcagccaggaaacttgactcgtggccagtacctgcacgacaccacaagggtgcaattctacaaaggctacctcgctgagctgaggaaagccatcgatgacggcgccgacgtggctggctacttcgcttggtctctcctcgacaacttcgagtggcagtcaggttacacgtccaagtttggaatcgtctacgtcgacttcagcacgcccaagctcgaacgacaccccaaggcgtcagcctactggttcagagacatgctccagaaacacttatgagcgtctaacaaccaagcctgaaataggtaccattaaatttcttcagcgttgcctaagctagtggccatattattgtagcaaaagttgtaagctagcacagtgcaagggtatcaaaaattataaacgggcaatgaatttgtatgttccatgctaattgcattttaccatcggtcttgaaaattatctagcgagttgtcatctagatcctcgaagttccaaaatactatatatttttagctcactaaagttgtagcgggtttcattcaagtcccaaacggac

SEQ ID NO: 21536 - DNA, 1848 bp, Zea Mays
tcgagttcttccgcttgttggatcggcgggagatgggatcctgttcatcggagcagcgtactgatggccctgtcttgtggggtgggagcaggattgatttctgcgttacgggctgcagcttggttttgttggtcgagtggagggagaattcccgtgatcttcagtcccgggctccaggctgtgtcacatgatgtttggttttcccttttgatctgcgttttgttactgactgcggttttgaatggtagctagagctgaaactcgagtctcgcagcaaaaaccttgccattgttgaattggccctgatgtttcatgtccagtgtttgtgttcttccgctccatgattcgcgactagcgagcatgtgttctgccatggattcagagcgtcgtggagttttttcgtgtcgccgatcaagtcaagatcgctaccctgttttgcaccgatcatatcctgctttcattgtcgatcctcgtttgtgacgtactgccactgttcatctcggtttgacttttccatcgctcgtcttcctgatgccactgaaacagcgacggccacggcctgagcggcgctgccagcaaggcggctagtatgagcagcatggagtcgcggccgggccgaacgaacctggtggagcccatagggcacggcgccgcgctgccgtccggcggccaggcagtgcagccgtggtggacgagctccggggctgtgctcggtgcagtctcgccagccgtcgtggcggtggcgcccgggagcgggacggggattagcctgtcgagcagcccggcaggtggtagtggtggtggcggcgcggctaaaggagccgcgagtgacgagagcagcgaggattcacggagatctggggaaccaaaagatggaagcgctagtcaagaaaagaaccatgccacatcgcagatacccgctctggcgccagagtatttggcaccatactcgcagctggaactgaaccaatcaattgcttctgcagcatatcagtacccagatccttactatgcaggcatggttgctccctatggaagtcatgctgtggctcattttcagctacctggactaactcaatctcgaatgccattacctcttgaagtatccgaggagcctgtttatgtaaatgccaagcagtaccatggtatcttaagacgacggcagtcccgtgctaaggctgaacttgagaaaaaggtggtcaaagccagaaagccataccttcacgagtctcgtcatcagcacgcgatgaggagggcaagaggaaacgggggacgcttcctgaacacaaagaaaagtgacagtggtgctcccaatggaggcgaaaacgccgagcatctccatgtccctcccgacttactacagctacgacagaacgaggcttgaagtagcggtatggctctggcatccttgaacagcagttcctgtccacgggcgtaggcattcgagaccggattcatatagctctccacagcatacgcgcagccatctctgcggtaacgcacgttctcctgaacgagctttgtagcgagataggtatgcaagtgcaatctgggcgcaggaatccatcatcaagtgcccaatgcccatggggtaggtacgctgtttcaggcaattcattcttggctttcacgttccacccttgtgtaactggtgtgttgtaaatgtgtggaaaactaagcttgtgctctgtatcgggccgttcagcggaactgcaaaacgcctgtataattaagatcgaactttggattaactcggtaatgctttgtctggttttcttttagcttttcaactgtaacacggccacagctgattcatgtgatgtgcttgcatatctttccttgtgccaa

SEQ ID NO: 21537 - DNA, 972 bp, Zea Mays
gaggagagacagacagagagagcgagcgactgagaccgacagggttcggttcgacccgatgcttccggcgctgcggcctcgccgccggctcccggtggcatccctcctccgccgcctcctctccgactccaccccctcctcctctggcactggagagagtgatctgatggccgcggccgcagcgaaggcccgggcggaggcggcagcgcgggctcgggtggaggcgtacaagcaagtccaaaacttcgactggagcagcggcgccgactggaagaccgccgccaacatcctcttcacggtgccccctaagcgcaaggagttcggctgtctatttagtggcccaatatgcacggagggagatcaaaaggatggaaggggaagcagaagagaaaaggaaaaaagacgaggaacttgagaaacaaaaacaggtcgaggaagaatctgccaaggaggatgctgattcaaagctttcgaaggtattagacaggctagatacactagagggtgtcgttaaggagattgtggatgacaaaaggaaactttcttcccctgatttaccgaccaaagaggaggttgcaaagaaaaatgaagcatctccggctaaggcttctgattcgagaagctatggtcagccagtggtggctgccaatagtaaggacaccaactatgcttcaaatgctccagcaaatactgcaaaaccaaacaataaggggattggtgataaggcatttccagttgagtccgaaagttgataaatcatttgagtttttttcttctgaaaacacaaaattggtgtttagctatgtagtcgtgtcctcgatgctaagcgaatgaaaagatgtaatttccacaccttaggatatgatgcgtcttaggaaaaaaaatacagtgagctaacgttttgtactacatagccccttcgatagttgaggctgtgatcttggataatgattaccacaaaatctttctgct

SEQ ID NO: 21538 - DNA, 2416 bp, Zea Mays
atacatactgcgcgttgcaagctcccacttcctgaggaacaggaactccatgagatccgcggcatccgccgtcccgttcatctgcacaaaaagaccgtaatccttctttttcctctcctccccatccgcggagtgtaaatcgtctctcgctagcgcgttcagtagaaaccctaaaccccgcctcctcccctcgccggggtaggggctacgggtgtcaacgcccgccatggacgcattccggaagcaactggatgtgctcatgggcgctaaccgcaacggcgacgtcgaggaggtgagccgcaactactacgaccgcgacgtctgccggctcttcctcgccggcctttgcccccacgacctcttccagctcacgaaaatggatcttggtccttgttctaagattcactcgcttcaactgcggaaagaaagcgaaagcaaagggaacagagaattttgacagagaactcgaggatatgatagaaaggctcattgtggagtgcgacaggaaaattcagagggccctgaaacgacttgcggatgacgatgccaaggctgctattgcgatatccgtctcggaggttactctgacggatgacatactgcagctgtcaaaacagatcaaggaaaaaatggtagaagttgatgcctttgattttgaagggagaactgatgataaaataaaggcccaggaagtagtggaagaactcagaactaaaagagctgatatgcaggctaccctcttgcttgatgcttttaacaaggacagagcttcattaactcagcctgctcaacctcctcaagtggcggcagcgccaccaccagctccacccgatgctcgtactcaagaaatgatcaatgaaaagcttaagaaagctgaagagcttggggaacaaggcatggttgatgaagctcagaaagctttggaagaggcagaagctctgaaaaagctggcgcgacgtccggagccaccttcagacccttctaaatatactgccgctgatgtttggattaccgatcaaaagttgcgcctctgtgatatatgtggagcatttctgagtgtatatgacaatgatcgacgtcttgctgaccattttggagggaaactgcatctaggctacatgctgattcgtgacaaacagaaagaacttcaggtgctgagtgtaatgtaccgttttctgctttaaagagttactctgttttgggccttttggcatctgtgagttttcttatctcaagagcctcaaggttctcaccttccctctatatattatttgattctcacattgccgggcactatggttattacgatagtcattacaggaattagtccatgtcgcgtgattggaatctcatgcgatgatcttcatacctatggctacaacagtcactgtctgttgacaaatgtaagcataggagcgtgcggaccatggtatgaaaaaaatcatgtttacttaattgtgacaaactgctcatgtgtctgcttagtatcgattgttgggcagaagctggaggttgcctttttactgcctgagccatattatgtagaccaggtgacaaataatactggttaagttatcctgaaagcacacttcttttgccaacattttgctgtaagtgacaacttgttctgttttctatctgctacctcctccataagtttgcaagttacattttgctgaagcaaccttgcctgtaaagtatcgcccgccctatcttttggaacgttgtctctgattttaaatatgccaaaatatcattatctgtactgtcaataaacaaaatacactgtggcatcttgcaggagcagagaaacaaaaggaggacaggcaaaactgaagatgataggcgatctagagagcagagcaaggatcgaaacggcccgccgtccagggatagagattcagaaaggagagacagggttgagtctcgagatggaagaagagattatgatagggaacgcgataggcgtcacgatagggaccgtcgccatgaccgcgaccgggatagggattatgaccgctcccgcggatatgactcaaggagaagagagcgttcacgctccagggagcgcagcaggcgccatgagagatactaaatgttactccatggctgacagattttggattgctggcgtctgttctggtttgtgttgtgctttgtgtcttatcttccgaagtttcctgttcctgctcgagaaatccgaaagccaatctgcgttctgcatcatgtcatgtcctagtgtcgtactgtttagttatatgccgagaacatctctttcatcaaatgaatatttggaaacaccaacgcacttgacgctaaatgggaatgaagtgtggagtatttaaacgcctctgaaatcaaatgaaagttgtacttgtacgaaagaaacatattcaaaaaaaaaaaactcaacaat

SEQ ID NO: 21539 - DNA, 622 bp, Zea Mays
gtccgaatgtcatcacataacaacagtatggtggccaaatcacaagcttttacacgtatagtatagtgtgtttcatctttacaagatcctttcccttttccttttcacccctatcaccccaacccacctacgctacattacatttcctgctataccaccaatctgtatacaattgaaaaactacaggctactacaacccaatgcttcctgagaatctagacaaatttggacagtgcgagtttcaagtcctgatggtattgtggcatattggttcctgcatgcattttgcaaatgaacaaggctaagagttattttataccttgcattgctgtaatttttacttctccccaccagggacatgggttcttgttgagatatcttgttaaccctttatttttgatcagttatttctcttcaagtttatctgttggggcctaatcctcttagcgacgcgtcatattagaacccgggtgttgtgttaaagcttggacaaccaatcatttattatccgagaatttaatttggttttattaatcaatttaaacctttctataggaagagagtggctcttcactcccatcggattaacaaaaaagaggaaggataaggacgcaaagaagac

SEQ ID NO: 21540 - DNA, 2566 bp, Zea Mays
caaatcttgtttcttcacagcctgccgccaaacaaagaagaactcaggatcagatacttcttcagataaatctgatactgctgagcatgtgaagtaccttgaagtgctcgagagtttaccagataagaaaggagtagcgtctgaagctagctgtgctgttcgagaagcagagaccaataaaatcgaagctgggtcagaagagaggtttgtacccagctgctgcaccatgaagcttgaacctgcactcggagatgacagcagggaagtccgggaggcaaaataccggcgcattcgtcatgaagggaaaggagaagcaaagcagccagcgacagcaagagacagatcaccaaggcctgtggttaacagcatcccttctaatgctgaccctgtagaagggccatttgagtgccatatgagaccgggattcatatacgctaacggcgagaagggccatctgagtgacaggaattttgatgatcctagcaccagagtcagtggcctggagaaagatcgtactgagcttctgcggatgcttgatgagttgcgggacaaggtacagagatcctgcgagattgctgacaagtcaagtgtgaatgcttcgacaaatagaatggttaatcctacaagctcctgcattcctcatgagcgtctgagtcgattgcggtatggttcacctcagctgcaacggaatgggtctcagcactcaccttctttgaatgggcagacacctggtgttcctcctgcttttccttcattatctgtacagcaagatctccatggatacggggaatcggttgcacacacgggagctcctatctacccagctgccccatatccatggagaaacttcgataattatttccaaggacattatgatcctgaccctctgatctcttatcaccatgatggcttctaccatcagcctgcttgctcttgcttacattgttaccatcgtgaattcttacctgttcgaagggcaccctatcttatgaacaatcctagcttgtaccatgcagaaggcccagtgatgtttggtgcacagaactacaatacaagaggcatgaatggtatgatgcgacgcagtcacatgagggccaccctgagtaaaaaacctgcacagacttgtgaaccgattgtcaatggcgctccttttactatttgctacaattgctatgaagtgctgcagcttcccaagaactctctcttgttgggaaaagatgagtataagctgcgttgtgggtcatgctcacatgcaattgtggtcagacttgatggaagcaggcttgatgtttcagcacctacaccagtttcacacttatcacctggaagtaagaactactacaacaatggccaagcaaacaatggacaaaatgctgatgagagacttcttccatcctatagtttttctgcaggcagtcattgctctcaagaaaaagatttaccctcgaactcaagcgaaccagacaaaacgcaatgcatatcttctgccagcatttccgaggatgataatagcccagctagatcgaattcacagaagaactcctctggttctagagacgttcctcatgatgctgaagtggttatccgcgttccaactttacctcttcgtgatcattttggatattctccatcagatagggtggttgatgggccaggcaaaggaagcagaagcacccggtccgaacatgaaaagggtgtgttaactgaaagttttaagccaaacaaagtgaaatgtgtacctgtagcaagcgtgctagacccgtcggacgacgagtatgatgatcctgagcacagtcaagatccaggtggtggggcacaatacgtcgaccacctgcgggccacgaaatcgggtgattcctttttctccagcctcataaagaagagctttaaaatcaatggtggaatgggcaatggcagagcaaatgttttcatcaatggctatcccatttctgaccgagctgtcaggaaggcggagaagattgctggaccagtctacccgggtgaatactggtatgactaccgtgctggattctggggtgttatgggacagccctgccttggcatcatacccccatatgttgcggaattcaactatcccatgcctaagaactgtgctggaggaaatactggtgtgttcatcaatggccgagaacttcaccagaaggacatggacttacttgtgggtcgagggcttcccgattctcctgatagatcatacagagttgagatttctggtaaagtatccgacgaagtatctggtgaagagctttattgccttggcaaactcgcaccaacggtggagaagatgaagcgcgggttcgggatgcgagtcccaaggatcattcagtgaagttggttcacatcgagaagcagaggctctgaaagttgtgtgccactacgcctttgtggtatccattgctaatgtaaccctgcctggaatacttgcatctgtcgcagtggttgttttgatcgagtgtgtcttggtgtggccatgtaattttgtctgtacaacatgccggataggtttgcttggggtttaataaaaatgggtgggtccaattctgtg

SEQ ID NO: 21541 - DNA, 2332 bp, Zea Mays
cttgaccacttgatgaacttgaaagacccagaagatctgctataccctcacattgtttctgaccattcacaacagttcaggcttcttgatgtccctcagcgatcaaatggtcaatctgctcatcaaacagaagggacaaatggtctgtccctttatgatagccacaacattgaggatgccaatggctctcagaagttcatctgcagattatgtgggctcaaatttgatcttcagccagatcttggccgccaccataaagtcgctcatatggactcagatgttgttggccacagctcactgggccgtgggaagtatcagcttaaccgtggccgacactactattccgctttcaagaaaagtttacgaccaacaagtacattaaagaagaggagtagctctggaatcgagaaaaactttaagtttcagagttctgccctaacatctcaaataattcaatctgaaacatccagctttggtaagttacaggattttcagtgctcagatgttgcgcaaacattattttccaagattcaaaagacaagaccccatccaagcaaccttgatattttatcggttgcccgcactgtatgctgcaagacaagtcttgctgctgcattggaagttaaatatggatctttacctgagaacatatttgtgaaagctgcaaagctatgcagtgacaatggcatccaaattgattggcatcaagaggtatttatatgccctaaaggttgcaaatctagatataattcaaatgctctgcttcctatgcaactcacggcagttgattttcctgaagctccttctgttgatcctcttaatgatgatgaaatgtgggcaatggaagaataccattatgttcttgattcaaagcactttggatggaagcctaaaaatgagagtgtcgttctctatgaagacataagctttggcagggagaaagttccaattgtctgtgtcattgatatggacgcaaaagattctttaggcatgaagcctgaagaacttttgtcacatggcagttctgtgccttggcaaggtttccactatatcacaaagcgtttgatggattcatctcttattaattcagagaactctatgcctgggtgcgcatgttctcatcctgaatgttctcctgagaaatgtggtcacgtgagtctcttcgatggtgtctatgctagtctggtggatatcaatggaacaccaatacatggcagatttgcatatgatgaaaatagtaaaattattttacaggaagggtatccaatatatgagtgcaattcatcatgtacttgtgactcatcctgccggaataaagtattgcagaaaggactgcttgttaagttggaactcttcagaactgagaataagggttgggctattagagctgccgaacctattccacagggtacctttgtctgcgagtatattggtgaagttgtgaaggccgacaagaccatgaaaaatgcagaaagattgatagggaaagacttcggactgtaggggctattgaatacttgattgatgccacaagatctggaaatgtgtcccgctatatcaatcacagttgttccccaaatctcagcacccgattggttttggtagagagcaaagattgccagcttgctcacattggcttgtttgctaatcaagacattgccgtaggagaagaacttgcctatgattaccgacaaaagcttgtagcaggcgatggctgcttctgccattgtgggggtaccaattgccgaggccgtgtctattgacttcgcaggaagacactaactgttcaacgcttggttgcagaactcgaggtttctacagctgtgtaggctgctgagcgatttagcactgcaattttccagagctcgagtgcaggactaggatcccattcttcatgctacaaatagggattgtgatataggactcacaggcaagcatcaggcaacaacatagtgtcgattttagtcatggtaccatcgtgcataactgattatttgtttgacgcagccagaaatgaagtgattcaggctgctttattcgtaggcgagaattctttcagtaaaattccttcattcatattttattgctcatgggcaccatcatcgacgtcaagtaataaactgcttatcccatttttgcgtttgttcatattagacgacggcctgttgtgcaggtaatattttgtagttgtattaattgcgtgatggctatcagaatcaatgaaaagataagtcttgtttctttaatggcgtatttgtattttgcagttgtattaattgtgtgatgggtatcagaatgaatcaaaagatagtcttatttctctaaatgcgtg

SEQ ID NO: 21542 - DNA, 1648 bp, Zea Mays
ggctgtgcgctggcctactgccgcgccccccttacttcttgctgcacctggagcggaaggaaaaagtcttacatgcctctactgtattggctcaaggtgttggtggcgatttcattgcgcctgatagcttgctgcaggaggttgtcaatcttgtggaggcacctgtgcccatccttggtcgatatgatgattccttcttagaacttcctaaagatgtactgattacggttatgcagaaacatcagaagtattttgctgtaatctccaagtccactggcgatctgctaccttattttattgctgttgccaatggtgcaattagcaaggaagttgttcgcaaagggaatgaagctgttctcagggcaaggtatgaggatgccaaattcttttataagatggatacacaaaagaaattttctgaattccgaggccagcttagtggcattctttttcatgaaaaacttgggacaatgctcgataaaatgacacgtgtcgagaataccgttgctgaattggcccttattcttggaataaatgagagaacggtcccaattatcaaagatgcggctgcattggctatgtcagatcttgccacttctattgtcacagaatttacttcacttgctggaattatggcacgccattatgctttgagagacagcatccctgaagagattgcagaagcactatttgagataacactccctcggtcttcgggtgatgtgtttccaagaacagatgctggtatagttcttgcggttgctgatagattggatagcctagttggattgtttggagctggatgccagccaagttctaccaatgatccatttggacttcgaagggtctcttatggattggtccaaatattagttgagaacaaaaagagctttgacctcagacgagctctcaccttattggcaggggtgcaacccatagcaatagagagtgatgttatagatgaggcagtacagttcgtcacaaggagactggaacagcttctggtggatgagggaattaactgcgagatagtccgatcagtgcttatggagcgtgcaaactgcccttatctagcagcacaaacagcgaccgaaatggaagcattttcgagaacagaaacatttcaaaaaatcgttgaagcgtattcaaggccaacaaggatcatccgtggaaaagaaattgagtctgctttggaggttgacccacacgtatttgagaaagatgaagagaaagttttgtggagcgcctacttggaggttgctgataagatccatcctggtgttgatattaagacctttgtggatgcttctcttatcctgatacaacccctagaagatttcttcaatagtgtcttcgtgatggcggaagacgagagagttcgcaacaaccggctaacgttgctgaggaagattgagagtttgcccaaggggattgcggacctgtcagttttacctgggttttaagctgcctattccagccagggggtgtgagcaatagccgtagcggagagatgattttgattttacaagtatttctgattaaaggaaaaaaaaacgtcgtcgcagtagggcacggcaatcccagtaaacgctgtacttgtaattctgattaatacagtcaacaaacggaatcatatctcaaatcttgt

SEQ ID NO: 21543 - DNA, 1603 bp, Zea Mays
cacccgcatcccctcttcagcgtagtgatgacgcctcactaatgaaaatgggaaccactcgaaaacgtcgctcactctggctgagagattgcagaggagcacgatggtttagagagtgttttagtgcctatgcaggggattgtggttaatgggaaaagtacttcagagctattgagtggctctgtatcattgaggtcagctgaggtggttggaacacctgttggacgaattgtgaagtgtgaggagtttctgaaggctgcaggacctgttatgctggttggcccttctagctaagttcaccatcttcaactttggtactcagaaggatgtctccaactggggcttgttcttctgtgttgcaattggtccatgggctggtctgattattggttttgtcacagaatactacactagcaatgcatacaagttcaaagcctacaagtctcttatgttttttcttctcatcgtttctttgtgatggtgttttaataatcctaacatgtttattctatggtagtcctgtgcaagacgttgcagattcctgcagaactggtgctgtcactaatgtcattttgggtcttgctcttggatacaagtcggttatcatcccgattttcgctatcgctgttatcatctatgttagtttctccattgctgcaatgtacgacatcgcagttgccgctcttggtatgctgagcacaatcgcaactggtcttgctattgatgcttatgctcccatcagtgacaatgctggtggtattgctgagaactgatgctgttgatgctgctggcaacaccactgccgctattggaaagggatttgccattggttcagctgctcttgtgtctctggcgctttttggtgcctttgtcagcagagctggagtcaaggttgtcgatgtcctctcccccaaggttttcattggtttgattgttggagccatgcttccctattggttctctgccatgaccgtgaagagtgttggaagtgctgccctaaagatggtggaggaggtccgcagacagttcaacaccattcctgggttgatggagggaactgccaagcctgactatgcaacctattggaagatctccactgatgcttccatcaaggagatgattcctcctggtgctctggtcatgctcactcccctcattgttggaaccctcttcggtgttgagactctctatggtgttcttgctggtgccctggtttctggagtgcaaccgtcgttttctcttaacagaaaagaactataaaaacgtcgccgctgtcaaaacccagaaattacgaggcgcgaaatggaaagcttccagcagattaacgatcggctagatttgattcattccgcccgcccactacctctcacggtcacggccaatccggccaacccagagatcacgtgtcagtgctattttgtgtacaagtactacttaatatatgtttgaaaacttttttaagtgatttccaaacttgaacgggaatcattcttattcttttaaatgtctgatagtagttattgtttgtgtgacattgtactgttttgtttcttaaacaaacaccattctacaaattttgcatcgtccctgtagtgcgcccgta

SEQ ID NO: 21544 - DNA, 1488 bp, Zea Mays
gtcaactaccccctccttttaaaatagtcttgcagcacagtaagcattgtagggtttgtaacaagtgtgtcgatggctttgaccaccactgtaggtggctcaacaattgcataggaaaaagaaactacaaaggattcttcatcctattggcttcagcagttctcttgcttataatgaagtggttagtgggtgctcttgtgttgattcttttctttatgaagcggggagaattctctgggcagataacctcaaaacttggaagcagcttctcagttgtggcttttgtaattgtcgtggtgacatgtacattgctagcgatggttgcaacaataccactctcacaacttctatgcttccacattcttcttatcaagaaaggaattagtacatacgattatattgtagctttgagagagcaagagcaacaagaacattcggagcaccagagcccacagatatccatcattagctctatcacaggacttagtaccagtagctcttttggtccacttcatcgtggatcatggtgtactccaccaagactattagttgaagatcaggatgtttttcatccggatatgccacagaattccactggcaagaaggccaggaaagacgaaggaagcaaaaggaaaccaccaggagctgtaaaaatcagcacatggtcactggctcgccttaacgcagaggacgtcacgaaggcagctgttgaggccaagaagagatctaaagtcctccagccgatcacaaggcgggggaatattcttaaacctgacaagagaacagacaaaagcagggtgttcctacctgtacctgaacaatctccggatcccatggcaaggacatccgcaagtggaaccgacggtaatttgagcgacatgatgatggaaacacccgctagcttagccccattgcagcacgaggccaggagtgactaccaacccagtgctgtgacgtctatcatgaacctcaaccttacttcatcaccggagagtagcttggagtcacctgatctccaccccttccgtatctccatgtcaggagcagatgaactccgaagcttcatgtcacttgcagcctcagagtcaactgctcagaagactattgcactttcgaggtcgacaagcggtgggtatgaagcctcgggaggcgacgacagcgaccaaataccctctagaattgtgcacaggtcgtccaattggacaaatgtcattctcaattcaggtaggcaggcaactatgtccgatctgaacttgcctaggctacacctgtagggttcataactaacaccaggctgacatagctcaaaattgtgagttgctgacttcttaattagctatgtgttgttagcctgtgagcatgcattggtcagaaccagtgttgggaacctggtttttgggtttaagagtcgggttatgttttgcgatcaataaatacatgtgcctttccaagctgtctattgttactttgaccatagttttcggtaac

SEQ ID NO: 21545 - DNA, 5739 bp, Zea Mays
ctccgctcaattcctccccacgcacccgtcacctctttccattccaatttcttccacctccctctctcagatctccacccctcccccaatgatgtgacggtcatcacgagggcgaaaaccaacgcacagaacccctcaccatggctacgtccacgatgccactcggcggggcgtctccgtcgggccgcgttctgggtccggcgctggaccggatcataaaaaacgccgcatggcggaagcactcagcgctcgtggccgcggcaaaggcggcactcgacctcctctcttcatcgccggcatacccgtcttcggaccctatctcgccgcaatcctcgctgctgctcggcctgccctccgccgccgccgacgcggccctccacgcgctgctgctcgctctcgagtcagcttcgcccaaggtcgtcgaccccgctctcgattgcgtcaccaaacttctttaccaccgcctcctctttggcgacctcggctgcgccggggacgatgcctcttcccccacctccaggctcttcaccgccgtccttacctgtggcgctctctctgatgatgcaatggagcttgccaccctccgtgttatcatcgccgccgcgcggtgccccactgtcgccatccgcggggagggcctcggccaggtgctcaagacctgctacaacatatacctcagcagcaacagtggggccaatcagctctgcgccaagcttgcgctggcgcaggtcctgctgattgtgtttgcacgcgtggaggtggattcgatggacgtgcgcattcggacggtgtcgatcacggagatgatggacgtgtctgatcgcaacctgaacgactccagcatcgtgcaggtggctcaggggtttataaacgagacaatggaggggagtgttgcaccagagccagggtcacatttggagccaaccgaggtggatggaaaggaggatactgggatgagcaagattagagaggatgggcttgcactcttgaagaacctgtgtaagctgtcaatgaagttctcgacgccagataaccctgaggatcagatgttgctgcgcggcaaggtgttgtcacttgagttgctgaaaatggttatcgacaatgctggccctttctggagaacaaatgaaaagtacattggagcaatcaagcagtatctttgtttgtccttattgaagaacagtgctttgtcagcaatgagtattttccagttgttgtgctccatatttgtgggcttactgtcaaggtttagatctggactgaaagaggaaattggaatattctttccaatgcttgttctaagggttcttgagaatgtccatcaacctagctttctacaaaaaatgacagttctaaacttgttggagaagatctgtaaagaatctcaggttcttattgatatctttgtgaactatgattgtgatgtagatgcaccaaatatttttgaaagggttgtcaatggacttctaaagactgctttaggtgttcctccaggatctacaacaacattaactatagcccaagaccaaacatttcgtattgagtcagtgaagtgccttgcaaccataatcaagtcaatgggttcatggatggaccaacagctgagaattggtgatttttcaccaaaaatatctgaagcttctttaagttctttaagttcaatagataaccccaacatccttattggagaagatggtagtggaattgattatgaactgcaatctgactctggtagcccagatgtatctggtgctccctcccttgagcagcgtcgtgcttttaaaatagaacttcagaaaggaatatccttgtttaaccgaaaaccttccaagggaattaattttctcgttaaaagcaagaagatagggcatacaccagaagatgttgcttgtttcttgagaaatactgctggtttaaatgcaacaatgattggagactatttgggtgaaagagatgaattccctatcaaagttatgcatgcatatgttgatgcactaaactttgaaggtatggacttcggtgaagctattaggtattatttgcgaggcttcaggttgcctggggaagcacagaaaattgatcggatcatggaaaagtttgctgaacgatactgcaaatgcaatccaaactcctttaccagtgcagatactgcatatgttcttgcttattctgtaatcatgctcaacactgatgctcacaatactatggtcaaggataagatgtctaaatctgacttcattcgcaataaccgaggaatagatgatggaaaggatttgccagaaacttatctgggtacactatatgaccaaattgtcaaaaatgagatcaaaatgagtgctggttcatcagttccacaaaacaagcaacctagtagtgtgatgaagctactaggattggacaatattattagctttgttaactggaaacaggctgatgacagggtagttggagcaaacgacctgctcatcaaaaccatacaagagaaatttaaactaaagagtggaaagtcggagtctgtgttttctgttatcactgatacaacaattttaagattcatgatggaggtttgttgggcccctatgatggctgcattcagtgtgacacttgatcagagtgatgataaggcggccacgtcgcagtgtttgcagggattcagatctgctgtgcatgttacctctgttatgtgcatggagacacagagagatgcctttgtgacatctgtagccaaattcacatatctgcattgtgctgctgacatgaaacaaaagaatgtggatgctgtgaaggctattatatccattgcaatcgaagatggtgattatttgcaggaagcttgggagcatgtactaacatgcctttcacggtttgagcatttacaccttcttggagagggggcacctactgatgcttcatttctcacagtaccactggttgactcagaagaaaaaacacagaagtctacctctatgtcatcaaagagaactaatgcacttcagaatccagctgtaatggctgctgttagaggaggttcttatgacagcacaacagcaaaaaataaagcatcaccgttggttactcctgaacagattaataatttcatatcaaacataaacctgctagaccagattggcatttttgagttaaatcacatatttgctcatagcccaagattaaatagtgatgctattgttgcttttgtgaaagctctttgcaaagtttcaatgacagagttgcagtctcctacagatcctcgtattttctgcctaacaaagattgttgagattgcgcattacaatatgaaccgcattcgtttggtttggtcccgtatttggaaagttctgtcagatttttttgtttctgttgggttgtcagagaacctttcagttgcaatatttgttatggactctttaaggcagctagctatgaagtttctggaaagagaagaactggcaaattataatttccaaaatgaattcctgcaaccttttgcggttgttatgcagaagagcaatgcttcagaagttcgtgaacttatagttcgatgtgtctcccaaatggttctgagtcgtgtcaacaatataaaatctggttggaaaagtgtttttacggtttttactgcagctgctgctgatgatcgaaaaaatattgttttgttggcatttgaaaccatggaaaagattgttcgggactatttcccttacataactgaaactgaaacaacaacgtttactgattgtgttaaatgccttatcacattcacaagtagtaaattcagcagtgatgccagtcttaatgccattgcatttcttcggttttgtgctgtcaaactcgctgaggaaggatttattagtcatgagaaggatactgaacagcaaccaagtaaaatagattcatcagatgggaacagcatggtgcataaggacgatcatgtttacttctgggttcctttgcttgctggtctagctagattgacaacggactcaagaccaactatcagaaaaggttctgcagaagtgctctttgacatcttggcagatcatgggcacctcttttctcagtccttctgggctaatatcttcgaatcagttatctatcctctttttagcagtgaaagttttgcaccaaatggccagatctcaagtgtaaatagtactgaggatgattcttggaattttgaaactaaaacggtggctctaaaatgtttagcagatttgtatattatgttttttgaagtgatgcgtccagaactttctagagttacttctgttattacgaatttcatcagaagcccttataaacaatcagctagcacgggtatatcagtttttcagcgtttaacagaaggactcgcgagcaagctctccaatgatgagtggggaacggtcctgttgtgcttcaaagaatcagcatcacatacatttgttgtgtttgacaaaatagttaaaatgatgaaagtcattgaaattccagatagaaatgaatcttactctgaagctgagcaatattcagatcatgacatatacaatgatgaagaagaggaagccaatatggaaacggcgtcttatgctattgtcagaatgaagaatcatatggctttgcaactcttaatcgttgagggcatcatcaaattgtatgaggttcacaggagctttcttggtgctgagcatatagtcataatgttggagattctatctgccattgcatcacatgcaagtgaagtgaactctgaatctaacttgcacaggaaactacataaagcatgctctattttggaggtacctgagccagcggttatccatttcgagagcgagtcctaccagagctacctcaaacttctccaagctcttcttcatgataacccatctttgtcagaaactatgaatgtggagtcacaaattatgctcgtctgtgagaaaatactgcgaatgtatctgacctgcgcagagcatgaactgtctaatggtgtttctggtaggggtccagctttacaacggatgcctctgggtacttctaaaaaggaggagctgggtgctagaactccatttgtccttcatgtgatggggttattgggcagtttagagaagaactgctttaggagaaacttgccccgctttttccccttattagctaatcttattcgctgcgagcataactctggagaagttcaagttgcactgtatgatatcttccaatcatcaataggccccataatatcagcatagcgtatattgtttcctcgccagttgtacaattttgtcagattgtggtataagaaaagggtacagctttacagtactgtaaatgattcatggttgaggcatttctggtgttgaagctacatggaacatcgacccagatgtctaaacaaggtttttgctgcgcacatttgccattcttttttctaacattcactgggtaatcattgacacgttaaagaggatggacattggaataagtccctaattcctgttttggtgtcatttcccccctttcatcttggctctgtatagtgtcgtctcccgaacctcagctaccagtgaagagggacttctgtcatatgttactgttcaacatattcgtctgtcgaataccattttaacagtatctacattgtagttagtatatatatactttcattctaacagcaatggatatcccaatggatgtctattaaagaaaggtgagcaatatagttcaataccttttctcacgtcccattgccatcaggatcacgacttg

SEQ ID NO: 21546 - DNA, 524 bp, Zea Mays
acgtaaaaatttcattgctggctcagcttgcgccataccgcgtcgtgcggagttcttctctccttccgctcgaagagaagagaaaaaagaacggtccgtgctcggctgccgtgaatctctctcacctccccgaagcaagcgagcggggcagcgcgccaggaaggatcggaggagacgccatcaatcagcacttgcacgcgcgcggtcggccgcaggtggaggaagaagatgggcctgtgctcgtgctgctgccggtgcctggagctgctgtgctcggtcctcctcccgcccctcggcgtctgcctccgccacggctgctgctccatggagttctggatcagtgtgctgctcaccatcctcggctacctccccggcgtcctctacgccgtgtacgtcatctgctccgtcgacccccaccgccaccgcgacaacgacgactacgtctacgtagcatgacaagatggaccggtccccgtggtgctctggatggctcgggcaaggcataggagctgccgctgccctac

SEQ ID NO: 21547 - DNA, 622 bp, Zea Mays
agcccaagacctttgcctgcttcagttgtagattctagaatatcagacaaggacgataatgatgttgcaggtgaagattcagatgaagagccacagaagaatgccaacggtgaatacaatacaagtgatttattgaagcagcatgtaaagcgtgcgaaaaggatacgtgctgggttgcaaaaggatcggcttcgtcggattgaaagatacaagcaacgccttgcacttcttttgtagaatcggcctgtgactgtataaagctgaaaccataggtgtttgtcttgcaggttttaacttccgtattggaatttgttaagatgttttattgactagcattgtatgttaggaccatctggatgttttattgccaacgttatctaataaaatgtgaaaaagcctttagctaagttggttggatgatctgagtagcactattaaagttttgagtatggtgccactgtgcatgggtgagacaaaggttcgaagttcgaaggttttctcgagctgcatgagaagatcttaaatgtaatgtaggtcttcttaaaggtaatgccgttgaggtggtcttaccatatatgtggattttttttatctagtgaaatgaaactgaaatcatagtcat

SEQ ID NO: 21548 - DNA, 1090 bp, Zea Mays
accacaggataacaattatgttggtttgcatgacaggcttgttacagtcacaggaacctttgataatcagatgaatgcgatagatttgatactgaaaaagttatctttggatgttcactacccagctaatttgagctccccatttccatatgcagcatgcatttcttggaaacataggtcttactttcccaagctaccctggtgttcctgttggttatatgattccgcaggtgccatataataatgctgtgaactatggacctaataacgggtatggaggaaggtaccaaaacaacaagcccagtacacctatgagatctcctgctagtaatgaagcccaagaatctctgaccattggtattgccgatgaacacattggtgctgttgtaggacgtgctggaaggaacataacagagattattcaggctagtggtgctcggatcaagatatcggataggggtgacttcatatctgggacatctgacaggaaggtgacgattactggaacatcagaagctatccggaccgcggagtccatgatcatgcagagggtgtcagccagttcggagaggctatgataccagatatgtttgacggactgtgggggccgttgttgagtccgagcagcatgtttgatgcaagttattattgtttgttgcgttgcgccaatggtttagtcgaagatatatatgtgcagcgtttgaatggatttgggaatagggctgagttatatcccgtggatgccacaacaaggcaggcaggcgccgctctgtgctagtggctgagtaggttgacaattcgaaagggcatggttggaagctttcagcgtttcccattcattcttgtgtgcctctccggatggagatcctctgcagtgccatgtcggccagactgcgagcaaaagctgacttttctggcggacgaagataggagtagcatgcatctagctgtcttgtgaaagtactattatttatcaaaatacagaatcggtcctcaaactttggtacgttgttggctccctgaattcaagaaatcgaaaaaaaaaacaagtcttgtaactttgtcgggtctaaaattagatttgtctaaa

SEQ ID NO: 21549 - DNA, 1071 bp, Zea Mays
caattaccaaaccagccctgactccctgaggtttgacggaggttgggttggatgggtggcccttcctctccccgtcgggagaacgacggcgagggggagtggcgggagatctccggctccggcgacatggaaggagcgcccgaggtccttcgacgagaagaccaggacggcgtgttggcgtaaggcagcggtgctgtcgggacggcacccggaacgctggcggcaggacgccgtgggcaacgtggtctgccgccgtttctggggctgccacggatgcctctgctacgagtacgaccacatcgtccctttctccaaaggaggagaatccactgttgagaactgccagatcctccagactagggtgaaccgttccaaatctgataaagcatgggtagcgcaagcagagatgcagggtttttcctgcgatattatgtttactgataaggagctagatataattgagatggctgtgtacggggacgtcattcgtccagggaagcaatgtcgctgcagaacagtagccgaggtgctcgggcaggtgaagccaacgaatcgcatggctgcatttgattccattcaacagaggaacttgagttctttctcacaagtcataatcttgggaaatggatgcagttgatctgcagcctgtgctcattcatgatatctgctcgtaaacattctgttgatttttttgttgttacatattgattgatggcaacgttatcaatgaattggcccattccaataattgggcttgaaaataactacttcgggtggttcaactcccatggctggtttagcttcagttggttggacctgtttagtaaggccactgtaaggatgtgagctgcaacagcctttgccgaggggtatagaaatgagaaactgaagtttaaatgttgtgttgtgatctgtagcctacatgatgtggtaacttcgaacttctacgcaaccatgatttctaccttaggaggcaaattccttaggagctgctggagaaggtcctcaattccgtatataccataccactagaaaagttgtaatcctacatgagtcagcttcaaattttgc

SEQ ID NO: 21550 - DNA, 1175 bp, Zea Mays
ccgtcgtctactcgctcacgttcctgagtgctgcatctgccttgcgtagtacggggagaaggaggaggttcggcagctgccgtgcacacacgtgtttcatctcaagtgcatatacagttccagctaacaagggaaatcaaggaagaattgatctttatattagcaggcggatgcaatcactaatcaaaaccacgatgcaaggtaacctaaatggattttaaattttattttggattgttaaatctttatttctgactactattgttttatgtcgtggatgccctcgtgaggttctacgccgacgccttcaggagggattcacagaggccatggtgaggatggccagcttgagtcggctcaccgggagcagcgcgagatccgctacaactaaatgataggaggcgattcccatttctcagtgatgtcgatgtcctgtactcctgtatatttggattcaacaatatgccattagtatgctgtcaagcgtcctatttgcaagagataaatggcttacgcccgaggggcttattcttccttatcatgtgcattggtgccacaacactggatgagtataggaagcatatagagaaagatcctgccttggaaagaaggtttcaaccagttaaggttccagagcctactatggatgaaacaatacagatcttaagaggacttcgtgagagatatgaacttcatcacaaactgagatacacagatgatgctttaattgctgctgcacagctgtcttatcagtatatcagcgatcgttttctgcctgacaaagccattgacttgattgatgaagctggatctcgtgttaggctgaggcatgcgcagctccctgatgaagccaaagagctggacaaagagctgcggcagataagcaagcagaaaaatgaggctgtacgtggccaagattttgagaaggtatactgttgtttggcacagcggtgacaaagccgatccgctcccacctctctagcaacgtcgatatggttaataccaagcattatgttgtttccttttgagataaatattttgttactgattttaccttttgtctcctcttcttgttttttgttctagaatctgtagcaaatggctaacgatgaggatatccattactttgtttatgacaataaaactgatatgttcaagattccgtagcaacgcac

SEQ ID NO: 21551 - DNA, 4019 bp, Zea Mays
gtattttggcggcaacatcagggagtttcccgcgaaaaataattgtggctgtccttgccttggccgcttggcttccatctatctattcctccattttcactgcgttcggacccacattcgttcacttcccaatactggagtggatggtagaaaggagagagagaccacactatgtcgatcgcttggcttccatctacaaatcccgccgccggcccgctggcgatcgctgaggcggtccccatctcgatctcccttgtccagttcttttcgccggagtgcactatgtcggcactgccgccggcagaggaattggatgcgtcgcatcagaagaagcggcggaggaggaaaaagcacagggagcaggtggaggctatagcggcatcctcggagcctcctccacctccggcaagcccggagtccaagcccaagtcaacaattccagtcgctcccgaaaccctaacctcagcggcggtgagggagtctccccgacctctgggaaacccggaatctaagtccgagtcgccgctactagtcgctcccgaaaccctagcctcggcggtgatggcagcggcggcagtgaggctggttaaggagcgcgagaggaagaatcaggtggtgccaccggcatctccgttaatggaggagcccgtgtggaaggaggaaaagcagcgtaagaaaaggaaacacgtgggcgccgcactggtggttccatcgccgccgactcctgatgcggcccaaaacttgcggatggaagccaagatgatggctgagggggcgacggtgaggaagaagcagaggcggctgaaggcggggcaggagcaatccggcgagccaccattttcaattgatgtccatccacaaggaggggaagaagctactgatgatggtggcgttggcgtcatggtcactcagtgtgtcaagaggagcaaaagcaagaactcccgggttttgaagacgcagcagacactgccccaaggttttttccctcccatggccaatcccaattccattgatcaggaccccaattattcctcaccttttggtgcattctttgcccaattcgcctacaaacctgctaatatcgctgatcgcccagcgaggctgcctcctcgaggccacccatcatctgggtcttctctactcactggaaaagagacctccaaggctgcctggacagcaacctcaaacaccaagcaaccatgcccagcctcagaatcaacctcagattcacaagaagaggcaaggatcgaagggaaagaaaagcctgagaagaagatgacaagggagatggcagtgagggagtctacccgacatttggcaatactggaatccatgtctgcttcctcagtcccagtcgctcccgaaaccccaacctcggcggcgatgacagcagcgacagtgatgcaggataaggagtgcaagagggagaatcaggaggcactgccggcagctccattaattgaggaccctgtgccgaaggtagaaaagaggcacaagaaaagaaaagtggcacaaatcacgcagatggaaaacaaggtgatgacagagggtgcgacggtaaggaagaaacataggcggcagaaggtgaagcaggagcaatctggccaaacaccatttctcaatgatgtctattcaaaggcaggggaagaagctgctgctggtggcgtcatgggcagtcagtgtgtcaagaggatcgaccgcagcaagaattccaaggttttgaagaagcagcagacactgccccaaggctttttccctcccatagccaatcccgatttcattgatcaggaccccaattattgttctccttttggtgcattttttgcccaattcgcctacaaacctgagcgccggcaagatgggaatggttcgccacttcctagtaccactggtcgcacagcgaggctgcctcctcgaggccacccgttatctgggtcttctctgcttactgcaaaagaggtctccaaggctgcccggacaacaaccttgaacaccaagcaaccatgcccagcctcagaatcaacctcagattcacaagaagaggcaaggatcgaagggaaagaaaagcctgagaagaagatgacaagggagatggcagcgagggagtctccccgacatttggcaatactggaatccatgtctgcttcctcagtcccagtcgctcccgaaaccctaacctcggcgatgacagcagcgacagtgatgcaggataaggagcgcaagagggagaatcaggaggcgctgccggcagctccattaattgaggaccctgtgccgaaggtagaaaagaggcacaagaaaaggaaggatagggaggctgcaatgattataccatcggtgcccactgctgctgtggcacaaatcacgcagatggaaaagaaggtgatgacagagggtgcgacggtaaggaagaaacataggcggcggaaggtggagcaggagcaatctggcgaaacaccatttctcaatgatgtctattcaagggcaggggaagaagctgctgctggtggcgtcatgggcagacagtgtgtcaagaggatcaaccgcagcaagaattccaaggttttgaagaagcagcagacactgccccaaggctttttccctcccatagctaatcccgatttcattgatcaggaccccaattattgttcaccttttggtgcattttttgcccaattcgcctacaaacctgagcgccggcaagatgggaatggttcgccacttcctagtaccactggtcgcacagcgaggctgcctcctcgaggccacccgtcatctgggtcttctctgcttactgcaaaagaggtctccaaggctgcccggacaacaaccttgaacaccaagcaagcatgcccagcctcagcatcaatctcaagttcacaagaaggtgtaagggtcaagggaaagaaaaaacctgaggagaaaacgacaatggagaaaaagccgaggaaaccaccgatattacttagtcctgccgagaagtggtcagataaataccgccgcctgccgctggatcagctggtgcccccaccacgctccccccataagctattgcaggagaagtatgcttctgacccctggaaggtcatcgtaatatgcatgctcctcaacttaacacagggaaaacaggtcaggaagaaagtgaagggcttcttcaagcgctatcctgatgctcagactgcatatacagctgatcccgaaaagatggcagagtatctagcacctcttggactgcagcgtgtgaaaacaaacagaattcagaaattctctaaggcttacgttggagaagaatggacctatatcactgagctttgtggtgttggcaagtatgctgctgatgcttacgcaatcttctgtgctggaagggcaaacgaagtggttccaaaagatcacaagttagtagattactggaattatgtctgttttgagttaccctcgattcagaaatcgcaggaggctggagtgacggagctgggaaaccttgtcgctaaggtgcaggaagttgctgtcagctgttgacatgggaaaacagtaacgcggtggcaagcgcttttggtgtttctgcttgcagcttaataatgttattcgctccgttctttttttatctgtcatgttttagttcaaaaatattcgaggactgaggtagtataatatatggggtatttatctagttattggggtagcctatgtttcaatgctggttttgagacaaaaattgaaggtaactagccaaaaggaagaaagaaaagtgctgattttgtgtgcatcctgcatgcccaagaatcctatctttaaagtcctgaatctatggaaaacttaaactcccaatgcatgcgtattgtattcaattaatatgcatgcatgtgtgtgtggaggtgtagcgcgcgtggctctaagaagtcaaatgatcaattgatttggtgatagtgcaatcaatgggactaaccaatgtggtgtttggtttaccatgtgtaatggtatcgcaatggaagttaaaaagcggtggattttaaatcaat

SEQ ID NO: 21552 - DNA, 2232 bp, Zea Mays
atggagtggagtcccgggcaaccgctgtccgctgggcaggggcaaccactttcgtctcgtccgcacatgcacggcgaagagaggactcctgttgattcattcattcacttgatctgctcagctcagcaacaggaagcatcgtatgcatggccagccagcccaggcccgctctccatacccggctgccacgcactcaccgaccccacgctctccaaacgggttaaaaggtcgcggtggacaacgcccggtgcgggtgtcagtgccagcgccagcggagaaaagaaacagagttcgaccggccccgccccgccccgcccggccgcccccaccgcagcgcccgcgaagccgccaaacaccaccacctatccgccagaagcctcttcctccctcgctctcccccatcggcgcgctgccaatggccgcgtggtgaagcgcacccgacggaagaagcacgcaccaacacccaagccccctgtgccctcgccgtcgccgcccgcgcaagattgagatcccggattcagacaggtgctaccattcgatttgatttggcgcggagcactttcctatggccgcctccatcgcggcctcgtccttctttccagggtcaccggcgccggccgctcctaagaacggccttggggagcgcccagagagcctggacgtccgcggcgttgcggcgaagccgggagcctcgtctagtgccgtgagggcgagcaagacgcgcgcccacgctgcggtccccaagatgaacggtgggggcaagtccgcggtggcggatggggagcacgaaaccgtaccttcttcggtgccgaagactttctacaaccagcttcccgactggagcatgctccttgcggccatcaccaccatcttcttggccgcagagaagcagtggacgatgcttgactggaagcctaggaggcctgacatgctcactgacacgtttgggtttggccggatcatacatgatgggctcatgttcaggcagaacttctccattaggtcctatgagattggggcagataggacggcatctatagagacgctgatgaaccatttgcaggaaacggcactcaatcatgtgaagaccgctgggctgctaggtgatggatttggctccacaccagagatgagtaaacgaaacttgttctgggtggttagccaaatgcaggccatcatcgagcgttatccatgctggggtgatactgttgaagtagatacatgggttagtgctaatggtaaaaatggaatgcgtagggattggcatatacgcgatcctataacaggcctcacgatactgaaggcaacaagtaaatgggttatgatgaacaaactcactaggaagcttgcaagaattccagatgaagtgcggactgaaatagagccatacttttttgagcattctgctattgttgacgaagacaaccgcaagcttccaaaactgccagagggacaaagcacgtctgtagctaaatatgtgaggacaggcctgactcctcgttgggctgatcttgatataaatcagcatgtcaataatgttaaatacattgcgtggattcttgagagtgcacccatctctattcttgagaatcatgagctggcgagcattgtgctggattacaaaagggagtgtggccgggatagtgtgctgcaatcacacacctctgtgcacacggattgcaacagtgagtctggagaaacaaccttgcactgtgagcatgtgctgagccttgaatcaggtccgaccatggtgaaggcccggaccatgtggaggcctaagagaaccaaggcccaagaaacagttgttccatcttcaatttgaattgtgtgagacgttcgggatggtgattttggcaacaaactactactatttggcaaaaagatcagaatggttactagcgtcctctattggaagcaagtcacacagggcgagacctaaactaatttaattatgaagtgtgaacaatagaggagatataaatagtgtgaacaatggactggaagagacagaagcggggggagatcgaagacaagggaggcctcatgtgcatgacaatcttcggtcgcacaaatgggtgttgtaagtattgatctgtaagctacaaatgtatgaaggggagtgagtgcttcccatacatgttccttctggggctatgtccatatgctataagcccctcgaaaacattgtcgcagccatatattcatgcagaggattttaatctcgtaaaaata

SEQ ID NO: 21553 - DNA, 1526 bp, Zea Mays
gtgcgttctggagagcatccaagtttccacggtttgaatctagcgtagcatgccgaggtttaaggccttttggcatcggatctgcttcgcctctgcgagatctccggattttgatcaaagttgcttctcgtcgaagtttcgctggatttcctctggattaaacaagcgagtcacgtggctcagttcgtgatcacgttatgatcctttcatatgtacctttccgaactgctcgcggagaggcacaagcttaccccgttcatcccagtgatcccacatagtgtacggttgctgaatcaagaaatttttcgtgtttccacactattggagaacgcgtctcttttaaatcaaagtggccttgaacatggtagtccactaacaacgggaggattatattcaaacggagcagctactgacatgaatgggtggccatcagcatttcaatcagaaagttctccagcttatagctggcttggaggatctcaaggcagctcctctggactcattgtcaagaaaacaatgaaggtcgatatcccagtagacaaatatccaacatacaattttgttggccgcatccttggtccaagaggaaattccttgaagcgggtggaggcaaatacggattgccgcgtgctaataagaggtcgtggcagcatcaaagatccagcacgggaggaaatgatgcgagggaagccaggatatgagcatctgaatgaacctctccatatattggttgaggcagagctacctgttgacatcattgatgctcggctgatgcaagcccgcgagatccttcaagatctgctaaagcctgtggatgaatcccaggacttcttcaagaagcagcagctccgggagctcgcgatgcttaatggcaccctgcgtgaggaagggatgcagaggttcggttcagcgtcccctttccacaacagccttggaatgaagagagccaagacaagggggtgatgaagaaagtcgcaagcatcatgaagggagaacttaaatcatcatctattctgaggccaatcctgtgtacgaatggggggttgccttgctggctactggcccaatacggtctcgcgccaccagcatcgcggcgcgggcggccgtgcacgataaaacatatatctggagttgtgtctactgggggagttgagtttggttatgcgccatgggttgttacgctatatattgggctgtgcaggcttttgtagcaatgtggtttgtgtaaatgctcatttggagcgtttggaagctctcggcttgtatttctttcttatcgagatagtattcaaggacgctgtttgggatttgaagcaatgctctaaactgcgacaagcatggaggcttgatctgtttcattcgaatctcttgtttgacactatcaataaccagtgcatacaagtagtgaactggcgtcttaagttgcatcttcaattcggattctgctttgttgatgcaggataatctaaattaatgcatgtaatgcacttgaaattaatatatcttctttttccaaaaaaaaagaa

SEQ ID NO: 21554 - DNA, 1781 bp, Zea Mays
tgaacccagaaatgagagggctcgatgtcggagatcagttttattctcgcgctgaaatggtagtgttgggcatccacagccattggctcaatggcattgactatatggggatgaaataccaaggaaagaaggagtatgccaacttaactttcccattggccacatgtattgtaatgtcggggatatatgaagatgatctagacaaggctgatgaaattatttatactggtcaaggaggaaatgatttacttggtaaccaccgccaaattggctctcaacagttgaaacgtgggaatttagcattgaagaatagcaggaagaatggtaatcctgtccgagttattcgaggtcatttatcaaagaatagctatactggaaaggtctacacctacgatgggctttacaaggttgtagatgactgggtgcagaacggtgtgcaaggccatgttgttttcaaatttaagttgaagcggcttgagggtcagccatcattgacaacttctgaggtgcgatttactcgtgcagaagctccgacaactatttctgaattacctggactggtttgtgacgatatctctggagggcaagaaaacattccgattcctgccactaacttggttgatgatccacctgttcctccatctggtttcacatacttgaagtctctaaaaattccaaaggacatcaagatcccatctagtattattggctgtgattgtgaaggagattgtgctagcaacaaaaattgttcatgtgctcagcgcaatggttctgatctgccttatgtatcatataagaacattggcaggttggtggagcccaaagcagttgtatttgaatgcggggctaactgcagctgcaaccatgattgtgtaaacagaacatctcaacagggtttgcagtatcacttagaggtatttaagacagcttcaaaaggttggggagtcaggacttgggacactatcctccctggggctcccatctgtgagtacacgggggtgttgaggaggactgaagatctggatggttcacagaacaactattgttttgacattgattgtcttcaaaccatgaaaggtttggatggaagggagaaaagagctggatctgaaatgcacctgcctaatctttatccagagaatgactcagatgcaccacctgcacctgagtactgcatagacggcagttccattggcaattttgcaagatttataaatcatagttgccaacctaaccttttcgtccagtgcgtcatgagctcacacaacgatgttaaactagcaaaagtgatgctttttgctgctgacacaatacttcctcttcaggagctatcctatgactacggttatcgcttggacagtgttgttgggcctgatggtaaaattgtgaagctgccatgccactgtggtgctccagattgccggaagcgcctctactagacctgcagtgtgtttccattttgattttgcaggaaacaacctatattgtaggaaagcattcatgttatttatgtagttggcatgctctgatatatagcgaaagaggagcaacttaatctccttttagagcattcttattttgtgataattggaggacatgctggtcatggtagcatattttgcaggaaatcaattaactgatatgtctgggcatggatctatgttttttctattatgtgctgtcgtgtttttttaatcaatggatactacattactgttatggccactgaattgatacaatgttatcgatttatatagcattttctcctgttaaaataggta

SEQ ID NO: 21555 - DNA, 990 bp, Zea Mays
cataacagagcgggacattgggaaaggcccacgacaacggcccgctccacctacttccaaacgaacaaaccctctcgaaaaccctctctcatattcaccccgccgccgcctcctcttccccttttcaacttcgccgaaaccctaaccctcccggcgaagtcgccatgtcgaacccgaagggctccaagatgctccagttcatcaactaccgcatgcgggtgacgatccaggacggccgccagctcgtgggcaagttcatggcgttcgaccgccacatgaacctcgtcctcggcgactgcgaggagttccgccgcctcccgccctccaagtcctccaaggccaccggcgaacgcgaggagcgccgcacgctcggcctcctcctgctccgcggcgaggaggtcgtctccatgaccgtcgaggggccgccgccgcccgacgagtcgcgcgccaaggccgcggcggcgggcggagccctcgccggccctggcgtcggccgcgccgctgggcgcggcgtgcccaccggcccgctgctccaggcagctcctggtcttgctggccctgtgcggggcgtgggtggacccgcccccggcatgatgcagccccagatctcgcgcccgccgatgcccaacctgtcggcccagccggtgtcgtacccgcaggtcgtgcgcccgccgcaggggatgcctccgccaatgcgtcctggaatgccgccgcagatgccgatgcaattccgcccgcctggggcgccgcctgctccgttccctggggcaccgccacaacagtacatgaggggaccgccgccgatggggccgccccaggtgaggcccgggatgccggggccgccaccgcctggaatgaggcctggaatgcctccgccaccattcggacagccgaggcctgggatgccgcctccgccacctggtccacagcagcctggacagaacccgccgcagtagcttccttgagatacccattgaactgttatgtact

SEQ ID NO: 21556 - DNA, 2927 bp, Zea Mays
cgaagctatactagccgaggcaggagcaggagcctcggccgcttctctcccctgctccaaatcccctcccccctgctcggccacaaacccacaatcccgtgtctccggccaccgtgctgcgcaggccgaggcccgagcttgagcgtttggtctgctgccatggatgacgaatctaagtctgctcctaaatcggatgtgaacaccgacgctggcgcggaagccgcggcggccgccgctccgctgccgccctcgagctcagaaacggcggagacggaggcaagggttgaggcggcggatggggagagccaggtggttgagcggttggtcgagcttgtgagcgagatcgcggccatctcggacttcaggaactcgtaccggcgtcagttctgcaacctgtcgcggcggatccggctcctcgtgcccatgctggaggaggccaaggaagcgcccacgccacttacggtggcatcggaggccgcgctacggcggctcagggaggcgctccacgccgccagggatctgctccagctcggcagcagcggcagcaagatcttcctggttcttgatagagagaaaataatgaagactttccaggatgtcactgcaagacttgaacaagccttagctggtatctcgtttgatgaacttaatatatctgatgaagttgaattggtgcatactcagttcaaaagagctaaggaacggtcagattcatctgatgatgatctttttaatgagctgatgtctctatgtaattcaagcagcagtgatagtgttgacccagatactcttcgaaggttatctgagaagttgcagcttgtcacaatatatgacctcaatcatgaatctctgaccttgcatgagatggctagtggcggtgatcctggtgcagttgttgaaaagatgtcaatgctcctcaaaaggattaaggattttgtgcagacagaagaccctgagatgggtgcccaagcaagtacagcaaccatttctacaaaagacaattcagcatgtcctgttattcccgatgatttccgttgcccaatatcactggatttaatgaaagatccagttattgttgccactgggcagacttatgagcgggggtacatagagatgtggctggaggctggccatgatacctgtccgaagacacaacagaagcttgccaataaatccctgaccccaaattatgtcttacgtagtctcataactcaatggtgcgaggcaaatggtattgagcctccaaaacgccctgctcaacttagggatgcaccactgtcatgtagtgctgctgagcatagcaatgttcttgagcttcttcagaaattgtcttcccaaaaccttgaagatcaacgtggctctgctggtatgcttcgtcaacttgccaagcgcagtgctgaaaatcgtgcttgtattggagatgctggtgctattcctattcttgttagtctgctatcaaccactgatgttagcacccaggaacatgtggttactgctctcttgaatctttccatctacgaagagaacaaggcaagaataatatcttctggagctgttcctggaattgtgcatgtgttaaagaggggcagcatggaggctcgggagaattcagctgccacacttttcagcctatctattgtagatgagaacaaggtgactattgggtgttcaggggcaattcctgcacttgtgcagctattgagtaatggaagccaacggggtaaaaaggatgcggcaacagcactatttaacttgtgtatttaccagggcaacaaggggaaagctgtaagagctggattggtacctatactactagaactgctcatggagactgaaagtgggatggtagatgaggcccttgcaatattggcaatcctctcaggccatcctgaggggaagacagctatcggcgctgcttctgcaatacctgtacttgttggagttatcagaaatggatctccaaggaacaaggaaaatgctgctgctgttatggtgcatctatgcagtggtgagcagcagcaacagcatcttgctgaagcacaggagcagggcatcgtgtctttgctggaggagctagcagaaagtggcacggacagaggaaagaggaaagctgtgcagctgctcgaacgaatgaatcggttcctaaagcagcagagtcaagccgaagccgaagcagaggccatggcacaggctcatgcacaagcacaagcacaagcacaagcacaagcacaagcgcagcctcagatcctggttcaagctcaagcacatgcagatatgcaagctgaacgatcactacttcccacatcatctgacatttcggatagatgaggtttttgatcagcagcttgttttgtctagtaactggcttgttttttttaagctcaggctgtcaggtggaagattgcctgcaactgttattgtggaggtttctggtttctgttgaacactgcaaattaggaggtctgggcagcgtgatttaggtccatgagcatgttgacaggtgggttctgagtcagtttttaacctgcgtgtgttcgtaaaatgtaccggtgattgaaggtagtaagtatatcctcgagttttaggaggtatcgttgaacttgtacccggtacgagcccagtacaggactaattctggcgccctaggctaagtgcctgacaaagttgcaggaaagctttagttcagaaaaatgtttgttcatcgagtccggtgcagttggttcagctgtcttctgtgagttgtttgcgttgaaaaaaagcggttggttcagctgtcttgtgtgggttgtttgttgtgaaaaaactgccgcaagctgtatgctgtgaaaagttaaaaatcgtttggcttaagctgctgtgaaacagtagacttaacaagatttggctgtgttgtccctgagattgtttatatgcaaattgataataca

SEQ ID NO: 21557 - DNA, 3902 bp, Zea Mays
tttgtggtgacattcccaagggcataccacattgggtttagtcatggatttaattgtggtgaagctgccaactttgcaactccacaatggttaaaatttgctaaagaggctgccgtacgaagggctgtgatgaattatcttccgatgctctctcatcagcagcttctgtacttgctagcagtttcttttataaccagaaccccaaatgtattgtctggaattcgttctcgcttgagagatcggaaaaaagaagaaagagaactgctggtgaagcaggaattcttgcaggacatgattagtgaaaacaagcttttgtgttctttcctggaaaagaaatcaattcgtcatgttgtgctctgggagcctgacttgttaccatcttcgactgctctacattcctgttcttctggctcaaaagctcctgagaagaagtctgaggatggttgcagaattgaatctagtgaacgtggcaccaaagataacagctctgatggcagtgcacatatgattggcgcacaaactaaatttatgtccgggaatagcaaatcatctggaactgcatctgcttccatggatgaggtcaatgctgatactgatgatgaggatgacctaccttttgatttgagcattgattctgggtcattgacctgtgttgcttgtggaattcttggttatccattcatggcaattctgcaaccttcaagagaagtattggaagggatttcccttgctcacacgagtagatacaagatgagttctgaaaaagataattgttcaaacacaattccatgctgtcccactgacagtaagtttggatgttcatttgttcccagtagaccttcttggcctgcggaacagcaatgtctggctactcctttggggcaagctaacatcagtcatcagaataagtgaaaatactcttcattcatgtagtgacaggggaaaatccgagaataagatttctgaggacagtcttggcccagaagtaggtgaacaaacaggcaaatatgtcatcaatgcgcaagctgcagaaagttctgatggtactattaactggaatacttattgtacatttgcacggccccggatcttttgcctgcagcatgcccttgagattgaaaagttgcttgagggcaaaggcggtgtccatggtctcattatttgccactcagactttgtcaaactaaaagcacttgcaatatcagtagctgaggaaattgagtttcaatttgattgtacagacatttcacttgcaaaagcatcaaagtctgatttacatctgatcaatatttcaattgacgacgagggacatgaggaagatggaagagactggacgtcacagatgggtctaaacctgaaatattctgccaaactcaggaaagagaaatcagaaaatcaagaacagtctcctttgccatttgggggactgctttcctgcccttcgcctgtttcggttgttcctaatcttaagtggctttgcaaaagagcgcggacaccatacacagttattggtactatgaggggttctagtgcaacagcaactgctgcggaacttaagcctggagtgaaaacagaaatattcactaatggaaatgtttgcgaggatgacaatagacatcattcttttcgacaaactggcctcgagcaaccaggtggactgcaagattgtgataagccttcatgttccgaggagaatggccatggaagacattgtcttgttaacattcctatcgctgttgctgaatatcctatgatgcatcaagtccgtgagggtccagtgagtgttagcacgtgcaatgactccatttgtttgtcaggttccctggatttacctccacacgcctctccagttgaagtaactagatacctaggatgtatacagtcaactgagctgagcagtttaccagccttttctgttcaacatttctttaatgatgaaagtacctctgtggaaggaagcatagactgtgtaagcaatggctgcttagaatctcaggatgatattttagggagcagagatgaacgtttgcaagttcaacaatatcaagagaagatggggcttcgcaataaccccaatatgaagtcagttgattcacacctgatagaaggtttggctgtatcagaaggaaagcatggggaaactgtggcagcattccttgaaaacaaggagcgttgtgctaagacatcctactgttctaatactgaaacaaaaactactaaatctgcaatagacaatcgattggagactcatcatctgggtactggtccagtgaaactaaattcaagctttaatgagatgcacagtgctgatagacaatgcagtttagtctttggctgccttgactcagctgatgttcctgcttcaactcaggctctgtcagtttcacctgttttgatgagtgacgagcagcaggtcgatgacgcccattctgctgtcaaggccattgagcacctgggcaataatctggctaacataaagcacaaatccctgcatatggatgtcctcatgttagaggacgcccaagttgcttccatggctgcagtccctgggcatgagggagaatctgtcgaggctggatcaaattcttttgatattttacttggagctctggctgaagagtccaaggcagcagatgctcctgggaaagatgaagttggcaaagcttccttgacattaataacactggctagcaacgagccctctgttacagaaggcagagttgtagacgtggtggaaacagacacaattttgggagcaggaaaagatgataaacaacttgaccagccacatggcttccatttgtcagatctggtgtctagatgcatcgggagctcaaatagatccgatatcatatgctatgtcagacgcaaacacaaaaggaagagggattactcgtgtttcgtccgctctccctgtgagagcttgaggccaaggtccaagcctgcagtagtcgaggagtcggaatggagcagaacagccgaggcttcttttgctaaaaggggtaagaggacacaagcagtgggatcatttcagtgtgatattgatctgtgtgacatggcatttgagactagggccgaactcaatgcccacaagcgcaatatttgcactgacgagtcatgtggcaagcgtttcagctcacacaaatacttgaagcgacatcagtgtgtccacagcgagatgaggccatttaaatgcccctgggaaggttgtaaaatgaccttcaagtggttgtgggctcagactgagcatgtcagagtgcacactggagagcggccatacaagtgctcggctcctgactgcgggcagacattcagatacgtatcggattacagccggcacagaaagaaatttaaccattactgacagcttctagttttccgagttattggccgcagctcggggcaaatctccagctgcttgtgtcggtgggccttgtttgttgtagtagctcagctcacgtatttattaacaacctgacagctgataggcctagtgaatgttccccgttaacaatgggctagtaatttagtcggtgtaggagttagaaattgttggggggtgaagtgcaacccccttctgttggtgtaggtttgcataagctgatcaccccccactgacacgtggccattcattatttgtttctcagatcagtgatgatgtatttaatccctgatgacaaacttcatgaacactgaaaccatatgatgtcggatgtcaaaatgatcaggggttgccaccgtcctcatgtaattcctgtcttcgacacattgtccaggtcctcattattctgtcatactgtttcagcagattacttgtatgcctttgtctacgcgaaatctaatcatttttaaattcagcgagatgctgccatctatatgccactgtttcgcttagatttaac

SEQ ID NO: 21558 - DNA, 666 bp, Zea Mays
gaaccttgttactaagggacctttgttccaacaaagaccatatccctcaccgggtgctgtgttgagaaaaaatgcagaggtagcaacccatggcaagaaacgtggtggtatggctccgataacaaaaagaggagatggcagcgacggacttggggaggcagattagtcttttggtgaactgaaatgttgtgctatccgaatctccttggtggttgtctctggagctgctaaactatcattgcacgcctgaagaaaatcgaaaaaatattggctgccagatctggaatgaggaaactcactacagttcgcgagtttttgcagcgattaacgctagtgtactcgctggacctcgaggctagagcaatgcgagctcaccccggcttgctgatgacacattcactgagttcactgcggtttgccgatgacattcaatgtgcccttggtgtgaattttatatgaaaatgaactataatctgtaattggaaagagtgatttcaatgtaaggaattaacttttgtggggtgatgaaccatactagcgatgcacttagccaaacaagagaaatttggatttgtaccattaaaagattacaactttagatatatagcattgctatctcactaacatgtgtggtccacatgagacatgagtcaataacatgtggag

SEQ ID NO: 21559 - DNA, 4763 bp, Zea Mays
ctcgtccccgtccccggccccggccccggccccgcatctctctctcgccctgccgtctccggagtctggagctgctctcacaaccccacacgcgcgcactcgaccccgacccccgacctcgtccaccacccgcttggcgcgcgcgcagtccttacagatttcctcgcccggggtggcggtgaggcctcgcaccgatgagctcggggaccgtcgcggcctcggaccctgggggtggcgagacgaagctggtggcgggagatgacgtcacaatatcggaagctgcgggcgatatgcctgcgttcgccgccgatttgaaagtggaggagaaggctacgttgacgatggatgtggctcatgaaaggggagatatggcggtgagcgacccactctacgcgactgagtcggctgggatggttggtaccgaagggcacggagatgagcccgtggaggacgtggatgcggtgaacggagaggacggtggcgaggaggggacgcaagaagcaggagctggtggtctgctgactgagacggagaggaagccggttctagtggtagatgtgcctgctgctgctggttctgccgctcctgaacatgctgaagccgcctattgcatttcagaatccaacaaagtcgaagaaaatcatgtaaatgcggagcctgggagaaagaataatgaaagtgatcatggtgtagtgccttctgataaggaaatacagaacaatgtgcctggtgacatggaggaaagctccgaggaacatgaaggtgatggagcacctgtagttgaccagcccaataacacatctgaaatgctcccacaaacaggagagcagtttcctgacagtggaaatagcccagacagcaacttagaggctgctagtctggggaatgttgatcagggtgctagataccgcctcccacctcttgataaaggcaggtttcaagttgctgatcttgtctggggtaaagtgaaaagtcatccttggtggcctggtgaaatttttgatccaacagatgcatctgaattggcgctgaagcatcggaaaaagggcagccacttggtagcttattttggtgacagtacttttgcatggtgcgatgaatcccagttgaagccttttgtaacaaattattcacaaatggagaagcagagcagttcagatggctttgttgggtcagttaataatgcacttgaagaactgtcaaggcgggtactgtcaggtttgagctgctcttgtttggcagaagagcttgctgataatggtatgtcatatacggttgataatgctgggctcaaggatggagttacttgttctgcagttaatcggcctgagatcttgaactgtttcagtccagaaaaccttcttaattatattaaggagttagctctatttcctggccagggaggtgatctattggagttagtgatagcgtgttctcaacttacatctttctatcgatctaagggatgtcctgaacttgcatcatttcaaactagtgatgcgtgggttgaggatgatctggatggtatagacactttgtccacccagaatgtaatggtggaggaacctgtgattaacgaagtgcagcctactcaagataagcccaaaaggggcagggggagacctcggaaacaaaaggctggtcatgaccaggtggtgatggagaaaaggagcacatctaatcaggtcaatgatactagctacaatgagaagaaaagaaacctcaaatcatttgaagattcagagaagtcatcagctccaactggtggtggttctttcaagattggtgagtgtattcggcgagctgcaagccagctgacaggatcttcatctattatgaaggctcagaatgaaccaacagtctataataacgctgctgaaggagagaatggggaatttgatgtctctagtgatgatgctggtgatgaacttactgtggagaaacgagcaaaaaggaggcgtctgcacataaatcacgctgcagatcccagggaattactgtcacaactatgcttggttgcaacagagccaatgaatggatatagtttctcagcaatgataatcggttacttcaacgattacagaaactatattgtttctactactactgaagcaaacattgttgataaaggtacatctagaagagggaggaagagaaaagaagttataccttctcctgaggtagagacaacggatcatatgcaggactcgtattggtccggattgagcttgtataatcacccagttcatgacctaaaaagagagagtccgactacaaggccaagacggaaacggagatcctcaagacatgcatatatacctttgtcggaacttggggagccggttcctaaaaaacagatacaagtgatggaaagatctatcatccatgtcgatgagaagatggttgatgagttgaagcccactgcacttgttttgacctttggcaggtcagcgtctattccttcagaactggatcttgttaagatgttcagtctctatggtccactgaaagaaagggggacaaaagtacatagggaaacaaatactgttaaggttgtcttcaagaaacgtgtcgatgctgaaagggcttttagtgctgcaggcaagtatagcacttttggaccttcgcttcgaagttaccgtcttgtcagtatgccactttctccagagacacaatcagcaaataatcctgaaaatcatggcttggagattccaggtttgaatatgtccgaagctcctaaggattccatggaagttgacctggtgcagaaaacagataaagtaaaagttacaggagaactgtcatctgaagaagttgagactgtaaggcaaacatgtctagtggaagctgcagacagtacatttgtcagtgaagttgacaggcttgagaaagcaggaaatattgatgctgagctaattgtccatgtgaatcagattggggaaggtgcagaagctgcatctgtatctgaagagtcatctcagcaagtgggtgacattgagcaagcttacactcaaaaggcagcgtcagtcagtgatctacccacagagatagaaaccttacattctgatgctataataaaagagttgcctcagaaggctccagataatatgcaaactgatatagccacggccccaaaacagagtcacaatccaggagataatgctgtatttgaagctgtcactgaagtgccaagtactgcacaagatcatagtgaggatgatgttggggatgaagttccagaagagcacactgtatttcctgtgttacaaagtcaaacccctggtgagaagctagtggggcaatctgaaactgaacaaaaagtgggacctgaagatccaaagtcacaagctgaaaatttgactgttgaacctgtcgtacaaggtgcagtcgagcaagtagaaattgaactggaatccaaaactactgttgaagtgtcatgcgaacaaggctatagtattgagcagactgttaacatggaagctgtaattgaagcatcaggtggacaacttgaggtgggaagacgaatttcagaagatgaatctatggctgatgcaaatattgagcactctatggtcatggttgatgaaactgtggaggcaaaagtagtaccactcgaggagagtacagagaataatgctgctaccataggagtagttgaggagacagctgaaggtgaaactaaggaggaagcaccagacgagaaggggaaaatagaaaataatgaagatgctgacaaattagctggagagaccagggcaggtgaaattacagttgaggcaccagatgagaaaacagaaattaaagcagatgctgacacaccagctggtgagaccaaagaatgtgaaattacagtagaggcaccagatgagaaaatagcaaacaaaggtattgttgaaccaataatcagggagataactgaagatcaaactgcagctggagaaccagatgaagaagctacaacaactgaggaaacggtagaggatgttaaggtgctagatgataagtctacagcagatgggaaacctgtagagaatgccacagtcgcgacaaatgaggattcaacaacagttgagaatactctgaaggatgcaatggttgcgccaccaggtacaaataccaccaacgccgaagaaactgctctgggtgccacagttaaagcactagatgaggatgctctagcagtggagaagactatagaggatacctcggttgaggcatcagatgtacaagcaggcaggtgcaagtgagtaaaccagcttatcgaaccttgcgttcctgtcagtttctgttgatatcgacgtagtttgctcaactgattctctcatctagaactttagatgatgtgttctgtatagaaaacctgaaactactttagcatcataaggccattaggtattgacaactagggcatctatatccttctcccccttttttgctctataaacttcacctagttgtattgggcgcgtacgtgttggtgttgtcataaacacaatttcctcctatatgtcagttcaatgctcaggtgatcagtgactgagtgaaagccttgaatcaatagggggaaggcatgttcattactacatttaacggttaggcttgcgagtctttagattatctacttggatcaaatgattcttgtatcatttgccatttgtaaccaactgtgttctggaatccttttatcatattacgtagaatatttagataattctatcttctcattggtcatcgagaagtctgcaaaccgtttagcatttttt

SEQ ID NO: 21560 - DNA, 1281 bp, Zea Mays
ggcggttcttctttctcctcgtctctcttcaccctcgcgtgggtaggagcgccagcggcttcgtccgatctctcacctcacttcagtcttcagccacgcacactccctccttccctccccgatcactactctccctctccagttcacacccaccgccccacctctcccactcaaatccagggccatcgcagatccaccgcctccccgatccggtcgcctacccagccgcccgatcggatcctgcaggtcatggcggttcacgtgctgctgagtatttgaaggagcatttgtttgagaacctcatgaaacatccagagttcatgacaaacacaaaattagcaataaatgaaacatataggaagaccgattcagagttcttggatgctgaaaggaattctcatagagatgatgggtcaacagcatcaacagcagtgctagttggtgaccatctttacgtggcaaatgttggagactcaagggctgttatatcaaaggctggcaaagctattgcgctctctgaagatcacaagccgaacagaagtgatgagaggaaacgaatcgagagtgctggtggaatagttatgtgggctggaacttggagggtaggtggtgtacttgcaatgtctcgggcatttggcaaccgtctcttaaaacaatttgttattgcagaccctgagattcaggacgctgtttcacttgtgaagatggaggaggatcctgaggcagcagcccggaagctgacagagactgcgttctcccgtgggagcggcgataacatcacctgcatcgttgtgaagttcgagcatgacaagcctggtggcggcggctactcgcctccaggcgacaagagttgattccatttgctgttggttatacgctttgccggtgtcccttttaccctgggccggattttgctggccccatccatggtgccccccgcggctggtacttgaggaaggagctggttcatgttcgtcgcctgtcttgtctatatttatgccactaattttggtctccggtcagtggggttaccggcgggcagtgcttgcccatttgcatgtttatcgtgggttcatcgtcctatacggcattgttgtagacttgtagttgctgttgcctgttgtatcaatgagagctaattctgtgaggcgcagggggatgggtgcactttgagatgttcccggaccgatctccttgcaaacacctccgctgcactgtatgtttctgttatatacagatcattgtccttgcacggccgtcagccaaggacgaatggccagt

SEQ ID NO: 21561 - DNA, 2168 bp, Zea Mays
atccgaagtcgcctcctcgtccttccttcgctagatgttctccttcgccggcggtcttgttgctagaggcgcccccgacctgtgcatccgtttcaacgccaactcctccaccagctaactcattcggagtaggtttagaaattgattgggattcaattcagctagaccctagatgggaggaggaagactacaagaagttgttaacgtggaagtggtgtatgatacactgggcctgacaaatgaggtgatgggtggaaccaattgtgatggttggcaaaacgattatggtgatgcaggggcagctatagaatgcaaggacattgacgatgacattgtaatgtttgatatgaaaaatccagttatgaggcttggtaacatatatatatagtagcatgaaggagtttaggctcgcaatgatccaatatgcaattaacaaggaatttgagctaggcattgaagctactagtactcgaaggtatagaggttattgtaaaggggatgattgtccatggagtattcatgccagaaaagaagtagaagaatcgcctatcatcattgttactgccatgacagatatccacacttgtacatctagtggtaggtgaaggacaaagacacctactagtggttgggttgctgcccaagcaatacctctcttgaagaagaaacctggcatgggagccaaggagttgcaaaatgcactacatgacacttataatgttcagattgcatatctaactctttggagagggagagagaaggctttgtatgagttgtttggtagttaggaggatagtttccaactttgttctcttggaaggaagctgtgttggagaaaagtttaagaaagcttacgagggaagaatagagcaactaggagataagtctttttggccaaaagtggagatggcaaatgaggtgggggcaccactgggtaggagaggtgtgggcagacaaaggaaaaatagaatcaaaggttgcctagaaggcggtaggggcaagaaagcatgtgcaaacgaaactgtaaagcaatggaaggtaattcggggacaataaggatgtctttggtttgaagtcaaagtaggatgaggcgggggcgacaccgtcccctcaattttttgggatcacgccgtcaccaaaaaattactccggtatttatttcaccccacgtgattctcatccaaacactatagaaactgtagccatccccttccatccctccttatacatccaaccaaacacaccctaaatgtttatattgtggggagctaggccacaagaagaacagccctaaatgtcctttaaatggcacgaagaagaggcgtgtgttttatgtgttgatctttgttcctgtttcctgttctgttttttttttcaaaaacttacagctggtgtgtattcttataggccaaggaagcagcgacataactctactcaaaaatggttttatgtgttgatctttgttcctgtttcctgttctgtttttttcaaaaacttacagctggtctgtattcttataggccaaggaagcagcgacattactcaaaaatggtttcctcgcgacgacagatttacacaagaacctagaacaccgcatttcgacaaagttatacaagaccctggtacaccacatgaacagccatcgtcttcgcagccacttccaaggtggaagtctcaatgccctgggaaaagaagaagagagccacgagaaaggaaggggcaaaactggaagtctcaatgtcgctccctggttaacgcccagcgttctcagttccaaatgtgaaagaacatcagctttcaaccattgatagtcatggatctcctcctcttggtggtggtactatcacaggcagcaaattgggtagataatggtatggtgaagaggataagggatgtttcgttctccaggagagtatctccatagttggaaagccacattatatatgatgcacgtgggtttgggatccacttgtggaattttgttttatcatactttcctgtgggttttggaatccactatgatactagcaacaggctagacacatgaatctagagaatgtttcccacagttcgtattgtgcctaggggaaaactataaatggaaaaggtgcaaaacagaaatttgaaccataagactaatttatataagcctagtagtaaaagactcc

SEQ ID NO: 21562 - DNA, 1501 bp, Zea Mays
atttgtttgcttcttgcttccaaggcaaggggtatgcattacaggctaggtatatgatactagcaacatccacagtatcaacattcgtgaagtatatattctatgttagtgacatgctaatggaaggtcaatgggagaaaaaggcagtgtatacattttacttggagctcataagtgaccttgtgcacttgtcattatacatgctcttcttcatagctatcttcctgaactatggtgtcccgctgcacttgattcgtgagctatatgagactttccgcaacttcagaattcgcattgcagattatgtgcgctacagaaagatcacttccaacatgaatgaacgctttccagatgctacatcagaagagctcgatgtgagtgatgctacatgtattatttgccgtgaggagatgactacagcaaagaaactgctctgtgggcatctgttccatgtgcattgtctaaggtcgtggctagaacgccaacacacttgccccacgtgcagagctccaatcattcccgcagataatggacatgctgtatcagcacgacaacatggagcccaggctggggttcagcctgctgcaggtactgccactccatcctcagaaggagcaccaggtgagaacatgagcaggcaccaagcaaaacttgaagctgctgcagcggcagcttctttatatggaaggtcttttgtttatcctccagcaaacaccctaaaaaggtctgttcctcctcagcctgcatcaagtacaccacaatctgaagcaagtagctccaatcatcagtcacaaaaagaccaagaaatgcagtcccgaaacagcagcgatggtttagtgcctctgcctcttaatgcagatggtgctgttggttcaggaacaagcacaagggaccttgaaaattcacttcagaaggcacaagaaaactttattaagagccagattgagatgttacagatccaactgcaaatggtgcagcgtggcgctgctgggccgcccagtaacgagaatactgagcacacagaagaatgactgaatctgtgaacagacacttctgcatcgtggtgtaataataaggagaatactgatgagcacacagctgaatctgtaaataggcggcgatgaggatgggacaaaagaaagccaaggattggcgatacctggggctgggggaaactgttacatgatgtcttgcctggatttttggcaggcctgttaatttatgcttcactattagtgccttgttgccagcaccagatgtttctctctctctgtgtgtgtgtggtggtttctgtacatgaaagccttttgacgggagaaccaaccatggctagtttaattatgaagttcacttgttgtacccgagggaaaatagaaatgactcttgtttttgcctatctatccatgacttgttgtaccgaggtcctttgattgcagaggcgactgtgagcaacatagacggcaggggttgggaaaagatggccctgttgatgctacaactg

SEQ ID NO: 21563 - DNA, 3214 bp, Zea Mays
agtccttcccattcctctgcaagtcgcaactcgcaaccaaaggcaaggagcatttcaaaaaccctacctccctaccccacttcgcagtccgcaccgcacccaccccgatctccttctcccacccagatcgccggcccgtgcgcacgaaatggaggtgccgcggagatgctcgacgccctcgcaggctggttcgcgcagtcgctctctcccgacaccgccgcgcgccggccgagcagacatcgcctccgccgcctcctccccgggcttccgctggcctcctcggcctcgcggcctccccgcgccacgacctccaggcccgcctcgccgcctccgtccacttcaagaatcttctccgccgccggtgcccaagcccgacgccgatgccgacgccgacgtcgaccaccttcccgcctccgactgcgccatcatcaaggcgaccttctccagctcctcctcaccaccccgcccctcatccaggcgcagtctccgaggcctcgcgccgcgcgctccgatttccccgccaggtgggagtcccttctcccgtccatcgtgtcctccctaggcactgccgtcaacgcgggggacatcaccgccaccaactctcttctcgctgccgtggtgtcgctcttctctcgcttccgcaacgcattcgacaataatgccctccgcctcgacctcaagtactgccttgacatcttcgccgccccactccttgaggtttttctctttgcctcccgccgccttcaagccgctgccaccacggccaacccgctcgagctccgtcccgtgtttgagtgccttcgcctctgttgcgagatcttctactcgcttaactccattgaccttcctgagttcttcgaggataacatgcgccagtggatgacagagttccaagccttcctcaccacatcctacccaccgcctgttgaggcagatggtgccccggatgcgctccgtgctgctgtctgtgataacctgcagctttatatggagaagtacgaggaggagtttaggggatacctgaaggagtttgttgaggctgtgtgggggctcctcatggcgcagaccgcttcgccttcccgtgtgcagcttgccgttactgcgataaggttcttgactacagttgctgagagtgtgcaccatgctttatttgggagtcctgaggcgatgaagcagatatgtgatagtgtcgttgtgcctaacttgcgcctgcgggatgaggatgaggagttgtttgagggcaattgggtggaatatgtcaggcgcgactctgagggtagcgatgcagatacactcagacgggcagcgtgccggttgctgcggggccttgcagcgaactaccaagagcaggtggctgcactcgtctcagcacaggtccagcagatgttggttgcatatgctgctaatcggtcaaacaactggaaggagaaggatgctgcaatataccttgttattgctcttatgcagaagcctggtgccacaggtggtggcacacctgtggttgacatggagagcttctttacatctgtgattgtgcctgagctccaagcccctgattggcagtctgagccaatgttgaaggcaactgtgctcaggttcttgaaggagttcaaggatcagatccccaaagctactgcactggcactcctacaaagtgtgatgcggtttttgatgcatgagtccaatgttgttcattcatatgctgcaacttttatcgagaacctgttgataatcaaggatgctgtaccggtaccaggggtgaccacagtgatcaggtctccacgttatgttgctgctgatatcaatccatttgccccacagatcattcagaacctgtccacagcactaggtttccctgattcacaagagaacccctacctgatgaagtgcctgatgcgggtgcttgggattgctaatattgctggtcaaattgttcatgagatcacagctcaacttgtgggtattctcatggaagtgtgtaataatcccaagaaccctgacttcaaccattacttgtttgaggctctggcagcagttattggccggactggtgagcaggacccaacactactccctgcttttgagaccagcctctttccagtgctccagaggatattggttgaggacatctcagagttctggccatatgcttttcagatatttgctcaacttgtcaatttgagccgaccacctctctcacagaattacatgcagctatttggtgtccttctcagtaatgcaacttgggaccggccaccatgtgttcctgccttggttcgtttgctgcgagcattccttaggaaaattctaaatgagctaaaccaagagggcaggcttccaaatatattggcaatatcccgtagcctcctctcacgcagcagcactgaagattctgcattctacatgctgaacacactagtggaaaacgttggttttgacattctgaacccatatataagtgagatatggagtgctttgtttactcggctacagactagacagacagtgaaatttgtgaactctcttgtggttttcatgtcgctagtgctggtcaaatatgggtcaagtgttcttgtcaattccgttgatgcaattcagccaaatcttttcacccaaatccttcagcgattttggattcccaacctcaatttgatcaaaggtgctcttgaagttaagttgacagcagttgcttcgataaagttgctttgtgagtctgcggtcctgttggatgctgcagcagcccagttatggggtaaattacttgacagtattgtcacactattgtccagaatgaatcaagatggatcacaacaagagcataatgatggtactgatgcagtggatactcagaagacatcaagttattctgtttcatttgtacgacttcaatatgctgggaagagtgaagatgaccttttgaaagaagtaaatgatccaaaacagtttgtggtcacatccttagccacaatttctgcccagtttcctgggaggtttggtcctgtcattgagcagcatgtggacctagcaaacaaaagtgtgcttcttcaactttgtgcagcctacaatgccaacattgtctaggctatttaaccgagggagctatttaacttcactggaaggtgcagccccgtccccgtatatgaacaaggacattccggtcacgttcaccgttttacatgcatgagtcttcgagccgttggatggaacgcacgaa

SEQ ID NO: 21564 - DNA, 1143 bp, Zea Mays
ttctgatgaatcagcttgattcgtttgcatgttgttgatggaatttataccagaatgggtgattagttctatcaacaaggaataagtaccttccatgaagagatgaaggaagcttcaaacatactgcataactgctcatctcgatccctagttatcatcgatgagcttggtcgaggcacaagcacacatgacgagagaatttgaaggttctgttggggcataccatgtttcatatctagccactaggaagcttttggaagtgaccgataaacaggtggaaactagcccagaggcaaatgatcttggagaaattattttcttgtacaaacttgttgctggagcttcagatagaagctttggacttaatgttgccctgcttgcacagcttccgtctagatgtatcaagagggcatccgtcatggcagccaaactgcaagaggagttaagtccgcgggaggaaatcaagcttcggaggacaacggatgcacaaactgtggacggaccatctgaaagttccgcagaagttggtttgttttgtgcacatccttatcaacgattggcagaaacatgtcgcaggatactgctgaacatcacgttggctcaaagcaataatgatgtaacgaacacacttccttctttgaaaaatgcacaggaaattgcacagaagacgatatgatgcagcggtccatttgacaactgacatattcttcatcagtgtgaagggaacttatcagtgcaagctacgctactctcggctatggcgttggaaaagttgagaagcagaattttaggggttatatgggacacatcacacaacggtatcatgtacctttttttgctacggaggatccctaatggtggtaagcattttgctggagccgtttgtgtaacccatactctgccaggatagcgtggttaagcattttggtcacaactcaaagcagtgcctgtgtgtagttggagtgaactccgtgatatatactggagtacttagtatgtaactctatattccgttcattaatttatctagaactcgtttcgttgatgtaaatgcagagaagggacgtgtttactttttttatatctcgtgctctacccgttttctttggcatcctggaccagggctggacaaaaaaaactcaa

SEQ ID NO: 21565 - DNA, 2373 bp, Zea Mays
ctgacccactctcgtcgcacgcaacgcaagtagcaaagcaggacccatcctctcccatctctcggtctccccatcccaacccgccgccgccgccgccgcttctcccgtctccagcgcccacagcgccattgtatccgcggggcgagctgagtcaccaagctggtctagggcccatccatttggaaccctcgcgagaagcaaagcggacggagcgccagcgttcttagatcgattgctcgccaggctgttggcgaggagtcgtcaaccctcacggcagccatgtctgtggagctcatcctgtggcttttctccttcgtctccgtcatggtcctcatcggcctcaccgcataccagcttatctgtctgtcagatttggagtatgattatatcaacccatatgattcatcgtctcgcatcaacgctgtggtgctgatagaatactcactccaaggggccctgtgtgcttctttcctcttgacattgcattggttcccgtttctagtcatgacaccagtaacatactaccatgtcaaactgtatgtattacttgctttgggttgatgttaattctggcagaatactcatgatattcagcattggatatcatgctgttcatacttttggctgtattcacatctttaaataatatttaaaatgatctacaactctcaatggctcaatgaaacagctaagtaagaatatatatattttagaatttagagattgtgatgttatgcttctagagtgataatttgtagttatctgcttgttctgggccatggtgtattgtctggtcctggagcaattccttctctgaaaatgggagaatattgatcatggtattaacaaatgggagaaggtagtgcacctgttctagtattatacctgtccagattttgtaggcctcactaccaaaatttgttagctatttaacttttattattgctggaatatgacaactctgaatcatgctatgtgcactttatttgctgagatatatatattttttatttttactagtatgtgctagagaagaaccataagtaatatttttgttgtaattatttagtattcagcagttcagcatgaactgttgattccacatatagttggcttaacaatgattaatgaaagtggttcttagtttgttctggtagggtacagctataatttagctggactattctctgggtgacaactgattttagtccatcagatatgagcaagcacccaattttttattgttacatgtggaaagaaaatctcccttgaccctgttcttgaaattttacagtcatgacaatagtttctaagcactctgcttgagttttcagttgatttagagttcttttttccactgttgaggattaagtataatgccccctggcattggaactagttttgatctcatgaactagtgaacttattttggtgggatatctgagatgcttttctaaatttaatttttgccaggctttaatatctgaatgaatatgaactagttttttttattcaggtatttggctcggaaacatcttgtagatgtcactgaaatttttagacaattaagtgacgagaagaagtacaggatgatcaagcttgccttctacttctgcctatttattataactatttacagaaactaggagtatctagacttcgccaccaacttgtcatggggatggagcagagttgtagcttgaaccagggagaccacaactcaatgccttgacttagttgtgagaaacaagatcagtttgtgccctgtagctggaggagctaacctggtactccttttaccctaaatcgtaagttgttttagttttttctagatgcatagcttttacgatgtatcctccagatgcatagtaaaagttatatatttagaaaaaacagaacaacttataatttggaatggagtattcatttcatccatcagattgtgatgtacaatgaattcccatagtttggtccatcggtaccatgtttgtaaattgggcagtcaatgatgtgcatcactgcaggatgaacgcacgtttggtaattgttgtgcaattctttgtacttgtggacaagtgctgtattctacacattgtttgcatacagacgatgtgtggttggtgtcataatttaccactaaacctttggtaaactgagcctgtcataactgcgagaaaagattggtaaaaaaactaagttgggatagaatgctaataaagtccggcaccctgtggttatggcaacacctgcaaaaaaaggtgctatagaatgactaacatgtggttactgaagattacgaacctagatattgagttgaactaaaacacgccaaataaaaattttgaactaaaagacgacaaataagaaaacacg

SEQ ID NO: 21566 - DNA, 494 bp, Zea Mays
ggaacctggtagttgctccaaccaatggcgagctcctataattgcaccattgatggcgatgtttctcggttgctgtcataagctgctgcccgacacctcggctaaaaggagccgtccaaccgagccttttgtccccgaacacgcaggtgagatgagtggtaagtaaccaacctgagtgacagggaggatcatggcatcaagaatttagaggggaggaaggccacgatgcaggctgcagcggatctctccatggatcaaggtgtccgcgcatgattgagcacgaggcagagtccaagcacactacgtacgataacacttgtcgaaagctgctattatgggcgtttctgtgtgggatttgggcagtcaacgccacgagatttcctacgaaaactgactggctcaggggtttcatgcatacgctgcttcttttattattattattagtattattgttgttgttgttgttgttgttattattattgatattattgttg

SEQ ID NO: 21567 - DNA, 2241 bp, Zea Mays
cgtcaccgccgccagtacgcccgccaccggcgctcgttcttgtcttcgtccatgcactgtacactacacatcaccgactgtaccgcacccgcacatgcgggaagccgcctcatcctcttcgtcgccgtgatccatccatccacatcactgatcagacccgtgccgtgcagttccaccacacttgggggaggcagagccccaagcgcgcgtccgacctctggacctccgcaggcggaacctattgctccctgcaggttctctcgcgggcctagccgtgcttcttccccacccggaatctgatgggatcgctcacgcgggtgccggcggaggacccagcagcggcggaggaggagtggtccgacgaggcggtcatctacgtcaacggcgtccgccgcgtgctcccggacggcctcgcccacctcaccctgcttcagtaccttagagatattggccttcgagggacaaagcttggatgtggtgaaggtggttgtggagcttgcactgtcatggtctcttgctatgaccgaattacaaagaaatcactgcattttgcaatcaatgcatgcttggctccactttattccgtggaaggaatgcatataatcacagttgagggaattggagatcgtcagcgaggtttgcacccagttcagccaaggcacatggttcacaatgtggattttgcacccctggttttgtgatgtctatgtatgcactgctgagatctagcaaacagcctcccactgaagaccagattgaagactgccttgcaggaaatttatgtcgttgtactggctaccgaccaattatagatgccttccgtgtgtttgccaaaacagataatttggcatacaccaattcatgttcagaagatgcaaaggaccaagctatctgcccttctactgggaaaccatgttcctgcaggaatgagacagatgtcaatgttaatgagtcctcgttatcatcgtctgtggaaagatattcaccttattcatacaatgaaattgatgggagtgcatacaatgaaagggaactcatcttccccccagaacttcagttgagaaaagttatgccacttaaattaaatgggtctaatgagatcaagtggtataggcctcttaaactaaagcaattactacatttgaaatcttgctacctggatgcaaagcttatcattggtaactcagaagtgggagtcgaaacgaagtttaagaatgcccaatataaggtcttgatcgcagttactcatattccagagcttaataccctcaaagctaaagaagatggcatacacattggttctgctgtaagacttgcacaacttcaaaattttcttaaaaaggttgtagcagaacatgatttgcctgaaacttcgtcatgccaggcaatagtacgtcagttaaaatggtttgcgggtacacaaatcaggaatgttgcatccattggtggtaacatttgtactgctagtccaatatcagacctaaatccactttggatagctgtaggtgcgaaattccatataatagatgtgaacggtaatgttagaactacccttgcaaaggacttctttcttggttatcgtaaagttgatataaaaccagaagaaatattgctttctattatactaccatggacaaggccttttgaatatgtcaaagaatttaaacaggcacatagaagggaggatgacattgctttggttaatgctggaatgcgtgtgtatttacaagaaactgaacgaaattggataatatctgatgtttcaattgtctttggtggggtagcagcagttccacttagtgcttcaagaactgaaaacttccttactggaaagaaatgggactctgggttgctggatgatactttcaatttattgaaagaagacatctctatttcagagaatgcacctggtggaatgattgaatttcgcagatcgcttactttgagtttctttttcaaatttttcctgtctgttacccatgaaatgaaaataaaagggttgttagcagatggattgcatgcagatcatctgtcagctgtacagccttacagtaggcctgttactgttggaactcaaagttatgaattagtaaggcaaggagcttctgtaggtcagccaatggttcatatgtcagctatgcttcaggtcactggtgaggctgaatacactgatgacacaccgacacctcccaatactttgcatgctgctttggtgctgagtaagaaggctcacgctcgcat

SEQ ID NO: 21568 - DNA, 160 bp, Zea Mays
caggtcaagaacaggcaccacaggatgaggcgcatggaggatgctgtgacgagttagtgagaggtctaggccgttgtctcccagtcaactttgggttgctggaccgttgtctccttataatgtaattatttattaattttgtatagaactcctattatat

SEQ ID NO: 21569 - DNA, 808 bp, Zea Mays
cgtcgctctcttctccaactcgaagatgtcggccgccaccgccctgcttcatcgaggcccaagacccgatctctgtttttgataaagaaaccaaacaacaacctagcagtcttccttcacttctctgcttccgacctcgtagcgaatcagatcggggggctagggttccggtgcgcctctacaactggacgcgaggctaggctgggcatggagggaatcgtcacggcctgaaagaggtcccggccggagacgacgaacggggttgcagccgccgggaagcgctacaaagacacagagtcatttcaaactggtctatcaagcaaatcgaagccttgcaccaagtttttcagtgtggacgcctctctggccggttgcataatcgacaagggtggggtcaacactaagcagagttacaggcgtcaagctatccatccgcgaccacgagtctaaccccaacctaaagaacatcgagctggaaggcaattttgaccagatcaagcaagccagcgacttgttgcgtgatctcatcgcaaccatcagcgcaagcatgccagcgaaaaatccatcttctgctgtggcgccagcaggaggaggccaaggcagtggtccggggggcacgagcagcaactacaagacaaagctgtgcgagaacttcttgaagctatgcgagaacttccaacacgactatgtatgagatattatctcttattatgactggatgagatgtgtcttatggctatagatgagacttttgtggtgtaattgatgagactatagatttaaatgttgttatgtgattgtgtgtgag

SEQ ID NO: 21570 - DNA, 75 bp, Zea Mays
ttttagactttctaagcttcggctttaaggacacattttcgctatttccgaagaaaagatgtctcaagacaaaaa

SEQ ID NO: 21571 - DNA, 1441 bp, Zea Mays
ctcgtctccagttttttccctcgtctgctataaatggagctcaccttccacgacctctggcagttcccatccgccgcccgcgcacttgttccttccggcacagcacacaggacaccgtagacagattcatcgcgacgatggggctggacgtcgtggagatcgggatgggcgccgatttgagcctggatctgaggcacttcgcctccaaggccgtgcggcagagcaaggactacgcgccggcgccggcgccggacatggacgcctgcatccgccgcctcgaggaggagcggggcaagatcgagatgttcaagcgggagctgccgctctgcgcgcgcctcctcgcagacgtgatcgatgtgatgaaggaggaagcggggaaggcggtggcggaggaggacggcgccgccggggacaagagcaagtggatgagcacggcgcagctctggacgggcgattgcggccgcgaggacgcggaaccagagaagcaagacaaggagaggagctcgcctgaggccaggtctcgcgccgccggcggcgctttcttgccgctcaaggctgccgtgggctccggcgcgccggcgttcgcgccgctcggcttgagaatggacgacaaggccgccgcgcgcgccgggatgcccgacctgtgcttgctgtcgccgccggcgaccaagagcgccgccgaggagagccgacgccaggtggtggggtttgcgcaggcggcgacgagggcggccgccgccacggcgccagctgccccttcgcttagcgttggcgtccagtccccgtcgcagcaggcgaggaaggctcggcgttgctggtccacggagctgcatcgccagttcgtcgccgccttgaaccagctcggtggcccccaagttgccaccccaaagcagatcagggagctgatgaaggtggacggcctcacaaacgacgaagtgaaaagccaccttcagaaataccggctgcacaaccggagggcgccagggtccggcgtggtgagccagcccatcgtgctggtgggagggctgtggattccgcaggagcaaagcagctcgcagtccgggtctccccacggcccgctccacttctccacctcaggcatcgcagtctcgtcggcggccaccgtcagctgcgaggaggaagacggacggtccgagagctatggctggaaatgatggagaggctgctgctgctgctgctgctgagaggggagctgcagcctcaggaacgggaatcatcaggagggaaactgagagtagtgtagctgtctgtacacatacatagttacattacattacatacagggagtgagggagatcgggccttgagcgctcgagaccaaactgatgcttcgggtttgtacatcccaaagagatgagatgatacagttttgcggctaatccatgtttcgggcttttttgtcaccatcttcaaaaaagaa

SEQ ID NO: 21572 - DNA, 2843 bp, Zea Mays
tgtctgctgatatataaaatcatttctcattctccgtcccatgaatttgagataggcttctatctgaaatttggaaagtggtggaatgtcaaattccaaaccaaataggttactttatttagtaaattccaattcctccaaaatgaatggatccatatgctgcttgtgtgcattcaagcatgatatggcgacttctagtgtaacttcctgtgtctttgtgacaattcgttctgacctgcatggctgcaacttctttttaatggattcttcaagatgagcaccaaactgcatgagcagagagtgcaaacaatggagtgctaggtcagattaaatgttatggaggtgctatgatccacactagaaatcatcatgccacgttagaatccactcaagcagcatgcaatgtggtcaatggcggtaaatctaggaagagacacaggtgctagaatacaaaagcaaaagttgtagggcggtttgatgaaccccatatttacagatgggttttaggaatttccccttagcacgatcgtcatccaacaatgctcttctgtcaaccatgcttaataattcttagacaaaattctctttgccatggagtgtagcctgctggtataatactatcggctttgtcagtcttccattcacagataatgtggtttgttaggctacactatcttgatctggttactagctgtgacatgctagcagtcatgtactgtcctccacaatgtgttggtgtctaaaactgaaactcgcaaccaaaattctggagttaatgcacaattaagcttggctttcaagcaacggagcataactgcaggaaagatggaaatatcaggcctctatacttttgaataaaaccacttgcaccattctttcgcagagaagtatttggacgaaaataagcaacttattttggccatcctggaaaatcagaacttagggaagttggctgaatgtgctcagtatcaagctcaacttcaaaagaacctcttgtacctggctgcgattgctgatgcccaaccccagcctccgcaaaaccctgcaggtcgccctcagatgatgcagcctggtatagtgcctggtgcggggcattacatgtcacaagtaccaatgttccctccaagaaccccattaaccccacagcagatgcaggagcagcagcaacaacaacagtttcagcagcagcagcagcaagtgcaggctcttacatttcctggacagatggtcatgagaccaggcaccatcaacggtatgcagcagcagcagcctatgcaggctgaccctgcccgggcagcagcggagctgcagcaggcagcacctatcccagctgacgggcgaggaagcaagcaggacaccgcgggtggggcgagctcagagccttctgccaatgagagccacaagagcgccaccggagcagataccgaggcaggtggcgacgtggccgagaaatcctaagtcgagcagcctgggcagggcgaaaaataatgccttgtatactagcaacgaaagaaaaaaagagtctttgaatgacagctactagcccctaccagtttactgtgtggtttagatgatgtagaacaaagtttagattggtgatgatgtaaaccgtccaatattgatactgcgttcttacattgctgtagtcaattatatgaataatttcatataagcatgttgccctagtggattttacctatgttttatgagctgatgtaaccaaaaacactgagcagcttttaattcagtatggcaattctgcagagttttcaccaatctgataagctgctccacacaattaaccctaagaattaacccaagcggaagcatttcaatacattcactcatacagatagacaaacatttatcaatacatagatgacatgtttccttaacaagaaaatgtcgatgagcaactaaaaacaaaacgagatgaaacacaggacaacttttcatttccagtacactattaaaatcgggcccctagcatcgatgcctttacttcttgccttcgatagggagtatttccaatccagccatccattcaagtaatgcaagccatttctgagataaatagccattggtttctctccttgtctcctttggataaaagccctactgccgtcgccgctttctcgtaacttcctttgggaacttgagaggggctgggagcgtcatgaaagtagacttaaaagcaccttctgtcacagatttgcatcccaactggtcatagtatggtttaagattttggcgggtcattttaaggtcctcacatatgtcgctggggttggatctgaagtcatcggcaaaaagtgttaggaccaatatgtagttggtcagaagctcttttttctctgttggcatgacactggaccccggttctgtaaacatgaacagcagcctgcgatatacagcctgcggggttgctggtccatggcttatctggttttcatttctgcctttccatttgcgattggacatggagccattccgcgccaatagagataggagatgttggatgtaggaaagtatccaagcaaacctctttttatcttcaccctaatgcaagagaaaagttgtttcttttagaaaacatatggaaaacatccatgaacacgatgtattaacaaaataaaaaatggcataagagcaagaattgtctgccatcattttggcagccaaactgtcacttccaaaagaggcgcacacagagcagtgccattcaacttgtcaacattgcagtagcaatggtgtctgctacactgttatcagcatgttatacaagtaaaaacggtcatgctaaggatcaattataaactgtcacaagttcaataagaagaaaa

SEQ ID NO: 21573 - DNA, 2479 bp, Zea Mays
gctccagcagacctgcaccattgaggagatgagctcgtcatctcaaggacgaattgtcaacattacgtggcaaagttgcatttttggaggaagacctttctaaatcgcatcaagaagcaacaaattaccatgaacttagtgataggttagcaaaggaattgaaggatctcaaagatcatgaccaacaaatgagattaaagcaaatgaaaatcctgtccgatctgctgatagctgtgtcaaaagcagagaggcaagaagcgagaatgagaataaggcaggaatctttcagacttggaaatgttgctgttatgagagctgggactatcatatctgaaacttgggaagacggtcaggcaataaaagatcttaatgctcacctgaaatctttgctggaaactaaggagactattgaaaggcatcgtaaatcacttaagaaaagacaatctgacaagggtgatggcagtgatgctgagactggcatgtctgaggaggacatcctcttacaagatgaaatatgtaaatctcggttaatgagtataaaacgggaggaagaacagtatatgagagagagagatcggtatgagttggaaaaggggaggcttatacgagagatgaagcgtctcagagatgaagatggctcacgctttaacaacttccaaattcttcaccatcgttatgctctcttaaatcttcttggaaagggagggtttagtgaggtttacagggcttttgatttggtggagtacaaatatgtggcatgcaagcttcatggattgaatgctcaatggagtgaggagaaaaaacagagctacatacggcatgcgattcgtgaatataacattcacaaaactttggttcatccaaacattgtcaggctatgggatatatttgagattgatcacaatacattctgcactgtcctagaatattgcagtggcaaggatcttgatgcagtccttaaagctacaccaattcttccagaaaaagaaggaaggatcataattgttcaaatatttcagggcctggtttatctaaacaagaggggccaaaagatcattcactatgatctaaagccgggcaatgttctctttgatgaggttggtgttgcaaaagttaccgactttggcctcagcaagatagtggagaatgatgttgggtctcaggggatggagctcacttctcagggagctggaacctattggtatcttcctccagaatgctttgacctgagcaaaacaccatttatttcatctaaggtggatgtttggtcagctggtgtaatgttttaccagatgctcttcggaaagcgtccttttggtcatgaccagacccaggagagaatacttcgggaagatacgattatcaatgcacggagagtggagttcccttcaaagccagctgtatcaaatgaggcaaaggatctgatacgccggtgcttgacatacaaccaatcagagagaccagatgtactaaccatagctcaagatccttatctctcatacgcaaagagatagccgctatgccggagaacactaaggcaagggtagctgatcatttatgagattatttatgtatggggatggataatcttgcgaaggagcaaagtgttccacaagctcaagaagaccacaaagggtgtaactgtatatgttgtaaattttagtctttcccatcgcagcaatgacctgaaatccagaagccatcagttcaacggacagcttctttgtagcgtagagaaagcaggcattggtttgaacggggcatgcgtaacgtgatggtttcttggctggtgggctgtgggcagtggtcctgttgatggttggtttttgtttgctcatactgtcggtaaggtctgccaaatcagaaaccaccggtgacaggcgagagctcacatgctcacctccgaaaaaaatctcggccttgcactggcaggatggactggattttgcgtattgccaaaacagatttaaggtagcatgcatcaatacaggttactttggataacctatagactcaccacagccacaagcacagaagctcttcgtacaatttcagagagtaccgatgtgccagatttctgctggtgccaatttgtttgtgatcgctgtcacccttgtacaacactgggatcgctcattgagcatacacaagttatgcaatttgcttttttattatagtcatctttagggcgtcgttttgttcggaacggattctttggaactttaatgttagttttatttgtgttaaaactgaacgtggaatagttccaggttatataatcccagctaacctaacttgcacttaggagatgtttggtttgagaaatcactctatctaaaataagttagtgtatcatgagttcattttctaaatttggtgggatgatctcattccatatactaagtaactaggaagaatgaggtgatgatatattaactcattttattttacaaaccaaaaaaaaatgaggagtaagaag

SEQ ID NO: 21574 - DNA, 3006 bp, Zea Mays
ctatctgaaaattgataacatcgtcagagggaggaagagctgcttgcgtactggtggagggagtacgctgaatgcagtgcaggaccaagaggatccttggttgaaagtgatgattctgcatatctttataaggttgaggaagagcgggttggggttcctgtgaaaggtggactatatgaggttgatttgatgaggcggcattgcttccctgtgtactggaatggggaaaaccggcgtgtcttgagaggccactggtttgctcgcaaaggtggcgtcgactggattcccgtgcgcgaggatgtctctgaacaacttgagttagcgtataattgtcaggtctggcatcgtcggaaatttcaaccttcaggcctatttgcagcaagggttgaccttcaaggaagtacaccggatttgcatgctctttttactggagaggatgatacttgggaagcttggcttgtctttgatacaggtcctaagtttggtagcaacacaatcaaattaagacgcggatatttctgttctgaatctgcaagtacaaagccttcacaggatgaattgcgtcagaaaaaagaagaggaaatggatgattactgctctcaggttccagttggtcatctggtattcatggttcatggcattggacagaggctggagaaagctaatcttgttgatgatgttgttgatttccgtcgtgtaactgctaacctagctgaaagatacttaacttcgtatcaaagaagtacccagagggttctatttataccctgtcagtggaggaagggcttgaagctcagtggtgaaagtactgttgagaaactcactttggatggagttaagggccttcgagtcgcattaggtgccacagttcatgatgttttatattatatgagtcctatctactgtcagcatattattgactcggtctcgaaccagttgaacaaactgtacatgaaatttctaaagagaaatcctggttacagtggaaaggtttcattgtatggccactcgttaggaagtgttttgtcgtatgatatactttgtcatcaagaatccctttgggccccatttccaacagagtatctgaacatggaaacatctgatcgaaatcaaggagcaaaatcagccaatgaagctgatctgcatgattcaggcgcaaaggatcatgatacttctagtctagggtattcttgtgctgataatgaaaacagtgtcattgatgaagatagcaccagaactgacgtgtcatgtatggacagcatcctcccatcatgtgtgcttgaggattcaccaaataaccatgacactgtcgtgcctcgtggtgcggttgttgctgatcaaaatggagaagaaaagaaggttgagaattatcagtcggtgtatgctgaggaaggaacaacttcaggtgtaatcacaaaaaaggctgaaggatcaagcatttcaagatctgctaaggaagtccatgaagaggtcctcgacaaagaaaaattgatggtccttgccaaagacaaattgatcctttcactagaagaagaggtgaaatgtcttaaagctaaactagatcagcttgaacaacataatcatctagtgactgaaaacaccagtggtgttgagtatcatgaagggcaaaattataatcatgccttgaactctggcaaacttttcgtggcacaagaaagtacaaaccagtcctactcaccgcaaatcaaatacacgaaactaaactttaaggttgatacattctttgctgttggatctcccttgggtgtcttcctttccctgcgtaatgtccgtattggtattggcaaaggacaagactattggcaagataagaacgtaattgaagagatgccatgctgccggcagatgttcaatatttttcatccttttgaccctgtagcatacagaattgaaccacttgtatgtgaagattatctaaagaagcgtcctgtaattgttccctaccatagaggcggaaagaggatacatgttggagtgcaggagttcagagaagatatttctgcacgttctcaagcaattgcccgtcaattgaagtcactgaaggtcaaagcagtagctgctatactagcattgagcagaaatgacacagaagaggatggtgagagtgctaatgagaaagaaaaatcatatggttccattatgatggaaaggttgaccagttcaccgaatggtcgaattgatcatgtgcttcaggagaaaacatttcagcatccatatctatctgctttgggagctcataccaactattggcgagatcatgatactgctctcttcattctcaaacatttgtatcgtgatatacccgaggatcctccaagcgatgtcattgaaaggatgcctattaaactattttatgagagagatccagttgaggaagaaacgcctgtgacgttttcagatcatgcagcaattaaggaattctgcagaaaggtgaaagcttactcaagaaaaatggaggatgatgccaactgccaagcctcgtgatggatttttagtctctcgttacggcctcacacgttcctgggcaagcagaagcaagatgcagacatgggaaggaagaacgaatcgtgatcccaagaaaagaatccacgagatgcagttccacgcttcacgccagaatcagagcacttggagaatgttgtacggagtagagtcggttgccttgctcgttcctacatttataatgcagtgttgtacatagaacgtccgactgtagttttgtgcatcttgaacgtaatgttatgctgcctgctttaaatgctacagaatatatttttgcttttgcatccctagtgtgcgtcaattgcaaagtggttagctcctacttatttagcatgtcttttcattatgtctatcatgggcaaaagtactacataaaaaaggactcgcttagggcccggttgattttttttttttgaaagtttaggtattacaaagacctagttttatagctaaagcgatgcaaaaccaccgtgatttcaaaag

SEQ ID NO: 21575 - DNA, 1080 bp, Zea Mays
tcttcaaagcccaagcccacaaacttcaaaaaaaaaaaaacccaccgtcagaacacgaacaccgtcaccacacggcgcacccaaacatggccgctccgaccaccgccgtcgacaccaccgccccgcctcctcctcctcccacggcagagcccgcggctgcacccgcaccggatcaaaaggtgtctccgcctcctcctgcccctcagcctgataccgctgctcccccgcccgttcccgcgccagcgccgaggaagcggggttgcacacctccgaatgctacaagatccgtgccgtcgtcgccgacctgcgtgtccgcttcgtccaggtttgccaagctactgatttccgcaacacggatgcagctcgtgagattttgaaagaaataaatgtggtcatggatctatccaagaaaatgaggctcaagcttggtgctacttctgagcctgtgaaaccacttgagaaaccttcagctgggtctgtgaaggatgagcttgtgaaaccatcagagaagccttcagctggacctgtgaacgacgagcctgtgaaaccatcggagaagccttctgctggacctgtgaaaaatgaacccactgagccagctccagctggagaaaacaatcaagctcccactgtcggtcagactacagtttctccaaataatgcaggtgttggtgcaccagtagtcaagcatgataattcagaggcgcaaaagtgaaggtgatagaggaaacctgaagtcccgatccattgagatggcatatcgtgcacatctgctcgacaaaaatgtagagtggccggttgatcccctgtgggctcatattatctttcttctactgtaggtaaaattgtttgctttgggctaatcgaagaagagtggtgggcatatcatggtccaaatttggttgtgttcagttgttaacatccatccattctgtactatgtcgctaattgcccatgaatagtttaatctttaaatagttactctataataactggatcattctatacatcgtattgccctgttgtacgaagtattagccaggcaatttcaagtcgtgcttgagaagaggtgatggaact

SEQ ID NO: 21576 - DNA, 1086 bp, Zea Mays
actgatggagaaccaggttgccagcttgaaaaataaaggggttccagctgaatttctctcttcaacacaggcatctcacactaaacaaaggatacatgaagaccttgatactggtaatccttctttaaagttgctatatgtgactcctgaacttgttgcaacatcaagctttatggcaaagctaaagaagctatacaacagaggtcttcttggtcttgttgcaattgatgaggctcactgtatttcaagttggggccacgatttcagacctagctaccgaaaactttcatcattgaggaagcagttcccagatatccctttgttagctttaactgcaactgctgtaccgaaggtccagaaagatgtggtatcatcattgtgcttgcaaaatccagtaattcttagagcttcatttaatcgacccaatatattctatgaaggtcaaaagctaccacaaccttggaagaggctttggaaatcttgggctccccctaagtgcaagtttttcttatggttggccattcggaataaatgttggacttcagatagattggagatgagaggtctggaccacccagtgtcttgcctattctgtgatcaagagcaggaaaccatacaacatattttgtgttcatgtgtatttgcaagacagttctggcattccattctatttggattgaatgttggtaatctctctccctcaagagatgagatctcctttgctgattggtggcgaaaaacaagtaagaagatacataaaagcaagagaaagggcatgaacagcatcatcattttaggggcctggtgtttatggatccaccgcaacaaggctgtctttgatggggagaccccttcgctaagctctatcagatgcgtctttcttgatgagattgggtgttggattacggctggtgccaagcatcttcagagctttggattagtgcttgcgcgtaaccttcacagggtctagggagtggtgtgttttttttttgttttgagtaagcctgcttagggctttgtaccttggtccattttggacctttttcttctctaattaaaatgatgcgcagttctcctgcgctttct

SEQ ID NO: 21577 - DNA, 2373 bp, Zea Mays
tggctggcttgccgctgctcctctcctctcctctcctcgctagctccccccaagcgagcacgccgcccaccacgatgccagcgcgcacgggagccggctgctccgcctccgcctcctctccgctcccgcaccactagcgcgggagcccgatggcgagcagcagggggaggctgaggctctccccgcgcgcggcggcgccgcagctggacgcgggcaagtacgtgcggtacacggcggagcaggtggatgcgctggagcttgcctacggcgagtgccccaagcccagctcgctgcgccggcagcagctcatccgggactgcgccgtcctcaccaacgtcgagcccaggcagatcaaggtctggttccagaaccgcagatgccgggagaagcagcggagggagtcctctcgtctgcagaccgtcaaccggaagctgggtgccatgaacaagctgttgatggaggagaacgaccggctgcagaagcaggtgtcccgtctcgtcttcgacaacgggtatatgaagaatcggctccacagtccttctgtagccaccaccgacacaagctgcgagtctgtggtgacaagtggtcagcacaagcagcagcaaaacccagcagttctgcatcctccacaaagggatgcgaacaacccagcaggtctactcgctattgctgaggagacattggcggagttcatgtccaaggcgaccggaactgctgtcaactgggtgcagatggttgggatgaagcctggtccggattccgttggaatcatcgctgtttcgcacaactgcagcggcgtagcagcacgagcttgcggccttgtgagcctcgagcccacaaaggttgccgagatccttaaggatcgcgcatcgtggtatcgcgattgtcggcgtgttgatatcctccatgttatccctacgggtaacggtggaacgattgagctgatctatatgcagacttatgcactgacaactctggcggaaccgcgcgacttttggacactacgatacactagtggtcttgacgatggcagtcttgtgatctgcgaaaggtcattgacccactccactggaggtccttctggacctaaaactccagattttataagagctgaggtgcttcctagtggttatctgattcgaccttgtgatgggggaggttccatgatttacattgtggatcatgttgatctgaatgcttgtagtgtccctgaggttcttcgaccgctctatgaatctcctaagatactggcacaaaagatgactgctgcggcgttgcgtcacattaggcaaattgcacacgaatcaagtggtgaaacgccctatggtgctgggcgacagccagctgttctcagaactttcagtcaaaggctcagcagaggcttcaatgatgctgtgagtggctttccagacgatggctggtcttctttgttgagcagtgatggtgctgaggatatttcaattacaatcaactcatctccaaacaaacttattgggtctgatgtcagcccttccccattcttttctgccatggggggcggcatcatgtgcgcaaaagcgtcaatgctactgcagaatgtgccacctgctctacttgtgcgatttttgagggagcatcgctctgaatgggctgaccctggtgttgatgcttattccgctgcctctctgagggccaacccatataatgttccgggtttaagggctggtgggtttatgggcaaccaggttatactaccccttgcacgcaccgtggagcatgaagagtgcttggaggttattcgacttcaaggacatggctttagccatgacgaggttcttatgtccccggatatgtttcttctgcagttgtgcagcggcatcgatgaggatgcgccgggtgcttgtgcacagcttgtcttcgctcctatcgatgaatcttttgctgacgatgcaccgttgctaccctctggcttccgtgtgataccgcttgatgctaagacggatgtgccatctgccacacgtacccttgaccttgcttctgcgctcgaggtcggatcaggcggaggtctgtgtgctttaagcgatagcgggtcaggcacgcgcagcacgaggtcggtcctgaccatcgccttccagttctcgttcgagaaccacctccgcgagagcgtggcagcgatggccaggcagtatgtcagggcagtgatggcgatcgtgcagagggtggccatggcgatttctccctctcgccttggcccgcatgtcgaactgaagcatccgccaggctctcccgaggcactcgcactagcttcgtggattggcaggagctacagcattaccctggaattgttaatgctctcttcaaatcatgagtagcattacccttggaggaactgtg

SEQ ID NO: 21578 - DNA, 561 bp, Zea Mays
atgattccatggtattgttgcaatttctggcgaatacatttacagacaaatcgtgctagtacgtgccacagcgtgcggtcatttctaaatatcaccctcagcaaggaaatgctagacacaacacaagagagttatgcactctacaagcagcgccgccgtagatcctcactggattttctccatcccgtaggtatcttcagctccactggctacatttcttcttctctctgctatcatctcggtgtatgcctgagggtacgagtagagaaatatgtaccaccatgcggatattacaaaagaaaccccagcagtaattacaacagattggataagcacccaactacaggcaacggcaccagttcccgtaagcaatattgtccaaggctgacacccgtccatgtcgtccaccaccccgtcctcatcaaagaacgccgccgcgccgttcttgccactctcccccttgcccccaccgccgccgccacctacccgcgccacgccgccgcgcctctggctcctgccgcagagctgcagccttgtttgtgcaccggtggcagcacatga

SEQ ID NO: 21579 - DNA, 1276 bp, Zea Mays
gaactggagttattttatttcctaagtttcctgaaggacttcagtttcatacttccattgattttctttgctagtgaaaggcgaatcaggatcctgaattatgattgtcgatgattttcctagctttttaactgggaatgaatatttgtagagatcttggatcgaacaagggtgcaaagtgggcgagcaggttattccattggcaaggaatttcaatggtgtgaacgctgatattgaatcacaaaatgtgccattggttgaaaacactgtggagatgaaagtaggggcaacttcttccagaaatgacgggagagctggccagttgaagtatgcaaacaacagggagactatcgccagcaaatacacttctattagagaacagaaccggcagtcagggaaggtagtgagaaaggaaatttcaccgaactctatatctttgctcgaagaaagaaattcagagcaggggtccaatgctggtgtaccaccaactggtgtgtctgcaacatgggcctcgatgaagattggttttcaaaatttcaaagcaaatatgggttctaagaagtttcttcctttgcgccaagatccaggatttgttccaaatttgaatgtctcttcaccagaatctcttgatgacatattccaaaggttgaaacggcggcctgcaaatgtgcctgtggattaccttgacgatgacgatgatgacaacataggagatacagatcttcatttccaagatcaatgaaataggttgtgatattcttttaggtttagaatatgcatacacagaaaaactaaaagaattggtagcaatagatgttcaaaggaagatacaggatgtatagatctgatgatggtttggtgtgcttcctggaagctcatgacgcctgtccatctggaaaactgcaaaatgtaagtacgatatgatgacagcctttacagaaaggtttggaattctcccgccgaaaagggttgggactaatctactacgtaccactatattcaggtaaccttgttggtttctctcaccttttttttggaactgtattggagatgctgatatgtgatggaagccaaaaattgtaaatgtgtacctacaataccatatgaaaattaacgtgcttgagttgtaaccagtaaaaacatactattgaatctatacttgatcgggaggatacaacccaaagtgtttgtgtgtgacgtcagacatgtatttgatggtataacttgtggacacttattgtctgatgcttgacctaaaaatacctatctgtactgc

SEQ ID NO: 21580 - DNA, 110 bp, Zea Mays
accggctgcgagctgagtttgatttcgccgggttactcggattaagtccgatcggtgttgagagttcgtcatgtggtgtgtggcgtggagatacagaaggaaaggtcctg

SEQ ID NO: 21581 - DNA, 278 bp, Zea Mays
caagtcttacccgactaaggaaaaagactctcaaggatatgctggcttttgtgaatcaaggtaaagtttaacaagattcaaggactcttttgcagaaaagcttactataagtggatccttaagaattccttttacttgtcaggttaagtgaagttaccttcatctagagttctttctatcctagttcaaacacttggcctacactagccatcttttatcatcccatcagtttactggattgctacgtgtaagtcagtgaccaagtcttcatatccgag

SEQ ID NO: 21582 - DNA, 1081 bp, Zea Mays
attggagtttatcatgaatttgatcgtagctaaagagcaattttagactggcatgcaatggttatgagtagagacaagatatctgaatgctagcattcgggagcttggtgatcattttcagacaaaacgtgatggtgaaaatggtgttgatgcatcaattgaaaagagaacacctaagctacttcagtttacttttcaagagttgaaatctgccacgcttaacttcaggccaggcaatattcttggggagggtgggttcggttatgtattcaatgggtggattgagccaaacagcactgctcctgcaaaacctggcacaggggttactgtggcagtaaaaagtttgaagccagatgcgcttcaaggtcatagagaatgggtgaagttgactttctgggacagttgcatcataaacaccttgttaagttgattggatattgtattgaggatgatcaaaggttacttgtatatgaattcatggcacggggaagtcttgaaaatcatcttttcagaagggctcttcccctaccttggtccaacaggatgaagattgttctaggtgccgcgaaaggagtagccttcctccatggaggtcccaaacctgttatttacagggattttaagacatcgaatgttcttcttgatgtggagtacaacgcaaaactatccgatttcagtttagcaaaagctggtcctcagggtgataaaactcatgtatatactcgggttgttggcacctatggttatgctgcaccagagtatgtaatgacagatgcgttttttttgggaccaagccctatgggcaacaatggagatgaccagcgtcttggtttatcaagaggaagttaatccctctcaactgaaactcccatcaaatttggggcatagtgtgtcgattcaattgtaactattatatgtcattttgggttagcaaactgtatctactaatttctcagccttaagccttttgagctagaaacttgtgtaaggatttgttgcactaagtgacatgctgatatttgaactatttaggctgccaaatctgaattttttaactatcaagtatctcaacatttctctc

SEQ ID NO: 21583 - DNA, 854 bp, Zea Mays
gggccaactatgttgaacaactcagattcactattcatactggtgctggaaagatcgttcctgaaatacaaagtgatgggcaggtaaaggttgatatgggcgagcctatcctttctggactagacatccccacaaaactgctagctaccaagaacaaagctgttgttcaagctgaattggcagttgagggcttaacatggcatgtcacatgtgttagcatgggaaaccctcactgtgtcacatttggtgcaaatgagttaaaggtattgcaggtcgacgatttaaaacttagcgaaattgggcctaaatttgagcatcatgaaatgtttcctgctcgcacaaacacagaattcgtacaggttttgtctcgctcacacctcaaaatgcgggtctgggaacgtggtgctggagcaactcttgcctgtggtactggtgcttgtgcagtggttgttgcagctgttcttgagggtcgagctgagcggaaatgtgtagttgatttgcctggcgggccattggaaattgagtggagggaggatgacaatcatgtttacatgactggtcctgcagaggtcgtcttttatggatctgttgttcactaggtaagagggggaggtcttggtggccaggtgatatggtgggtgtgatttggagctccctaaagatcctatattccaccatttgggttgccctcagattctaactgataaagtagcttttttaattggctcatgttgcgcatattgtattgcaaaatcataggtgtgcatgttaggacatcagctttattgacgtctggaatttgcagaggtatattcttgctttttgttaataaactacagtatacaataaaagtt

SEQ ID NO: 21584 - DNA, 4357 bp, Zea Mays
gctccaatccagtgccggctggcggtcccccggcgggcgatacggacggccccgatcgcgtggggcccgctccaccctgcagcgccatgtataaatacacggggacaggctcggtccgcgcgtggtctcgctcgatttcgggggcgcggatcagacggcggggagcgaatccggggcccagttcccgcacctgcctccctcaccctccactccaccctcctccactccatccacctctccctcccctgcgccgctgttgatctcggagcaacaaaaaaaaaagaacaaggggaagaaatctcctcccccgtgctgttgccgtctgtttggcctcgaccgcggaccgcccgctaccatccaaaaggcggcggcaggctgctctgcccactcggtgccgttgtcgtcgccccagccagcgggatcttgctgctccaccgccgcctgccgctgttttcctccattcagctcgcgcctgctccagatatctgacccgggaggcggcggcggcaggcaggcagggagccaacccgggagaagaaggccagggaaggtgttcatcacttgagctcatatcatcgtcagaggcaggcagcagtaagcagattccgctgttgctgagcattgtcgtcgtgggcgtggcaggccagttcgcgtggagacggggagggaacatctggtgtgcgtttgctaaccggggggcggccggcgggtggaggcgaccaggcgaggactgctctgcggcggcaaagggtttcaaaatgctggcgtgcatcgcctgctcggccaaggacggcggggatcaggacggctcccgcgccgccacgccccacggaagggacgccggcaagtccctcacctcccagctcaaggacatggtgctcaagttctccggctccggcaggcagtacaaggccgcggcggcgagcccgtcgttccggggcaaccgcttccaccgcaacagccgcctggccgcgtacacgggcgtcattgacgactcgggcttcacgtcggacggggccaccgagggctacggctacatgaggacgacgacgcacgcgaccggcgccaccgcgggaaccaaggtcggccgtggcttcccgcagcacgtcaggagcccgagcgcgagctggataccgagcatcggggaggaggacgatgaggaggatgaagaggttgtcgtcgttgaagaggaccgcgtgccgcgggagtggacggcccaggtggagcccggcgtccagatcaccttcgtctccaccgccggcggcgctggcaacgacataaagcgaatccgcttcagccgcgacatgttcaacaagtgggaggcgcagcggtggtggggagagaactacgaccgcgtggtggagctctacaacgtgcagacgttcagccggcagcagggcgtctcgacgccgacgtcctccatcgacgatgccacgcagagagactcgtcgttctactcccgcgccggctcgacgagggacagcccggtgatcctgccgccgacagccgtgggcagggagcagccgatcgcccgcgccacctcgtgcagggccacggccgcggcggcttccacggcccgagccgcgtgcaacccatcgtccagtgcggtgccggacccgtcggaccacgtgtgggcgcaccacttcaacctgctcaactccgcgccggcgccggcaccggccgctccgcacctcgacccgtcgcgcgctaccacgtcgtccctggacgaggcgtccgtgtccgtgagcaacgcgagcgacctggaggccacggagtgggtggagcaggacgagcccggcgtgtccatcaccatccgcgagttcggcgatggcacccgcgagctccgccgcgtccgcttcagccgggagaggttcggcgaggagagggccaaggtgtggtgggaccagaacaggaaccgaatacacgcgcagtacctgtgacgtcggactcggagctagctgttgggtgtgcagtacacgcgttggatggaagccaagccaccaatccatggacaatagtagcgtagggctgagtcagtgatactattgcgactactgtctactagtgctagtttttacagggtgaacagaggtgaaagaggtccacggaatggagcctgtgtaaaacatgtttgctactactactgatctgggtttgtgtgttgatgaccaatgtattttttttcttgatgaactaatactgttttgtgttgatcgcctcagatgaacagtgctcacattttctaatcgcgggcacaaacaaatcacccacaagacaccaagcaagctaactttgaccatattggataacattcactttccaattacaaaagaaagcaagacaaaattcttcagtgttgcgttttttactagtgatgaggaaacgtttgccatcgttacaagacgtgcgccaaattggcacctcactgcgttaaatgtgcattcaaaccaaatgtgaaatgtccatcccttgttgggctcaaggatttacaagctgttaaatgtgcatacagtttgtgacagcgatattggtgcaagataacattgcaaggcaaaccaaaccaaattaatagcacaatcatgtttattaaaacatgggggcaagcttttcgcaggaaaaaagcagatcaaccgcccggaagtggggaaggcttgatgcaggctctagcacttcacaaaggaatttgcaaacccattctaatatgtctcgacgcagcgaaactgtggtgatggcaaatccgcacaaccatcgatgggcaaacgctcaggctgactatcctcttcgggcacactggtttctgcacactatacacaacacccctcctgcagctgatcgaattttcactccacataccctcatttagctgaccaattttcttgtcagcctctttgctggagggatatcgtcagacttcccaagaaagtccgacttgccatgtccggccttcatcatgggggcagcaggcttcacagcgctccgtgttctagaggtcacagacatttgggatagtttctctgtaattgatgagaccttctgtattgctcctcggccagtttcaggcaagctccgtgaatgcctaagtacaggattccctacaattccaaaggaaaaaaagttctaaaaaatcaaaacccatttcgtgcaaggagttgggcaatgcaaccctatataggaaacttgcctgggctattccgagctggtacccgattcgtagttagtttattgctagtctcggttggcttcatacccttttgggatggctgacgatccaaattaagttttctttgtacacctgtaatgttggtagcaaaatagacaatcaaactaaaccctataaatcttgcttgctccagcccaattaaaacagataagacacgcaccagtcttagataaaccatttaattttgcggatgcattgctatgagatttcattgtagatagagttccagttgagaatcttctagccacactgttctctgaatttccttttgatccaactaaaacaaatgaaccaagcacatgtaaaacaacaatatcctaaatgaattaggtacaaagcagaatactagtctgttaactaaccacatggaggtgttctaggaagtgatgaagcttttggacggacagggagtggaacacatgtacaaccctaaaagttggcaaccagaaaactgattatagttccaaggagacaataactgaaccttgccaataaaaatagagtagaaagaatatactattacctgaaaaaaggtatgctggaggacttctgcggcctttggtctcttgctaggatcccatgagcataaacttactgagatgaggtcaattgcatcgctactggctgttgtcatcacctcggccagttgactgcctttgatctgcatggatagaagaacacaccctcaacattagatcaaatattaaccagtcattcaacatgtatccacattcacaatgaggtggcaaaaggtacaacaattcatccttttcaggggagtacaactattggtaatcaagaaagagaatgacataaacagcataacactgatggggggtttggcaacaagtataagggtaataggatttgaatgcgctgtagcaaaatggataaggactagagaaaaacttagtactccctccatagaaataaggactagcaaaaatggataaggactagcaaaatggataaggagtatgaaataacagattctaacaatttaggatgatgtgtgtagtgtactgtttcatttgttgcagcaaacaagttcctaaaagaaagtatcaagaaaatcatgacaatactccctccatcgaagaaaactgagtgtcttaaacataatcttaatcacttaat

SEQ ID NO: 21585 - DNA, 895 bp, Zea Mays
caattgtcataggtccgatctgtccccaagcttgcaagactcctagatagatctttaagggagctgtcaaagtaatggccaaagaccttattcgtacccggcatcagataacaaagttctaccaactcaaatctcagctccaaggagtttctctaagagttcagacactaaaatcaactcaagctatgggtgatgccatgaagggcgttacaaaggcaatggctcaaatgaacaggcagctaaatctgccagggttgcagaggataatgcaagagtttgagcggcagaacgagaggatggagatggtgagcgaagtgatgggagatgccatagatgatgctttggaaggagatgaggaggaagaagaaactgaggagcttgtgaatcaagtacttgatgaaattggcattgatatcaaccaagagcttgttggagccccgtcggccgctgttgctcaacctgcttcagcgggaagggttgcccaggctgaaagtgctgggaatgctgacactggaatcgacgccgatttgcaggcaaggctggacaatctgaggagaatgtaggtgctacaccagcaaaagagtagtgccttctagctctgttgcctgcgaatgtgaatacctagtcaatcaaagcaaaacgtttacaagccagtgtgtatgttgaaatgaatgaagcgttcgatatgccggtagtaatgacaaatgttaaatatacatatttacaatttcttcccctctgagttcatgatggattgatgcctgcagatgcggcatgtcagctgcgtgctaactgtgatttgcaagctgttgcttaaatacacagcagatatctaagctttaaattgccatgcttcctttccggcgattcaacgtcgtcgaagctccgaatcgtt

SEQ ID NO: 21586 - DNA, 3687 bp, Zea Mays
aaaaaaaagagcagggcaggagaggactgagagcgaggccgaggaccaagaagaccgaccaagcgtgaagcgccctttgtctcgacgccgctgccgccgcaaagactcgcgattcgcgagagaagcggccgcagcagccgagcttctctcgcccccgccgctcctctcccactccaccaccgcgcttcagattccacaggtgagaggcaaaaggcaagagccgaagaagcgagccgaggcgccaccgctctcccgcctgcttcctccgccggcccggccgtcccggccggcgagcgagagccaacgaactgcgggccgaagcgaactgccggggccaccgtggggcggagatccgcaccggacctcccaccggttcctggttgtggaatacctggccaacccctttttctatgtgtcgctgctggtcataaaacccaatagttacttggagatcacatgcaacaaatatgcacactaaaggggcttcttcagatgccatcagagttagcacctctagtgcccccagcacatcgagccatggttctgcacaagatgactatgattcctctggggatgtgtacgtgtggggtgaagtcatttgtgacaacactgtaagagttggtcctgatacagtaatcaggtctaccgctaaggctgattttctattgcctaagcccctggagtccaagctagttcttgatgtgtaccatgtggattgtggggtcaagcacgctgctttggtcacaaagaatggggaagtgtttacatggggtgaggaatctggaggacgtcttggccatggatcaagggaggactctgtgcaccctcgcctagttgagtcattagctatttgtaatgtggacattgttgcttgtggggagttccacacctgtgctgtgacaacatctggggaactttacacctggggtgatggaacacataatattggacttctaggcaatggtaccgatgtaagccactggattcctaaaagaatttcaggagtactggagggtcatcaagttgcgtatgtttcttgtgggacctggcatacagccttggttacgtcgaggggacagctatttacgtttggtgatggtacattcggagttttaggacatggaaaccgcgagagtttttcgtgtccaagggaggtagaatctttatcggggttgaaaacaattgctgtggcttgtggtgtatggcacacggcagctgttgtagaagttatagtcacccaatccagttcaagtatgtcttctggaaagctcttcacatggggagatggtgacaaacatcggcttggtcatggtgacaaggaaccaaaacttaagcctacgtgtgtggcttcacttattgattatgacttctgcaggatagcatgtggtcatagtcttacggtaggactgacaacatctggacaggttctgagcatgggtaatactgtctatggtcagcttgggaatcctcgttcagatggtaaacttccatgcttaattgaagatatcatgggtgaacatgttgtccaagttgcatgtggttcctaccatgttgcagtcttaacaaataagagtgaggtttttacatggggaaagggggccaatggaagactgggtcatggagacgtagaggatagaaaaatacctacactggttgaatcattgagagacagggctgttaggcacatagcttgtggttcaaacttcacttcagctatctgtcaacataagtgggtttctggagctgagcagtcgcaatgtgcctcatgtcggcaaccatttgggttcaccaggaagaggcataattgccataattgtggtcttgtccattgtaatgcgtgcacctcacataaggtcctgagagcagcattggctcctaatcctgcaaaaccataccgtgtttgtgattcatgttttatgaaattgaacagtgcagcatactcaagtacaattaataagaagaaagaggttgtgcctcgccattctggtgaaagcaaccatgatgctaaattagctagagcaattgtgcccagcaatttggatatgattagaagtttggacagcaaggcagcaaaacaagggaagaaaactgatgcactgtcattccttcggactccccaaatgagttcgcttcttcagctaagagatatcactttatctggtggaattgatctgaacaagtcagttccaagagcagttcgcacatcagtccgatcattgaactcatctagggctgtttcccctttctctcgcaagcctagtccaccacgctcaaccacaccagtcccaacaactcatggtctttcaattgctaaaactgctgctgatagtcttgcaaaaactaatgagatgttaagtcaagaggttgaaagactccgtgcacaggttgacaatctaaggcgccgttgcgagcttcaagaacttgagttgcagaaatcagcaaagaaagtacaagaagccatgtcaatggtttcagaggaatccgcaaaatctaaagctgctaaggaagtaataaagtccttaacatcacagctcaaggatatggctgaaagactacctccagatcagggagcctatgatggtagcgaagcaaaacaagcacatgttccaaatggcattgagatgtatgcttctatttacactagcatgaatggtattcatcagccacgaaatgagtctgtcagtgccctaagcacgcctggcctgcatattggacgatcatcgcacccaaatggaatctcaaatcatcatcaatcaccaggaagtattactgaaaacagtgaagtgagtgctcacacccatagggtttcaggtcctcccgacgttgaaaatccgaatcgaaggggacatagcagtagtgacgagatgctcagtgcaagtagtagagcagacgatagtagcagcagggacgctagatcccttttgaatggtgaggatggttacaaatctcggagtgcagtatctttgcccagcaaccaagttcaggctgagtggattgagcagtatgaaccaggtgtatacataacactgacaactcttcgtgatgggacccgagatctaaagcgtgtacgcttcagtcgaaggcgttttggggagcatcaggcggagagctggtggaacgagaaccgcgacaaggtctatgagaagtacaatgtcgatgacccctcctccgtaccacactaccctgcagtagtcatcagaaaacttcaagtgggagcgcagagccaaagtcagagtggcaagggtgccgaggaattcttttttgtccgtgtaatgtcgataattcttgttactgttgttatgaaattgagtcagtgggacttgttaggttgtcttgttcagatgtaatgcacatagagttgtggaacaccgaaacatgttgtagggggtggggcggtagcagagggtggacagtaacagtagcgcgcccagccctctacggcctacccttttgaaagccttggttgtagccaatgcagctagctgtaaagaagtggcattttttttttgtctccaaaaggtgtcacgcttcacattttggctatattgcatttgatgacattcaaaatattcggatccagtagcacctcatattcccaccccacatcatctgagttcccctcttcaaactagtggttgtagatgctgagctgaaactgacgttgaagagagtgtagatgctggagct

SEQ ID NO: 21587 - DNA, 1628 bp, Zea Mays
agaggatttctattgtagaaatgcagttaggcccattaggttttgcccttttttttcagactcggattggtccgccctccttgtgctccgccggcaatggcgtccaccgccgtcaagctcatcgacatcgcagtcaacttcacagatggcatgttcaagggcatctaccacggcaagcagtgccacgccgccgacatcccggccgtactcgcgcgcgcgtgggctgcaggcgtcgatcgcatcattgtcaccggaggctccctgaaagagtccagagaggcattgcagatcgccgagaccgacgggagactgttctgcactgtgggagtgcacccaacaagatgcggggaattcgaggagagtggagatcccgagggtcattttcaggcactgctggctctagcgaaggagggtttagataaaggcaaggtcgttgctgttggtgaatgtggtttggattatgacagacttcagttctgtccggcagatatgcaaaagaagtacttcgagaaacaatttgagttggctgaagcagtaaaactgcccatgtttcttcacatgcgtgctgctggtgaagacttctgtgaaatcatgacacggaatttgcacagattccctggtggggttacacattccttcactgactcagcagaagatcgggacatgctactttcttttgagaagatgtttataggtgttaatggttgctctctgaaaactaacgaaaatcttgaggttctacgaggcattcctgtcgagaggttgatgatagaaacagattctccatattgtgacataagaaatactcatgctggaagccagtatgtaaaatctgtctggccatctaagaagaaagaaaagtatgagccagattcaacagtaaaaggtcgcaatgagccttgtttagttaggcaagttcttgaggtagtggctggaagcaaaggaatttctgacatagaaggcctgagtagaactctgtaccacaacacatgcaggctcttctttcctcaagatcttgacgcttctgctaatgcgcagcttgagagtggtactgccgtccaggattgctgatgtcagagtgatttttttattataaatgtttccttttgactggtactgccgtccagttgcggcggcgtagggcgggggtaggacagggcgcccacgcggtggcggaggccgacatggtggcgctgcaggttctggaaccggaggctgagaagcggggcaggggcgtaatggcggctgcggtggccatggccggagcgcagagatttatagaatatgacgaatattgaataaattattcactatccaggcgtaggggtgggcattttaaaaccgaacctgaacccgaaccaaacccgaatagaccgaattgtcggtctattcgggttttcgggttcgggttcggttcctatatgtgctatatttcgggatatgtgttcgggttcggttcctaacctttaaaacccaaatagacctaataacccgaaatataaaaaagctcttaatatgtgatggtattattatatgtatgatttataaacttagtagcttgaaataatgatatcatcttaacgatagtatatatatctttgtatgctattttttatagtcacttgtag

SEQ ID NO: 21588 - DNA, 65 bp, Zea Mays
aaaagatccttcggccgaagctagcataattggtggaaaattttttactgatatctgggataatg

SEQ ID NO: 21589 - DNA, 2860 bp, Zea Mays
cctgagtccaccccccgtccctttccctctcctacctccacctccacgacaacaagcaaatccccatccagttccaaaccctaactcaaatgctcgctttgactgcctcagcctcatccgcttcgtcccatccttatcgccacgcctccgcgcacactcgtcgcccccgcctacgtgcggtcctcgcgatggcgggctccgacgacccccgtgcagcgcccgccagatcggtcgccgtcgtcggcgccggggtcagcgggctcgcggcggcgtacaggctcagacagagcggcgtgaacgtaacggtgttcgaagcggccgacagggcgggaggaaagatacggaccaattccgagggcgggtttgtctgggatgaaggagctaacaccatgacagaaggtgaatgggaggccagtagactgattgatgatcttggtctacaagacaaacagcagtatcctaactcccaacacaagcgttacattgtcaaagatggagcaccagcactgattccttcggatcccatttcgctaatgaaaagcagtgttctttcgacaaaatcaaaggtatgttcagccattgagtacaaactgccgagtgccgactaacaaaatgtcataacattgctagtatcaatgcctaccatcatcaattgaagtagtttgttagttactttaaggtaactacttgataaattcttatattcctccatttatttttccttcaagctatgtgtttatgatctgcggtgattatgtcattttattctaaaaaaaactcgacctgcggagggtaagacaacccctggacattatattaagaagaccttctcaagtgggttgagaaaaccctcaaacccctgctccacccatacacagcggcaccgtagcccatgtgagaatgacagcgattggggccatgcattagacctgtgctttggcgtgggacggacgaggggatttcccccgaacccctgccgtagcccatgtgagaatgaccgcaactagggccggacattagacttgtgctttagcgtggaacagatgaggagatttccccccgaacctctgccacacccatacacaacggcactgtagcccatatgagaatgaccgcgaccagagccggacattagacatgttctttggcgtgggacagacgagtggaatttttaaccttagattgaaattcactctcacagggagttgaactcaggacatgagggtgctactcagaccacgtaaccaactcagttagaggccttcgtatgtcattatgttttaactgaattatgttttatctgtggctctttgaagattgcgttattttttgaaccatttctctacaagaaagctaacacaagaaactctggaaaagtgtctgaggagcacttgagtgagagtgttgggagcttctgtgaacgccactttggaagagaagttgttgactattttgttgatccatttgtagctggaacaagtgcaggagatccagagtcactatctattcgtcatgcattcccagcattgtggaatttggaaagaaagtatggttcagttattgttggtgccatcttgtctaagctagcagctaaaggtgatccagtaaagacaagacatgattcatcagggaaaagaaggaatagacgagtgtcgttttcatttcatggtggaatgcagtcactaataaatgcacttcacaatgaagttggagatgataatgtgaagcttggtacagaagtgttgtcattggcatgtacatttgatggagttcctgcactaggcaggtggtcaatttctgttgattcgaaggatagcggtgacaaggaccttgctagtaaccaaacctttgatgctgttataatgacagctccattgtcaaatgtccggaggatgaagttcacaaaaggtggagctccggttgttcttgactttcttcctaagatggattatctaccactatctctcatggtgactgcttttaagaaggatgatgtcaagaaacctctggaaggatttggggtcttaataccttacaaggaacagcaaaaacatggtctgaaaacccttgggactctcttttcctcaatgatgttcccagatcgagctcctgatgaccaatatttatatacaacatttgttgggggtagccacaatagagatcttgctggagctccaacgtctattctgaaacaacttgtgacctctgaccttaaaaaactcttgggcgtagaggggcaaccaacttttgtcaagcatgtatactggggaaatgcttttcctttgtatggccatgattatagttctgtattggaagctatagaaaagatggagaaaaaccttccagggttcttctacgcaggaaataacaaggatgggcttgctgttggaagtgttatagcttcaggaagcaaggctgctgaccttgcaatctcatatcttgaatctcacaccaagcataataattcacattgaaagcgtctgacctatcctctagcagttgtcgacaaatttgtccagttcatgtacagtagaaaccgatgcgttgcagtctcagaacatcttcacttcagatattaacccttcgttgaacatccaccagaaaggtagtcacatgtgtaagtcggaaaatgaggttaaaaactattatggtggccgaaatgctcttttttgttttcctcacaagtggcctacgacacttgatgttggaaatacatttaaatttgttgaattgtttgagaacacatgcgtgacgtgtaatatttgcctattgtgattttagcagtagattctttgccagattatgctttacgcctttacagtgacctaggagtcaagggccccacatattatatttattt

SEQ ID NO: 21590 - DNA, 754 bp, Zea Mays
ctcgtctaagtcaccaatttaccaccaggtgtttgaggagatccggaaggagcattggtacaagccgaggttgctttggtacgtagatcttgttacagtgcttgcaagcaaaggtctccggactgaggtcgacagagcctgttcatatctgaagagggaacagttggagcctgacactgaaggtttcaatttgcttctgaaggcactcctagactctgggttcacacagttaacactggactgtttccgtctaatgaaattgtgggacagtgatcctgacaggataacgtatacaacattgatcaaaggccttgaatccctaggaaagatggagctatctgctggcattcggttggaggcagaaaatgattatggttccttggacttcctcgatgaagtggagatcgatgaggcttgcagaagtagaccttaacaggatgggtcaatcttgctctttgatgcaaccagcaggagtaaatctttgtgaagtgcagaatgagattatacagaaccttagtaaataattctttcctagatcttatacacaattttagaaattagaacagaccttgttgcagcaagtactagtattgactactaatatctagctgtttgttgtgtatccaaaatcttgaggggtcacctgttatcttaacttgatttttgtttgacatctgtatggatgtctaaccatgctgttattccctgaattatagtgacattactattttcgcttcatcaaactgtatttttt

SEQ ID NO: 21591 - DNA, 8721 bp, Zea Mays
tcttcttcctcctcgtccctcccaaatccccgaacccgagcgcgcgactccctcccgcctcccagatcttccagaacccgctacgattcgggcaatccgccggcccgcgccctagtaggtctccgcgggcgggattggttgatgcctccccgcctcgcgtgaccgctgcccgagggctggaccggagatctccgcatggatcacaggggcggcggcggcggtggcggaaacaagaaccgcaccgatctcctcgctgcagggcggaagaaggaagcggagaggtctcaggcggagcagtgcaacggtgaggggcctggtaccgcggagtccagctctgtggagagttccaatgcggtgcaagaacaggagacggtgcaagagcaggagacggatgatgtctccgatgcacatcatgtcggtcctagtgagcaggggatttcggagcatcctgaaagccagacagctggtggcagggatctatcacttcaggctaccagtggagacagcattggtgatgataatgtaggacgagctcagctgggtgatgtggatagcatggagctgaatgcttcttctgaaggtaatggagcagatggtgattgcaatcaactaggggaacaccagcaggtggaaatggatgctgttgaaaggccaacaagttccagtttcgaagaattcaccgagttgccaattcattctcaaggcattgaagccgataatatccacggtgaaggggctcaggaaatggtgatggatgtttctgggaggccattagatggagacatacagcatgacatcgagcccacagcttctgctgaaatagatgccgagactgcacttgaagagtcaactgttgcagcttcaattgtgattcctgagagtactgcaagaggtactgagtacgaaagagacactgggtatgaaaccgatggagtagacaaagaggctctcctagaagatccaagcatggtgcatgtaagtgatgaagctgtcactatagatgatttgagtgttcaggccaagccaacagcatcagcggatatgccactttgtgagcagaagggggatccagctttatctagaagtgcggtattgcaaggcattatgccacttcacttcgaggatatacaaaatcatatgttctctgcaactctgtcaagggattttctccagttgcagctagatgaggctgctggcctttattcagattttacacaacagtcttctgacaataccacacagctccgggtactgctaaaagaaactgaagaaagcaaactagcagttgacagagagcttcatcaatgtagacatgagctctccaaggtgaacatagaaaaggggcaacttgaactgaccatggcttccttgaaagaagaaatcaacactagcaacacgaggtgcacatatttggagagtgagctacattcctccaaggagagcacagaacaaatccacagtgaactagctaacagcagattgttactggaagctctgcaaaaagagaacatggagcttactgcaagccttgcttttgagaaagaagccaaaaaagaagttgaagaacagcgggaccatctatcttctgataacaggaagcttttatcggagttgtcaggtcttgagcttagcttagcttctgtgaaagaggaaatggatgctagcagtagcagatgtaatgtttttgagtgtgagctgcgttcctccaatgagaatatgaatcatactttgacagagttggcaaattgccaggctttattggaaacattacagaaagataatttggagctgtctgcaaattctgcctccgaaagagaagcaaaaatgaaactccaagaagacaatttgtatctatgtaatgaaaagggcaagctttcttcaaatttacgtgaactaaatgacaagttggaagtttcgtatgccaagcataagcagcttgagtcacatgtcaaagatacagaaacatactttggacaacttaccgagcagctaattgaggaaaatctgtacacaagtattagcatcgatatttaccaatctacaaccaaagacttagacactaagtacaatattgtgctgggacaattccagaatattatgcgtcaagaacttcatttggactcgtctgaagtcactactgagaatgctgaaagagccattatgacccctagacatgatagccatggtaataatcagtgtttgcttaatctggtaaatgcgaatgactcatgtaactcaactgctttgctgtcgctgaagggccatctagaggtggcaaaaagtgatttgcataaccttgaaaagttgctagagaggatctcctctaggtctgatggacgtgttctggtatcaaaactcattaaatcctttgagtcaaagggaagtgacgatgatactggactgtctgagggggagcatgataatttacaaaagtcaactcgggagatgctatcatgcctaggggagaagtttatagcaatgagctcagatattacaaaaactgaagaatatttggctgaactgtgtaacaaaattgaactttacgtcaagtctactgtgcagcatgatagagatagacaatgtactgttgttcttgaggccaaaatggatgaacttgctggcaagctgagcaactacaaggagacaattgacaatctgcacaatcaggttgctattgtgcagcaggatgcaaacagtaatgctggaaagctcattgatcaagcagaactgttgcagaaggatgcggtagaaaggatttccattcttgagaatgagagaatgtctttatcagatttactcagtgaagtaacaaacaagctcacctctttgggagatgctgtatttcctagtggttccagtgaaattgaaggtctcaatttctgcactttgagctgtgtggaccttgttgctagatcatttcaaagtcttcaggagaaattagaggctgctcaaatagataatgctcagctcaatagttctctggtggagctcaggaaggcaattggtgttgctcaagagaggagtgaacatgcagatggaattgtcaagaaactgtatgattccctacaggaacttctatgtgattcacttggaagttcaaatgaatttggggccagatatagtgttgaggaaccaattgaaagtcaatatggaagactcattgcgcatttaaagaatttgttgcatgaccaccattccgcgctgtcaactaatgctgaacttgagttgagtctgttaagtaaatgtgaagaagttgaggagctcaacatgagatgcagttctctattaaaaaaattggatgaagtttgtattctaaatgaggagcttaagtcagcttcttcaagtaaaaacgtcacactggataaactacacagtagatgccttactgtagcagaaatgttggcttcatgctcagcaaatcattcctcgacagttcagttgatatctgatattggtgaaggatctagcaaggaagatcatattcttaccacccttctcccatgcattgaggcggacgtggcttcatgcatcgagaaatttgaaaatgcagctgaagaaatccgtttgtctaagatatgcttgcaagaaatcagcatatttgaccagatttcatttgaaaaatggtcttaccccttgcccacattgattaaagaggaagttttaccaaagatatgtgatttgcaagacagattcgaccagctcaatgcactaaacattcagctggaaactgaagttgcagtcctcaaggatggcatgaaagagctggatgaagatcttggaacttcgcgatctgagcttcagaaaaaggtttctgaacttgaacagttagatcagaaattttcatctgtgaaggaaaaacttagtattgctgttgcaaaaggtaaaggtttgatagtgcagcgtgacagccttaagcagtctttgctggagaagtctggtgagatcgagaaactcacacaagaactgcagttaaaggaaacattgctgaaagagttggaagccaaactcaaatcctatacagaagcagatcgaattgaagccttggaatcggagctgtcatacataaggaattcagctacagctctaagggattcatttcttctaaaagactctgttcttcagagaattgaagaggtcttagaagaactagatttgccagagcaatttcattctcgagatattgttgaaaaaatagaactgctgtcaaagatggccattggcactcctttcactctacctgatggtgataagggatcctctgttgatgggcattctgagtctggtgtggctatgaatgtcatagacgatgagcagaactcaaattcaaattcagtatctgatgaagtaaagagcaaatatgaggaactgaataggagattctgtgagctggctgaacagaacaatatgctggaacaatctctagtggagaggaacagtcttatacagaaatgggaagaagtccttggccaaattagcatccccccacagttcaggatgttggaagcagaagataagttagcatggttaggaaacagattcttggaggtggaacaggagagagattcattacagttgaagattgagcatcttgaggattcctcagaaatgcttattgctgatctagaagagtcacataaaaggatatctgaactcagtgcagaggtggttgctataaaggctgagaaggatttcttttcacaaagcctagagaaactgagatttgagttccttgggctctctgagaaagttgttcaagatgagtttgttagagataaattgcgaatggatctatctgaactgcgggataagttcgctgaaaaaaccgaggagagcaggcactaccatgaaatggacaccgaggtccacaaactgctgaatttggtgcaaaacacattgcaggatagcactaactctgaaatttcatctggaggcatttctgctgtgttgtgcttgggcaaaatgctgaagaaacttttagatgactatggcactcttctgtacaagtcgactgaaggcaattttgccgagagagacattcagttagaggatatcaagccatctaaggatgcctctaaatcggacactggtgcatacgagaaagagatggaactaaattctttaaataacgagttagatcatgctcacaacaatctggccttagcgcaacaggagtgtgatgaagctgtggagaaggcacaatcactaatgatggaaattgagaccttacatgctcaaataagtaaattgcaggaaagtgatgctgaacaaatgcaaaagaaagagatggaactaaattctttaaataacgagttagatcatgctcgtaacaatctggccttagtggagcaggagcgtgatgaagctgtggagaaggcacaatcactaatgatggaaattgagaccttacatgctcaaataagtaaattgcaggaaagtgatgctgaacagatgcaaaaatatcagtcgcttgtccttgaactagaaagtgtgggtaagcaacgggacaatctacaggagcggttaaatcaggaggagcaaaagtgtgcctcattgagggagaaactaaatgttgctgtcagaaaagggaagggtctagtgcaacacagagacagcttgaagcaaactatggaagagatgaatgtagtgatagagaaacttaaaagtgaaagaaaacagcacatagaatcacttgagaccgagaaatcatcgttaatggatcgattggctgagaatgaaaagagcttgcatgaaacaaaccagtacttgagtggactattaaatgctttaaatagagtggatgttgctcgggaatttgatatggatccaatcaccaaggttgaaaagatggctaaatttttccttgacctacagtcaacagtggcttcatcgcaaaacgaagtgatgaaatcaaaacgagcaacagagctgcttcttgctgagttaaatgaagctcatgaaagggctgacaacctgcaggaggaattggtcaaggcagaagctgcactttctgaatcttctaaacaatacattgttacagaatctgcaagagctgatgctgttcgtcagcttgaacttattatgcatgcacagtcacaaacaaggaggaggcaagcagatcatttgctggagttaaactccaccagcagtcaactaagagaagtctgctttgaactttcacactgtcttgttaatacattcagtaaggatgtggaccttatctgctatgtggtgaacttcatgaggtcttctggtaaattgatggatgacacaaatacgatggacataccgattgcctctaaacatgttttgtccaaccgcacaaacaacaagaaggctcatattccaaatgctcctttggaaattaagacggatgatacggatgacagtcagtttttgcatcatcttgctattgcatgccatgctttatctgattgtgttaaggactgtaatgatctcaaaagaaacattgatgagcatgacttttcagttgaacagaaagcaaccgagctatttgatgttatgtccaccttaaagaataggttcacttctcagcataatgagttggaatctttgagagcaaaatttgttgaactacagtcagagatggaagaaagagacaaggagattatatttgcacaaaggaatatgagcttgctatatgaagcatgcgcaagttcagttgctgagattgaaggaattagtgatatatatcctggtaaacacagctatgctgttgaacattctgcagatgaatgtataaaatcaatcgttgaacagttagttatggctgtaaaaacttctcagaacagtaacgaaggtagcacaaaggagctgaaggctattgttcttgagttgcagcaggagcttcaagctaaagatgtccaaattagcacaatcagttctgatctatcatatcagttaagggtggctgaatcttctgcaaagcagttctcagttgatcttgaagatgcaagaatggagctccaaaatttggagaaacaagttgatgtgttgcagaatcagaagaaggatttagagactcaattaaatgagcttaaaaatatggaatcaatggcaagtgaacaacatggaagaattgagaaattgactgatgaattaagcagaaaagatcaagaaattgaaggtttggtgcaagcactcgatgaagaagaaaaagagcttgaaatcttggagaataaaagccttcagttggagcaaatgctgcaagagaaagaatttgccttgaagacctcagaagtttctaggaccaaagctttggcaaaacttgcaacgactgttgacaaatttgatgagctgcatagcttgtctgagaaccttcttgctgaagtggaaaaccttcagttgcaattgcaagaaagagattctgagatctcatttctgcgaaaagaagttacaaaaagcactaatgaactgctaaccactgaagagagcaacaaaaattattcatctcagctaaatggtttcatgaagtggttagaaagagaactgttgcagttcggcttccattctgagagtgccaatgattatgattacactcaatttcctgtctatatggatatgttggacaaaaaaataggatctctgatagccgaatcagatgatttaagggttacagttcaaagcaaagattctttactacaggttgagagggccaaaattgaggagttgatgcgtaaatcagatggtctagaagcttcattgagccaaaaggattcccagatagggttacttcgccgggacagagcatccaatcagcagagcagatctataaatttgcctggcacttcagagattgagcaaatgaatgacaaagtaagcccagctgcagttgtcactcagattcgaggcgcacgaaaagtcatcaatgaccaagttgctattgatgtagagatggagaaggacaagccttttgatgatgaagatgatgacaaagggtctcaggcgatagattgctcatgaggcaaccgaccttaagactcggcgtcttgatatattggattgcactgcatgctttgcttgctagttttatttgaactctgtaaagatgtagccatctcctggcgagtgactgtacagtactctgtgtctatagcaagttatatctaaacagaagcagtttgcactgataccgtgattcctttcgaaaatgttaccgaatacttgagccgtattggcagctgcagaaatcttcatgatgcattttcacccttcatcctggtgcaaatcctgtctagcttagtttgtgttcaattgatacaaatggatggaagagaactgaaggaagcagcagcaaagaaccccctgtacatacatttttgtttgctctattctttgcttttagaaaaaagatggagggcattctacatgctagcgactacttactacactatatgatacaggattacagggaagtgacatgtagttttggaagttagggttttgggatggtagcaggtcatcccctcccttgagttggccccctcaatcccatcatgccttctaatctttttcgtttacatgtataacacagtgattatatcatttattgtaatccacatagtgtgcaatgggggagcttgcacattttattaacgtcaagtgaagcctgagtgctgaaagttcatgtcaggtctgatttggggagtgcgttgagccctggcgtatgctgtgaggcttcagcggttgttttgctactgttgc

SEQ ID NO: 21592 - DNA, 8714 bp, Zea Mays
cggagccgcgccacgtcttctccccctcctgacctcccccctgccccctcgtcaagctcatcatccggttccgcctatcggatctcgccgtgcaccgccgctgattccacccaccgctccgcacgcatttgcaccccaactcctcacagatctccccagatctacgcgctccacgcactgccattttcccgctccgattcttcccccactccagtctacgccgcgcttaatcgcccgcccgctgtttcacttccgttgaccgattcccgctcgcatttccacaccctgcgcttggttcggaattggtctcgatggagtaaagtccttgcaatggcggaagacgcgcacgagttgttcgattcctccccgccgcgggaggagggctccgacgagcagctcgcggccgtaccgctcggcgacgaggcgggcgtcgtcgaggaggaggaggcgtcggatccggggatgagtaccagcatgccggccacacccgcgacgccctacgagccgcccccgcggcccaggcggccgcctggagtaccggccgacgcgccactggaggtggtgcgggcggtggaggaggcgatcgcgggcggggcggaccttctccgcgaggtggtctcccaggagcagggcgagctggctcactccgtcgtcgacgtgctgctcggcaccatgggcggtgtggacgaggcaggcgacgccaccggcaccggcgctcctcccaccgtcatgatcagctcgcgtgccgctgtcgccgccgctgagctcctgccttatctccccgaagacgacgagccgtcgccgcgcactcgaacagccttaggtctgcacgccgccctccgcgcctgcactcgcaatagagccatgtgttcttccgcgggcctcctggctgccctcctcgcgtccgcagagaagctgttcgtcgaaatggatcagggtagcagatgggacgggacgccactgcttcaatgcattcagatgttgggtgggcactcgcttagtgtgaaagacctgcattcctggcttgatttggttagaaagtcacttggaacgagctgggccacaccacttatgctagcgcttgagaaggccatgggcagcatggaagcaaaaggtcctgctgtgacatttgagtttgacggggagagctctggtctgcttggcccaggtgacagcaggtggcccttcttaaatggatatgggtttgccacttggatatacatagaatcattctcggatacccttagcacagcaacagctgcggcagccattgctgctgctgcagcggcaacatctggaaaatcatcagcaatgtcagctgctgcggcagccagtgcccttgcaggagaaggaacaacacacatgcctcggcttttcagctttctctcttcagataaccagggtgtggaagcttactttcatggccagttcttggtggtggagagtgtgggtggtaggggtaagaaagcttctttgcacttcacatatgcgttcaagcctcagtgctggtattttgttgggttggagcacacaaacaagcatagtttgctcggaaaggatgacagcgaattgagtctgtatgttgatggaagcctgtatgagagccgtccttttgagtttccacgtatctctaaaccacttgcattttgctgcatcgggacaaatccaccaccaactattgccggcctgcagaggcgccggcggcaatgcccattatttgctgaaatggggcctgtctacatcttcaaagaaccaattgggccagacagaatgagacgtctagcatcccgaggaggagacacactgcccagttttggaaatggcgcaggcttgccatggaaggcaactaatgaccaagttaagagtatggctgaagagagcttttcactcaacaatgggatagggggaagcttgcatcttctttaccatcctagtcttctcactgggcggttttgtccagacgcctcaccttctggttcatcaggcactcatcgaaggcccgcagaggttctcggattggttcatgtctcacctcgtgtgcgaccttcagaatctttatgggccttagcttatgggggtccaatggctttacttccactaaccataggcaatgtacatgtggacagccttgagcctgcacctggggacttgccatcgtctcttgctaccatttccctttctgccccagttttcaggattatttcccaagctattcaacaccctggaaataatgaagaattatgccgtacatttgcaccagagcttttatcacgtgttttacattatgtgttgcaggctcttccaaagttggaaagtggggaagaggttctgactgatgaggagcttgttgctgccattgtatctttgtgccagtctcaaagaaataatcatgaacttaaagtgcagcttttcagcagcttgctgttggacctaaatctatggagttcatgcaattatggtttacagaaggagcttctgtcgtctctcgcagacatggtatttacagagtctgcttgcatgcgagatgccaaggcgatgcaaatgcttcttgatggctgcagaaggtgttactgggtaattcaggaaccggattcaatcgataactttgcatttactggaacaaagcgatctttgggggaagtgaatgctctagtggatgaacttttggttgttattgaactactgctaggagcagcatcttcaacagcagcagcagatgatgtccgctgtttgattggatttattgttgactgcccacagcctaatcaggttgcaagggtgttgcacctcatatataggttgaatgtacaacctaacatttctagggccaacttattttctcaatccttcatcactagtggtggtgtggaagcactacttgttcttttacaacgggaagctaaagtgggtaacaaaaatattttggatcattctagtgcaagtgaaaataatgtgcccaaggatggaagttccaacagaaaagctgatagtgctgacacaagttgtcaggttgatgaaaatcaatcagctgaacgtcatgaaactgtcttccatgaagaagccattgaacatgaagccacaaatgcaaaagatatgctggactcaaatattggaagtaaagtgcctggttctgagaatgggctcttgaagaacctgggtggcattagcttctcaattacttctgataatgtccggaataatgtttacaatgttgacaaaggtgatggaattgttgttggcattattcacattcttggtgctctaattgggtcaggtcacctgaaatttgattctggagctggaagtgcaaatatacctggtggtagtcagaccacacttaatgaagaaggaaatactatgtcagaagatagagtatcattgttactttttgcattgcaaaaggcattccaagcagccccaaggaggcttatgacggcaaatgtctatatggctttgatttctgctgtgattaatgtttcatcagctgatgaaagtcttaatctttatgattctggtcaccgttttgaacatatccaacttttactggttctacttcgctcgcttccatatgcatcgagggcattccaagctcgtgcaatacaggatattctgtttttggcttgtagtcatctagataacagaactacaatgacctcgatttcagagtggccagaatggattttggaggttttgatttcgaaccatgaaatggacacaaagaaaaatgctgatggtgtaagcattggtgagattgaagacctcatacacaattttctgattataatgctggagcattcaatgcgacaaaaagatgggtggaaggatgtggaggcaacaattcattgtgcggagtggctctcaatagttggaggatctagcactggagaccaaaggatcaggcgtgaagaatcattacctatttttaaaaggagattgttgggtgacttgcttgatttttctgccagggagcttcaagttcaggtgatagcatcacatcgtccacatcaatgacttcattggctgccagtcggtcaaattctttgagcacagctggtaaagaacccatggctgctggggtctcaagacgggcatctttgtccagtgatgctggtggccttcctctggatttgcttacttctatggctgattcaaatggacaaatctctgctgccgtgatggaacgtcttacagcagcaacagcagctgaaccttatgattctgtcaagcatgcatttgtgtcttatgggagctgcataactgatcttggagaaagttggaagtaccgaagccgtttgtggtatggtgttggcattccacccaaatctgatatatttggtggtggtggaagtggttgggaatcttggagatctattctagagaaggattcaaatgggatttggattgaatttccacttgtgaagaaatcagttgctgtgctgcaggcacttcttttagatgaatctggacttggtggtggtcttggtattggagggggatctggccctggtatgggggttatgactgccctctatcagttgctagatagcgatcaaccatttctttgcatgctcagaatggttcttgtttcgatgagggaggacgacaatggtgaaggcgatgcttttacgaaagatgttagcataaaggatgtggtatcagaaggaatgggccaccaggctggaagtgtgatgccatttgatggcaacagttattcatctccaagaaaacctcgatctgctcttctttggagtgtgcttggccccatccttaatatgccaataacagagtctaagagacagagagtgttggttgcttcctctattctctactcagaggtatggcacgctattggcagggacaggaaacccctaaggaaacaatacattgagctgattttaccaccgtttgtagcaattcttagaagatggcgaccccttttggctggtattcatgagcttacttcttcagatggacaaaatccactaattgctgatgatcgtgctttggcggcagatgcattacctgtcgaggcttctcttttgatgatatcgcctggttgggctgctgcttttgcatcgccaccagttgcaatggcattggccatgatggctgctggtgcctcaggaacagaaacaagaacacctcctaggaataccttgaataggcgtgacaaagcattgcctgagcgcaaggcagcagcaaaactacagactttctcgagtttccagatgcctatggaaacagcatctaacaagcctgggtccaccctgaaggacaaggcagcagcaaaagctgccgcattggcagccgctcgtgaccttgaacgaactgctaagattggttcaagaaggggccttagtgctgtagcaatggcaacatcaggacaaaggaggagttcgggtgacatcgaacgagcaaagaggtggaatacgtcagaagctatgagtgctgcttgggtggagtgtctgcaatcagatgattccaaatcagttgtgggaagggatttttcagccctttcatacaaatatgtcgcagtacttgtttcttgtttggccttagcacgaaacttacaacgagctgagatggagaggcaaacactagttgatgtgttaattcggcatcgcgcctcaactgggcttcgagcatggcggcatcttcttcattgcctaacagagatgggtagactatatggaccttttgaacatctgtgcactcctgatcgtgttttctggaaattagattttactgaaagctcttcaaggatgagaagatttgtgaaaagaaattacaagggatgtgatcatttaggtgcagctgctgattatgaggaccggaagcttcttaatacttctgcacagtcaaatgaacataactctgaggatgctaattcttcattaacaagcactcttccatcatctgcttctgtaattatggctgatgccatgtcgatgaatgacagaaatgtggaaaatgagcagttagaaactgacactactcgcagcagtgttgatgacgatcagcttcaacattcttcagcagctgatcaacaatcggtaaaaggatcgataggttcaagaacttctgacatttgtgctgatcgaaatttggttaggtctacagttcttgcacctagttatgtgcctagcgaagctgatgagagaattattgttgaactgccatcattaatggtgcgaccattgaaggtggttcgaggaacattccaagtaacttcaaagaggattaacttcataattgatgagcgttcaaatgacagtaacattgatgatgctgcatctactagtggccaatgtgatcaacaagataaagatcgaagctggttggtctcatcactttatcagatatatagcagacgatacttgctacgccgaagtgctttggaattattcatggtagataggtcgaatttcttttttgactttgcggatattgatgcccgtaaaaacgcttatcgggccattgttcataccaaacctcctaacttgaatgacatctttttagctacccagagagctgagcagattcttaaaagaactcagttgatggagcgctgggctaattgggagatcaacaattttgagtacttaatggaacttaacacactggctgggcgcagttacaatgacattactcagtaccctgtttttccctgggtagtagcagattacaaatcccgagtgttgaatctggatgaccctttgtcgtatcgagatctttcaaagccaattggagcactaaaccctgaacgtctaaagaagttccaagaacggtactctacattcgaggatccaatcataccaaagtttcattatggttcacattactccagtgctggcacggtcttgtattaccttttcagagtggagccttttacaacactgtctatacaactgcaagacggcaaatttgaccacgctgatcgcatgttttctgatctttctggtacatgggatagtgttcttgaagacatgagtgatgtaaaagagctagtacccgagatgttttacctccctgaggtatttaccaacataaatggcattgactttgggacaactcaacttggagggaagctagattccgtagaattgcctccctgggctgaaaatcatgtggattttgtccataaacatcggaaggctcttgagagtgagcacgtctctgctcatttgcatgagtggattgatctaatttttggatataaacagaggggcaaagaagcgataatggcaaacaatgtattcttctacataacatatgaggggactgttgacattgacaaaattacaaacccagtggatcggcgagctacacaagatcaaatagcttactttggacaaacaccatctcaactgctgactgtacctcacatgaagaggaagccactggcggaggtcttacaactacagacaatattccgaaatccaagtgaacttaaatcatatgtgcttccacattcagatcgttgcaatgttcctgccagtgctatgcttgtatcaaacgactctattgtagttgttgatgtaaatgccccagcagcacatgtggcacttcaccaatggcaggctaatactccagatggtcagggaacacctttccttttccatcatggtagaaattccacaaattcaaccagtggcgcactcatgcgcattttcaaaggatctgctggttctgcggaagattatgggttcccaagggctatagcatttgctgcttctgcaatccgcagttcagcagttgttgctgtgacatgtgacaaagagataattactggtggccacgttgatggttcattgaagttgatatccctagatggagcgaagacaattgaaactgcttctgggcatattgctccagtgacatgccttgcgctgtcacctgatagcaactaccttgtgacagggtctagagataccacagttatactctggaggattcatcagacaggctcctcacataagaaaaatgctcaagaacctccaccgactacaccaacgacaccacgcagtcctctctctggcagcactagcaccatgagcagcctctcagaaacaaagagacgtcgcgttgaaggtccaatgcatgtaatgagaggacatcttggggaagtaacctgctgctcggttagtccagacttaggacttgttgcttcctcatcaaatgcaacaggcattcttctgcattccttacgcacaggcaggctgataaggaggcttgatgtcgatgaggcacatgcaatatgcttatcttctcaaggaatcattttggtttggaatggaacaaagaaaacattatctaccttcactgtcaatggactccctattgctaactcagttctgttgcctttctctggacaagttagttgcatcgagatttctacagatggccattttgctttatttggaacatctttgttcaacaactacaagtgtgataacagtactgaaactggggatcatgagcttggacccaatggcactgatgatgtatcaaaaaattctgaacaatctgttcacgcgccttcaatctgctttgttgacctgcatacactgaaggtttttcatactctgaagctggcaaagggccaggacatcacagcaattgctctaaacaaagagaacacaaatcttttagtttctactgctgataattttttttatagtctttactgatcccgctgtaagcatcctcgatac

SEQ ID NO: 21593 - DNA, 738 bp, Zea Mays
cttcagaccacacttgttgggctctatcagggttcattgaggcccataatcggttcgctgatacagaatgcagtgaggcccacgtccctctcgtctcgtacagacgacgacggaaagaggatgatgcggggagtcggaggtccgctgctcaccatcggggatctactcagcgacctcgctgtcgacgacccactcgtcggcgtcggagatgcgtctgtcccatcatctccatcggcggcgcagcaagcggggaaggccaatccgtccgatctcagccggctctttgagatcccaaaatgctgctggatttcagtaccactgatcttcaacctgagcgggttctggagcgtcgtctggtgaagaaaggctctaaggctgtcccacaggtgctggtgaaatggactcaccttccagtggactcggcgacctgggaagactggtatgttctacaggccaggtttccttcgttcgttgcttgtggacaagcaaccgctgcaggggggaagctgtcgcggccggtgtgccggacgcgcctcaatgactgaagccgacgtgtctaagcctgggttagtggcctaagtatgccagatgtcatggagtctgtaatcagggcaccacctgtgggcccagtcgtcaatgcctatgtgcagagtatgtaataagcgagacttgggaacttgagagacaagaaagaaaaagaaacagaaacttgccgccggaacctttcctggcgagcac

SEQ ID NO: 21594 - DNA, 1454 bp, Zea Mays
ggagtctgtctcgtgctcctcgtagtcttcctacccacccctccacccccccccccccccctttgcccccaatccctagccctgcccctctcctccagcgccgcgcgccggctctatgcgcccgccgcccccggagatgcatatcacacgccgccgttaccgctgggtgaaggagtgggtcccgcaagatctggtcgtcaccggaggcccctgcacgctctacaagtgggtgcgagaggatagactggcagctttgaaggctaaggataaggagcagggggcagcatctgcaatgcctgaaccaaactctgaggttctcttcctgtgcagctacgaaggatgtgggaagacatttttttgatgtaggggctcttaagaagcacgctcatgtccatggggagaggcaatatatctgccactatgagaactgtggcaagaaattcttagatagctctaagttgaagagacattttcttatccatactggagagaagaattttgtgtgcccacatgaaggttgtgggagggcattttcgttggattttaatttaaaggcacacatgaaaacacattctgcagataactatcatgtgtgccagtacccagaatgtggccgaagatttacacaagaatcaaaactgagagctcatatcagggcacaacatgagaaagctgttggcttgcagaatccaggtgcgtcatcaatgaaccacagtgcaattggaggtccgcaccagccccctaggccagcgaaggtctcagcagcacctccagctccctcagctgagcgcccttacgtctgcccctacgatggttgtgacaaggcatacatccatgagtacaagttgaacctccatctgaaaaaagagcatcccaaccactaccaggatggtggtccaaatggtgctgccgccccttcaaagcgcagcatctcgaagagttcccacaggagcaagctggacatcacctctaggatgccaccggccaacatccccaagcacagagggtatgcaacaccattgccagctgtggtgagcctccctgaggagcagcagttgctaaggaaagtggtgtacgaggatgacagcgaggagactgaagaagagggggataacaatggcgaggacagatggaactacaagagagctgctagcagcgacgacgaggaaaccgaagacgaagaatgagctgctagcagggattcatttttttttcttctgtagctgtgcatataccataatctatagactggtggttatagatttcaatacatgtacatttttaaaatacggctggcctatagtagacaagaggttgttgctgccatgccccttctcaactacacaggccatgagttcagaaaggataatggatcattgctcccgtctgcctgtgtttgtgccttttggtttgttgtcataaatgagttctcagttatcgtagccctgattgag

SEQ ID NO: 21595 - DNA, 2810 bp, Zea Mays
ctctcgctggccgctgctgcagctgcggagctgccactgcctccgcgggctccaccggggcaaatcgcccctgctggagaggctggagcgtctcttcgccttctctctctactttctctgtcctcgccactcacaagtcctcgccagcggcagcaagcacactgcgcttcctcttccgctccctccactgtgtgactcgcccatcatccatcaccctcgccgtgcgcgcgcgggcgctaggctttggagatctctcgcttggcttccgagatccgcgccgatccgcccgccgccgcattctcctcgggcgtggcggttgcgtgcgccgccgccgcacgatccgtttccttccggcgctgaatcgggggacgctgccagcgagcggggcgttccggtttctctgctcgcttccgcgctcgtggagcagagcaatggttcggagtgaccggcggcagcgacgatgaggtgcgtcgcgtggtgggcggtccttctcgcggccgcctcgttggttggcgcttgggggaaccacactgtatcggcgctcacgttggtatcggagacgtggtacgatgaccgcttggcgctggttcctgttgagtttggcggcggtgacggcgaggatgccgcggggcttcgcagtgagctcccgtgccagacatactccgcgaactcgaggtcctgcgaggaattgaacggctccgggtcgttcaacaccacctgcgtcataagttccagctcttcgctggacggtgatctgtgcgtatatggcgacgggagtgtggagattcggccccatgtcaagatcatctgccccttcagggggtgctacatcaccgtcaatgtctcagggagcgtcaggattggtgagcatgttgaggtgattgcagggtcggtaagcctgtacgcggccaatgtgtcgttggatcaccactccaccatcaacaccactgcactcgccggtgagcctcctcctcagacgagtgggacgccgcacagcctggaaggggcaggtggtggacatggtgggaggggtgcatcatgtaaagtgtcaaatgacaccaactggggaggtgatgtgtacgcgtggtcgacattggattggccttggagctatggcagcatgggtggcagcatgtccgccggtcagtttggagggtacggtggaggccgtgtcatgcttaggacatccggctttctgaatgttgatggacaggtgcttgctgaaggtggtgttggcagtctcaagggtggcggcggctctgggggaagcattataatacatgctttcaagctatctggaaatggcacaataagtgctgctggtggtaatggatggggtggcggtggcggtggaaggatatctctggactgttacagcattcaacaagatttggaaataacagttcatggtggccagagttttgggtgtgctcagaatgctggtgcagcaggtacaatatatgatagttcactgcagaccctaaaggtcagcaatgggaatttcaccacacgcacagaaactccattgcttggtttcccaatgactagactttggtccaatgtgcttgtggagcgctatgcaaaagtgctggttcccttgttgtggtccagagtacaggtgacaggtcaaattagattactaaccaagggtagtatctgctttgggttatcagaaaatccaatatcagaatttgagctggttgctgaagaacttttaatgagtgactctgttataaaggtctatggagctttcagaatgtatgttaaagtgctcttgatgtgggattcaaatattcagattgatggcggtgctaaggatgttgttcttgcatctatgcttgaggcaagaaaccttgtagtcctcaggcatgggtcagtgatatcttccaacactgatttaatggtatatggacaaggacttcttaacttgagtggccctggtgatggaatcaaagctaagcgactgtttctgtctctattttacaacattgaggttggccctggttcccttgttcaggctccactcgacgaggctgttccaagcaacttggatgcactttcacgctgtgaaagtaaaacatgtcctagtgagcttattaccccacctgatgattgccatgtaaaccgctccttgtcatttacactacaaatttgtcgtgttgaagacataactgtcagtggcatagttaggggaagtataattcatattcatagagcaaggactgtgactattgcaaaggatggcacaattagtgcctcagagttaggttgcaaggaaggcatcggaaaaggaaagtttctcaagtatggagctggtggtggtgctgggcatggaggccgaggtggcacagggatttacaatggaatgagaagtgaaggaggcctagaatatggcaatgctgatcttccatgtgagctaggaagtggtagtggcggttctgctttgtcagcagataacactgccggtgggggattaattgttattggatccatgaaatggccactttcaaggttgctagtttatggctcgctgaactctgacggggaaagccatagaggcacatcgggaaattcaaatgggacttttaaaggtggagttggtggtggttctggaggatcaattcttttatttcttcaatggtttctgctagagaaaaactcatcattatcggcatctggtggcaatggaggtgtatacggtggtggtggaggtggtggtggtagaatacatttccattggtcatatattgctactggagatgaatatgttcacattgcttctgtcaatggcacaatagtatcaagataaa

SEQ ID NO: 21596 - DNA, 928 bp, Zea Mays
gggatggatgccaagctgttttatatatgcaggggagaagtctataaagccagaactgatagtacaagtggagcctattgaggacccttatggcccatccataactgatgagaagttggatgccattattgtcagtaaggagacattaaatggtggactggctgtaaataggaaaagagaagagaaagggttcccactgttgaaggttgaggttgttgatctcctttccggcggtgtggagggggaaaaattgagttcttctgctttaaggaaacttgaggcagaacaagctcaacaaagtgaaacaaaatctggtagccttgaagcttcttagggaggaaattgaatactttgatctggttagctgaatgcacaaatacgggggtgatctgctccaagctcagtgtgaacaaaaaatatgatcagagctgacagtttggttacctttctagaggaataatcttcgaacactggcccatggccctgtaacagtattgctctaaccttctaaaatcaacctggcaacatagactctcccctactaaccaaatttacaaattttgtattggcaatgccatctgaatgttaaaaggaaatcttcttgggtttgtataaatatctacaattgtgacaaagctacaaacgaatatggttccccttcgcaagaacccatgcaatgtagcttgtcattataatctttgttctcttgaaacatattgtataattatgtgtatatacgcattggttgatcagagactttgggttctccattaatgtagaatcaggaaactgaagataacctgtaagggtacagcttttttttgttaggtggtcaagaaccctgttgtttcgaataattagtaaatttaacctagtgtgttaatctcttactaaatctaaaaagatacccactgtggagataattctt

SEQ ID NO: 21597 - DNA, 376 bp, Zea Mays
cgctgccgctcccacacgctaaatttggtggctacagtgcacacgctagccgttcaacggctcacgctaccaggcgctctacgcggatgtttcccctagccagcttctctctccccctcgttctgtggtgcctctctcaccctctctaatactgttcacgtgggtccacttccaattattagtagatgaaaaattgataggaggtgaaaagtaggtatagaaaatgattttttatggttgtagtggggtataggggaaggatttagggggaaccgctgtacagggtggagatataggggggaagagaacgctgacgtggcacgtgagtgagatatagggggagaaatttaggggtaaccgctgaagacagtcttaa

SEQ ID NO: 21598 - DNA, 1214 bp, Zea Mays
ttttcttgaaaatgcggagaggctgatccgaacccatggtccggtgacttagtgagacagctctcgtcactgcactaggcctacccttaatttgcattccatggcactaaggagaatgcagcgagttgggatgagacttaatgtctctgcatatactgttgctattaaggcgtgtgttgaaaacaaagatttgaagttagcactgcacttatttgaagaaatgaaaacacaccaactgaagcccaatttggtgacgtacaaaactctcctggcagcacgcatcaattatggatcactacaggaggtccaacagtgtttagcgatatatcaggagatgaggaaagcagggtttcaggcaaatgattattatctcaaggaattaatagtggaatggtgtgaaggagttctgtctagtcgcagtgataatcaagatttttacaatttggatctacaacctgagactgagaggaaagaatcgttcaacctgtttcttgagaaagtcgtaacagtcttgcaaaaagatactgatcagaaccaaattgtcgatgttcgtggcctttcaaaggttgaagctcgaattgttgttctctctgtccttcggaagatcaaagagcaatacctcctaggaagagtggtccaggatgatgtggttatcatcacgggtcatgagaagacatcaacaactgaagctgaaaccacaactagtgcagttgacgtcgtgcaggcaatagttactgttttgacggatgatctgggtcttgaagttttgattggacctggaagctgccctcccgtttcatcaaaacccaaagcaccgactaaatctagaagtaatttagagcaaatatccaaagaatttactaggagaccacagggaatgataaaaatccctatcaactcacttaaccattggttaaggaagaaagccgtgaggattgcagagtgacatttccttaaaggcttaaactacctttttggtccatttagtataccagtaaatcagcacagctattccaggattgggtgtacatatgaaaacaggttactgctcctggtattccaggcacactgacacgacttgaaaagggacttgttggcaggcaataaactgtgcttctgtgttgatttaatggtcgtgtttctaaaggcatcaagcattcatactgttatatatcaatgtccagttcatttccattcaaaccgggttatcccat

SEQ ID NO: 21599 - DNA, 1459 bp, Zea Mays
cgttctacacatgttaaaaaactgctacttaagatgttaaatagctactgcaaacatgtcgatcgatacaagaactcattaatcacgaggttctatggtgtacactgtgtgaagcgccataatggacagaaggtccgattcattgtcatgggtaatctgttctgttctgaataccagattcatcgccgttttgatttgaaaggttcatcatatggacgaacagcagacaagtttgaagatgagattgatgagacaactacactcaaggacttggacctcaattttgtcttccggttgcagaaatcttggtacaccgatctccatgaacaattgagacgagactgcgatttcttggaatcagaagggattatggattacagtttcttgataggaattcacttttgtgatgacatctctgcctcaaagatgggatcctctacttttactgcttctccaaagcgtttaatcaagagtgaatcatttcaaggtggtggcacaacagagctttgcttctcagatgatgcttttgatatggtacctgattgcagccggaaatctttgattagactgggcgcacacatgccaggccgggcagagcaagcatccagaaggagcgggttcgtattcccaaaccagaccggcgaagtgcacgacgtgattctctttttcgggataattgacatccttcaggattacagcgtcaaaaagcggctcgagcatagttacaagtcattgcagacagaccccaactcgatctctgccgtggaacccaagctctactcgaggaggtttcaagagttcatcggcagaattttcgtggaagatggctaacacgcattgggtacagattaaccggtggagcagcagctcatcggcggctaggtaactaaccgtgaagcctcgggtcagcggtgaaggggatctgagttcgaagcaaacttgccccgaattctctccgaaaaccattcgagtggctggatttttgaagcgcagccatgggatcggatggttttgtctgtaaattatgtgattggttcttccggctacattatagcagcagtttgtttgtcctccttaatttagttggaggtttttttatcttcaccccccccccccccccccccccttccccttctgtatatcggtccgatgtgaagaatcgggcagtgagttttgtttccagaaaggattatttaagggctttatagggtgcatgggattgatggacatataatccatggattatatgatacttacaaggcattatatgtcccttgatcccatccaatctgcatgtaaccaaagtcataaggctgcggcaggcagtgaataataagatcgtgtacagatacaccttgatcctgggaatgggtggattagaattcaattcagcgtcgtcatgacccgtgggtcccagatcacggcttctccctcttcacctttgtgctgtttgtttctt

SEQ ID NO: 21600 - DNA, 3641 bp, Zea Mays
ctcttttttcccttttcccggttccctccactggccgtctcccccaacctcaaaattcgaaagctggggcgccctgcggccgcacaggatgctcctgtcaccgcacggacggctaggatctcaccgagacgcctcggtcgccgtgcccgcgcccaaaccggttaggaaggaaataaaatggaagacgtcctcgtctccatcgccggttgtgtctcctcctatccatttctccagtcgtttctctcccctcgcgctgcccatggccatcccggaggacctagaggggacctcgggcgatggcggggtgacgaatcgcgggagtagagggcggcgaaaaggcgcggcgaaggggcgcgggaggggcaggccgcggagcgccgacagatcctttccgccgccggcgatggctggggtggcggtcggggacagggtgctcagggagaggaggcacacgaccaacgttttctgcgagcgcgacacggatgttgacgatgaggatgatgttgagacagttaggtccaaggactcaaggagtggcgatgttttacagactgcaaaaaagaggaagaagggaggtgcagggaaggtttctgtcacaaaaaggtcgaaaagagagggtgaagaacaaaagaaggcatcaccctccaaggataaagattgtgctgaaactaatgggaaaaggaagatgttgactggggataatgccctgatgtgccaccagtgccagaggaatgataaagggagggtggtctggtgtaattcatgcagaaataagcgcttctgtgtgccatgcattgaaagatggtatcctaacttgtcagaagacgaatttgctgcaaaatgcccatattgtcgcaagaactgtaattgcaaaggatgccttagaatgagaggggttgaagagcctccaaagaaggaaatttctgaagaaaatcaaatctcttatgcttgcaatgttgtgcgcttgttgcttccctggttgagaaaactgcgacaggagcagatggaggagaagaaattggaggctaaaataaaaggtgttttggtgaatgagatgaagttggaacaagctgaatataatctagatgagcgtgtctactgcaataattgcaaaacttctatagttgattttcacagaagctgcaagtactgcttttatgatctgtgccttgactgctgtgtggagatccgcagaggtgagattcctggaggagaagagataatgagagtaaagcctgaagatagaggccgagcatatctttttggtactactaactcaaaggatgggagtaaaaggttctccatgaggaggcacagctcatccctggagaatgagccttccaatgtagtaggttctagtgagggggcaaataactctctggagctgtggaaagcagaaagtgatggtagcataccttgcccaccaaaggagctaggaggctgtggcggttcgattttggatctcaagtgtttttttccagaaaagatgctttcaaatttagaagaacgagctgacagaattatgaggagcgaagtatttgcaaaagcagtagccaaaagaagtgaccagtgcccttgttatgaccattcaggaaacataagaactcaggacgtgcgagagactgcaaatacgaaaggctcaagtgataaccatctctactgcccagttgccactgctatcaaggaggatgacttggcgcactttcagatgcactggacaaaaggcgaaccagttattgtttctgatgttctgcatttgacttctggtctaagttgggaaccattagttatgtggcgggcattgcgagagaaaaagactaatggtgacgtagaagatgagcactttgctgtcagggcattagattgccttgattggtgtgaggtggaaattaacatacacatgttttttgtgggatatatgaaaggcagaacgcatcacatgacacactggcctgagatgcttaagctaaaggactggccgccatctagttcttttgatcagagattgcctcgccatggtgctgagtttatcagtgcattgccatttcctgagtacactgatcctcgatatggtccgctgaatcttacagtcaagctacctgatggtgcattgaagccagatcttggaccaaaaacttacatcgcttatggattttaccaagagttaggcaggggtgattctgtgaccaagcttcactgtgacatgtctgatgcggtaaatatattgacacacacagcacaagtgccctatgcgcgttatcaacttgagaagatagaggaaaccagaaagaaaatgaaagaacaagatcttcaggaactttatggtgtttcagaactaaacctatcatcaccttttactgattccaggaatataagtgctgatgaaatgtcaaagacctcatgtaactatggtttggacgtcaatgatgtaccacctgttaataatgaatctgaggtacaaagtggggcaggccagtgttcagattacattgacaaggatagaagttatgctgggatgcataacggggagagaaccggtggtgccttatgggatattttccgaagagaagattctgacaagatacaagattatcttaggaaacatgccacggaattccggcacatcttttgcaatcctgtgaagcaggttattcacccaattcacgatcagactttctacttaaccgaggagcataagagaaagctcaaggaagaatatggtgttgaaccctggacgtttgagcagaagcttggtgaagcggttttcattcctgctggatgtcctcaccaagtgaggaacttgaagtcttgcattaaggttgcgatggactttgtctccccagaaagcgtcaacgagtgcatgaaactgactggagagtttaggcggcttccacctgatcacagggctaaagaggataagctggagatcaagaagattgctcttcatgctctgaaccaagtagtaaatttcttggatccttcctcggagtggtcgaagagttggtttgcccaactcaagaacaaaaaaaaggctggagctgaagaacaggagaagcctaaaaggaagcgtggccgcccatgtcgcaagtccaacgatgaagctgctggcgataggcacagaaagaagggcggccgccaaagaggtcggaagaggggatacggcaagtccaaagatggcgctggcgctgttgatgtgaagcctcctaaaaggcagcgcaatctcctgaaaggctctggcaatcgtgtaggtggttgattgtttcactgctgactgggaagatggaaggcgtaagggctgtaccgacccaaccttgacgtggttattttggtaccaggttgtaagtgtagactctagattgtagaatagaccaggcatttcgtcacccctgggcgccattatggcgtcttgcttttgttcatatgtggcgattgccggttgacaccgttttggaagaataatatgctagatgctcgttgtaccagactcttcatgtagcgggctatggtgaattgctgttcagcatgtctgatgctgatgttggtaattgacctgaatagatgtggtcatttgaactctctggattctgattttacatatccaatccattggctgaggctgagcattcttagttgaaaaacga

SEQ ID NO: 21601 - DNA, 892 bp, Zea Mays
aagggaaaggggtgtcctcggtggcagacatcgactccactggggatgccgtggttcagggctagcagcgacaacatggcagcaaaggatgacaacagtgagacctgcctctcagtcgccatggcaaagggtgcacttgccctcagtggtatgcctgacgcacagtcaaaacctgtgctactgtgttcattaaatgacaacactgtccgcttatatgatctgccatcgttcagtgacagaggcagattattctccaaaaaagaaattagggcaatacagatgggtcctggtggtttattttttaccggggatggaactggtgagctcaaggtttggcagtgggtagatttagcccaaacctaatgaacatagtgtgctagattagttttctctcatgtattttatgagggagttcgtacaaatacgcataatgagttcaggttgtggtcggtggccagttctttttttgtaatatgccccacatttgtcacaaatgacacgagattcggtggatctgttcggcagtaaaatcagaagcagagtatgtgttatggactgtagttttgtcctggaatggattttaagacaggagaataattggttgttgtaatatgtaaggcactggaacgagcaattctgacgactgcttggaggtggtggcagtttcaaaaggatatatgctaatatacaagggtttgttcagccgcatttgcaaatgagcaggtcttttcacggccgtaccatttttcacaactgttgaatgatcatgttttttttgtaacctcgatcagtcatttggctcggtttttggaagctgcacacagaacctgtgccgatatttatctatatttgttcctggatagcttccaggctcaggctctgatgatatttt

SEQ ID NO: 21602 - DNA, 1766 bp, Zea Mays
tgaactgttgagctcttgatgttctgttgcaaaaacctatgcaagcaagtacatccctataattgctagtgtgagcgaacaccaaccaccaacctggccttcttattttatggatatcaatgtgcttgcctttttagttcctgctgggatcgtatcatgcttcttaccattatctgatgcaagctcatttttggtcctgtacttggtaacctcagtgtatttctctggagtaatggtccgacttatgctggtccttgctcctgctgcatgcattttgtctgggattgctctgtctgaagcttttggtgtccttacaagatcaatgaaatttcagcgtccaacactggatgatggctcttttacagccggggatgggagttctgatactcctacgaactctgaaatgggtttgaaggaaaaaacatccaagaaaaatcggaagaaagacaaagagtcagagggaagttcacctgttgatcatagaaccgaagaaaagcttttagtactgccttgtgggccatctgctgtgggcataatgctgctgaccatactttctggtttttacgtgatccattgtgtgtgggctgctgcagaagcatattcagcaccttcaattgtgctaacatctcgttcacatgatgggtttcatgtttttgatgatttccgcgaagcttatggatggctgcgccataacacagatgcagatgacaaggttgcatcttggtgggactatggttatcagacaactgcaatggcaaacagaactgttattgtggacaataatacatggaataacacgcacattgcaacagttgggactgcaatggcatctccagaaaaagtagcatgggagatcttcaattctttagatgtcaaatatgtgcttgttatctttggagggcttattggctacccaagtgatgatattaataagttcctctggatggttcgaatcggaggtggtgtattccctcaaataaaggaagcagattaccttaaggatggcaactaccgtgttgatgctcatagtaccccaaccatgttgaattccctcatgtacaagctttgctattacagattcgtcgaaactgatggtaagggctttgatagagtgagaagatatgaaatagggaagaaacattttaaacttacgcattttgaggaggttttcacaactcaccattggctggttcggatttacaaactgaaacctcagaagaacagagtcagagggaaactgaaatttaaatctagtttaaaagcaagttttatgcgtaaaactggtggaaagaagagcccatggaaatagagactacaaaggcagggtgctggagtcactagtcagcacagttactatcctgagaaaaccatgaattcatcaaaaggagttagattaaaagcatagcattggtgtgttctttgttattgtcatggagcagattataggggtgcttcatgttttttttggcatttgatctccttaatggcattataggggtctgatgaaatttgtggtaggttctcgagtgaggttttatccccattttaaacaaaatggactttgtttataggaacctgactgagcgcctggccgtttggaaacatctttaaaggttgtttggtttgaagaaatggtggcctatcttttcttttaggctaccttttggaaggaaggattttttcccctatttcctgcattttttctgtaaaaatgaaatgattgtgaaatgtcaaatacgattctgtggaagttctgctttccaaga

SEQ ID NO: 21603 - DNA, 1042 bp, Zea Mays
agagggaaattagaaatccatcccgatcctatcgtccccaatttcttctgctccacctaaatagatccgtagccgtagcctaggcgcgcacattgcagaaagatcgagcggaaggtcggcagcaggcgcatagatgcaggggtgagggcacgggcggcagcgcttgacgggcgacgagtaaaccctaacgctttgattgcgggcggcgtcgtctgagccagtcccgagtcgatacgctgtcatgcctgtcaatcctcctccgccacctcctgggtcgtcgtctttggctccggcgggggccagctacttcccgctccctttccacctgcagcagcaccagccgccgccgccgcaggtgccgccgcctatggcggcgagcagctatcagcagtatcagcaacagctgcatcaggcccatcagctcttccagcgggacgcgcagaccataacccccgaagcgctgcagagcgtcaaggctgccctcgccaccagcgacgtcctcgaccccgtcgccgccgccaacgccaggctctccgatccctctaccagcaagaagcccatcccccgtcgcgctgccggacaatcctgggaggatcctaccctcactgaatggcccgaaaacgactaccggctgttctgtggagatctaggcaacgaagttaatgatgatgttctctccaaagcattttcacggtttccatccttcaacatggcaaggagataagaggactggcaaaactaaaggctatggatttgtgagcttttcaaaccctactgatctggctgcagcaataaaagagatgaatggaaagtatgttgggaaccgccctattaaattgcgtaagagtaactggaaggagaggacagatgttgaggctctggaaagacaaaagaatcatgtcaagaggaagcctaaaattcccaagaagactattcttcacaagtagagatacaaaggccctaccgagggtgaatgccagctcatgctattacacattttgctgaggtctgatggatggcttatatgatgtgtatgatgcag

SEQ ID NO: 21604 - DNA, 121 bp, Zea Mays
gcaaccaccactgtatttacttgccttcaccgagaatttggaatggtactaagtacgatccggaagtccaccaccttgaattctccccctttccttcctcccttcttccctccaccaaaac

SEQ ID NO: 21605 - DNA, 1437 bp, Zea Mays
gtctagggacgttttctatatatatggtggctctaaaatctggttcagtgaaggattcacctggccttcggattctagcccaagaccagtgtaaaagtgtggaagtccttgtgctccagttgatgctagtctctttccagccattaggtttgatctgcacaagtgttggcacaccatcggcctgccagtagtgaccacgccggtcagtttggccatctcgtcgtggccaagacaacccagcaagcctaggggtattgtaccaaagtggaagagcaatgattttagagtactttttattagggaagaaggggccgttgttgaggaagtttgtgagataaagtagaccaaactgggagctgtgcaatgggacactgatgtcagggaagttgattcagtgtttgggataggaaattgaggaagatttttctccctttcctgtgctccactggtgtgctcgagttgggatacgggtggggtgcaaaaccaaggatctagtgacttcagctctgcttcaaaatatctagttttggattgtttgggagatgtggacaaaagagatcatatctgttttgtctactatctgcagatatctactacctgcagatttggaccaagtgatatttgtgtgttgggggcattaaagtttctttgctggttatttgaggtaataaaaaggggagctgaacttgaggtttcagtcgagtagaacagcaggagcagttttagaataatctgatgaaagtatctccatccaccaaattgatatagggaattctaggatatgccagcccaaaagagacttatgagaatggaaagtttattgtcaaaaatcatgataggaacgggggtgcccgattttccgtcaggtgaaggtaactatcgatttggtggagatgtcacacaaacgatccggcttccaatcaacacgactagaaccccgcaatcgcaacaccacttctcctctagttatcaaccatgcactgcgcgattgacctcaccacgagggctaattcctgcctgagaatcgaagacccaagcaagaacaagaaaaaacacaatctagaatattgcggatgaaaaattaagctctcaagttggggtctcacaaaccgatctacgacgactgttcttgacagatctaaacttaagcaaaactcaaccctaatgtggcggcagctgctgaataaatagagtattagagcgtgcatgacccatggactcgcccctaatgggctccgatgcgatacacagcccaacagacggtgtcgcagcaccaaaacagaatctgaacgctgacttgtttcgacgattcccgttgactctggacgaattttagggtggaaccagttgggttggttagatgatctccttatctttccaaccatatcaagtccgttgcaatcggagtctggatgcatcttgggcgtccattttagt

SEQ ID NO: 21606 - DNA, 229 bp, Zea Mays
actcgcgttgactacgtccctgccctttgtacacaccgcccgtcgctcctaccgattgaatggtccggtgaagtgttcggatcacggcgacgggggcggttcgccgcccccgacgtcgcgagaagtccattgaaccttatcatttagaggaagtagaagtcgtaacaaggtttccgtaggtgaacctgcggaaaaatcattgccgtgacccttaaacaaaacagaccgc

SEQ ID NO: 21607 - DNA, 394 bp, Zea Mays
tcaaaagcttaagttgttgggaagagattgtaggacgaagttctcagggtccctggatggcctcttccagatataccatattgcaatcagtggagttggtggttataaagtttcttcagaggactcgttgcatttggttgaagccctaagtgtgattatcacaacgcttccaccagaatctgctagtagagccctggagttaatctgccagccagtaatcaatcccttgcaagaatttatccagcagggtgatcaagttcttcaacgagtccctgctcggcatttaactgtacatatagaccgactatcaagcattttcagtaatgtgaaacaaccagaagttgttgctgaagctgtatatagatattggccgacactcaagagtatctttgat

SEQ ID NO: 21608 - DNA, 2959 bp, Zea Mays
tttcaccccttgttttcgacatgccattgctcctccctcaaacgccacggcttttttcacgaaccaactgtgacaatccagtcaattctgatctctaggccctcgcttccccttcctgtggatgccatcggggcgctcaccgggacaacatactcctcgacagcgacgccgccgcgcttccttgaggaaagctcgtagctgcccccgcgcaaagctccggtctttcttggccctgacccctcctccccgccgccggcgccgcgtgagcacgccgcgcttggcttgatgctcgacttctgcgcgccccacgggcccgccaagctcccggttgcgtctgtcgctggggtgcgagtcgccggcaggtggttgtggcgatcggcggcggttggggcggtgcgccatggcgtctccgcgcgggcctcatccttcggttcccggatcgggctcgattctcagaattttcacacaagggacctctcccagttgttgtggatcggtccggtgccaggtgacatcgcagagattgaggcctactgccgcatattccgtgctgccgagcagctccatactgcagtcatgtcagcactctgtgatccagagacaggagagtgccctgtacgctatgatgttgaatcagaggatctgccggtgctggaagacaaggttgctgccgtccttggctgcatgctggcgttgctgaaccggggaaggaatgaggtgctctcagggagatcaggtgttgcaagtgccttccagggatctgaggacagcactgctgataggatcccaccgctcgccttgttccgtggagacatgaagcgttgctgtgagagtatgcaggtggcgcttgcaagctaccttgtgccaagtgaacctagggggttggacatatggaggaagctgcagagattaaagaacacttgttatgatgcaggtttcccgagggctgatggttatccatgtccgacattgtttgcaaattggtttccagtgtacctttcgattgtgtcagatgattcaggaatggatgagctagaggttgcattttggaggggaggacaagtcagtgaggagggactggcatggctacttggaaagggattcaaaactattgttgatctccgggaagaagatgttaaagatgatttgtacctttcagcagttcaggaagctgtctcatctgggaagatagaggtggtgaatatgccagttgagattggaactgcaccatcagctgaacaggttcagcaatttgcagctcttgtgtcagatggcgcaaagaagcccatttatctctacagcaaagaaggtgtttctaggacgtctgcaatggtctcaagatggaaacagtatgttactcgttcagagagattggctgtccaaaatcactctctaaatgggaatggtaacatcctgacaaatcacaagaccatgcagcacactggcataccaagttcctctccgaatggagctgaaaatggtatgataacagaatctgataggaccatgaacaatggggaatcaagtgagatagacatagatacagctcgtcataatctggaggtcactaatgccctttgtaatgatcaaagcactcaacaaggtgaaatgcctgacaccgtggcagaactcttgtcaaactttaaactggagagtaacccccttaaagcacaatttcctacttgcgatgttttctctagaaaagagatgaccaagttttttagaagcaaaacagtttatccaaaatctgttctgaactctaggagacgatcaagtagcttggttataaggagaaaacaaaatctctgcacggagcgtagtggaaccaatgactatgaagcagcagagtttgcagttctcagaagttcaaatggaaaatcatttgacagtgattatattctatcagttgcttcaggtatcactgatggaaaaccttcaaacaatgaagcctcattaattgaggaaaaggaaagggaagtttcagttgccactattgacactagagcatctgccaacagttctaatagaaaggttcaggttggatcacaagaatctgctgaaaagaatagtaccccttatcttgagagaaacaaatcagataatgttgatagaaatatgtgtgcatctgcaactggtgttgttagactccagtcaagaagaaaagcagagatgtttctagtacgtactgatggattttcttgtactagagaaaaagtaacagaatcatctctggcttttacgcatcctagtacccagcaacagatgcttatgtggaaatcacctccaaagactgtcttacttttgaagaaattaggagatgagctcatggaagaagctaaagaggttgcttcatttctgcatcatcaagaaaagatgaatgttcttgtggaacctgatgttcatgatacatttgctagaattccaggttatggttttgtgcaaaccttctatactcaagataccagtgaccttcatgagcgaattgattttgttacatgcttgggtggtgatggactcattttgcatgcatcaaacttatttagaacttctgtaccacctgttgtctccttcaatctcggatctcttgggttcttaacttcacataatttcgaaggtttcagacaagatttgagagatttaatccatgggaacaacacacttggaatttatataactcttagaatgcgtctaagatgtgagatctttcgcaaaggaaaatcaatgcctggtaaagtgtttgatgtgctgaatgaagttgttgttgatcgaggttccaatccatacctatcaaaaattgagtgttatgagcataaccaccttatcactaaggtgcaagctgacggggtgatagttgcaacaccaactggcagcacagcatattctactgcagcagggggatcaatgtggacctgagggctgatgccagtgggggctaggacaagaggaacctcagggtccg

SEQ ID NO: 21609 - DNA, 3203 bp, Zea Mays
tatggcggacccacttatcaatcgatttatgggccccgcgtggcagagtcaaaagactcggaagggagttggttggtttttgtttcctccccgcacccgcaacaacggaaacaacggccccgtggtagcgaggagatcaggaattcaggagagcaaaaggggagagagaatgaattgaaacgaaggcccgcgacgcgaggagcgagggaactaccaccggtgaccggtctcggcgcctccgcgacgatagcctctccgacctcgagcgcggtccggttcctccctgcgtcagcacgcgagcccttggagcttcgagtcagatcccggcgggcgcccatggtggctctggtgccgttgagccgcgcgatgtagggttttcgcgcgccgcagagtaggagcgatggggcgccggaagatgtccgcggcggcaccgccgtctcggagctggtccaacgttggcggaagcgtcatcccggaacttcgagctaaacacaaaacagacttgcagaatttgacgctgaccaaacagccactcagaacattgcattttttcctgttagccatgttacaatacttgaaaagattagcaacatatatcctgagtaagggtggtttcttctttctcctaattgttttattggtagcttctggaatcttgctcgtcgtttcggatggtctgcataagaaggtttgttgcatgttcttctcttgtctttgtcttaatcagcgggatatggatagtcattttcataactcataagaacccatgttgcagtattttgtatagcatcttggcattgtttttgagcactaatgttgtttggatgtcatgtatgcagcatgtgcaggaattccttaattatgctaaatttgtgtcgtggtgggtttcattaggtgtggcttcatcaattggactaggcaagttgtattttcgcacctctaaacactgagactctgaaataaaagcacattaataaaatgtcactggagtttgcttatgtcaccctttggtcctgtcctacaaatatttagttatcatgtcttaattgtatagtcttgaaggctttgaaacatatgtacttcaacaaattagttaggcagaaaaggcactttattttggttttcattgctagtgtattaaaggattgatataaaccatcctattcctgcttagttcgtgtttgcaaccatatcagacttcataaagaaaacagttgaaggtgggcagggcaccaatcgcctgattacatatcaaatacagacaacaggtgaaataacgggcactagtttgcagtgaatagtggcttcactgtttaccttttttatgccataattatttgcttctcaatatctagctgtcacatgatccagatccttgccagttttttgtgaatggttcatgtttaactgattcttcatctatttcagtacactagatttagttaccctacaacaatttactgtacttgcacccttttttgggctgcatgtacctacctgtctatgcagagcagcgacatcaataaagtatgcagaaagctgatgccttctttcccttatttggaaagttatttatggcctctgtatattcagttagtcttgagacattactctgtcatgcttctataatgttatttggatctaccacattgaacagcctttttttccatatacagggcttgttaaagttggaaactgggacatgtaaatttggaatgctttattgctgcaactgcaatagagaagaaaactcattttctaagctgatgatttgaaatttaaatgcaggttctggtttgcatacatttgtgctgtatctgggtcctcatattgctctgttcactattaaggctgttcaatgtggtcgaattgatctaaaaattgctccatatgataccatacagctaaaggttgggccatcatggcttgacaagaaatgttcagaatttggaccacctgtgtatccagcatcagctcattcagttaggatcccagtcttcgacctactacctcagatacagctggaggcagttctttggggaattgggactgcgcttggtgagctccctccttattttatatcacgagcagctcgcttatcaggaagcgagtcaaaagctgttcaggagcttgatgcagctacttccaaagaagatgggccagtagcatcatcccttaatcgaaccaagcgttggcttctctctcactcccaacatctcaacttcttctctatcttgattcttgcttcggttccaaatccactctttgaccttgctggtattatgtgtgggcaatttggtgtgcctttctgggagttcttgtttgctactttgattgggaaagccatcatcaagactcatattcagacactatttatcgtgtccctgtgcaacaatcagctcttgtatcttattgaaaaggagttaatctggatatttggtcacgttcctgggttttctgccacccttccgtctgtgattgccagactccatgctgccaaggacaagtatctatcaccaccagccccagtctcaccgtcatcacaaatgggggagaaacagtggaatttctcttttacatctgtctggaactctatagtgtggcttgtgcttttgaacttcttcattaagatagtcacgtcaacagcacaggattatctcaaaaagcagcaggatacggagatggaacttatttcggattccccgatccaggaccattctaaaactaactagtggcgcagctagtggtgtttatacacagctgctagcagcaaagattctcctctgtagcttaagcccctgcagatgatttcaagttccaacaattagtattagtagttattcatctgcgcagtggacaaaaacatggacacatggtcttggttaacttgtcagttgacgaccttttgtcattgagcctgtacctgtactggcagctcctgttggagtcattctgtttattttcggacatctacacggataaacagtaggaattgtttatggagcacggttggctttttttgaagtgaagagcacggttggctttgtgagatgtatcattcatacctgttcctatgtattctgggaacttgaaatgcaatagaaacctgggaggatttaacaaggatacatcattgtgtcattactatgtgcatgtggtttgcaatttgcacctcttccggaacaggtggtgaatagtctctg

SEQ ID NO: 21610 - DNA, 231 bp, Zea Mays
atggcctccccgcaattgacgcccatctccttctatatccttcctcccacagaaactgcacgacattctcatcctcttcgactcttcgtaacctgctcctgctgctggtggtgcgacaagatagatcgcctgtgcaccctaagtctatccgtcacaacctcaagatgcccccggggaagaaggggccgcgagtcccacgacatcacgcagaacctactcctacagactatg

SEQ ID NO: 21611 - DNA, 3500 bp, Zea Mays
agacccgcagtgcgttcgccccttacctttttcttgtccctttcacggtttcaccccgcgttcgctctctctcccgtggcgacgactgggcggccgccgcagccgccctagcccggtgcggctcttcgtcgggtccttcgccggcgacgggcacctaccaggatgaagacgaggatagtgtactccagggagtttctgctgtcgcttggcgagttggagcattgcaagaagctgccccctgactttgatgcagcgctgcttagtgagctgcaggagctgtcagcgggtgtgcttgagagaaacaagggctactacaacacatcccagggacggccagatgggtcggtgggatatacttactcttctcgtggtgggaacactggagggaggtgggatactcgctcatctggatcaagtgatcgggatggggaacctgatcgtgagtctcagacacaggggcgtggtgcaaaccagtacagacgcaattggcagaacacggagcatgatggcctacttggccgtggtggtttccctaggccatcaggatatactgggcagttgtcatcaaaggatcatggcaatgcgcctcagctaaacaggacatcagaacgctaccagccaccacgtccttacaaggctgctcctttttcacggaaagacattgactcgattaatgatgagacattcgggtcttctgaattatcaaatgaggatagagcagaagaagaaaggaagcggagggcatcttttgagttgatgagaaaagagcaacataaagcagtgctaggaaagaagagtggtcctgatatcctgaaggagaatcccagtgatgatatattttcaaagttacagacatctactgcaaaggcaaatgccaaaactaaaaacgagaagttagatggttctgtagtatcctcatatcaggaagataccactaaaccatcttcagttctactagctcctgcagccaggccgcttgtcccgccgggttttgcaaatgcattcgctgacaagaagcttcagtcacagtcgtctaacatcacacatgagccgaagctagaggatgaccagtcagcaacagggttcacatctgaaagtaaagagaagggagtttctggtaacgatgctactatgggtccaaagcacacgcttccacctggtagtgttacctcttcagctgaattggcttctagcgttctgaaagggagcgaggattgggatgctgatgtaatggataagtattctattggaaaagaaggcaaatctaaaaatattgatccagttaggaaggatgattcagtagcaatcttagaacagttctttggcaatgttttatcgaaaagcggcagcaacctaccaacttatgttgagaaccagccattgaaaactgatgatgacatgatcacttctgtgccagaatcatccaaatttgctcattggtttcttgatgaagacttgaaacctgcagaagacttatcttcaaagagcctgctctccatgattgtcaaaaatgaaaatccaggtctagaaaatttaaaccatactcctttatctgatgctgctgcccagaatttatccccaagagcacctattgataaacttgattctgcatcagagcttatctcatttacatcctctacgcctgccaatggagttcttgaacaatgcatccattctgatgttccagaggcagttcctattatgacatgtgaggatcttgagcagacgatgttagcacaggttagcaatagcagctcaactcagataaatgctacaaaggagcaactgactgttatggatgaaccagttgccatgcagaaagtaactgtagataatcatgcatcacaacatcttctttcattgttgcaaaaaggaacagataataagggagcaccttccctgggtttccagagagaatcaactgatgaacctctgagtgttgacacaaatttaatggcaaatggtggaatatctggaagtgatccggttaacagtgttgaaaatgttcctacttctgggaaggacttgacattggaagcgttattcggggctgcatttatgaatgagctccactcgaaagatgcaccagtttctattcgaggagccacaactggtggtcctactgagtttgcagagatgggtaaaactctgttgtcatctagccatgaaggatactaccctgttgaacagaccgtacacttcaacaatactaaagatgctgctgtccgtagagaaccaggtattgagcattcagcagtacctggtctaagtcaggggagtgctagttttgacaagaaaggaatggaaattcatctgcctgaagaagataatttgtttaccatgagtgattctctgcttggtcaaaattctgatattttggcatcagtaggatccagcagggttgaagggctattgcctgaaaaggcacttgataacctcagctataggtttcaaagtcttgtgcctggtgatgcagaacacattcaagtatatggtcctgatgcacttggatctcatcctcgtgattctcagaatatgtatcatcttctacagggtaggcctcctatgatagcacctcaccctatgatggatcacattgttaataggaaacagccagctccatttgatatggcacagtcgatacaccatgattctcaccgttctttcccatctaatgtgaatcatatgcaacataatcttcatgggccaggggtccctcacttggaccctgctggacatattatgcgacaacacatgtccatgcctggaagatttcctccagaaggcttgccaagaggtgtccctccatctcagcctgtgcatcacatggctggttatagacctgaaatgggtaatgtaaataatttccatatgcaccctcgccagcccaactatggagaatttggattgatgatgccaggtccagaggtgaggggcaatcatccagaggcgttcgaaaggttgatccagatggagatgtcagccagatcgaagcaacagcaggtgcaccaccctgcaatggccgctggccgtgtgcctagtgggatgtacgggcacgagcttgatgcgaaattgagatacagatgatggatgcctggatgcttcactccgtacagaggacctggaggtgtggtttgttgtatggttgtagcatgtacatctgaacgggtgatggaacggagtgggtctaagatctgtaggagcggaagtctaccgggaaaaggggttatggtgtgctgaatggaagacgtggcgtcgacgtcttagcagccacatgtgtaatgacgttttctgtctactgtttctgacgactatgcagtttccattttgtataagctctgttatgcaaaaggaaaaaaaaagaagaaaaaaaactgagtcagattaacagattggcgacagtgtccgcttgaccctatatcttcaacttgtttgaaaggaaatgaccacgcgtcatgccgagacgtttgtagctgatagcactgtttgagacgttttgc

SEQ ID NO: 21612 - DNA, 309 bp, Zea Mays
cctgtgatgtccatcgcatgtccccatccagctcgaccttcctgccaccggccgcagatgcatccggcaccatgcccatttgctcactggaggcctggtacacacctccttcactacccggctcaccagctacacgcctacaccagtcccgctttgttgttgctctggtgtttgaggatcatgaggtgcttgggcttcaggttgtggagacagagtctgcggcttcaaagctacctttggttttgtcatgatcggtttgcagaacctcgtcaccgacgtaggcgtccttctgccccatcccgaccatga

SEQ ID NO: 21613 - DNA, 494 bp, Zea Mays
accgatcttagttctggcatgtatttctggacggatctgattgaataaaccgtgaaggagatgccctggaatagattcatgcccttcctttcaaaatgttgtacttctaccgttcagacatcttcatcatattcatctttttcctcgtccttctccccgatacaaccatggttatttgtgggtcttggcaaccctggtgagaagtatcaatccaccaggcacaacgtgggttttgatatgatagatgcatttgcgcaatcccagggtatacccctgactacacattacttcaaagcactctttggtgaagggatggttgatggagtccctgttcttcttgccaagccccagacttatatgaatctcagtggagaatctgtcggcccacttgctgcctattataaactgccacttaatcgtgtcctagtggtggcacccaggatttccacaacctccttccaaggttaaaaaaatgatagaaccatttaagaaag

SEQ ID NO: 21614 - DNA, 3202 bp, Zea Mays
aaacagttttaccattttatagaaatgaataaaaaagctgagaagtttgacaatctgcaacagttttttatggcgagaagacgaaaaaaaggccaaataaacagggcccagtgggtggcccgtggctgaacccgccatcggatttcgaaggttcgaggcaaccccaaaatccaaacaaaggaacattccccgggaagcggaaacgaaccactccgggcctccagcttttctatttttcataactacccttatcctccaccggtgtttgcgcggagcgactaggggcacttccgtccgtttcgcacccccgaataaacaaggcgcaggagcagcagcagcagcagttaaagcagttgaaaacatttccgatacagctggcaagctttacttccgataacatttgtgcttatcaggatgagcaccgccaaggtcatgataacatacaagaggaagcgtgctgccacacatgcccatacagaagacgacacagttcttgactcatctcctgctgcctcaagcaatgtggctgtcagcagtctacaacttaagcctgagggccctgctgagactgccgtgataaatgaatataatcatattactcctaaaatgcagcagtctttctccacgtttcaacaaaacatcaaagaagaacgtgaaccagagaaaggacatgatcagctatatgaatcatcaccgtggaaagaacaacctgagatttgttctgccactattgcctcaaccgcagaggcgcatagcaataaatcacaatgcattgatggcacaaatagtcaaacccctgtttcaagttctctgtgtggcaacatgcttgctgataggatgattaaccagacaaaagattcaaatatctctgcccctgtggaaataaattctcctacggggatggaaaatgctgtcgcccctggccaatgtaagagcaggtttagtcctctgctcacctttcgcaggcgagttaagaagaaaacaaatttggatgaaccagcagaagaaatttgttcacttgacaacgacaaacagtgttcaacactgacatgcagcccaccacgctcatcacaggatgctacatcattactaaaacatactgctccaaaccctttggatattgaggataaggtaggtagattgaaaaatactggaccttctacagaagctgaacactcacctgaacaagaaagttcccacgtcgtaaaatcctcagttcaacatgtggttccacagattgctctagatgtaaaccaaaacataattctggaagatgatgttacaccaatgtcgaaccaaaagatgtccttggaagatgatgttacaccaatgtcgaagttcactggtgtgcaagaggtcagtgggcaagatacgccagtggaggacttcaacagaacatcaccaaatactattgaagtgccaaaagttattgatttgcaggggaagggacattgtactggggaaactacttctctgcagtctccaagacaaaaagttgatgccagttggttgaaacggaccaataaatctgtggcagaagatgttccagaatctcaaggttcaacaaaaaatattccaataattctcttggatgatgataatgatgataggggcaaggagctcgaaaattcagaggccctcgatcaagggctccatagtcaaaacaaaagaacttttgggaagattgacctgaactgtactgaattaagacaacagggacttctctgtttagatgactcaacaattcaaaggctgccagatctggatctagctgtcaatgctcgaaagcaaatgtctcgaccgattgaaaggctgtttttcacagaggagaaagataccatccgtggcaaacaagagcatcatgaagaaagctcaaccatgcacgccccatactcaaatttctttgatctgggtccaccgtggaacaccgggagtttgaagggaccaaaaggcttgccttcagaagtaaagtttggaataatggacagggctcctgagttcagtctagacctcaggctggatagtttcacagacaacaacagtgtggctgccctgaggagcgacaagttgtttctcggaagcacctccagcacatctcgtaagttaacagaaaagcttggcatgtactcctacaagaggcagtcggctccgtggtcagaagaagagctggactttctttggatcggggttaggaggtacggcgtgaataactggaatgcaatgctgagggacagtcggctgcggttttcaatctcaaggatgcccgaggaccttgctaagcaatgggacaaggagcagaagaaacttgtgggtcctgcgcaagctgttggttatcttggtagagcttcgtgctctggatgctcaaagtctgcatctgtcggggcccaagcccaaacggacctttcattgggcgaatattaccttggtagagcttcgtgctctggatgctccaagtcttcatttctcggggcccagacggacctttcattgggcgacgtctaccttcgcagtggccgtgctccagagagaggccaccagcatcatttaccaacaagcctgggcgtgggcggcttccctggggcttcttcatcgtatggaagaagtggcggcaggcgcagaagggcgtccaagtcgtactactacgagaacaagtcggcttggttccaggagccaccatcggacagggtgccccagcaacccggcggccgaatgggccctgagatgtggccgagcatcatggtggtgccaccgccaacggcagatccaccgagggacgacgacgtgaagccccatgtcctcctccctgatgctaccctgaagcgcgcgataaggaggagtgcggactgggggtcgttcagcaggaggctgttcctgtccggcgatctcaacgggggggctgcaggcgccccagtaccaagcgacaccggcgcgtcatccgaagagacagtgtctgacagctgagcttcagtttatttgacatgtcccattcccattcccattcttattggatgttgatgaagctgctggcatgttctctgtaatgtcatggttgcctagtactcactagtattgcatcttgtataaagtctctctctctctctctctctctctctgtcctctataacaggctacgagtccactcatgcatggtggttagatcgaacaaatactccgtaacaacatagcataccctaaacccccc

SEQ ID NO: 21615 - DNA, 1522 bp, Zea Mays
ctagcagcctagcacattgccccttgggcgccgcagaagtgtttgtctcctgctggctgggcgtgtctatatatacgtgcctccattctcgcatcaaaatgtagggccatgtgaaggtcgcgttcgttccttcgttccccaaggccttgccttgttctggttcagcatcagtgacgcttagcttcacaggaaccaggaccagcgaggtctctggctctctgcaacttgccatggggaccgcaacggcagcaatggacaggaatgcagatggagagcagggcaagaggaagaagaagggaggcttcaggaccatgccgctgatactaggttcttcgaccgggcagcaatagtgacggcgggcgacatctccccgtccgggcaaccagacccgtggcgcctgtcgacggtgcaccgcgtggaggagctcaagtccatcgtccgcatgctgcccatctggtcggccggcatcatgctggccaccgccagctcgcacaactacaccttcaccatcatgcaggcgcggaccatggaccggcacatggggccccacttccagctcccgccggcgacgctgtccatcttctcgaacgcggccatgctcgtcaccctggccttgtacgaccgcgtcttcgtgcccctggcgcgccgcgtcacgggcctgccgtccgggatcacctacttccagcgcatgggcatcgggctggccatctccgtgctcagcgtcgccacggcggcgctcgtggagaccaagcgccgcgacgccgccgcccggcacgggctcctggacagcccggccgccgtcgtcccgctcagcgtgttctggctggtgccccagttcgccgtccacggcgtcggcgacgccttctcgtccgtggggcacatggagttcctgtacgaccaggcgcccgagagcatgcgcagcagcgccgccgcgctcttctggctcgccgcctccatcgggaactacatgggcacggtgctcgtcacggcggtgcagcgcgccacgcgtgggcgcggcgagtggctccaggacaacatcaaccgcggcaggatcgacaactactactggctcgtcacctgcatcacgctactcaacttgggctactacctcgtctgcttctatttctacaccatgaagccgctggaggtggcggatgactgtgacaaggactgtgagctctcctccctccagaaaaatggcagtggcgcggcgctagtgtgatggtgtaattaactggaagactagaaagcaagaatggtcttgttgttaataactagctatatacaatcagcagcgctgcaatgcacacggattacaatttactatagggatattgtagtgtatatcgagagtttataactataagctgtggtcgagcatgcatacgtacggtcataggaagatacaaacgcaacgatcatgatcgtgatcatgcaagctaaaagcaccatcgcatacagtttagtgtattttattgtgtccatacctctatcacagattcagcttttctgagtgtccttt

SEQ ID NO: 21616 - DNA, 5745 bp, Zea Mays
ggcgggaacatcgataatatgccgccgttttccttccccgaaccctccaccttcgccggcccgtcagccacgaccgccaccattcaatccttccacttccatccctactccgtctcctctaccgtccacccattccggcggagctccccgccagaatggaggcggcgctgaagggctatttcgggtactcaacgttccggccgtaccagagggagatcatacagaaggtcctggatgggcgggattgcctcgtcgtcatggccaccggaagcggcaagtccatctgctatcagattcccccactggttacgaagaaaacagctgtcgttgtaagccctcttctgtccctgatgcaagaccaggttatgagtttaaaacaaaaaggtgtgaaatctgagtaccttggcagcacccaaacgaatagctccgtcagtaatgaggcagaaaaaggcacgtttgatgtgctttacatgacaccggagaaagccatttcacttccttcaagattttggagtaacttgcaggcttctggaatctgcttgttagctgttgacgaagctcattgcatatcagaatggggccatgatttcaggacagagtacaagcagctgcattcattgcgcaaccttcttgtgggtgttccctttgttgctttaactgctacagccacagaaagggtacgccaagatatttctacttccttggttctttgcagtcctcacgtggtggttggttcatttgatcgtcataaccttttctatggtgtgaaaacatgcaaccgatctatgtcctttataagtgaacttgtgaaagatgtttcaaagaggagtgatgtgggtgagtcaacaataatatattgtacgaccatccgggacacagaacaggttcatgaggctttagttacttctggaatcaagactggaatctatcatggtcaaatgggcagcagagctagagaggaatcccatagatccttcattagggatgaagttcttgtaatggtggcaactatagcttttgggatgggtattgataagcctgatgttagatgtgtaatacactatggatgtccaaagagcctagagtcttactaccaggaaagtgggcgttgtggaagagatggactgccttcaatctgctggctatattaccaaagaagtgatattacaaaagctgatttctattgttctgaggcaaaaaatgaaacccagaggaaagcaatcatggattccttcatggcagcacaaaaatattgcttgcttgctacatgccgtaggaggttcttattgcaatattttggtgaagaatggaacattgactgtggtaattgtgataattgcacagcagtgaaaaatgagagggatttgtcaaaagaagtctttttgttgctgtcctgcatcaaatcttgtggaggacgctggggcctcaatttacctattgatgttctccgtggctcacgagccaagaagattgttgacaacaattatgataaactacaaatgcatgggcgtggtaaagattattcgtcaaactggtggaaagcacttggtggtcttcttatagcacatgacaattctattgctgtcttttccctggcaaaagaagaaagtattacagaaagatttcatttgaatgcaagcaaagattatttgaaggagactgttcgtgatacatttagatttgtcagtgtcagtccaaaaggggtcaagtttctctctactgctgataaaatagatggagcaccactggtatttcagctgactgcagagatgattgaactagaggagcacggtagttcacatcataaagaaggtggtttgaatcttgtgccaacattagaatctgaaaaattttctgaggatgaatcaaaactctatcaaaggctcctgaatgttaggatgaagattgctcaagatattggcactgctccgtatgctgtatgtggcgatcagacaataagaaactttgcaaagatgagaccttctactggagctagacttgctaatatcgatggtgtcaaccagcattttatttcacgtttcagtaacattttcatccaaaatattgcggaattgtcgaaggagttaaacctcccgttggataattcaccatttccaccaccaccaccaacaaatccagctgcagaaaatattgctggtataccaaaacctgtacaaaacaatcttcctgggatcttgggtgatgcaaagctgactgcatgggaattgtggcataagcaggagtactcattcctgaaaattgcttatttccgcagagcagtgccaataaaagagcaaacagttattgcgtacattcttgatgctgctcgagaaggatgtgagatggactggagtaggttttgcagggaagtagggctgacacctgatatagccaccgcaattcgtcttgcaatctcaaaggttggatcacgtgagaaaatgaagccaatcaaagaggagctcccagagaatgtaacttatgacatgatcaagacattcctgactattgaggggtgtggattgtcagagcaagtctttggtaacggtaccgctgacggtgtctctagtagaatagcagagtcaccaatatcttcctgccatgcaagtgaagcaggcggaaatggtgtcccagcagcggcagaggccagtgatgcaaacccttcagcaaagagaggtcaaactgtttgtgctgaggagccagcaacaaaactgcaaaggacatacgagcatggagctgagttaactggcacggcgactgctactgtagattctgtgctagatctggttgcgagctgcaatggggtatcgctggaggatgttgccaagcacttcaagggatccaagagagaatcggtcctggagatattggagggccttgaatctgaattcacaatttacaagaaaaacgggaactacatggtcctgtgacaaacttgcccgcgtagtctgggaaggggatatgcctcagctgtgtgtgtatatatatatatctatacgatggtgggtgacttactgactttggactatggtagcaaggttgttggctggtgtgcatgtgctcattttggggattgggcagaactagcagatgtacgaacgtgtgtgtttggagctgggatcctttctgtcatctcgcatatgagtatcttggactaattgaccccgcgtattttcgttgggttttgatgcgttcaccctactcgttcaacagcttaagatcaggtttgactcctattgcaattttcctacgtgtccatttggagcaaattatcaaaggttttagaaccacacagaattcctatagaatgccttaacaattcgtaagaatttcggaggaaacattccatggtaaaaacttccgccacagatatcaaccaccactcttaccatacattttctttgctccgatgatattttatgattattacggtctagcgaaatcacgtgatgccttgcaagtgggaaacacgagaaaccgtactcggccattggagagcaggtgaaccagttgtcttaacaaaaagggacacgtactcggctcgggcacgcccgcacggccgcaccgcaccaccaagcgaacccattggctgtctctctcacggctcacttcactgttcactcggcggcaccgcactgcgccagtgccccgtcgccgatcaaagcaaccgcctccaacgcggcaacggcaacggcaacggcaagcgccgtcagtcactcccgtagtagccgccccgcagtgagtgtgtgagcgagtgagatgatcagcggaggggccgcggccgccgggaacccgaggagtaggaggacgcgatgaaggcgcagccgctgctactgccggcgctcaagaggcggagaggccctcgcgtggcggtgctggcgctcgtcctctgctccctgctcgtgcccttggccttcctcttcgaccgcgccccctccggatacgtgacgacggaggagcggcaccgacaggaggtcgttctgcctttgttggatcacgtggcggagaagagacgtccgagtggtagtggcgctgacacgcgacaggatgcgctggagaagaaggtccccggtagtagtgcaggagtcattcatcaacaaacaccggataagaacatctccaaagtcattcgtcaacaaacaccggagaagaccatctccaaaggcagtgcaggtgtcgttcatcagtataagcaaattggtagccactccacaagtgatggtgctaaaccaaaagtttccccagcaccaaaagttgaaccatcagatgctgtttcagattcaactaaagtcgcaagagatactagccaagaaggtgaaaaggctgatgaagtggaaaagtcaaagtcttgtcaacttgaatttgggagttattgtctctggtccattgagcacaaagaagtaatgaaagattatacagtgaaaaggctaaaagatcaactcttcgtagcacgctcatactatccaagcattgcaaaacttcaaggacaggaagctctgactcaggaaatgaagcaaaacatacaagaccatgagaagattcttagtgtatcaacagttgatgctgatctaccatcctctatcaacagaaggatgaagcagatggagcaaacaatagtgagagccaaatcttgcacagtagattgtagaagtgttgacaggaagcttcgccagattctttatatgactgaggatgaagctcattttcatatgcagcagagtgcattcctctacaatctcggtgcccagacattgccgaaaagtcatcattgcctttctatgaggttcagtagtccagaatacaggcacttcgttatactatcaaggaacgttcttgcggcttctgtagcaatcaactcaactgtgagcagttgtaaggagccaggctactttgcttttcatatcctaactgacgctcagaacttctatgccatgaaacactgccactcacatttcgttattccagaaatattcaagtatctaaacaaggtggtcgtgttggatgacgatgtagttgttcaacgtgatctgtctttcttgtggaatattgatatgggagacaaggtaaatggcgctgtcgaactttgtggtctgaaactgggtgagatgaaaaatgtcttgggtaaaacagcatatgatccaaagtcgtgtgcgtggatgtcgggggtgaatttgattaatctggataaatggagggagcataatgtcacagagaactatctgcggctcatgaaaaagttcgaagtcaaggatgagctgtccctgcgagcagcagcatttcctctaagcttgctatccttccaacatctaatataccccctagatgaaaaattgacgctggctggacttggatatgattacggaatcgatgaagaggttgcgcggagatctgcatcattgcactacaatggcaacatgaaaccttggcttgaattaggtataccggagtacaagaagtactggaagaggtttcttgtccgaggagatcgatttatggacgagtgcaacgtaaatccgtgacgtagagttggacccgaaacgagaacgattgcgtgaatctgtgacgcagagttggatctgaaatcagaacaactggaatagacatcagctagcctcactgaagtttgtgtcggcaaattgtgaacgagaatgaattctggtggtggagctaggatttttttgagtggagattccaaacatgaaagtagtaaacactaatatatatacggtagtataaatttgagtaaat

SEQ ID NO: 21617 - DNA, 3502 bp, Zea Mays
ccttccccggtctctattccccaattgcccctcacctccattaccttccccgtctccctcgtacattcgacattccccttcccctgccattcggtcccgctcccgccgcctccgccgcgattccactctcccttccgcctccgccgcgattccactctcccttccgcctccgccgcgattcttgtctcccttccgcctccgccgcttaccgccgcggccacgccgcaagcgtttcgtctcgggatccccacttcgtctcgctcgagcggtagagccacgctcccaccgcccaggcgtccgccgcggaggcgtcggtggcctatctgagcaggctctcctcgtcgggcttttttgctttagagggagagacttcctggtcggcgcgccgcgagaagagcaccagccatgtcgcaaactaactgggaggcggacaagatgctggatgtatacatatatgattattttatgaagagaaatttgcaggcaactgcaaaggccttccaagcagagggaaaggtctcttcggatccagttgcaattgacgcacctggtggatttcttttcgagtggtggtcggttttttgggatatattcatagcaagaactaatgagaagcattcagatgttgcagcctcatatattgagactcagctcatgaaagccagggagcaacaacatcaacagcagcaacagatccctcaacagaggcagcagcagccacagcatatacaaatgcaacaaatgctgttgcaaagagctgtgcagcagcagcagcagcagcagcaacaacaacaacaacaacaacaacaacaacaacaacaacaacaacaacaacaacctcagcagcagcagcagcagcagctgcaacagcaacagctgcaacagcagcgtagagatggttctcatcttctcaatggttctgcaaatggaatttctggaaacaatcctttaatgcggcaaaaccaaagtactgcaaatgttatggcaacaaaaatgtacgaggaaaggttaaaggtaccttccgagagagactctttggaagaggcatcattgaagcaaaggtacggagagaatgctgggcaactacttgattcaaatgaagcatcattgttgaaagcagcttcaagcgcgcaatcctcagggcaaattttgcatggaactgttggtggcttgtcaggcactctgcaacaagttcaggccaggagccctcaacttcctggtcctgctcagggtatcaagacagagattaatcccattctgacccccagagctgcaggcccagaagggtcatttataggtgctcaaggatctaatcaagctgggaacaatttgactctgaaaggatggccactcacgggacttgagcaacttaggtcaggaattcttcagcagaagtcgtttatacataatcaacagcaattgcagcagcaaatccagatgctgactccacagcagcagcagcagcttatgctgcatgctcagcaaaatatgtcttcaccaacatctagtgatgtcgacaacagaagattgaggatgatgctaaatagaaatgctgttcttggccgggatgggcagacaaacagtggtagtgatattattccaaatattggctctcctagtcaaagtggtggcgatatagatatgcttataaagaagaaacttgctcagcagcagcaactattacaacagcaaagcaatagccaacagctcccacagcaacatcagcttcagcaacctgctgtctctagccagcaatctcaaagttcaaatcaacatcttcaacaagaaaagccaggaattggaagtatgcctgctgatgggggcataccaaattcatttgggggagctgaacagacagcaaagaagagaaagaagccaggctcatcctctggtagagctaatagttcaggcacagccaatactgctggtccctctccaagttctgcaccatcgacaccttccactcatacaccaggagacgtgatgtctgtgccacagctgcagcagaatggcggttcagctaaacccatggtaatgtttggctctgacggaactgggagcttgacatctccagcaaacccattggatgatgttgaccgcttgctagaagatggctcattggatgataatgttgaatcttttctatcacaggatgacatggatcctagggacaacttggggcgatgcatggatgctagtaaagggtttggtttttctgaggttgccaaagcacgcgcaagcacagccaaagttgtctgttgccacttctcagctgatggtaaactgcttgctactggtggtcatgataaaaaggtcactttgtggtgtacagattctctgaaccctaaatcttatctggaagagcactcgtttcttatcactgatgttagatttagcccaagcatgtcacgccttgctacatcctcctttgacaaaactgtgcgggtttgggatgcagataatactgactattcactacgaactttcacgggccattcagcaactgttatgtcacttgattttcatccaaataaagaggatatgatatgctcctgtgatagtgatggggaagtgcgcagctggagcataaataatggtagctgtttgacatgtgttaaggtgtttaagggaggtgctactcagatgagatttcaacctcgtaagggaaagtatctagcagcggcctcagataaagctatctacatacttgatggggagacacaacatgcttgtagaagtcccttgcaggggcacaataagaatattcaatcgctttgttgggattctgctggcgaatatctcgcttctgtcagtgaagactcggtcagaatatggtcattcagttctggacgtgaaggtgaatttgtgcatgaattgaatcgcagcggaaatcaattccactcgtgtgttttccacccaacttatcagtcattgctagtgattggttgttacgagtctttggaactttgggacataagggagaagaacaccatgaccttcaacaatgcgcatgacggtttggttgcagccctggcatcatccagtgctacagggaaggttgcctcagtaagccatgatagaactctcaagctctggaaatgactttataatagcgatcggtgtgaagacgattttctaccaaaaatgaccacatgacgcacatgacgaaaaggtagctgacaagatactctggagccgcgtgggctcaagaactaacggtggtttgtgttgtggttcttgtatgctgttcaatatgctattgaagtttgtaactcctaatagaaacgttcagtcaagactccaagattgtacctcggacaagtagcaaatatttattccccaaaaaaatctgcattttgttttttaccgtgtattttaacgtcgccgagcctgtttggaagctagttttaatgttttgcaaaatttacgtggactaaaaaaatgcctggattaagaaggccagcacagatggagcgatccgacgtgtgtcgattgagcactg

SEQ ID NO: 21618 - DNA, 350 bp, Zea Mays
gttcaatctattttccctgcatgtgactaaccgtctagtggaggatgtgctggacaatgaaagcttctgtcttgaaataataggatacaagaagcttgcaagtggttttgtgaaggcttttgtgaatcacttgaatcattagttcttttaagaatggttttgtaaagcgttagcaaatatgtgtaaaacacaataagatgtgtggcaaattcagtgatctagttgtacaattttttgtgtttatgggatatgtggatatttcattgtggaatgttaatgaagtgtgtatgtctatgtgattatgtgtataaaatatatgttttgtggtgcttttgtgataatatctattc

SEQ ID NO: 21619 - DNA, 2960 bp, Zea Mays
ctctgtgacccctccccgcgcggcggtcgcggtcatcccgctgtcgacgctacttcggcaagatgagcttgcttgggacggggcttcagcctcggcctcgacccgcgtcaggtgaaggctgcggcacgcgtcccctcctccgcctccagtctccgcccaactcaaaaccctagcaaccgcgcctccatccctacccgaattccaatccaggtccgatcccccggtggcgaggacacccggcgccgattcgtccccgcagatcgaccgggcaggacatatttgggttcggggtccgctcgagtcgcctcgccggggtccaccgcggcggtcagggggtatggtgggcggcgggaggcggggcggagcggcggaggaggtcaagctttacaccggcaacgtgttcgcggcgctcgagtccctcaagaagaagaagaagaagggtgacaaaggcaaggcggtcgggaggaggacggcgagggggccgctgaaccctgggcaaacaggcgagcgagtacgccgactgcgaggagtaaacttgtgtcatctcgcgcggggccaacccgaggaccacgcacatcctcgccggcgagacggtggaggtgcgcaggggagacgtaggtggtggctgcacgaaggtggttttcagcattgagccgttggcattgagcgaccggcagcagcccgcgtcttcgtcttcgtcgccggcggcacccgccagagtcgtcgtgtccggtcgttgctgctgctgcatgaagaggctgctggaggaccgggacatcttcatctacctgggcaagaaggccttctgcagcgacgagtgcaggaacgggttcactatggaccgtttggctcgaattgtcttgagcccaaggaaatctgggcctttttaatcgtcgtcacctagctcgcggatggtccgcacacagtttccaccgtcagtatcgcattggagtgaaacaacacccatccttgccaccgattaggaacttaggaatggactcgccggtgcctgctacgctcgcccgcgcgccagcgagatcgcaagcgcgggcgggcgaggaggcttgcgcggatactcggcaggatgctccggcggaagcggagccacctccccgtcggccacccgcgttctacagctccgtgtttgcgtagatcgaagagatcgggtggaagcagctggtgagcgccacaggagacggagtgtcctgtctcaccttccgcgtcgtggatgaaccaggacagatgcatttactggagatcacactgcccatgggctatcccgaaagtcctccttcaatctctgcagttagtctctatcctgatatttttattatactttgccagggatgaactaggcatgtttttgattatagcccatatgtagccgccagggatgaactaggcctgtttttattatactttgcagttgcatgaaatttcagaaccataaccatatgggctataattgaacttgtctcattaacaggacgtaccatatctcccaaaaatacattggtcaaaaaactcaagactgaaagatgttatttgccatgtctcattaacaggacgtaccatatactcacatatttcctgcattgcattgtacacattttcttatatattaacgagtgcaggaacgagttcatcgaggaggcggcggaggaggagctcatgattctagatcctgctcgaaatctttgatcaagatttgttagttgtcgtggcaaaagtagagagtgtaatatttgcccgcaatattttgcttctaccttcaacttggggactacttggctgggagagtgagtgggggaaggacaaaggaaatgcctctcattcaagttttttgctgtaaggagaggtcgtcccggtttggccaaccagtgcaatggtcgagccagccaatttccgtggtttgttgagctccattttggctactgtcatattagctcttcggcatcaatttccgggaggaggatggcgagggggccgcgcagcggcaagagccaccgcagaaggagctattctcagccttctcagccttttccagtttattttattttttatttagtagcatttcgttaattccagttctatttgttacaatgattccagttcgttcttgtagcaatagctggctctggctgaattttatgatctatcaatttaatgtcatcatcatgattaatgtggacttatctagactgtttttggatagagtagtagttagtgatttctgatccgactattgtcgctgcaatctttcatgttctttttatgtagtctcactttgctcctttttcattaatggtttattcgtggacattttcaacttctaccatcaaaccttctgatgttggtactttgtgttctattcaattattttacccataaaagaacttgggattattttataccttttatctctactactacttaagtgtctattgtaggcgtccacaaaggcggatggtgcacggttctgccggttccgcatcccgccagattgggacgaattcggcatcggctccaccaaaggctccacggatttggcatcagctccacagattttcgatactgggtaacagaaatgcatgtttatggtgttcgttttgaccttgcattacatctacaatgaccagaggatgcagaacgccactgcagcaccgatggaattgtacggtgtcatcaggctcgactaaatctagatgggatggactctacttgtgttgaaggaaaggaagtatgtgcttggcttgcgaggagggggcatatttctgttcaacttttcttacgggtcatgttacttgtcatctcagattacacaactttaggtatttctgtctttgtgagaaaagtaccaaaatagtttcacatgtgtttaatttgaatattttgtgtgccgttgcaacgcacgggcacatacctagttatatttataattttagatacataattagaca

SEQ ID NO: 21620 - DNA, 5892 bp, Zea Mays
gtttgctcgtcccctccagccgtccagcgcccacggtggtgcgtcctctccgagacaccgctcgccggacctcttccgagtttgggaaactctggcgccatgaatccaatagtatagcacacgtcgcatgggagaaggcacattccaagagcagatgatccacacacacggtttcagcccggtggcccaacggcgcagctatcaccatccagccctggaagaagcaaggattcaccctcaagctcgaaactgaacgcaactcccgaagacccggtgaagccatgtctgcggggagaggcgatccaaacacccctgccaacaggcctctgttcctgagtgctggggtgcccaacttaggctgtcacaatgttgcagctccagctgcagcaggcaacagcggctcgatcgcctcgcaagtcttattctccccatgctccacgtctgtcctgaatactattcaggaggttcctgctccacaatctgctctgttgagtccgataaaccgtgcaactgaacaaggtgatgtgccctgcatccagccatcctggaatatgcctgggggttgcacgcaggtgcctattaatatcatagtgttccatagggaactcactagaaggggttcgaggccgcagttgtcgccgtcggccactgccttacctgatgtttcagagggagcttccattcggcttgctgggagtaatttcttgtcacatggaagaacacctagcatcgttgcaggtgatatgacaacgaattcttcacagctagccactgcagataaatacaattcagagcatcggatgaattgtttacatgatgaagcatccaagactgaaaatggaaaaggaagtacccaacttccacaattagcaacagcaattttccgtgacagctacaatgatttggaatcagtggttcctgcagctacctgggaaacacgagtgcaacattctcaagaatcaaccacctgtcttgcagaaagtaccactgatgacaacattcatatgtaccaatctatgcaaaaaaggctcaagacacaaatcaacaagagtgaacacacaccattgtcagcaccaactgtacccaaggagaaaacactgactcaaattgagacgcagctagcaagtgccgagaaaaccgaaatgttcaggaatgaggaaaccccagcgctgaaaatgaaggctcggaagaaaaaacacagaccaaaggtaatcagagagaataagccagccaaagtgcagaaacctgattcaacaccagatggaaaatctccgaaccaaaaggtcaagagaagttatgtccggaagaaaagaaacctcagctctctggagaattgctctggtcctgttagcgatcaatcaatctctggagcaacaggagttgcagctagaagcagaacatcatcagttcgacgaagtctgcaatttgaatccaaagaacaaggattgcagggcggccattcgtcaatggccaacatacaccatcacaactatgagaaacctggccatgctcaaagttctttctactcagagtcagaagtgcagactgggcgtgtgatgcaagaaggtatggagaattcaccaggagaattagctttcgacatgagtcgcagactgaacaaatttttagatgagtacatacatttgccagatatgctaaaacctacacaagaagtttcggctgcaacttctgcatcatttagtacggaactggcaagggaagaagataatgtgggaagaacttgcaaacctgatggcaaaagtaagtgcagtttgtttgctgatgaaagggtggtaaaccccacaatagaagggaacaaaaaggacttggaattaaactattctgatgctgatggtcttgtttcctcagctaggtctttacctcaaatggatcccacaagaagtcagatgggtaaggtgtcggaagtggaaaaccccacacaccatagcaatggttcgctacctggcacacgggactctgttgtcttgagggctgcagctgagatgttcgcatttttccaagcgggtgcaataaaaaagaagcgatctgcccgactccgcagaaattcccccttttatactatggatcttaagaataatactctacaagcatcaacaagactgccacagccatgcatggatgcgctgcatagaagttcttgcattaagtttttgaccaaaaaacgttcagaaaaggcaagaccgcactgttccagtgtaattcaaccaaatgatgagctgaaggacaggctttcagctggaagcactttttatggcgcaactaatggatgcaaaatatcagaagagagttctccaaacttttcatctcagaccctggacaataaaagaatcaacgttgatactcattgtgaagtagcagaagggagatcaaccaacacatcaacaggaccctatatggattacgttcaaggagttgcatcaaagttgaagcatcttgatttgaatactgaacaggtgcagagaactgagatgcatttatctctgaccacaccagctgttatttcttttgagggaacaagtggtccttcaaatgctcttgtcccatatggtggtgtggtgatggttcccaatgagaggcccttgcagttagtcaaaaagcagcggcctcgtgctaaggttgacttggattttgagacgacgagggtttggaaccttttgatggggaaatcagccgagtcttatgggactgatgttgaaaaggagagatggtggcagcaagaaagagaagtgtttcaaagccgtgctaattcgtttatagcacgcatgcgacttgttcaaggggacaggcgcttttctccttggaaaggatctgtagtcgattctgtagtaggagtgttcctcactcagaatgtagctgatcatctttcaagctctgcctatatggcccttgccgcaagttttccttcacggccagtcaacaataattgtaaggatgatggtaccacagaagacaataaacaaaccaccaggatgagtgagctagtaggagagaaaagtgtgtttgaccttttctacaatggtgttagacctgatctagaagtgggatgtgaggaggtatcaatgacttgcaagaagacacacatggaaccaacagacaatactagggatagtgaatttattgaaggtgaaacctattcctttgattacaaatcaacagatgaaagcgtttgcaatcacaaagggataggtatagaacataaagaacaacaattaccagatttctcctcagcagaattaactgtgtctacagaactcgtgcagcagatacaaatccagaagatctcatcctctcaaattttaacttcagaaaccatacaatcaagattatctttgagttctgagatacctagaaattttgtttgtggtggttctgctgcagcttatcagcagctgggaagcaatttcgaccagggaagctcattaacagaaaatgatgccacagccagtgaaattgaatgtcacagactccaaatggctgcaataaatgattatggatttggtaaacctgagattccttctagttcctcaatgccatttttcttggctgttgatcctcaacaactgaaattgagaaatgagacaaatgtttcttcaacatcttccaacattccttcagattctgcatcaccaaacttgaaaaatggcacggatcctcttttgatgccatttaattcctacatggcagattggagcagcgataagataacttacaccactctgaacactccaaaaataagcacagaacttccagtcaagttacaccatgacaaaagtagtagctttgaagcaccaaacctgaaggagcatgaatcagtctttgcaacacatgaaatgacggtagaagcaacaagaaaagaagacgaacacacatcaaaatctagttttacttcctacaatggagtaccagatacagctgcacaagcatcaaagccaaagaaaacaagaaccacaactgcaaagaacacagagaattttgactgggaaaaattacgaaggcaggcttgtagtgaagggcagatgaaacaaagaagttttgaaagaagagactctatagattgggaagcagtacggtgtgcagatgtacgaagaatatctcatgccattcgggagagggggatgaataatgttttagcagagcgaatccagaattttctgaatcgtttggttagagatcatgggagcattgaccttgagtggctaagatatattcccccagactcagcgaaggattacctactaagtatacggggactggggcttaaaagtgttgaatgtgttcgtcttctcacactgcatcatcttgctttccctgttgacaccaatgttggtcgtatatgtgtaagactgggatgggtgcccattcaacctcttcctgaatctctacagctacatctcttggagctatatcctatcttggaaactatacaaaagtatctttggcctcgcctttgtaaactcgatcagcagacactgtatgagctgcattatcagatgattacatttggaaaggtcttttgtaccaaaagacagccaaattgcaatgcatgctatgaattcgactcacctacctcgccttgaggggagtatccattcaagggagtttcttcctaagaattcagagccaataatcgaggagcctgcaagtccaagagaggaaagacctccagaaaccatggaaaatgatattgaagatttttatgaagatggtgaaatcccaacaataaagcttaacatggaagcttttgcacaaaacttggagaattgcattaaagaaagcaataacgaactccagtctgatgatattgcaaaagcattggttgctattagcactgaagcagcttcgattcctgtaccgaaactaaagaatgtgcttaggcttcgaacagaacactatgtgtatgagcttccagatgcacatccacttttacaacagctaggacttgaccaacgggaacatgatgatcctaccccatacttattggccatatggacaccagatggaataaaggaaataactaagacaccaaaaccatgctgtgaccctcaaatgggaggcgatttatgcaataatgaaatgtgccacaattgtactgcagagaaagaaaaccaatctagatatgtcagaggcacaattctggttccttgtcgaacagctatgaggggtagtttcccacttaatggcacttactttcaagtcaatgaggtatttgctgaccacagatctagccacaacccaatccatgtggaaagggagatgctatggaacttgcaaaggcgcatggtctttttcgggacttcagtacccaccatattcaaaggtctaagaacagaagaaatacaacaatgcttctggaggggatttgtctgtgtgcgaggattcgacatggagactagagcaccaaggcctctgtgcccccatttgcacattatagcaaggccgaaggcccgcaagacagcagcaactgagcaagtactctaatcagcaaagatatcagttttatgaacatcatgtttattgtgatatgacatcaatagctctcgacctatgcatggaatcatattacttcctgcctggcgatggccattgtttaggaaatttaagccatggatggggtccgagactgttagttctgagacgagaggactaatgaagcatcaggaagcaccaataattttcacttttttgtttcagatctactgtatgtaaattagcatctagctgttagtccatgtaagatgccattgctatcctttctgagacaaactaccttatcaacatttcatttggttaacatttgttctgagtattgggaagcctgccagaattttgttttcgtacctgtatattcctgttatctgtacaacggtttag

SEQ ID NO: 21621 - DNA, 821 bp, Zea Mays
gcagcccatccccccagtctgcggtctccccctcccctgcctcctcgtctcctcggtctcccctccctgtcttccagagacacagagcagggcgctcttcggtcggaggagaagcgcgaccacgaccatgggctttatctcgttcgtcggccgggttcattgaatttggaaatgacggtggacctgcagcgaagaccttgaagccaaagttcaatttgttcgtcaagctagtgtccaagaatactggattgggggtgccgcatattgatataaaaactgtcattgcagctaccatgtttcttaaaggctttggtggtcttctgttcatagtcagcagctcatttggagcattcctcctgctcatttacttggcgtttataacccctattgtgtatgacttctacaaccatgaaatggagtcaacactgtttgtcgatctttttttcaagttcatacagaacttggcgtttatgggtgccctgcttttcttccttgggatgaagaactcaattccaaaacgtcgctccaagggaaggacaacaaaaaccaagacaaactgatgtcagtggttgtaggaggggaagcaattgggctcattatgtttgcatactatacaggaatagatgtcccacttttgttcttggtgcgccaattgaattgtgaattgggacttacagaacttagcatgtaggatatttaagttatcttgcgcaattttattttcttatgttgcgatgtgttcttatgtcacatttcattttgctacaagaactgctttgacagtaaaaaaatattaagtcgcatagtctattttctgtgca

SEQ ID NO: 21622 - DNA, 2159 bp, Zea Mays
atggacgatccctcctccgcctccaacaagcacaagcgcaagcgggggcgcaagcccaaggcgtcgccgcccttccccgaccgctcctccccctctccctcggccgcccccgctccggctgggcgtcgtggccgcaagccgcgacgtcacgaggcccccgccgacgcggacgccacgcgtccgccgtccccgccccgccgcggggagccgaagccggtggcaaacggaggcgatgtggtggcagtggcggagtcaggccccgcgagctgggatgaggtggtgagggtagtgccgtgcatggacgctgtggtcaaggtgttctgcgtgcacacggagcccaacttctcgctgccgtggcagcggaagcggcagtacagctccagcagcagcggatttatcatcggcggccgccgtgtcctcaccaatgctcactccgtggagcactatacccaggttaagcttaagaagcgcggctccgacaccaagtaccttgccaccgtcctggccatcggcacagagtgcgacattgcgctcttaactgtcaatgacgatgaattctgggaaggagtttcacctgttgagtttggaacattaccagcccttcaggatgcagttactgttgttggttatccaattggaggagataccatatccgtgacaagtggagtggtctctaggatagaaatactttcatacgttcatggttctacagaacttctaggattgcagatagatgcagctattaattcaggaaattcaggtggcccagcttttaatgataggggaaaatgtgtcggtatagcttttcagtctcttaaacatgaagatgcggagaacataggttatgtgataccgactccagttattacacatttcattgaggactacaaaaaatctggagaatacacaggctttcctatacttggagttgaatggcagaaaatggagaatccagatctccgcaaagcaatgggaatgaaaccagatcaaaagggtgttcgtgttagaagggtggagcccactgctccagaatctggatgcctacgaccatctgatattattcttagtttcgacggtgttgacattgctaatgatggaacagttcctttcaggcatggtgagcgcattggcttcagttatctggtttctcagaaatatactggagagaaagctcttgttaaagttctgcgtgattcaaaagttcatgaatttaaaataaggttagcaactcacaagcggcttgttgcggctcatgtgaagggcaggccaccgtcatattacatagttgctggctttgtttttgcagctatctctgttccatatcttcgatccgagtatggaaaagattatgaatatgatgcacctgtcaagttgttggtgaaacatttacatgcgatggcggaatcacctgatgaacagctagtggtggtatcacaggtgcttgtatcagatatcaatataggttatgaagaaatagtcaatactcagctaataaaagcatttctcatggacacaaatatctggagtttgattgttgtcctcgagacgaaaactgcaaaggctgctacccaggacattctgacgacgcactgtataccttctgcaacgtcggatgaccttaaggcctagtgggaggagaagggagcatgacgcagccctgggcctgagccagggccatcaggtgggccaatagtttgggccacaatttcggctgaattgattagcgcagcgtacgatccgtgatgaagaggaaccccaatgtttatctgtttaagttaaatatcttttgaggggttgtggatgtgagagtgctggctggtgtctaaagctccgccattatagaaggtttgagggactgtcactgtcagataacaataaactggagttgttacagacagagtcatcgtgaaaacgatagtgtctagtaagaagctgagtttgttttttctttacatgatttcattacaactacaccaaattattgacggggaaaggaatcataattggtccgtgatttcattacatccttggtgtctcaagcttgttccgcatagtacctgctatttgtcaacgatacttttacttctgcttgtaaagtatttgcatcttgtttctggacaagtggtacttaaaagatatttaagcgttgtgaaccaaag

SEQ ID NO: 21623 - DNA, 252 bp, Zea Mays
ttaaaacttatataaattaaagaagtaattcggttcggaatgatttcaggtcacaattcctagacaaccgaacggctccttagctgtttgcatgctcctagtattgtccatgcacatagatggtgtatacattattgttgcaccccaacacttcacgtttccttcgatccagcctccaatagtggttgtcgatcatgcctagattcgtacttttcgttctcctcaagttgaatcatgtgccttcgtgtccac

SEQ ID NO: 21624 - DNA, 907 bp, Zea Mays
gtcgtgctcgtgctcgcgctcgcgcctgcgcctgtcttaagctccgattgctaatcttcggatgtttgcctctcgaggctgagagcgcgttggagatttggactataagagcgagcgagcgagctgggtgccttgctgccttgaggacgccgtcaagaaaccgcgtggaggggagggcgatgagatgagggatgctggccgcggtgatggactacttcagcacctgctggggcccgcggtctcgtgcggggcaccggggcaagggctccgacgccgccggccggcaggacggcctcctctggtacaaggacgccgggcagctcgtcaccggggggttctccatggccgtggtgcaggccaaccagctgcttgaggaccagagccaggtggagtccggatcgctctccctggctgactacggcccgcagggcaccttcgtcggcgtctatgatggccatggcggcccggagacgtcccggttcatcaatgaccacctcttcaaccatctcaggagatttgcaactgagcacaagtccatgtcagcagacgtgatccggaaagctttccaagaaactgaggagggctttctttctctagtcatcaaggaatggtctttcaagcctcagattgcatcagttggctcctgttgccttgttggtgtaatctgtgctgggactctctatgttgcaaacctgggcgactcgcgtgcagttcttggaaggcttgtgaaagcaactggagaggttctggccactcagttgtcagcggagcacaatgcatgctatgaagaagttagacaagagctgcagtcatcacatcctgatgatccacgtattgtggttctcaaacataacgtttggcgagtgaagggtctcatccagtcttatcaagatacttccggtgatat

SEQ ID NO: 21625 - DNA, 465 bp, Zea Mays
aactgaagcagccgtcgatcgtcgtcggcagactaacgtgggataccggatagcgatagacagaccgccaggcaccaccgcaccacacaccactcgtccggtcgtccctgactcaggccactgacaacgaccaccggaatccgcatgctggcgctgatgaccacctcttccgcgttctccgcccctctcctttcgttccggccgccgcctcgcctccccattaaccgcctgcgcctccacccccgccgtcacgctctgttccgctgcgacgcggtgtccgagattgccccggccgcctcagccgcctacggcgtcctcctcctgggcggcggcgccttcgcatatgcaaggtcggggagtaaaggctccatctacggggggctggctggagctgcgctcatgggcgctattagatatggaatgccttgtcatcgtgtcatggttactgctacgactgttattctg

SEQ ID NO: 21626 - DNA, 936 bp, Zea Mays
gggccctccaacgttccatttcaagacggttatcatcatgataatagtttctctggttgcttcagttgattcgctttcatcgtaccatgcggcgtcactgctggtaaatctaagcccaccaacacgtggagttgtcagcagagcgattgggcttgaaggggtttcaacgtttattgctggagtgtggggtacaggtacaggatcgacaacgttaacagagaacatacacaccctcgaaacaaccaaaatgggcagcaggagggctttgcagcttggggcagccgtgtaaaatcggagctctcctagcctctatacctcttgccttggccgcctctgttctgtgcttcacctgggcgctaattgtcgcgcttggtttgtccacattgcgatacacccaagcagcaagctccaggaacatgataatagttggatttaccctgttcatctccttgtcgatacccgcatactttcagcagtatgaacccagctccaacctaatcttgcccagctatcttcttccatatgctgcagcgtcaagtgggccagttcacacagccagcagcgggtgccaggcagcaaacaagagcgcggtgtgtacatttggacagatcccaaatccctcgaggtggatcctgctacattggaaccctaccgattgccggagaaggtttcgtgctggttcaggtgggcaaagtgtgtcggcatctgaaagctcttaggagtggcggtgaagattctatttattccattggtacctgctatatatatacccatgtaaagttatggtcatgttagagggaacacgttatacgagctatgctatgtaatgtaagtttgtagtaatactacgttcaaataacagttagagattattcgttttgctctcaatctacatggattgagtgggttttaattaaaaaagtcaaatttttttat

SEQ ID NO: 21627 - DNA, 3964 bp, Zea Mays
gtcgacgctagttcgaattatttcgtgctgtacgtgatttggtctacagtttttaaacctagcgctgacaaaaaaaaaaaaaccgaaccagccaacaccagcgatcgccaccgtcccgccggcagcgtccgacctgatcgatccacggccgccgccaacgctcatccgtcccccgagcgatccggcggccgcgcggtgtgtcgtcgcatccccagagctcccttggtgacccacccatccggccacctccactgaactcaacaccgcaactgcttctctgcctccctccttccttcccggacccagtctcccagtcgcgtcgcatgctattcaaatctctcaccctcgccgcaaacgcagtccactgacttctaagcaaccctagctagctctgctccggccggcgcccatggtctcgcggggactcttcggctggtccccgccccacgtccagccgctcacgccggtctccgagacctccgagccgcccgagtcgccctccccctacgccgccgacctcggcctcggaggggacggcgctccgccgcctgacgacgatgcccaaccgcccctagacgatgccgacgacgacccggacccgccgcccgccgctgtccccttcaagcgcctcttcgcctgcgccgaccgcctcgactgggcgctcatggtcgccggcagcctcgcagccgctgcacacggagtcgcgctcgtcgtctacctccacctcttcggcaaagccatcaactcgcttcatgcccatgggcggcatacccacgacctcttccacgatatcaaccagcacgctttgtacttcctctatatagccattggcgttttctttgccgcatggatagaggtttcgtgctggattttgaccggggaaagacagacggcagtgattagatcaaagtatgttcaagtcctcttaaaccaggacatgagtttctttgatacatacggcaacaacggtgatattgtcagtcaagtactgagtgatgtcttgctcattcagtcagctctgagtgagaaagttggaaactacattcacaacatggctacatttttcggtggtcttgtcattggtctggtcaactgttggcaaatagctttattgacattagcaactgggcccttcatcgttgctgcaggaggaatatcaaatatatttctccataggcttgcagaaaatattcaggatgcttatggtgacgcagcaagcattgctgaacaggcaatcttgtacattaggaccttgtattccttcacaaatgagacccttgcaaaatattcttatgctacttcacttcaagcaacactgcgctatggaatccttataagtttggtgcaaggtcttggtcttggatttacatatggccttgccatatgttcttgtgccttacaactttgggttgggaggttcctgatctctcatggaagagctaatggtggtgaagttgtagtagcactgtttgctattatcttgagtggacttggacttaatcaagcagcaacaaacttctattcctttgagcaaggacgtatagctgcatacagactatatgaaatgataagccgttcaacatctactgtgaaccaggatggtagtaccttgtcttcagttcaaggcaacatcgagttccgcaatgtctacttcagctacttgtcccgccctgaaatccccatcttaagtggattctacctcactgtacctgctagaaaaactgttgctcttgttggcagaaatggttcaggaaaaagcagcataattcctctaatggaacgcttctatgacccaaccttaggtgaagtgcttttggatggggagaacataaagaatttgaagctagagtggttaagaagccaaataggacttgtgactcaagaaccagctttgttgagcttgagcatcatggaaaatattgcatatggtagatgtgccacaactgaccaaattgaagaggcagctaaaacagctcacgtgcatgctttcatcagttcactagaaaaaggatatgaaacacaggttggtcgggctggcctttctctgacagaagaacaaaagataaaactttccattgctcgtgctgtgctctcaaatccatcaattcttctactggatgaggtcactggtgctcttgattttgaggcagagaaagcagtccaggaagcactagacattctaatgcttgggaggtctaccatcatcatagctcggcgcctcagtcttatcaggaatgctgattatatagcagtaatggaggaaggtcaacttgttgagatggggacacatgaagaattgttaaaccttgatggtctttatgcagaacttcttaggtgtgaagaagccgcaaaactcccaaagagaacaccgatgagaaattataaagagccaagctccttccaaattgaaagggattcgtcagcaggtcacaactttcaagaatcatcttctccaaagatgtcaaaatcgccatcacttcagaaaacacatggctttctcacattccgaacttcagatgccaatcataactcacatgaatcaccaaatattcaaagccccccttcagagcaaatggcagaagccaggctaccaatggttgcatctgagagagctccatccatcaaaaggcaggacagttttgaaatgaaattgcctgatcttcccaaaattgatgtcccgctgcatcgacagtcgtcaaatacatcagacccagaatctccaatatctccattgttgacttctgatccaaaaaatgagcgctcccactcaaaaactttcagccggcctcttgtcatctttgatagttttcatgctgaggattccaagcagcagcacacaaaagcaccatctttttggaggcttgcagagcttagttttgcggaatatttttatgctctgttaggaagtgctggggctgcttgtttcggttcatttaatcctcttcttgcttatacaatatctcttatagtagtggcctactacaaaataggggtccgtgatgtacatgccgaagtgaataagtactgctcattcattgttggcatgggtataattactgtactagccaacttcttgcagcacttctactttggtataatgggagagaaaatgaccgagcgtgtcagaaggatgatgttttctgcaattctgcgcaatgaagttggttggtttgacgacgaagaaaatagtgcagacatattatcaatgagacttgcaaatgatgcaacatttgtccgcgctgctttcagtaacagactttctatattcattcaggatacatcggccattcttgttgcacttcttcttggtatgttactacaatggcgtgttgctcttgttgcattggcaacgttacccatccttatcatttctgcggttgcacagaaaatgagatattcgtgtatggagaaagcaccctttcctggcagtaccatcgttgttggggaggtgtatgagggggctaagtttgtcgcacttttgacattttctcaggaatggtgctccttttttttatctgtctgatgaactggaggttttttttcttcttatcattatatgtctacggcaccatttcctatctgtttgtagcagcccgttaaatttattaatttgggaagggtctattctgagggaaggagtagagcaataccatgtaacctctgcccgcagttgctggtcttcaaatttatagagaagggggatgttgatgcaagtctgcttggttgagctgcgtcctgtattctagttctagatgaggaaaccctgggctgtgttgatgcaaataatcttttttttttcttgtgagggtatctgattgcatagataccaagtgagcctacatatgcagagcttgatcatagagcatctaagggggtgtttagtttgagaaatggttccatccaaatctaagctgaggtgtgtattatgaatttatttctcaaattttgtgggatgacctcactt

SEQ ID NO: 21628 - DNA, 855 bp, Zea Mays
tttaaaagtgctcccccgccccccagatatatcactcaaatgtagctgtagagagcgggtttgtcgatgtggggataatggtgtcaccgactgtattcgccagacgaagcttgtgctaccttatgtgtgaccaacctgatgcggccctccgtgatgcaatgcaagcgcagatcgtctaccctgattggccaacagcattctacatgcaggcagttgcactatccaagctaaacatgcagagtgacgccgtggacatgctgaacgaggcatcacagctagaagagaagaggcaaaagagcacaagagttccttgaatggcattgccagctcagagaagtggcacgtcttctatacatataacatagattgcacactatgtagtacagtagtatattctccaacctttcccaccctgtaaaaagcgcatagtatattgcgtggtctagaattagaagtaaggagaagtgaactgcagagaagatgctctttgctccctggactctggagccctgtgatggcacttgtgtgataggttcaattttttgggcccatgtatataacatccgttgcatgggagtttagagtataggttgccggttggtcaggagggccctgtcgccgaagataataaacatgttatgtttgtgaaaaactgtctgggtatcgcttccagcagggcatgttagtaagggcttgtttgtatctcagagctaaaacaaaagtgactaaagttttagtcaggctaaagatctaaacattaagagctaagagctaaaagtgactaaaataacaaaaatatatcattcccgtcacttttagctcctaacgaggggtcaaactttagtcaaattgttt

SEQ ID NO: 21629 - DNA, 1073 bp, Zea Mays
gatacaacgaaacagactctaacccaacacaggtgacctggccattagatgattcctgcattacagcatggccacgcatagcctggtctagaaatctagccaggtcagggctacacaagtagccaaacagaccctatagctatctggatgtacggttacatgcctagtgcacactatctacaatgagaagggactgatgatactatcatgtagctaatttatcgatgaactagtgttgtagtgcacgtaaaatgtagtacacgatcatgttatttggaacaggggatttcacgagactatgaatcaagtcaatcaacgtgcatgggcagtgccactggttgagtgccaacaaagtggctagctataccttctgctgtgttctcccaaccaccaataggacaagttggtcttactgaggagcaggcaattgaagagtatggagatgttgatgtcttcgttgccaacttcaggcccctcaaggccactctgtctggactacctgatcgtgtattgatgaagattcttgtgtgcgctacgtcaaacaaagttgtaggagtgcacatgtgtggtgatgatgcacctgagataattcagggaattgcaattgctgttaaagctggattgacgaagcaagattttgatgccaccattggcattcaccccacatccgctgaggaattcgtcacaatgaggagcccgactagaaaaattcgaaaaagttctacagatcaggtagaatctaaagatgaggttgtaagtaagcagtagatagcattttttcctaggaggtgttctcgggggagggagtattcctgctgcaggacgacagctggacggaattttggaatacaccggcagagtagctgaaataacggctaggaatttctgagaaatttcatgttagggaaccaacgatgctgtttaatagaattggctgtacatacctgtccgccgagctattttcctgtgtcttgtacgttgaaataaaatactgcaaatgtttgccttacggtcatgaaattttgcaataaccaataagtaatcaatgcgccttcctaagcgttcgctgtgat

SEQ ID NO: 21630 - DNA, 1113 bp, Zea Mays
tttctctcaaaataaaacctcacccctccttggtctgcggccctttgtcctgtctcctcccacccttgcctccgagtcacctcctcccttggtctccgccgtcgctgcctccttgccggaaccctaaatggaccccggcgccggcgcacactactccgtccgtaccgcggaggaggttttccgcgacttccgcggccgccgcgcgggcatgatcaaggccctcaccaacgatgtggagaagttctaccagctgtgtgaccccgaaaaggaaaacttgtgcctttatggctaccccaacgaaacatgggaagtaactttgccagcagaggaagttcctccagagatccctgaaccagctttgggtataaactttgctagggatggcatgaatgagaaggattggttagcgctagttgctgtccacagcgattcctggttactagcagttgcattctactttgcagcccggtttgggtttgacaaagaggccagacggcggctcttcaacatgataaataacttgcccacgatatttgaagtagtgactggggttgcaaataaacaaaacaaggagaagggccccaatagtaccagcaaaagcaacaaaacaagttcaaaaatgacatcaagacccgagtctcattccaaggcgacaaaagtggcagtgccccctaaggatgacgatgatgagagcggtgaagaatatgaagaggaagagcgtgataacaccttatgtggatcatgtggaacaaatgacggcaaggacgaattctggatctgttgtgatagttgtgagcggtggtaccatgggaagtgtgtcaagatcactcctgcacgtgctgagcacatcaagcactacaaatgcccagattgcaacaacaagagggcaagagcctagcgtcaagccctggtgtgaccctggagtgaaggctgatagaacatattatactcagaggggtagctatacttcaatatgctgatgacaccattatttgtgtaaagcatgatttggagagagcaagggatatgaagtttctgttgtacttatatgaaatgttggtaggcttaaaaatcaattttaatagaagtgaaattgtggtggtaaatgataga

SEQ ID NO: 21631 - DNA, 2033 bp, Zea Mays
accgaacaggtccagccgtccaggcacgtcggcgacgtcatagactcgttgtccagttcttaaggaaagatgagtttgatatcccagaacgcggtccagaagcgctgcctcagaaaaagtgaagctgataatggcaatgatgaggacattggctctccgacctctatagatgcagaagttgggaaggaagcaaaattgaagaatcacaataaggaaaggaagaagaaaaagactaagttgttggaatcccagcagaacaaagaggaagaggagatgcggcagctggagagctcattgtttggttccctttatgctccactagagtttggcactgaggtaggggctgcagtagctcctgaccgggatgcgcctttgtttttcacagataggtctgctggtggtggcatggattattttcctacatatgaggaggatatggcccatgaagatgaggaagacatggtgggtatcaagaggaggaagcctgtatgggtggatgaggaggaagaaatgacagaggtggacattgtgaaggttccaaggttgaggaagctgagaaaagaggaagatgagcatttgatttcagggaaagagtatgaggccaggttgcgtggtcagcatgcgaaattgaacccctttactggctgggctgatatggaccagaaaacttctcttcctgctgcgtcagatggtgagtctgatgatgagggttgtgtcgatgatattcttcggaataatgatgagcttgttgccaaggatactgtcaagctcttaccggggatgctggaattctcaaggctcgttgatgccaatatccaggatccatcaagtggtcctatcaattcagtgcagtttcataggaatgggcaactgatgcttgctgcaggtttggacaagcatctgaggtttttccagattgatggaaagagaaaccccaagatccagagcatatttattggggactgtccagtacacaaggcttcttttctacccgatggctctgaggtgatcctatcaggcaggaggaagttcttctactcatttgacctggtgaatgctgctgttagcaagattggacctttgacgggacgcgaggagaaaagcctggagagctttgagatatcacctgattcgagaaccattgcttttgttggcaatgaagggtacatccttcttatttctgccaagacaaagcagctcatcacaaccctcaagatgaacggaagcgtgcgttcactggcttttgcggatggtgggaaccagctactgagcagcggtggagatggccatgtttaccactgggaccttggaacaaggaaatgcatccacaaggcaacagatgacggttccctggctggcctctcgctctgcacctcgcgggatagctctttgtttgccacaggctccagcagcggcatcgtgaatgtgtacaagagggacgattttctcggcgggaagaggaagccgatgaagactatcgagaacctgaccactgatatcggtgagatgaagttcaaccatgacgcccagatcctggcgatcagctcgaggaaagagaggaacggcatgaggctcgtgcacgtcccgtcgttcagcgtgttccagaactggccggggcctcggtttagtctccactatccacggtgcctggatttcagccccggcagcggcttcctgtccgtcggacatgcaggtggaaaggtcctgctgtacaagctccaccattacgagaatgcatgatgagactaggatggttgcttggcgaaaacccatttttgacattatatttgtactcatgaatactccattaatcgagtgagtgtatgctggtccgttccagtcattgtgcctttctatttggtgccgctggtgtcaatgctttggtgcaagctggcgatctcttacatgtcttttactcttttgtagtcgtacgcaagtcgttgtgctgctgtttgctttattatagtggtggactaagttggttgcagaagtttagtttttttttggcaagagattgcagaatcactgttgtc

SEQ ID NO: 21632 - DNA, 3301 bp, Zea Mays
ggagtttcgagggagtcaggggaacccgcccaaattctcgggtttcagcagcgggaaaaccaaaaacgaaacctatctcaccgcagagtctcctcaccgcagtaccagactccggccgaaccgcacctctgcccccttcctcccggaggctcagggcctgtggcgcacgtctatggagcggatccacgtagcggtgcgctcgcggccgctctccccggaggactcgcggagcagcccgtggaagatctcgggcaacgcaatcgctcactccgcgcagtcctcctcccgcttcgagttcgacaggatattcggcgaggagtgccgcactgccgaggtctaccaggcccgcatcaagcacatcgtcgataacgtggtccgagggttcaatggcactgtttttgcatatggtcaaactaacagtgggaagaccttcacaatgagaggatcggctaatgaacctggaataataccgcttgcagttcatgacttattccagcgtattcaagagcatatggacagagagtttcttgtgcggatgtcctacatggaaatttacaatgaagatattaatgaccttcttgtgcctgaacatcgaaaattgcagattcatgagagtattgagaaagggatctttgttgctggtttaagggaagaaattgttacatgcgcggaacaggtcatggatttcatgtcttttggagaatcccaccggcatatcggagagacaaacatgaatctttatagcagtcgttctcacactatatttcgcatggtaatcgagagtagagaaaaaggcgatgacaatgaagttgaagatttttgtgatgctgtacgagtatctgttttgaaccttgttgacttagctggctcagaacgcgctgcaaagactggtgcagagggtgtgagacttaaggagggttctcatattaacaaaagtctcatgactcttggtacggtcataaagaaacttagtgaaggcattgagagtcaagggggacatgtgccataccgtgatagtaaactgacaaggatactgcagcctgctctgggtggaaattctaacacagctatcatctgcaatataacacttgcacagatccacactgatgagacaaaaagcagtttgcaatttgcgagtagagcattacgtgtaacaaactgtgcatgcgttaatgagattttgacagatgctgcattattaaaacgccaaaggaaagaaatagaagagcttcgagcaaaacttagaaaatctgaaagtgatcattgggaggaagaaattctgaatctgcgaaacacactactgcagagtgaattggaaaaggaaagaatctctttagagctggaggaggaaaagaaagctaaagagcagcgtgacagatgcttgattgaacaggcaaagaaaattgaaaatcttagttcactggttttaaattcagacagagatgacaggagtactgcttttagtaagaacaaaagaagggtaacatggtgtcctggaccaaatgcaaagcaatttgatattgaggatttaagacctgtccaggaaggctctacaagcagcacagttagaaatgaacgggatatgggaatgccaccactttttgaagagttaatgcaagaaagtaatgatgagccttgtgctaacgtttactcatctggacctggtaatgtgtccaaagacagtgaagacgtccctcttcctgactcgcatgctttgctgcatgttaccaacagaagaaagccaaaggcaatgaagaaatcagatcaagagcaattcagggggagagctggtgaactattaataccccaggacccctgtgatgggaatgatgctctacgccacaaaaacactgtgccttgtgtagttagtagcttatcttctcgagaatctgaagccattcttgtcatcaaacaacttcaagatcagatcaagctgctggaggcagagaagagttctgttcaaactaatttggatgctgttcttgtgctggcaactcaacagaaggtttcatttaatgaggagtatgaagagcttcagcagatcactctagctgcagaagaacaagcaaaggttgctaatgagaacctgtccacactatctgctactgtaaaatccaaacaggaactagcatatgaattcctcggtaatttattgatggagactcaaggaataaatgtggagatggatcagtggagaaactcggttgacagtgctctttcttttattgatgaactctttcagaatctctgcatcatggcacaaggcattcgtgaagtaaatcactctgctcatgaagatagtgcacggtcctgttctgtgatcagggactatgaaaaactatcaacctgtttgatggacaaagtttacaaacttgaattggagaagaaactattggaggaacagtcccaagaccaacaaaatgagatttataagctgaaggccaatctggaaagctgtgagaaggccatagatgactgtactcttcaacatgaattggagaaggatgccattcttttagagctcctaaacctccagaaggaagtatctatcttgtcatcatcttctttgatgaaagaaaaggaatctatccgaaaggaacttgatagaactaaatcaaagttaagagagacggaggacaaacttaagaattccattcaggagaaaacaaaacttcagagtgagaaagcagaggcccacaaagaaattaagaaattgcaaagccagagaactttgcttgaacgtgatttacggaaacgtgattcagctactgttgacaaaaggcatgaactgaattccatgccacaggaaagttctggtgcttttggtcacatgcaggagaactaccaaaatcttgagatgcatgcttttgatatggatgctgaaatttattctttacaagaagctcttgtcacttcaattgatgaaaaggatgaagcgttgtctaaagtagggcttataacatctgaactagaagatcttgcgaataaactgaacttagcagaatcagaaaggaactcctttagcaacgagatcacactcttgactgaaaagttaattgcatctgaatcttcccttaaaagtttggagacttctctcaattctgtatcaagggaaaaggaagatttgggaatgcaacttactgatgcccttttggacatggaatctgaaagatcaatttggacagcaaaggagaaagaatatgtagaagctaatcatagattgaacatctgccttgatgagaaccacaaactttcagaagatttgatgaagtgtataaatggattgcctaccttctcttaa

SEQ ID NO: 21633 - DNA, 1572 bp, Zea Mays
aaaattccaaatttgttgttgtacacacggcacaccctaaccaaaacatcctgccgtttcccgttcacccagcgtgcgctccatcttggcgaggccgcgagggcgaccgctacagcagcagccgccgccgccgccagatccccaggccttcgttgaacccttcgccgtaacgagatcagatggctgggtatatgtcaagagggccccaaaatggttctgtgtatgtctgcaatctacctcctggaactgatgaaaatatgttggctgaatattttggcaccataggcttgctaaagaaggacaaaaggactgggcgtccaaaaatttggatatacagggacaaagttactaatgaaccaaagggtgatgcaacagtcacctatgaggatccacatgctgcttcagctgctgtggaatggttcgataacaaggatttccatgggagcactattcaggttcacatagctgagtcaaaaagcaaagatgcattcgataaccccacaagtttgaacatcattggtggtgttggtgaacaagatgaactggataatggagcaggcagaggcagagggcgtggtgatggtccaggcaaggcttggcagcaagatggggattggatgtgtccaaatacaagttgtggcaatgtaaattttgccttccgtggtgtttgtaatcgctgtggagctgcacgccctgctggtgctggtggaactgctgctggtggtggcggtaggggtagaggccgtggtagctctgatgcaagaggaagcagccatgctggtgctgctgttggtggtccacctggattgtttggcccgaatgattggccatgtccaatgtgtggcaacatcaactgggctaagcggaccaaatgtaatatatgtaacacctccaagcctggtaccaatgaaggtggtgtgaggggtggccgtggtggtgggtacaaagagcttgatgaagaagaactagaggaagttaaaaaacgtcggaaagaggctgaggaggatgatggagagatctatgacgaatttggcaacctgaaaaagaaatttcgctctaaagctctgcatactgaaggtgcacaggcacttcctgggtctggacgtgctggatgggaagttgagcatcgtggtcctagtgaaagggaaggcagggagaggagcagggatcgtgttagggatgactactatgaaaaggaaaccaggggcagagatagaggtgatcttggaagggaccagcgccggagcaggagtcgaagcagagaccgtgaaagggaaaggagggagaggagaagagaacatgattatgagagaagggagcgtgaccgggatcgggaccgccgccataggtgaagatagaaataacaaggctttctgttcgtacactgcatttgccaatttttgtagccatgcgacccgtggtcttgtgttagtaactgggggcgtgcgttgttgctctgaatctgatttttgctttgaatgattcgctgcactggcattttattcagatattctgtttcttctgtgattacttttatgtttgtggaacacatatgacactcacggatccact

SEQ ID NO: 21634 - DNA, 1842 bp, Zea Mays
gcgacgtccgacgagtggcgttgaggacagaagacgacgagtggagtggagtaggacacgaggtggttccggccggcccactcgcagaatcttctgccactgcccttccatctcgtcccttagctacaagtcatctcgccgcaaccggaacccgcagccatggggacggaggcggagcagccggacatggacagccaccgaaacgacggcgtcgtggtggtgccagcgccgcgcccgcgtaaggggctcgcctcctgggcgcttgacctgctcgagtccctcgccgtgcgcctcggccacgacaagaccaagccgctccactggctctccggcaacttcgcccccgtcgtcgaggagaccccgccggccccaaaccttagcgtccgcggacacctcccggagtgcttgaatggagagtttgtcagggttgggcctaatccgaagtttgctcctgttgcggggtatcactggtttgatggagacgggatgattcatgccatgcgtattaaggatggaaaagctacctatgtatcaagatatgtgaagactgcccgcctcaaacaagaggagtattttggtggagcaaagtttatgaagattggagaccttaagggattttttggattgtttatggtccaaatgcagcaacttcggaaaaaattcaaagtcttggattttacctatggatttgggacagctaatactgcacttatatatcatcatggtaaactcatggccttgtcagaagcagataagccatatgttgttaaggtccttgaagatggagacttgcagactcttggcttgttggattatgacaaaagagaattactctatttttatggacctccctttattgttccgaccaaaggaaatggtgaagaacggtgagtttatctacaagtttgatcctacaaagaaaggtcgttttggtattctcccccgctatgcaaaggatgacaaactcatcagatggtttcaactccctaattgtttcatattccataatgctaatgcttgggaagagggtgatgaagttgttctcattacctgccgccttgagaatccagatttggacaaggtgaatggatatcaaagtgacaagctcgaaaacttcgggaatgagctgtacgagatgagattcaacatgaaaacgggtgctgcttcacaaaagcaattgtctgtttctgctgtggattttcctcgtgttaatgagagctatactggcagaaagcagcggtatgtctactgcactatacttgacagcattgcgaaggtgactggcatcataaagtttgatctgcatgctgaaccggaaagtggtgtgaaagaacttgaagtgggaggaaatgtacaaggcatatatgacctgggacctggtagatttggttcagaggcgatttttgttcccaagcatccaggtgtgtccggagaagaagatgacggctatttgatattctttgtacacgacgagaatacagggaaatctgaagtaaatgttatcgatgcaaagacaatgtctgctgatccagttgcggtggttgagcttcctaatagggttccttatggattccatgccttctttgtaactgaggaccaactggctcgacaggcggaggggcagtgaagatacggcacctgcagattctgcacacgcgggtacatgttggaagttattgcaggacatgtatatgtataggacaagtttattacacatgtattcgaaccacacattacacaagtttattgcaggacgtgtattcgaaccacacattacacatgtatatgtgtaggacaagtttattacagtcctgattgattgcaaattactcagtctgttgc

SEQ ID NO: 21635 - DNA, 3284 bp, Zea Mays
actggatttgttcgtgcttcacagagtttcaatgcccttagctatgacgacaaaatattggatggtttctatgacatttgtgccactggggatgagcttgcaatgtcaaccataccttctctgatggatctgcaagcactgccattttcacatggaggcaaaactgatgctgtattggtcgacagagcactggattctgagctcgtagctcttgagcagaaggctgttatcatggctgtagaatttcgctcgaaaaaatcagaatttgttgaccgctctttggttcagactctagctaatttagtttccaactacatgggtggaccagtcattgatccagaaagcatgctgttgaagtaccgaaatatgagcagtgcgttgaaagctgatataagaagtgcagttgtacctcttgggcagctaacagttggtttggctcgtcaccgtgcactgctttttaaggttttggcagatagccttgctgttccttgccgattagttaaaggaaggcagtacactggatcagatgatggagctttgaacattgtgaaatttaatgatggaagggagtgcattgttgatctcatgatagatcctggtactcttatttcatcagatggtgctgacctgggtagagaattggaagacagcttagtcgtagataatcaacatgttaacaaagatgacactagcactcagttactttcctctttcagtgaagcttcaagttccatgcacagttcatttgaaaatggatcgcttgaaaaaggatttatttgcaatgctgggcattttggtccatatgaagcaacaactgcccatagtgacaatgatgtgcttgggtctggggtatcaagttcatttgatgagctatcggtcagcacatatgcatgtgaaaacatacctattattcatgaatctaatacagatcataccatgactgaaaaaagcaaagataagtcgatcacatcaaataattcgtcatcatgttcgcctccatcttctgagataggcagtactcctgctgtacgaaggaaaaaggtcaaagacgtctcggagtatatgattagtgctgcaaaagagaaccctcagatagcagaaaggatccatgctgtgttacttgaaagtggtgttgtgccaccacctgacttgttttcagaagaatctaaggaacaaccaaaggacctgattgtttacgacacatctctgtttcaaacaacagatgaaatgataaggacaatgaatgagcttgaatccacagcacacgatggttgtgctggtcttggtccttcattgccacctgatcctggacatgagctccaaacaaagattgttccttatcggatgcctcctgacctcaagcctgtccagggattaggtgtttaccataagtttgatttccgggataacatcaatccctctatacctctctatgaaccaagtccagctcctcaggaaaatccattacaacttataaagcaaatgcctgttacagctgctgctgttgcaacagctgcagtggttgcatcttcaatggttgttgctgctgcgaaatctaacagcgatattaaactagatgtgccagttgcagcagctgccactgctgctgcagttgttgctactacagctgctgttaaccaacaatatgaatacttggatccgggttgtcaattgctttgcttgccaagttcatcaaataaattaatccaaaaaggtagacatgacttgttggatgatgatcagctggaaacaaatcatggacaggataatgcccttgagcgtgaaaaggatttggttcaagcaccccaggaagctgagcgaatctctgataggtcaactgggacagagagtgcaagatctgaaatttctcttgataaaatcgcagagtttgaaatccagtgggaagaacttacccttggagaacgagttgggctgggatctttcggagaagtgtatagaggtgaatggcatgaaacagaagtcgcagtcaagaaattcttgcaacaagatatttcaagtgatgctctggaagaatttagaactgaggtgggaataatgagaagactgcgtcatcctaatgttgttctttttatgggtgctgtcactcgtgttcctcatctttctatcgtgactgaatttctgccaaggggtagtttatttcggttaatccataggcccaataaccagttggatcaaaaaaggcgtttaaggatggcacttgatgtggcacgtggtatgaattatttacacaattgcaccccagtcatagttcaccgagacttgaaatctccaaatctacttgttgacaaaaattgggttgtgaaggtctgtgattttggtttatcacgtctgaaacatagtaccttcctttcgtcaagatccgcagctggaacagcggagtggatggcaccagaaatacttcgaaatgaaccatcagatgagaaatgtgacgtcttcagctatggggtcatattatgggagctctgtacattgctgcagccatgggaaggtatgaatcccatgcaggttgttggagctgttggttttcagcaacgacggcttgatattcctggtggtgtggatcctgctgtagcagagataataaggagatgctggcagactgatccaaggatgcggccatcattttcagagatcatggctactttgagaccattgttaaaaaacatgcctgccaaccaacctaccaggaagcgggcacaacaaacagatgattaagaatatattggtcagtatcagctgaagacacaggccaaagagagactgcattgtacgccaaatgcgtatttgatgaagaacaggtgaattttggtccttttgccttcagcgtttggttctccattggagccagcggaatgctgtctatatctatctgatgaaagccgacccaaataacacagatccatgaagccaaagaaaagaaagggaaaagaaaatttgtgaaagttcgtgcatactatttttgcagacacaatggttactggagtcagaagttgacatgtcatgttgtaacaggatcatcgtcttctgttcagttaggccttatttttgctagtcctcgaactaatggaaaactattccatctttaaggccccatcaaattgtaatgttttactatgaaaaggttggctcacccttgtgtatatcacgtctcaacaaatctgcttttaattgacaggtagattacaaaagaaaattatgccctttgtactaagaatgatcattctttgcggtaggaaaaatgttaaacctacttttgcaaacat

SEQ ID NO: 21636 - DNA, 2448 bp, Zea Mays
atggcatcactatttttatttcacttgacaacagccttgaaaaatggtggtcttcgccatgatatccattactggattggtaaagacactagtcaggacgaagttggaactgctgcgattttaacagtagagcttgatgctgctcttggtgggcgtgctgttcagtaccgagaaatacatggcaatgaaacagaaagattcctgtcctattttagaccatgcatcatgccacagccaggaggagtggcatctggattcaaccatgttgaggtcaatgagcaggactacaagacccgcttatatgtctgccatggaaagcatgttgttcatgttaaagaggcaagttatctgcgtgactgtctttttattcaaatatgggttccctttgctcgatcatcccttaatcatgatgacatatttattctggatacgaagtccaaaattttccagttcagtggctcaaactcatccatccaagagcgagcaaaagctcttgaagttgtgcagtacatcaaagacacatttcatgagggcaagtgtgaaattgcatctgttgaggacggtagaatgatgtctgatgcggaagctggtgaattctggggtttttttggcggctttgccccactccctaggagggcacctgcagaaggcaatgagaaacaagaggaaactgctttcaaattgctatgttttgaccaaggaaagctggagcctgtcaactgcaaatctttagcacatgaattacttgagacaaacaagtgttacttcttagactatggtgctgaattgtatgtttggatgggcagaattacatccttgcaggagagaaagggtgctagtgaagctgctgagaaattgctctctgattcaagccgaacaagaacacctatgatcaaagtgattgaagggtttgagactgttgcattcaagtcaaagtttaaagagtggccacaaacgcctgggttgaagatgtcatcggaggatggaagaggccaagttgcagctcttctcaaacgccagggcttaaatgttaagggtttgatgaaagctgctcctgcaaaagaagaacctcaatcctatattgattgtactggcaacttgcaggtttggcgtgtaaatgataaagacaaggttccactctcatcctctgaccaatccaaattttacactggcgattgctacatatttcagtatacttatcctggagatgataaggaggaatgtcttgttggaacctggtttgggaaaaagagcattgaggatgataaggtaatagcagtctcacttgcaagcaagatggttgaatctgctaagtttcaggctgtccaggcacgcttttatgaggggaaagaaccgattcagttctttgtgatatttcaaagcttgcaagtgtttaagggtggcattagttctggatacaagagatttatcgctgaaattggtattgatgatgaaagttattctgaagatgggcttgcactctttcgtattcaaggttcaggaccagaaaacatgcaaacgattcaagttgaacctgtggcctcatcattgaattcatcatattgttacattctacatgatggaaacactgtgttcacttgggctggaaatctgaccactgcattggatcaagagttaatggaaaggctgcttgatgttattaagccaaacacacagtctaggtcacaaaaggaagggtcagaaacggaccagttttggagcttactgggaggcaaatctgagtactcaggccaaaaaatggtgcaagaacttgaaagtgatccccatcttttctcatgcatcctgtcgaaaggcaatttgaaggtcaaagaaatgcaccactttactcaagatgatttaatgacagaagatgtttttgttctggactgtcacacgagcatattcgtttgggttggtcagcaggtggatgttaaactcaggttacaagctctggatgttggggagaaatttattgtgcttgatttccttatggaaaaccttgcccgtgaaacaccaattttcaccattatggagggaagcgagcctctcttcttcactagattcttcacctgggacttggcaaaatcactgatgcatggaaattcataccagaggaaactcgcaattgtaaaaggtggaggtgctccagcgttggatgagggagatggtaaaggtgttcatactgtggccactagtgttgaatctctgactataaatgaagatgtaaaagaaaacgagccagaagatgaagacggccttcctatttacctgtatgaacgtctgaagaccacagctgttgatcctgtcactgaaattgatgtcacgaggcgagagacctacttatcttcgactgaattcagagagaagtttgggatgacaaaggaagcatttagcaagcttccgaagtggaagcggaacaagctaaaaattgctcttcaacttttttag

SEQ ID NO: 21637 - DNA, 1137 bp, Zea Mays
gctgaatattttaaaaggacatgtgacgtcgatatatacagctgaatattttaaaaggacatgcaacgcgagtaaaagctgatgcggatggcctgtcaaagagactcgaagcacttgaagcttacaaaaggaaacttttgggtgagaggttggaagactgctccattgaagagctgcacagtttggaagtcaagcttgagaagagcctgcattgcatcaggggaagaaagactgagctgctggaggagcaagtccgtaagctgaagcagaaggagatgagtctgcgcaagagcaacgaagatttgcgtgaaaagtgcaagaagcagccgcctgtgccgatggcttcggcgccgcctcgtgcgccggcagtcgacaacgtggaggacggtcaccgggagccgaaggacgacgggatggacgtggagacggagctgtacataggattgcccggcagagactaccgctcaagcaaagacaaggctgcagtggcggtcaggtcaggctagcagctacctcagccacgcacaggcccaatcaacgcaagctagctagctgagaataatcttttagatctctggtagtgtggagatcgagatgcaagccaagcaatgtgatatcgcgttgtgtgttaccaacctgtcagtctgtgtatcatcccgtcccgtccgtcagagtctcagagaacgaacacttcttctccctgtagctagctgctcctgcttgtgtccagatcttctgttcgatcggttttgggagtagctagggagtgggtgtcgtgtccattgggcgacgcttcggccttctgcaaggaggcttctcgagatctctggtggtggtccccgcacggcgcctgaaattccatgctgacacgtgcatgcatcggaccggaggcagagtcacgatctcttcgccttcggaagcgatgggcttataaccgtccctgggctgaaaggtaaaaggccctctacttcctttgtaggcgatgggctgttgttgcaatagttctatgtaggtaagggagagttgtcccgtgggttggtatcctctaccgcaaaataaaccgatctttagaatcacctcacgaagtcaatattttatagaaaaactataatatctataacaccaaataaataaaat

SEQ ID NO: 21638 - DNA, 418 bp, Zea Mays
aaccgcccacttccccaaaacctgccacgcttgaacggctctcaatcccaaccctaacagcaccgtctctcggatctgatctgatctgatcctccaattcgttcgtccacgtctcgccatggaggacgaggaacttgttgatcagaagaaatatcttgaggaacgatgcaagccgcaatgtgtaaaatcactttacgaatatgagaaatgcgtcaagagagttgagaatgatgatactggtcacaaacactgcactgggcaatactttgattactggtcatgcatcgacaaatgtagcactggaaatttgacttctcttcaggatgtgtttggttcaagtgtgtggatgtgtttggttcaagtgtgtgagaaaaaaactgaaagttgtttgatttaaactattgtaagttatctattg

SEQ ID NO: 21639 - DNA, 340 bp, Zea Mays
cgtcggcgtccaggtcgggctgcgagagcgcccgaaggtccaccacggggagcagctccgtcgccattgggtatccgccggggccggggccgggtcgtggattggattggagagggtgaggtaggcggcggaggactgaaggaggaggagcggggaccgatccgagcgtgtcgctcgccgaggagactagagcagggtgggatcggcttgggttgttggggtgtcccccagttccagttccacttccactcccacttccactcccacttccacttgaccacttccacctcggaggaggcggagtggcggacgccgggcgcccgggcgtaactgtttcgtt

SEQ ID NO: 21640 - DNA, 378 bp, Zea Mays
tgccaccgcggggtgctcgtctcatctcgggcgtgtgcgacggtcggcgagcagcaatttctcgccgaactttgacttcgccgcacaactacgtatcgtcgtggattacgccgataccgtctagctccccgatgaacaagtgaccgaggacccaggtgttcagtaggtggaaattgcggagcaggagctcattgaaggcaagttgtgcccttgatcacttctatttacccaataatgttcatgttaatcattatgatctgtataagttaattttgatgggacccaataggtcaccctaggttgactatctttataccttgtgtaccactgaacttttaggtagtacctgctattgctttatgtggttttggatacaca

SEQ ID NO: 21641 - DNA, 2391 bp, Zea Mays
aactctaccaaaataattagttttaaattttgttttaaaaaatagaaataaaaaaacccaccgcgttcgtgcgtccgtggagagggacggagaccagtcgcccgccgacccgtgcgtctccactcgtccacgcgcaaatccccttcccaccccctgaccagaccaaaggcagtagcaactagcaatgcagcttcctcctcgtcttcctcctccacctcagctgctcatgctcctcccagtcccctcctcctgcccccaatcctcttccgcccctccctcgggcctcttccccatctcctgatcacactcgctcgcgcgccatgggcggccgcgcctcccgccaccgcgcgcagccgcacgaccagtcttctcaccctcctcctcggccgccgcccaagcagcagcagggccagcagcaccccaacaaccgccccaacaagcccaagcagcagcagcagcccccacctccacgtcctccgccgccacaccaggctccccccgccgcctcccccgccgccccgggcgcggccaccgtcggccgcgtgctgggccggccgatggaggacgtgcgcgcgtcctacacgttcggccgggagctgggccggggccagttcggcgtcacctacctggccacgcacaagcccaccggccgccggtacgcgtgcaagtccatcgcgacgcggaagctcgcgcacagcgacgacgtcgacgacgtccgccgggaggtgcagatcatgcaccacctcacgggccaccgcagcatcgtcgagctccggggcgcctacgaggaccgccactccgtcaacctcgtcatggagctgtgcgagggtggggagctcttcgaccgcatcatcgcgagggggcactactccgagcgtgccgccgccgccctctgcagggagatcgtctccgtcgtccacagctgccactccatgggggtcatgcatcgggacctcaagcccgaaaacttcctcttccttaacaagagggaggactcgccgctcaaggccacggatttcggactctccgtcttcttcaagcccggcgagcagttcagggatcttgtcggcagcgcttactacgtcgccccagaggtgctcaagcggcgatacggagctgaggcagacatatggagtgccggagttatcctctacatcctgctatccggcgtccctcctttctgggccgagaacgaggatggcatatttgatgctgttttgcgaggtcatattgacttcgcatctgatccctggccttccatatcgaatagcgcaaaagatttggtcaagaagatgctgcgccaagaccccaaggagcggcttactgctgctgaaattttgaaccatccatggattagagaggatggagaggccccagacaagccactagacataacagtaataagcagaatgaagcagttccgggccatgaacaagcttaagaaggttgccttgaaggttgttgctgagaacttgtcagaggaagagatcgtgggcttgaaggaaatgttcaaatccctggatactgacaacagtgggacaataacgctggaagaattgagagctggtttaccaaagctcggcaccaaaatctctgaatcagaaataaggcagttgatggaagcagctgatgttgatgggaatggcaccattgattatgttgaatttatatcagcaacaatgcacatgaatagactagagaaggaggatcatatatttaaagcattcgagtattttgacaaggatcatagcgggcacattacagttgatgagttggaagaagctttgaagaagtatgatatgggcgatgaggcaacagttaaagaaattattgctgaagtagacacagatcacgatgggagaatcaactaccaggagtttgttgccatgatgaagaataatagccccgagattgttccaaatcggaggcgcatgttttaaggctcatctcctacatttaattggaaaaaagaaagacttctaagatatatttttccgcggtcagaggggagagcaactgatactcgaaagtgggattcagcctgggcatatgtgcaatgatattacagactttggacaagtcatcagtcatgggtgattgcctttgtgttgcttccattttcgaccatctcatcctacgatctttccaagttatctttaatgaggtgtgtcgtgtggtctatgtttcctgcctctggatcttttatgtaagagaaacggacttgtaaaacagttccaaattatcatataccaggcgaaaagagcaaatcgtaatcgcccactgcccccttttcaagaacggaacacatgactcctgtgtacatgccaaaacctcttggacagtgagcaggtttgaaacgagcccttccagaacaggaaaaaaaacaacaac

SEQ ID NO: 21642 - DNA, 2093 bp, Zea Mays
cccatcccgccgctaccggcttagtcccagcctcgccccctctccgcagagcgcatccatctccctacctcgagcccaaatcgatgtccagacgccaacccgtccccgccgccgctgcgaagctggaggaaggggagcatgagctgagcatcgtcgacgcgctcctcgaggtgttgtcgggccgctgcgagctgcgacggacctccttcggctctcggcgcctgtaccggcgctttagcttcacctccatgggggcgccgccacagggaagacgcgtgcgctcctcctcgctctccgccaagtgataaattttctcaaatttgttgtgaatatggtggaatttcttgattaatgtcttggcgtggggattcagttgcctgggtaccagatatagcgatgagcgaaatttaaggccccagagaattgatttttcaggttatatctgatttgactcaaggtagggtatgtgtccacttctttttcccctgaactaaaattcatgtttacatttaggttttagttacaaataatgatggatatttgttgctcggaatttctataaaagaattagaaacagtgcatgtttttttatctagatcacatacatgcttacagcttatatacccattgtttgcattgtaaaacaagaatatgtaagccatatagactcgtgatgagattcactcgctattgtctgttcttcagatttcttcatggcttttcagtcctagacacagcaacccctatacttttcttgaactaagtttggaaggtattctacaaaagtagtaagaggattaggttccttaataccttcagattcatgcaccgcactcatatttcatgttcgaaagtggaaactgctcctttggctggtcttgtaacatattctgacaaagaaatgttcctacattgtatgaggttatatatgctaggctgctagcaacctttatgttaaccctttcatacttctgttatagtattcattaggacaacagtcactcaaaatcattacttcattttcatttatcatttgttactctgatctcatatgggctaccttttttggaaataatgctggtgagtttcaaacctcattggaatctattcagaattcactagcagatgggttgctaaaactgacagaacaagtaacttctgacaatcggagtattgcatctttatctatatgtatgcacatttggttgaaattctatgcagtgtcaacaggtacacactttacaagattacattttcattacaagatgcttgattgcagccaatattttcatttctttggtgcttgtgtagaagtatcgccttgcaaagtatataccagactctcatgctaaaggttttaaggacgacaagaaagtttgagtgattccctctcgaacatggattatgtaccatattctgaaatgtgtttagaggattgcaaatcaatgaggcactaaagatgcaactggaagttcagaagcggctacacgagcaactggaggtatttgaaggtgtttgagataaataatgatgctaaaatgaaaaggacaatgcgacgtcccctaccatctggtcgtgttagttctacacatgctgccatgtgggctacaagtgcaggaattgcaggaacaactttgctggcctctcgaaggttagcgctatgtcgtggtgctccactttaaagatgtgcatgccacgtctacacttcccgtctctgattatagattaggtctttactccctgatgtttagccagtgcgtgctgttacccactaggtctagccgtagtcagtgactgcacaaccacaacccgctcttgtgtattttgcgtttgcggatcgcatcgcatgttattttggtccttctatattcatgctacaaggctgcaaactgtggtgctcatacatttatgtaaccagtaacctataacgactttgatgtatattatattttgtaacagtgaacttgactatcgtagatatgtagcttgctggaacgattttttagtgtacgactgtgctacaatgactgtagcgcccggtagggcgctgccctattctagtagaaataaaggaggaagtcccttgatatata

SEQ ID NO: 21643 - DNA, 2005 bp, Zea Mays
cccagtccagacgtcgccgtcgtcgccgcccgaacccgatggacatccgccgcgggccgccgccgccgcgcaccgcgtcgggcggggtggagccgcggttccgccaggtgggattcgtcacggccgccgagcccgcgcggggggccgccacgccggcgcccgcgtcgcccgccgcgtccgacggcctctcccccgtcatgatcccgcccccgctcatccccgtccccgtccccgtccctgtcgcgcccgcttccgagtccctcgcgccttcttccccgcccccggactcctcgtctcgccccgacgccgtctccgaccttgacgacgacgacgacatcgacgtgtcctgggcgcgcccacccccgcccgccttcccagaaccaaacaagagacaccttactgaaagaaagaatgagcatgctcctccgactccagtttcgcagaaaccaaagctttctaaagcagagagacgtgccattcaggagtcccagcgtgctgccaaagccgctgccaaggaggcaggtttgaaatcaacagccatggcttctgatgctaacaccaagcaacccaaaacagcaaagatatctctgaagaaagatgtcaaccaagttaactctccagttgcttctgataagaagactggtgaacgaccgcctgacaaagatagaaaaaaagatgctcctcaaccccgcatgcaatttgacgatacacatcgggtggtgaaagcaaagaagcgttcagttgttagacaatcagaagctcaaaacagggtcgaactgttcagacatctgcctcaatatgcacatggcactcaactacctgaccttgagtcaaaattttttcaacctgatctgatgcatccttctgtgtacaaggttggacttcaatatttgtctggtgacatatctggtggcaatgctcgctgtatagcaatgcttcttgcattcagagaggcaataaatgattactccatgccttctgaaaaaattctgaatagagatcttactgctaaaatcagtagctatgtgtcatttctcatcgagtgcagaccactttcaatcagcatgggcaacgcaattagatttttgaagaacaggattaccaagctaccacttgcattttcagagtcagaagctaaagttagtcttcaatctgatattgatcgctttataaatgagaagataatagttgcggataaggtcattgttagtcatgctgtcacaaaaatcagagatggtgatgttctattgacatttgggtcagcctctgtcgttgaaatgatttttgataatgctcatgaacttggaaagaaatttcgtgttgtggtggtcgactctcgtccaaaccatgagggacaaggattgttgcgccgattagttgcaaagggtatcagttgcacatatacacacataaatgctgtatcttacatcatgcatgaggttacaagagtgtttttgggtgcctcttcagtactatcgaatggtactgtctactccagagttgggacagctttggttgcgatggttgcacatgcttttggagttcctgttctagtgtgttgtgaagcgtacaagtttcatgagagggttcaactcgattctatatgctttaatgaacttggtgacccagatgctatttcaagagttcctagggatgaaagtttgagcaatctcaaaaactgggctgagaatgaaaatcttcatcttctgaatcttaagtatgatatcaccccttccgattatgtttcaatgctcataacagattatggaatgctcccacctactagtgtaccagtcattgtaagagagtaccggagggagcacgtttggatatagaagccaccgttttcctttctggttttgtttgaggtatgataatctgaacagcttttgctgcctaagtgttagtggaatggtaagggggtggtgtgagcataccagcaaatgtttatatctcagttttgcaaccatcaaattggtttggaaaaaaaaaaaaaaaaaaaaaa

SEQ ID NO: 21644 - DNA, 122 bp, Zea Mays
gccatcgttaccgacaaaaatgtactattcaacaatgttgaacctcacttccattctttggaagaaacttacggaaaaaagataaaactgatcacctccagggcaaacgctaaacattcaac

SEQ ID NO: 21645 - DNA, 3855 bp, Zea Mays
ccccaccaaaaaaaaaaaaaaactccgacgccttgggccgttggacgcaactcgcgagccccccgaaagcaccgcccgctcccacacccggcacgaggcggaggcacccacacccactccggtcacccaacttgactcgccctccccctacctccgtcgctcttcccgtgaaaccctccaggatccaacgaaaaaggcgaaatctccgaaccacaccgccataatcacacacgccaaccggcggcccagggccggctttcccccctggttccctcctcaaatggcctagcggaggcgggtgtctcttttctttcccctcgcgtcgcgcctcagtgagggcaaggtagagtggcactgggaaagacgcgcgccgtgccgcctcgcaatgcccgctcccgaccgtgccacggcggggggcggtgccgggggccacttccgcggccacgcgcacctcaccaactgcatccacctgcgccaccaccacgcgcacgcgcacgcgggagcgggaggcgcgtcgtcgtcgggccggaggcggagcccggcgtccgcgtcgctgatgcgcgaccttctcgcgctgcagcgctcgcgatcgctccgggacccgtccacgcgccgctccgtcgagtcgtccagggtggcggccgaccccgacgatggcaccgacgacgacgacgacgacgacgccgatctccccgccaagtcccgccgcagcgccggggcgctcaagacgctcctggaccagctagccgagaacccccatccgaagcccggccgccgcccgccccgccggttcaaacgtcgggcaggccgccgcgccgccgctgccagcaagcctccagaccgcgcggccgcgctctccgtcaactccagctcccaggaggccgtctgcggcaacaaatacctgttccatggcggcggcggcggcgacgacgacggcgatggcgtggtggagctgcagcagcatttgccgcaggactcgcgcaacgtctgtggcattccatggaactggtcgcgtctgcaccaccggggcaagtctatcctcgacatggccggccgcagcctttcgtgcggcctctccgactccaagtcggcggcggggcgaaagtccgaagcgcccgccgcctcaggtgtccgtccccttttccccgttaagtccgagaggctggcttcgtcgaccagttcggactcggacgcgctgcccctgcttgttgaggaggctgccacctccggtgctcgcaaacgcattggcgtcatttcttctggaagctactccggagagcttgggattttctctaaccagacaagcgagatggactccgacctgctgtctgagtctcagtcggggcacaagtcactggcctcgcgctcgcagcatggccgtgggcgtcatcgtagcctgacacagaagttcgcaccaaagacgttcaaagacgttgttggccagagcttggtggtgcaggcgctgtccaacgccatcctgaggaggaagattgggttggtgtatgtattctatggtccgcacggcacgggcaagacttcgtgcgcccgtgtctttgccaaggcgctcaattgcctctcctctgagcaccccaggccctgtgactcatgcacgtcgtgcattgctcacaatctcggcaagagcaggagcctgatggagattgggccggttggcaacatcgacatggagggcattgtggacgtcctcgataatgtgatgctttcacctgcaccatcacactacagggtgtttatatttgatgactgtgatactctgccagctgacacttggagtgctatctcaaaagttgtggaccgggcaccccgtcgagttgtgtttatccttgtcagtccaaaccttgaacttcctcacatcatcctgtcgagatgccagaagttctttttcccaaagctgagggagtccgacattgtcaatacattgcagtggatttgcaccagcgagagtctagatgttgataaagatgcaatgaagctaattgcatctcgttccgatggatctttgagggatgccgagatgactcttgatcaactcagtttgcttggacaaaggatttccttgtctcttgtccaagaattggttggtctggtgtctgatgataaactggtcgatttgcttgatttggctctatctgccgacatggtgaacacagtgaagacactacgagacatcacagaaaccggcgttgagcctttagcactgatgtctcagcttgccacaataattactgatattcttgctggttcgtatgcatttactcgagaaaggcccaggagaaagttcttcaaacgtcctaccttgtcaaaggaagatatggaaaaactacgtcaggccttgaaaacactatctgaagctgaaaagcagttgagggtttctagtgacaagacaacctggcttacagctgctctgcttcagcttgctcctgataagcagtacctgctgcctagttcatcaactagtacaagtttgaaccatggtgtgctggttggtccctttcctgataggggtgtagggagggccccagcagttgagaataaaggtaacctggcaggcacgtcttatggggaaaagagaactgttgaacacacagaaaatggtcatgtgttgtcaaccagttctgtcagagcaaatgagggaactaaactcagaaaagcggaaaatgaaatggtctggcaagctgtgcttgagagtatccaatcagatacattgagaaaaatgatggctaaagaggccaggctaaactctatcagccttggaacagaaccaacagtgcaactaataattagctcacatatcagtaagtccaaagccgaaaactacagagctcagattctgcaggcatttgagtccgttcttcgttctgctataatacttgaaattcgatatgaatcaaagaatgatgcaaaaccaggtcatactccatcaatgtttccttaccctgagaatgactcgacactgaggaggtcctttactaaacatagtccactctcttctggagaaggtgaaataattgaagttggaccttctcgcatgcattggcatgctcaaacaaataatgatgttcttgacgtaaatgaaagaagaaaggagaacacatgggaggaagaaacttcgtcatcaccaaaccaagagagcgtgactaatccaaaaggaagaaatgggaacagacagaatcgacagaacagcatagtaagaggaaaggtatctcttgctcatgttattgggagggctgaagcttgttctcagcgaggaggctggtctagacgaaaagctatatcgattgctgaaaagctagagcaagagaatttgaggatggagcctaaatcgagtctactttgttggagaacctcaaggactcgtcggaagatgtattgaagagaccatggttaagcatgtaatttcccttgatggtagtttaagtctggatagttccgtaatctccttttacgtgacatctctcttcaattaaggtcaggaatcgaagatcacgcaccatatcaaggctcatattgtgtggaagatgcatttcgaccaaatctccaagatagaagaatttgaatcgtagaatttgcaacctgttaacttagcattcataatttattctgtctgtaccttgtaggctgtagccgtgtcagtttgtagatccttctctctctctctctctctctctctcaattctgtatatttcttgacatgtaaaaaacgacgatagaagtgacatagtaaattcttctttcaaaatgctctgtaatttttttataggaagactagaataaaaactttgtattcggaagtctctgataattgataaatgtccttagtctccatagacactgaac

SEQ ID NO: 21646 - DNA, 3073 bp, Zea Mays
cgcgggtgtgccacgccgcggcccgcgggcacgccgcacgaggtttctcccaccgtcccgcccgccaggcgccagccagctcgagcgccgcacgccatcgtttccgtttccacccccaggccgtgccagggagtcgagtcgagtcgagtcgggcgcggcgcggcgcgggcgctgggacggcgacgagacgagacaccgcccgtgaggaggagtgcaggaccaggcagcgccagcggctccgggctcggctcttgcgtgcgccgctcgtcgtgaaggattcgtcggtggaggtagcaggagtccgcagcaacaagatgattgatggcaggcggcattcggtggacatccccgtctcgagggccctgttggccatcatgcggtccagatccctgagggacccggacaccaactcactggccaagttctccgccaagaaaaccatctgggagggcagctccctcgacgaggacgaaatggagggggcgaacaacaagaatgcctacggcaggcacagcttcagctacaacgcgtacgatcacctccagcggaggagggaggagttcggtgacggcctcaggtctggccggctcgccgactcgcccatcaacatcatcaaggccaatgccatggccaaggcggcgctccacaaccagagctgttgctcggccatttccgggatgtcgaggagcacaaaggacagggcctttggcttggtgggtgatggggaggagattggccggagggaggccagcacgttccaggagagctccaggagtttgcttcagaagtaccggcccagatctttctccgagcttgttgggcatggtgttattgctcagtctctttcgggtgccgttttgaaaggaaagcttgctcctatctacctcttccatggtccgcacggcgtgggcaagacgtccacggctagaacgtttgcagcagcgctgaattgccgttccccaggtgagaaccagccatgtggacgctgtgacgagtgcatgcccatattctcgggaagcagcagcagtgtggtagagattgatgcttccaaacttgattgcaagtctagggtcgcggccttgctcaggaatgcctgtgaagtccttgcctcttcacacttcaaggttctgatcgttgatgattgccagcacatggacaaggagggatggtactctatctacaatagccttgaagggattcctgagagcacaatctttgttatgatcacatctgatattgaaaagctaccaagcaattccatagggtggtgccagagctacaggttttgcaagatagatgacgcagagattgcccgcaggttgatcaagatttgtacaaaagaagggatggaattcgaagcggaggcattggaccttcttgctcgcaaggctaacggttccattcgagatgcaattcaaatgcttgaccaactaactctacttggaaagagaatcagcaaatcagtgacacatgagctgataggtgatgtgtcagacgatgaattgcttgatcttctcaatctggccatgtcatcagatgctgctacaattgtgaggagggccagggagcttttgagctcaaaagtcgaccctttgcagctattagctcagcttgcgaatcatatcatggatattttagctgggaagcacccgtcagattcttcagaagttagaagagttaccggcaaacatacatctgctgatgtggatgtacacaaacttaggaatgcattggaaatactctctgaaactgaaaagcaattgaagaccacaaaaaaccagtctacatggctcactgctgcactgttacagtttaatatgagagaaccctactgtctagatgatactgcggtttcaagcatgtttactgaaagtcatacagatgatgggactgcagcactgaaagatgaaagcttagacacgagttcccatctttgttcccagaacaaaatcagttctctagacatgaatctgggagatccagatgtactggagacgatatggatgaaagctcttgaaaactgctcgtcccctccacttcaaaatctactactcaaggatggaaagctgtcatctctgtacacaacccaaggtgtggcggttgctgagctacagttctgccatcctgaggttgtcccaacgtcaaagaacttctggaagccactatgtgcatctctgcagaatctgctgaggtgcagcgtcgacatccgaatcaacctatctcctatctccggcaacggggcgggatccaaggactcgtccgtcagccttgtcatggagtcaagagaagaagaccgcgaggcacaggacccagccacctcaaactgcagaaccgtggtgtcatccgggagagactgcccttccccacccttggggcaggccaaggagagatcgtcccacatcctggggtgcctccatggcggcgcgggtggcgacgccgtggacaccgagccgaggatcctgagctaccagaagatctccgttgtccctgcagcatccaccccaggaaacactcccctgaaagccgctgccgccgctgccggagacgagtcaaaggttgatgatggcggggttcgtcctggctgctgctcgcacattttaccctgtggtgcttgcgctccccgtcagaagccccggacgcgggagaaacgccgtgccaagctgttcagctgctgcttctgcaagatcggaccggactgcaaggcgaagggggaagcagggtagtttgcagcagattagggacagagcaatcctctgctgttagttcaagctggagatgggggcagtagttcagactgtcaagtgtgaccacctgtttactgtagctcgcctccgatggggtggtcaaagacacagttacatgtgcatcggtcgctaacataaaggttattttgtagtcggatgcttaaattttcttggtagcataccatatttataattgtatgtttgatggcgcgcgttagttttaccgaaagcttaaatggacaggtctcgctatttaaggataatttgagaacttaaatcccctctgagattattagaggggttgaggagaattcatatctcaatcccgg

SEQ ID NO: 21647 - DNA, 4672 bp, Zea Mays
tacaagagggagccgtgctattttctgcaacagtttattcataaataatgtagcatggagcttcatcttggcgtaagtgaaagggttgctgatataaaaacacggacctctgcaatgaaatgtctcactgccttctgtgaggcagtgggtcctggatttgtgtttgagaggctttacaaaataatgaaggagcacaagaatcccaaggttcttagtgagggtattctttggatggtctctgctgtggaagactttgggatctccaatttaaagctaaaggacatgattgatttttgcaaagacaccggtcttcagtctagtgctgctgtaacaagaaatgctactataaaattaattgggatgctacataagtttgtgggcccagatattaaaggctttttaagtgatgttaaaccagcacttctaagtgccctcgatactgaatatgagaaaaatccttttgagggtgctgctgctgctgctccgaagagaacagttcgagttctggataccgcatcttctgtatctgctggcttgtttgatgggttgccacgagaagacattagtgctaagataacacctactttactaaaaaatctgggcagtccggactggaaggtagcggcctcttttaatttatttgatttactttgcaagtgtcttgtattttatttgtgatatttgctattatgcttatatgtgaattgataggtacgattggagtccatagatgcagtcaccaaaattgtggaggaggctaataaacgtatccagcctacaggaacagctgacctgttcagtgcacttagaggccgtctttatgacagcaacaaaaatttagtaatggcaaccttgtccactattggtggccttgcatatgctatgggaccttctgttgaaaagtcaagcaagggtattttggcagatgtgctgaagtgtcttggtgacaataagaagcacatgcgagaatgcacattgactgctctagattcatggattgctgcagcccaacttgacaaaatggttccatatattatagtgtctttgggtgatcagaaaacaggttcagaagggcgaaaagatctctttgattggttgtctaagcacgtttctaaaatgagtgatccatctgaggctttgcctttgttgaagccatctgcatcttctttgatggataaatcttctgaagtccgcaaagctgctgaatcctttatgaatgaaattctcaggatctgtggccaagaagtggttggaaggaacttgaaagatttgccatcacctactttggctattgtatcagaaaggctgaaactgtctactgtacatgaaggattttctgaatctgttaagatggtgacaacaagcatgagtttgccatcaaaagctggtttgaagaacaataaacatggtcttaatgatcgtggttctaatgtgggcaaacttgtgtcccaaagaggacttcccgccagggcatctgttactatggtttccacccaagaccctgcacaatcccaagcattatttaacataaaggactcaaacaaggtgagcaatcatcaggccctgcaacatctctgtattatgaacaggtctcatacaagtttacttattgatcaggaagagcgggagagacgtgttttggtaagaaaattcaagttcgaagaaccacgtcgtgaacagatagatgaactaaagattgatttgtttaagcatttccgagaagatgtaagcctgcgattatggaactcagactttaagaggcaaatcgatggtattgaattgctacaaaaggcacttccttcaagttggaaagaagtgattgaacttcttgacatattattaaggtggtttgtcttacgcttttgtgaatcgaacacaacatgtttgttgaaggttcttgactttcttcctgagctttttgatattttaaaagaccagtcatacatgttgacagaagctgaagctgcaatttttcttccttgcctcatagagaagtctggtcataacattgaaaaagtcagggaaaaaatgggggagctgataaagcaaatgatcaacatttactctcttcccaaactaattccctatatacttgaggggctccgctccaagaataaccggacaaggatagaatgtgttgatattgttggatatttcattgaccatcatgggaccgaggttggtgggttgatgaaaaacttgccatctgttgcagcactgacagcagagcgtgatggtgagattaggaaagctgcccttaatacgcttgcaacagcctacaagaaccttggggatgatgtatggcgatatgttggaaaactctcagatgcccaaagaagcatgctcgatgataggtttaaatggaaggcaagagaaatggataaaaggcgagaaggaaggcctggtgatgcacgagcagctctgaggcgttcagttagggagaatgggtctgatatagcagaacaaagcggagaagtagtgtcccgtccagtggctggatcaatgatctcaagatgctcatatggataggcacatggtacctaggcagattccaagtacaagtggtcctgtggactggcgcgaagctctcgagatagttgcattaggtttgcctgagcagtccgttgaaggtatgaaagttatatgccatgagctaacacaggcagctgaccctgaaagcacattgcttgaagatcttattaaggaagctgacagattagtgtcatgcttggctgttatggttccgaaaaccttcaattttagcttatctggtgcttcttcaaggtcttgcaaatatgtgttaaacacactcatgcagacatttcagatcaaacgtcttgctcatgctgtgaaggagggtacccttgacaaccttattacggagttacttctttggcttttagatgaaagggttcctcttatggatgatggcagccaattactcaaagcactaaatgttttgatgcttaaaatcttggataatgctgagagaacatcctcgtttgttgtgctgattaatttgctgaggcctttggacccttcaagatggccatcgcctacaccaacggagtctcttgctgtaaaaaatcagaagttttcagacttagttgtcaaatgtttaattaagttgacgaaggttcttcagagtacaatatatgaagttgaccttgatcgaattcttcagagcatccatatttatttacaagaacttgggatggaagaaatacggagaagggctggtgctgatgacaagccattgagaatggtcaaaactgtcttgcatgaacttgtgaagcttcggggaacggcaataaagggtcacctttcaatggttcctatagatgctgaacctcagccaataattctagcatacattgatctcaatctccagacccttgcagccgctagaatgttgacgccatcggggcctatgggtcaaactcactggggtgatgctgcatcgaacaatccaaatccatctactcactcagctgacgcgcaattgaagcaagagcttgctgctattttcaagaaaattggtgacaagcaaacatgtaccattggcctctatgaactgtatcggataactcagctctacccaaaggttgatatatttgctcagcttcagaatgctagtgaagcgtttagaacctatatcagagatggcctagctcaggtggagaagaatgcagcagctggaagaatgccttccagtcttccattatccacgccgcccccaatagcagcaatacccaatccaaaatttgcaccatcccctgttcacacaaaatcaatcggtaaaacagattataacgaagataatgccagtggtgagacacaacccttcagaggtcaaggtgccatcaccgaccaacaaactgatagataccatacctcaggtcgccatcctactcagcctcgatgctaattatatgctatcaatgtttatgtgatctgattattggaatcattatttctgtaccagcaggcacgttggatgctcttagggaaaggatgaaaagcattcaagcggcagctataggtcattttgacggtgctcaggctcggccgttggcaagtatgaacggaagtaatatggtgcatgggggaactcgattggacggtgaaccccaacaacgaagtaatataccacccatggatgagcgagctctatctgggctgcaagcacgaatggagagactaaagagtgggtctatggaattacaatagatacgataacaattctgagaaataccaactattgtagttctttgtaaatttgaggcatagtgatggtgttctttgtagataggtatttgaatgtcggaagaactatatggcacggggtcaacatttcgtaacccatgtgtcaagccattcttgcagagcctttggatgcagttttagataagaggtagccaaatgttttccttgttgctactccaagggctaattagtgttgacacattttgccgtactgtattggttttcctgtggtgtacagcaatagaatttttcattctaaattaactggaaatgttacttgtgaaatatatggtttttgaaatgcatatccgtatggtttcacatttatttgattatctgaatgggattttgattggctactgttcttgtcaaaattgaactacagtttagaaagaaatgtgttcac

SEQ ID NO: 21648 - DNA, 75 bp, Zea Mays
ctttgtgcttcaatgcttctgttgactagacttgcagttcagtagctatatttggctttcctttgatctctatca

SEQ ID NO: 21649 - DNA, 614 bp, Zea Mays
cccgactagccggaccgcgtctacgcagctcgtagccgtcggccgtcctctccgcagtttctagtagagtaagggttgctgtaaggcttaggcctaggaatgcagaagagttggcggcagatgcagattttggtgattgtgttgaacttcagccagagctcaaaaggttaaggcttcgtaaaaataattgggagtcggaaacatacgaattcgatgaagtgcttacagacttctcttctcaaaagcgagtgtacgaagttgttgcgaaaccagttgtggagagtgttatggagggatataatggtacagttatggcatatggccagactggtactgggaaaacttttacactggaaagacttggtgaagaagacactgctgctaggggaatcatggttcgtgcaatggaggatattctagcagacataacacctgggactgattctgtctcagtatcatatcttcagttgtacatggagatgatacaagatctccttgatcctgtaaatgataatatagccattgtagaagacccaaggactggggatgtttcattgcctggagccacagtagttgaagttagagatcaaaaaagctttgtggatcttctaagg

SEQ ID NO: 21650 - DNA, 1248 bp, Zea Mays
aggtaacagatttccatgaaaatgaaggagactatgcaataaaacgcagccatcttacatgtttacagatagggagcatcgtgagccatttgaatactcagaggatcttacaagcttgactgttggggcagaggatccagaaaatgtaatttctgcccaaagatatcaagaaaacgataatgatcttttgctaagtacttcagataaagaggacaatggtacaagagccagcaatggttcttctacctctgcatacaatgctccttctgatttgattagcccttcattgataagctcccaaacaccagctgaaacttcactagtaaatactggtgggccgacacattcctcacaatcaaacttcagtctcgatgaccttcttggcattggcgttactgaagctcctgctccaacaccaccagcactgacccttaactcgaagcctgtgctagatcctggtacgttccagaggaaatggggccagctagcattggcgctgtctcaggaatgctctttgagtccacaaggagcagcttcattgatgaatccccaatcactcatccgtcatatgcaaagcaattacatccaatgtattgcttcaggtggtcagcctccgaactacaagttctttttctatgctcagaaagatggggctactgctttcttccttgttgaatgtattgtcaacacagcatcagcgaaggcacagctcaaaattaaggctgatgatgggactgctgctgaggcattctcgactttgtttcagtcagccttgtccaaatttgggctttcttgatcctgagtattttgtctgagcgattcactggtccacaatttttttccggcgttcacagttttgcccccactctgccgcggtgccgcctaagcttgtccagtacttgatcaatttgttggagaatcagcgtagaaggtgcgattagagggcaatatattattatcactaaattcagcaagagagcaatggagttttgcggagtaaaatcttatttgtattaattgggtgaactgtgcatttgtacatgactacatgtcatctagataaatagctaggttatttaggattgtgctagtgtgatgccttgacttcttctgaagggccttctttttcttgaaggatgtagaaacaacacacacctccccctttcatgtatgctgtacttacctttctttcttgcacaggtgaccaataaagatgtttcttccattttgattcacattaagggcctg

SEQ ID NO: 21651 - DNA, 835 bp, Zea Mays
atatacaccgaggcccgagccaccgaggaaaactcgagggggaataaaatcccagcggcttcccccaaacaaaacctcttctccgccagagtccgcgtcggccagatcaaacgaatcggcacgacgcatcggcatcgcctccgacgatcttgagacaaacaaaacccaccgctgcggcaactccgcctcccgctgacacggggatcgcctgacaacaggcagagaaaagaggcgcagggtttgcccgcgaagatggaggacgtggacgtctcgcggcagctgaagcagatgacgaacttcatccgccaggaggccgtcgagaaggccgccgagatcgaggccgccgccgccgaggagttccaaatagaaaagttgcagctggtggaagctgaaaagaagaagatcaggcaggaatatgaccggaaagagaagcaagttggcatcaagaagaaaattgattactcgatgcagctcaatgcttccagaattaaagtccttcaagctcaggatgatttggtaacagatatgttggagtcagcaaggaaagagctactgtgcataagtagagatcaccccacttacaagaagctcctcaagacacttattgttcagagtttgctgcgcctgaaagaaccagctgtgcttctccgctgcaggaaggaggatcttcaacttgttgatttagttttggaatctgcaaggaatgagtatgcagataaagcaaaagtatatcctcctgagatagtggtagatcgtcaaatctatctgccatctgctcccagtcattatcaggcacctggcccctcatggttgtgcatcagaatgctcactgttg

SEQ ID NO: 21652 - DNA, 866 bp, Zea Mays
ggcattggtcggacccgcgtggttctcccgtgtcctctctctctagtgtcgacgagtgggcgaacgccgccaccgccttacgccagtcgccaggcgctcaggttttcatcttcgggcccttcaccggcgaccagcacccaacaggctttgatgattgctgtacaaggatgatatggcctcccgcccaaagctgtctggtattcagaagcaggttttggcgctgtacaggggattccttcggacagcacgccttaaggcccctgaagaacgccgcaggatcgagtctgttgtctttgcagagttccgtgacaacgcaaggagtgttgaccgtaggaactttgtacacatagagtacttgttgaggagagggaagaagcagcttgagcagctcaagaatcctgatattactggactcgctacccttgtagtaaagaaatgagcaacagttgtcgaaatttacaggtccattcattgccagaacaaagtatcatcatgataccggtgtttctaatgtgaagatttggaacctgccactgatggtgtccaaataaaataaatatgaccacagattacagatttgatatccagggactttctaatcagcctattagaatctgaagataaatcttgtagcacctgtccggtgacccatagtaatattattttactcttgctgtaagcagaggttaacactaaaaaaagtattgtgattggtctgaactttttgtgcggtataaagcatgtgattcagctcaacttgacttttccaactttaccgagcatatacaattgtgattaatatagaggctcttaaggtgtttaaatgtgctatttacaaaaaaaaatcgtagagtcgtctatgaatt

SEQ ID NO: 21653 - DNA, 2972 bp, Zea Mays
catcccgtgtgaaccactgaacccacgccaaagcagagcaaccacctctctctctctctcccaccagggaggcagggaccggtctccacagtccacacacacacagaggaaccaagtcacgaagacgaagagacaagggagcggttgcccggcgctggtttccctttccccgattcccagttaagcgcagcgatttggcgtctgatgattgcgcaatcgagcagcggcgcggggaggcaacaggacgcaccgaaaagggggcgcctttacaggacacgggcctcgcctttcccttgaatctcgccgcgccgcgcctcctttcgttttcccgcccgtcgcgacctttgcaactgcaaccacagcgagcgagccacggagggggcagagcggagccagaggtctctgacgcggcgcaggatcgcggcggcggaggggagcaagcagaggaggccaagaggtccgagggcctcgccgaagcgcgtgcggcgtagtccgcctctgtccgtccgggtccggcaacggcggcgagatggaggcggccgccgacctgctggagtacgagctgcagagggagatctccggcatcttgattcagaactacgtctgcggtttgcgccaggagtatgagatgaagttgtgggagcaccggaactgcatcagcgctctgaacaggaactgggcggaaaaggtttctgagatcacggcgctgcgagacgagcttcgcgatgttctctgtacttctgaacctgctactcatcatcaccatcaccgctcccacgggagtctagaagacgagacgatcattgcgaagacggaaggtgacagtgagcctccggtaacagagaaatcttctgagtctacgctcgagatcccagatttttccctcctgaagcacatgcacggcgaagaaatcacgagttttctcaggacagaatggctaaagctgcgaaggcagcacgagtccgagcttcacgagaagacagaggagctgttcagggtgaaaagggaacacgcaaaggagaaagcttcgttgcctcttaagaaagagcgggagcttgagctccacaggtcgaagctgctacagaccatcgctaggctgggcgagatagcctccaggaaagaggaatcttgctctgactgcaacgaggatgaggagatgtgcagattgaaggacaggatcggcgtgctactacaagaaaacaatcgtctccgaggcttgctggctgataagaagcaggaggttaaacatctctctttgcaagtgtcagattcaaggagcaaaatagcccagtactcactgccagagtcaaaactgtcgaataattgtgagaagcttagggctgaacttgaagattttaagatagagaggcacttgaacgatttattggactcatctgtattcagggaagtttgtcacaattatgaggatcagatatgtgatttgaatcaggagggatccttcctcagagacctgcttgatgaaaaagaagaccagctaagtatcatgtacgaagatagacagaagctcaagcatgaaaacgatcaactcgtatcgattgcagggtcaattatacagcatcatgaccaagccaacttggttcatgacgagcttatgatatataaggagaaattgtgcgagcaagaacttttgatattggagtcaaagggcgaatataactccatgaaaaggtgcctgtatgaggctatgcagcaaatccaggtatgcaagcaagaaattctaggcctgactgagaatttaacttctatgtctattgctttggagaaagccaaggaacagaatgcctcacttgacgccacaatccgagagatgaagaaaacaccagggcaaagcattggcagtcattgggggcaaactggggaatttgatcttaccagtatggagaagttatcaaagacatgtagtgacttcgaaagcagattagtagaaacaatgaaaagaaatgaaaccaggttgactagtatagtttgtcagtttagcccactggtgcagcaagttgctctcttaaggaaaaaagaattctggtataagcaaatactcgagattaaatgctcaaatctttggaaagcagaagccgaggttgatgtacttggtgatgaggttgacacccttctaagtgtgctgggaaaaatttatattgcactcgaccattattcgccagttttgaagcattaccctggggttacagagattttgatgcttgtgcagaaggtgttgaaaggagaaagcgtttaacaccgaaccactatgtgaaaatcttgacagatttcatgtccatattacaaacagtagcgcaagaccctaagaagagttagggcaatgtgctgtgggagaatatttacacgtacttactgcaaaggagcttcctagattagatttttttttttacgaacagtcgaagtactgaagtagccatgggtccaattaaatggtgtagagtaaccggttttcagcttgctagctagctttatttgtattacctccgttctcgaatatttgtcgctggctagctcatttttaaactaaaacacgacaaataaaaaagaacagaggtagtattagtgtgcagttatagttgaattcagactaggaattcaaaaggttggtttaacgatggtagctttacagtattagtgtttgggtagtataaatgtgtatgtaacggttgtaggtttaggttggatgatgctctggtgattattatttcaaggagcatagcttcttgtagtcatatggagtattgtatgcttgcagtgggtagggaagatggacttgtaacagctgcgtcccattcgttgcagttaaaatatacatgcagattctttgtgttgacaggaggtattgaaatgaacatgcttgactgatacattgcaaatgtctacggtatcatggatattccttcactgctaactcagcgcaaattcatggtctatttttgctcattaactatttg

SEQ ID NO: 21654 - DNA, 1242 bp, Zea Mays
ggaggaggcacaaatgaagcctctgtcagtgggttgaactgcattgcaattgggcagggtggtggggttgcacctttgctcacattggcacgctcagaggttgaagatgttcatgagacagctgcaggggcactatggaatcttgctttttattctggtaatgctctccgcatagtcgaagaaggtggggtgcctgttcttgtaaaaatttgctcatcatcagggtccaagatggcacgcttcatgtctgcactagcactagcatatatgtttgatggaagaatggatgaagttgctttggttggagcatcctcagctagcagttccaagagtgttaatattgaaggagctagaagaatagcatttaagcatatagagacctttgtgctcactttctcagatccacaaatgttctctacggctgctgcctcctcagccccggcagcgctgtctcatgttgctgaagcagtgtttatacaggaagctggacacctgagatgcagtcgctctgagattggtagatttgttgtcatgcttcggaatccttcaccaattcttcgtgcttgtgctgcctttgcccttcttcagttcacaatcccaggaggtcggcatgcggtgcaccacgcaggtctcttgcaggaagcaggagcaggtcgagtgttacgcccagcggcggcagcgacaacagcttctattgaagccaaaatctttgccaggattgtcctcaggaacttggaacaccatcagtcagggacgtcaacatgaacacccagcagaggtgcatcctccaacaaacaaaggcttctgcaacgatgggctgcttggccgatgcagaatggactactttggctttcggagcctttttacatcacaacaacagtttttctgtgcagacagtgactgaagggacttcaccgaaggtataacccacaactctgaagtgactgaatgaaacataagtgacggcccttcccgtatcgggcgtttaaggtgaacctgcagttttctagagattattttgtgtataagtaaaaaacttttagcgtcgatgagaattataaactggcatagctaaacttatggatatttattccttgttcgttattgttgaggtgtgtagcggcgtcatgtagaaattgggctattcctcctagtatacatgtaactttataaatgtactgttatgtattttcccccatgattgattctgtgcatttatagatcgaggtgttgttaagcact

SEQ ID NO: 21655 - DNA, 1821 bp, Zea Mays
cggatgtagatggtgctctctctttttaggtgcaggtgtaaatgcagtcagaaaattcggcatgagccccctctctgagctggtgtggtctccggatgaaggcttgagcattaaaattgcggcgtctagtcttagcacaagaaaggcttctcttcgttggaatgcagatacattgagcatattgatatcttcacctcaacgaagtggttctggtccaggtgaaaagaacggtgataccataaatgataacctagaggtatcagaaaagatgccatcacaactgcggattcgcagtgacagctcagtgagagtaaccgtggatagccccaatagtacaaatgttgacgccctacaatttacgtctatgagatcgcaggagcaagattcaaagtgctgtgaagggattaatgttatgaacgaaggtaaagaagagtcagaaaactgttgcgtggataagctggaggacatggaagtggggaattgtcccaccagatgctgcaaggatgcttcccatagttcagcctccaggaaaaaagtcgtgcctagcatttcagaaaaccaggcttgctgtgcaaccactttctgcaatgaaagatcttgggaaactaatgcatggcgtgctcggttagtaaaggcagtttgtcagaaagaatctattttgccaacgaacacagagaatccaattttaccttcttccataggaatttcatgtgatgcagtagagttctcaggcaaattggtaggttcccaaggcaagtttcaaagcctgggtgtaagtagtaatgctctagaaattcattctcatgacaattgccaagatccggttctgcacgaaagccataaggatgagcctgttattgctagaggtgagtcagcatctggtgttaatattgttgcaagatgtgagtcggtacctggagttgattccagcaattttgtgagaggcaaagaaaaagttatgtacaatgacagcaattgtggtaacaatacaagggagggtgatgacagcaatgagagcatcgagagctgtacaagtacaaaagccccaaagcgcaagcatgcgcagtgttgtgcagccacgatgccttcttctggaaacaaaagatttagaagagaagacaatgagagttcttgttcgggattattgcaaaaatgtggtacatctttcttcaactggatgtcatcactcacgaatgggttacccatgctagatggagccactgctgccgttccacttgaacagaagttttcagcaagtacaggagatggatctgcagcaccttcccagccacttcaaaacaaccgcagcgttcctatgcaattttttggcttcaattcgctcttccagtccctgtatactcgtaatgttatgataacttcaggagataattgtcgtcaaccagaaagcaactgtgctggacatgtgttcaatagactgaccctggaattaaatgatagcaattctatgttgaacaaagaaattggcatgggtagagaaactcttgatctggctactcagacttcagctgctgaaggatttcagatgatttctggtggctgtagaggaaatgttcagagtcaaattgatattttccaaatgagaccagaaagaaatatgaaactgcccagttccagtaagtttagctctagatctctagaagaaaaacaaaatcagtgcacagctgcctgctcaaatgatgcaacacaaaataaaggtggtttgagggaaagcttgtgggtaactcggcttttgccaaaagcatcagtagaattgatggagggcacaccatgcaatgtagagaatgctgttagtccacaggc

SEQ ID NO: 21656 - DNA, 3156 bp, Zea Mays
acacagttgggtttgacaagctctactaaccgcgacctgcctcagcgtctctgcggccccgatgaagtcaagttctacttctcaagcttgtacgaccgcgatggggacaagaacatcaacctcaagacaaacataaactgcaacatgtcttcttggggcaagggatgcgatgccggatgggcctgcgccaccgatccagttccagaccgccccagcaaccgtggtagcaacgatatcccgctgagaacaagcagctgccaggcatgctgcgagggcttcttctgcccccgcggcctcacttgcatgctcccttgcccactaggctcatactgtccacgcgccacggcgaatcacacaactgggctctgcgacccgtacaagtatcagatagctccaaactcgactgatagctgtggaggtgctgacatgtgggctgatatccagagcacagaagaaatcttctgcccagctggttactactgtccaagcacgaccagaaaagataactgtagcagtgggcactattgcagattgggttccacagctgaggagaagtgcataataaaggcctcctgcgaagaaaacgcagagaacgagcacatcgccattcttggagcttgcatagtgggtgcgttgtgcctgctgcttcttgtcatatacaactgctcagacaaattcctcagcatccgtgaacggaggaaagcaaggtcaagggagaatgccatccggctagctcgccagcagctaaaggcgcaggagggatggaaagcggcgaaacagtttgccaggaggcatgtgagtggcatgcagggtcatctttcacgcacgttttcgcggaggaggtcgtttcgtcagcaggtagacgcagacaagtctagccatagggtgcaggaagcgccgctgatgggtcaggtccagatgcaggaaatgtcggattctgctgtgtttgcttctgagagcgcaaatgagataacagaggcgatgccatcagtcattgtagatgtcagtgatggggaagttgttgctacaaatgaaaatcctgcgccgaaaggaaaacatagatcaacccacacacaagtgttcaagtatgcgtatggcgagattgagaaggagaaattccagcagcgacaggacaacaagaatctaacttttactggggtgatcgccatggtgaaggaccagcagaaggagataactaggcctttgctcaaggttgagttcagagacctgacactgatgctagggaagaagaagctgctgaggtctatcaatggtgaactccggccggggcgtgtaactgctgtcatgggcccatcaggggctggcaagaccacatttctcaatgccgtcactgggaaggtgaacggctacaagatgacaggttctgttcttgttaatggaaagaatcttaatatccgttcctacaaaaaggtcattggatttgtgccacaagatgacattgttcatggaaacttaacggtggaggaaaacctctggttcagtgcaaagtgcaggctatcagcaagcatgaagcatcgcgacaaggtgctcctagtggagagagtgatagattctctggatcttcagggaatcagaaattcattggttggcacagttgaaaagcgtgggatttctggcgggcagaggaagcgtgtcaatgtgggcatcgagatggtgatggagccgtcgcttctaatcctggatgaaccaacatctggcctggatagctcctcgtcacaacttctcctcagagcccttcggcatgaggcgctccaaggcgtgaacgtctgtgctgttgttcatcaaccgagctacacgctgtacaacatgttcgacgatttgatactcctcgcaaaaggggggttgatggtctacaatggcccagtaaagacggtcgaggagtacttcacagctcttggaatccatgttcctgaccgcgtaaaccccccagaccactacatcgacattctcgagggcattgtgaagcctgattcttctgccatcaaagcgaagcacctaccagtgcattggatgctacacaatggctacgaagtaccaagtgacatgcaagatgatgtcaaggaaatcggtgaacaagccccacaattcaggtccagctcctcgacatctggctcgccctctcctcactgcctccccatcagaaatgcatttgcagaagagcgtgaccgtctcgaacagcgtttgtcaaaaccgaaggacttgtccagcagaaaaacaccagggatcttcatgcagtacaaatattacttgggaagggttacgaaacagcggctgcgtgaagctaggctgctcatggttgatttcctgatactaggcctagctggtatctgcttagggacgatagcaaagctcagtgacaaaacattcgggatgcctggctacatatacactataattgcagtctctcttttgtgcaagatcgcagcactgcggtcgttttcgttggagcgattgcagtacttcagagagagagaatctgggatgagctctctggcatacttccttgctagggacacgattgatcatttcagtactgttgtgaagccgatcatttacctgtctatgttctactacttcaataacccaagatcaacaattgctgataactacattgtgctcctcgcgcttgtgtactgtgtgactgggataggatacacttttgccatctgcttcagtcctggctcagcacagctgtgttctgcgcttatcccggttgttctaaccctgttatccactcaaaagagtactccaacattaatcaggagattgtgctactcaaaatgggcattggagggcttcataattgtaaatgccaagaagtatcctggagtttggcttataacccgctgtggcctgttgtttcagagtcaatttgatattcacaactacaagctctgcattttgattttgttcatgtatggtctgttcttcaggatggtggcatttgctgcaatgattttactgaagaagagatgaatgtactctagatgtaacatttagttcatctctaatatcttcattcatttttacatgtgtaaaacaattctgatgaaaggttttagagcactgacccttgtacagatgagaaaaaaggcaataggaattcatttttttctaccattattgtttcgtaca

SEQ ID NO: 21657 - DNA, 757 bp, Zea Mays
ttcgaataggctaccaaacacacagctaggcagctagtagctagcaatgattagcatggaccaccagatgttcgacgaccccttcgggagcagcggcatctcgtcgctggaggcggacatcttctccgccgccgccggcagccagctgccgtcgccgccgtggccggacttcgacgacgactacgacatccccgacctctccgcgctgcccgccaacgccgccacctcctcgggcggcggctacggctccggcggatccggcggacaccgcaagctcagccacaacgcgtacgagcgtgaccgacggaagcagctcaacgacctctactcctcgctccgctccctcctcccggacgctgaccacaccaagaagctgagcatccccaccaccgtgtcccgagtcctcaagtacatcccggagctgcagaagcaggtggacaacctggagaggaggaagcgggagctgaccaacgccaactgcaagccgggagttctcaacaccagcgagatcgtaactactcccattgtttctgctacttgcctcaacgacacggagatcatggttcaggtcagcctgcacagcaatgtggcagccacggctctccctctctccaagtgcataaaggtgctggaggacgcaggccttcacctcatcagctcatcaacctactccacctttgggaacaagacattctatagcctccatcttcagagaagtcaaagaacgatgaacgaggagtgcccggcattctgcgac

SEQ ID NO: 21658 - DNA, 3674 bp, Zea Mays
tggagtcgggcaaaggtcctgtggtcgcggacgattaagcgatttgctcgctgcagccaggcgtgcaagggtcgttgctcgcaaagccgccttcgttgctagtgcgacggctttggagatgattgttcaagctgagaaggcgaacaccgaggctgccaagaaagctcctagacctctgcgtcgtgatgaggagcagaaatatttatgtctccaatgatcctgtggcggtggaccaaatgtactgctgaatgcttcaggcgcaggaagccttttcactgtgaagttgcttgcccctactctaagatcgccgcttctgttcagtgtgatgactcaagtggtgatgaaaagctgaactttgctcctgataatgagcctatccagaaatggcaccggtctttgagctctgacagtgttgtgcagacactccgctgtttaaggaggaaacctgcagttgcattcacctactttaaagatacacatagccttggttttcaccatgacttctcaacctactcagagatcatacaaattttgtcccattcattccaggggaagatgctggtatccttgtttcgtgagattctcttgggaactggtagtggtggccctgaaatcttaccgctcattgatcacttgagaaaaacatgtgccacttctcacgtactctcgtatgcagtcaattgcttaatcaaggcatacaccacctgccacgatgcacaagaaacagtagagatgttttgttgcctttgcaggcttggatttgttccaacactttgggctcgcaactttctgctcaaatttgtatctcagagcagtggtgattcacatatggttgtcgcagcttatgatcgaatgaagtgctttcagttgacactggatgctcaatcattgaacatagtcactagatcactttttcaagcaaacaaggcagacgaagcattccaaatgtaggtcgggatgattgaaatgggagtgaaattagatgtacatggattctcatcatttataattggcctttgtgattgtggaaagtttgatctagcttataacatggtaagaagatatgctgttctacaagagatatcccaagagagggttccaattgaagccatggcttataatatggtaatcgatggactatgcaaagaaatgaaactgaaggaggctgaaaaggtcttggagatcaagaccagacatggatctgcccctgatctatatagctatagctatctcattcatagtcattgcaaaatgggtaacctagagaaggcatggtatcatgttgaagacatggtatcccatggcattgagataaattgttacattgttgcttaccttctacagtgcctcaggaagttaggcatggtatctgaagtaattgtgcacttccagaaatttagagatttaggggtccatcttgatggcgtgctttataacattgctatggatgcttattgcaagcttgggaacatgaatgaggcagttaagctactgaatgaaatgatggctggaagtttggtaccagacaaaatccactatacatgcctgatcaatggttattgtctgaaaggagaaacagaaaatgcctggcaagtatttgaggagatgctgaaggcaaatataaaaccagatgtagttacatataacatattggccagtggatatagcaggaatggccttgttatgaaggtatttgacattctagagcacatgatggatcaagggctcgaacctaattcactcacctatggtatagctattgctggtttttgtagaggaggcaacttgagcgaagcagaggtgctgtttaatatagtagaagaaagagggatagataatatcaatgtgctgtacggttctatggtttgtggttatttgcactcaggctggactgaccatgcttacatgctttttcttagagttgctaaacaaggaaatatggtggatcgtttgtcatgttcaaaattgataaacggactctgtagggatgaaaaggttggagaggcttcaactgtatgtaaaatgatgcttgaaaagaatgttgtccctgatgtaatttcatatagcaaacttatatcagcttattgtcagacaagagatatgcacaatgctcgcttatggttccatgatatggttgaacgaggactttctgatgttattgtatacactgtactgatgaatggttattgcaaggttggtcggttgcaagaagcatgtgaattatttgtccaaatgataaatttaggaatcaagcctgatgtagttgcatacacagtgctattggatggccacctaaaggagaccctacaacaagggtggcagggcatcgctaaggaaaggaggaccttttttcttaggacaaagcataaggtgttgctgaactctatgaaagatatggaaatcgaacctgatgtaacctgttacacagtattgattgatggacggtgcaaagcagaatatctagaggaagcacgaggattgtttgatgagatgttagcaaaaggacttatccctgatgttcacacatacacagctcttataaatggatactgtagccagggagaaatagctaaggctgaagatcttttccaagaaatgatagctaagggaatgaagccagatgtactgagcttttcagtattacataagagaaccttgagacatgaaaaggctcattaatatttatgtgtactaatggttatgttgatgaatgtcagtttgactgaaggtgaaggggcgtcctgccaacaaaagggaaggcgaacacctggattgaaagactgctctctcagttcagcattgggtcgtcaaggagaacaaaatgatggtaccttcagcgtgaggatcgatgactgtcaatggagctgtgcaaacacaatcgtggcaaagctggctgtggcactggcgcctatgccatttatgagggttttgcttgaccgttttgtggctgcaactagtggtgtgttcccagacaaccaagagctacaagacagaggtaagctctcgggttccgtcctggggcaatggggagctgttgatgatcctgagtccatgctgcaccacatccattgggcagtaatgaggtgattccaatcgttaagagtcaagcataatgttgtgtgatagatctatttgcggtgtttgacatcgaggctggggaagttggaaaatggacacagatcgcagagctcggttaaacaagtggcctgtgcctgccatgttggtatcatccaaacagtctccatgtctgcattatactgatgactggaatgagggtgtgtccaaggaggagctggactctgagatcccacctggcgaggagtcgatatacggatacataatgggaatggcagatacatgtagtctgtagaatccatcaggatttccccttgataggtctcaggtttcactctaatattgtgcattgtccctcaagatgttaatacagcaatttcttgtttagtgctcataacattactccagtctccaggcgtagtgcttggtgtagagacataaaacagataatgcagcaccagtttgtggcttcaaattccgaaacaacagctttgtggaagacagaaaagaacactagtttttggcgaactgttgattcatttcagaatccaaagattggatgacctatttcgtatttcaaaaatgacatccaaatgggc

SEQ ID NO: 21659 - DNA, 905 bp, Zea Mays
aaagagcgcaacttatctgaagtaaacaagaaaccaaaaggccagccagagttttagatgaagacttgatttctcctctcagataatagagtgtttcaaaatgactgatcaggagcgagatgatgttcccatgttgctaagaaatgttgagctaccaagatttcctctaagaagtacttcaatgtgtataccagtcagggatgatgattatgaagaagacacctttgtgccccatactggtcctctattcgtccagccatcaactcagacggcaccgggaatttcatttacaggtagagacacacctgataggcttcctaaaccttcacagggaaaacaagtcagcaagccacatgcaatcatgccagaagaaataagaggaaataagtggtcttacagtgggcaggttccaaagaatgaacacttgatgatgtctgggcctttggggcaatgtgataatcccgactgtgtgaattgccctcctgcttgtaaaaacagaagacattttcagagaggttcaaatgctttagacaataagatccataatattctttatggtcacagtcgtggatggaagaagaagattgagcaaatcatggcatgcattccgattatgaacccacatgcaaagcctgttcagcggtggaatcaattctttgtcatatcatgcctgattgccattttcattgatcccctgttcttcttcttactatcagtacgacaggatggcaactgcatagtgttaaattgggaaattgctacagcgcttgctgttgtgagaagtgtgactgatgctatttatttcctccacatgttgcttcagttcagattggcttatgttgcaccagagtcacgagtggtgggagctggagacttggttgatgagccaaaaaaagttgctatcc

SEQ ID NO: 21660 - DNA, 2102 bp, Zea Mays
caagtttccaaatcaaaaattttatgaaggaaaaattatagatggtctgaacgttaaggactataacaatatttatctcgatgtgcatatatatggtccttattcattcatccatgttgaagatggtttcgaagaaaacaataaacagggcttaaaaatattgttgaagctgctgtggtagccaatattgttggcagatttgcggaagcatgcgccgagcagaagaagaaaaccaacgttggtatagtatctccatatgcagcccaagtaatttctttgcaagaaagagttcagatttataagaagcatgactttctttctattgaagtatgcattgttgattcatgtcaaagtgctgagaaagacattaatcctttcaacagttagacaaaataatggtgggaatataggctttgttgattgtgttatgagaactaatgtggctttgacaagagcaaagcactgcatgtggatccttggacatgaattcaacatggtatgatttagtcaaagacgcgaaggatcgtgaatgtttctttaaagctcgcgatgatgatttttttgctagaacaatggatcagtttagacttatgcaaaactcacaggtgacagacaatgtttcacgatggaacattgaatgccagtgtgctccagatgcacaactcacatgtgacaaccatgctacaataccagacaaggctccagatgcacaactcacaggtgacaaccgtgccacaataccagacaaggcacaggttgtagagcctgcacatgcagagcaggtgcctatgcagtcagaaagagctgcagaaaagacatggcagctgtgtcttaatcagctctcgcacattccttcttttgctccaggtgaacaactaacagacgaaaaggttgtagagcctgcacatgcaaagcaagtgcatcttgctcagctctcgcccagtccatcaagggagagggcccgtctcagtcagtttgctcaaggtgctcaactcacagatgaagaagcggctgcactagaggaagaagaccatcctcaaattgaccttctggatggtttgcggcgcggaggccggctgcggggttccggggcagcgcgtctcgcggaggtgcgtagacgacggcggagcggcgtcctcacctccatggcgtcgctgtcgagcaagcaccacgtcctaatccaggtgctgctcgcccgcggcccgctctctgagcgcgacttccacgctttcatcgatggcgcctttggcaagaacaccgcattaggaactaagcggttggcttcagaggacctggccaatgactgggataataaaaggctaaatccaggaaatgacaattatccactttcaacaggagctgcaaataatttatttttgggtattgagcaaggagctggaagcagcaatggccagtctgcctttcccaagtttgacaatgggagctcagtggcattaccatctgggcagggaatgtctggtcttatgggaaaaggggcaaaatggcgtgacggggactggttgtgcaacaactgcaacaatcacaactatgcatctcgtgcgttttgcaacaggtgcaaaactcagaaagaatctgcagttcaccctggtgtgttatagcttgctgttggattattttgttccaggatatgttgctgcctgttctagctccttcctcaaggctgcggtttgagttttttcgattctgcagtgtttttgctgctctaaaatgtttgtctcgatatttcattagtgcttgttgaagttccccatttgtttatggtataagcgcttgaataaaatgtttctggaaagtaccggcctacaatctggattttggcaaaataattgaattagttgttgtacaatgaggcaaattgtcttacgttgtacttgatgaactctggagtattatcactcgtcgggttgaaaaggggaactatacaatgtaatttcagtacagattattattttttcctgagaactccagttgtgctgttatgcgagttttgcccattcagaatacttttgatgcattcatcagaattcggctgttactttttcatcttttatgcccctttgcatctattaaattgcccttaa

SEQ ID NO: 21661 - DNA, 1071 bp, Zea Mays
aagtgctgttctcaaaacagttctactacagatgcacatacaagaacgacatgaagtgccccgcgacgaagcaagtgcagcagaaggacagcagcgacccgccactgttctccgtcacttacttcaaccagcacacctgcagcagctcaagcgccctcggcagcgccagagacgtcgcgtcccagtcgtcttcaaagaaggcggtgtcgatctgcttcagcccgcacgccccctccgagcagacctcgttcctgacgacgactacggtcgcgccgccggttatgcactcctacggcgccaaccgacagcccgacaggagcgcctacaaccaacagccccagtggtggacaggcggtgtgccatctcccacaagcaacggccctgctaagatggaggtcgcggagtccacgcagaagccgagcggttcgtacggcagcaccaccggcaacgctccgtccaggacgctgctaccgatcggccagtccaggtgcatcgagtacttccatttcttgtgatgagcttccgggaaggcaagctggggctcgggcactgcagcttggtgtctgcttgtttggagtggcaagtggagtttgtatctggagctggaggcgaaggcgaaaatgttgctgccgtcgtcctggcctcctggcctgaactacacaggccgggcggggcccaatcagtatactgactgacctgcattgcattacatacagagactgcctgctgcttactgtactgtacatctttgcatttgggttcaagccacgttttggtgcttggatgatgtgaagaatggtattggactgttggggtttctttatctagcagtagcgtacatgatatgatacgacgtacagaatgactgcttgacagttgagatatatccatttgtttgttatgtgttgtttgctgtttgtttagagatgagactaggatgtctcatttctgacagcgggatattggccatggttcagtctgctgctacggaaatgctgaaggttatagattatgtacactaaacagtaacagtttcttattaacatgtcttctacagttttagaagcagaa

SEQ ID NO: 21662 - DNA, 2231 bp, Zea Mays
cagattcattaacatgcctatcctaccactataaaggtacacaaagcttccgaagggaagaagctcttgagaagatactgcaatgatggctcctctgtctcctagactggtagtgcccgtagacgtgaagaagctgccgcgggagcaaaaggtccctctccacaaccgctggcacccggatatccctcctgttgctgatgtaaccgaaggggaattgttccgcgttgagatggtcgattggagtggagggcgggttagggatgataactctgcagatgatctgaaattcatggatttcacaattgctcattatcttagtgggcccctaagaatagttgattctgaaggggttccagcttcaccaggtgatcttctcgcggtagaaatctgcaaccttggcccacttcctggcgacgagtggggttacaccgcaatacttgaaagggagaatggaggtggattcttaactgaccacttccctagcgcaagaaaagccatctggtatttcgaaggaatttacgcatgctccccgcagataccaggtgttcgttttccaggattgactcatcctggtgttgtgggaactgcaccgtcacttgagctcctaaatatatggaatgaaagagagaaaagtttgtctgagacaagcctagagactattaaactgtgtgaagttctacaccagaggccccttgctcatttaccgacccctgaaaattgcttacttgggaaggtccaagaagggactgctgaatggcacataattgcaaacgaagcggccagaactattgctggaagggaaaatggcgggaattgcgacataaagaacctaagcagaggctccagaatttatctaccagtgtttgtcgaaggagcaaacctcagcactggtgacatgcacttctcccagggggacggcgagatttcgctgtgtggagcaattgaaatgagcgggttccttgagctcaagtgtatcttttactatcatgctgcccatgcgagggtaggatatctggaatagtggactctcctaatgctgtaacaactcttgccatccctacagcgatatttgatcaggtatgctgccaagagtccagcccatcgcaattttctttggtcttttttactgtcatatgcactgtatcgttgctgctccttttaagtgtaaagtgttcatcaacagattagttaaacagttttcctttagtctgatactctgatgtttgatccaagtgtctgatatatgctgctggtacttcatgtgttatgtctgaagaaacaaaagttactgcctgcatatcgtgaactcatgagcaggccgtacaaacaaaccacacaattttgatgctgattaacgtgagctgggcaaggttcagggttcaccaagactagatttatatcaccctctccattttattgaaagtatcttatgtgagtaagcctggttcatttgatcagcggcatgcatcacctaactgtttcttgtgataatgtgatccggtcaatataaaagcgacccaaatattatagaatatacttttccgctgacagttactattaggcaaagtgtaagaacaacttgtatgaagaagtgacaatgaccagcggtcagcggagaagaaacatgttattattttcagcacaaggctataggcagattgaaattgcttacttcgatactaaaaaaaatatattgatctgtaccagtttgtttttgggcctttgggcattttgatcgtcgttcccttttaaaactaaaatgcataacatttcgatttccaacgtaggatataaagccaaaacgcgtgaaggggagaccacttggaggaccacagttgagaagacttccagatcttctaagctgctcaaatcatggacgccttcctgccacccaagacagaagtggtacaagcgcgccctagtatatggaaacagatgcagtatcaatcgacatgcaactgtgccaaggctataatcaagaatgcgtttgtctttttttttttattttcttcgtctaataaaaattacgataaagcttttgccgttctttagaaaaaaataatcaagaattatcctcgattcatcaggttgtcatcgtgaatgagagtgagccttttggttttataccagccaggctctttttaaatggtactgcataaattctcaaatatttatcgtccgctagtttatttttaaactaaaccgtaataaagaaaaaagaacggagggag

SEQ ID NO: 21663 - DNA, 153 bp, Zea Mays
gaggacacttgccttcaccaaatagatgcttagggtcttcaactctgtagaactcgaagaaccagaccacttggttgccaacgcttggccgccgattccttaaagctcagaaacgaatcacgatctaatcgcaacgcaaagcgaaggcgaact

SEQ ID NO: 21664 - DNA, 1377 bp, Zea Mays
atcgagtccagcgtcaacaggcaacaggtgtcccagccgcgcgccgcacgccctgttgccttctctcgacttcgagagcaccgccgcacggcataacgctcgcacggccgagccccgacattctaccgcactccctccgctgcacccctttccattctaccgccggcgacgccaaagttcttgggcctcctcatcggcgacttttccgccggcgacaggaaacaacgaaccaaaccacttctctgtcgagaggcgtcgcgctcctctcttcgccctctgctgttatttttcttaacccggctttctctcgattgctgcgtaaagttgaagatgaggaagctcaagttccatgagcagaagctcctcaagaggcacaatttcttggagtacaagagggagggcggccaccgcgaggcgctcgtcacacagcgctaccgcctcgtggagagggacgactacaagaagtacaatgggatatgcttaatggtgcaaaagctcgttaacatcataaagcagatggacccaagagaccctttcagaatccagatgacagacttgattctcgataagctgtataatatgggtgtaatttcaacaaaagagagcttgttaaagtgtgagaaactttcagtgagcgccttctgcaggtctcttcctccctctccctcttcctctcctccctagcaatctggcacgtttgttttcctttataggatgttgtgttctagccatctcacttcagctcaagtgttctttcttggctaaggtctgcaactctttggtagagtatatcatattattcactttgctagccgcttttatggtaaggtagaacaagtaggaaacaatgacatgtgcagttccatttaccttgtttactcaattcttgcaggcggagacttgcaacagttatggtgaagctcaagtttgcagagcaccttaaggaggctgtgacgtacatcgaacaggggcacgtgcgtgtcggtccagatgcagtcacggacccagcctttcttgtgaccagaaacatggaggacttcatcacctgggtggattcctcaaagatcaagaggaaggtcatggagtacaatgatgcattagatgattatgatgccatgttctgagaaaataattctgcagaaatttatgtgcccgtcagtagtgtaatcttaagcctgccacatatgggtcttttctgaacaaatctgtgggagttgtcttctgcatggctacttgcatttgtattgcacctgcagatgtgatgcaattttgtggttggttgaaggcacattataaattcatatctgatgtagttgtgcaattgtctttgttaaagagcgggtttgcccggatttcccctaaaaaaaaaaaggtaaa

SEQ ID NO: 21665 - DNA, 1734 bp, Zea Mays
gtcacattcccgactcgataaacccttctctcgtccgcctccgcgcctcactccctctcctcctctgcttcgtcttccccacccgcggcgcgcagcacacccaaaaccgtaaccctagattgcaagaggacatgaccagcaagtttgggctcgccggcggcatcccggagcggcgggtgagaccgatctgggacgcagtcgactcacgccagtacaagcccgcgctcaagctctgcaccgcgctcctcgccaagcaccctacatccccctacgcgctcgccctcaaggctcttattctggagaggatgggaaagcctgatgaagcattgagcggggccctgaatgctaaggagctattgtattcagacaacatttttcattttgatgatcttacacttagcactctacagatagtatttcaaaggcttgaccgattggatcttgctacttcatgctatgagtatgcctgtacaaagtatccaagtaacttggaattaatgatggggctttttaattgctatgttcgagagtactcatacgtgaaacaacagcagctctcaaaatgtacaaaactgtaggagaagaaaggtttttgctttgggctgtttgcagcattcagctgcaggtgcattttagcagtggtggtgtgaaattattggcactagccgaagcattgctgaagaagcacataaattctcatagtttacatgagccagaagcactttctctctatgtttcaattttggagcaagagaaaaagtatgacactgctttggaagttctttctggagacttgggatctcttcttggaagggaggaggacaagcttcgtttgcagggatgtcttcttgctcaagcgagtagctatctgtctgcttctgaaatataccagaaggttctggagtcttgtcctgatgactgggagtcctttctccattatataggatgtttgctggagcatgatgtgaatctccctaaaccatccactggcgaacacacttgtccttcttgctctgttgattcagcattatccaacaagacttctcttgacaaggagctggttgaatctcgccttacaagtgcgttgtcatttgtgcaaagtctacaagaaaataactcaagcgattgtgtcagaggacctcatctggcaaaaattgaaattgaacggcagcggtgcctcaatggaaacccagataatatcaagcttatggaagctttggtgcagtacctccacagatttggtcatttgtcttgctcagcatctgatgttgaaatttaccttcacatgctatccaacaatgagatatctgagctgctagatgaaattactagatcttttgatgcatcatcaatttcagttaacacactgggttcaacaattactcttttcaaggtccaggaacttttgggaacttcattcacaaaaccaacttcagaacttgagggcattgcaaaaagaatggttgataccttttacaaaaacctgcctctatcaaattacttggatcctcaggaaagcatgtacggtgaagagcttctgtcaatggccagcagtatccttgtgcagctatactggcgcaccagggatttaggatacctacttgaagcaattttgatactggagtttggattgactgttcgcaagtatgtctggcaatacaaggttactctggtccatctgtactcttacctgggggcacttcctttagcacataaatggtaatttctcctttg

SEQ ID NO: 21666 - DNA, 5010 bp, Zea Mays
gatccgtttgccgcccctgtcctgtccgcctgcactgcccgattctgccgcctgtccacgaggcgaggggcggtaaaaggctgggtgtgtgcctgtgtggggtgtgggtaggggaggcagagattgctgcgcgcgccccggagcagagcgagtgcttgccagttgccattactgttcggtgcggtgaggtagtagagggataaagaaagaagggactggaaggaaggaaggagtgagggagatgccggcttcgcctcgtatggggaggggataagggaaggccgatggcaatgccgccgtttctccctcttcgcgaatagctagtacgcgttcaaagcaactgattggctgttgatcagcaagatggatgggaaaggattgtttgcggagatagggatgaaggaggaggacattgccacaatgctgtctgggaagaaagtttccgagctggcagaggatgcgtttgatggttccaaggaagaaagacagatctttgagggtgtcttctgcctaacaaacgttgatggtggattgaatgatcattatcatggaggcattggacatactgttcatgcagggaaagtggtgacaagttctagaaaaccatcaagctctgccgacaattacaaggcagcacactgtcgcatagtagagtccttcactgctggcaacttatcaagctatcgtgtctcctgtcttggtgccgatgagcaggctcatggagcaatgcattctcctgatgctgtccgtttcaagcttgcagtgcagtggacgcctcctcgccctgatcgggtgtacactcgtagggtggtgactcgcaggagcgagagggcaagaatttgcagtgcgatggatttggagagcatcgacatttgcaatttcagtcgtcagagggatggtcgtggccatggacagctttggaaccatcttcggatgcatgcacatcttctgatggtggatgccgggtggaagattgaggccaaggaaagagacaacaggagtaaagttgatcatgtttatgtggcgccagacaatgtgacacgcctgtattctcttcccagagcatggaaatgctttggccagtggttgcttatgacaacaccctgcgtcaatggaaatgagtcaattgactacggaaaggagtggtcgaacatgcatgaatttctgtatgatctgaagaacacactgctatgcctacagtatgaggtccaacgtacgaagccagcactatctttcctctaccagtggcagctccttgatcctttcatggctgttgtttgcatcgataagaaggttgcagctcttaaagatggagtggcactgaaagctgttaacagcaccgtgacttgcctcaatcgcagtgagtgtaagatgttggatgccaagaattcaaataggtcacttggggtcaactccacaagtaaatatatgaatccatatctcagctcctgcaaaaaaagtcttctgccgcttctctctgaatctgattatcagcctgataaggaagggaatactatgcctaatgaagaagcttctctattttgtacaaacaagactagcgaagatgaagctgatcggcggtcattgtgtatgtcagaaatgaatgaaataggcataagaagcacagctcatcacatagttatgggtttacatgatgcaacagcttttcatggctcaagccaaacttgttcggggaggaaaagaaaatttccgtgcatcaagtctaaagaggataatcaaactgaagacaagtctgacccattattctttccacccagctattcatccacattaagtcatctggttgaaaatgttcaaataaatgatgttagccctcatggctatgaaaccacggagattccaaacatgggcaatcgtacagatattcttgataagatgtacctaggagagaatttattgtttgcccccgaaactggtaatatgctacttgaaactacagatgatatcaacaatgaacagcatgatgatgcagctgtctctgagccccaatcggcagataatgatggaagtggaccttctggtgcatcatcactaccaccagagaaagatgcatacatgggatctaaagaggattctattaacgactatcatgatccttcagttgtctctgagttccaaattgctaataatgatgcaaaatgtgaaccttctattgcattcttgccagaaaaggataaagatttggaagctaataaaacgagcttggaaggtccagcaaaaacaggccaattgtcatctgaagctagtggcagcactttgatgatctcagagccacaagtattgtttgtgtccccacaagatgggactctgtctttcatgaacaataatacgaacaaccaagagatgtggaggttcctgaatgtttcccctgataccatggataccgaaatgcagatggactctaattcattggtttacgaggcaagcttgattcagggtttcttgtaccttgacaatgagggttctccaatttgttggacagtgatgaacccggaacctcctaggcgcttgatatgtgctactgctctggaaccaaactcaaagctgtcgaaacagtatgttgaaatgaggttggagaatgatgcatcaacgtctgaacacaagaagggaggaaaattgtctgataaggctgcagatatccaagacaatgtcagtagaaaaaaacagaaagcaaacattgcttctttaaataattgcgtaagtatggacaatttaactgtcaatcctattgatcctgtagttctcaatgagggagagcagacaggtacagcaatcactgagcaggttcctgttcctttgaatctagtgcttgagaacaaaaatgacaaggaccaaggtgagcaaagcagtgaaacttcagaacaacttatgtccaaagaaccacaaaaaagggacatcaaaaggcaaaagagaacatggtctcatacatgcaagtttgatgatgatgaccttctgatgacagctgtaatatataagctgacagcacgttacaggaactcttttcatcggaagctcagaaataaattcggtttcaggcgtcttccaacataccactgggagaatgaagataaaggtgacaggaagaagtttcctggagaagcaaggacggtgttgaacaagttacttgaaatgggcattgttgctagagtggatattcttcaatgtcatggtccaggaggcaaaaatgtgttgaaggatgggaacataactgcgagtggcattcaatgccagtgctgtggtaccacattcacaatgtccaagtttaagtgtcatgcaggtctcaggcaagaagtcccatctctgaatcttttcttggatacaggcaaatcttacagtctttgtcagcttcaagcatggtctatagagcagaaggtgaggaaagagcatgcaaaggatacaatgtcccttcaagcagaccaaaacgatgatacctgtggatcatgtggcgatggtggtgaactgatatgctgtgacaattgtcctgctagttaccatcaagcctgcttgtcttgccagaccatgtaaaatgtgtatctgccaaagttccgtgcaatgaggatggatctggtacctggttttgtggaagaaaatgtcacgagatctatatgaccttccgttctcgtgttggagtgcctgatcacatggacgatgatctgtgtttcaccgttcttcgtaacaacggtgataagaaggttcgcacggcagaggagattgctctcatggctgaatgcaacatgaaactcatgatcgccacgagtatcatggaagagtgtttcctgcctattctagatcccaggacagggatagacattattccctccatattgtataactggaggtctgatttacatttcaattacaaggggttctatacagtagtcttggaaagtgatgatagcatggtatctgttgcctccataaggttgcatggtgcaattttagcagagatgcctctggtagcaacttctaaagagaatcgtcagcaggggatgtgcaggcgcctcatggattacattgaggagatgctgaaatccctgaaggtggagatgctgctcctatcagcaatcccgcacctggcggagacatggacatcgacatttgggttcagagagatagatgagtcggacaagaagaggctgagtaaggtgaggctggccgcagttccggggaccgtcctactgaagaaggacctgctgtgtgaatgttcaggcgcggacgccggtgagccgccgagccctaagcccttccaagtttactcgcgcgtgccgagaggccgcaccggtttggatgcagtgtgccaataaagatgacgcagtggatcgaatgcgccgcggtcagtcgtcgtcgtcggtgacagggggcagctggtggtcgtcacggggcctcgtctccggttgctgaagccgaggccgagcacatcagcacgcgccggtttgtgtggtggaaatggaaagcctcgttgctctggtaggagctctgaagatcgctgtcgtctgcttgtagtctgtaaatagcttctccgtcggcgagaagcccagggtccacggccattgtagaaccgaacctgtatgataaaactagaccgtgttggcgccccaccagcgtttagtagtttccgttgccctttgaactcaaagtttcaggctagtccattgtgttcgtttcagaagcctgcggttttcagggggaggggaggtgccagaaagggaggacataacgcacgtgcagaccgagtattatgtggtggtgtcgtagacacgcacgagttgacgaagctataggagcagctcgtgatgagcaatggttggtgcagatgatgatgtcaatgagctcctcccgcagggaccggacctgtggacacggatggagctgaacttgtttgaaggatgcgtagtactaataatatatgcagtcaagccagcctgaacttatttgaatgaggtgtagtactaataatatatgcagccaagccagcctgacactttcata

SEQ ID NO: 21667 - DNA, 1998 bp, Zea Mays
ggtaatagatgttgatgaaagcttgctgttcatatccatcaatagtacattagtaccacatttccttgcaatctttggaaaactaactgtccatgaatagttctttctttcacttcaccacttcctatgtgcttcaatttttattttatttcaattttgagcaagaagggtaggcctggtgcagtggtgagagctatctcacggagtcaccaagtcgcggttcaaagcatcctctctgcatttgcgggggaaagcttgtctcggtttatctcttgcgcagaccccactcatgtgggacctccagcgctgggtttgcccttgaacttgagcaacaattcctgacacaaaagagctgttgtccttttgttctcttatccaatgatgaagtcaagtgaaggaggttcagataaacctgcaggatggagaaaccagagctggttctacatagttgtgagaataagtttgttcctttgggttgctttgctaaatctcattaccatatcgtcaacttgggcaagggtaattgatgtcatggacagtgagttcagtcaggttcaaggttatttggttttattggagctggtgctacgctagggcaactttttggttcattgttcgctgcgagtatggcatggctgggaccatttctgctcctattttcttcactcttgatggaacttgctgccctgtcatcaaaaggaatttgtcttgatggaaatcatgcttcggctgaattacatcaaacaggggcaggacaagctcctaataccatggctgatgatgaaatttcttcactagtcacttcacctagacaacctgtccaatctcaagaatccaaacctgaacttttcataatgtttgaaggtttctggctgatcttgcgatcaccctacctgatatacatatctctgtttctttggttaagtgcagttgtctcgtctgtattttactttcagaaagtgacgatagttgctactacaatatcaagcccaacagccagaaggagaacgtttgctctgataaacagctttatagcagtttttattcttgcgggacagctcactttgacgggtcatattcttacagtagctggtgtcacagttgctatctgtgcatctccctttgttgctgcctcaaatttggttgcccttgctgtatggccaacttgggttgccgtggctgtcactgaaacaattagaaaggtaacaacttatgttttgacaagacctggaagggagttattattcactgttgtctcacaggatgaaaaatacaaagcaaaggtctgtatagatgtgattgtccagaggcttggtgacgcaacagctgctggaatttacaggtggttgttcagtagccttgagaagaaaacatccaaggtcaccctgtttgcattgccgctctgcttcctgtggcttgtcattgcatttcacttgggccggctgcagactaatcttgccaggcttcaggctgcttctgctccgtcctactcctgaacaggaagctgctgcgagtgtctttggagatgtgcttccagaatgtttgaacaggcatggcgagaagtggttgtcatcaatagttagttacttagtttacacgtcttgcaggaatttcaggttttattgatggagaaaccttcagaatacagtagcaaccattactacactacagaagagtttagcatacacaaggggggagaaatagtacaccatagacatagactagcacactatatacaaattcaatatcccatttcgatgtgcactgcaggaaactgtagcatgcaatctgtgagtttattataaatgatgtagtagtagggccggatttgttgggcactgctctgcctttggaactactgctgtcctgacagacactgcatcattctgcatttcacctaccccagttcccagactaaatggctgtaaagacagattcataaaaatgtctgctttatggaacatgaacatttctttatagacaggaggagtaaagaga

SEQ ID NO: 21668 - DNA, 6653 bp, Zea Mays
ctcctttcccagaaaaaccctcgttcagctgctacactcaccgcggtctctctctgtccatttcccgcctcctcgccgcaactagggtttcttaagccctcaccgcccatggcgagcggcagggcggctacatccagttccatcctcgtcaacgccgccggcaccagcaagaccctgtccgcatcgctatggtgggactccttcgtcgtcctctccgacgacctcgaccgagccactgctggcccctctgtcccggatgccctcgctaagcggatcaaaagccaccacgcgtggctccgagggtcggtctctatgttcgggaagccgaacgacgcgtccaggagcgcactggaagttggcgaggttgccgtcggggagcgtcgcctcactgtcaagccagagctcaaggaggccgcgcttcgtgcaagcaaatgcctgaacctggatgaagtgcaatcatacattctggtcaagagatcttcagaagtctctccaacaatccgtgatgctgatgctgaggagtttcttcatctggtatctgtacgatattaccttgagcgtcagtgcttactgaagtgcatcagaagaatctttgtgcatgcaagtgacgtgtctgattcaactgatcccattcgagatgaggcttcattattgattagtgaagagatagacagaaaactgatatctatcattgaagattctttttcaactgcatcttctgtaaaagcggaagcggaatttacaatttctagtctggaagaaactttgattgaagttaacttgattcttgacatattgtttcttactttttatgataacttctcaagatgtaatggtagacagtggataactttgtgttcaatttttaaggacattctatgtggttcttatggtgtcgggaaatttgttgcatctgttgaggcaaagaattcatttcattatgctaaagctcagctacttctcatccttattgaaactttggactttgagaatctcctccggatgattcatgatgaagttcctctgagtggagggtgttctgcattttctgtcggtgatattctggagatggatgttgaaatatcaaaattgcctgaattttcattggtagaatcaggaccacttatactggcttgggcagttttcctttgcctagttctgtctcttccagaaagtaacaccaacttggaaattgatcatacatcctatgcccgacgggcctttgagtttgcgccattcaattatttactaggagttctttgttcaagcatcttcagggagtcagatggtcctgtttctggttatcggggtatattgcggacattcatttcagcattcatcgcttcatatgaggtatcttatcagaaagaacacagttcctttgacatgatttcgagtattttatgtgaagtttatgatggagaggaatctctctgtatgcaattttgggataaagatagctttgttgatggtcctatcagatctgttcttcatatgctggaggaggagtatccttttcagatatctgaactgatacgtttcttatcagcagtttgccatgggacctggcctgctaattgtgtatataattatcttgagaggatgaatggagttacaacaatctataccatcccttgtgttgctgatggtgttggttatggccatcaaattgaaagtcatcatccagtcagcattcctagtattgaaggcattacaattccacaaggaacccatggctacattttgaaagttcttcaagaggataccacattagttcgctgggagttcccgcattctggggtatcctttttgctcataactctggcgcaagagctccattcatgcaattacaagaaggcatgtgatatcataggtctactttatcggatggtgtcgtcaaataaggacctgtgcttcgctttgatgcatgttgacaagtcactggctgttcaaacatcaaataacttaggacaaattgaaaagcatgtcaggattgatattgctaaggtattttgcaattccattttcaaatatgtgcgagatgttaataatgctgacatattgtccaaaacctttggtctactagcagaaatgatgaaatgcgctccatatcacgtgtttgatgcggcgttcgagtgcaacatcttcacttcacaattaagtagtccatcaagtgattggttactttctggtgccctagctagaatgctttttgctgcctatgaaggaaatggagattgttcttcgcttacatcttcagtgcttgactttaccactcaggttcttcggaaaggagcagatgctgatgatataatatcacctttaattgttttctcaattaaatacatcatgattaatcatgtgaactggaaacacaaggaatgtagtcgttggaagacaaccctacgggtgtttgaattggtgaaaagctgtcttcaagtaaaaccattctcatcaaagcttggtggcatcatttgggaaattctactatatgattcatctgtccacggtgtactctggagcatattatctgtactaacacgattactgcatgactcatataggagcaattatcatggtcttaaggatattgaagatatccagcttgtcctttgcaatggacttgatattatatatcacatcctgtccaatttaccagagggtatgcaagtagctgccgctagagcattctcagcattgtgtttcattgcatataaggcccaacctcagttgatggaaaatgccagctttacaagtgatgtttctgagatacggagattggaatcaaatatatcctgcattctagatgaggatgataaaaataatgattgtttggttgtggctgtattcaaccttttgacatctgctgctcgttatcagcctgcttttcttatttccttgatagagcagagtacgaagtcaactgatcataatgcttccaccaatgatcgtgacaatagagttttggttacttcaaaaagtaatgctagacttgttgaccaaatcttggactatattgataggtccattgagctcatgaatagatctcccttggtgttactcagtattctggacttgttgaaggcactatgggaaagtggtatacgatttttgtttattttagagaagctaagaagctctgtaacattctgggataacttatcacggtgtattcgtgctacacttgatatctcccctattgacaatattgatgccattgacgagaaattttcgttaaggtaccattgtcagggtaaaatatttgagatcatgtcacacgagttatttttgcaaggaaaattgcttacagagacttctaatactgtccaagatgatccaaaggggcaaaaagagcataaaagtgggccttgtcgtatcagtgtagtcttgaaatggttcgataatgctattttggccgatctggtcagtaatttgtcaagtaatgcatacaaaaaggaacttcatcatgcaaaggtagctgcctgcctatgtatcatccatttaataacaaagttgtcaaccggtgatactgggagcttgtctttctcattcatgaagaaaattcagatcatatcaacaaaattgttgcagcaccatgcatttttagctctcctgtcacagtattccctgcatggatacagcggtgaacaagaacttaataatttggttctcaatgatctttattaccttatacgtggagaactcgaaggacgtcagattagctctggcccttttcaggagttgctcagttttcttcttgggtttagaatttttgaacacaatcccttggagcaactacaaaacacatacctgatggcaaatgacaaatttttatttgatgtggagcacatacatgacgagcttggagttgatctctggactgattcagacaagaggtctaaagaagtagctaaaaaaatgctggatattatgagtaaagcaaatttaatgaagtattatgctgatgcaaaactttctgcattgatgtccttcttgaaatttttatctgtctacaaaggagcgatttctaacaaaaacttggacttacctgatggaggcatatcagtagcggccacacaatcagcaattaaatgtgcatgtaaatcatttgagtcaactgttgattcactgctgcctcaagctcatacagatgaggttttgtttcccctcttgtccgggcaagtggaattattgcttactttggcccgaatattgtttcatcaagcaaagaacaagaaatcaagccatctctgtccagatattgtacttctaatgaaaacttcaggtgccagcacttgtttgtttgttgatctcatgccatctgctcatgctcttaagcaaccagtgaagacacttcttgttctgcttttgtcgtcatatgagttcatgtacagcaaggttgacataaaagacctaccaaatgatattaacatttttggcgaattagcccttttaagtgtgagcttgctacctatactgtgcaaattggcagagaatagggaatgctctgatcttgctgttgcatcaatggacctaatattgaagggatctgtaccttctaatttatggatgcctattctgcaaaagcattttcatctccagactatactgcataaatgccagaatggtgatttattatctactcaagttatacttaatttcctcttgaccttggggcgaacaaaggatggtgctaaagttcttcagtctgccaatatttttgcattcttaaagttacttttgagtcagttgtctctggatgactcctgtttgagaaattccttgagcgcccaagtgaaggatgtgaacctatggggcttgggtctcggtattgttgcgtccctgaaccattgtttggatgatgacatttctcataacaatgtcgtgagcaacactatcagcttcctttcaggacatgtgcctttggtgtcatcatatctgtctacacagagtgctactactcatcagagcaagaaacgggcattgtcgcagaagtcacagacatcgctttcagcccttagtcttactgagaatattctcatacttctatgcatcttggcaaaataccattttccacgggacactggaaagaaggaagtagattcagaactaagagagattattatccacctgctagcatttataagcaaaggaagtgtaaagactggcaatgcctctaaatggaactcatcgtttttctgccctgctgttatcaaagaggaagtagcgcttaatgagaaaccaccactcatttgtagcaagtatgggtggttcagatttgcagcaagttgtactttgtcaactgcaggtgtttcagtttctcccagtgcagctttatcagtggtgagacgggacaagacttcaggagattctgattctataaggcagactcgttttactgagatattagctgttcagatatacaggattgcttttcttatcatgaagtttctctgtagtcaagcaaaagaagcagtaaaaagggcagaagaactggagtttcttgacctcgcccattttcctgagcttcccatgccagatattcttcatggtttacaggatcaagtggtttgtattgtcactgaaatattcgaggcaaatgggtcaagcactctaaatcccgagacagagaaggtatgccagctcctattggtgacacttgaaacgtcactttacatggaactatgtgtatcccaatcatgtggcatcaggccagtacttggtcggcttgaagatttctgcaaaggaattaaggctatgcttcaagctatagagaagcactccagttttgaaccttttgtcaggtcgctaactgaaattacttctcttttgtatcccgggcttttgcataataaccttctcatgtgactcttgtaaattgtcactgttaaagagatgtgttgttggctaactttgaattgagccacatatggacttgcatactcagttgacgtcacccgaggaagcttcgttttcgcacgttactgtcaccaaagtaaagtgggttccagcggctacgaagcaaattcgcagagccagggcaccaaatcaaactgaaggcgacgacgcccgaggaagcttcgttttcgcatcacctttgttcggtttcacagccgaggctcccaaagtggccagagaatcttggtggacttgcctttccgggactccacactgccgaccacgcttattcacccgtgtaaattatgctgggattctcctttgctggctcgtctggccgatgtgcgtcccatcatcacagagaactagaaacaaatgatacatatgtagatgctatgcgttcttgatcaatcagacacgcatttttttttctgtagaggaatacatgttcggcgcgttgcatctttacactaccatttgtttgccttctccatcctgtttaagccctgtttcaaaacgctaccatgcaaattaaccctaagggataatttgggagccgtaaaaccggaggggattggagggtctagatttcccttagggttgatttggtgacaaagggatcacgggaggattggaagggattgagggggaaataaactaatttccctctcaatcccctccaatcctcccgagatcccgggtcaccaaatcagcccttagggtccgtttgtttccttttattttgaggaattgga

SEQ ID NO: 21669 - DNA, 1525 bp, Zea Mays
ctccaatatgagattcctcctcctcgccaacccagtcgaagaatcaacagtttgttctcttctctagcgctagctcatggatggatgatcagttgccgagtagtggtggtggtgcatgattgagacgcgccggccgtctgcctatatattcctttctttccttcgtctcccgcgtctcagtctacctccagcgctccatcaccatatgacaacaaaggattccaccttgatccttgaagtggacctccagtgcgagaaatgttacaagaagatccagaaagttctctgcaagctccagtccaaggagaagatcaacaagatcgactacgagaacaccaagaacaaggtcaccgtcgtcggcgccttcgaccccaagaagctttccaagacgctgagatgcaaggcctgtgatgtcatcagggacatcaccatcgtcaagcctcccgaggtgaagaaaccggccgcggaggagaagaagaagccggaggaagaggagaagaagaagaagccggaggaagaggagaagaagaagcccgcagaggagaagaacaagggcggcgaggagaaggccgccaagccagcggcggcggcgccaccgtcgacgacggtgaacctgcagttcaccaacatatgcgggatctgctacccgtggccgtgcagcgacccggcgcaccggggcggtttccaccacccgcagcagctgccgcagccgtggctgccgtgcggagggatggctccagctccagctcccgcgcctgcaccgccggttcacacccacccgcaaccgccctgcggcggtgcccctcagaaatgggcgccgtgcggcggccctccgctgtgcggaggctgcgcgtggtgcctcggcggcggcatcggctgctggtcgccgccgccgcagcagccgatgtgctgccccgggccgtcgctgtgcagagggtgcaacgggtgcaagatcgtgcgcgagaccaagttcagctacgaggagtacccttccagtgcatgtgccatcatgtgatctttgctcctacttgtgttcttcgattgctcagtcctgaattctggtcaaacgagtagcggtctcaaagaaacattgtttttcctgcaaagaaaaaaaaagctccttttctgctgtggcaattttgattcttttcaaatctccgtgactccagatatgtttaattatgtattattgtccaccaacaatacatgtatctgttcacgactcgagtatatgaaacagtagccagtacaactaacaaagtagcggtatacaacaattttgttttaaaaaaaaaacaggaccacgcagtcacactctaaaattagggcattggcagaatcacccccaaaccactaaaatgacttaaattacaagaacgagggagtttttttttctttattccgttagttttcgcacaaataaggacatcgtttttatataataaaaaatatggacgacttgcatgtgtcgtttcatgaataggtttggtatgtgggccgagaattgatctgctctttgagggag

SEQ ID NO: 21670 - DNA, 1013 bp, Zea Mays
cggaatcttgttttgtaaacgtggtgacctatacggccatacccaattcaattttcgcccccaccatgtttttggacatagacattccttggtaaatgagctgattgccggtgcgaaaccgtcaaattgccaaatatctggggacccaaagaatctggaggccagcctgcatgatctccatccagcgtcttggtattgtgttgcatggtatcccatataccggatacctgatggaaaattccaggctacattcttgacatatcactctcttggccactggattcgtcggagcagctcagcaggtggggccgctgttttgccagtcatgggcctgcagtcttacaatgccaaggcagagtggtggtttgagatgagcaagtccgaatctgaaggcgggcagtcgcaggccagtgaagcatccgagattctgaaggagagatcgcgcacgctgagtgaggctgcggccgtgttgtccagggccagcgtgctgaagaatgggcagatgagtagaaacagacatccagactacgagttcttcctctcccggagctgatttggaagtgcctcttcgtactcggatttagttaggtttcagtgtatgtatgtgttgttgacactaaagcttattctgcaaccgatgactggaagctgtttgcttagcttagcttagcaatataataataatgctagtcagttctcatccaagtgtcatgtcactgttattgaagtagatcagagatgaaacaggaaggaccacgaagatccatcggaactgcaccaagaagtccaccaaagccttcttcctcttgcggcgcaccaaaggttcatgcatgtccgaaacagcaaactacatatatcatattatggaagagcttctacactcgatggaagaaacgactgaaggaaacacattgttatctttgactgcaaggagatatctcaccaacacctagctgtaatgataaagctacaccatcacactctcattccaccatatactaatgtttcaggaa

SEQ ID NO: 21671 - DNA, 1059 bp, Zea Mays
cggcggtaacgtatgctttagagtcatcactgcggacagcctgagtccaccccccgtccctttccctctcctacctccacctccacgacaacaagcaaatccccatccagttccaaaccctaactcaaatgctcgctttgactgcctcagcctcatccgcttcgtcccatccttatcgccacgcctccgcgcacactcgtcgcccccgcctacgtgcggtcctcgcgatggcgggctccgacgacccccgtgcagcgcccgccagatcggtcgccgtcgtcggcgccggggtcagcgggctcgcggcggcgtacaggctcagacagagcggcgtgaacgtaacggtgttcgaagcggccgacagggcgggaggaaagatacggaccaattccgagggcgggtttgtctgggatgaaggagctaacaccatgacagaaggtgaatgggaggccagtagactgattgatgatcttggtctacaagacaaacagcagtatcctaactcccaacacaagcgttacattgtcaaagatggagcaccagcactgattccttcggatcccatttcgctaatgaaaagcagtgttctttcgacaaaatcaaagattgcgttattttttgaaccatttctctacaagaaagctaacacaagaaactctggaaaagtgtctgaggagcacttgagtgagagtgttgggagcttctgtgaacgccactttggaagagaagttgttgactattttgttgatccatttgtagctggaacaagtgcaggagatccagagtcactatctattcgtcatgcattcccagcattgtggaatttggaaagaaagtatggttcagttattgttggtgccatcttgtctaagctagcagctaaaggtgatccagtaaagacaagacatgattcatcagggaaaagaaggaatagacgagtgtcgttttcatttcatggtggaatgcagatagtttgcatggaagcagtgatgagtcctgaatatactcatctatcatgagaaatacaaacaaatctagatttttatacttactttggct

SEQ ID NO: 21672 - DNA, 845 bp, Zea Mays
ccccccgccggccgctgcggcaggaccaagggaacaacgagtcgccttcttgcgcgcgcgctcaccattccgcttcccggcacccgccgccttcccgagccgccgcccggctcgcgtgcccgtcgccgccgcggcgccggagcgcaggccgccgggcgcggtggcgtccaccaccaactacgtcgtgccgctcgacgcggcgccgtccgggatcacgcgcccgctcgtcgagatcctccgcgacctcaacaagcgcgtcccggacgccatcgtgcggccctcctcccggcgcgcctccgcctccgaccccgtcatcccctggtaccatgccaataggatgctcagcttttatgctccaggttcacagggaggctgctggaacagcatcgctgagcgatgaacggttcgacgaccccgtgtctgcggcagaagaggcagcgttctgcaaagcctgcgcgaggttcggtttcggcctttacctgtaccatgaagacgagacaccatagaagaccaacaatttctccacatcgtctatgccggccctgttctgtttagatttgcgcttgaggggctgtgctctactgttgttgatcagtaagtctatcagatacccatcccattgctgctaggtccttgagctgttgtaacgctggtactatgttgtttgctcgttttggtagctttgtcttgcaaaaaaatgttgtcagctacaattggtatggattatggaactattagtatatatgcaatacttttttgttgcttacctctaatatacacatctcacactgttcaagtttatagaaaaaatcacgtagcatcgaatttgtttcaatgaatccgcc

SEQ ID NO: 21673 - DNA, 957 bp, Zea Mays
tgagtacaagacaccggaccggttttgggccgcagcggtcaacaccgcctgctacgccatcaaccggttatatcttcaccgaatcctcaagaagacatcatatgaactcctaaccggttgctgcacaagctgtgcagtccgaataaaatcaggacagataaggcagcctgaagcacttgggatatctgcagaactaaaagataagggctatgctttgttgtgtgttggtttcccatctggcgatgttgaagtcgagactcaagatgaagatgaggtatattggctccaattcgggagatactttgcacgagggccagtggaaagagatgattacgcgctagaacttgcaatgggagacgaatgagctgtgcctaagagaccttgccatctaaaatttgaataccatctcaaatttggacccatgtagttctgagtatgccggttatctttttgtggctccaaatctcactctcagccttctttccttcggctgttagcgtttagagtgacaaggacacttcctgagaggaggaataaagttctgctctgctctctattttccaggttgcccccttcccgcctttccttgttcggttgtcacttattagcctggtgcgttgctgcgtgcagttctcgtttctcctctaatagatggcacacgttatgaagtgtgtaaaggtgtcaaaatccaaaaacatccagcattcacaatctttgtcgtgatgaagtgtgtaaacttgtaaaaaattatccaaaatctttaccatgaagctacgagtggctaactagggctggttgaagttgttccaagctgttgtgtcgctagggtatatttagttcgccatcttatcatactttatctaacttttttttactaaccttagataaattgtaaattgtggcacagtcaggggcgaatcaaacatgtttctagtagagtggaaaatatatgacgtg

SEQ ID NO: 21674 - DNA, 2915 bp, Zea Mays
atcatcgcttcctccaaaccctagcctgcctcttaccccgcccgacgacctgtttctgccagtcatatttcccgggcagcgcgcgatctcaacgctcccgtcgcgccctgcccctgcgcttcaaccgctccatccaggcgagatcctgcggatggaacccccggcggcaaaggaggcgccgtcaccgccgctccagcctgcggcggaggaggacgcgatgctctctgcgacggcggtcatggcgaaggaagcctctgtagcgttccagggacgtcgctacgccgactgcgcagaagtgctcacgaggctgctggacatgaaagagggcgatcccaaggtccaccataacatggccatcaccaaagccttcttggatggttgtcctgattcaaacaggctgcttaaaattctttgtgatgctaagagaagaagtgaagagcttgcatgtgcaactagagaacaagctgattctgcaaatggggtaggaaatagtgctccttcaggatcaagagggagtggcgttgcactacctttttctgctacacataatgtgtcgacttatggggatgagtttgacacgaccataattacattcaacatggctgtcatcctgtatcatcttcatgactatgaatctgcactatctgttttggacccattgtaccgaaacattgaaccaatggatgagctttgcaagatgcaacaaaggctgcggacataatacagtacatggaaagggcatttggagtagctaacataacgagcccgaatgaaaatccaagcatagctcagcagcaattagctcaaccgaagcctcctgtgaaaattagcgtgcctccagattctgaattaaatgcttatgctggtggatatgagaacctttcggctggaattttaccagatgatcaaatagaatttgaatctctatactctagttttgatggacatcagaatttgggcaggcgtatctttaatgatttctcaagggcatctgctgatcttgctgctactgctgctgatttgaaagttagacttcagatttacaaggttcgccttctactgctcactaggaaccttaaggttgcgaagcgagaactcaaagtactaatgaacatggcacgtggtagggattcatctacagagcttctcttgaaatctcagctggagtatgcccgggggaattataggaaagctgtgaagctattgagcacaccacataatcgggctgaaccagcaatgctagccattttctacaacaacctgggctgtatactccaccgacagagatcgtatcacacctctatatggtgctttagcaaagcgctgaaatacactttatcacttcgttcagagaaaccaatgaagctgtctacattatcacaagacaagtcttgccttatttcatacaactgtggtgtccaacatttgatgtgtgggaagcctttgttagcagcttcttgttttcgtgaagctatgccgctcttctacaagcgacctcttttctggcttcgtttttctgagtgtagtctgctagctctagaaaagggtctcctgtgtgcaaaaggtgcttcttcatgcaacgatgagattgaagtcattgttgtggggtcaggacaatggaggcagttgattgtcaaccatgtgagcttgagaagtaatttaggttgtgcaggtgtgacttcaggtgaacataaaaagttggtttcacttggatttgctagacagtgtctactcaatgcgctgctactattgaatgctactgaacaggaaaattgggtaaccacatctaatgcagaggattacatccaaggaacattacaaggatataaaaactcaggtcagaagaacactacaagtacggattctaaaacaccttctgccccaactctagctaatgtaaatggtgaacaaaagggaacgagcttgaatgctaccttgcagagttctcttgctttctataatgagatctgtcgaaaagagaacctgaaaatgagacaggccatcctggggaacttggcgtttgttgaattgtgtcttgagaaccccttgaaagctttgtcttatgcaaagtcagtaatgcaggttaaagactgttccaggatgtatatattcctcagccatgtatacgcagctgaagctttgtgtactttgaacagaccaacggatgctgctgagaagctatcagtttatataagagatggcaatgatatcgagttgccgtataatatggagaactctgaaaaggccttggttgagaaagacagtgacagtgaagacttggctgctgctacagtgacaaaagtagccacagaagaatctgagtactcagagggcctcaggcctgaggaggcccgtggtgtcttgtatatcaaccttgccatgactgctgcagtgcagggaaaagttgagcaagccaactacatggtcagccgtggcctggcgatgttgcccaacaaccctcgagcagtgctagcatcggtttacatagacctcttgcaagggaagtcccaggaggctgtcgtgaagttgagacactgtaggaatgtgagatttagacccggtagcatagcagccagcagctgagcatagagaagcctcacttttcatggtttctgtagtttacaattaccatcatgatatttttggacgctgaccccaatgtggatgatcaaagatggtaatgttcctcctgtgtaccatacataagaaatgaactgtagcactgcccttttagcttcaggggtcaaatctcaaatgtgttgtaactgtaccggtttaatttgcctctctttggactgaagagaggtcaagtgatcaaaaacgtttcctatgttacgccaatattttggaaaataatgcttaaaagctgaggggtctgatcgatatacatttagggcttgttcggttagctctca

SEQ ID NO: 21675 - DNA, 5835 bp, Zea Mays
cccctgccggcctaggtccccgcacgcagaacggcagagcgacgccgcctcgcctccatccccgccgcacatcgccacccggcacgaaccccaaagcacgccgcggcggtcgcccacagcccagcagcaggcagcagggcggtccgaggccgagggttttagaaaccaccacccgatcggtacggccgcacgcacccattcaaccgtccgtcgccatcgtcttctccaccgagtcgccattcgccaaaagaaaaagggaaaaacgtccgcgggggagaggtggaagagaggtgggagcgaaggaaaagcttcccgagtgaagaagtgtttcccaaaggtgtggataaggccgacgcccgacgcggttggaggctccggctcccgagaaagtggggggctttgtcgcgggcctagctccggcggaggaggacgaggcctgctggtggacttgctcgcccgcctagggttttgggctgccggccggcttgctcggaggccgcaagtctaatggctactgagagtgctttccgattgattggtgggacgggggctagggactggagtaagggatttggtgcatttggctcttcagcaggtgccttatcaggggaagacttgggatttgtggataatgacactggggtttatgggggctggaacaaatctgttccaaatcgtagtggaagcgcaccgcctagcatggaaggatctcttgctgctcttggccatctcattgatcagcagagtgggagctttgaagctagtttgacaaccttggataacataactgacagttccaaatctgaggagcaactacgtgctgatccagcatattttgagtattatggctccaaggtgaatctgaatccaaggctccctccgccacttatttcaagggagagtcgccgattaatgaaccgtgttggcaaggctaaagagtggaggatggtctcccaagataacagcagcaaaggctcaatatacgttcctcgatctatgttgtcaactcacaaagaagaacctgaggatgataaatctccaagattggattcaagttcagtggaggatgcccagattgtctccagtgcatccaactttcagagccaggattttatgctggagaggtttcaacagagtgttgcttcttcgcctgatagttcatcttctaatccttcaaatagcaacactggtgattctatgcctgtatattctgacataaatttgttaaagagtttgtcatttgatgctttgaagcaatcggatttgaactcttggacaccaaaaggcccactgaaaagtaatgttaacaatgacctttcatcgccacccctttccagttcatcatatcctggtagcaaaactggtacgcaaacttttgagcaagaaaaggctgctgctgacaccaaacatggaaatgttgtgcttggcagtggcgcagctgttactgaagttgataatgtggactccattatgaagaatttgaagttaagtttggatgtccatacatcctcacctgccaagcagaggtggcaggacaatgtcttgcagcagtatggttcctttttaccagcccaaggtgatcctattcaattgactactcaaggaccccatcctcctcatgtaccttttgttgataacttgtctcatgctcagctcaagttgcctgacatccaccaaaatttaccacaacctagtatgacaacacctttctatacaccaaattcttttgggaacccttattatcagaatttgcaccctgctaatgcttttccaacctcaattggaactgggggttatgctgtaagtggttctattttgccaccgtttatggctggctatgctccccaaggtcctcttgctacacctcttgacagttctatgactccaagctttagtggcaggccatctggatttcttccagcagggaatcttacagggggaacagattttatgcagtcatgtaaagtatacggacaatttgagcctggtatgcagccatccattcccgatccgaacttcattcatttctttcagcatccctctttatttcagtatactggaggaaatcaatacaatacaatgggtccaagatttactgttgttgggaatttagctgaaagctttgattcacaaaacacgatacctcaagctgcatctgcatatccatctgatcagaggcttccactgccaataactggctttcctaattctcctacagccagaagaggagggactgttccaaattatcaaggcatttcatcctacattggagtgccaatgacttatcctactagtccagtgtttcagggacaaacattgcctggagtattgcctcctgttaggagaaacgactctgctggatttctgcccccctcaagaaacatcactggtagccctggaattcaagggcagcgagcaagacagaagtttgatgaatcaaagacctgctctttcttagaagagttgaagtccaacagagcgcgcatggttgagctttctgacatcacaggccgtgtagttgaatacagtgctgaccaacatggtagccgattcatccagcagaagttggaaaactgcaccgccgaagagaagacatctgtgtttgccgagattcttcctcatgcttcagcattaatgactgacgtttttgggaattatgtgatccaaaagttttttgaacatggaactcgtgagcaaaggagggatcttgccaccaagcttgttggtcacgttttgcctttgagtcttcagatgtatggctgccgtgtaatccagaagcccaagcacgtcctagaggcggcgacagaaatgagttgctggcaagtttgacaaaacaagcagacatggtcttggtggctcagcaggaattaatcacccaaaaaaacagttacaagttgggttcatgcatgtcttacgtcaaggattgtactccccgttaaactgttggttcgggccagtggccggcccggtacgttcaggcccaccgggcgaacgggccggcccggcacgatttatccctgtgcgtgccgggtttgggcatgtcgctaggcacgtgggccagcacgacccggcccgaagcatcaacgggccgtgcctggcccggccctatccgtaccgggccgaaacgggttcggaccgggtccgtgccgggtggcccgtttggacatctataggtccctatttggacctgaagtgaagcattttaaagttgaaggacccagattctcacttcgagagtttatgaacctagatgagaatctaaggtaagttaggacccaagcgcatcttttgttgtttttttaatgtaacaggcacatcttttgtaatgattatggaaatacagaatatgttatgcaagactttctatttctcagttctgtttgtacatatcattttgtttttcatcaacatgtgatgcttggaagttggaagtctccaattacttcaaaagctgcttggctttaagattagctgatgaataaagtgttagatgtcttcagtggtactaattacatgtgccagttgttgatggcttcagtctttgtaaaatgagtgccatttgtgagatgtccttctgatttgagtgcatgtgcagtgttagtattacagttatgaaaacacctgcagtactagagtgagcatttgaaacatgtagtgtttagtactgtcacaagtatctgtgggatccattccttttagtttatattctactgatcaatatttttcattgctagtctctgtctccatacataacttttttcccttctattattgcaaaaaagcatcagagttctatcacaatatccaccattcacttcatgtcattgttagttactcatccctgtctcttatttcaaactccactctgtaaacaatacaaaacagtgttttgcacagccatatgcacgatttggtggtcatagccttagaggggtatattttcgtaatcgctatgtcattccgagggggaaagtagctatgatatgaaacagtgacctcttttatgtacttagtcatttctgttagtctgctaatgatactgtggggctggtgatgcagcgcaagcaacttaaaacttagtttctcgtgtgattcttgatatcatctagcttaatgtgagcaactacatctatcattattgattattgcttccagtaacttctctctccaaacatgtaggctctggaagttatggaacttgaccagaaaatagatctagttcatgagcttgatggtcatattatgcgatgtgtccgtgatcaaaatggaaatcacgttatacagaagtgcattgagtgtgtccccacagaacatattggttttgtagtgtctgcttttcagggacaagttactagcctttcaatgcatccatatggctgccgtgtaattcagagaatcttggagcactgcggtggtaactcacaaggccagtgcataatagacgagatattacagtgggtgtgcatccttgcgcaggatcagtatggcaactatgttacacagcatgttctagaaagaggaaaagctcatgagaggagccaaattattactaaattggccgggcaggttgttaccatgagccaaaataaatatgcatcaaatgtgatagagaagtgttttcaacatggtgatattgcggagcgggatcttctgatcagacggattgtggagcagacagagggcaacaacaatttattggtctgtttggtagtgtagtaaaagtgttccctccattatcccttcctctctttgccaaacgggtcggggttctggaaggtagggctaggacatggggacctgatctcagttcggtacagccaatcagataacaccatgagtatctcagttctgctattccagctttctgggagctgcgaatcctatggattaccaagacatgggatctctgtaaacttatttcttcctgtgttgatgttagtttatatttcctaatcaccttttatattcaatcaggcaatgatgaaggaccagtatgctaattacgtggtccagaagatacttgaaacttgcaacgaggatcagcgggagcttctgctcagccgcgtaaaggatcatatgcaagcattgaggaagtacacatacggcaagcacatcgtaagccgagtcgagcagctctgtggcgacggaactgccgagtcaggttcttgaaacgaaccgccgcctaattcttcataggctggagggtgtcctgctcttttgctcattccgtcagtgacgaagaaagcaaaacggatcaagtctaactctggcgcttcagaacagactaacaaagctgtcgtcgaagattgtataggtgtgactctgttcagggatagtcttcaggttctagaacagaagggtagtggtgtgcatcagtgtatctgtttactggataatagtggttggttaggtgtgtgcagaaaaagtttagtgctatgctttgtatgtgatacatattaactatgccttggaatgttcatatgttgtcctgattacgtgtgatatctctcgttcagttcaagttgcgttttctacatggccatgggaccatctgccgatttgatgaaaaaggaaaggttgtgcacctttgtaagcgggcatggagatgagctgcgctattttttttttttacaaaatgtctgctgggattgaactgtctattttataaaaatatcatattttcttttaatgtcaacagaaaaattacggactgtgtatggatcccatgtagctaaggccagtgagtgttacgatgctttgtcagttgatgttatgtcagtcttttcattgttaattctgaaagtagattttatgccgatgaacctttataaaaag

SEQ ID NO: 21676 - DNA, 1588 bp, Zea Mays
gcaagccaagcattctcctcacacacgtacttccgccagcgcagctagctatagctgttcgcctgttctcttctcgcgcgccatcatctctcgtctgtgatcaacgtcggcgcgcggccagcatggagatgatcgacgcggagctgcgtcttggcccgcccgggagcaacaacagcgacgtcgtcgtcaccgtcgtgccgcctgcagcggcgaggaaaccggcggcgccggcgccggcgtcggcggcgaaacggccgtcctcgtcggtggtgaagagcgacgacgcgtccgggacgggcgaccatgacgacgacgccgcaccggcctccaacagagcagcacgcgacacaccgcgtacacagctactataccgcgcgcggagcgaccagctgatgatcgggctggtgctcgtgaacgaacgccgcagggtgcgggcggtggggtggccgccggtgagagcgtaccggaagaacgcgttccacgcggcggcggaggcggcgaggaggaccaataataagggcgaggagctgcagggaggaggcggccgcctgtacgtgaaggtgagcatggacggggcgccctacctccgcaaggtcgacctgcggacctacggcggctaccgggagctgagggacgcgctggacgcgctcttcggctgcttctcctcctcctccgcctcctcctcctcggccgacggcggctgccagttcgccgtcgcctacgaggacaaggacggcgacctcatgctcgccggcgacgtgccctgggagatgttcatctgctcctgcaagaagctgaggatcatgagggggtccgaagcaagataaccaacgcaacaacgaggatgcaaaggacatgttggatgcatggcatgcatggaggtccagctagctatggtccgtccaactcatgcatgggacagagggagagagagagacagaaaaaaaaagggaggtctttatatctgtcattcactggaattggaggcgcggcgtagggtatatacctgcacaggggtcggaggccccatgcatgcatgcgcgcgtcgtcgtgttctacggccagcccagccggctcataccatacacaccatggacatgcacatgatcagatggagtggagcatggaggtgatggttcaaggatcacggcggcgtagtacacgtcacgccgtgtctcccgccaccagtcaggcggacgtgctgtggacggctgactggacgtgcatgcatgtcagatcggagattattcagccaagtagcatcggtgaaaagctactatctagaattttttttgtactgtgcacgctagctcatatgctgtagcttatgcttgctagcctatctgtaactttgagctcctcttttgtaagtgacctgggcccatgtatattagttcattctaggggtgcagccgcacccacgtaaaaaaataagaaacaatgtgggattagaaccaaatataattgccaccgctttattatatacttgtacgataagaaaaatcacacccacaagacaacgtctctcctcgatcgatctggttttcgctctaactccacccctggactggactggactggacctgag

SEQ ID NO: 21677 - DNA, 1119 bp, Zea Mays
ataaattgaggcaaaccttctaccctcaaatgcggagaggctgctctgaacccgtgacctggtgactcggtatctatggcccaaaaggcgttactgttcctgatccggttcaatcagtttgcacgagatggggcagtgatcctttttgctcaggttcatactcgcacatcagagttgggtcttccggtgctgactatgacattctttccgagagtgtgaatgaccgactcttcttcgctggagaagccacgaaccgcgcgtaccctgcaaccatgcacggggccctattgagcgggttaagagaagcttccaaaatctatcgtgcctcagatagcttagtgaattatgaccagaagaagaattcactgccaaagagcctcaaaccaccagatggtgcccttctagatctcttcttggagccggacctagcattcgggagattctcgttcgtgttctcctcactgacacccgatgatccagcggctccagggttacttcgggtttcgctcgacaagcgtttccttctgcagcccaattataattcagagctaaagggcgaccaaaaggatcacagccacagccacgcatctggggccttccatctgtacgccgctgtctctcgggagcaggcagatcggctacgaaggtcaagcgaagatgacagaactaggttaggagtattatgcaaggatcgtactgtaaagctaatgggttacgatagtacttgcgacgtaggtagcgatctgatctcgagcatcttgggtgcgcggaaagccaggaaactgctgcagcacccaaagaactccaagatcccgcgttgatgtgtacccggttcctctctttttttcttctttgtagaacagaatgcattcttttgttatgtacacaaggtacgaagggccggccgccggctggtggagctcagattttgctgtggcgtgtacaggctacgaactgtgacgcttcggcaggaacgtaactgagatcctccatgttctggtcctcacttgtaaaaattgccgttcatgtgacttcagacttcagttgattagatattgttctgtggatttaactgcaggcaccattgtgatcttgctctatctatctttcgcctgagta

SEQ ID NO: 21678 - DNA, 972 bp, Zea Mays
ggggttactgatggaaagaagcaaaagggttgctgttgtcaccggagggaacaaagggattgggctggaagtatgcaggcagctggcctccaggggtgtcgcggtgatcctaacggcgagggacgagaaaaagggaacagaagcagtggctacgcttcgtggatccggactaccggatgtacagtttcaccgcctggatgtcagtaatccaactggcactgcccgtcttgctgaatttatcaaggagaagtttggcaggctagatatcctggtgagatctcttttttccagaaaaaacagaattgatttgatgcgtggtaaacttggcttaacccggtgcatcaaacagctcgtaggcaagaacgccatggagaggctacaatggttggtgcagcactccacggagagttacgaggaagcaagagaatgcctgaaaataaactacttcggcaccaaatatgtgaccgaagcactcctcccaatccttatatcctcctctgacggacggctcatcaacgtgtcatccaactatggactactccagcatttcagtggcgaagatcttaagcaagagctaaacgatattgacaacctgacggttgagaggctagatgagatgccggagttgttcctgaaagactacaggagtgggcagctgaaatctcatgggtggcctgccgactctgagtacctggcctacaaggtatccaaggctctgaccaatggctacaccaggatactggcgaaggcgcacccagagttgcgcatcaactgcgtgcaccctggcttctgcaagaccgacatcaactttgacaccggcgaatacaccgcggaagacggtgccagttgcattgttgcggtggcgctattgccggaaggaggcccaactggcgtgttcttcttccgcagagaagaagtaccctttacgtaacgaaggcatctggcacacttgattgcagcgtgatgataaac

SEQ ID NO: 21679 - DNA, 623 bp, Zea Mays
gacgactaaaatatttggggcaaaataattaggggagcactcgaccgaccacggctaggaagagcaccgtggcgagccatggacagggactcgtggccggcgagcaaagaggagcgagggcgagctaagggaaggagctggaggaggagcgctcggctaagggcgagcagcaggagggcggtcgagcgccatgggagtgggcagggcgagctcggcaagctgcgcgcaggggacagaaaaacagggcgcgcgacgcaggaggaaccgagcaggaagctccggccaggaggacgctcggcgagctgggcagagggagggaacttgggcacgatgcagtggagctccggctgggcgtttctgccggcgagggagaagacacgcaggagctgcagagcagggaccgagcgggagcagaacgctgggagagccgctcggctgtacttttaaagggctcatgggcggtgccgtagaaaaatcataggaggaagaaggatagcgacgatgctgtgcggtggcgagaagatttttttttccgcagatgaacgcgcgcgcacaacaccaggggactcgcggcaggagcagcgagcggcagagaaagtgcgacgagcagaaagaacatgagg

SEQ ID NO: 21680 - DNA, 313 bp, Zea Mays
cgggggtatacttattaccggagattgtgcagcgaatgggcccgaccgcggtgactagattgcgcggaggcgagatcaactacggtgtgcaattccccgcgctccgaccaccccgatgcaaggcaatgcaccgtacgggaccaacaccacttgaggacctccctcagcttcttcacgcggttggcgtcatgactttgcccgacaccgaccgaggcggctctcagccctctctctctttctcggttcacggagatggccggggaatggaggaacgtgctgcgcccgagatgccaggaggatagttatcccccac

SEQ ID NO: 21681 - DNA, 1599 bp, Zea Mays
ctacagcctacagttccgcggttttgagtaaacaagcgagcgaaaaaataagaagagagagaaaaagaaaaaggagaggcccgcgactgtagtgggattgtgggaagatgcctcgggatggcgcgcaggcggcgccgccaccggagcgcggcgagatggacgaggtggtagaggcggacccggatacggaggcggaggatcaggaggagaggtgggcgaggctgctgccggagctgctctccgacgtggtgcggcgcgtcgaggcgtccggcggcgagcggtggccggcgcggaaggacgtcgtctcctgcgcctgcgtgtgccgccggtggcgggaggccgccgtctccgtcgtgcgtccgccggcggagtccggcaagatcaccttcccctcctcgctcaagcaggtcgattgcatggcttcccttatatggcgtcatcagcggttttgatacgtaccggccattcagatatttaggatatagtttgagaagtttcctggccaattcagtgtcgtagtgttttttatttgacatctgtgtacctaaatcttacaccatttctcaaaacacagccagggccaagggagagaccaatgcagtgctttatcaagaggaataagaacaactctacattctacctctaccttggcttcacaagttcacctgtggataaagggaagtttctcatggctgctagaagatttaggcgtggtccccataccgagtacattatatctcttgatgcagaagacttatcacaagggagcaatgcatacatggggaaactgagatctgatttctgggggacaaacttcaaaatatatgatagcaagccaccatatgatggtgctaaagcatcaagtagtcgatctagtcgtcgtttcggaagcagaaggattagtccccaggtatcggctggcaattatgaagttggacaggtttcatacaaatacaacttgctcaaatccagaggccccaggagaatgtattgcactctcgaatgcccttcagcccaagagacttgggaaaactcactcaagacaaagttcaggcgccccctgggccccacaactttacgaaataaagcaccccgctggcatgagcacctgcaatgctggtgcttaaacttccatgggcgggtaacagttgcatcagtcaagaatttccagcttgtggctgctgccgaccccagtgagcctactaccaacgtggatgatgaaacggttctgctgcagtttggtaaggtcgatagcgatatgttcacaatggattaccggcaaccactctccgcgtttcaagcatttgccatcagcctcagcagctttgggaccaagctagcctgtgaatagcgatgcagtttgatgctcttcgtgtggctatatggtttgtgttggtggttgcttgcttgtttcttgttgttacgatgtgatccgttcttcgttttagttgagtatttatgtactatttgtaccacaagagatgtaataaactattgtattgtcaaacggatttgttcaaggaaattatgtgtaatgaacttttgctctagttccatgcaaaagacaaaaaaaaatgctaagcaacagtaagaaaaata

SEQ ID NO: 21682 - DNA, 598 bp, Zea Mays
ccaaaaagaggaaggataaggacgcaaagaaaagaagtaaaaagaggagaaagcacaaaagttcatcagagtcaagttccagctcatcttcagaatcttcaagcagcgacgatgaggataggggttcaaggaagtccagatcacggtcgagatcaaagagaacaaggaaggaaaagaagagccggtcaaggtccaagcgcagaggcagtgaaagcgaggaggaaggcccggtacgcctctctaaattcttcgggaagtaaggagtagacgccgctgtacccaagacgcctttttcattttgaaacgtagattggtgggtttggatgtatcattcaacacaaattacttctgaaggttgagcgagccgtttaccatggtgttctcaatatgatgctcagctgttaagagggtctggtcaagttgtgtggcttctaaaaactttgtaagcaactggtaagtcattgttaaatcgctgtaccttggaggatttgatgccatatatttgagacattgaactgctatatttatgttaagactttacatatgcagtcagttgtttcagttatatgctcttttgctatatttatgttaagacttt

SEQ ID NO: 21683 - DNA, 1763 bp, Zea Mays
gggcaatgcaaatgaccaccaacctggccttccgtgtgcacgagcactgcacgaccactgcctgcgtgcatcaccgcaggaaccagactgatgagtaatctaatgactcattgtgttgtctagggcaggcagaatattacgcacgcgtgttggagtatttttaaaggatctcacgttacatgtggaataacatcaacaaagttgggggggaaatgtcgagaggcaatttttttttggcacagagaaaaaagaagttgcaataggcggagcggagagaagctttagataccttttcggccacccatcatatactctgtctgctgttcttccctataaattcgtcgacctctccatatcacagagagatagagagagagagagatagacaggagagagagagagaggggaagagagagagagagagagagagagatagatgtggtaactcaagaactgttcttatgcatgcagcagccataagcattgctactagcgtctcctgcacgtgctgtgtcgtttccagggtttcatgcggggcgaagcagctggtctctgccgcctgaacgccgccggaatctgcgaggcctccccgagctgcgtgcgtcgtcggataaggcagccggcacggcaatgccggttccgcttgctccgtacccagctcctccggcgccattcacgccgcccaatggggcccagagccagctcgtctgcaccgggtgccggaacctcctcatgtacccagctggtgcgacgtcggtctgctgcgccgtctgcagcaccgtcaccgccgtgccggctccaggtacgccgtacgcgcatggcatgaatcaatatcaccttcgtcaagaacttgcgagcaaataaacacggcgccgtggagccacatttgtgtgtgcagagctagcagtgcaacactgtccctttcgtctctctgttctttttaaccagttaagaagtagcatttgctgcatccataaagttttgtttgcctttttttttgagatgaaggctttcattcgctacagagacctagctgtaggttccatgatagttcaaggggacaactttggtggtttccctctgaacctcttgcagttctggtgctgtagcagtagttggttactggcctctgaaacgtgaagctgccgcgtgaatcttctgcaggaactgagatggcgcagctagtgtgcggaggatgccacaccctcctcatgtacatacgcggcgcgacgagcgtgcagtgttcttgctgccacactgtgaacctggctatggaaggtaaatcctgtgacttcgattcctgtacgaaagaagaagaagaagaaaaaaaaatcctgctttctgtatattgtgtggtctggaaagctcagcaaccttccaatagcattttaacgtcgtagaattggcctatcttggagtcgtaatcgttgaaattggctattatccagagagatggaaaagcttgacagggatgtcctagagtcactggactggagctgaatgaatatctcgtagagatgcttcagtgtgccgagcacagcatttactggaactttcctacaaggaaggattttagtcccatgaccatgaccacccgttgaattcatcaagttgcgaactttgtcaaaaagaaagggaaaaataaacatcacgttcagagattgtgtatttgtccagggttcagaaatcaagtgctctgctcattcctaacatctccagtgacgaacggtcttcttgttttttttcttcttcttccgtcgcag

SEQ ID NO: 21684 - DNA, 2259 bp, Zea Mays
cctcccttcctgctcattttcccgatgaggatgttgtgatgtgactgaagaagtgaagaatcctaatgtaactgctacggcaccgtgtttgcagtcgagtggatttgctggctgaatggccaaaggaagaaagctccaacaccagaggaattggctgagctggaggcaagacgtgaacgtgtcaagcaaaacattcagcgtatgtatgcggtgtttcctacttgtgtactcatgtatgattttattaataagcctcactgtgtgcagtgagcaagagcccaaacatgttttcttaggcatttgcagttgagtaacccatgttaattgcctcaactactttatagtagcccatatgtatcataatatgcactgtatgctactttccataccgttcactggacaaggctaagagaaatgaaataaaatgctggttagatatgtgtgtttcttgtatttgatgctaaattcttattttgtaaatagaaactgtattgtattttgtgctaggatcgtcaacaaggttgtatgagacatgatcacttgaaaactttgatctctattactccatccatccacaaaagggtgcaattttcacttttcgaggagccaaacagtttgaagttggaccataattataccaagaagtattaacctttatggtaagataagtagaatggcagacccagtgccggaggctcccacatgagtggtgtgtgggaaagggataaaccgaggcaagtctttccctacaaatacgaagagctttgagcccgtgacctgatgactctagtgagacaactctcaccgctgcaccaagcctgtccataaaattaattatgagatatattttcgtagtaaatctagttagggacataaatgttaatattattcactataaacttggtcaaactagtttgacttgcacaaatcccacagttgcatccttttgtcccattagctgcatccttttgtggatagagggagtacaactttgcaagcattccatctacgaattagaataacgttaacagtcagttgttttggtgtgtgattggtgattataaaagtaacaggacatgctgtcgtgcactcaaaatttggtttgttaacctcgtgattagggatgtaagctctgacaccatatagttgtgggccagttagctacttagctagctaacttctatcccgcatcccttcctttgatatttggatttgttcaatcgagtattgggttgatccaatgtcctaggaatgcaaaactcccatccctactcacgatctgaattttgatgatgtctgctatatatctatttaaatttattcacgaaaaatatgttgaaagtgctggcgtattgtttatggcctgaattttgtagagaatagttgttacaatgtaatatactggatacgtttgcagctatgaagctttcattctagttgaagacttgcatcgcggtaaaagatctgattcacaccagcatatgtttgtcacagcttcttttaagttttgtttcttcaaggatcaagattctcatgcatgtaattttgcattaaccttggttattcataaagctgtcatctttttttagtttgatggccaataatgtgtgtttttctccactaacatatttgaatctatgttcaatcaagttctcaaaaagaaagaagaagaggaaagaaaaactggtatccaaccagtcaagaaaattgggaaagctgaatctccaaatctccaaagtttcgtgaagcagcagttctcgggtactcctccagatcagcagaaaggacctgaggataggcctaaggacacaactcatacagaagatgctacgacagacaatgagaggtatactgaaccaacgggaactggtgccactttcaagccagggacttggcagccaccaacatgaatgccaacatgaactttagaagatgaaggacggtgtaccggagcattttcctttcacctatctgtgtaacattttaacatttgctctgaaagaatcactagcctatgttccttctttcagatggttacccatctgatggagttatagccttaagttccttcttttagatgcttacccatctgatggagttataggtgatcgggggctcccacggtatgctgttttttttgtggctaaattgtcctctgtaatctttactgtgatagcaactgtaataaactggaccagtgttttgcatcagggctctcttagagacactgttcaacatattctagtatgtctgatgctg

SEQ ID NO: 21685 - DNA, 547 bp, Zea Mays
cccagtcccctccgcctccggtctccataacctagccgtccctctcctcggtgcagcggtgcccggacgctggagcgacctcaagtgctcgacaggcgtcacgggacacgacgctcaccgctcgctgtcgctggtggactacggacgactggaactggattgctgtggagaactggattgctgactgctgtggagaatttggactttgaagcctgaagtctaaaccatctgtgaaaggcatacaagagtggagaactgcaggaaactctagagaaagcaatgtgttcgtagaaaaaaaatgaacaataagcagatggcatacaattaatcaaaatgttatagtatttgctgtacaattcaggcttgtcatcaactggagatgcaagttgtggataattcatgtccaaatgttcagtgcactttcgactggaaatacatctttctgcagtttgtgactagtcatccagtttgaaccccgatcatatattgtacgatttgtgactaccagattgctccgttttcagctgcaactaccgcgtccgcccgc

SEQ ID NO: 21686 - DNA, 1794 bp, Zea Mays
attagacgttaaaaacccgacgcgatacggaacccctgcaactaagcggaaagcttcaaagggagggagggagggagggacagggagagccagagaggagggagaagaaaatggtcgcggcggcggcggaggtgtcgacggcggcgacggctagcagtagccccccggcggaggagggggagcggcgggacgagagcgagagcgacggggagatggcggggctggcggccgtgctggacttcgacatgctgtgcgcgtccgtggcgctgtcggcggagaggaggaaggccggcgcggcgctggcgggcgcggccggcgactgcggcggtggaggcggaggggtgcagaggatgtgggagggcgacgtcgtgctggattgcctagacgaccggcgaatcgcgctcgagacgtcctgctgcccatgctaccggtttggtaagaacatgcggagagccaatctcggatcttgcttccttcagggaatggtttactgcattctgttggctgctgtcctaatcagcctaattgccttttctgtaacaaggcatcatatatatttatatatgggaatcggctctgtcctcttgatagccatctatactggttatttccggagaagaatcaggaagcaattcaacattcgggcaagtatttcttgggatagctagttttcagatatagtattcagaaagtttcctgtttactgcaagagtcaagatgtagcgtttattgcagttgctccagtgcccatcttttctagaattgtaccatccttgacgcccttgtgcaaattgttgcaccattttgcaaagctaaaagtctaaaatgaaagtaactgaaacttggaggtatatcgatggttaggtacaatcaaggccgtacctatcaacataagtatgctgccaacatgggagtaatattagtgtactttaattctagaactgcaggcatgaaattctagggagatgccattcacattggcagggagtcttcattctgataaagctgacgattcacccttttgtacttgttacagggtactgagagcagtctggacgattgtgttctccatctcatatgtccttgctgtacgctgtgccaggaggctagaactttggagatgaataatgtccagtgtggtgtctggcatggccgaggtgataccatttgtttagggagcaacggtgcaggaaacaaggctttcgctgccctgaacaaggcctctctcgtgcctgtaaagtccccggggctgtgtggcatggatagatcgtcaagcgcagctgacgagcagcagccgcttgtcccaccggaccaactggagcaggtttaggtattctctgtcgccacgacctctgcactttcctagaagggcttggacagcgccgacggaaaaaaaaaatcgtcctctgccggattattaggcgcctgcatctgcatccattggtcccgagaactggactttgcagctaccgtacatgggtgatgggcgcagtcgacctgctgctggctgctgctgttgtaaaattcagtgatagattttctcttgcagtcgaattgtttaggtcgaagactgtatcttcataatgtcacgacacgtgctcaggccttttgcctgaatccaactgtaaatttcagatccaatctagcagttcgagttacatagacaggaatgagatggtaatgttcttttcaccggccgtgcttgctccctgtatctttcatacgctgccccttgtcgttcctgttctcaggagcttgattaacactgttttctttacgaaacgtcattttccg

SEQ ID NO: 21687 - DNA, 4125 bp, Zea Mays
gactcggtggcggcgtcagaggctccccctcctgcctcgcgccctcgcctccggtcctccgcacaccggccggcgaccctgctgtctcccggccccggcgggcagtgggagccagcagctgctgctccaacaagcaatgatgggaatagaaggcattgcagccacagtcaccgaggaccctgaaccctcaattcctccaggatttggaccttttgctgcctcggcatcatggggaatccaaaacgatgttaaacctgctgatgatcattctagttctgttttagcattacagagcatcgacgacgatgtggaaattttggaatatctatccagttcagtggatcaccagagtgacacaggttgctgtatttctgggagcaatacctgtaggaaatcactgcgtaatagacctccaatagattatagccgctttgatcagattgcagatgaagattctgatgctgaagtagcagacaagggtgtaaatgcagtgaaacacagacaacaattccctaaaggagtacttcgaggatgtccagaatgtgccaattgtcaaaaggttattgcaagatggaatccatctggtgcacgtaggcctgttcttgatgaggctcctgtttactatcctaccgaggaggaatttcaggacacattaaaatacattgagattatccgcccaacagcagaaccatatggaatatgccgtattgttccaccagcttcatggaagcctccatgccttcttaaagagaaaaacatttgggagtgctcaaaattttctactcgggtacagaaggttgacaagctccaaaatcgtaaatcgcccaagaagagcagaagaggtggaatgatgaagaagcgtagaaagatttcggagactgaagaaaacaatcaccatcaaattggaatgcagcaaaaccaagagagatttggatttgaaccaggaccagagttcacactacagatgtttcagaagtatgcagatgacttcagtgatcagtattttatgaaagataaatgcagagattcaccaccatcagtggaagatattgaaggcgagtattggcgcatagttgaaagaccgacagaggagatagaggtaatatatggtgccgatttggagactggaacttttggcagtgggtttccaaagttatgtcctgaaatgaaatctgatgtggaggataaatatgcacaatctgggtggaatctaaataacctgcctagactacaaggttcggttctttcttttgaaggcggtgacatttctggtgttttagtgccttggctttatgtcggcatgtgtttttcatctttctgctggcatgttgaagatcatcatttgtactcactgaactacatgcattggggtgctccaaagatgtggtatggagttccagggaaggatgctgtgaatttggaggctgcaatgaggaaacatcttcctgagttatttgaggagcaacctgatttgcttcacaacttagttactcagttctcaccatcattgcttaaatctgaaggagtaccagtctaccgatgtgttcagcatgagggagagtttgtcctgacgttcccacgggcataccatgctggttttaattgtggcttcaattgtgcagaagctgttaatgtggcacccattgattggttgccggttggacaaaatgctgttgatctttatcgtgaacaagctcggaaaataactatctcccatgataagctgttgcttggggctgcaagagaagcaataagagctcagtgggacatcctatttctcaagaggaattcttctgttaacttgaggtggaaaagcatatgtggacctgatagcacaatatgcaagtcactgaaggcacgaattgaaatggagttggtacaaagacaaaatatatcctctccatgtcaatctaggaaaatggatagtgagtttgattctactgatagggaatgtgcattgtgttactatgatctgcatctttcagcttcaggctgtccatgctccccagagaaatatgcttgcctggtacatgcaaagcagctttgttcatgcgattgggacaaaaggtttttcctatttcgttatgatgttaatgagttgaatatcttagctgatgctttagggggaaagctaagtgccattcacagatggggtgtctctgatcttggattaagtttgagctcctgtgtcaaacgggaaaaggtccaagattccaagactgttcgcagattaactgatggcccaagacggtcctacatgtcacaggcatcaacagtatcattgattccttcttctgttagcactgaacagaaaaagaatgaagataagacactggatttaggttgcccaggtatgaatttaccaaaaataagtccggaggcaaataatctgcgtccttcgacagaacagataaaatcagaaaatctctcacagctaaaggaaccatgtgtgaagaatgaattatcttgtccgaccagcaatggtaccagccaagaacataaaggagggattggaggccacaaacttgcagcagcaagcatgatggttctttctggtcaatcatttcctgcaaatgctggtgaatcagtgagaaatgcgcatgtcttggcagtatttaaagagggtagagactgtacatcttcacttacacttagggagtatcataacaggccagtgtcaatgattgataatggagctaacatgaagctggatctggaaaacatagacaattctcatatgttgatgtcatcaccagacttcaatgcaactgtatgtcattcttacaaggatcaaacattcttaacactggaaactaatacctctgtgatgactgagaaagatagcagtcaggcccgtaatgcaagccagcagtttgtcagtactgctttaagaacacaaaatgtgtctcaggaaccattgtgtaccgcgattgctccaaagcaactcatagatcctcaagttcagaaaaaatcatatggtgtttttggttctggcagtgcccatcttgggcatctgactgttggtaatcagcaactaaatgagagatggcatcaaagacaatctgattctttatccagtgtggaagttagagctaggggtcattcagctatgatagtgcagcctgctctggaaaatcacagcagaaatggagttgcacagaagggtcctcgcatagctaatgttgtacatagattcaagtgctctgttgaacctatagaaattggtgctgtgttatctgggaagttgtggtcctcaagtcaagcaatcttcccaaaagggtttaagagcagagtaaaatacttcagtgttgtagatccagtacaaatgacatactacatatctgaaatattggacgctggacagcagggaccactttttatggtgactgtagaaaactgtcctggtgaaattttcataaacatctctcctaccaagtgctggaacatggttcgtgaaaggctcaatatggaaataaggaggcagctcaatatgggaagagctaaccttcctacactacagcctccaggatcagttgatggccatgaaatgtttgggttgttaacaccagcaatagttcaggcaattgaggcccgggacagagattatatctgtacagagtactggcgatcaaggccccatgcaacaattgagaatcgagacaatcagaatatgtcacctcaggatccaccccttgttgcactgagggggctcttccagcgggctaattgtgatgaactgcgagcactacgcagtttgctgatgagcaatagaattctgggcgacaattctaggcagcaggcttgccaaatccttgatgaggagattgcgaagcaatggcactgaccagcgtaaatacaggatgttgtactaaccaattgtttggcatgattttgttttgacgggataaatcagttttaaggcttgcttcttccgttgcccttgtgcccattcttttcattcttgtgaccatacccaattctttattgcaagtggtgtcaacaagcatgaggctacagctgcatcacctgcaaggaagtcaaaaactacaaccaagtaaagctattgcacactcctcaacaactgtatgcaagaagcaggatagcggatgaacatgtatcctccag

SEQ ID NO: 21688 - DNA, 771 bp, Zea Mays
atccctgcatcgcaccctcccgggccgccttctcttctccagcgtccgatctcccactcccctccctcaccgcagctctcccacctccgccctccccccgcacgcgctcgccacctcgccctcccctccacgttgctcgcacccgcgcttatataagtgcaggaggagctcatggcggaagctccggcgagccctggcggcggcggcgggagccacgagagcgggagccccaggggaggcggaggcggtggcagcgtcagggagcaggacaggttcctgcccatcgccaacatcagtcgcatcatgaagaaggccatcccggctaacgggaagatcgccaaggacgctaaggagaccgtgcaggagtgcgtctccgagttcatctccttcatcactagcgaagcgagtgacaagtgccagagggagaagcggaagaccatcaatggcgacgatctgctgtgggccatggccacgctggggtttgaagactacattgaacccctcaaggtgtacctgcagaagtacagagaggtgcagggtgatagcaagttaactgcaaaatctagcgatggctcaattaaaaaggatgcccttggtcatgtgggagcaagtagctcagctgcacaagggatgggccaacagggagcatacaaccaaggaatgggttatatgcaaccccagtaccataacggggatatctcaaactaatggaggtatggaccttttctgcgacagctgctcttacctgaggaaaaaggggaaggcaacaga

SEQ ID NO: 21689 - DNA, 974 bp, Zea Mays
ttttaatatggtttttatgtcaaaacagagacactatgtgataaacaatattattacaaaattacagaaactggaattgactaatttggaccaagtatgaattttatatgaattaaacaagttctagcatttatttttactctaaaaagtactttccaaatgaatttatttgattttctgattatctagatcgagcgcagcattattcgaaagtgtagggcttattatgtaaatatttccaagactcacaattcacttgcgatggaccgtgggttggtttctctaaaactcaggggcctttgtgttaatctgcgcctgcgaaggggtatccttcgattccagccacacgatcagagattaagcgcctggatttgatcctacccattaacaaaccggtatgcgaaataggccactggatcctcaatcaacggcacatatcagatcggacggaccccgcgtttcaacccaaacgtttccccatgatcaaatccccatcgtccaaactcggatggacgactctggatatcgtcttcttcctcctgcgcgcggccacggcggcaaacaaagcatgcgtgacggacattcgccggagccctgcctagacccaacgccgcaccgattcccaccccagaaacggttggggacaaactcattggagattaggtggcggttgtcgctgtccacgagctgctcggatctgcagccaaggcaagcgacggcgagaatttgcaggtgatctgacggccttcgatctccctggatgtcaccaccacgagcacgtccccgcagtgaaggtctcgatccaaccctggcgccgaatcatcgccaaatccgagaacagcggggcggcttcctcgcactcagcttttttccgcaaatctctctctgcaatccgacgagcacatggcgatggctacaacctggaggtcagggagcggcggacgttcctttttatattccgaacgcgaggccga

SEQ ID NO: 21690 - DNA, 2121 bp, Zea Mays
gaagcaataacttcagccctgggcccgccccggcaaggccgctgggttgagagcctgctctgaaacgacgtacgtaaagggagcaaggaaccggagagcgtgcggcgggcttctggattttagcagagtaggcacctgtcgcttggacgtgcttcggagaagtaggtgtccaaaagttgcttacagtggatccagatccttcgaacaacattgctcaagctcatgatatagactgtcatggaggcagctgcagatgaggagaggccactgattcagtacctggctccagaggatgatgaagcttcctcacgatacactagcgacggaacgctcgatatcaacaagcagcgtgctctgaagaagagcaccgggaactggagagcatgcttcatgattctgggtaccgagttcgccgaatgcctggcattttacgcgaccgcaaagaacctggtcacctacctcacggctgagcttggtgagaccaacatcgatgccgcgacgaacgtgtccacctggattggcagctgctacctcacgccgctcatcggcgccttcttggccgacacgtactggggaagatacaagacgatgatagtcttcctcttgctctacatcgttgggatgcttactctgacagcgtcggcgtggctccccttggccatggaggacgactcacctgacaacagcggacttcggcgtgccacagcgtacctggggctctacctcgtttccctaggcacaggaggcatcaagccctgcacggcggccctcggggccgaccagttcgacggcggcgacgcggcggagcgggtcaccaaggcctccttcttcaactggtactacttctgcaccaacatcggctccctgctgtcggggaccgtgctcgtctgggtgcaggaaaatattggatggggagtcgggtttacggtgcagacggtgttcatgctgttcggcctcgccgtgttcgtcgccggtcgcaaggtgtataggtacaagaagctgggcgggagccctctcacaagggtagcccaggtggttgtcgcagctgtgaggaactgccatctcgtgctgcctgatgatacgtcagccctgtaccacgataagcttctaccaactgaaccaaatttcaggattgagtctgccagacaattcagattctttgacaaggctgccataatcaccggcgagaagggtgcagcagcgccgacgagcccgtggagactgtgcacggtgtcccaggtggaggagctgaagatgctgctccggttgctgccggtctgggcatccatggtgctcttcttcgccgtcagtgcgcagacggtaaccacgttcattgagcaggctagggtgatggacaaccgcatcggcccgttcaccattcctccggcgtcgatagcgaccttcgacgtgatcagcgtcatggtctgcgtccccgtctacgacgccgtgctggtgcctctggcccggcgtgccactggcaacgaccgcggcctgtcgcagctgcaccggctctccatcgggatcgcgctgtccgtggtcgtcatggtgtacgcggcgctgctcgagggcaggcgcctggccctcgcgcgggccaacatgcccgccatgaacatcgcgtggcaggcacccatgttcgccgtgcacggcgcggcggcggtcttcgccaccgtcggcgtgctcgagttcttctacgaccagtcgccggacgggatgaagagcctcggcaacgcgctcgcgctgctctccatggcggccgggagctatttcaactcgcttgcgctcagcgctgtcgggtcgatcacggcgcgcggcggggaacgcgggtggctcccggacgacctgaacaagggtcatatggactatttcttctggatgatggccgctcttggaacgctcaacctgctgcacttcttgcactactgcaacagacgatacagaggcaacaacaacaacacttcttgacgtgtgctgtcatgctgtgtgcaccatgtttctcaaaatcatagtttgataatactatattttgtaattatcataataatactatagttttagccagctccaaaaatactaggttctaagaaacattgcttaaatacaacatcatggcgttaggagctt

SEQ ID NO: 21691 - DNA, 1178 bp, Zea Mays
aggttgctgtttaaggacttaagggcagaaaggagaaattttttcttgatgctggtgaaggagatgaagatgaagatgctgcagaaaatggagatcaggatgctgatacttccattggacaaaggaagaacacaacaaaaagagttacaagagtagaaatgaacagaagagctcgccggaaggagaggttaagagcagaagcgaaagcaaagaaaatggaaaatattttgaaagaaattgacaggtaggtgtttatgttcttggatcatcgaggttactgtaaatgtgcttaggaaaaccggagttctgtacttttgcagcttgccaaatataatggatgagatagctaaagaggacaaggaaaaggagaagaggcacaaacgtcgaactgtggttaaagaggagagacgtaaatcaggcccacctcgtctgggcagacacaaatttgagccagctcctgttcaagttctattgacagaagagattagtggctcacttagaaagctaaaggtaacaagtgcttctcgttttgttgattttctatttttctctctgggttagttaactataaaattcgtgcaggggtgttgtaatcttgcaagggatcgctacaagagcattgagaaacgtggaatacttgcaccaagcaagagaataagcaaacgtcggtagagaaggcaagttccaatctgagggatgatatggtgaagctggattgaagaggatttactagatttgagaagaccctttggatgttcactgtcggaatgttcccctctttcagtgtcttgcgaaagtacctaacgattggttctgtcgttgtgggctcgttgttgacgctagtttcataggatctgggatgcactcatatacctgggctggtcttgatgcatgatggcgtatcgcttggtatgtatgttatccacacatgcgtattccaatccaaccccaataaaaattcggcaaaaaaaaaaacaaacgaataggaaagtcgcgtcgattcctagctattgtgtttatccctgtaatataatacatacgggaagtttattggaaaactcactatcattcaaataaacgtgaatgcagattcctaaactctatagcgtgcagaccctttaatcttcttcacaaatccagctagattatccaagaatctaatttcacacaaaaaaaaa

SEQ ID NO: 21692 - DNA, 3694 bp, Zea Mays
gctctgcttgctccaaatttttgcatcgaagaaaacacacggttggcttgagcaagagtcagggttcttcttcaatatgaagtacttcgaggagaaggtccatgctggggagtgggatgaggtggagagatacttgtcaggattcaccaaggtagatgacaataggtattcgatgaagatcttctttgagatcaggaagcagaagtatttggaagcgcttgataggcatgatagagcaaaggctgtagatattcttgtcaaggatcttaaagtcttctcgacattcaatgaggagttgtataaggagataacacaacttctcactcttgagaattttagggaaaatgaacagttgtctaagtatggggatactaaatcagctcgaagtattatgctggttgagctaaaaaaacttattgaagcaaacccccttttccgggaaaaacttgtcttccctactcttaaggcatcacgcctccgaactctaatcaatcaaagcttgaattggcagcatcagctttgtaagaaccctcgtccaaatccagatatcaaaactttattcaccgaccatacatgttctccacccaatggagctcgtgcatcgccggtatctgtaccactggcagctgttccaaaggctggtgctgcatatccaccactcacagctcatactccgttccaacctccacctggtccatctttagctggttggatggcaaatgcagccgcctcttcatctgttcagtctgctgttgtagcagcagcatcaatacctgttccacccaatcaagagtctgagcaactaatgaagcgcttgaggcctggtggacatggcattgatgaggccacatatcctgctcccacccctcaacctgcatggtcagtggatgatcttccaaggacagttgcttgttcattgtcacatggatctaatgtaactagcatggattttcatccaactcggcatacactgcttctagtgggatctgctaatggtgaatttacactttatgagatcggtctgcgtgaaacattactttcaaagcccttcaaaattcgggatataaatgcatgttcaccacaatttcagaatgctgttgtcaaagattcctccatatccattaatcaagttacctggagccctgatggagaaatgattggcgttgcattcacgaaacatttgatccatctgcatggataccaaccaccaaatgagacacgacaccttctagagattgaggctcattctggaggtgtaaatgatatagcattctcccgaccaaataagcaactttgtgtggtcacttgtggagatgataaactaataaaggtatgggatatgcatggacataaattattcacatttgaagggcatgaggcacctgtgtattctatatgtccgcatcacaaagagagtattcagttcatcttctcaacttcccttgatggaaaaattaaggcctggctttatgacaatatgggatctagggtggactacgatgctcctggcaagtggtgtactactatgctatatagtgctgatggaactaggttgttctcatgtggaactagcaaagagggagactcctatttggttgagtggaatgaaagtgaaggatctatcaagaggacatattctggattccgtaaaaggtcagctggtgttgctggtgtagtgcagtttgatacagctcagaatcacattctggctgctggtgaagataaccatattaaattttgggatgttgacaataataacatgctgatctgcaccgatgctgaaggaggcctcccagctcttcctcgcttgaggtttaataaagaaggcaatcttcttgctgttactacagcagacaatggttttaagatacttgcaaatgctgatggacttagaactctacgcgcattagggagccggcctccttttgaagcatttaggccgcaatacgaagcttcttctatgaaggtctcaggtgctcctgttgttgctagcatctctcctaacataggccgaatggatcacttggataggaattctcctgcaaagccatctcctatactgaatggtggggatacagcatcaaggagcatagatataaagccaagaatctcagaagaaaagcctgataaagcaaaaccttgggaactaatggaagttctaaatccccagcaatgccatgtagcaacaatgccagaaactccagaccaagccagaaaggttgtccgacttctgtacacaaattctggtgttgggttgctagcactagggtctaacgccattcaaaggctatggaaatggagtcgaaacgaacaaaatccgagtggaaaagccacagctagtgttgtgccacaccattggcagccaaatagtggtcttgtcatgacaaatgatacagcagataccaatccagaggaggcagttccatgcattgcactctcaaagaatgattcctatgtgatgtctgcttgtggtgggaaggtttctttgtttaacatgatgacattcaaggtgatgacaacattcatgccacctccaccagcatcaacatttttagcatttcaccctcaagacaataacatcatagcaataggaatggaagattcaaccatccacatatacaatgtcagggtagatgaggtaaaaactagactcaaaggacatcaaaggaggataactgggttggcattctccaccaaccttggcatacttgtttcttcaggcgctgatgcacagctctgtgtgtggaccaatgacacctgggaaaaaaagagaacagtctcgatacaaatgccagctggaaaaactccttcaggagatacacgggtccagtttagttctgatcaaagtcacttgctagtagtacatgagactcaactagccatatatgacgcatcaaaaatggagaggatctatcagtggataccccaggacacattgtcagcttccatatcgcatgcatcatactcatgtaacagccagctagtttttgctgccttcactgatggtaacttaggtgtttttgatgcggagaacttgagattaagatgtcgaattgcaccatcggtgataaacagcaatccacctgttcaccctcttgtcgtcgccgcacatccccacgagccaaaccaatttgcggtcgggctgtcagatgggtccgtcaaagtgctggagccattggagtccgaagggaaatggggagcgcccgctccggcagacaatggcatcattcccaatggcaagacgccagcttcgtcggctactagcaaccctgctgcggatcaaatccaaagatagattgtattccctaagcttttctttttctgcaaactttctaattacactgacttatttgtatgtggatgccgttaggatattatcgtcatttgttgtaaaaaggacagaataggttttatgttcaggtgtggttaactttcaggtactaccctagttatcctgttcatggaagattatgtttgcgatacggggtaatagtgtctataaagtatgtcgcctaaggttttctcaggtttagctcgatagctcaaatgatgtaagctatatatttcttcatgaatgtaaagcaatacatagtttttgctcaagatctatttttacctggttttacatagtttttgctcaagatctattttacctggttttttaatatagcgtgtgttcatcgaaaaagaggaa

SEQ ID NO: 21693 - DNA, 1819 bp, Zea Mays
gcgcaggctcgtattatcgtctcgttaattatttaataatgggattcacagctaattaaatctggaagtatatcttgcccgcaaggaaagaatagaagaaaatacaggcggagagaggcgaggaaggaagaaatcgacgaggggattggattggactgcgactgttgttgattctctcttgcacgcggcggtcctcctccagagtccagacccaatcccaaatccctaatcctacagagggatcccaaatccggcgtccagtccagtccaacctgtagtagatatccccgccggcttggccgtccgtccttgccccaattccgattgaccggagaggagttggatcagggagcattggaatggccgccgccgcataggatggagctggattcctccggccgctgctcggttgctcccgtgaatgctgtgatcgtcgcgattggaggtggaggcgaaggttctcttcagtaagagcttcaagagctgtgatctagctgattgggtatggaggagagtggcggcagctgcggaaagcgggaggacgcggcgccgccgtggaggccgagcgactccacggcgttcggccgttttgcggcggccgcttctccgccggaggcgtccccgtcggcctccgccaatggggctgctgcccgcgtcagcagccttcatggggtcaggcggaaaccgtctgttgcgagattaacagcaggcatcattcagacatatctacaatgtgatcccgagtttaagtactcagaggttctaaatccaaaacgtttcctcacgaatccctctaccccagcccacaacgatgggcttgacaatgcaaattgggatctcatattgtatgtcaacttggagttggttaataagatgtcgaacagaaggtttattgtcaaggaaatgcttgggcagggaacttttggtcaagtagttaaatgctgggacacagaaactaacgactatgttgctgtgaaggtgataaaaaaccagcctgcattttaccatcaagctatcatggaggtttcactattaagaacgttaaatcagaaatttgatcctgatgatcagcataacattgtccgtatgcttgattatctgtcatttcaaaaccatttgtgtatagcttttgagatgcttggccaaaacctatatgaactgctcaaaaggaatcacttaagaggtctgaaattgaaatatgttcaagccttctcaaaacagatattggatgccatggttgtgatgagagaagctggaatcatccattgtgatttgaagccagaaaatatcctgttagctcccagtgtcacaacagctgcagaagtgaaagttattgattttggatcagcctgcctggagggtaaaacggtttactcgtacatccagagccgctattacaggtctccagaggttctccttggctatccatatactaccgcgatcgacatgtggtcgtttggctgcatagttgctgaactgtttctaggtttgccattgtttcctggagcgtcagaatatgatgtgcttcagcgaatgatgaaaattcttgggggccaaccaccagatgaactgctaagggaagctaaaaacactgcaaggttttttaaacatgttggaagtatctatcctggcaatgaggcacctactggtctttgtagtgcgtacaaaagtttaagtgaagaagatgttgaagtgagagactccaagaagccacagatgggaaagtggtacttcccacacctaaagcttgacaaactcatatgtacctatccttggaacaattccgaactgacagatgagacttcttacaataaagctt

SEQ ID NO: 21694 - DNA, 2133 bp, Zea Mays
cgttaataccgaacctctcgcgccgttacccgctggtcctaaaaccctagcgaaggcgagccttccacttccctcaacctgccgccgccaccgccaccgccgccgccatgtgcccagcagcggcgaccacgagctccgccaagccgtcgaagaagcggaaacagcccgtcatagcgccgccggagtcggactctgaggaggaatctgtctacgacactgcctccgacgatgacgaggaggaagaggagacgcaggagttagagagtgaggatgtagacgaggaggtggaggaggggagcgagggcggcgaggaaaatgaaattggtgacgatagcgaggtggaagaagaggaggtgaaggagaaaaaagaaaaggaggagacggtgaaggagaaaaaggaaaagaaggacatgaagcaagagggaaagaaggcgaagaagcaagaggaaaagaaggcgaagaaggacaagaaggaagaggaaaaaaaggtgatggaggacaagaaagaagaggaaaagaaggcgaagaagaagagcgaggggagtggaatcctgtctaacaagctcttctcggagctccccctctctgagctcactgccaaggccatcagagagatgaactacacccacctcacccagattcaagctagatcaataccacatctgttggaggggaatgatgtgatgggcgcagccaagactggctctgggaagactcttgcattccttataccagcgattgagatgctatatcacacacacttctcaccgaggaatgggactggagctattgtggtttgcccgacacgggaacttgctatccagtgccttgtcattgatgaagccgatcgcatacttgagcaaaactttgaggaagacatgaaacaaatatttaaacgccttccccagaataggcagactgttcttttttctgctacacaaactccagaggttgaaaaatttgctaaactgtcatttgagaaaaatgaagaaagtaaaaaaaaacctgtttatgttggagttgatgatgataagtcaaaggctactgttgaaggcctgcagcagggttattgtgtcatttctagcgataaaaggttcttggttctgtatgctttcctaagaaagaagcggaataagaagataatggtgttcttctcatcatgtaattcagtaaagttccacgctgaacttctgaatttccttgggatagagtgttctgatatccatggaaaacagaagcaacagaagcgaactactacattctttagcttttgcaaggcagaaaagggcatcttattgtgcactaatgtggctgcccgtggacttgatattcctgacgtggattatatcttgcaatatgaccctccagatgaaccaaaggattacattcacagagttggtcgtaccgcacgtggtgagaaaggcaaaggaagtgcattgctgttcttactaccagaagaactgaagtttctaatttacctgaaggcggccaaggttaccctgacggaatatgagttcaatcagaagaatgtgccaaatttgcaatcgcagcttgagaatattgttggtgagaattactttctgaaccagtctgccaaagaagcctacagatcctacgttttggcatatgactctcactctatgaaagacatttttaatgtccatcaacttgatctgcagaaagtagctgcgtcattcggtttcaagaatcccccgaaagtgaacctggacctggatagcagtgcggcgaagcatcggaagaagatgaggagagtagacggtgggaagaggcatggcatcagcgcttcgaacccgtacgggaggaaggacaaaggcggtgccggcgataaacgacagttggcgagattctagaaaggaaggaagagcaggagcgtttcactattgttgtgttcgtaccagggctttgattgatgttacctggcttgggaaaaatcttgacaggccactaagattggctataaattttgggttgtcttgatatatttggtgtgtaacgcaatcagcctgctcgatgcgaaaattggattattgctttatagtacttgtggtttccaacccgaggaaagttggtgctgtggtttctggttttgcgtctcaacacgaccatggcggg

SEQ ID NO: 21695 - DNA, 3118 bp, Zea Mays
aagcagctccgtagcgcacactccacgactcggcctcctcttcctcgcactattccgccgccgccgccgccgcctacaatcctccacctccccgggtcccgccgccgcgccgcgatggaggaagacgacgagttcggcgacctctacaccgacatcctcatccccactcagccccccacatccacgtccgcgttatccaaccctgttccagtcgaaaccctaccccgtccgcctccaaccctaatcctagccctgtggcggcggcggcggcggcgggggtggaggaagacgacgactggatcctaggagggagcgaccccatacccggggtcgacccgaccggcgactgggccgacgaggacgacgacgaaggcgaccctgcgccgcccgtgaagctgcccgccgctgataatgatctcgatccgctcatggggggtggtgcggaggattccgggccagccatccctgggctctcgtcgtcggcggcagctggtgcggccgggagcgaccaatgggacagcgatagcgaggacgacatccagatcgtgctcaacgagacagatggacgccgggggctcggggatgatgaaggagacgacgaagacggtgaggacctcgtcatcgtcgccgacggaccacacatcaccgggatcgacgagcaggattggggagaggacccagtagcggcaggggcagaaggagagcgaaaggacggaggtgatcctggtaagacggccgcggcacctggtggaaggatcgggtacagtggcggcggccaagggttccatcaacagcaccattccatgttcaagtatgtacgccctggcgctcctgttgcttcagcaggtggggtacctggtggtcctggtcagttccgccctgctggaccttcaggccctttctctggtcgtggtagaggtgactggaggcctgctgctggtcgaggcatgaataaaagttttcattcaggttatggaaccgctccatggggtggttcagggcgcggttttggtggcggactagatttcacacttcctcctcacaagacaatatttgatattgatgtggaaaccacatttgaggataaaccgtggaaataccctggtgctgatatttcagacttttttaactttggccttgatgaagagaagtggaaagatttttgcaagcagctggaccaacttcgactagaatccacaatgcaatctagaatacgggtgtatgaaagtggccgctcagaacaggattatgacccagatttgccaccagagctagctgctgtgactggtcatccagacatctctgctgacaatcgcaataaaatggataacggccatacagattttagtgcccaaggaagaggtccggcaaacgtgcggacaccagtgatgacagggagacctatacaagttgaaactaattacacagaccggtttccatctattgattcacgctcacatcgaatgcgtgaatcatattctgttattgagattgtgtgccagggccgtgattcaatggatgatgagacagtggaccaaactgaaaaagattctcaaagaggttataaaggagtccatgatgttgaggagggtaagccatatccaacagataagattaataattctggtcataactcaaatttggtgataaagacagaacataagagacagccacctgtttcacctgaatgtgatatgttatccacggatgtcaatgctccctcccctcccagctacaagacaagaggttctcctcgtgaagcaaggttgaaacaaaagaagtgaatgaacaagatagcagtagaggccatgcaacattatccaagaagagccagaatcctcagccagataattcattggtgaatcaagtggaagaagacgcctcagatgatgaaaatcacgaggattctagaaagggacgctctaaattggagcgatggacaagccacaaagagatagaatatagtaatatcgatgatgataatacagagacatttccgaccatcaaagctgatgttgaagccgatgaggtgggtaaatctgaagtttctgctgcagttggcaattcagacatcaatagcaatgttgatactgggcaaacatctgataagagtgaccgacatctagacacagttgagaggctcaagagacgaagtgagcgtttcaaacttcccatgcctggcgagaaggatacgcctcaaagcaaaaaggtggataccgaagtgcagcctccccaaaatgaatctactgctgctgatatggaagtgaagcctgagcggccagctcggaagcggagatggactgggagttagttgaactagcataacgtttccacttttcagcagatttcatggcagatgcttgcgctttgccacgtttttcctcgtacagttgaaagttgaattgatgtatggttttactgtctagcatacacatgtacctgtaaacttagtttttttttgtgtggctgggaactggatactgtactaaaaccccatccattttcccactatgattctggtgacctcaatgtggcacaggagccactgtactccgggtaagttccgaggctgttatgggaagcagtggcctcggagtttcccagttgaatatctgggttcggcatgaactacattttgatgaagctggagtgcccctgctgcaaggttcttttgtttgaagttctggtggcctgaagcaccgggtcttgtaacaatcttgtgttggtgggagatacttgcaagatgtgatggttgaatgtttggcacgtgatgatgatgctgttttaggaaccaccaataggtgatagaaaccaggggctagagatttcagaactgacataatcacaaatttgtatgcttaatactatgttagtcatgtacattctgataaacgtataaatgtcgtgcatgatctaccggagtaaggtgtctaagactagtgtgtagagctccacggtgcactttttgggtcgagcaatacatatatatgtacctgtagagagtgttaggtagaaataacatgattgtttgcttgttgtaggtttgcggtgtatgtaactggttcgtgtagaattttgctaaccatagagttttgaatggcattatctaaatttattg

SEQ ID NO: 21696 - DNA, 3627 bp, Zea Mays
cgcgtcctcctgtcgtgtcggatccgagcaaaccactgcgcaccttcccttcacttcccccacagcgcgcgaggcgcaacttccggctatgtgcttgcccacgcctgaagtcgccgtcacgtccttacgcgtcaacggcacggccccacgcgggtgagagaggagagccccccacgcacccgcgtgaatatatactcgcgcggccacggcagggttggtgggagagcgaattcgagctggtcgaatccggcagccgagcgagatggagagctatctcaaggagaacttcgggggcgtgcaggccaagcactcgtcggacgaggcgctgagacgatggcgcaaggtcgtcggcctcgtcaagaaccccaagcgccgcttccgcttcacggccaacctcgacaagcgcaacgaggccaccgccatgaagcgaaataaccatgagaagctacgtgttgccgtgcttgtttcaaaggctgcacttcagttcattcacagcgttgctccgtcgagtgagtacaagggcctcgcgtccaagctatccacttcggagtctgacggcctcaccacgtccgcggacaagctagcgacccggcgggatgtttttggcgtcaacaagtttgcggaggcggagtcccgtggcttcttggtcttcgtctgggaggcgttgcaggacatgacactcatgatccttgccgcgtgcgcgttcttctcgctcatcgtcggtatcgccacggagggatggcccaagggcgcacacgacggcctcggcattgtggccagcatcctgctggtcgtgttcgtcacggcgtcaagcgactaccgccaatccctgcagttcaaggaccttgacaaggagaagaagaagatcacggttcaggtcacccggagcggctacaggcagaagctctcaatatatgaacttctcgtcggcgacatcgttcacctctccattggtgatcaggtgccggctgacgggctgttcatgtcaggcttctcgcttctgatcaacgagtcgagcttgaccggagagagtgagccagttgccgtcaacgttgagtacccattccttttgtcagggacgaaggtgcaggacggttcttgcaaaatgctcgtcacgacagtcggcatgaggactcagtgggggaagctgatggccactctcagcgaaggtggtgatgacgagacaccattgcaggtcaagctgaatggtgtggccaccatcatcggtaagataggacttatctttgcagtggtcacattcgcagtgctcacccaaagcctgttccggcgcaagatcattgatggtacgtacttgagctggactggagatgacgcattggagctgcttgagttcttcgccattgctgtcaccatcgtcgttgtggcagtacctgaagggctaccgctggccgtgacactgagccttgcatttgcaatgaagaagatgatgaacgacaaggcactcgtccggcaccttgcagcctgcgagaccatgggctcagcgacctccatttgcagtgacaagacaggcactctcacaacgaaccacatgaccgttgtcaaagcctgcatctgtggtaagatcaaagaagtggatggtgtttcggatatcaagaacctgttctctgaactcccagactctgtcatggcgattctctcccagtccatattcaacaacactgggggagacgttgtcttgaaccaggatggcaaacgtgaaatactggggacacctactgagacagcgattctagagttcgggctgtcacttggtggagactttttggcggtgcgcaaagcaagcactcttgtaaaggtggagccgttcaactctgccaagaagagaatgggagtggtaatccagctcccagagggtgcactgcgagcacactgcaaaggtgcatcagagatcatactggcatcttgcagcaagtacctgaatgaagatggcaatgtcatccccctggatgcaggaaccattgatcacttgaaggccacgatcgatagcttcgcgaacgaggcacttcgcactctctgtcttgcctacatagaagttgaggatgggttctcagtcaatgatcagatcccaacggatgggtacacctgcattggcattgtggggatcaaagacccagtgcggcctggagtgaaggaatcagttgctatctgcaggtcggcaggtattacagtcaggatggtcacaggtgacaacatcaacacggcaaaggcaattgcccgggaatgcggcattttaactgaaggtggcattgccatagaaggcccagatttcagaaccaagagtgaagaagagcttactcaactgataccaaagatacaggtgatggcaagatcttcaccactggataagcatacccttgtcaagcatcttcgaactaaactctacgaagttgtggctgtgactggtgacggaacaaacgatgcacctgctcttcatgaggctgatattgggcttgcaatgggcattgctggaaccgaggtggccaaagagagtgctgacgtcatcattcttgatgacaacttctccacaattgtcactgttgcaaaatggggtcgatcagtttacatcaacattcagaagtttgtgcagtttcagctcactgtcaatgtggttgctctggtggtaaacttctcctcagcttgcctgacagggagtgctcctctcactgctgtgcaattgctctgggtcaacatgatcatggatacactgggtgcgctggcattggcgacagaacccccaaacaatgaactgatgaagagaacacctgttggaaggaaaggaaacttcatcagtaacattatgtggagaaacatcctgggacaggccttgtaccagttccttgtaatttggtacctacagacagagggaaagtggctgtttggaatcaagggcgataactccgatctagtcttgaacacactgatcttcaattgcttcgtgttctgccaggtattcaatgaggtgagctcaagggagatggagaggataaatgtatttgaaggcattctaaacaacaacgtgttcattgctgtcctcggcagcaccgtcatcttccagttcatcataatacagttcctcggcgatttcgcaaacactacccctcttacgctcaaccagtggatcgcatgtgtttttatcggtttcataggcatgcctatcgcagctattgtgaagatgatcccagttggatctacgtagtgaattagagctaatttcgtccagaaactgaagttggacatggctacagtctgatcatggcaatggagttttctgggttgccatttgtgtacaagatagatctgtgctatgcttctattctggtcaatctttgcatcttttatcctgtagtatcttatcagccaaggttgtggactcgattgttagaaaatgccttgggctcttgtagctgttctttgctttatattttttcttggtgcttttgctaggaacattggaggctggagctgtatatgacaatcttgttgttcactcgaatgtgcttgttttgacacctatcattttgcttcatctgataagtaatgtttcagtcagaagttccagagaagggtggaatcttaatgtttctgatttgccaagaaaacggaccc

SEQ ID NO: 21697 - DNA, 196 bp, Zea Mays
gtctcacaccccccacaggacaagaacaggtaccccaggatgaggcgcgtggaggatgctgtgacgagttcgtgagaggtctaggccgtcgtctcccagtcaactttgggttgctggatcgtttcctcatatgatgtaattatttaattatttttgtacagaacacctgttatatagtaaatatgtgacattcgat

SEQ ID NO: 21698 - DNA, 993 bp, Zea Mays
tcagaaagtggtcaactgttttcgaatggggggaaaatgtttgatggcgtggccctgaacttccgcatgctaaattgagcttctgcacagtccatcagattgttgtttagtgcagccccatgtgatgcaagcatgagggggctccaggtagaacatgattgcacaatgaaagagagaatgggcatgcaaaagaaactgatcgagcttggggcaacagacctcctggtgcctggcgttctcccaattggctgcttcccgttgtacctgacgctgtacaacaccagcagcaaagcagactacaacgcccggaccgggtgccttcggaggtacaaccgcctggccttccaccacaacagggagctgaagcagcagcttgacgagcttcagaagaagtaccccaagacgaagatcatgtatggagattacttcaaggctgcactgcagtttgtcgtcaaccctggaaaatttggttttagcacggccttgcaggcgtgctgcggcgcaggagggcagggcaactacaacttcaacctgaagaagaagtgtggcgagcagggcgcgagcgtgtgctccaacccgtcgtcgtacgtgagctgggacggcatccacatgaccgaagctgcgtacagaaaggtcgccaatggctggttgaatggcccgtatgctcagcccccaattctcaagtcatgatcgagattactaggctgtgcgtaataccgccgcagctgcatgctgcggctagagatatatatgaggagtgtttcaggcaatagatatgctaagttatggtaaagctatttggtctgttcattggaagatctgtataaactgcgccggtatagatatgttcccagctgaaatggctctagcacagatgtgcatggcatgttctctgattcttttcatttgttctaaaaaaatattgcggcagtaatatgagttgataaaagtaactaaatttctgcaattttatcaggcttcaaagctaccatt

SEQ ID NO: 21699 - DNA, 152 bp, Zea Mays
ttgccttcaaggaactcctgcttagcagtctccacctgttgaacccctggatccactgtagctggctcgtctacttgcatcaatacaaacaaacatggtatggaagaaattaacatcacaccaaacagtagaacaaaatgcatgataatatt

SEQ ID NO: 21700 - DNA, 1700 bp, Zea Mays
cgtggctacagttggttagcaacagcaaactagttctcacagtggcgcctcgatttcgacctgtaatttttgatttttcaccaatttggcttgccggctgggatgagtggggagtggaggctcctgaagtatgtggaggaagcagaatttggcccggatgctggcattaacacggtgtacattgtcggatctcttgagttgagattggatgatctgccaggtcagatgcttaatgtttgaatgtttctcaaccgggaattgcttgaccatcatgcgttgcccatggcagagtcatgtaaatggatgtccaaggagtgtgcattgaggttgctttcggaagcgaaaccaggtaatgatcgcataggacagtatgcatatattggacttctgaattcggagctgtcatcaaactgcacagcttctcctgcattgcccttccaggtatcacctcccctccccccctcttcagttcatgccatatagtgatagtttcccagtcctgaaatgcattgctcaataggaatacccacctggaataacacttgtacctatgaagagtaggacactagcgccattccgtacaactaatcttgtggtagtaagatcaaccaatggtgctggtggatctacatgttctgatttttttgcttcgggggaagctctgcttatagatcccggatgcagctctcaggttcatgcagagcttgcagatctcattgattcccttccaaaaaggttattagttcttgttacacatcatcatcaggatcacattgagggtctttcagtcgttcagagatgcaatcctaatgctgttcttctgacacaccaaagtacaatggatcgcattgggaaaggaacttggcagattgactacacttcagtaactggtggtgaaaagatatgcataggtgaccaagaactacaagttgtttttgcacctggtcatacagatggtcatatggggcttctccatgtaaataccaatacattggttgttggagatcattgtgtagggcatggaagtgcaaccttggacagtagaaatggtggcaacatgaaggattactttgaaactacatacaaattcttggagttgtcaccacatgtattaattccaatgcatggaaggattaatctatggcccaagtatatgctttgtggatacctcaggaatcgaagggctagagaagcgtccattctgcactctatagagaatggggcccaaactctttttgatatagtttcgaagacttacagtgatgttgacaggaagttgtggattcctgcttctttcaatgttcgccttcatgttgatcatctgaactccctacataaattgcccaaggacttctcattggagaactttaaggaaagctgtggagtgcatttcatgttgcgttgggcggtggcatatgtgcattcaaggagctccccagctatccttgcggcaagtgcccttgctggtggtcttgcaattgcttgtgctctcagaaggaactactgcaagcaatcataggttctctcggtcgataattttccagctagatgcacattatattattcacaagattctgctaccagtatgttgagtcgaacggtgaattgccagaactcttattctactattattgtccgtgattgccacatctatatacaagagaagtatctagactaggagcatgagaatcgaatgcaac

SEQ ID NO: 21701 - DNA, 859 bp, Zea Mays
ccaacagtctcggcctctcctcccggcttcctcacacggcactccagccgctagccctcactcaaccagacaaccagtacaccaccgccaccaagcccgggccgaataactctgccgggcaaccgccgcccttcgccggcaaagaacgcccaccagatccaccccggcctgctatggagtccgcggtgaacccgaaggcgtacccgctggctgatgcgcagctgacgatgggtatcctcgatatcatccagcaggccgccaactacaagcagctcaagaagggagcgaacgaagcgacgaaaaccctgaatagggggatatcggagttcgttgtgatggcggcggacacggagcctctcgagatcctgctccacctccccttgttagccgaggataagaacgtcccatatgtatttgttccatcgaaacaagctcttggccgtgcttgtggtgtgacaagacccgtcattgcttgctcagtgaccagcaatgagggtagccagctgaaacaacagatacagggtctcaaggactcgattgagaagcttctcatctgatttacctaagatctttcagtgtgatgggcctcggcgacacatttttcagaggcttggactggtgatggtgtcttgtttactagattttacgtctttccaaactatgtttgaacactgttaggtcgaccatacttgaattgtgcttatatatttgactgtcatgtattctgaagatgcatctgcattctggtgccttggtttatgttgagattctgaccatcattgtaacggttgattactatgagtttgagaattggatcgattggatggttgcaatttccatgtgaccaggacagataaaa

SEQ ID NO: 21702 - DNA, 1697 bp, Zea Mays
cagcaggaagcctttagaaaaaaaaagaacaatcaccaccgttattaagaagatgatgcgctgcgctgcaacgggcggcgggtgcgtcgcttcgtggagcggcgatcggagattgccggcggtcaacccctgcagcgtgcggatgccgacgggcaacactaggttcttttactgggggttctttggcagataaatttgggcggacaagaacattcatcctggatgcagtcccacttgctctaggtgcattcttgagtgcaacagctcaagatatccgcacaatgattattggccgattgcttgctggaattggtatcggggtctcatctgctcttgtacccctttacatatctgagatctcaccaactgaaattcgtggaacacttggtaccgttaatcaactttttatttgcattggaattcttgcagctttgttagctggattgcctctggcaggaaatcctgcctggtggaggacaatgtttggaattgctgtagttccatccattctgctggctgtaggaatggccttttcgcctgaaagccctcgttggctattccagcaaggaaaggttactcaagcagaattagctgtaaaaagactgtatggaaaagaaatggttaccgaaattatgtttgatctgagagctagtggccaaagttcttcggagtccgaagccggctggtttgatcttttcagcaagcgttactggaaagttgtgagtgtgggggcagcactgtttttgttccagcagcttgctggtataaacgctgttgtatattactctacatcggtgttccgtagtgcaggcattgcatctgatgttgctgctagtgctcttgttggagcagccaatgtttttggtactatggttgcatcttctctaatggacaaacaaggaaggaaaagccttctgataacaagcttttctggaatgggtgcttcaatgctactcctagcattgtccttcacctggaaagctctggcaccttattctggtactcttgctgttgttggcactgttctgtacgtgctgtcatttgctctaggagcgggccctgttccagcgctacttcttcctgaaatatttgcctcgagaataagggccaaggctgtcgcattatctctaggcatgcactgggtatctaactttttcattggcctgtacttcctgagtgtcgtgagcaagtttgggatcagcaacgtgtatctgggatttgcatcagtatgtgcccttgcagttctgtacatagctgggaatgtggtcgagaccaaggggagatcacttgaagagattgaaagggagctaagtgtagcagaatgatgtacttttgctagtcatgctgtggcgccgttttggttatcgagaatgcaaccaagcgctcaaccgagcatccttggacctggagactctttctagtttcatgtagttttagaaataagcgaacggcaagagtaccaatcttaggtgacttggtgtgggttgtgtctgaaataagtgaattggattgtagaatttcagaaataagtgaattggattgtagaatttcagaaaaagtaacaaaaaaaaatacaaaaggatgatccttttgcatgtactggttcttctatttcttatcatattcagcctgcagatctcgtcgattcctttccaaaaaggttattagttgttacacttacacatcatcatcatgac

SEQ ID NO: 21703 - DNA, 2223 bp, Zea Mays
taaacaagtccttaggaaaattgtgttcctaaactagcacttagagatgctctaattttactagcattttttatcaactaactattagctccaaacaccccctaattttagtagcaagagcaaggaaaacccccagccatcttcatctgcctgctggtgccggactgacggttagagatggcccacccctccgccgccgccgccgccgtatcctccacggcgcccgctgcaaaccctagttctggcgcccgcgaggaaggaggcgcccgctctccgccgtcgccgtctccgtctcagagggggcgggccaaggtggtgatcgttatgggcgccacgggcgccggcaagtcgcggctggccgtcgacctcgcggcccacttcgccggcgtcgaagtggtcagcgccgactccatgcagctctaccgcggcctcgacgtcctcaccaacaaggctcccctccacgagcagaacggtgttcctcatcatctacttagcgtgattgatccctctgtcgagttcacttgccgtgatttccgcgaccgtgccgtgccgattatacaggaaatagtggaccgcggtggcctccctgtggttgtcggcggcacaaacttctacatccaggctctcgttagcccattcctcttggatgatatggcagaagaaatgcagggctgtactctgagagatcacatagatgatggtcttactgatgaagatgaaggcaatgggtttgaacgcttgaaggagatcgatcctgtggctgcgcagaggatccatccaaacgaccatagaaaaatcaaacgctacctcgagttgtatgcaaccacgggtgccctacccagcgatctgttccaaggagaggccgctaagaacagaaatggggtcggcctagtaactccagactcgactgctgtttcctgtgggtagatgctgatcttcaagtcctggacagttatgtcaacaaaagggtcgattgcatgatggatggtggcctgctggacgaagtatgcagcatatatgatgcggatgctgtctatacccaggggctgcggcaggctattggggttcgtgagtttgacgagtttttcagagcatatttacccagaaaagaatctggtgagggttcctgtgcaagcctgttaggtatgcatgacgatcagcttaagagcttgttggacgaagctgtttcccagctgaaggcaaacactcgtagactagttcgacgtcaaagacggagattgcatcggctgagtaaagattttgggtggaacttgcatcgtgttgacgcaaccgaagcattcttctgtgccactgacgactcatggcaaaagaaagttgtcaaaccatgtgtggatgtcgtaagaaggtttttgtcggacaattccactgttttgccaagcacaagcgcaagtgacccctcttcaagagagctgtggacgcaatatgtgtgcgaggcctgcggcaaccgggtgctgcgaggtgcgcacgagtgggagcagcacaggcaagggcgaggccaccggaagcgagtgcagcgcctgaagcagaagagcctgaggccatggccatcgctgctgccccaagaccgcagctgatggtaactttttcacagcagaaccggcgagaagtgggacggggacgttgacgtggacatggtcgtctcgtcccacccaaaaaagcgtgccagcctgacagcgacatgctttcccaatcccgaattcctggcacgtcgacggggggactacctccatgccttttagcagcggaagaagcaggcaccaaagaactgcttatcaaaagtattgtaccacacgtacgacgggtctagaagccacagaaacgtagtgtggaagtggatagatacttgaacaatggtccatctttctatactgctaaagtttagcatatgctaaggaggtgtttaagattgctaaaatctctattttcaaaaccgaagtattgcaaatactgtagttattttaagctattctaaacttaggtctggaccttagtttgcaaaactgtattgaccacagtttgtaaaactgtattatttcaaactgtggtattgtaattactaaagtaaaaactgtattatttcaaactgtggtattgtaatgactaaagtatattatagtattttaaaaactgtggtttctaaaatgggcttaaactttggttaaactttagaacttgagacatgtttgatgcaagtgtttaaca

SEQ ID NO: 21704 - DNA, 2947 bp, Zea Mays
caggaatcaggaaaggaaaggagcaaccgccgctctctccatccatcgccttccccatctcccccagttcccctcgtcgtcgcttcttccaaaccctagcggcctagcctgcctcctacctcgcccgccgacctatctctgccagtcctattccccgcggcagcgcgggatctcctcgctcccgtcgctccctgcacctacggtacaaccgctccatccaaacgagatccagcggatggaacccccggcggcgaaggaggcgccgccacttcagcctgcggcggaggaggacgcgatgctctctgcgacggcggccatggcgaaggaagccgctgtagcgttccagggctgccgctacgccgactgtgccgcagtgctcacgaggctgctggacaagaaagagggcgatctcaaggtacaccataacatggccatcactgaattcttcttggatgattgtcctgattcaaacaggctgcttaaaattcttggtgattttaagagaagaagtgaagagcttgcatgtgcatctagagaacaagctgattctgctaatggggtaggaaacagcgctcattcaggatcaagagggagtggtgctttactacctttttcctctacacataatgcgtcaacttatggggatgaatttgacacgaccataattacattcaacatggctgtcatcctatatcatcttcatgactatgaatctgcactatctgttttggacccactgtaccgaaacattgaaccaatggacgagctttgcaagatgcaacaaaggctgtggatatagtacagtacttggaaaggtcgtttggagtagctaacacaatgaacccgaatgaaaatgcaagcatagctcagcagcaattagctcaagcgaagcctcctgtgaaaattagcatgcctccagattccgattcaaatgcttatgctggtggatatgagaacctttcgtcaggaattttcccagatgagcaaatagaatttgaatctctatgctctagttttgatggacatcagaatgtgggcaggcgtatcttgaatgatttctcaagggcgtctgctgatcttgctgctactgctgctgatttgaaagttagacttcagatttacaaggtccgtcttctactgctcactaggaaccttaaggttgcgaagcgagaactcaaagtactaatgaacatggcacgtggtagggattcatctacagagcttctcttgaaatctcagctggagtatgcccgggggaattataggaaggctgtgaagctattgagcacaccaaataatcggactgaaccagcaatgctagccattttccacaacaacatgggatgtatactccaccaacagagatcgtatcacgcctctatatggtgctttagcaaagcgctgaaatacagcttatcatttcgttcagagaaaccaatgaagttgtctacattatcacaagacaagtcttgccttatttcatacaactgtggtatccaacatttgatgtgtgggaagcctttgttagcagcttcttgttttcgtgaagccatgccgctcttctacaagcgaccccttttctggctccgtttttctgagtgcagcctgctagctctagaaaagggtctcctgtgtgcaaatggtgcttcctcattcaacgatgagattgaaatcaatgttgtggggtcaggacaatggaggcagttgattgtcaacccagtgaactcgagaagtaatttagattctgcaggtgtgactttaggcgaacataaaaatttggtttcacttggatttgctagacagtgtctacaaaatgcgctgctattattggatgctactgagaaggaaaattgggtaatcgcatctgatacagaggattgggaccaaggaaccgtacatggatataaaagctcaggccagaagaatactacaagtacagattctaaaacaccttcaggcccaactctagctaatgtaaatggagaacaaaagggcacaagcttgaatgctaccttgcagagttctcttgctttctatgacgagatccgtagaaaagagtacatcaaaatcagacaggctgtcctggcgaacttggcatttgttgaattgtgccttgataatcccttgaaaactttgacgtatgcaaagtcagtactgcaggtgacagactgttccaggatgtatgcgttcctcagccatgtatacgcagccgaagctctatgtactttgaacagaacagaggatgccgccgagaatctatcagtttatataagagatggtaatcatgtcgagttgccttatagtgtggagaattctgaaaaggccttggttgagaaagacagtgatggtgaagacttggttgctcctgcagtgacaaaactcgccacagaagaacctgagcagctcaggccggaggaggcccgtggtgtcctgtatatcaaccttggcatgattgctgcaaggcagggagaagttgaaaaagccaactacatggtgagccgtggcctggcgatgttgcccaacaacccccgggcagtgctagcatcggtttacgtagaccttttgcaagggaagtcccaggaagctgtcgtgaagttgagacggtgtaggaatgtgagatttagacccgctagcatagcagccagcagtcagcagtcgagcttagaaaagcctcccctttcatgatttctgtagtttacaattaccgttataatcttttttggaccctgaccccaatgtggatgatcaaagatggtaatgcttctcctgtgtaacatatataagaaatgaactctaactccccttctagctccctcccagattcaggggtggaatgtgttggaactgtaccgttttaatttgccctctttggactgaagagagccaagtgatcaaaatagtttcctatgtttattcaagaatttggaaaataatgtgcagtcagcag

SEQ ID NO: 21705 - DNA, 507 bp, Zea Mays
ctttcatctccaagccgaaaaaacacccacagaaccctaccctcccgagtcccgaccccgtcctgctcgctccgccgtccttcgcccgccacccgccacccgccggactgccaaagcccggaggcctgaggcccgagttacgcgaggagcagccgaaccagcggcccggcgcctcatccctcagcggccccgcccctggggccgtgtagtcagcaagcggccacgcgagtgcgcggtcggcgcggagtgagcaggagcaacccgtggctggcggtcagtcggtggctagctggagcctggagttgcgacttgcgagcggcgttagaactcgctccacctataatttttgtgtggctccgtcactgattccacccgttctgtggccggcgacagaggcacagagaagcgccaatccgccggcttgatctgaagcatggacaggcgagtaattttgcaagtggaatatagatcgatctgaagctatgcatctgtgtgaattgtgccaag

SEQ ID NO: 21706 - DNA, 156 bp, Zea Mays
gttatttttcgcgagtaataaaaataattgcttttatgaacagcaacaagcccgaaacagaatctcgcccgtaaaactaggaaggcggtaatggcccaaccaagagccagattagggcctgttcggttatacggaataagccaggattcattccag

SEQ ID NO: 21707 - DNA, 1306 bp, Zea Mays
agacataaacactaacatgctcacagatgtgtcccttatgaaaaaactgcgccatcctaacatactgctcttcatgggtgcggttacgtctccacaacgcctttgtattgtaacagagtttctccctcgtggaagcttgtttcgcttacttcaaaggagtgctaccaagttgggtgtgagacgacatgttcacatggctttagatattgcaaggggcatgaactatcttcaccattccagcccacctatcattcaccgagatttgaagtcatctaatctgttagtcgacaagaactggactgtgaaggtggcggactttggcctttcacgtctcaagcgcgaaactttcttgacaacaaaaacgggaaaaggaacaccgcaatggatggcgccagaggtgctgcgcaacgaaccttccgatgaaaagtctgatgtgtatagctatggggtgatcctatgggagctcgttactcagaagataccctgggaaaacctgaactcgatgcaggtcattggcgcagtaggttttatgaaccaaaggttggatatcccaagcgaagtagatcctcagtggagatcaattatcctgaactgttgggaaagcgacccgcagcaacggccgtcgttccaggagcttctggagaggctccgcgagctgcagaggcgttacgccatccagcagcggaacgcgaagaacagcgtcgaggagtgaagactgaagaatgcaatgcaactctcccaagcggcggcgggcttgctttgaagcattttgcgagccagcagcatgccagatctagagaagggcctgagcctcctgtactggggcctgggggctgctaaggctggaagaagtatgttctacagacgaggcgccttctgtcttcttctttttttttaaaaaaaaagaaagttcttccccatggcaattgtgactgtaattaatttctgggtcctgacagcaagggtcagtagggtagcgagtgagtagtgactgagctcgggcttgcttgctagcgcctctgggttctgattcttgacaacgcaaatgcgtactacgtggttaacagtaacatccaatccagcctccagtttctggcaagggcatgcatgatgatgtgtagattgtctgttctgataggtcagtggtgtgtacatgtgatccccaaccgaacgcattcgactgcgtcgcttcgatatctggttggtcaggttacactgctgaatacgggtgatagatccttcttccctagcaagtagcaatggctgccgaacaagaattcttatatttgagtgctcgaaattaaaa

SEQ ID NO: 21708 - DNA, 4379 bp, Zea Mays
accgactcgatcccaattctcaaaccagctttggcattcgtctctctctctccctaccccttcacgccaatttcgaaacagcgcgagacgagaccgcgagagtagccaaaagccgagggagcccttccttctcagattagaacccaaacgagtgcgctttgaagcgggggctgcgagctcggtgcgcgaattgggcggtcgatcaggcgcggcggccgggcatggcggccgtggagcagttgaaggagctgggggagaagctgcaggcggtggcgccggcgcctgcggacgaactcgccaagcttctcgaaaaagctgtggagtgcttacatggaatagagcagtcaccagtatcatcagtgatggaagctattcaaccaagtctaaaggctgttaccagagaagaattgctgaagcatgaggatgacaatgtcaaagttctcttggcaacatgtttctgtgaaattacaagaataactgcacctgatgctccctacaacgatgacattttaagggatatattctatctgatcgtgggtacatttggcggactcaatgatgttaatagtcaatcctttggcaggaaggttgctattcttgaaacagttgctagataccgagcatgtgttgtgatgttagatcttgaatgtgatgatctcatcacaaacatgtttcaaacatttttagttgttgtcagtgagagtcatgaagaatacattgtaaagtcaatgcagacaataatgacccttattatagatgagagtgaagatgtacacgagagtcttctacgtgtactgttgtcagcattggggcagaaaaaaactggtgctgcaatgtctgcgcgtaaacttgcttgcagtgtcatcgagcattctgctacaaagcttgaaccttatctaaagaaatttctaatgtcatcatgggctgggaatgtcagttcttctaatgatcaaattgatcaccagggagttgtatttgatttatatcagtgtgctccgaaggttcttaaggtgatcgtgccatatattactggggaactactggcagatgaagtagataatcggtccaagtcagttgaattacttggggaaattttttccttacctggatcccctattgtggaatgcttcgagactcttttcacagagtttctcaagagactgaccgatagagttgttgaaattcgtatttctgtggttgagtatttgaagagatgtctaatatcaaatccttcccgagctgaagctcctgaaatcatcaaggcactttgtgacagactgttggattatgaagaaaatgtccggaagggagtggtagctgcactttgtgatgtagctacccattctcctgatgctattccaattgatacaattaaagtagtagctgagcgtgtccgtgataaatcgttggctgtgaagtgctataccatggagaggttggcagatatttacaagctatactgccagaggggttttgatagctcaacaaattctgatgattttgagtggatacctggaaaaatattaagatgtctttatgacaaagattttaggccagagtcaatcaactctattttgtgtggttcattgttcccaccagagtttccaatgaaaggaagagtgaaacattgggttacagctgcgacatactttgataaagttgagatgaaagctcttgaacaaattctcctgcagaagcaaagactgcaacaagaaatgatgaaatacatatcacttcggcaactaagccaggaagatgcccctgatctgcaaaaaagaatcatcggatgtttccggaacatatctcgcttatttagtgattctgcaaagtgtgaggagaacttgaacatgcttcatcagctaaaagatgctgatatctggaaaatattcactagcctgcttaattgttcaactacatttgagaaagcttggtctcttcgggcagatttgcttaagatatttggtgaaaaacatgtgctttataattttgttggcgcattagcaatgggatgttcatatttacttgtaaacaaggagtatgcaaaagagatcctttctgaagcttctgaacagaagacttctgggaatacaaaactcatctcatcatgcatgaatcttctaacggcaatatctagtttctttccgtctcttttgtctggacttgaagaagacattgttgaactcctgaaagaggataatgaagtgcttaaagagggtattgcacatgtgttatcgaaggctggtggcactattcgtgaacagttagcctcaacaagttcccttgatcttctattagagcgtttatgcttagagggtacacggaggcaggctaaatactctgttcatgcacttgctgccattacaaaagatgatggtcttatgtcactatctgttctttacaaggatatggttcgaaattcttctaataaatctgaatggggtgatagcacagagaattgtttgctaaagatttatggcatcaaaacattggtgaagagctatctaccttgcaaagatgctcatgcacagccaggaatagagaagttaattgatattctgaagaatattcttacttacggtgacgtatctccaaatatggtctcaagtgctgctgataaggcccatttgaggcttgccgcagcaaaagctgttctccgcttatcaaaacaatgggaccataaagtgcctgttgatgtattttatttgactttgaggatttcacaggatgattttcctcaggtgaggaaattatttctttgtaaagttctgcaatatatcaaggaaagggccttggatgcaaaatatgcctgcaccttcatgtttggtgttaacgattatcatgccccgccgtacgaagagttcaagtacaatctgactgaagtggttcagatatgccaacaagttaagatgcgccaactttcagtccaagcagatatggatttgttgacggcttacccagaatacataatttcctttttggttcatgccctcgctcatgatccttcatccccggaaattgaagaacatgaaaacgtcaatgcatttggtccaatttactggcgactatatctgattctttcaatcctcctgggggaagaaggtttgcaacatagtgtcccaggcatgaaaaaggacagcttcactacaataatatctatattcaaaagtataaaatcttcacaggatgtggttgatggaagtaagaccaagactgtgtgtgctatatgtgatcttggtactcttattgcaaagaggttatgccaagaccaaacgagtttatcagaagctcaaacagttccattgcctgctcaactttacacgccgcttcatgataaccaaaatgaaaattctgtggagaataatgagcagatttggctgggatgtgagaaagtactggcccattttgaggctgtaaggactgcaaatatggataaggttgaatctcccaaacataagatgcttattgatgtgactgatgaatttggaaatgaagttcctcttggcaaaattgtcaaacttcttaaatcacgaggagaaaggaagattggggaaaagcagaaggcaccatctagtagttcagtaaatgcagagaacgatgatgttctgggtttagtaagagaaattaacttaaacaatcaagaagatttggaggaatcgcataaggacaagtctgagaagcgtcatacaaatgcaaaagatagtaaccagaaaccacttgatttttcttcacctaaacgcaaaagatcaatttctaagagtagaccacattcagcaaaaggtagtaaaagcagtgatgagcgtctactacatactcctaactcagagaggaccaatatctccttggaaactaagatgaaggagaaagacagagatgattcaactgatacagaactgttagtatctccaagcactagaacccctgtatctaaacaaaataagggtgctaagaaatccaatattaatattttgagcagtgttccaaagaagtctgctgatgcagacagtactaagagaactgttgaaccgagaagtctaaatgggtcactcaaaaggcaaaagtcaaaaccaatttctggtttactaaagtgctcaacacaagactcaagcagtacagacttggtaggacaccgaataaaagtttggtggcctttggataagagattttatgaaggtgccgtgcaatcatacgattcatccaagaaaaaacatagggtgctatacgatgacggagatgttgaagtgcttaacttggctaaagagaagtggatactgattgaaagtaatgactcatcagtgaagaggcaaaagaaggatcatcttgggacaaacccaggaagagcactggagataactagcagcagcaagtctcctcctagcctg

SEQ ID NO: 21709 - DNA, 3527 bp, Zea Mays
ctccggactcgaggattcggagtttcggacaaccgacaacatcgctcgccggcgacgagcgcggcgcggcggcggcgatggatgggggacacacgacgaggcatccgatgtctccagcgatctcggcttcgactgtgctaccgcagcagcggcagatgcagcctcaccaccacccggcgcggccggcaatcgccgatctcttcaccctatacctcggcatgaactcgaagcagcgagcggaagacccattgagagagagctctttcttgaaaacattcctgatgatgaagcactggttagtataatcatggagattcataggaggagagatatggtgtgtatgcacatgcaaatgttggatcaacatcttcattgtccgacatttggaactcatcgtttcttatcacaatcatacccaagcatagctggagaatctgttactaatctgcgttattctcccattacttaccctagtgtattgggagagccactacatggagagattatccgcattgagattgttatgaacactctaagttcagatccaaggaaggttgataccacaagaaagataatttcattccacaaagaagacaaaagccttgacgccaataatattggccctcaaagtattcttcttgatttcatcagtagtagtcagactctgcgcatttggtctttcaacacttcgattagagaacatttgaacagtgatcagcttcaaaaaggaaaacagattgacgaatggtggaaacagatgatgaaagcttctggtgagaggatgatagactttacgaacttggacgaacgagcaacaggcatgttctgggttctctccttcaccatggcgcaaccagcttgtgaagcagtaatgaattggtttacgtcagctggaatggcagatttaattcaagggcctaatatgcagccaagtgaaagaataatgatgatgcgtgaaacttaccctctgtcaatgtcattgctttctggcttgtctatcaatctttgtctgaagcttgcttaccagcttgaagagaccatatttcttggccaggctgtccctagcattgctatggtggaaacctatgtgaggttactgcttatagcaccccattcattgtttcgtccccattttacggcattaacccaaagatctccatctattttgagcaaatctggtgtgtcattgctcctacttgagatactaaattacagattgctgcctttgtataggtatcatggtaaaagcaaggcgttgatgtatgatgtcacaaagataatatcaatgattaagggtaaacgtggagaacatcgtctttttcgattagcagaaaatttgtgcatgaatttgattctctcactgaaagacttcttttttgtgaaaaaggaattgaagggcccgactgagtttactgaaactctaaaccgcataacaataataagtcttgcaatcactatcaagacgcgtggaattgctgaagttgaacacatgatttatcttcaaccattgttagagcaaattatggcaaccagtcagcatacctggtcagaaaagacactgcgttattttcctcctctcattcgtgattttttaatggggagagtggataagaggggtctagctatccaagcatggcagcaggcagaaacgactgttattaaccaatgtaatcagctgctctcaccatctgctgagccaaactatgtcatgacttatttgagccacagtttccctcagcatcgtcaatatctttgtgctggtgcttggatgctgatgaatggacatcttgagatcaacagtgcaaatcttgctcgcgtcttaagagagttttcacctgaggaagttacagcaaatatctatacagtggttgatgtgcttctgcatcatatccaatgcgaggtgcaaagggggcatctagcacaggatttactatccaaagcaatcacaaatctttctttttttatatggacacatgaactccttccgctggatattctattgctagctcttattgacagggatgatgatccttatgctttacgccttgtgataagtctgcttgaaaaaccagaacttcagcaaagagtcaagaatttctgtaatactcgttctccagagcattggctgaaaaatcaacatccaaaaagagctgagctccagaaagctcttggcagccatctttcatggaaggaccgctatccacccttcttcgatgacattgctgcacgtctgcttcctgttattccactgattatttataggcttattgagaatgatgcaactgacattgcagacagagttcttgcattctattcttccttgcttgccttccacccgctaagatttacatttgtacgtgatattcttgcgtatttctatggtcatcttccaatcaaactaattggtaggatcctcaacctgctgggtgttagcactaaggtaacattgttgcccttctgcattccttttttagcaatcttccacaagagtggctggaatctactcatactgtcatcaaacaccttcggccagtcaattcagttgccatgttaagaatcgccttccgcatattgggtcccttgttacctcgtctagcctttgctcgacctttgttcatgaagaccttggctttactcttcaatgttttgggtgacgtgtttggtaagaaccctcaggtctcaaatccaaatcctgtggaggcgtcagaaattgcagacataattgacttcttgcatcatgcggtgatgtatgagggccaaggcggtcctgttcagagcacgagcaaacccaagctggagatactgacattatgcgggaaagtaatagagattttgaggccagacgtgcaacatcttctctcccacctcaagattgaccccacctcttcaatctatgctgcaacgcatccaaagctcgttcaaaacccatcctaataatgttatagcttacaagtgtattctaatgatgcaagatgcttcgaaccactgcagaagtctcaacatgtgatgctgttggatgagtagaattgcagtaactgtaacatgtgattcaggggcgtattctcaagtgattcgccgttgtcagttgtatcctttagttagaatgttgtaaatgctatctgcttagtgcatattaggacataactacatagtgtaagcagtaaccatggaggttatcttgccaggctaagaattttggctgccttgcctgtgagccatgcgacatatgtatcctgtcgcattaggatgagcgacaaccgacacggtcgcatgatgcaagatttgtgccggttggccgattgtcaccgtgcagatctcttcgtaacagtgctgcacgtggaaggtttgaccgagtgactgcatcaccagttaatagtgtgaactgtatcaaattcttgatcatcttgcttattatgaaatgcctacgttgtgtcaatcactcttgcattgtatagtcgctcatcaagtgttcaaacttaattgtgggtaaaattgtttggttcttcttgcatgacattcatccaatc

SEQ ID NO: 21710 - DNA, 2328 bp, Zea Mays
ggagcattatcttcatattgcagccagaaaccgaagagtaatctaagctatcccctggacaatgatgatgacaacattgaagaagcatctgatgcagttgtacctgatggagttgaggaggtagtattagctaagattggtgttgaggtaaaagaaagagctcggaagctactgcttgatgatatccgggccttatctatctgtggtgaaacatctcatggtcagagtcagtcaccaaaggctaatgacattgcatggattgttactggttcaaggttaatgctggtcaaacaactgaagaaacgactcgtgaatgtccgcaatggtaggaaagaagcatattctatgctaagaaccgctatgcagaaagctgcacagttgaggttgatggaaaaagaaaagaacaaaagcccttcatttgccatgagaatttctgtgaggataaaaaagatcgtgtggagcatgttagcagatggaaaatccttttctgaggccgagataaacgatatgatttttgaattcgaccgagattacaaagatattggcatcgcccagttgacaaccaagctgtttgtcctaaaaaatggacttgctaatgcaaaatcagatactgttgtatcaccctggaatccacctgctgaatggggcaagaatgcaatgcttcgtgttaatgcctggcagggagctccaactggtgggaatccagttatcgagagtttcttagtagacatctatccactaaaaatttatctgactgaagcaatgtacagaatgatgtggggatattttttccctggagatgaacagcaaccacaaaagcgacaggagcttttcaaggtctccactacagcaggaacaagacgaaagaaaaacacttctgttgcagagacaaacagtcccaataaccagtcatcaaaagaaactacatttgcacagaagcctgaacttcgaaggacatcttcatttgacaggacatgggaggaaacagttgctgagtctgtagctaacgaacttgtttcacaaatggagggtcaaacaaatacccaatatgaacctcaagatgctgctaaggattccaagttattacgtcctgtccgctctacccgcgaggataagaaaattgtagagcccaatgagttgaaacaatctagacctcaaaaaatgatggacttccgcaatataaaaataagccaggttgaactgcagctcacatatgaaggattgccatttgctgttagtgatgtaaggctacttatggataccttccatcgtgaggattttacaggaacatgggcaagactgttttctcgagtaaagaaacatattgtatggggtgtattgaagtctgttacaggcatgcagggtaaaaagtttaaagctaaatctagcagccaaaaagaaccatctacagctttaatcagtgccgctgattttaatttaagtgacagtgatggtgatgaagctggcagttctgatcaacttccagcatttctaaaaaaacctagtgatggagctggtgatggatttgcaacctccgttaagggcttgttcagtacacagaaaaagaaagctatggcatttgttttgaagacaatgaaaggagacgctgatcatgatttccatggtgaacggagtgagaacgaaattgagttctctccatttgctcggcagttgactataacaaaaacgaagaagcttatacggcggcacacaaagaagttaaacaagtctaaggttcataaagttacagctactgagctagaagtggcagagctgccaccgcgtgctcctgggtacaacacggactcctcctccgactcgtcatcggcggaaacaagcccaaaagattagcctgtgccccatgtgaaaggttgattcagagggatgcttcgaagtcgtcctgagccctggagtgatgtccaagttggttctttacaaattctggttttgatcgatacatcgttgatcctcaagatggttttgcagccatccgaatagatatagatagtgtttcaacattccctcctcatcggatgtggtgttgtctgagctgaagtttttagttgtgacgatgaattcagtgctctgcagacaacaactattatcataacctgagggtagagtgaattattcattgtatttttcttgagttgagggtagtgtttgagacatcattctcggctttgtagtactcacagtggacagtataaaatcaagtgcgacagcaaatatcgtattttaaatattgtacttaataaaatatttaatatatactagtatatatgcagcagagataagaagctttgctgttgaaggttctgactctgt

SEQ ID NO: 21711 - DNA, 991 bp, Zea Mays
cggcgtcagtatcccgcaccttctctttcgtcagttttcgaagcggcgctccccttcaccgactccttcgcgcactcactgccacgccttgccccgctgctgcttgccaatcacgaaccagtgcatcgtgcggacgaggatgctgggcatagagtagaatggcgggaccgcacgccttgtcgcggtcgcgtctcgctgtccatggagcgactctctacgccctgcctgcttcgctcgctggctcaccgcagctggaacggcgccacattcctttgttagagccgccgttttgcatacgccgagggagagaaccgaggggagagagagtttggtcgtcgagtcacatggagggttcgctggtggcctaggatctccgtgtgtcgcatcgcctaggcggtggattccccgtgcgtggagccaccagcagctgcggagtccgcgccgccgccatgggtccaaatctctgttgctgttcggagcacgagctcgacccggtgagcttcaccacgacaccaagtttcttctccggttctccgcggacaaaacggtgcaggggcgcgcgacgaactgctcgtcggatcttcaaggccgcgtctcaccatgggcagggaatcccactgctccgatctcgtgaggtcacgaggatctgaagaatcaccctgataactggaaatcttaagtgccaggagaagaacaggtggttcaggaggagccacgtatcgaggagttcaattcaatctaggtggtgtttctcagttgacattggtgccgacgatccttagttcgtgttatatttatcttttatttttgtaagtcttccgctatgtaataaatactctgattattgtgacatttatctctatacactcagttattatatatgttgtcttcttggcgcatgtatgagatgcacctggctttgttccttaaagccgggtgtgacactaaataacaaaacagttatttgtggtcggaactttataagtttggc

SEQ ID NO: 21712 - DNA, 173 bp, Zea Mays
cggggatgtagttcagatggtagaacgctcgcttagcatgcgagaggtatggggatcgataccccacatctccattaaataataattttctttttgtttgggcttcggttagctcacctgcactcgagccttctcttgatttcttgaactctgtcaaatgtagtgccttgcta

SEQ ID NO: 21713 - DNA, 191 bp, Zea Mays
aggcaaaccaaatgcgaaccatgtacatgccaggaccagcaattcacatacatagtagttacataaatcggacatcatcacacagtgctcggataataacataaaagacggtaatagttaattacatcatggtgtccaagacatcgacatagtcattgacaattatcaaagtgcggaaatgaaacgtagat

SEQ ID NO: 21714 - DNA, 4217 bp, Zea Mays
gtaaaataagtgagccggtggaataatcccttcctcggcatccttcggtcccggaatatgcccccggcgtctccctcctcgcgttcctctcgtcggtgagctcctgccgcctggctcgcacagccgatttgcctcagtccagatcgtgcctccttcttcctagatcgggtccgaattcggctaccctcgccaccgccctacgccaggtgccgaggcctccgccgatctcttcgccggcgaagagcggccaccagcttgtggatggaggaggaggcgctgggtcgtggtggtggtgaaaagctttgatttcgtagccgtggtggacgccgctgctaatgcccttgccgtgcctcgttggtggcgtgcaagatgtatgccgtggggaaggtgggcagcctcatctcccgcagcgtgtacaccgtctccggcccgttccacccgttcggcggcgcggtcgacatagtcgttgtgcagcagcaggacggcagcttcaagagctcgccgtggtacgtgcggttcggcaagttccagggggttctcaagtcgagggagaaggttgtcgacatctccgtcaatggcgtcgacgcagggttccacatgtacctggacagcaacggcgaggcttacttcctcaggaacgcggacccgaatggtgaggaaggggagttcattgtctcccccgcctcgtcgggagatgagcgagaggtgccgatccaggaagctcagctgaggaagtcgaagagcacttcgtgtgatagctcgacgatggaagccgacgtcggtgagggcaagattcttgcgaggacaacctcgaggcggataaccatacttgaaaggatgtttggccggaaatcgattaagaacaatgcccatgctgtggatagggtgagttcattggagcgtgcagaggtcgctgcagaactcctagataccaagtggtcaacaaatctcccacgtagttcaaaacctaatggttcaaatgatgagccttccaagagcaacaatgatcagatggaaacctcaaaacctgtattttcggaacatagtttggatcatgggaaagagatggactctaactgtgacaatgctcactgcaattcatgcagccctcgtggaggaagaaacagttcagcagatgaaaccgatccgtgtttacaagccactattgtgaagaaagaggtggttgagatacacgcgcgtgagagcagcgacttcactgataatatcacttcaatcacacatcaacaagggtcagaatcttcgtcaaatgatctgggaacagataaacttatgcagcagtctgtcgatactcaagatgagttgctgcatgatgttgaagatgtaactgaaagggagacacatgcagaggaggttatttccaatgacatttttgaaatccatgttgttgagacagacattacaagtggtaagagcgaggtggattctgagattgttactgtggatccagaaccagatcgagctaaccagaattttacagatacaaattaccaaaattatggcaccacagatatttcatctgaaagacatgaggtttcattgatcccttctgcacaggatgcagttcaagagaaaatagttatcctcagcagttctgaggctgtggagggctcactagatgcagttccagagaaagtagtcattctcagcagttctgagactgtggatagctcatatgctgtgtcctgtattttggatgacacagttcatgatgcttctgatatctcacaggctgacggtgtacaacatgaggagcactctagtatctctgatgggagtacagaaaagctaatttctgaggaaagttcattagtatgctatggtgttcccagcaacaaaaaagacttggttaatatagctgttcaagaaagtaaagcctttatcttaaaaaatcctgcctcccaaatcttggaagagagtggtccaggtttggatgtatctacagacagtgtttccctttcacatgcagactcagctcctgatttagcttgtcagcatgtttctcctaatgttgaagatacaacaagttatgagcctggcattggtcctgaagatgtaacaaaaaactcagttgtggaaaatggagcatgcagcggggaacttgttgtttctgttattcagacctcagcgggagatggactgacaaaatgcattgctcatccagctgttttttctaataaaatagaagtagaaggctcaccaacttctgctggattttccagtttgatcagtgttgaagtgcaaaacacaaaactagaagatgacacaaacaaatctagttctgtgattggagatgaagctggttttgtgcctgaggctacagctgagcttgatgaagaagcagaaccagttatatcattatctgaatatacagaagaaattcagtttcaatttagtgatgctgaaaattttgcagatagaaaggccacggatgacatggtggctaacaaaacaacaggtgaagtagaacatgatgaatctgattgtgacacagagaaacaggaagaaggtgatgtaggtcttgtaaatgacttggagaactgttctgcgtcattaaagcctgtgagtagccctgtttctattcctgcaattgacttccagtcaggaaatagtaacagagaggctaaatctctaccaaatctccgttctcatatacatgatcttgaaaggtcttatagttttcagctaagccgctcactgcaatcaactgctgaaaataatggaattgatctagtcaagagcatgaattatgcttttcttgagcagaaatcagaagctattggtgatttttcagaagaaaataacagccctcctgaggttaccaacactgtagcacttgatggcaaccatgctgatgatctgaaagttgatgcgttcattccttttgcagaattatcactatgcagacacctgttatctgaaggcatgggggaggatgctgcttgcagtgcatttgattctgagaaggtaaccttagaggagttccgtaacatgaagcaatcactgatgcgaaacaacaaactagttgttaggattgctggccgctactttccctgggatgctgctgcacctatagtactcggtatgatttctttcagtgaggaacaagtttttgaacccaaaggaatgataaatgtggagcgagttgagcaaagtgcagctccaggtggcagctggagcatctggccatttagtttcagacgaacaaggactattactgctatccagccagtttgtgaaagtattgttgagacttctgtatccactcctaaagaattgacacattttaaagaactagatagagaaaggaataaatccagggtaaagaggattgagaggaaggtgcgatcactcactccaacatctgacgagcttgcatctcttgatctcagagagggcaggaacgtggtaacatttacgttctcaactgcaattgttgggaaacagcaggttgattgccacatatatttatggagatggaatacacgcattgtaatatctgatgtggatggaactatcaccaagtctgatgttcttgggcagttcatgccactagttggagttgattggtcccaaaacggagttgctcatttattttctgcaataaaggaaaatggataccagcttctatttctgagtgcacgcgctatttcacaagcccacatcacaagacagtttcttttcaacctaaagcaggacggcaaagcacttcctgatggccctgttgttatatctccagatggtctcttcccgtcactttacagagaagtcatcagaagagctccgcatgaattcaagatttcgtgtctagaggccatcaaagatttatttccacacgactcaaatccgttttatgctggatttggaaatagagacacagacgagcttagctacctcaaggttggtattcctatgggcaagatcttcataataaaccccaagggtgaagtcgcagtgaaccgacgggtcgatacaaagtcgtacacatccttgcatgctcttgtccacgggatgttccctccaatattgtcgtcatctgagcaggaggactacaatgcttggaattactggaagatgccattgcctgatgttgatttgtgaggtacaagtcgagtctgcacaacagcactgcactaattttatgatgtgccgtagtgatcatgagaagatgtttggtgcatcggccacctatttctgca

SEQ ID NO: 21715 - DNA, 3246 bp, Zea Mays
cgcacacagatctgacacctaaccactctccctccgccaccgccatgacggccggcgctggcgagccccgccgtatagtcctcctcctagacctcgataccttcctccccacttccagctcaagcacccccgctgccgcctcctacctcgccgaagtcctgcccgccgccacctccctgctcgccgcctgccggtccccggcgtccctctccgcggggcgcctcttcttctcctccctctccccgatcctctcctcctccctcctccctaggccgctcccggccgcccccaccccgctctccttcgacctccacccggccaccctcgcgtccctcgccccgctccgctgcctggcgctccgggcgacccccgcgcacccgcgcgcccccgcctcctcgtcagtcgccaaatctctcctccagcttgagcacgactactcctgggaccacgacccccctcgccgccgtcgctgccgcggcttcgatccgccgcccaatctggtggctctcttcacgcccgtcacggaattcgatctgttcggggacgacgccagcttcgtcgagaaattccgcaaggttttcggtcctgtcagggaccgcctctcggcgattggtctacaggtgtgctgggtcgtcgtcccatccgcctccgtctccgcctctgccgccgccagtgaggggatcaggagggcggtcaccgagctgggctggtggttcactaccgccgatgcggtcgcgttggggtcggccgttgcaccgccggcgctcgtgtggggaggtgttggacttggcggcggggaaggtggacggcgaggggaggtggtgttggagatcgcggatgtggagggcaaaccacttgtctgcaagggctgtgaggtcgaggtggttggctcctcacggttgcagcaggccagcggcaatgccgtgtccaggatacatgtcaggtcggtgtgtgaggcggggaattgggagcggttgatggatggggatgttgccgtggttcgagggttccaacgggaggggagcaaggctgacggtgaagaagctgtagataaggagtattttcctcatcggattcttgaattggtccttggtgacgagaaggaccgattaggggttgccaagccaatttggcagctaattttggtgttccttagtagaaggaactattgtgcagtagtctcagtttctgatggagatggaaactccgtagatggtgttctcatgcccttctcgatgaactgtgccttacttcatcttgagaagaatgtcatgtctgccaaagcctccgagacgccaagttgtggtgcatctgatgagacaaaggtccagagtgataagaagaggagaagcaggctggtcggtaagctacttgaggtgaccacctggagtaccttctgtgacatgcttcgcaaacgtgctgatggaagcatgccggtggtggacttggaggatctatatttcagcaggtatggcaccacatccaaaaagttgcggtttctgaaatgctggatgaaacaggtgaaacagtcacgtcttagtactctatcaagtatacatacagaaggagagcagcgtcttccctcgaaggatgattcagaagcaagagttctggtttcagaagaagatgcttcagctagtcttgtcaatttttcgctggatgaagcagattgccagaaagtagacgcactagtggatgtagcaggctgcagtgaagtgggcatacctgtcgatgaagcagattgcagtaaagtggacatatcagtgggtgaagagagttccatgttctcttctatggaagaattagaagcatttctgggagctgtcccacataagattgagcaaagtctttgttctgaagatgctgatctggggagtttagctgaacgtttggttgacttgtccgtccatgcgatgttggttaaacacggaaagattgcagtgcggtactttgaacacaatgaagcggaagatggttctagtgcaaagattgcctgtgagctttccaatatcttgctgaggaaaccgaaggaactggtctcaaagtacagagaaagtaactcagcgtctgctgcatcagaacaaactgcaaaacacagtacatgttataaaatccgagagcatgagctgcagatcttgcttagaatggaaatgatcaaatctgaactcgggtctgccatagaggaaggttcaaaacagaaaatgataaaagacatctgctcgcttctgcaatttattgacatcaatctccaaggggattcttttcagtctgacggtattcttgagtatgctgaaaagaccataaagtcgaggtacatcaactccatggaggatgtgatcaagaagatctacagggagatggagtttgatttatttgatgacgacgacggagttgactactcagattctctacccagcagcagcaaccaggacgacggcaggtgccgcagccagcggggctccgacagcgcgagcgcctccgcgctccacctgctgcagcgggacgccaggagcagccggcagcgcgaggacgacgaccggcacgacaagctgacggcgagggcccgggagcggcgggaccggcagaggcggctctcctccttcaccagctgggtgcccgacctgcgccgcgtctgggcgctcaagcacccggggaaagagccgtgcgcgtgggtgccgcggtcccggtccaggtcgtgcgcgaagcggcggcgggccgcgtgcaccgatgtcgtcctcgagacgccggtgacctccggcaaaaggcacatgagcgggtcggagtccgacgacgccagacaggtggcggcgaggaggtccgccgcgctcggggccgtgtccaagaccttgtttgacgacgaggtggtcgagactgacgttagctcgagtagcacgtaagccgaccaggagattgctgttttttgtttgttgatttgatgaaaagagtcgtcgttgtcttgggcatgttcgtttcctcacccagcgtcgttgttcaggaaaggaaatagaacgaaatggcagtgatctttactgttgtcagttcagttcagttcagtgcgagtgtgcgacactgtactgcccttgcccttgtcgttttatcgagtggacactcggggatgagacagctagtgagcagggagtccgattttttttttttgtattttggcccttttttggaaaaaaatcacatattttaatgtcatttttggatcatttgctcggcgctataggctatggcgtcgaggta

SEQ ID NO: 21716 - DNA, 1682 bp, Zea Mays
tcagataataaagatgctgtcagcacagcatgtttgtagctttattggagggtgatgcttttaattcagccccctagcttgctgttggaaacattgtgagacgtgttttgcatataataaaggaggaagatatatcttccacagcagttggtatcgaaggtctttctgttactgttgacagtgatgatgaatatgacagcgaacatgatgatcgccctgcattatctgctgctgttcttgctgcacatgctagaaatgcccttcgtgcaccttcattgcagactctgctagaagacattcctgtgagtcctgcaatttcccgcactgcatcatcaactggtgactcagacggaaaaagtaaatcagctggagataagagctcaactagaaaactgaagcatgatgtcatcgcagccattggtgatcttattgatgagattgactcatgctatgagccgatttctgagcaagctgtggaacttattcaccaaaatgaggtaatcctaactctaggtcgttctagaaccgtcaaggagttcctgtatgccgcgaaagaaaagaaacgatcttttcgtgtatttgttgctgaaggtgctccaagatatcagggccatgttctcgcaaaagagctggttgagaaaggtgtacaaactacagttataacagattcagcagtttttgctatgatatctcgagttaacatggtcatcgttggagcgcatgctatcatggcaaatggtggagtcattgcaccagtagggatgaacatggttgcacttgctgctcaaaggcatgctgtgccttttgttgtggttgctggtagtcacaagctgtgtccgttgtatccacacaatccagaagtgttgttgaatgaactcaaatcgccgtctgatttgctcgattttggcgagttctcagattgcatgaatttcagtactcaggatggcagccccttgttaaatgttgtcaacccaacatttgactatgtgccaccgaagcttgtgagcctattcatcactgacactgggggacacagtccatcttatatgtatcggcttattgctgagtattactcagctgatgacctggtagtgagacggaaggcaacatcttgaaggaagacaaaagcgctgcgaagtctccttggtgttctgatcataggatttgcgatcttattggaatcctagtgttcttgtactcgtcatgatctgttgcctgtagagcggtgctgctgtgataagtggaatcacctgtttgtggatccagttactgtcaaactgcaggaaatcgatgcaagcattctcgcgcatcgttgtaaccatggcggcattttaagtataaactgttgaggaatggagcgttacgtcatggaagaattgtttcactataggagaggttcaaatatatgattgactggttgtgtagagggtgtctgtttcttttctggtcataggttaatctgggccttggctggtccaaattttgaatgttataaactccagcaagctgttcgatatgtctatgaagtgttaccatgcacactgatggatgctgggaaagggaaaaaaagggaattttaaggcttaaacaaattagtaagacaacttcgtagatgcttggaccggcgacgacctggacgcacacgcgccgcaggaggtcgtactctggcggggccatcggtg

SEQ ID NO: 21717 - DNA, 1036 bp, Zea Mays
gtccaccacccttaccgtgcccccgctccagccccgcccgcgccgtcttcctccctgcaatcccgccaccgcccgcgcgtcgtcctttcccttcaatctcgccctcgcccgcgccgtcccttccctgcatcccgtccccgtccgtgagccccctccacacgctcccgtccgcgaccccagatcccgtgactgccgccgtgtcttcgcccctagctccatcatcccgtcgtgtcccgccgtgccatcctccgctccgcgaccaccgcctctgctcccctcgtgcccagcgccgcgtccgcgaaccagcacccctcactctctctcccgcccggctctcctcgcccaactctctctcccgcaatcccacggcctcgccccaaatcgccgccccggctctcggtcctcgcccaagctctccatggaaggagatcgaggaatccgcgtccgctgcgcccggctctctctgcgtccgtagtctccctggaaggcgattcctcgatccgcgtctgctcgcttcggctcctccgttcccaaacctcctcaaccagcatctctagggttttcgcagccaccgcccatggctgccactccggaccgcgtcaatgccgaccttcatcgtcgcctcgccgtcgacactccaccgccgccccaggtagccagagggaggaatcgtccaggcactaagcacaaggaacagatggaatgggtactccatggattaccaaggaaaaaacaagctggtttttagcctaactgatccgaaatcatgcacagcacaaggtagagactgtacgatagttgattgcaccagaaaaatagtagcccagatgggtaagaaagagctgatgggaggcaaggacttctaccatgtggaagtacagtcaggatatgaccaagctttcatcattggggtgatggcaattcttgacagcatacatggagaaagacatgggacaaatagaagacatctaaagctttccaaggcagatgcctccagaggatatctactctctggtcatatgatcgatgcatagat

SEQ ID NO: 21718 - DNA, 913 bp, Zea Mays
tttttgtcaagttcatgggcatgattagcttgaagaatagaagttgaaacagaggtcttggcagttgaagtgttacctggctggaaaaagggaaccaagattacattccccaacaaaggcgataagctacatggccagttagcacaagacctgacctttgtcctcgattcgaagccccatgatgtgtacaatcttgaagggaacaaccttcttgtaaagcaggtgatccctctggtagatgccctcgctggggcagagataaacctcacaacccttgatggtcggaatctgcctgtgagggtggaggaagtggtgcgccctggatacgaagttgtgctggagaacgaagggtggccgatcaggaaggaacctgggaagaagggaaagctggtaatcaagtttgatgtgaccttcccgatgaggttatcgccgtcacagcgggcagccatcaggcgaatcatgggcagctaactgggggaagagaaagagaaggggcattgcattcttttacatggagaaggaacagtctctacattggcactagaattcagatggatagttggaacttggaagtaacttgagtcaatcagataggcatttccatggttaaatatcccgttactaatcctacctatttgctttggttaattgaatgtgacctagttttttttttcgttttctttgttatatcgtgtgaatccgtagaaaaggtgggtgatttcgaggataatgtaagctgatttttccatccgaattttttctggggcatgtgatggttttttcattggaaaactgtagcatacccgggaaatggaaggaaaggaaaaaaagatagaaaagacaagaaaggagcctttaagcaaatattcatgtgcctctttcttgtatcatgtatcagttgggcagggttcat

SEQ ID NO: 21719 - DNA, 883 bp, Zea Mays
tgcagctcctgttgtttaaggtaggggaggtgggggagctgtctgagatattccaatggaaaggggaggtgcccaaggggctgccaggctgggacgatgccgagaaggagcacttgggcgaggagctcgccgacgtgctcctctatctggtgcgcctgtcggacatgtgcggcgtcgacctcggcaaggctgccctgcgcaagatggagatcaacgcccgcaaatacccagttggacagtgcaagggttcatccaagaagcacactcactacggctccactaacaatgttggcgacagcgacaaagctaatgccgcgaacaaggagcagcatagctgtggtgtctaaaatgactcggagctccttgaatggtaatttggatggtcgggcatgatctaggttacgtgtgctgatgaaacagggatgctctattttggtgggaaagggacaagttgcgtgggttcaagttcccctatatattagatggctaatgaaccaagtgttaaccacaaagcttcgtaggctgtagctcccctatgtctaatgtgtactggggcattctgattctgctggttcagttatgcagcttcatatgatgcgaaagcaaagctgactattgcagtagtactaatgagtactgacagtactttatgatgcaaaagctttctgacagtgcaaagttgtcagtgtagtctttgagctggtgttggactgtcggtgattggtgaatgtcattgacgctctagtccttatttcagtacaatgaacaaagattattatggggcctttatgaacgtcatggtaagtggacccgagtcctgactatggactaggattctcggggaaatctttgtctgtgcacagcccatcaaagcttgtcgtcg

SEQ ID NO: 21720 - DNA, 1431 bp, Zea Mays
gagagccccgcccccgggaggccgggagagaagagaacacgcgcgtcaggagcgcacaccgcacggcgcacacacacacgcctcccgcggcaagcagcgcaggacaccgacgacgaagcgaggagaggggaggaggcggagccgagcgcccgagcccaaccccgcaaccacgacccacttccccgtcgcgattcgcattgcccttccctcgggttctacccccagcctcgcgccgccgccgccgccgccgcccttgccagagagatcaccccccattcccacaatcccgtccctccctccgtccctcgagtgaccggtgagtggcgtggggagccggtgggcggtggcgagggcatatcatggtgcagtgcctggacggggtgaggcagctgctcgcggtcctgctcaattgctgcgacgtcgagctcaagcagccgcgggggctccaagacccccaggtcctcgcgagggagaccgtcttcagcgtgagtgaggtcgaggcgctgtacgagctgtttaagaggatcagcagcgccgtcattgatgatgggctgattaacaaggaggaatttcagttggcgctatttaagaccaacaagaaggagagcctgttcgcggatcgcgtatttgatttatttgacacaaagcacagtggaattttgggatttgaagaatttgctcgtgctctctcagtatttcatcctaatgctccccttgatgagaaaattgatttttcattccggctgtatgatctcaagcagcaaggctatattgagagacaagaggttaagcagatggttgttgcaacacttgccgagtcaggaatgaatctttcggatgaaattgtagagagtataattgacaagacatttgaggaggcagacacaaagcatgatggaagaattgacaaggaagagtggcgcaatctagtcattcggcatccttctttgctgaagaacatgactcttcagtacctcaaggacatcaccactacatttccaagctttgtctttcactctcaggttgatgataactgaaattgatggggttactttgaaaagaaacattagaagatattctcatgggttctgatatggttttcatttttcaaaattgggttgttggattgaaagattgtagtgttgtgaagtacgtgcatgttggattcgaggactcgattttttttgtcaaccttgtttctttcatttgcatgtctggatgcgcatgaataagatatgaagtttatgtctaaagttttcttttttttccttgttttctttggctggccggcaatcggatccagtttttagaagcttgtctttctgtacaggatagaaacagcgttttaaggatttatattgtccttgtacttttttctgctgtagctagagcagaatattttttggttgaaggtggcgtgcttccattttt

SEQ ID NO: 21721 - DNA, 4772 bp, Zea Mays
caacaagtatatttggccaactgttcacggttcttcaccagttgcgttcgtcgttcccgttctcctcctcgtatcccctggtccgtacgtcgtggccaccggcgccgcctagctcgcaccgccgacagcgtctcagactagatcgcgcctccccctcccaaatcgggttccagtcgggctcccgcaaccgccgccgtctacaccaggtgccgaggccgatcttttcgtcggcaaagatcgccgagcagatctgcccctggccgtcgccctacaccaggtgccgatatcttcgccagcgaagagcgcccagcagctttatgattgcaagacctggttattttcacctgaggttgtgttcaacatgttagtggcatgaaaattgcctcaattgggggcaatggcatctagtacaaaatcagatttagtgtctggtagccctgatgggcatggatacttcaatgcacaacgtgggtcctatgcagctgcttcattggaaaggtcaggaagcttccgtgaaggcggtgatggctatgcgatgttttcagcatcaaactcatcaaggtcagcggcagtgaactctatcaatctagttcagtcacttgcactggacttgagaccggcaactgtggatcacaaaacatctcggttagatctaaagaaatcaataagttccatttttggaacctctgcagaagattcaacatcacttccatctctagggagaaatttaccaaatgctatcgaagagatcagacgtatgaggagtaatcttaacgacaattcaaataaggccagggaaagatctagagcttttggtggtgctatggcgaagattgataaactttgtcccaatattgtgcgaaaacgttctcgaggagacagttcatctaatgaacgatctagtgtgttatcatctggaggagttacccctaaaaatgttcctcagagccatttaaatgcagatgatatggaagctgggcttcagagagaagagaggacaaagaatgcaggacaaaataggagaatacgtacatccatggtggagatggatgcaagaacagctggtccatcaagaggccccggacctactgataggatctcagatcctggtaaagccaccaatggcagttctgcagttccagaagaaaaaatcagaggtttggcaactactatcgatggttgggaaaagccaaaaatgaagaaaaagcgttctaccattaaggcagacatgtcactggctggtgttttgaggactgttgatgtagaccgagagtcaaaacaaggcatgcagcacaagtttactaatgacggtagggcgagaatgacaagttctagtttcaggtctggaactgttgcatctggcacaaccaaagcagatttgctttctacacaaaatggtcttgttatgcgacccttaaataggagtgatcaagacaatggtttccatcctactaacaaaagggaacgtcaagctgcattagataaagaaacgcccaacccgagaaccattaacaagcctaatgaagacgacagtggatgtaacattgcatcattaccgaaggcgaatggatctgcgcggggaccccgatcaaattcagggtcaatattgaagtcatatccaaacattcatcgatcacaagctagttctgatgattgggaacatccgtctggtacaaataagttaatttctgctggtggatctggcattcataaacgtacaaaatcaacacattcattatctcctccgatccaatggggtgggcagaggcctcagaagatatcccgttcagcaaggaagtcaaatttagtccctataatcactactgatagtgcactggtaccaggttcgctggacagtcctgtcaatgaagattgtgcaggtttaccgaggcgtgcatctgtaaatagccttcaacaaacaaaacgaggagatcatgggctctcaactggacctgaaggcaatgagcctgtagttgctgagaaaaagctaagggacaagggcaaaagggctggtgaactggatgatgggcatggctctggttttcagaagattgctatgcttgggcatccttccaaaaggaataagttgcctgctgatgaggatattggagatgctttaaggagacaagcaagagttgtcccgggttttactctgaccaggcctgggactcctgtatccattgacaagcttgaaaatgctccgattacaaaacaaagaagtgtgaggacagtctcagagagaactgagagtaaatctgggagaccactgatgaagaaaatatctgagcgcaaaagtaatgcacggcctaggcatacaagtagcagtgtgcagtcagactctcctgtgcaatctgaagatgatcatgaggaacttcttgcttcagcaaatgctgccctaagatctgcttgtgcaagcacgttctggcggcaggttgaacctttcttcgcatttttgactgcagaagacatcacatatcttagtcaacagatacatttaccagatgattcctcttcaagtaggtcaatggaagggggtgaatgccaaaaatataagggtggtcttgaatacatttcacacccctcaactccagccgctagcaacaaagatgatcacgctgctcttccaaatggttttggcttgaatcagttggataatgacataggggttggctgggaggcaagctgcattgaacctatcctcgatcaacttgtccatgggattggggtaccaggatggtcttcagttggccaaagacttattcaagcattgattgatgaagataggatcgatagtattaccaacaacacttacataagcgagggctatgcatttgatacacatgaaattcattttgatggaggaggatggaagcctcactcaaataattataagttagaacctttagcgaattttgaagcttcaaggaggggcccaaatggtctgacaatggattctgactggaaatataatgatgtgtcaaatagaagtggcaatgtcatggataaaaccaaggtgtggcctgagtttcagtacagtgagatgtgcttcaatgataggattatcattgagctgagtgaagttggtgtatctattgaacctgtgcctgatcttgcacagagtgaggacgaggatattaatgctgaaatctgtaaattagaaggccaacttcgtaaagaggttgtggagaagaaaaacttgctattgaaactggatggcattgttgcaactgcaaaagagtctcagcatagggaattctcacgccttgccatggatagacttctcctgagagcatatgagaaatatatggccttctgtggtccaaatgtttcaagcagcaaaaatgtcaatagaactggcaaacatgctgctctaagttttgtcaaacgagtactagtgcgatgccaaaactacgaagaggcggggacaagttgctttgatgagcctattttcaaggacatgtttttatcagcgacgtctcacagacgcagtctagatactgcttcacaagataacaatacaacagcgagaccagtccacagggccggtgcaccagacgcttcgcgaggaagcagtcacccgacggacctgtcgtttgcaaaggaggatccctggacaaacaacgtaaagcagcgggaactgttgctggacgaggttgtaggtagcataacaggaggagctctgagaacctcctcctccgtccttggtatctccctcgtcagcaatacgaaagggaagagaagcgagagggaagggaaggggcacaaccgagacagcctcaggtccggccgtccgtcgccgtccaacgcaaagggtgaaaggaagaacaaaacaaagctcagacagaaggcagccaacatctctgctccttcaggaggtctacagcttccagcgaaaacaacgcctcccagcagtgggaacggcaaggaggagagcgcagcagcagcagcagctgctgctgccaggcatggtggtgatccggcggcgaatgcttcgaatgacgccgaaatgcccgacctggctaacctcgagctgccaggactggacgccgactttggcggctggttgaatctggacgacgacgacgccctccaggacctcgacctgatgggcctcgagatccccatggacgacatcaacgagataaacctcatgatatagccgtacattttccttcgtttctcacagtaacaaccaacagagaaaaagctcccgatagtgcgtgcacaggtaaccaccaaccctgcagttttaacaccaggcctggttattaagcttcacttagggctagtttggaaactcaaatcccttccggtattggaggtgattgaggggagaatgcaataatttcttcctcaatctcctctaattctggaggggatttgagtttccaaactagctctgataaaagagagagagagggacagacagttgatagagacctcttgacaatcccaacaaccacgtgttgtcttttttgtaccagcgtgtaatttgcctccctgccttgtaccctcccctatacgttcatctgtcgtgtagacgtcggtgtacatatctattttggcgccctagttacaaggtagggaggctagttactgcatctgttactcgctccaaaggttgtgtgtgtacagactgaggacatttctcatctcatggcagcgccgactttccccccttattgcgagcataagatcacattcttttatctcagattagattgaggctagagactattccagccaatcaatgttaacgtaaataaatgtat

SEQ ID NO: 21722 - DNA, 2029 bp, Zea Mays
aatgtaagaaatacacacaaaaaaaaagtcaaatcttaaaatggcgaacatgcgagcccctagaaacgatgacaaccaagagagtgcctcctgtcctcctaacatcgattttcctccggaatcgtaacctcagaaagccaaatctcattctccggcgctcaggcccacccaagcgtcgactctcccgatccaatcggtacctcctagttcctcgccggcggtagcggcgtcgggcgaacagcggtgacttggcgagggcgcttggccggcgacaatcatccactaggatggaaggtgaggcagagaccgtggttggttcttgttctaaaccatgtgggcctctggaggactactacattccagattacattctgaagccaggtgcccaacaagtacttgttgatcatgcggcaccctgccccgttgtagtgttcatcaactcaagatctggaggccaacttggaagtagtttaatcaaaacatatcgtgagcttctcaatgaagcacaggtttttgatctctcaaaagaggctccagataaggtattgcatcgtttatatgccaaccttgaaaggctgaagatggaaggagacattcttgcagttcaaatttggaggacactgaggctaattgcggtgatggtacagctagctggctgcttggggtagtcagtgaccttaagctttcccacccacctccagtggcaactgttcctctgggaaccggaaataacctccccttttcatttggatggggaaagaagaatccttctactgaccaagaggctgtaaaatcattcctcgggctagtaaagcatgcaaaagaaattaagattgatagttggcacatcattttgagaatgcgagttccagaggaaggtccatgtgatcctattgctccattagatttgcctcattcattgcatgcgttccatcgtgtctcaagtagtgattctctcaatatggaaggttaccacacattccgtggaggattttggaattactttagtatggggatggatgcagaagtgtcttatgcatttcattctgaaaggaagaagaatccagagaagttcaagaatcagctgacaaatcagggtacatacgctaagcttggacttaaacaaggatggttttgtgcttctcttagtcagccatcatcaaggaaccttgctcaaattgcaaaagtaaagatcatgaaaagagctggtagcctctgggaggaacttcacattcatcacagcattcggtccatcgtgtgtctgaatttgcctagtttttctggaggtttgaatccttggggcacacctggcacgaggagagcagaagatagggagttcactgcaccttttgtcgacgatggacttcttgaggttgttggcttccgtgacgcctggcacgggctggtcctgctggcccctaatggacacggcactcgcattgcccaggcccataggatccgctttgaattccacaaaggcgcagcagagcacacgttcatgagggttgacggagagccctggaagcagccccttcccaaggacgatgacacggttgtggtggaaatctctcaccttgggcaggtcaccatgctagcaaatgagccgtgcaggtccaagagcgtcaacgaccagtcgtcactgtcgccggcgcacgacagtcatggtgattacaatgatatcgctgaggaggacgaagacgagtgggaggacggcaggaggaagtttggggcggcagatacatttaagattcctgacgagattgacattgctcatttcagttgagctttgactagtgcatcgtcgtgtgcgttctgatcatacgagtatggtttggtttataaccatctcctttcttttgatttcatatatttgcgatatgattgttgcagccatgtgtaagtgaatcctaggtaaccaagtgctgcgttgctatatatgaccaatgtatgtatagattcagtggaacggtaaaaacacgcgaactctacggttttctccttaaaaataaaaaagaaaataaaataaaaa

SEQ ID NO: 21723 - DNA, 2175 bp, Zea Mays
accacgatgcagagacagctcggtctattgtccctgcaaagaatgagaagaaagaatcctcaggcattggcaagcgagaaactgggaaatctacaaaaaggactgctcctatagacaaggctaagactgctaaagaggaggccagagagttgctcttgaaggaggaagcatctgtgcgtatgaaggttgggcaagtgcagaaggatctctccttaatgttggatgctcttggcaagttggctattgctaatcctatatttactcatggtcaactgccgtcactggtaaactatgttgaacctttgctaagttctccaatagtaagcgatgctgcattttgtacaatgttgaggctagcacgttgcacagcccctcctctttgcaattgggcgctcgacattgctgctgcgattcgtgtgatatctgttggtgattttgaaatggttttggatcttacacctgtgatcatggaagatgatagtaagaagccatcatctggcatctttgaacaaatagtaaatgggctgactattgcgtgcaaagcgggtcctcttccagcagattcatttactttcgtctttccgatcatggaaaggatccttctatcttcaaaaaagacatgtcttcatgatgatgtgcttcacatactatctatgcatatggatccaatactaccacttcctcgacctaggatgttatcagttctttatcatgtgctaagcactgttcctgcctatcaaccttcagttgggcctatgctgaatgagctatgcctaggtctaagaggccatgagttagcacaggctcttgtcggtgtatatgcaaaagaactgcatgttaggcttgcctgcttaactgctataaaatgtgttcctgtgcactctgtgcaacgagatttgcaggtgtcaacaagcctctggattgctgctcatgatccggagaaggtggttgctgaattagcagaggaattatgggaccgctttggttttgatgccatcactgattactctggtattttcaatgcactttcccataaaaattacaatgttcgtgctgcatctgctgaggctctggctgcggcattggatgaaaatcaagacaaaatgcaagatgcactttctacccttttctctctgtacattcgtgatattggcactagtgttgaatttggagatgcacactggctcggaaggcagggtattgcattagcactccactctatcgctgacgttttggcctctaaagatcttcctgttgtcatgacatttctcatctcacgcgccctggctgatccaaacgtcgatgttcgtggtagaatgattaatgctggcatccttattattgacaggcatggaaaggaaaatgttcctttgctatttcctatttttgagagctacttgaataaaagggcaagtactactttcctattaataattgtactagcatcagatgagaaaacatatgatcttgtgagggaaggtgttgttatttttactggtgctctggcgaaacatctatcaaaggatgatcccaaagttcacagtgtcattgaaaagttgttagatgtccttaacaccccatcagaggcagttcaacgtgctgtctcagattgtttgtccccacttatggtatccaaacaggaagagggtcaggctcttgtttctagactcttggatcggatgatgaaatgtgaaaagtatggtgagcgacgaggtgcagcctttggccttgctggtgtggttaaaggatttggaatttcttccttgaaaaaatatggcatcgctgtgacattgcagaaaaatttggaagacagaatgtctgcaaaatctcgtgaaggagctttacttggatttgagtgcctgtgtgagaagcttggcaaactatttgagccgtatgtcattcaaatgcttccgttcctacttgtgtgtttctctgatcaagtcctagcagtgcgcgaagctgctgagtgtgctgctcgggcaatgatgtctcagctcactggtcctggtgtgaagcttgttcttccgtcacttcttaaggtatcaatatatcttatttgatgctatcaaatcataacatttattgtgtccaaatgttctggagaatacaagtgtccagttcatctagttatatattgaaatctgacaaccacttaacttctgctgaatatttagg

SEQ ID NO: 21724 - DNA, 1542 bp, Zea Mays
aggagcccactcttgggcatacctcagttccaaaaagctcgcaacagccagccctaggtctgaactctctcggacgggtgacaggctgacagccgccgcccgccagctttggagagccacggtgacaggccgccagcagccatcgacggccctccctccacctcgccgtcgtccctcttcccccatctcgccgagccatcgtccctccacagcaggaccacctcaccgagccgtcgtccctccacagcaggagtgcaggaccgcatcgccgagtcgtcgtctctccacaccaggttcgccgtcgcggcgcggctacctcgctccggctcccagctcgtccggtccagctcactcgcggtcgcgaccatctccgtccacctcatccctccggcaagcagttgctaaactcatccagggtcagatcagcagctcttgccttatcccgctggctggccgcagcaccggtggtgtggtggaggatggcatcgaaatacgtggccagggtaccgtctccatggtgggcgccacaacgtcgtttggttggttcatgggtttccgtctgctcggtaaaatgcggtgcattgggaggacgggatgttgtgtgcgctgctgttagcttcagaccatgcatcgacattcacaaggggaaagttaagcagattgttggttctactcttcgggattcatccaatgatggcatggaacttgtgacaaactttgaatcagacaaatctcctgcagaatttgcaaaatcatataaagaagatgaacttcttggaggacatgttataatgcttggctcagatcctgcaagccaggctgctgcactcgaggcactacatgcatatcctggtggcttgcaagttggaggtggaataaatttgcagaatgcaatgtcttaccttaatgaaggggccagtcatgtgatagtgacctcttatgtgcttagcgatggcaagatgaacattgaaaggctgacaaaacttgtcgagctggttgggaaacagaggcttgtgctggaccttagctgtcgaaaaaaggatggcagatatactattgtaactgacaggtggcagaagttcagtgatgtgtttgtggatgaaccggcattagaatatctcgctgccttcgcagatgagtttttggttcatggtgttgatgtggagggcaaaaggttagggattgatgaggaacttgtggaactattggggcatcattcaccaatcccagtaacttatgctgggggtgtgtcaacaatggatgacctagagaggataaagaaggcaggcaaaagtcgagtagatgtaactgttgggagtgctctagatatatttggaggagatttaccctacaaagatgttgtcctttggcacaagaagcaaagtatggttggccaagtgtcaaggaacatgtggtagcgatcagtattgccagaatttattgtgtatcgctcgctaaaagcatatttattttcattacaaaacttcattgtgcgtttgaattactgagctttcttttgcttttgcttttggttgtttagac

SEQ ID NO: 21725 - DNA, 2003 bp, Zea Mays
atcttcgcagcattgttgctgtccgaggtcagccgccctctctctctcctcgtgctccgattcgtgggctcgagctccggtgactaggaacagcggcaaggaaacaatgcttctttctcccttcgcacctttgtgatgcactgaacactagtcaggagctctagtaatcctctaatggccgaatgttcattggcaacgctgagagtgagaggccagtatcaagggagatggacctggtccaacagcaagttgaatatgccaatcatggatccaaagaggaactacgccctcaagattcatcttccatgccaatccaaagcagcaagagaatggacaagtgttgcatttaccccttttggttttcatggaagggatcacagggtggaaacttcagttaaatgttactgtttgcagccactcatggattcggagagcatggtctcaccaaatctaatactgatttcggatgaagctcttctcactatcagcatggtttttgcatatttggctggagttgtaccctctgggcagacatctcctcgtgtcagaaatcagaatgtttctcaacatattccagagccaagctcctctcattctgggacctaaagttcttgcctgaaaggaatgctgcatttgaccccaacgatatgtggagtgaagtgagtgctaaactttccaaagccttacaagcacatgttcaagatgcccttttggatagccgagaggatggactcatgagtgataggaaaaactatcctttgagtatgcttgccattcatgctggtcccagattgcggcttcttctgatcacattccagcttctggaaatggaggtaagaaatatctctggaagttctgaactcgatggaatcaggtggttgcaagtatcgactaccttgatagatagtttaattcaaccagtatttatgaaatggattgaagaagaacaggccttggaaaatggacaaatcaacgaaaaacttatgaagacgataagcagcaaactaaaggagggcaataagatcttgaggaggtttaacagatttgggaaatctgaactctatttggatatgctctttttcctaagatttggttctgcaaggtgtgacagttattttaatgtcaaatttcttgctgaacatggagaaagaattttagaggaccttgttatttccttagctgatgtgattgctagtatttatctggagcttatgtcagtggatggtgatatgtctgctgaagttgttggttccagcttggttctatgttctctatcaaccagagaactccaaaagctgcgcaatgaggtggcaattaattggtggttgcaccaatacttcaagtcagttgtttcaatgtatgaggacaggttcgagttatatgttctatgcagcaaaaaatgtgaaaaaacagccgacaatcaagctgagagggcaaattggtggaggattgcatctggcaagcctaatgtgcttactcttgattatgttaacatcagtccattttcccttccagcaagaaggacaaaggaattaagagctttgattggatggaggtattacttcagcttattcttagagttgtcagatattgccatgcccttcataagggttgctatcagcaaagtgagctctgcggtgtcctacttctgggtgtcaatgattggaaggtctcttgggctgattttctcagggattagacaatcactaggctggaaataagcttatacggtcatacctgttgagttttgagtctgacttctgggactgaatgaatgtctgttaggttatgcattgtaaatctttgagatggctgtcatttttctctgctttctttttcatcttagtgtgtaagaaagtccattgatttcgtggacggaatatgttaatctgtggattactgaaatccatccacatccagtctttctcaaaacagaattcatgtacacgaaatgtctagatgcatttttgtttttttattcaagagggacggaacatcatatt

SEQ ID NO: 21726 - DNA, 116 bp, Zea Mays
gcaaggaggagaaacggtgggacggatgatgagcgcgtggacgaggagcttgcggtggaacagaggaggagcccgactgcggctaggcggcggaggcctgggcggacagatccatg

SEQ ID NO: 21727 - DNA, 4424 bp, Zea Mays
ctgttgttagggttgtacatgttccgctggttattgatccgcgatttgctggctcattcagcagcatcctgattcgttaggcgtgccgcgtgagccttgctcgctccaatcgatttcgtcgtcgtccgctcgtcgctagctccttcttggtcgctccttcgcccctgctacaatcgatttcgtcgtcttcagcgaggagctggggagtgattgaacgaagccagcgctccctccattgtcgccccgcagatcgatcgaagtcagcaaccagatcagaaagagcaaaagaggcgcccgagtctctacggcggaaagccatggacggcgccgccaactggcgtcccacgcagggagccgaccctgccaccgtcgctgctgtcggcggcgtcgaccctaacgcggctgcccccaccggaagcgactggcgcacccagcttcagcccgaggcgcgccagaggatcgtcaataagataatggagactctgaagaagcacctgccagtatcagtaccggaggggctgactgagcttcacaaaattgccgtgcgatttgaagagaaaatctatactgccgccaccagccagtctgattatctgaggaagatttctctgaaaatgctgtccatggaaagccagaaaaagacacaacagaaccctggaaatgctcaagtgattccaaatcaaaaccctcctggtccaggtagtaatccagcacagtcatcagctatcccgttgatgtctcagcaacagacacggcagccaaatgcttctacatccgttcaaggttctcttcctagtgttggtcagaacttgtcgagtgtcagccagacattgacgctgcagaatctgtctggcatgccacaaaataccatgaacaatggtttagcacaaggtaggcagcagcagcaacaacaacagcaagcacataatcagtttatgtatcaacagcagaaattgttgatgaaccagaaattgcagcagaattcacgtatgcaaccacacattcagcagcagcaaactttgttgcagtcaacacagatgcaatcttcacagcagcccatggtgcaaatgtcatctggccttcagcctgggcagattgccattccacaaactcaatccatggcgatgcagtcagctacacagagtggtattcaacagaatgcactgaattcggtacaacaacctgtgcaatcgttactccagcagcctacaccgtctgtggtaaggcagcagcaacatccacagtccatgcaccagcagtcttctctgcagcaaactcaaccaactcaacagcccaacattcctttgcaacagcagccacaacaattaatgggccatcagtcaaatttacagcaaaatcagttagtgaatcaacagagtggtgctgtggagatgcaacagcaacaaaggctaccagttcagtcaactaatcttttgaatatgcatcaaacgcagcagatgatgaaccagcaatctatgcccttgcaccagccacaacaattggcaaaccagggaaatgtgtcaagtctaaatcagcagcagcagcagcttcttggaaccgtgccaaatgtccgtatgcatatgttacagcaacaaaagccaattcagcaaccacagcagcaacagcatgctcagcagacatcaatgggtttgatgcaacctcagtctcagcagaatcagcttcagcaacctcaacaacatatgatgtcgcagttccagtctcagcctaatcaaacgcagcaacaattgggaatgcaacaaaggctccagacttcagctggcatgctcttgcaacaaaataatattgatcaacaaaagcagtacgttcaggcacagaaggtcctccaagaagcacccagtacatctgtggattccactgctcaaactggtcatccagggacaggtgattcgcaagaggagttatatcaaatgattaagagtttaaaggaccaatactttgcggaattgaatgatgtgtacaataagatatccatgaagatacaaaatattgacaaccacatgcccgctcaaaagtcagcggagcagtatgaaaggctgaaaggctttaaaggaatgttggagcgcatattgcatttcctgcaagctaacaagagcagcattcagccaggttttagggaaaaaatctctattttcgagaggcaaattctcagtatcatgagttcacaaagaaggaagcctgtgcaggcacctggacagcaaacgtttcagcaatctggtgggcaagctcctagctctaatatgtcacagcagcatcagacttcccaaggtttgcagcagcatgatagtcatactaatcagatgcctcaagcaagtttaccaagtatgaacacaggagtaccgacctctggagcacctggcattcagcatgtacctgcgcctcaagcatcaaactttggtgttccaacaacacagcaaaatgtcacaaatgcaccgcaggctgcctctaatccggagaatgctcagggaaataattttaatcctgtgcagcatggttcaatgggtactgcattgcaacagggaagcactggtcccatgcagggtgcattgaatgcacagcatcagtccaatagtaacatgatatccaacaatgcaatgagtacaatgcagactaataccaatgccatgcaagcaaacgtgaattcattgcagcagctaaagcaacatcaggagcatcagatgatgcaaaatcagcaaatgaagcagcgtcagcagatgctgcagcagatgcagcaaaagaaaatacttcaacaacagctcccaatacaacaactacagaaacaacagcagcaagggccgattcaggttcaacaacttcattctggaaatgatgtgaatgagctaaaggtcaggcaaggagctgcaatcaaatctggaatgtatcaaccgctgaaccagcgtaactattatcagcagataaaacggggggatgtctttccaatttcttctccgcaaaacctccaagcatcgtccccacaaatttcacactattctcatgttgatcagcacagtctgttgcaatctcaagtgaaaaccgggacaccgttgcattcagctaactcaccatttgtcccatctccatctcctcctgttgccccatcaccggtcccactggattcagataaaccactctccaacctatcttcactcactagtgctgggcaggctggacatcagcaaacatcccttgcacctctaacacaatctatagctgttaacacaccaggtatatcagcgtcacccttgcttgcagaattcacaagtgctgatggaggtcaggttagcgtaccaactcaagttccaacaaaatcaagcgcagcagaaaggcctctcgatcgcttgcttaaagcattgagaacaacacagcctgagtcccttagtgctgcagttagcgatattggatctgtcgtgagtatgattgacaggattgctggatcagcgcctggtaatggttccagagctgctgtgggtgaagatcttgtcgctatgacaaagtgccgcttgcaagccaggaacttcataacccatgatgggagtggtgcatcaaagagaatgaagcgggacacaggtgctatgcctcttaatgtgtcatccgctggaagtttgaatgacagcttgaagcaatcatatactgttggcactccagagctacaatcaactgcaacctcacgtgtcaagtgtcaaagggctgaggtaaaccatgttctgttagaggagattcaggagataaacaaacagcttatagatacagagctccatgtctctgaggatgatgctgagtccttcactacatctgatatggccgaagggacagtcattaaatgcacattcactgctgttgctgttagccccagcttgaaatccatgtttgcttcagcgcagatgagtccaattttgccgttgaggttgcttgttcctggtagctacccaaaatgctccccggtgcttctagacaagtttcctgatgaacaatggaactcggatgacctgtctacgaaggccaagtcaaagttcagtgtgttgctccggggtctagctgagcccatgtcattgcgagaaatcgcaaggacgtgggatgcttgcgcccggaaagtgattgcagagtatgcccagcaaactggaggaggcagtttcagctcgagctatggttgctgggaaagctgcgttggcgcttcataagtttattgtatctattactccgtagtatatttattattctttattacactaagcatttatgtgttgagcaaaagaaaataacagtttatcttccttttggtatcgagtcactgttagcttgataaataagatcgtgtacagtacagtgtatggagcaagcttgggtgcttcagcccggttaatatttactatcttgtatgctttgcctctacttacataacttgcgcg

SEQ ID NO: 21728 - DNA, 208 bp, Zea Mays
gatcgaatgtcacaacttttctatataataggagttcggtacaaaataagtaaataaatacattataaggagacaacggtccagcaatccaaagttaactggaagacgacagcctagacctctcacgaactcgtcacaacatcctccaagcacctcatcctgtggtacctgttcttgacctgtggagggtgtgagacagcaagagtga

SEQ ID NO: 21729 - DNA, 639 bp, Zea Mays
gtggcttccctgcatcaatcttttttcaatgatcttgtgatggttatctaaggaactcttggatttgggtgaggcagttggaacccagagccgtggtctctctcaagaatgcatttcattgcttcccatcactaagtataagtgtggattcttttcaaggaagaaaacacgccgtgaaaggtgtgtgatttgccaaatggagtacaggagaggaaatttgcagattacgcttccatgcaagcatgtataccatgccagctgcgtgacaagatggcttagcataaacaaggtatgccctgtttgctttgctgaagttcctggcgaggattctctgaggcaatgattcatcagttgtgatgccactatgaagttgctgctctgggtactgcgcccccaatggacgcatgatttctgctttgaaggcagcttgttgtccccactttagaattgtgtattagcgccatattaccaaataggttattacttatcagatgtatttaggtagtgtttggtttcagaatatggtaggatggagtcactttgctcctaatttattgttgtttgaattgatttcatgtaggacatagtaactctaaaaatggaaaaactatgcttaaatactgaagcatctgactcccc

SEQ ID NO: 21730 - DNA, 2601 bp, Zea Mays
gccgcacccgcacctccccgcggacagatcgatccgtccgtcctccgtcgtgttcgttcaggccgagcgagatccactgctgactgctcactgcaccgaaccgagagagcgtggcaggcaggcgggcggccgatcaccgacgccgacgcggcgtccacacgcgccaacggccgaacgcactctctcccacccctccgtcgtgctccacggcccaacccaaccctacgcactcctcccccctccccccccgcagctacatctcccctcccgcttcgccagtcgccaccgcgcggcgggagctcgctgaagagcttcccccctctccccccaggcccgcggcggcgccggctcggcccccgtcatcgcgctatcgtaggctcgcgggctcagctgatctggtcagcgaggcgaggttgccggggggccagattccgctcccgcccgcgcgtggtctggggtgtgggcggtggatcggctgcgcgggtcattagatctatgcccgagatctaaggcgccagcgccaggtgcggaggcggaggccgtgagccggtggcggtcggaggccggggacagggatggcgtggtggtccgggaaggtgtcgctcagcggcctgcaggacatcgccggagccgtcaacaagatcagcgagagcgtgaagaacatcgagaagaacttcgacagcgcgctcggcctagaggagaagcgcgacgatgaagaagcatcaggatcgcggacatccaactctgatggaataggattcttcaatcctgtcatggctttcatgggacacaatggtgaagaagatggcactgaagtatcagaaaagccacaatttccaaaggatctgtcagtagaggaagaaaatcatagcaccccaactaagaaacagacatccgaggtagatcattcagaagtatcagtaacaacatttccagaacagccttcaaaatcagaagaagctcatagtatctccaatgagtcacctgtttctaaggcagatgtttctgagcagtccataacaccacaaactccagcacatccttcagtagcagaagaaaagcttgatggctgcactgaggcacttgcatctaaggtgggtgatgatgaagcatcagaaacatcacaatctccaggacatccttcaacagttgaagaaaaccaggaccatcaatatagtaaacattcttgtcctagtgatgaagcagagccaaatcagcttagagagtctgctggagacttacctgatggtagtgcattttcttcgcctatcaaaatagataaatcaggtgacaccgaaacaggtgaatctattgatacaggaaaggaagacacatctgatgggaatgcctctcagtcacaaccagcagaatccatgctagctagttccgataatataactgaagttgaggacaagattgctcaagaatacaatgtcccaaaagaacttagtagcccacaggagaattgcgatacagtagacaaagttactcgtcttgaagtcaaattacatgatggcaatattgataccaaaaaaagtgaggaagaaagcaataagatggaggcaggggaagtatctgttgttgtacaggaggataatgtaatggagcaacctgaagatttaatgtcaaagtccataactgcagctcatgattcacattcgcagaatgagtcagtggtcagtttgaccgatgtacctgctggactagggggagtaggccccgcagataattttacagaagaagaaaagattgctagaatcacagattttcagattgtggactctgttgtttctgttggtgagctagagaaattaagacgtgaaatgaagatgatggaagctgcattgcaaggtgctgcaagacagtcacagtccaaagctgatgaaattgcaaggttgatgaatgagaatgaacaactaaaatcaacgatcgatgatctcaagagtaagtcttctgaagccgaaatggatgcacttaaagatgaatatcaccaaagagtagcaactcttgaaaggaaggtgtatgcattaaccaaagagcgtgatacactaaggagagaacagaataaaaaaagtgacgcagctgcccttttgaaagaaaaggatgagatcatcaatcaggtcatggctgaaggtgaagaactatccaaaaaacaagctgcccaagaagctacaatacgaaaactgagagcacagattcgtgagtttgaagaagagaaacaacgtctgaactcaaagatccaggttgaggaggctaaggtcgaaagcattaagagagacaagatggcaaccgagaagttgcttcaagaaacaatagaaagaaatcagactgaacttgcagctcagaaggagttctacaccaatgctcttaatgcagctaaagaggctgaggcattggctgaagcaagagtcaacagcgaagccaaagttgaactggagaaccttttaagagaagctggcgaaaaagaaaatatgctgattaagacaatcgaggagttgaggctttctctcacccgacaagaacaagaggaacgacctatttggccatctatcttgtatagctgtccgatgtcagttccattgaggcattgactaactgttt

SEQ ID NO: 21731 - DNA, 1396 bp, Zea Mays
gttcgagggaaggtcttcttaatataataccgtgagagcggtcttacccctgcagattctcctcctaggtgataaactgaaagttgcactaaatgagcttgagaaggcctgcctcagtttagctacagccctccctttcaggttgagaggtaggctgctggaagagtatgaccaaaaccaggtatcaaccattttctcttgctatgaggaggctttgagaagagatcctacatgtagctactccatggagaggctaatcaaaatgcataaaaaaggatattataacaccatccaactacttgaggcaatagctttacatttagattccgtcaatgggaaatcctgcatctgggaagagcttgtatcatgtttccttcggcttttttctgacaatactgctgactacgaggattgcatatcatgtactaatacccatgggggtgaatcattggaggcttccagtaaattttcttcagtcttttttgagcagtttaccagagaatcatggaaggcccgatgcagatggtgggcacgccatcatttcagccaaaatgcttatacatcagaagctcagtcaggtgattgcaagctcctggctgccaaggcagcttgtgctgctcatttgtttggaccagaattcccatatgtcaaagcagttggtgtctatattgcaaagcaagaagctctggacgaaatcagtgtcctagtcagaaataagcagaactctgtcaggctattacaaactttggagaaactaacacgatgattctttcaccattgcttggtgttggtaattagcataatgttgacgatattttatagaccccttgatgaagcaaaattttgtaggatcaatagcatgtcactaatgtagtgtgttggcagaaaattttgtagtatcaatagcatgtcactaatgtatgtgttggcagaaccttggcgctggatgaaatcttggcgcgggtgatgccatacgttgtgtagcagcaaaaaaagcaaagacatcagaaacgtaagagatagaagccatttgctcccttgttttttttttgtttttgcgaaatgtaagtacaaggccgagaagagtcctgaaaatttatacttatttcattatccctggagctgcactgagggtctgtttgacaactttacaaatgaaaattttaagcacatgtgatcccttgtaacggttcctcttgtagtcccttgtaggtttctcatgtagtttgctgttcagataaaaacgaattcaactgcagctcagccttgtgaattaagatggactacatttaagaataattgtctctagagagttggatatagagaaaaaaatgaagaacaatgcaggggtattgtaatcactatcctcggtctgcctgagatgcccagatcgtgg

SEQ ID NO: 21732 - DNA, 428 bp, Zea Mays
tggagctgttcttctcatgaaaagatctgtggctctaaagaaagggctgcccattcttggtgttttcaggtgcccggtgcgtggctactcttctaaatgaaatgaagcgtcggggcaaagactgcagatttggtgttgtcaccatgtgtatcggatctagaatggggacagcagctgtgttcgagctgtgttcggcccggctggaggtatcgaccatcactcgtcactgtaacccgatggtgatcggtgatcgtgagcttccatgttattgcattctgatacttgagacttttattatgactatgtatgagatattgtctcttattagtactgggatgatgagatgtgtcttattatgactatggatgagacttttgtgatgtaattgatgagacttttgtgatgtaattgatgagactatgtattta

SEQ ID NO: 21733 - DNA, 1292 bp, Zea Mays
gaagtttgaaatggatgacgaccttggaagtttgaaaccgctaatcgtcatgctattttgcgacaaaagattgtaaaaagatcatagatttttgtgcaagagcgagtggatatggaaccatcccctcagcctatgggtgtcgctgccggtgggtcacaagtgtatcctgcctctgcctatccgcctgcagcaacagtagctcctgcttctgttgtatctgctggtttacagtcagggcagccattcccagccaatcctggtcatatgagtgctcagcaccagattgtctaccaacaagctcaacaattccaccaacagctccagcagcaacaacaacagcagcttcagcagttctgggttgaacgcatgactgaaattgaggcgacgactgatttcaagaaccacaacttgccacttgcgaggataaagaagatcatgaaggccgatgaagatgttcgcatgatctcagctgaagctcctgtagtctttgcaaaagcttgtgagatattcatactggagctgacacttaggtcgtggatgcacactgaggagaacaagcgccgcaccttgcaaaagaatgacattgcagcagcgatcactaggactgacatttatgacttcttggtcgacattgttcccagggatgagatgaaggaggacggaattgggcttcctagggctggtctgccacccatgggagccccagctgatgcatatccatactactacatgccacagcagcaggtgcctggttctggaatggtttatggtgcccagcaagggcacccagtgacttatttgtggcaggagcctcagcaacagcaggagcaagctcctgaagagcagcaatctgcatgaaagtggctgagaatattgctcagaagctatcacctgattcagagttctcattttaggttgtccaaactgcaggttttcttagtaatatcgttggttatcaaactgaaacaggcgattctaagtagggtgtagcatcatggtagtttcatttctgcttgtgatgttagttgaaaggataatgattagtggctagtggattaaagttaccataccatttccttctattccgaaagtttgcctccatgaggcctctgatatgacgtgctagttgttaatgcttctatgctctgcttgtgctgtacagttcaagctgtttttttggttgctcttgatttgtagcatgtaaggtgctgttaattcttgggaaattcgttcgagacctcaatatagttgaattctgagatccagtagagttggggcttggataagaccaa

SEQ ID NO: 21734 - DNA, 387 bp, Zea Mays
aaagaacattattaggtaatagaagtgtcacacccggttttggaaggcagaccgaatgcgagccatgtacgtgtcaggatcagaaactcacgtatatagcgattacataattggacatcatcacacaatgctcaaagtaaatagcggaaaggtaatttattacaataagatgtccgagacatccacagagtctaatacatagccaaagtcattaacattaatatcaaagtgtggaatacgaaacgtagaagataaggccttcacaggcagctgactgggggtttgccactaagaaaaactagaactcgtcgtagtcctggaactcctcaaagtcctccatgttgccagcatcacctcctgagcactgagtatagtggggacaacctg

SEQ ID NO: 21735 - DNA, 225 bp, Zea Mays
atataatcagagtacttattacatagaggaagtcttacaaaaataaaagataaatataacacaaactaaggatcatccttggcgcaagaaagtcaactgtgagacgcatgctagatcgaatcgaactcctcgatttgtggctcctcttgaaccacctattcttctcctgtggggggtgcaagatagcaagggtgagctcacacatgttcatcgctcaacatgttg

SEQ ID NO: 21736 - DNA, 3043 bp, Zea Mays
ctcactgacagtctgacagctgcgcccactagacagagccccacctgtcatctgctacccctgcctccttgaacagaccgggtcgccaccttctcttcgcgctcactgacaagggagggagggaggccacgcccacgctcgactctcttgcctccgtgtacctcctcgcggcgcgtgccgaggtggaggaggagcaggggaaggggagctacctgccgttgcgtgccagctactacaccttccagctcccggatcgaagcacgggtcggttaaagcacggggccccgagcggcacggccgacttggcagcagccagcaggtgaggcggagggagagggatgagcagcctcgctatagtggagaagaagccgccgccgttccccggcggcggctgcacgggcggcgtgctcttccacctcctggactggcaccgccgcctcgcctgcaagcgcaggctcttctccccgcgtcgcctcctcccttcgtccctccgctcctcgtccccacgcaggctcccgtgcccgcctcctgctgcctcgccgccaccgccgacgctgccacatccggccgatggggccgccccgggcgttgtcgcgcgcctcatgggcctggagtcctggcccgccaccgccaccgccgcgccgccgagaccgcagaagcagaggaaggtggaggcgtcgcgcgcggacggcgctgactcggcggtcgtgctcgtgctgcctacgacccggagccgtcgacctcccgcgtccgcgcccgtgccgacggcgaggagccaccacggggccgacctgccagcgcggagcccgaggcggacccgtctcgtgcacgcggccgcggcgaagctgctgcatccgggcgcgcgcgccggctcacgcgcaagcgccaggctggccctcgcgtacgcttgctcttcgccgcagcaccgcaaggatgaccacgccggcaccttgtttcaaggctccggaatgaccgacgacttcctatctcgctctgagagcttgcccttggagcgttctgcactgctacaggtacagcctcctggtcttcctgcggagacagattgtgacaccgctgttgtatcgcgtaggcacgaccattgttccactaataacgtcgatgcagcgatcagtgccagtacggtagtgttgcctagaatgggttttggtgatggaaacaggagtaaacggagctctgatgtggatgctaagcacaaggggagtggaattagaaatgacgtaacgcgcacttgtgccagggctagatcgagcggtgctgccgttcaaactggagatgagaggttgttgcgcaaacgagcaacacctactcggccggaggtttctgggatgccagagtctggggacttggctggttcgacgcgcctagctgggggtgctcgtgacttggtatctgctactaggaagtttgcacacggtggttctggtccaagaagagagttcgcgggatcgatcagtggacaagggagcacgacccacagggatttgaacagccaaaatgggttagcatccacaagtaggatttcaagcaatggatctgggcataaaaggggatcagggagaaaggtggggcatgatagagcaataagtaacagagatgacagaaatgcaattgcatttacttctagatcatctacaaagccagtggccagagcttcgtcacagagcaatctattgaagagtggatccccaaatagactagcacctgatacaactcgcacacgagttctggctcctgaaaaaagatacattgaagcttcaccttcttttatgtctacttccgagaaaggtgaatttagcaggctgttgaaagcaaaaatcaatgagcttggcatgtcggacaggattgagtgtacaccagatgattcaccttcaggaaaactgactgtacctgtgttgcaagagctcatttctgcccttacaaacgacatgagcactccaatctcccaatgtagcaactactctgctgcatcagcacccttaagttgcaatggaaatgttgactgcatcaatgaaccacattgtatattctccaatgatcaatcacctgatttccagaaatgctttaagggtgaacaagatgttgattcttctgccgcatcattaaacaatgagcccaatcagccaagtccaacgtcagtccttgaagcatccttctcaaatgatacttctttaggaagtccagttgaaaaaaatgaaggaaaagacttaatcatgtcaattgagaacaaaatggaagatctctttaatttggagtctgacattgtcgatttagcaatgtcaattgacacgaggaaaactgatgctgaagaaacacaccgtgacaatgacaagttatcatgtttacagaattttcttgcacatgatttcaacatcttagaatccaggctctgcagcattagagaagctatttcaaatgctgaactgcttgtgggcagtagcctctcgcgtagcacagcatcaggtctcccactccaccctttcattgtcgaaatgctggaaaacaccatggatatgtttagtggaggagagtattcaggtttcactgaagataagaagtatcaacgtaccaacttcctgtttgactgcatcatagagtcactggattcaaaattctgcaatttcggcaaatgtggatacaaggcctggctgagcctgcctctcagtttgagcgaggacctgctgaagcgccaggtattggaagacatcggcaactggagggagtcgagtgggactgctcttagacaagtctctgacaaagaagtggaccaagtgactgacaggtgggatgcaagccaggttgaagcatttgacataagcattgcaatcgagaacgacattcttgaggcgcttgccgcttgtcagcttgtggactgtccggtcaagtggaggatactcggcaggaaacaagcaggaattagagaacaaatcagagccagttctcgaagcagtactctgtcgaaaaggcactcctcgattcgcttaatctatccaggatacgagacagctgaccgtcagctgctctt

SEQ ID NO: 21737 - DNA, 2478 bp, Zea Mays
gcaagatcaaaattcgttttgagttgcatttcttattctgcggagaatctgtttggctatcctgcatcagaagcccttggtcaggacgccctcatgcttctggttgattctggtgatcacaatgtggtgaatgacattttccgacgtatttctatgggtgaaagttggactgggaagtttccagttaagagcaaacaaggagatagattttcagctgttgccaccaacacacctttctatgatgaagatggaagtttggtgggtatcatttgtgtttcaagtgattcccgccacttggagcagatattttgtaagcctccaacctctgcaaggcctcaatcagaatcatctaggacatcttgtgatgggagttgcagcaacactagtcgcagaatcaatttgttgaacagaagtccttttgatcctcagatacccctgcaaagcacttttgcatccaggataacgaatttggctaccaaggtcacaaataaagttcgttctcgggtcagcacagacgattatggcatagaacgggaaggtggcagtggtgagagtcattgttcggatcgtggtgcaaaggaagaaccaacatctagcggaacaaatacacctagagggaatgcaccacatggtcccttttctacagatgagaactcccctgggaaatcaacgaacccaagcagtgatgaattagaaggaaaagtaggtctgcacaagtttttgagttcaaaggcagaggcactactgaacaagaaagggatatcatggccttggaaagtgcgcgagaatgacggacctgatgaaagaaatcatgtgatattgttgcatggagaccaagagaatgttatgaatcatcagaaggtttcagattctagcatagctccagattcccaaggcgctgaacacaacctacctagcaaaaatgaggcatcaggttcctggtcctcttacaacaataacagcacaagcagtgcaagcagcacaggaagcactaatagcagtgctctctacaaagtagatcatgaagcggattgtctggattatgagatcttatgggaagaccttgtcattggagaacaaatagggcaaggctcttgtgggacagtatatcatgctttgtggtatggttcggatgtggctgttaaagttttctccaggcaagaatattcagaagatgtgatactgtcctttcgacaagaggtgtcccttatgaaaaaactgcgccatcctaacatactgctcttcatgggtgcggttacgtctccacaacgcctttgtattgtaacagagtttctccctcgtggaagcttgtttcgcttacttcaaaggagtgctaccaagttgggtgtgagacgacatgttcacatggctttagatattgcaaggggcatgaactatcttcaccattccagcccacctatcattcaccgagatttgaagtcatctaatctgttagtcgacaagaactggactgtgaaggtggcggactttggcctttcacgtctcaagcgcgaaactttcttgacaacaaaaacgggaaaaggaacaccgcaatggatggcgccagaggtgctgcgcaacgaaccttccgatgaaaagtctgatgtgtatagctatggggtgatcctatgggagctcgttactcagaagataccctgggaaaacctgaactcgatgcaggtcattggcgcagtaggttttatgaaccaaaggttggatatcccaagcgaagtagatcctcagtggagatcaattatcctgaactgttgggaaagcgacccgcagcaacggccgtcgttccaggagcttctggagaggctccgcgagctgcagaggcgttacgccatccagcagcggaacgcgaagaacagcgtcgaggagtgaagactgaagaatgcaatgcaactctcccaagcggcggcgggcttgctttgaagcattttgcgagccagcagcatgccagatctagagaagggcctgagcctcctgtactggggcctgggggctgctaaggctggaagaagtatgttctacagacgaggcgccttctgtcttcttctttttttttaaaaaaaaagaaagttcttccccatggcaattgtgactgtaattaatttctgggtcctgacagcaagggtcagtagggtagcgagtgagtagtgactgagctcgggcttgcttgctagcgcctctgggttctgattcttgacaacgcaaatgcgtactacgtggttaacagtaacatccaatccagcctccagtttctggcaagggcatgcatgatgatgtgtagattgtctgttctgataggtcagtggtgtgtacatgtgatccccaaccgaacgcattcgactgcgtcgcttcgatatctggttggtcaggttacactgctgaatacgggtgatagatccttcttccctagcaagtagcaatggctgccgaacaagaattcttatatttgagtgctcgaaattaaaa

SEQ ID NO: 21738 - DNA, 1526 bp, Zea Mays
ctcacttacaaaacatgacctttaacgctaccactatatgagcgagaacgaggaggcaggagaaatatatagtgagaggaatcaataccaccatactgtgacgttctctcctcctctgatgagaaagagatgatgagggagggcgatgcatgtgttacgcttctaagaagcaagctccatggcctggtcgagaggaaccgtgctctggaagaggagaacaagcaactgagacaccaagtgagccgactaaaaggtcagatctcttctctcgaaggccaggacactgacaagaggatgctatggaagaagctgctggagagttctgcgaccagcatcagctactccaaggagaagcagtttgtccaaagcaacgatgacgcgaaggaaaccacggatctcagcagctcactgtgtcacagaaggcagcagcagttctccagggtagcactcgtgagatcaagggcgccaagggttccgaatccaccgcccaatccgacatgcacccagccaaagacaaccgtccgaaaggaaggatgcatggcccctcctcctcctccaccacctccgctaccttccaagttgcagaggagcgcaaaggcgatacaaagggtgcccgaggtagtcgagctgtaccggtcgttggtgcggcctgaaggcaaaaacgatgcgaagtctggatccgtaggaattccagcagcgacgagcagcagagagatgattggggaaattgagaacagatcagcttatgttttagctatcaaatcagacgtagaaaatcaaggcaactttgtgaacttcctcgcaagcgaagttcaaaatgcagcgtacagagagatagctgacgttgaagagtttgtcaagtggcttgacggggaactgtcataccttgtggacgagagagcggtgctcaagcacttccccaactggcccgagaagaaagcagacgccatgagagaagcagcgttcaactaccgagatctgaagaacctggagtcagaagcgtcatccttccacgacgacaggagggtggctacgccgatggctctcaagcgcatgcaagccttgcaggacaaaattgaacaaggtatccataacactgaacgagtaagggacagtgcaggcggaaggtacaaggatcttaagataccatgggaatggatgctcgactctggagtcataagccaacttgcaaaggagtacatgaaccgcatcgcgagcactctgaagtcagatccatttgcgaacgacgaggagctacttctgcaaggcgtccgctttgccttccgcgtacaccagcttgctggtggctttgacgaaggatgcagaaaggcgtttcaagagctaaaaacttacgcaagcaagtctgagtgatccgaatccacgcgcgttcaaaataaaagctgggatcacgcatagataaatgtgaaacacatagattattaagttttgccgaggataatgctgcattttttttataaagcttaatttattttgggcatcagcagcagcaggtgctggtctctcgg

SEQ ID NO: 21739 - DNA, 103 bp, Zea Mays
gccatcagttttggagtccggaggaggtaggacactcactattctcgttttccccaaaatagaacatctcttccaacattgttactgtccagttgagtacata

SEQ ID NO: 21740 - DNA, 1316 bp, Zea Mays
gtttgattttgtaaaaatttgggatccaagtttgcgtggttctgaacttcgagcaacacttaaagggcatactagggcaattcgaacaatcagttcagatcgtggcaaaatagtttctggagctgatgatcagtctgtcatagtatgggataagcagacttttaagcttttggaagaactgaagggccacgaggcaccggttagttctgtccggatgctctcaggagaacgtgtccttattgcatcccatgatggtactgtgaagatgtgggatgtccggactgatacttgtgttgttaccgtgggtcgttgccaaagtgctgttctctgtatggaatatgatgattccactgggattctggcggctgctggaagagatatcacggcacatgtctgggatattcgctccagcaagcagatgttcaagcttcaagggcatacaaagtggataagatcaatgaggatgaccggagagaccataataacaggtagtgatgattggactgctagagtgtggtcccttaaccggggaacatgtgatgcagtgttagcatgccatgctggtcccgtactatgtgtggaatactcaccttcagataaaggaattatcactggttcagctgatgggctcatacgattttgggaaaatgaaggaggaataaaatgcgtcaagaatcttacacttcacacagcatccgttctgtccattagtgccagtgatcactggctagcgattggtgctgctgataattctatgtctctttttcatcggccacaagaaagattcggtggcttctcaaatgcaggatcaaaagttgcaggatggcagctttacagaactccccaaaaaactgctgcagtggtgagatgtatagcatctgacctggataggaaaagaatatgtagtggtggtcgcaacggactcctgcggctttgggatgcaactacaagcatctaggactgatagatgttcatgtgaaaaggcaattgacatgatgttgcatgccattttccttttagctaggaatttatgtgctatttagaggatgcgaaaggagccggactttgttctactgtttctttatcatctaaaaaaccctgcccagttgagtatatgtttgacgtcgtgtaaaattttgtttatattttcgggttcagatagccttacgtggctacgattttgtaagaactatgagaaacttgggaagttctgtactactaccagtgcaaatgtttgttttagtacaacattattttttatgtgcatattcatcgtatgaacctgcactagtgcaaacatgactgctagcatatgc

SEQ ID NO: 21741 - DNA, 1785 bp, Zea Mays
gcggttcacaggcaagcggcaagcccgtcgtccgcaggatgaaaatgaagatattcatgatattcacggggaaatagttccttatagcgagtcaaaacttgctattgagcaaatggttatgaaggaaacattctcaagggatgaatgtgataggatggtagagctaataaaatcaagagttagagattctactcctgaaacccatgagtatggaaagcaagaagaaatcccaagtaggaatgcaggcattgcacatgacttcacaggaacatgccgctccttgagccgtgataggaatttcactgaatcggtcccattctctagtatgagaatgagacctggtcattcttctccaggctttccactccaagcatcacctcagctatgcactgcagcagttagggaagcaaaaaaatggttggaagagaaaaggcagggactgggcgtaaaacctgaagacaatggatcatgcacattaaatacagatatatttagttctcgtgatgactctgacaagggttctccagttgatttggcgaatagctcgcattggatcatctggagattctgctgttgcttctaaattatggaattatggttccaattccagattatttgagaatgacacttccatattctcattgggcaccgatgagaaagttggagatcctaccaaaactcataatggctctgagaaagttgcagcaacagaaccactcggtagatgctccttacttattacaccaactgaagatagaactgatggtattactgagcctgtggaccttgcaaagaataatgagaatgcaccccaagaataccaagctgcatctgaaattatccctgataaagttgcagagggtaatgatgtgtcttccacaggatggtaaagctctcacttcagaaccgcatataggggaaacacatgtcaactcagcttcagaatccataccaaatgacgcagctcccccaacccagagcaaaatgaatgggtcgaccaagaaatcattagtcaacggtgttttggatcaaccaaatgccaactcagggctagaatcttcgggaaatgattatcctagctacactaactcgagcagtgctatgccacccgcgagtaccgagttaattgggtctgcagctgctgttatagatgttgattctgctgagaatggcccaggtacgaaaccagaacaaccggctaagggagcctcgagagcatcgaaatccaaggttgttccacgaggacagaagagggtgttgcgaagcgcaacaagaggaagagcgacgtaggggcattgctgcgctacattgttgtgtactaatatatgttgacggcccagaagggcaacatgatccctaggttaactagagctagcgccgactggtcgtttccacgtacgatgcactgcgcatcagcctgtatccatgttgtattatcgtagggcttgtaatgaccacatgccctggttagagttgatcattaggaccagtagctgcttgatttgtgtctcggtgatctagctttgggtagtttgtgcagttggaaggagacagtttgttggttgtattgtattgcagcgcacagctagcaagtgttgttgtagccatcaggtacgtgttgtgtagtgaatccaggtccagggacagagctgttcctctgtatggtggaccctgaccctttgttttgtgccatggggcctttctgtgttgtgcttacatgagctggagctgctttatttttctttttttatacgattaatacgctgctgatgagtcttttttttt

SEQ ID NO: 21742 - DNA, 1657 bp, Zea Mays
tttcactacttcaataacttaagaagtaaaaagggcaaagatagccctggttgtggaaaaaaacaaggaaaatgaattgacttggcgttgtggtgcactacaagggattcttaaagaggctcattctctctttgcaatgtttcatggaccaatccgaactttgcttcacaaacaacccagtgcagagcttgctcgtggtcacctccgcacatttcttacagattatttgagcgattttaatgttggaaagaagttacaatttccaacctaccgtgacagcctaaaggagaggggaacagtccaaatgcttacggtatcacgagaagtggcacttgacgttcagtcactcgccacagtacttggatcatgtcttggaaatgttacctgccaatcacttgtactatttgaagacctcttggtgtcaacgacactgcccccggatgatactttaaacctatatacatatgctgttctgaggttaactccgcgtgctttatattccaatgcaagttcttggtcctatttgcggaaaggaacttctgttagtgctggccaaacatcaagttcatcaaatggaacaactgcaggagaaaggcctctcctacgtgagaaattgtcaaagggaaaggatggctttgttgctgctgatttcacagctacagaagctcgttgtgctgtaccctcgactccaatactttggttccagcaggcagatgagtgcatgcacctatgcatttatcagcacaaaagtctcactatcttactgctggttcctgcttcctcagtgataaatggagaagagggcattactcatgtgaagaaggcgatgcttgaaaatgcatcacagaagattgtcactgttgagcagaaattgacacgaggatggggaggagaaaatgcgtatcatgttagtggatatcgttatttgcttgttgatccggagagaagagtatcaagagcctccccacctgggaaagtcaccaccctagcaaaggattctctacttgccctcaacatgctaagacaagaagtagatctagagaagtcaagatacaagagaggcgacccttgtcatgataaggatttcgaagtatgtatcagaacaaaaaacaatgcgtgggttattgctaaaatcagtcaaggaagggagctttacatggctctagagaagggtggtgaaacgcttctatatgcatccacagctgtagagaaattcagcaacaggtactgtgagggagcattctctacagattagaagcaccagagggagatcttagcttttccatacattacctattatgtacatcctgtttttttcccagctgtatcgttgccccctattgttgagagactcggaccactctttgcgaagggaataaggagttcgtatcagttgtacagctgctctgctgtcgtgtgctatctgcaaaagaatagcctagtctgggaataacgcagagcgggatagagtttgtttgttcacttatgcccttccttaacgcagagcattgtgcgtgttttcattttgctgtaacagccggcgatttacctgcagactgggaaagtaacttagcgtttaatttggtattctgcattttgatggtctcatatcatatggttcgagttgacgggttcgttctgcctccggagaggagag

SEQ ID NO: 21743 - DNA, 642 bp, Zea Mays
tgtgaagaaggataaaatcattgatggaaaaacattgttaagggagatgtgcttataggtcttccttccagtggtgttcattctaacgggttctctcttgttagaaggagtactgagaaaagtggactttctttggatgattagctcccaagaaatgatggcataacaactacagttggtgaagctctaatggcaccaaccttcatctatgttaagcaggtgcttgagattattagcaaaggtggtgtgaaaggactagcccacatcactggtggtggctttactagcaatatcccaagagtattcccctctggatgcggggcaaaaaatttactgggtcatgggaaatacctccaatcttcagttggcttcaacaggcaagaacaaatgatcttcaaacttcgcctttgattttcagtagcaactattctgagaaacatcaggcactgcattggcgtactggtcataaaaatgattgcctccagataataagttctgctgcttcaaattcagttctgccagctgtaggaatagaaatggaattgagggtatccatggagatgcatgtagctgaactcagtcaagtttatatccattgtgtgtgtgcacgcttatttggcatcgtgttcttccttttcatgg

SEQ ID NO: 21744 - DNA, 1016 bp, Zea Mays
ggagactggactcatccgttcgggtcgtcatgaaaagccagtccacgccactgccacaaactccgacgccgacggcggccccaggaggaggaggaggaggacatgagcagcccgtggctccgggcggccggctcgccgcgctcctgccaagggggacgatggcgaggcggcgagccgcgctggcggcgctgctagtgctgctgctgctggcggcgtgcacggcggcggcggccgccgtgaccgtgtcgcggaagcagcggcagcggcaccaccccggcggggcgtcggcgtcggcggcgcggtcctgcgaccccttcgcggcggcaggcgcgtgggtggaggacgggtcgtacccgctctacgactcggcgcgctgccccttcatccgcgacgagttcgcgtgcgcgcgcttcggccgccccgacacggcgtacctccggtaccggtggcggctggacgcgccgtgcgcgcagcccgccttcgacggggccgcgctgctccggatgtggcgcggcaagacggccatgttcgtcggcgactcgctggcgctcaaccagtacgagtcgctgctctgcatgctccacgccgccgcgggccccgccgcgcggaccaccctgtcgccgccgtccgggaagatcgacccctcctccaccgtccgcttcgaggactacaacgtgaccgtcgtgtactacctgacgcactacctggtggacctcgtgacggagccgcacaccggccggcgcgtcctcaagctggacgccatcgaccaggcccgcgactggctcgccgccgacgtgctcgtcttcgactcctggcactggtggccgcgcaccggcgccacgcagccctgggactacatccaggtgggcgacacggtggtgaaggacatggaccgcacgcaggccttcgccaaggcgctgcacacctgggccaggtgggtcgacgccaaccttgtccagaccgacaccaaggtcttcttccaggggatctcgccttcccactacagcccgtccgtg

SEQ ID NO: 21745 - DNA, 177 bp, Zea Mays
gtcacatcattaatatataatgaagttctgtacaaaatagttaaataattacatcatgcaaagacaacaatccagcaacacaaagttgactaggagacgacaacctagaccactcacgaactcttcacaatatccttcgtgcgcctcatcctgtggtacctgttcttgacctggggg

SEQ ID NO: 21746 - DNA, 2727 bp, Zea Mays
gcagattgaagcttcaaattcagattctagagatgagtagaactgttgaagacatggaattctacaataatgctgataaacatcctcgtgtttttggcatgactgcttcaccaattattggaaaaggtggttctaacaagcttacctacactaaatgtatcaacagtctcgaggaattacttaatgcaaaggtttgttcagttgataatgtagaacttgaaagtgtgattgcttctcctaaggttgaagtgtacttttatggtccagttggtcactctaacttgactacagcttatatcaaagagcttggtggctataagtttcagtctgaatgcatgttaagagagagtgtatgcaatttcaatgagtcactgaagaaactgaagtccttatggaggttgcatgaaaatttgattttctgtttgcaagaagttggtctctttggagctctccaagctgcaaggacttttctctcttccagtagtgttagtctagatggaaagggggctgacattaatgattatgcaaacaaagcaatgtctcttctcagccgggacatcttagaaggtccggatgctgattcatttgacttagagacaatagaagaacctttcttctcaaaaaaatttgcagttcttattaacgttctatcgagatacaggttggaggaaaacatgaagtgcattgtttttgtgaaaagaatcattgtcgcaagagtagtagttcaaattctccaaaatctgaagtgccttgatttttggagatgtgagtttcttgtgggatgccactcggggttaaggaatatgtcaagggataagatgagttctatcattgaaaagttctcttcgggtgaggtaaaccttttggttgctactagtgtaggtgaggagggacttgatattcagacttgctgccttgttgtgcggtttgatctccctgaaactgttaatagctttatccaatcaagggggcgtgcccggatgagtaaatcgaaatatgtttttctcttggagaggggaaatcattctcaggagaagttacttgatgattatattactggtgaaatcattatggataaagagattaacttgagaacatcaaatgatatgttcaattgccttgaggagaacatctatcgagtcaatgatactggtgcttccattagcactgcttgcagtgtatctctattacatcgctactgtgataaccttcctagagatattttttttgttccttccccatcattcttctttgttgatgacgtcgatggaatagtatgcaaattaattcttccaccaaatgctgctttccgtcaagtgaatggtcaaccctgtccatcgaaagatgaagctaagagagatgcatgcttgaaagcatgcatcaaacttcatgaactcggtgctttgacagattttcttctacctggccaaggctctagaaagattaaggtatcaacaacaaataattcagaaagcaacaaagacgatgatgaaagttttagggaagagctttatgagatgttaatccctgcagttctgagaccttcaagatgcaaactagactcctcgtttaagttgcatttctattacatagaatttattcccataccagcagatagacgatatcagatgtttggtctttttgtgatcaatcgccttccagaggaatctgaaaagttggatgttgaattgcatcttgctcgtgcgaggattgtgaaagcaggaattaaatatttgggaaagattgagtttaacaaagaagagatgatactcgcacacaattttcaagaaatgtttttgaaagttctcctggatagatctgagttcacaccatcttatattttgttggggaatgatggtgcattggacatggattcaacattttaccttttacttcccatcaagcagaaattctatggtgataatatgattgattggccagcagtaaagcggtgtttatcatcacctgcatttcaagatccaatgggtttgtctctgcatgattcatatttaccaaatgagtctttgaagcttcttggtggaacatacaacaaagctgatgtgattggcagtttggtctatactccccacaccgacctgtttttcttcgttgatgccattctggatggaacaaatgctaaaagtgagttgaacggtgcaacgtatgcagaacattttaaacaaaggttacatatcaagctttcccatcctgagcagccgcttttgaaagctaagcaactcttctgtctgcgtaatctgcttcataaccgacaactagagagcacagaatctgaggctcgtgaattgatggagcactttgtggagttacctccagagctatgctctttgaagataattgggttctcaaaagatatgggcagttctttgtccttgctaccatctctaatgtatcgcttggagaatttgttggtggctattgagttgaaggatgtcatgtcatcttatttcccagaggcttctcaaattagtgcctcgggtatccttgaatcattgactactgaaaggtgtttagagaggatctctttggagcgattagaagtcctaggtgatgctttcttgaagtatgtagttgggcgtcataactttatttcatatgagggacttgatgaaggtcagttgaccaggagacgttctgatatagtgagtaattcgaatttgtatgagttatcaattagaagaaatttgcaggtgagttgattgtatcgat

SEQ ID NO: 21747 - DNA, 502 bp, Zea Mays
cggcgtcgaagaatttgaacttgtcgcctacagggctccagaaaaccagacggcttgaccgcttcacctccatttccttcgtcccccccgagtcctactatatacgcgcggccgtgcgctcgatccatacctccttccaccgctgacgccttcctcgagcgttccatcccatcccctcacccgaatcccactcggctactccccacttccctttaagaacgcgcccctccccaccggaggttaccgcccacccatcaatccatcatccatcgctcggtaatcgatcgacccgaacaacgccggggtgctggtgtgagggtcaggatggtggtcggattccgccgcacgatctcgttcccggcgcccaggtccccggcgccgccagcggggcccagcgccgccaacaacaagtccgtcgcctaccgcgcgcggtcggcgagcctaccgtgccggttccacccgctggtgctccagctcgacgacgacgtcgccgacttgcgtg

SEQ ID NO: 21748 - DNA, 1064 bp, Zea Mays
accacaggataacaattatgttggtttgcatgacaggcttgttacagtcacaggaacctttgataatcagatgaatgcgatagatttgatactgaaaaagttatctttggatgttcactacccagctaatttgagctccccatttccatatgcaggtcttactttcccaagctaccctggtgttcctgttggttatatgattccgcaggtgccatataataatgctgtgaactatggacctaataacgggtatggaggaaggtaccaaaacaacaagcccagtacacctatgagatctcctgctagtaatgaagcccaagaatctctgaccattggtattgccgatgaacacattggtgctgttgtaggacgtgctggaaggaacataacagagattattcaggctagtggtgctcggatcaagatatcggataggggtgacttcatatctgggacatctgacaggtgacgattactggaacatcagaagctatccggaccgcggagtccatgatcatgcagagggtgtcagccagttcggagaggctatgataccagatatgtttgacggactgtgggggccgttgttgagtccgagcagcatgtttgatgcaagttattattgtttgttgcgttgcgccaatggtttagtcgaagatatatatgtgcagcgtttgaatggatttgggaatagggctgagttatatcccgtggatgccacaacaaggcaggcaggcgccgctctgtgctagtggctgagtaggttgacaattcgaaagggcatggttggaagctttcagcgtttcccattcattcttgtgtgcctctccggatggagatcctctgcagtgccatgtcggccagactgcgagcaaaagctgacttttctggcggacgaagataggagtagcatgcatctagctgtcttgtgaaagtactattatttatcaaaatacagaatcggtcctcaaactttggtacgttgttggctccctgaattcaagaaatcgaaaaaaaaaacaagtcttgtaactttgtcgggtctaaaattagatttgtctaaa

SEQ ID NO: 21749 - DNA, 2171 bp, Zea Mays
tgaacttctgaagggcagttcctaggacaaaatacgaagccgtaatagtacgtctctccgcaacagaagcggaactatttcgtacgcgggcgacgagtttgacgaaggaatcgtctgcggcaggaaccgaagaaggagatctccgtccagaatcttccagccgctctcgtttcctctgcttttgctttccattttgttctctctcatctcctccccgtcgccgaccagaacacagcctcctcctcctctccgtctcagactcgtcttcgagctctaggccttgccgcctcgagtccggctcctgcagggagcacccgccaccaccgccgcagaagcgaaagcggcgttcgcctcaaggaggagacttccgccgctggattagagaccgggaaagggaggggttccctccgcgccgggatggacgacggcgatagtgtggtccggagcgtcgagaaggctggcgccggcccgggcgacgacggcagcacgacaccgctcccggagacggttcaaattggcaattcacccagttacagaattgacagaaagcttggaaagggagggtttgggcaagtatatgttggtcgtcgcatttcctctcctagtgttagtgacaggacgcccggtgcgaatgctttagaggttgcaatcaaatttgaacatcgaaccagcaaaggttgcaactatggtgctccttatgagtggcaagtttacaacactcttagcggaattcatggcgtaccaagagtacactacaaagggaagctgggagagtattatatcatgattatggacatgttggggccaagcctatgggatgtttggaataataactctcactctatgcctgttgaaatggtggcttgcattgctatagaagcaatttccatactggagaagatgcactcaaaagggtacgtccatggagatgtgaagcctgaaaattttttgcttggacctccaggcaccctacaagagaagaaactttttctcgttgaccttggtttagctaccagatggaaagacactggtacaggagagcatgttgaatatgatcagaggcctgatgtcttcagaggaactgttcggtatgctagcgtgcatgctcatttggggagaactggaagcaggagggatgaccttgaatctcttgcctacacacttgtatttcttctgcgtggtcgccttccttggcaaggataccagggggagaataaaggtttccttgtctgcaagaaaaagatggcaacttctccagaatctttgtgttgcttttgcccacaacctttccgacaatttattgagtatgttgtgaacttaaagtttgatgaagaaccaaactatgcaaagtacatttctctttttgatggcattgttggtccaaacccagacataaggccaatcaatacagatggtgctcaaaagcttgtatttcaggtaggccagaagagaggtcgccttacgatggaggaagatgatgatgagcagcccaaaaagaagattcggatgggaatgcctgcgacccaatggattagtgtttacaatgcaaggcggcctatgaaacagaggtatcactacaatgttgcagactgtaggttagctcagcacatttcaaagggaaatgaagatggtttgtttataagctccgttgcctcttgttcaaatctgtgggctttgataatggatgctggcaccggatttacttctcaagtgtatgaactgtctccatattttcttcacaaggaatggataatggaacaatgggagaagaacttctatatcactgcgctagcaggggcaaacaatggtagttcactggtggtcatgtcgagaggaacacaatatgcccagcaatcttacaaagcagtcgttgggcagtggtcatgtcccggaattctggcttttcggcgcaggttgtggagcttgacttcttgtatccaagtgagggtatccatcgacgatgggataatggatttcgcatcacggctactgcagctacatgggatcaggcagcgtttatcttgagcatccccaaaaggaaacctgctgatgaaacacaggagactctaagaacgtctgctttccccagccagcatgtgaaggttcatccttatttatttggatatagatataaaaacaagagctagaaccaatactattgtgggacgaag

SEQ ID NO: 21750 - DNA, 1482 bp, Zea Mays
aaacagtacaacaggcgctcgtatattaggcctgtgggagctgtctggccaggcaaatttgtcaggtttcggtgaagtttggtcggtcattcgacaggattccccatcctgatgcagccttggaggaatctataagtgaggtgtgggaccaaagccttcagcggaacccatatctatacagcggtacaaagtttcggtatggaggaaatgccttgcactacaaagatgactcagatcatgatcttgagtactgtgtctcacttcatttgggtctcacagactacaggacatttgtgggaacaaatctcaatccattgtgggaattttttttggttccatctgaagatgattctgtacattgccaacacttgtcagatgcactgggaaatggtgctatagttgaaacatctgacaaaaagattattgtattgcaaaggagctacaatgtggcggactatccaggatactatgttttccctggaggacactcggagccgcaagaaattggaatcatgggtcatcaaactgatgaagaagactttgctagtctcactgaacgagtttcacaagaaatgtttgacggagtcatccgtgaagtggttgaggaaactggagttcctgctagctccctaactgatcctgtcttcattggagtttcccgccgagaagttaacgttaggccgactgcgttcttttttacaaaatgtaacattgattccagtggcgtaagcgagctttattctagagctcaagatggctatgaatctactaaactctacacagtatccgttgaagagctacaaggaatgaggcagcggatgcctggatgccacaacggtggtattgctctgtatgagttgatgaggaatgctgcaaaaaaaagtgaagatgtcattgatgaatagttctgatggtgttattacaccacaaacaagtgtggaggtattcgcatctcgtacaaacacccgtgcagaacactgcatgtgacatccatcagattgctgttctttgcagtagatatgtgccatttccatgtttgttgagcctgacataggtctccttagaccgctgcataagtgcccacaaagagcatgaagcttaaagtttcctctgaatactaccggaataaatttcatctccggatgtaccaccaaaggaggcacaccagagcggcatcatgatgctaatctacatggtgagatgacccgtggattgtaatgttctttcaggattgaatttcctgggcaagtgatgcctgaatctgtcagctgttcttctgttggtttctgctgtagcggtgtactaggagtatgtaggaaccgaaggtgaagcttacattactttgctctgagaacgtttatatacttgttacctttggtatggatatactagttcgtgctagggtatggattctacatatttcatcttgacttttatcgcttcacacaattgccatcttggtgaattcgagtatagcctgtg

SEQ ID NO: 21751 - DNA, 1612 bp, Zea Mays
ttttggtaacggttgcttctctgctcagtgggtggataactggattgtggattttgctaactacatgctgggttatcagcctatcataaggaaagcaaagaagagacaacaaagcaatttgttgtctctttcttaggagctggcgagtactcggcatggcagatgctagttcgaggactgacacctcgactgttttagacatggatgataagaatcaaaggttagaaaatggacagagtggagctatggccctggcttcgaattcatctgatcggtctgacagatctgacaaacctatggaccaaaaggttttacgacggcttgcccaaaatcgtgaggcagcaaggaaaagtcggctgaggaaaaaggcatatgtgcaacaactagagagcagcaagctaaaacttgcaagcctggagcaagaactccagaaagctcgacaacagggaatcttcatatccagttctggagatcaaactcatgctatgagtggaaatggagctatgaccttcgatttagaatattctcgatggcaagaggaagaaaataagcagataaatgagctgaggactgcagtaaatgctcatgcaagtgaaagtgacctccgtcttatcgtcgatgggataatggcacattatgatgagatattcaggctgaagggtattgctgcaaaggctgatgtgttccatatactttcaggcatgtggaaaacacctgctgaaagctccttgtgaatcagcttgagcctctaactgagcagcaattgatggggctatccaatctccagcaatcctcccagcaggctgaggatgcattgtcacaaggcatggaagcattgcagcaatccttggcagaaacgctggctgggtcccttggtccatcaggatcttccggaaacgtcgcaaactatatgggtcaaatggctatggccatgggaaaacttggcacactcgagaatttccttcgtcaggctgacaatctacgacagcagaccttgcatcagatgcaacgcatcctgacaattcgacaagccgctcgcgcgcttcttgcaatacacgactacttttcacgtctacgcgccctgagttctctttggctcgctaggccgcgagagtagcatcacccacgttggagtcactccatgggccgatctgtgaatgtggggctgctggctgcaaactcgcaacgcatttgcagatggctggagggtcagttctctttgtacaagttgtattaacatcttctggtctcatattgcgcttcagtgttgtacaagttagggtaaagcttgcatttaacttgtaagttatcatggattcatgattgacatattgtacaattgtattagcaataagaatagaagtacataaatgctggaaggactatccagcgtctatattggttggaaacgagcagcagaagcttgtcatgtcgattttgaatagtcggttgaagtgttctttttggggtctatagagaacaaagaaagcttcaggagaaatgtataggtattcaccagtctaccatagtgtgtgcttcggggagctccttgtgatggtaaaatttgataacgaggatgagttcagtgacattaaaaatttcgtactccctg

SEQ ID NO: 21752 - DNA, 4032 bp, Zea Mays
tttgctctccgccgcctggtgcttcgcccccctcgctctccgacgactggtgggccgccggcgccggtgccgccctacggcagttgggccttcgttggcctcttcgccggccttttcgccggtgacgagcagccactaggaaagcttctgttgctctgcatgcaacgatgaactgatgattattgttgataacagcttctcttcttgtttacatggagtgcaacagagatgaggctgctagagcgaaagttcttgcggaaagaaaaatgctggacaaggattttgttggtgcaaaaaagttgattatcaaggtgcagcaactcctcaaagaagtggaagatattgacattccaaaaatgttaactgtttgtgatgttcattgtgctgctggagctaaggtaaatactgagattgattggtacggaatactgcaagtacctgtaaatgctgacgacgcactgataaagaagcagtatcgtaagcttgcccttttgctacaccctgacaagaacaaatttggaggtgcggaggcagcattcaaattagttggagaagcaaacataactctcacagacccatcaaaacgttatgtgcatgacatgaaaagaaacaccttcagaagcgttacggcaagacccaatcgtcagccaccaaaaagacctgcacctgctagatctagttctactcctgtgaatctctacaatatgcatcagcaacatcagcgtcaagcctcaaatcctacagggacgcaaacaacattttggactatttgtccagcttgtggcatgagatatcagtattacctctcgatcttgaagaaagctttgcgctgtcagaattgtttgaagccatttattgcacatgatttgaaggaccaagctattccttccggggcaaatcagcgatctgctggggtttggaaaaatgcaggcacaccacagaactctgcaggacctcaatcaaatgtcactggtcagaaaggctggtctgccacttcaggagttcatgttaataccggttctcatcatgctaatgtgaatacaaagaggaaaactgatggtaacgcaggtggactgaaaaacaaaatgaaatctgcccaggccaccaggaaaccttcaaaagcttcatcaactgctggattgaaaaggggcaggagggcggtgtttgaatctagtgaatctagcatatcagaaactgacagcgacggtgaggtagagattccaaaacatggtcctgctgaaaatagtgcagggccaggtcaacaaactcgcagatctagcaggcagaagcaagaagttaagtataatgaggatagtgatgatgataatgatgatgtggaagatgatgataacacggttgaggatgattttgttgattctcctgcgttgaaaaggctgagaaaaggtggcatgttccatggtgatcacagtactaaaacagcaaagctgaatgaagacaccgctggccataatagtgtgaatagctggggtaacataaaagataaaaagaacggtggtatgccatgtgaagagaaaacttccaatggggttgagcagatgaagagagaaacaatgcatgttggagaaaatagtgatggcaaagaagagctatttcattctgtcagcaacaatggccttggtctaaacgatgatgatgcttcagatgataacaaattcactttcccagatcctgaattttttgattttgacaaacttcgagatgcaagtcaatttagagccaaccaggtctgggctgtctatgatgatcaaggttgtatgcctagattttatgctcgaatcacaagggtaaaaatggttccaaagtttatgctacaatttgtttggttggagttcaatcctgcaaataaagcggaggaggcatggtcttacaggggtctgcctgttgcatgtggacactttacgcatggactgtcagagacaactagtgaaactggtatgttctcccggattatatcattagagagaagcaagacaaagaacttctatgaaatatatccaaggaaaggtgaagtttgggccctttttaagggatgggatattggttggagctcagatgctggcattcacaaaaaaatgaaccatcgctatgaagttgttcaagttctttctgatctcaccacgagcactagcattattgtcatgccacttgtgaagttaaaaggctatgttagcttatttgtgcagtctggagaggcagctccatatgtgatacctcaggttgacacactaaggttttctcattgtgtcccacattatttgacgagcggaactgaaaaagaaggcattccagaaggatctcttgaacttgatcctgcagcgcttccctccaacttggaagaggcttttccttctgctaacccagaatgcagttcagcaagaagccaggagtctgactccaaaaatgctggtttgtccagtggaaatcgcaaaggatccatgaatgtggggcaggggcaacataaaatagccgcgaatggaagggtttgtacaaagacaacaaaggtagagaatatcaagcataacattgatctgtctgaagttacagatgtcgttgacgatagcatttgccaaacagagtatgtatgcgccgattcagaattctacgatttttcagtaagaagatcgctccaaaggttttcacctgggcagatctgggctctctacagtgatatagataaattccccaattactatgcatttatacagaaagtagatctcaagaatgataaagtacaagttagatggcttgatgtctgtcctcaaggagaagtggagaaaagattgtcccaagatcggaccattggcattggaacctttagggttggctacatccacgacatgatgacttacactggtacagatgccttttctcatcttgttgaggccagacctactggcagaaaaggtgaatatgaaatacttcctcgtctcggtgagatatgggcagtttacaaaaattggagcgctggatggactgcgcaggattttgaaaaatgtgaatatgaaatacttcctcgtcatggtgagatatgggcggtttacaaaaactgggaggctgtatggactgcacaggattttgaaaaatgtgagtatgaactggtggagatacttggccatactgattcctccatacaagttcagcttctaaggaaggtcgatggttataagatggtatttatgtcatacagagcagagggttctgtgatgacaataaggaacgatgagtaccccaagttctctcaccagattccttgctttcgtctcacacatgaaaaaggtggcaagcttcgaggctatttggagcttgaccccttatcagtaccagaggaatttctcgactgattccatctgagataaactttatcaaccacaaatctggaaccttcttgtgatgaagtttctgtaactgaggctcagttaatgttaaggtcgacaggtcaacattgttcaaatgacactgacataagatgtctggatttcagcattcgtagcactaacgttcttaaggctctgttcgtttagtccggattggaggccagaaccattccaactcatcaagctaatacaaatttgtgaactattctaatccggaaccaatccagtaaagtattccggaagaaccgaacgggcactaaaggtggactaccaatctgcacaatgaaggcattgactgttggactctttgctgggtggctgtcctgcagctgtaattcacaagccgagtaaattgtttgtagttagcttcagctgtatctggggtttatggtgtaaaaactgccacttctcttgtagtgtactctggtagtgctgtatttgagctgtggggtgccatcctgattaattatcagagttctattggccacccttacaggaactgaaacatgaaatggagtcagccaggtcaggctcatcgatcaatgtgttatgattgtgttgttttgcaggggacaaggcctctttctattcgcatttctctgtatatacaagttacacttacacgtcatgatttttt

SEQ ID NO: 21753 - DNA, 1511 bp, Zea Mays
tgccatcatccgctgcttgcacagtactttactgagaggatagcagccgcaaccacagctgctggaagtcagtgcaactctgccactcagacatttgatggtgttgatttaatgggtgaaaggttagcaaatgaggttctatcagttgtagagcaaagacgaggtgtgaagaaaatctcgtttgtggcacattctcttggtggccttgttgccagatatgctataggaaggctctatgaacctaatagtagaaggaaatcttctgggggggagagcagagatgatgttgtgcacttgaatggtcacattgctggtttagaacctatgaatttcataacatttgcatcaccacatttgggttcaagtggaaacaaacagctaccttttttatgtggccttcctttccttgagcgaagagcttcagaagctgcgcatttgattgttgggagaactggaaagcatttattccttacagacaatgatgatggtagacgcccacttctccttcgaatggttgatgactctgatgatttacagttcagatcggcgttgcgttctttcaaacggcgcgtagcatatgctaatgctaattttgaccatatggttggatggagaacatcatcaatccgacgtcagcatgagttgccaaaacatcgtcttcttgttcgtgatgaaaagtatccacatattgtttatgttgaaaaggaagttacagacaacaatgaaacgaaggcccatgctgatcattatgatccagaagaggagatgataagaggccttacgcaagttccgtgggaacgtgttgatgtgagcttccagaaaagcacccaaagattagttgcgcataacacaattcaggtgaaaagctattggctaaactcggatggagcagacgtgatcaaccacatgatggacaatttcatcgtctagtccatggaggcatgaagcctacgttgtgtcgatggaggttcagtctacgctgtgggtttgacgaatgcgcagagcagagccccgccctcgatgcttatcatcctgcaccatcagcaaggctagttcgttcaactgtatcataatctgtcccctcctttgtatacttgtattccgcaactaagctagtaaatagatgttgctggaaatagaattcttctatctggttcaattggagttgaagttcgaactgaaacttgccatattcttgtgatccatcgacgtgcttattgggcacggtacggtacttcaatcaagctgtttttttaggaacttgaagtttttttttttgggaattgtatggataacaggatcgctcttcagagagctcctgtcgttcttaaagagaagctatattctatgttgaaagtaattcttgcgattttttttttgtttttgaaaatgtattcttgcgatttcaatagactctaggtataacgtgattgtggcgtgtggcgtggagcgaatgaggagcgttttttcagctcgtagtcttctaattcatttcaagcaatcattgatag

SEQ ID NO: 21754 - DNA, 2377 bp, Zea Mays
cccagcccgcgtgcgctctctccctccgccgctagccgctaggtgccgaggccttcatcggtcttccgctggcgacggttcgcctcgcgcgtgcgacgcctgggtggacaaccgccgcggcggcctcaggtgccgaggcattcgtcggtgtcttagctggcgacgaacaccaccaggtggccgacgaatttgcaacgtctttataagacggctgtaaatctgtgacagttaatattttgcagttgaagctctgtgattttgctgtgggcacattctgtttattgtcttatgatatggcagaatcacggactgtttcgaattctgagaataagcgcactctcccagcatggatgttgaaagcaacctcaggtaatcaaacagcaaagaccgcagatcagaataagcaggcactggaatctgctgacattggggctcttgatcagagcaaacccatcaaaaggaacaacagacggccgctaaaaaacttggattcagtagctgctggtgaactgggagttttgcagcgatgtgagggtagaggaaaggccagaaggaagagcaaggatgctgtcaaagatgaagttgaagaaattgtggaattaaagagtaagaatgcaagaaaaacgagtggaagaggtgctgcaaagaatagcaagaaacggaagttggataatgtcgaatcaggaccatcatcgccagtatcaactgatgatgacatagagcttactgttgaggatcttgtgagcatagctgaagagtttgttaatgctgataaacagaagcaatgtgaactacaaactgtggaggttaccaggcataaagagcatcatctgtgccctaaaatttccactgaggtagatagagggcagtcagtagtaaatgctcaatcagtgaaaggatcgatgcagtgcgcaacagccacaagtaatacaggtgcaatcaagtatacagaagatgagagcactagccatcaagaagtgcaattttcaagtttcaaaacgacagaagatgttgctcaggatatgataaacctgttattcggtcacctattgagtaaacctgttgccaacacagagaagtctgatcctgtagaatcaacgactagaactgtaaatcaggtgccagaggggagaggctggcacagcgaagtaccaaggcaggaggaacctgtgaagaaaccagagcctgtagtagaatcaatgcctacgactataaatcatgtgccagagaagaaagactggcgtagcgagttaacaaagctgggcgaacctgtggcaaagaagaagagcagcctcagggacaaggtggccttgtttctttgactgcatcagatgagatttgggcagtagattgtgattcgtatgggaccgtgtctgctggttctgagcgtgtcccagtcccacggcattgtttttgcatatagttatacctttggttaataagctgtcctctttaaatctagcaagccagccctcactgttgctagatggtattcctgtgtataaaggatgcatggtgcattttctgttggttgaagtacgactgtatgaagtatcggtgttcctcaacgcgacaactacactagagggaagcggtttaaacatcgtagagttattaggcatggaggagcccagctatctccttactcgccatggagcctttgcagaagttgctggagactgacacagctgagagtgtcctgttcccaatcatttacagtgctgcaaaactatggatcagtatgggcgctgatgatgcagccatcttcgtaaaagtggtaatggatcgttgtctatctttgggaggatcagaagaggtttcctttggacaagctctggcgatcggcagatgcaaaaatttgggggcattgagtgtcagacctggatgtgcacagattgccactcccggtaatgctgttgacaggcagttcatcaaggccaacaccatcctcactcttggggatgaggaataccaatggacatgggtgtcgaacttctacgccgcatgcaacaagaacagaacggtcagggacgttttgcacggagtatgtttcttgaatacgaaaacagtgacagagatggcagaattgttatgctatgggactttctcagtaacagaaagacctgacgagaatgaaaccggttagctctggcaccacaaccggaagagccgcgacaaaagccgtgggcggggcttgtgccttgtggggaggagtcctgtcaaacgagtttggctccggagcggggctcctgtctttatgtactcccctgttccaaaatagttgttttagccttttaacaaattcattcaataattaatatatttgttttgtatatgtgtctagatttattatcatattttaaatatagacataaaa

SEQ ID NO: 21755 - DNA, 1558 bp, Zea Mays
gtcgattggatgcagtatgccagatggaaggaagaatgcaaagagatggattctcatgtcggcagtggtaaaatcatcaccgccccgattataactgaggatggattccctattaaggatccgttggtattacttgaggctacttcagacacgcaaggtacttcaatcgccaccggcaacagtggaaatggaattgagaaccgtgtcttggataaacaaattattgactggaagcttaccttacatcaaataggccttgatgttctgcgcactgaccgcaccatggtattttatgagaacaaagataacatttcaaagttgtgggatattcttgctgtctatgcatggatcgacaaagaagttggttattgtcaaggaatgagtgatttatgttcacccatgatagtgctactccacaatgaagcagatgcattttggtgctttgagagattgatgcgtagactgcgaggtaatttcagatgcacacaacagtctgttggggtggaaaaccagcttcagcatcttgcttctatcattcaggtgcttgatccaaagttacatggccacctagaaagacttggcgggggtgactatctcttcgcattccgcatgttcatggtattgttccggcgagaactatcatttggggactccttgtacctttgggagatgatgtgggctctcgaatatgatcctggcatttgctccacttatgaagaggataatactggggctgtggtccacaaaattgaaggaaaggtaaaatcaatacgtcagtttggtaagtacgagagggagaatatgaagaagagggcaaacgatggtgatggacctgtccctatttcggtcttcctggttgctagtgtcctaaaagagaacagtacaaagcttctgcaagaggctcgagggattgatgacattattaggatattgaataatgttaatggaaatctggacgccaaaagagcttgcgttgttgcactaaagcttcataggaagtatcacaaaaaggaaaagaaatcctaacatcatatggcgagattgcacgcaacacaacactgggacttatatattgcttgtttctgttcctttcattttcccactcactgtatcggaggaagaaggtggtttacatatacagtcgcgggcgagacctcataaatataagtgacttattgtatctacaatatcaatgatccacgtccacagcctactcaattgtgaacatcaacctagtacatgataatttattcacgatcacaatggacttggcaaatattatcccatcagtatttgtcatgaacctcagtctactctcgtatcatcttaggtttttggatcccttcgttttgaaggaactgaaatttacttaatggagtaggttacttggtttacattctaccacttttcaaaatttaaatacaagtatatctcaaatttataggatgatgaatgaaaattgattttatatatcgatagtctatgtttctaatttgtaacttatagcatgctcttcggcttgcttcgctacagtagaaatgtaacaaataaatgtctg

SEQ ID NO: 21756 - DNA, 1698 bp, Zea Mays
gttcaacaggatattatgcattctggcgttcaggctaaggcagacaaaagtcctgtcacagtggctgattatggatctcaaatattggtcggtttttccttaaagatggatgtatcatctggaccattttcattggtggctgaagaggtaacaatactatttctctttctacctgtttccatgtagcattcattagtgcttctgcaattaataggcatcaagtgcttatgtaggactcagatgaattgagaaaagatggcgctgaagaaattttggaagatattactgaccttgtcaatgaaaccatctttgatgatggttcatataacatttcgtttacaaaggaaggtatactctctgcaattgatgatgggaagtctgagggaggtccatctggacgacattgggtgcttgatccgattgacggtactaaaggtttcttgaggggcgaccaatatgccattgcattggctctgcttgatgaaggtaaagttgttttgggtgtattggcttgtccaaatcttccattgtcatcaataaacaacatcaatggtaactcttcgggagataaagttggtgccctgttttctgctacaattggttgtggggctcaagtagagtccttagatggctctccaccacaaaagattagtgtttgctccatcgacaatcctgtcaatgcatcattttttgaatcctatgaaagtgcacactccatgcatgatttgactggctctattgcagagaaacttggtgtccaagctcctccagttagaatcgacagccaagcaaaatatggtgctctggcccgaggtgatggcgccatttacttgcgctttccacacaaaggttatagagagaaaatatgggaccatgcagcaggatcaattgtcgtgacagaagctggaggcatagtaacagatgctgcgggaaacgacttggatttctccaaagggagatttctggatctcgacacaggcatcatcgcaaccaacaaggagttgatgccgtcgctcctgaaagctgtccaagaggctattaaagagacgaaccaggctgcctccctcttatagctgttgtagtggtcgacaaaaaagtagttgcaaaattttcgtactggcaaacaggcatcatcaagacaggcgagcgcttggtgccggtgctcttaaaggccatccaagaggttatcaaggagaaagttgagcagtcgtaatgatgaacagaaattttagttgcacgtgtgacttacatatttcagctgtaccacttttgatcagacacgttcccagtgggtgcttagcagataacagttcttttactgaatactgtaaaagcctttttttttcaaaaataaactaggtttcctccgttttctttctagtgtaaaatctgtttacatcctgcggatcgatgacccgtctgcgaaagccactggaggcagcaacaacatcttcactaatgctcatgtcgctcaactcatttttttagtttttttttttttgcttcgaagcctttatatagcattatagcttgcttcaccgaacgatgttcagttttcaaatggaacatagtatacacttttacaagggaaaatggagttcctaaactagtccttgtataacggtctcacccggtggatgcatgtgtatagaaacatgtcgtgattgttccatcgagaaaccatttcgtaattttgcg

SEQ ID NO: 21757 - DNA, 2146 bp, Zea Mays
gcggttttttcttcggagttggttccacagttggagcaggagtatatgttcttgtgggaataattgctagggagcacgctggtccagcattgacaatttcatttctgatagctggaatagcagccacactttcagctttctgttatgctgagcttgctagtcgttgcccctctgctggaagtgcctaccattattcatacatctgtgttggagaaggtgttgcctggttgattggctgggctctagtgctggaatatactattggtggatctgctgttgcccgtggtatatctccaaacttagccttgttttttggaggacaggatagtctgccatggattttagcacgccatcagcttccatggtttggtatcattattgatccctgtgcagctgctcttgtttgtgttgtgactgttttactctgcatgggaattaaagagagttcatttgcacaaggagttgtaacagttctgaatgcttttgtaatgatatttgttattgtagctggtagttatattggcttccaaataggatgggtcggctacaaggattctgatgggtatttcccatatggagtaaatggaatgcttgctggatcagcaactgttttctttgcatacataggctttgatacagttgctagtacagctgaagaggttaggaatccacagagagatcttccattgggaatcggagtagcgttggctatttgttgtgcattgtatatggctgtttctgttgttattgttgggctggtaccatattttgccatggacccagatactcctatttcatctgcctttgcaaaacatggaatgcaatgggccatgtatgttgtgacaactggtgctgttcttgcactctgctcgaacttgatgggctcacttcttccacagcctagaatacttatggccatggcacgagatggcctgttgccatccttcttctctgatgttaacaagcaaactcaagtacctgttaagagcacaattgtgacaggcatctgtgcagctgctctggcttttacaatggatgtctcacagttagcaggaatggtcagtgtaggcacactccttgcattcaccgtagttgctgtttcgatcttgatactcagatatgtccctccagatgaggtccctttgccaccctctctgcaagaatcattccgtttgaaccaggaatgcgatgaggaaagggacagggctcttcttggagttgggaactgtaccttgtctcagacaaaggatgtgattgtggtagtagaatcagttaaggaccctctcattgatataccgctgcataaaggcaagatggatgagacaaagcgccgaaagatagcctctttaagcataggatctgtgtgtataggggttctgatcctcacatcttcagcctctgccacatggttgccttttctcccgatatgtattggctgcatcattggagttgtgctccttctggctggcctcagtttgctctcctggatcgaccaagatgctggcaggcactcttttggtcattctggaggattcacatgcccttttgttccagtgctgccagttttgtgcatcctgataaatacgtatctgttgataaacctgggtggtgacacatggatgagagttggcatatggctgctgatgggtgttctcctgtacattttctacggacgaacccacagctccctaacagatgtcgtctacgttccagtagcgcaggctgatgagatgtacaggagttcatcaggatatgtatcatagaaaagaacagccgcagttacttcaaggtggttggtcattcagttgtagataattggttatcaaccaggaaagaggggaattggctgttatttctttcatgcttggccaacaagatctcgtggatgcaactttgcaagatatatatgatgttcacgagcctggtcaatttacacattgtttgttggagtgtgcgtagatgtggtgtatataaacccagctgggtggaatgatgtggtacataatttatgcaattcatgtaaaagccctttctacctttctactgaaatgggagagcatttaaagggcatattgaaacagtacatgaatggcaagagaagctacctttttttatatctttttacctcgaacaagtcataattgtg

SEQ ID NO: 21758 - DNA, 693 bp, Zea Mays
ccaaaacccacaccgccacacggccacgcccagttctcccctctctcgctgcgcatcgacgacggcgagggcgccatgatcgtgcgcacgtacaggcgtagatcccgttccatctccgaaggcgggggcggggtctcgtcctcgcaggaggcgttcgacttcgatgccgacgtcgacgtgctgggatcgtcggcctcgcagccgctcccgccatcgcaggaatcctcctcgatgtgggatttcgacgaggacccgcctccgtccccgccgcggcccgggaaggaggggaggcgaagcgggcggggcggagccagaagaggaggagggttggagctcgcggaagctcccgcgatggcgccgacggtgacgctgatggaggcggaggagtacggagagatgatggagagcgtggacgacgtcacgttcgcgctcgacgggctccgccccgccgcgcagaagcggacgcggcgggccagcctgctcgcgctgctcgggatctgcgactccgccgagcgccgccgcgtgcttcggtcccaaggattggtacagcaaattatcgatgctattttggttctggacattgatgatcctccctgcgctattgctgcaggagctcttttatttgttttggcaagtgatgaagctgcttatgaaggtgccatttggtgtagggaaggtgccagtgccctccaa

SEQ ID NO: 21759 - DNA, 1129 bp, Zea Mays
atgcgccatgtgcatagctacctacgtttacgtaccagcaaatccatgtgagccctgaactgtacggagatagcagccccaggttcttcacatattggacggagaccgggtgctacaacctgcactgctccggcttcgtccagacgaacaaccggatcgccattggagccgctatctcgccgacctcggtctacaacggccggcagttcgacatcagcctgctcatatggaaggacccacaccgggggaactggtggctgcagctggggtcgacgggtcagctggtggggtactggccgtcgttcctgttcacgcacctgggcgggcacgccaacatggtgcagttcggcggcgaggtggtgaactcgcggccgtcggggtcgcacacgcccacgcagatggggagtgggcacttcccccgcgagggctccaaccgcgccgcctacttccgcaacgtgcaggtggtggacggcgacaacagcctcgtccccgccgccgcgctccgcctcgtcgccgaccacccggcctgctacgacatccagggcggctacaaccgcgcctggggaaactacttctactacggagggcctggcaggaacgtgcactgcccgtgatacatgatccggccggcgaccatgcatgcatggcgatggcatgaactgaatgaacgaagaagcagatacgtgcacagatacatatatatatatatactactacagagattcagagacggatcacagtatgcggccgtgccggaggattgatctctagtgggatcgtcgtcgccgctcatcaaccggacatggatcctatatatataggagcggtgctagtcgttatagcttagccatagtccctcgtttggttactgcgcatgctaatgagtaatgagtttttagtcgcccagcccagctgcgtacacgcgcgccgccggccgggccggtagtagcacaggcaaaaggtttcgatttgatgtatgtgaggcttctttcgtttgcatcggtctgatttttttttgtcttgagttctgtatacatgaagaaatccacagagtattttgatcaacatgcgtatatatagtacgaaccatgcatccacactgtgtttaataactattcctttgcatttg

SEQ ID NO: 21760 - DNA, 1468 bp, Zea Mays
cgagccgattgaattgctacccactttagatgaagctagtgtagtccaatctagtgtactgcatcgacaaggagttatcggatcagtactcacaggtggtgagtctggtcttcccgacttcaaggatgcaatctctggtgctttcaagttcttgaccaagagttcaaagcaaggcaaagatgggccgtcgaccagcaggccacatacttctgagttgttgacccaggtcaattatctcagagaggagctacaaatgttgtctaaatcaaatcatgttgctattgtcactgttgatggtagacctgggcctggtgcatatggtattacagctgttattattggagctattggctatttattcataagatggaaggggtggaaactttctgatatgatgtttgtgacgaagcgtggattatctgatgcttgcaatgttgtggggaaacaagtggatcaggtttcagaaagtgttaatgttgcaaggagacatcttgcaggaaggattgatcgtgtagattgtagtttagatgaatgtcatgaaattacagaagccacaagggaacaggtcacaatcatccatggagatctaagtgccttccagaaggaaatggaaacagttcatcttgtagttcgtagtctggaggcaaagcttggacgcctagcttatactcaagatcggacaacacgaggaatatatgatttgtgtgaattcactaaaagattggatcagagcccgaaagctgagactcatcaggttacatcatcaactcctcgccctgctattgaatcctcagagagaattgctagggctggttctttgcccccagctttggaaccagagtctcctagaatagaggcgcctaaggttgtgcgctcatctacaatcatgtcagcatcgggacttagtttgctagctggaactacaacaccacctaaaagagaccagccgggtgctttcagcagaacaagttcaatgaaggaaggatcctctgagttaccgagtggtgtccgaagctcagcagaaccaagccccaggagatctggcggttcaaccctttttggagggcttggttttctaaggagctacaccagctgagacgtatgtgctcagatacgtgaatttttattcagactccatcagcttgagctgcatatgtaggtagtagaaaacatggcagttgccaaaaggatggctcccttttccaattgggaattgcgaatttttgtaggaacttaataccttgcagggcaatgcctggagggttgtatattgcactggattatactagtagaatacatgtttggcaaggagcagttgcaactaaatttgtgcttttcttggactcaaacctgctggctgatgatgcttgcttggatagcatgtatgcaacatttgttgtggcagctgcaggctgcaggcatatctggaaactctggatccactcacggttggatttccacccagtac

SEQ ID NO: 21761 - DNA, 243 bp, Zea Mays
accggggcttgcctttgttgcagtgaagaggctctagatccctctatccaatacacagttagatggctcctccacttgatcagcagccattggagtagactccatcaaacaccacttcttctaggtgttcctccaggcacacggtgctcacacgaagtcaaccggagaagatgcggttaagcgggttgacggtcaggctgccaacggcgccgatctgcggtggcgagatccttgctgagttgt

SEQ ID NO: 21762 - DNA, 3368 bp, Zea Mays
ctctgctactcgaccgctggcactggcgcgtttctttattgcttcgtccccttcatccggcaactccactgtcagcgccctattcggctcaatccatccctctgcttggcgtcctctctgctgcttgatttgctacctgtacctggtgctgggaatggattctgctatcagagggatcctgcaagtgtgaaatctatatattctggacaaatggggcaaaatatgttacagccacaagtgctctgcctgtgctccattatcctcacgttattttttacccttttgcaaccgaccgctgcacagatcactgcaccatgggaagttgatgccctcaaggctattaggggcagcttgatagatccacacggaaatcttagcagctggaaccgaggagatccatgcatgggaaattggtcccatgttatctgttacaatgcaacaggcagtgatggatacttccatgtaaaagaattacagctcctaagtttgaatctatctggaattttggctcctgagcttggtcagctttctcaaatgaaaattatggattttatgtggaattcgattggcgggaccatacctaaggaggtcggaaatatcacttctctggagttaatgctcctgaatggaaaccaattgaatggctctttaccagaggagattggcttccttcctaatctgaatcggattcagattgatcagaaccatatatctggacttatacctaaatcatttgctaacctgaataaaaccaagcactttcacatgaacaacaactcattgagcggtcaaatcccacctgagttatccagattaccttcacttgttcacctattattggataacaataacttgtcaggctacattcctccagaactatcaaagttgccaaatgtgctcatcatacaactggacaataataatttctctggaagtacaattccttcatcttatggcaacatctcaacacttctaaaattgagtttaaggaactgcagcttggaaggacctgttcctgatgtcagtgggataccccaacttggctacttggatgttagctggaatcaattgaggggtccaataccatccattcaattttcgagcaacataactacaattgatctttcccacaataatcttaatggttccattccaggaattttctctggccttccttatctccaaagactgtcacttgacgacaacaatttgactggttctgttccatctaatatctggcaagatattgatctaagaggaaataaaagtcttgtactgtaagaccaaatcttcactcatctcacttttctagaacaagattacatggaaacccagtatgcattgggcaaaaccaactgaatatttctcagtattgtcagtcaggaacatatgttgcacgtggaggttcagcagataacagtacagtttgtccaccatgctctagcgactttccttttgaaagaataccgatgtcaccaataccatgctcatgtgtcgttccagtttatgtgggttaccggcttaagagtcctgggttctcaaatttcattccatacgaatcccagttccagcagtacttaacatctgggctttcactgtcatcgtaccaattagaagtttctacttttatgtgggaagaaggcccaaggctgaagatggacctgaaaatatttccaaataacactccctttttcactgtaagtgaggtgttcaggcttaatggtatgttcacagcttggcagattgcagactctgatatatttggcccatatgaacttatcagcttcaaccaagggtggtacaacacaataataccacagggtacaaagtctggtctgagtacaggtgccattgttggggtggtcatggcggcatttgttgcagctgccattctttcatccctcgttactatcatcatattgcggagacgctcaagacagtcttcttcaaataaacgcaccgcgaaaagaatttcaatgaaaattgctggtgtaaaagacttcacttttgatgaattgtcacattgtacacatgactttaatgattcaacactaattggccaaggagggtatggcaaggtatacagaggtgtgttggctgatggaatagtagtagcaataaagcgagcacagcaagggtctcttcaaggttctaaggaattcttcacagagatagagttgctatcgaggctgcatcaccgtaatctagtctctttgctcggttattgtgatgaagatgatgaacagatgctggtttacgagtatatgcccaatggaaatctgcgtgatcatctttcagctagagctaaggtgcctctagatttccccatgaggctacggatcgcgctgggatcgtcacgtggtatcctgtatttgcacacggaagcagatcctccaatataccatcgtgacatcaaagccagcaatattctactggactcgaagtttgtcgcaaaggttgctgatttcggtctctcacgccttgctccgctgccagaaacagaggggagtgcccctggtcatgtctccacagtcgtaaaaggcaccccgggttatcttgacccagagtattttctcacccataagctcacggacaagagcgacgtgtacagcctgggcgttgtgttcttggagctgctgactgggatgcagccaatctctcatggaaggaatattgtcagagaggttttggcagccaatcagtcagggatgatattctcggtggtggataaccggatgggctcgtaccctgctgagtgcgtggagaagtttgctgcgctggcgctgcggtgttgccaggacgagacggactcgaggccatccatggtggaggtggttcgggagctggacatgatatggcgcatgacgccggggacggagaacattgcatcgtcagagtctggcgtcatggggatgggctccaacagcaccagcacacccacagcatcggggtctcggatggatgatcactacatttcgtccatggaggtctccggtagcaacctgctcagtggcgttatgcccagcatcaatccgcgctgacctgctagtatatgttgctgttctagcggtgtgtattatagtttggactcaccacgacgaggatgtaggctacttgtgagcaaccaaacatgtattcattctcttatcgggttcaattttattgttgtcacacttagactgtgaaagtttcattccttagacggtctctagcaacgttctctaaatttcatccattaaaaaatatatataattgcactctaaaagattacgtcatttatatcttcatcatccccggtagtctcttttaaatttcatcatctatatcctatcttccatattatcacaaatcctgttattagaaatttt

SEQ ID NO: 21763 - DNA, 1022 bp, Zea Mays
atggagctcaagcgcgtcctggtcgcgccaacagcagcacgccgagctccaacggtccctcccaccacctctggtgcgaccgctctgccccctgcagggctcggtctccttcccccactgccggaagctatcccctggccctccagcggtgtgcaaacccatgttgccgctgttgaacaagcagttgtaaaagatgctacgaagctggaagctccagttgttgttgttacaggtgcctctagagggattggaaaggcaactgctctagcccttggaaaagcaggatgcaaggttctggtaaattatgctcggtcttcgaaagaggctgaagaggtctccaaagagattgaagcatctggtggtgaggctatcacctttggaggagatgtttcaaaagaagctgatgtagagtctatgatgaaagcagctctagataaatggggaacgatagatgtgctggtaaataatgcaggaattacacgagacacattattgatgaggatgaagaaatctcagtggcaagatgtaattgatctgaatcttacaggcgtctgcctgtgtacacaggctgcaacaaaagtaatgatgaagaagaaaaaggggaaaattatcaacattgcatccgtcgttggccttactggcaatgttggccaagctaattatagtgcagccaaggctggggtgattggtttcacgaaaacagttgccagggagtatgcaagcagaaatatcaatgtgaatgctattgcaccagggtttattgcatctgatatgactgccgaacttggagaagagcttgagaagaaaatcttgtcaaccattccattagggagatatggccaaccagaggaagttgcagggttagtcgagttcctggcccttagccctgcagctagctatatgaccggacaggcgacgttggttcactttcttgtgcacgggcgattttgggcaacggaattagggttctctttttcttttaatactcaccgtggataaaccaggcatgtggaagttgaaat

SEQ ID NO: 21764 - DNA, 1471 bp, Zea Mays
gcgcacgcagaggagcacagcggcgtcactgctgcggcagtaatggccgcctggttctcccacggcgtctactagcgatacaccgagaccacttttctcttgcttccttcgaccccgccccctccggcctccggatcgcgcaccgcgcctgccctccacccaaaaccgctccggagcctttgcgaagcggcgccgcttactggccggcaaggcgaccccgtctctcggcggcctgcgttgatctggttgctgctgttgaggtgggcagagcggcggccgcgatgggcatctcggcgaggtggctcaagtcattagttgggctgaggaaggtggagcagcagccgcgtaaggagagtgcagatgttggacgaatgaaaagtgatgtcgccgatcagtttcattttcagaatcagcgctctcaagatgacagcagcattgctgcacaagaagaaattccagaggttccttatggaaatgatccacctgaagatgattctaatgcaccttcatgcttggaacccacttatagttcagctgatgtgccactgtttcaaactgaagaggaactgaaagagatctgggctgctacaattattcagacaacattcagagctttcctggctaggagagcccatcgagctttaaaagggttggttaggcttcaagcccttgtaagaggtcacatagtaagaaagcaagctgatacgacactccgttgtatgcaagctttggtcagggttcaggcccgtgttagagcaaggcgagttcgcatggctttggaaaaccagactgatcagcaaaatacttcaccagagcacacgaccgtggcacgtgtcagagaaattgaggatggctggtgtgatagtattggttctgtggaagatatccaagcaaaacttttaaagaggcaggaagcagcagctaaacgtgagcgagccatggcctatgctctagctcatcaggttcagaagctggtagacacctgacaaagaaaggcacagttaaccgatccctgaaggccacaaaagattcccacatgctggggtcaagacatcatcttgccagttgcattgatccagttcccactagagttgagctggagacttagaaggcatgtgatgcttgaacatcgccatggattgcacttagcatagcaagtagcaacttggatgccattcatgtctgcatggctgcatcgtttgtactggcggcagcggcttctttcaacaccgaatatgcacgtcagcatgtccatacatgctgaggttaccccattgggcctttgagatgtaaattatgtcgttcagtcgagtggtatgcttatcatgtgtttatcggtgtatgatgttggtatagttgtaacttggaaggctaagcgaagttgtactgttgtatttggtattgccgtattgatatatagattgcacatgcgtcttgcagttgaatttctaccattttagacaaaatttgc

SEQ ID NO: 21765 - DNA, 971 bp, Zea Mays
aaaagcgccctctgctctcaccctccctcacagcctcatttctcgcttgggtctctcaccactggcctgtcacctctttgggaggaaatggcatgtcctggcaaggtctcttcctgggccatggcccgaaattggcatcgccattaaatgtttgaggtcctacttatctttcacaagtggtcctcttccatgcttaaacaggaataccagggagacgacgccctgcagcttgattaactctgagatgatcagcactcccggatccacaacaagatccagccactcttcccaccgcagggtgaaagctcctcctgtgcacgccatcccaagttcaacggagatgaacgagtacttcgctgctgaacagcgacgccaacaacaggctttcattgacaagtacaactttgatcctgtaaatgactgccctctcccaggcaggtttgaatgggtgaagctagactgatagattcagaggacatgagagcagcagcatggaactcacctccgctccctccaccgccgcagcgtcgtggcagaggcgcataccgtcgtgttagctttgtttctgttgtaaaaacttagcgttagcttgtagccttaattgtcgcgtgtcacagtacagaactgatgctgagttacagcaccctgatatgatctggtccctcaactccaatgtaacccttaacagctcattctgtaaggaacctatcatcctgttaccagttgccgaattaatgaagtagagctagataatgatgttctgtcacagttattaatacttatactctgtgatgttgcacctgaagctgatgtaatttttgtgtgtgattcatgcactcctcttggtacctgcaaagctggctgccatggtttgacctttggagccttgtgctgtgcccttcctgcagtggcatcttctctctcagggctcaggatgctgctgcatgtgtcattattgctggatgctggcc

SEQ ID NO: 21766 - DNA, 970 bp, Zea Mays
gcttgttgaggtatacaaacaagtccgaattggggatccgttggagaaaggcaccttactgggaccactgcacactcctgcttcaaaagagaactttttgaaaggcattcagactatcaaatctcagggagggaaaatcctttttggaggatctgccattgaatcagaaggaaactttgtgcaaccaacaattgtggaaattacaccttctgcaccagttgtgaaagaagaactctttggtcctgtcctttatgttatgaaatttcagtccttgaaggaagcaattgaaatcaataactctgttcctcaaggattgagcagttctatatttacaaagaggccagatattatttttaagtggctcgggccccatggtagtgattgtggtatagtgaatgtgaacatacctactaatggtgctgaaattggtggagcatttggtggagaaaaagcaactggtggtggacgagaagcagggagtgattcctggaagcagtacatgaggagggcgacttgtacaatcaactatgggagcgagctacctctagcccagggaatcaattttggttaatcctgcagaaatgttgcgcgtggatctcagtgttttctgcagacgtggatgccgtatggaaagaactgatgcaaccgcatttgagatctcagcagacttgagcagcatttattggcgtcagttgtgaaacttaaactgcaggagcatcttgtacataaataaaataagatgtttgttgctcgtgggccgtggcacgttttggtaccggtgtccagtctactaataaaatctaatgcaaaacggtcataactacattctcatgcagtatgattttccggccttttgatctggaattgaaatgagcgttgttcgttttgaacaagcacatgaagaaaaaactgctaagggttaatttggcaaccttattttttcaagggattttaattttttcaagagaaa

SEQ ID NO: 21767 - DNA, 2195 bp, Zea Mays
cgcggtcggccattcgcccattctcgggtcgagacggcaagcgtcagaccagtgacgaagcaaatctaccatgcgatgcgagcatgacaaataaataccctttacctcgtccttgccgccgcggccgccggggcgtcccggatcgtggtggtgcttgccgtcgctgcgcgcgcgatgcgccggcggtgggacagctgcttctcgggcagcgacgtccgcgtgggcgggcgcgtcccccccgaggagccggagccggaggtcttctccttcgccgagcccctcccgtcgtggcccacaggcgggggattcgcgcgggggaggatacgtatcggcggaggggagctggagctcgccgcggccaccgcgttccagaagatctgcaccctgtcgtcgcggcggcgtggcggcggcggcagcgccaccttttaccggccggtcggcgtcccagaggggttctcgctcctgggttactactgccagcctaactgccgcccgctccacggccacgtcctcgttgccagagcgggggagcgcccgtccggcgcctcacctcagccgccgccgccgccgctctgcaagccgctggactatacgctcatctgggaattccaagccagtggcgataccggctacggctacggtcgaagcgacgcctacttctggatccccgtgccgccggagaggtatcgggcgctcgggtgtctcgtgaccacggaaccacggagaccaccgctcgaggaggtggtatgcgtccgcgaggacctgacggacgagtgcgagccgcacggctcgctgctctgcctagagcagccgcggccgtcttcgttcttcaccgtgcggggcgttcgtccggtgcgccgagggatacgggagaaaggagtgtgcgtgggcaccttctgctgcgccgctgacgggctccccccgcgcgagcacggcatggcgtgcctgggcaacgtcgagctcgacctgtcggcgatgccaacgctggagcaggcgcacgcggtgatccggcactacggccccacgctgttcttccaccccaaggagatcgacggcgaggggtccaacctccctggtggcggttgcaacgacggggagttctggatcgacgttcccagcggcgagcggggccgcgccgtgtgccgcggcagcatcgacagcgcggagctctacgcgcacgtgaagccggccatgggcggcacgtgcaccgacgtggccatgtgggtgttctgcccgttcaacggcccggcgaggctcaagctgggcccgatcagcctcccgctgggcaagaccgggcggcacgtcggggactgggagcacttcacgttccgcgtcagcaacctcaccggtgagctcatgggcgtgtactactcgcagcacagcggcgggcactgggtggacgcctccgcattggagtacatcgacggcaaccggcctgtggtgtactcgtccaggaacgggcacgcgagctacgcgtaccctggcgtgtacctgcagggctcggcggcgctcggggtcggcatccgcaacgacgccgctcggagcagcctattcgtggactccagcgccaggtaccgcatcgttgcggcggggtatctgggcgagggcgccgtcgtcgagccgcagtggctgcagttcatgcgggagtggggtccgacggtggtgtacaagtggaggaagcggatggagtgggtgatcggccgcctacctccctggctcaggtgcagagcggagagcatgctgaacaagatgcccaacgagctgtccagggaagaagggccgaccgggcccaaggagaagaacaactgggagggagacgagagatggtaagactggtacgtaggaacagtgctcaacgatgtgattttataacatgtgtggcttaaattaaggggcgtgctatatttaggtgtttgaaaaacagcttcttcgcggaccatacactagtacaatttggctctataccagcggtacgctttttacatcacagacggttcggttagaaaaccgcctgtaatgtcccaggcggttcagtacgcctgtgatgtaatagtatcacaagcggtttttgtttaggaccgtctgtggtgctctatccttttcacaaacggaccctaagaaaaaaccgcctctgattgtaaaaatatttttaatttttaacagaaatatgcaaatacaatttaaatgaattaata

SEQ ID NO: 21768 - DNA, 4178 bp, Zea Mays
cccccgccgccccgtccgttagatgattcccagcccttttttcccggtaaaaccaccgcaccaaaagggcagcagcgcagacgcgcctcgatgcctcgtgctccataaccaacgcccacagccagtctatactctagagccccccaacacagcacacaacactcgctcgcggcgcagcgcttcgctcgttgccaccgcccgcctttccccgcgcccgacggaagagccccacgcccccaccgccgcgggagggggaggggcgcggaggagcatgcgcgcaggctgtcaccgcggccagagaaagagaaggaggacctgcgccgcgcgcaccgcgacgagccgctctccgctggcacccacgccaaaaggcgaagattctcggccgagcccccgtcccttccaccatcccccgctgaataaaaggcggttcttgcgggcggttgccatggggtgcggccagtccaagacggaggaggagtacgccgtgcagcactgccgggcgcgctccgagctcctggcgctggccatccgccagcgctacatgctcgccgacgcgcaccacgcctacgccgagtcgctgcgcgccgtcggcgccctgctgcacgacttcctccgcggcgtccagtcgctgccgccgccgccgcccgagcccgcgctccgcctcccgctgcagcggaagggcgacggcctccccgccgcgtcgccgccgccgcccgcaatcgcgtcctcctcctccgccgccaagcaggtccgcatcgcccccaacgacggccatatccagttctccgacgacgactccgattccgatgacggacacatcaagttccactccgacgaagagcccgacccggctcgccgccgcccggatgtcgtccactcagccggggcgcctggtcctccgccgccgcagatgggaccaccctattcctccgggtatgctccgccgccgtatggtcctggatacggctacgggtacgccaatgggcctgggccgggtcctggtcccgattatggcggtattggcatgagcagcggcggcggcggtggttacgggcaaagctatgggggcatgggtggtggtggcagcggcggcggtgccggctacaatgaccagagctatggtggcatgggcagtggcggcggcgctggcggctatgaccaaggctacggtggcatgggtggatatgggcagagcttctttaacatcaactacgcgcgcagccagccacctccaccgtcaatctcgcacgagcaacgcctgcaggccactaacgccagggtccactactattccggcaatgacgagctgcagccacccccgcgcggctatggtggtgggtactcctacccaccacagagctcgagctcatataatcagtatgcctatggtggttactatggaggtggttctgctcctgcaccaccagcagacatcccctcctcctcccgcgagccagccgcagcaccaccgcctccatctcctcccagggtgtccacctgggacttcctgaacccgtttgaaacttatgatagctactacgagcaaccaactgctacagcagctccatactctcccagcaggagttcaaaggatgtgcgcgaggaggaggggattccggacttggaggatgaagacatggaggtagtcaaggaagcttatggtgatgagaagcacccaatgaagggttacatgggaaacgggaaggcgacaaaggaagatggtaggagcagtacgagagatgaactgccccgcaagtccaagtcatctgaggccagcagtagtgggagcagcttggagcatgacgtgcatgtagtagagaagagtgttgtcggagagcaagttcaacactcagagccacagcagcatgttgccggtctgccacccacaggatcggacaagatatacatcgatgacactgaggtggtggtggagatcaggactcaatttgagcgtgcctcacaatcagctagtgaggtatccaagatgcttgaggtcggaaagatgccttactaccagaagagttcaggtttcaaagtctctgcaatgatggtctgtggtataccgacaatggaggaggagtttctgcgttttgaagaggacaaggcgatgggatccggcaacctctcctctacgctacagaagttgtacatgtgggagaagaagcttcttgaggaagttaagacagaggagaggatgcgggtactgtatgacagaaaacgtgaggagctgaaaatgttagatgagaaaggttgtaaacactatttcagaaaagattagtaagttgagggatgaagagttgtggccacaaacatgtgagctcattcaagggttgatgaggatgtggagcgttatgctagaatgccatcagatacaattgcatgccatatcccaagctagatacatagactccatgatagacactgcaaagttcggtgatgatcatatggacttgatcaagcggttagagcttcagctattggattggattgcttgttttgctgcatgggttagcgctcaaaagaattatgtcaaaactttaaataagtggctgacaaatggtgtcatctatgtacccgaggaaaccgaggacggggcgcctccattttctcctggaaggttaggagggccaccgatattcgtcatatgcaataactgggctgccagtgtggacagggtatctgagaaagaagtggtcgaggcaatgcaggcctttgcgtccaacgtcctgaacctctgggagaggcacaggtcggagcaaaggcagggtctgatggcgaacaaaggcatggacagagatcttagggtgatggaaagagacgagcaatcgatgcgcaaggctctggaggcacagaacaagaagcttgtgctcatttcgaaccagggcagcgtgtccttgtctgcacaagcgttacatgagcgaggccctggcgctgaagccggtggtagtctgcagacaggtctgaggaatattttcgaagcgatggagaacttcacctctgcatctgcaaatacgtacagggagctccatcttcgcgccgaagaagagaaagcccgggttgcgcaggagagcggcagcgtttcctagttccacatgaggacatgagcatttgtcggtggaaagaagggggactaacgccagtggcagcgtttctacggcacagtggcacaaccaacccctagtggcagctgatgcaccttgctcgccaggtgcctcagttttttgggttccaagctctctctgatgtagaggcctgtggtacttggtggagttaacaggttgtgacatgggggtgctgcatttctttgatcgggatgaacaggcattctcctcagaccgtaattgggaagcgcagttgtgaaattaggtaatcgccagacacatcctggtagttgggagaccccgcctgaagggaccgagtgaagagcagatgcccttgtgcatctgagaagccgcagatgatctcttagttcagatgctgttatcatgaacccaagattcatggaacgctcccaatcccatgcatgtcagcgcccaacacacagggaagaggccaggctaccaggtttatcagaagctgtttcaataaccgcagaattttttttcccatgccaatgcacactgtacagaggtgatgcgggacgaatcgagctggagccttgtgtccgctgccgagaagcccgagacgatgtcgctttgagcttcctctaaggtgttcggactgcggcttcgccgtgccaccgcgctggaagtacactcgtagggtttagcagagttcgatgagcttgtagggtagacgccctgaccccgttctgttgcagatcatctaaccaccgctccggatttgtttttttgttttattttgttttgtttatttaatatacatattaattcatttgtagcaccccccgtgtacagcagctgctggctaacttaaacctgctgtgccatattttattcattctattcacaccctggtttgccaatcttgtggatcgctgaaagctccgagccgcctgtggtgatcgcccgttgggtgtaggtgtaataaacggtagttagcggtagagcattgcgatggtgagtttagctatggctccccttccgttccgtctcgcatcgcatcagacgttctcggagcgcgggcatcgtggccagggtacagacagcagcttgtcg

SEQ ID NO: 21769 - DNA, 3446 bp, Zea Mays
cgacgatgcttccccacaactcgagcccctcgtagcttccacccggcccccatccgcggcctccctcctccgttcccctttcccgttttcctcctccgcttcccgattcaactcgcaacgccgccgccttcgctgacccatgagcgggcgcgagccgatttaggcccgccgctacagagatttcgagagaatttttgggctagcggggtgtgaacagaaacttggtgccccgctgctctgccttttgtcgtccactgtttcgcgtcaattctcgcgcgaaaagggatgggcactggagaggggtcgccgccggcgaggcggggcatcagcggtaggcgccgtcgatggccggacgaggacgacgacgagtatgtgctggaggaggaagaagaagaggattatgtggaggagctctccgcctcgagcgccggcgaggagggggtggattcagacgccgagtaccaggaggcagaggaggaggacgagatcgagaagccgcgcccaaagcgaccagcgaagggcatcacatcgagcgccggcgagaggggattggattcagacgccgaataccaggaggcagaggaggacgagatggagacgccgcgcccaaagcgaccggcgaaggacagcacatcgagcgccggcgaggatgggttggattcagacgccgaataccaggaggcagaggaggaggacgacgacgaaatcgagacgccgcgcccgaagcgacgggcaaagggcagcaacagagtacggaaaggaaaggtggatctggccgccgcacgatctcgacgccggaagtatgaggaggacgaggactacgaggaggaggttgacgaagacgacgaggtggaggaggagtaccatgatgaccttgaggaggtcgaggaggaggaagaagtggcaccacagcggccgaagagcattgtgaaatgcggtgcccgtggccggaatgtgaagctgtctctggcagcgaagcgatctcatcagcggaagcaggaggatgatgaggatatggattttgacccagagttggatgacgaggaggtcgagatagatgaggatattgattttgatcccgatgtcgatggtgacgaggaggatgagtatcaagacgaggaggaagaggaactggttcctgcccgtgccagaaaggtaactgtaaagaatccggtgaagcgaaagtccatttcaaagaggcgaacaccaaagaagaagaagaaaaataggggatctaaggtttctaggcggaagggggcttcagctaaagtgaagaaatcagcacctgttaggaggcggagaaagcgttcagtgatagatgattacgaggatgaggatgtggatgatgacgatgacgacgacttcattgtcgacgatgaggtcattgtgaatcggcaccccaagaagaaggccaggatagggagtgggagggagacagtggtggaccctcaagtatctattgaggaagagacatggccagaccttgagtcagactcatcggactttgagtttgcgacgtccgatgaagaacctaacaatgttgaaacacctgtagctgagcagactacagtcagaaaagggaggaagaagaggatatctgagtcagagtcatcctcagattctgaatttgttgtatcaggtaaggaattggaagaattgagggagcctgagcctccaaaggctgcaccaaatctgcatgtgtccttgagaaggatttgtattacaaggcatggagaaggcaagggaaaggagaaacaggaacaggaggaggctgggaagccaatatgcgggatctgtctctcggaggagctgagagctactgtacaaggtgtcctcaattgttgctcacactatttttgcttcgcatgcatcatggaatggtctagggttgagtcgagatgcccattgtgcaagcagcggttcactacaatcaccaagtcatcaaaggtagatcttggtcttggagtgagaaaagctgtagtcaaggtcgaagagcgtgatcaggtttatcagcccactgaagaagaaataaggcgttggctagacccatatgaaaatgttgtttgtatagagtgcaatcaaggtggcgatgataatctcatgctactatgtgacatttgtgattcctcagcacatacttattgtgttggcttgggtagagaagtgcccgaaggaaactggtactgtggaggatgtagactcggtgacgagggaccatcatatactggaattcagcgtacagtagcttatgaaagacaaaattacagaagtcatgtcggtagttctgtaagttttggcatggctgtaccaggcggtacatttgaaaggccgtcatcaatcaatcctcgccattcttttcaagggattgatctaaatctatctccaagagagtttcccggagaatcacatcctgctgaatcacaagtttcaactgatagcgtatcaactcccactggaagagctggaagaactatttcaggaaggcgtgaattacaacggtacattcagagtttgttcagaccaagtctacctagtagaccagacacgtaccacaatattgcgcagaacagtggtggtgtatcaagaaatgaaccgaaccgctggaacttcccttcttcatcagaagcaaacacatcacagaatctgcctgatggcattcagaaccatcacagtgaccttccatttgttcaagctcacagcaattttgctccatttatgtccccagatggggatgatttccagcaaattgagggtgtcaagagcaacctcaggaacatgcagtagagcccttacggcgttactagaagctcgattctaccctgtgaagcttaccaagggggcaacatgtgccgttttaatggcttgtggaactgaacataacaaaagcttgtgcctgttgcattctcccagaaattgatgtggttcggctcatttgcggagatgtgatgtggtcaacgatataagatacatgctctctttgtttaagtttaggcattttttgttgtcgtcattcttattcattcagtcattaagcacaacctcagattacacagcgaaggcatttctgaatgtcttgatagcttcaaatttatacattgtaatattgtggtaacaccaatttcattaggctgaccattcttttcctcgcgagatgctcttttgcctactaggaatgctgataactgagcttcccagcctcttctataatcatataccgcgcggtggcaaactagcctcgttcgggtactggctttctgttctattagcatactggtctagtggatcaaccgagaaaagctatcaacaatcttagtactaacaatctatggtctgaagactcgtcttctttaagtgttttgttgtatagcgcagctgctttttgtacagatgaatgtttgttccatattgcttaagtttgtatccagtatccccttcatatgcatgtg

SEQ ID NO: 21770 - DNA, 3813 bp, Zea Mays
ccgctgcaaccgcatgtacggcagcctccccttctcgagtcgccagtggccacgccgggacgggcgcgcttttcccctgccgcgccaaagcaggaaacaaagcaacggccaggaaggagtcacgcgcgaggcgaaaagcgggcgggtggaagaagcgtgggcgcctgggttaacgctcccgcagcgagtgatctgagagcggtagaggccggccggaaccgcggaagaggagaggccgggggatccgacgatggcggggaacgagtggatcaatgggtacctggaggcgatcctcgacagccgcacctcgtcgggcggcggcggaggcggcggcggcggggacccaaggtcgccggtggcgggggcgtcgccgacgaagggggcgagcccccgcggcccgcacatgaacttcaacccctcgcactacttcgtcgaggaggtggtcaagggcgtcgacgagagcgacctccaccggacgtggatcaaggtcgtagccacgcgcaacgcccgggagcgcagcaccaggctcgagaacatgtgctggcggatctggcacctcgcgcgcaagaagaaacagctggagttggagggcatccagagaatctcggcacgccggaaggaacaggagcaggtgcgtcgtgaggcgacggaggacctggccgacgatctgtcagaaggcgagaaaggggacaccctcgctgagcttgtgccggttgaggcggccaagaagaagttccagaggaacttctctgaccttaccgtctggtctgacgacaataatgagaagaagctttacattgtgctcatcagtgttcatggtcttgttcgtggcgaaaacatggaactaggtcgtgattctgacaccggtggccaggtgaaatatgttgtcgaacttgcaagagcaatgtcaatgatgcctggagtgtacagggtggacctcttcactcgtcaagtgtcatctcctgacgtggactggagctatggtgagccgaccgagatgttatgctccggttccaacgatggagaggggatgggtgagagtgccggagcctacattgtgcgcataccgtgtggaccacgggataaatacctcaagaaggaagcactgtggccttacctccaagagtttgtcgatggagctcttgcgcatatccttaacatgtccaaggctctgggagaacaggttggaaatgggaggccagtactgccttacgtgatacatggacactatgccgacgctggagatgttgctgctctcctttccggtgcgctcaatgtacccatggtgctcactggtcactcacttgggaggaacaagctggagcaactcctgaagcaagggcgcatgtccaaggaggagatcgattcaacatacaagatcatgaggcgtatcgagggtgaggagctggccctggatgcgtcagagcttgtcatcaccagcacaaggcaggagattgatgaacagtggggattgtacgacggatttgatgtcaagcttgagaaagtgttgagggcacgggcgaggcgtggggttagctgccatggtcgtttcatgcctaggatggtggtgattcctccaggaatggatttcagcaatgttgtggttcatgaagacattgatggggatggtgacagcaaagatgatatcgttggtttggagggtgcttcaccgaagtcaatgcccccaatttgggccgaggtgatgcggttcctaaccaatcctcacaagccgatgatcctggcgctgtcgaggccagacccgaagaagaacatcactaccctcgtcaaagcctttggagagtgccccccactcagggaacttgcaaaccttactctaatcatgggaaacagagatgacatcgacgatatgtctgctggcaatgccagtgtcctcaccacagttctgaagctgatagacaagtatgatctgtatggaagcgtagcgtttcctaagcatcacaatcaggctgatgtcccggagatctaccgcctcgcggccaaaatgaagggtgtcttcatcaaccctgctctcgttgagccgttcggtctcaccctgatcgaggctgcagcacacggacttccaatagtcgctaccaagaatggtggtccggtcgacattacaactgcactgagcaacggactgctcgttgacccgcacgaccagaacgccatcgctcaagcactgctgaagctcgtagcagataagaacctgtggcaggaatgccggagaaacgggctgcgaaacatccacctttactcatggccggagcactgccgcacttacctcaccagggttgctgggtgccggttaaggaacccgaggtggctgaaggacacaccagcagatgccggagctgatgaggaggagttcctggaggattccatggacgctcaggacctgtcactccgtctgtccatcgacggtgagaagagctcgctgaacaccaacgacccattgtcgtcggacccgcaggatcaggtgcagaagatcatgaacaagatcaatcagtcgtcagcacttccgccgtccatgtcctcagtcgcagacggtgccaagaacgcaaccgaggccacgggcagcaccttgaacaagtacccactcctgcgccggcgccggcgcctgttcgtcatcgccgtggactgctaccaagacgacggccgtgctagcaagaagatgctgcaggtgatccaggaagttttcagagcagtccgatcggactcccagatgtccaagatctcagggttcgcgctgtccactgcgatgccgttgtccgaaacactccagcttctgcagctcggcaagatcccagcgaccgacttcgacaccctcatctgtggcagtggcagcgaggtctactatcctggcacagtgaactgcgtcgacgctgaaggaaagctgcgcccagaccaggactatctgatgcacatcagccaccgctggtcccatgacggcgcgaagcagaccatagcgaagctcatggccactcaggacggttcaggcgacactgtcgagctggacccggcgtctagtaatgcacactgcttcacgttccttatcaaagatcccaaaaaggtgaaaacggtcgatgagatgagggagaggctgaggatgcgtggtctccggtgccacatcatgtactgcaggaactcgacaaggcttcaggttgtccctctgctagcatcaaggtcacaggcactcaggtatctttttgtgcgctggggcctatatgtggggaacatgtatctgatcactggggaacatggcgacaccgatcatgaggagatgctatctggattacacaagactgtgatcgtccggggtgtcaccgagaaaggttcggaagggctgctgaggagcccaggaagctacaagaaggacgacgtcgtgccgtctgagacccccttggctgcgtacacgactggtgagatgaaggccgatgagatcatgcgagctctgaaacaagtctccaagacttccagcggcatgtgaattagctgctgggaaaggtcgatctctaatatattcttcttgttcataactcaaacggcagacacattttctccttttcttcactagtactacataaataacttgtgaacagtaccgagggtgtatatattgcagtgacaaataactaggacactgctaattctactgctggctcaccactgtcttggtgagatgtagccctacaagattgtatactgtgtatttctctagtcgcagctaggcatactttgttttttaaaaaaagaacttcagtttactgcatactcaaggaaacgaaatgacagtaaaagtcagggtttaat

SEQ ID NO: 21771 - DNA, 2202 bp, Zea Mays
cgcacggaccggacagacgcccagaaagatagggctgcccgctgcccctgcctctgccatccttttcctgcagcagatgacacggccgcgggcccgcggcagaagagagagcccaaatcatagccacaaaagccacgcacgcggggcgcttgtcttgcgcgcacgaaaacccacatccaccgcggcgccacaccgcgtgcgtcggctgcttgctgccccgtgttccttggctcccgccgacaccgagcgccgacaccgagcgccgccaccgccatggctgccccgccccgcgccaccgcggtcctcgcgtggggttccggggaggacgggcagcttggcatgggcgggaacgaggagaaggactgggcacactgcgtggaggcactcggttcctacgccgtcaccgccgtcgtagccggtagccgcaactccctcgccatctgcgaagacggccgcctcttcacttgggggtggaaccagcgcggcacgctcgggcacccgccgaagaccaagacggagagctcccctggccccgtccacgccctcgcggggttgaagatcgtccaggcggcgattggtgggtggcattgccttgcagttgacgacaatgggcacgcctacgcctgggggggaaacgagtacgggcagtgcggtgaggagcctgagaggaaggaggacgggacgagggcgctcaggagggacatcccgaccccacagcggtgcgcacccaagctcaaagtccggcaagtagctgctggagggacacattcagtggttttgactcaagaaggtcacgtttggacatggggacagccatggcctcctggtgatatcaagcaaatatcgacaccagtacgcgtgcaaggccttgagaaagtgagggtcattgctgtaggtgcattccataatttggcactcacagaggatggaattttgtgggcatggggtaataatgagtatggtcagctggggactggagatacccaaccaagatcacaccctatacgcgttgaaggactatctgatctctcactggttgacattgctgctggaggctggcattcaactgcactaactatacagggagaggtgtatgcttgggggagaggagaacacgggaggcttggatttggagatgataagagtagtcgcatggtccccctaaaggttgagcttctagctggagaggatattgttcaggtatcatgtggaggaacacattcagttgctctaactcgagatggccggatgttttcttatgggaggggcgaccatggccgtctgggctacggcaggaagctgacgacaggccagcccatgggagtggacattgacctgccgccgcccaagacccgcagcagccgggacgggcagtggcaggcgaagtacgtggcttgtggcgggcggcacaccctggctattgtggtgtgggcagagaccaccgactgatcacggagtgatcaacttcctgaatcctaatctgggtgcaaatctgagtttgacaatcctgctagataattatagtgttagtgaaataagcataagttatgcgacattaggcatcataaatttttatgtatgtgcttaatttggcaaggaacaaaaatagtcgggaagaggactttgtgcagatgggagagcttcagtatttcagcaatatttttcgatggacaattttgtgctgtatcctgtgcttactggctcccgggttgctaccttcactcgctgcacggctacacatctaactgtcaagggtgacaatggatcaagcactagttcaaatcgaatattggagacattcaattagcgacgattaaggagatcatgcttcaactcgcggctgctcaagaacatgcacaaattacctccaaggagcttggcctaaggagacgcctcaaagtgcgcagtgttggcttgaagcacagcaagaatcaggcagcactctcgtctcacgcacatccgttacggggacgcgaacaccaaattcttctaactatgggtgaattatagggcacgccaaattaagggagtatttggttactttgtcatgctactaactaaacttatccctaaattttctatttgaaaagccttttttagttataccgttggaagtttagtgactagattttagtcacttaagttttggaagttggaaccaaacatcccctaaatactgaatacataccaactacaccactg

SEQ ID NO: 21772 - DNA, 1227 bp, Zea Mays
atttgttgggcatgtcatcttggcgtgctccgcacgagaatgccaggaagccaatacgaatatacctcaattatgatgccgtcgggcattcgcccgaccgtgattgtaaaaatgttggcgacatcgtgaagcttggcgaacctcctgtatcatcagcaccaggaacacctatatgcgatcctcatggtgatccaccactggtgggagactgctggtacaattgcacccttgaggacatagctgggaaagacaagaggcaacgtctccgtaaggcactggggcaaacagtagagtggtttagaaaagctctagctgttgaacctgtcaaggggaacctacggctcagtgggtactcagcttgtggtcaggatggaggtgtacaactacctcatgcgtatgttgaagatggtgttgctaatgctgatttagtcctcttagtaacaactagaccaacaacaggtaacacccttgcatgggctgtggcctgtgaacgtgaccagtggggtcgggccattgcaggacatgttaatgtggcccctcgtcatttgacagctgaagctgaaacattactttcagctactctaatacacgaggttatgcatgttctagggtttgatcctcatgccttcacacattttcgtgatgaaaggaaaaggagacgtggtcaggttactgctcaaagtttggataaaaagcttggaagaatggttactcgtgttgtcctaccacgagttgtcatgcacgcgagacatcattatggagcattttcccaaaacttcactgggttagaattggaagacgggggaggccggggcacctcaggttcacattgggagaagaggctcttaatgaatgagatcatgactgggtcagtggatacgagatctgtggtttcaagaatgactttagcattactggaggacagtggatggtatcaagctaattacagcatggctgaacatttagattggggtcagaatcagggaacagagtttgttatatctccttgcaactcatggaaaggggcataccattgcaatacaactcaattatcaggatgcacatataatagggaggcagaaggttactgccctatagtaaactatagtggggacttgcccaagtgggctcaatattttccccaagccaataaaggtatgcccaaatgtagcataaattattatgtttatgacattaaacaggatgctgaattatattaaatgaaaa

SEQ ID NO: 21773 - DNA, 244 bp, Zea Mays
ggctccagctccggctctgccgccgtggttgattcggacgcagggcgaggtcgggattctgggcgccgccgcgtggaacatcgccggtgactaccacggcgatcgcggcctaggtcgtgcgctggtgggcattaggtgagaaggcatcagccagatttgggggaattcctcaccgaagatcaacagtgccgccgatccgctgctcacgatgaccgtctctgccactacttcgaccaccattgag

SEQ ID NO: 21774 - DNA, 1587 bp, Zea Mays
ctttccttccctctcggtggtgatatgcagtgggtccgctgtcctaaccacatgcaccatacctctttaaaaccccagcctaatgtgcatcctccagtccaaggccactaggagtttgtaatggagaacaatacccctccaaagactgggacgggcttcttaaaaacttgcttcaatggagttaatgctctctcaggcgttggaatattatctattccatatgcattgtctcaaggaggatggctgagcttacttatcttcttaaccatagcaatcatctgtttctacactggtattctcctacagagatgtatagactcgagttcgcttgttaagacctatcctgatatcggtgagctagcttttgggcggaaaggaaaaatcatagtagcaatattcttgtacctagagctgtatcttgtggctattgatttcttgatattagaaggtgacaacttggagaaattatttccaaatgctaacttccatgctgccgggctgaaggttggaagcaagcaagggtttgtgttgatgttcagtctacttgttttaccaacaacatggcttcagagcttgaacatgcttgcatatgtcgcccttggtggagtcatggcttctgtcattttaatcgcctctgttctgtgggttgggacatttgatggggttggttttcataagaaaggtgtgcctgtggactggtctggtatgccaactgccatgagcttatatgcgttctgcttcagtggccatgctgtttttccgatgatatacactggcatgaggaacagaaaaacgttccccacagtgttactcatctgcttcattatctgcactcttagctatggcctgacaggtgtcattggatacttgatgtttgggaaatcattaagctcccaggtgactctgaaccttccagctaaccattttgcctccaacattgcgatctacacgacgttgatcaatccgtttaccaagttcgcgctgctgatcactccaatagcagaggctatcgaagataaacttcatgtggacaagaataagaccgtcagtatcttaatccggactgcgctggttgtcagcacaaccattgtggcccttgccgtgcccttctttgcctatgttgtcgctcttactggttcgtttctcagcagcacggtcacaattttgctaccatgtgtttgctacctgaagatcagctcacggacctccaggaatctgaggttggagctggtagtttgcttgggtattatcatgattggggtgggattagttttggtcggcacgtatagctcactgaaaaagattgttcatagcttttgatttctgaatgatatatgcaccttgaggccttagttcgtttcatcctttattaaaccatgaagactgaaggggatgattgatgaacaaggcctgagtgggtgtaatgtaaggcagaagaaaccctaggcagatactgtagcaaatgaatcgtagacaagccgatcttgcgatctagaataagtcgcttactgagaagtcaaactcgtgtaaatttaatcaaatatatgtaaaaaattactaatgtctatgtaataaacgccattaaat

SEQ ID NO: 21775 - DNA, 164 bp, Zea Mays
gggggggggggggggcggcgtgccgggccggagcccggcggcacgggtgactcgttcgcggtctgttttgtttaagggtcacggcaatgatccttccgcaggttcacctacggaaaccttgttacgacttctccttcctctaaatgataaggttcaatggactt

SEQ ID NO: 21776 - DNA, 907 bp, Zea Mays
gagcttcttcttgctatcaatgctacttctacggttctacagcgatggttctggaagaagcttgcctaggtcttgcacctcacacatggacaaaacctcgtgctttttcccccagaatgtgttgccaaccatccgaaccccaacttttgttttgaacactgcctatgacgtgtggcagcttcaacaaagtgtggcccctagaacagctgatccccaaggtctttggtcaaagtgtaggacgaaccatgccttctgtaatagcaaccagctccagtttttgcaagggttcaggaaccagatgcttgatgccgtgaggggtttctctgcatcaaggcaaaatggtctgttcatcaactcatgttttgctcattgccagagcgagagacaggatacttggtacgcgaacaactcgccacgtcttggtaacaagaaaatcgctgacgctgttggggactggttcttcgagagggggaacgccaagtacacagactgcccatacccttgcgatggcacttgccatcaccttgtgttcaggggagaccactaagatcattcttcagcaccaacaaattcatcagatggtacaaggatcaaaccccaatgggtacagaatggaaaacaggatatagatacagataaggtgcaagtggtcggcttgcccatgtttgttcatcagtgagtcatatgattgatagtgcgaggacctcacccgcgaacgcgcggaggaggcctctgcattagattcacataccgtcatgatatcgattattttcattggaaaagcgtccatgattacgtaccagaacaattgagttacatactcatttcgtgtactgtattaataacactagaacgttacatattcatttgtcctgaagatcgtactacttggcatgagtactcactt

SEQ ID NO: 21777 - DNA, 657 bp, Zea Mays
gagtggctcggttgaagtggcaacaccaacgcaaccacgttacgcaccatagaacatacccgtgagaagctaagacccggccgttgctcaccacagcatcatcgccgcgccgtgctagctcaaggatggagaacaacaggcagcagcagcaggcgccgccgccgccaggcttggagcaggagcagggaggcaggaagggacgacgccgggagaagacgacctcgcgcggggataaaggcttcatcgaaggatgcatcgcggcgctctgctgctgctggatctgcgagatgtgctgcgactaggcacgcagctagcggtcagctagctctccgtctccggcggctatacatacgaaatacgatgagagagctagcctgccacagcttctgcttctgcttctgcaagagagatctgcttaaattattctatcgtccagagctgcagcaacacctgatatgtttgtttggggtgttattagtagggagagctagctcagctttattattgttaataataattctgtgctgtacgtagctatagcaagcatacgtatgtatacacgtatatgtatgtgttttaccgtgacttgaatgtttggaaatggtgatttcattgccttctttttgtcggtggtctttatacacttgcggaccaacg

SEQ ID NO: 21778 - DNA, 774 bp, Zea Mays
agcccgatgcgaaaatgcttgaagcctccaagaatctgggtgcaccgctgaggcgctgaccaccacgcaccacctcaccagatctttcttcctgttgcttcctcggctggtttccttctctcgccgcgtcgcctgcttcttcccccaaccaaagacacgaatcagccatggcgctcgcctccgccacgtcccgccccctcctcggtcgcccccgccggcaccgcgcggccccacctcgccgtttcctcatcctcccccgcctcctcgatccgcttcccccgcggcgccgacggcggcgccagcagagcggccgtctctctccgcgcccccacgcctccagtctgtgaccccaaaagccttcttttcatgtttggaatggagctggactacagcgacgccctcattggtggcggcttcttgttccagaatccaaacgcaacaaaaacctgtgggtgcggcaaatctttcgcgactggaaaggagaccgaggccgcggcaaccacttgcaacaactagagtagagaaatattgttagctaaacgtgatgtggcatgttgtatagcttgctcatgttgaagccctgtggctacaccacagatacataaagaggcatagttcaaaggaattacaccattaccaatggcctaattcagattttcttgtttggtgatcattccgaagtccttaaacttgtggtatggtctctcaaaatgcattgtattttcaggtatccaaacttgtcttgacgtgtcgtccaggcctacaagtactaaa

SEQ ID NO: 21779 - DNA, 1139 bp, Zea Mays
ctcagatgtctggggaggctggagttggaagctgtgctgtctattggtgctcatctaatcccacacccaagaaaggctgcaagtggcggagaagatgctttctttgccaatagcgatgctggcggagtatttgccattgcagatggtgtctcgggtcattctcttatctactgacagatgggcagaaaagaatgtcaatccagctctattctctcgagagctcatgagaaacagctctaatttcctcaatgatgaggcggtatctcttgctaaacctcaacactatttataggcatcattttctttactctatgtgcttgtaacaaattcatgtcacatggaagttgcaggtcagtcatgatcctcagattcttctcatgaaagctcatgctgcaacttcttctattggatctgcaacagtaatcatcgccatgcttgagaagaccgggactctaaaaattgcaagtgtgggagattgtgggttgaaagttattcgtaaagggcaagtaatgttctctatatcccctcaagaacattattttgactgcccataccagataagctcagaggcagagggtcaaacatataaggatgcattggtttgcagtgtaaatcttatggagggtgatataattgtgagtggttcagatggactttttgacaatatctttgaccaagagattgtttccataatttctgagtcgccaagtgtagatgaagctgcaaaagcattggcggagcttgcaagaaaacactcggtggatgtcagattcgattcaccctactcaatggaggcccggagtagggggttcgatgtcccctggtggaagaagctacttggaggcaaactaataggcggtaagatggatgacatcacagttgttgtcgcacaagtgaagacagtagtggtcccagaggacgaggttcagggtggcgacacagaagaacaaaaggggaatgagcagggcgctgcagctgtggttgcatacaaaatgaatgatgaagaagtagcttgagttctgggaccatcctcattttcattctcttcattttacttttctgtgatgactgtattatactgcacataaaggaattgaagcaaaataaatttgtgtgattgtgtctagctgtgcgtatat

SEQ ID NO: 21780 - DNA, 1954 bp, Zea Mays
gtgagcaccgactaggagtatattctgtgccaatgaaatgtctgcctctgaaaaccaggctgctgaagccagaatggacaaaagtgccatgaaaattggcccaactgggaacaaaatccgtattcgtttgccattatcactgagaaagcggttggccgaaggccttcaaaccatgagcacaggattacctgaggatacaacaaaacacgctgctaaggaagtacctgaatatactgatgacactgccaaggctaatttcattgtcccagacctgaatctgacaatcgctgctggcacgcaggataaaagggaaagcatttgccctgtaagaaaagggtcatgtgaagagcgacacacggacattatgagcaatgggctgcctcctgacagcagcgaaacaacaaagaagcaagcatgtgtaggagccatggacaacacccaaagcatggaaccttcaatcacaggagtgcaaagtgaagtggaaaagaataactccattaagaaaccctgtgaacctgctagtgaaaatatcttaagcaagaagctactctatgagacaaacagcaatacctcaaggaagagagtaactgaagaagctaagatcaacaacccaagcaagaacctgaaaacctctgcagtgaagtgtggagaggcaaatgactgtttcctaaccagacggtctgctgatcaatctaatgacaagaaatttagcaaaaaactgtgtagctctgcggtacaagctactgacagctgccagaacatttctggaatgaaacttcctacctctgttggcgtggctgtagaacaaagtaccagcactgcattctcggaggccacaaaagtgtataaagagtttgagaagcaggttaagaggactgtataccttgacaacttgtcttgcctagctacagatggagtcattacgacggctttgaaccagttcggtagtgtcaaacacgttagttttctgaccaactatacagttccatttgacattcccaaatctgcattagtagaaatggaaactgagaaggatgctgattctgtggtcaagatactagatgagttcccattcatgatatctgggatgccaaggcctgtgagggcgaagcatgccacagctgaaatgttcaatgaccgtccatgtaaacctggtataaagttagaattccgttgggtgggccctacagaccctgattatcataatgtcagaaagttcaagtttttgtccaagaggcatgagttggagaacttagcactgatcaagaatgaactgcgagaggagcaacttctcgcgaggcatcagcaggacaatctaaattttcattacatgaagcttgagactgtagacagcatgattacgagtggctgcatcaatcgcctgactcacatttacaacctccgtttcgctgacatgtattgagagtgtcaggtgtacatggacttgttttgacctcggaacatacctgttgggtggaattgagctgtgaacatgatgttacgatctgattaaagtctgcttttaatacttttcggctgttagtgttttttaaatgcttttaggctgttttttaaatgcttttagctgtgaacatatcctagtttggaccacacgtagctccctggttttcggcattgaacaatcagctgatggcgctgtatggatggaattcggactactgtactaagcatttaacaaaggagagcttgggtgctaaagatactgaatattactatatgtctaggcctacttttgtaatggagattttttcccctgttcttgcgcgcgcgcgtgtgtgtgtttgaaaaaatgaacaatttcctgtaaaatgcatagaccattcgtgctcaaacatgcccttagaatgggctgatcagacagacgtcaatatcaattttgtttcttacaatgatgtcattgaataataatagtttcttgagcaaactataataa

SEQ ID NO: 21781 - DNA, 1352 bp, Zea Mays
gtggaaagtaaagctaaagaggaatctagcaaagttcacaacagtgtttagccatgacaaggattcaattccaagggtctggacaggaaaggaagatgttcgtgcaatagcaaaggaagctcgatctgcggctctcaaacttctgtctgtaatggcggccattcgctgggatgacgagccagataggattgaaagcatcctcacttcaacacttctggaaggctctgttgtatcaaagattgcaagtgctgcttctgctgatccacttgcttctaccacttgggaagagattgctccaaagcatacaatgattaccccgtctcagtgcaagtcactgtggaaacaatttaaagcagaaactgagttcacgattacacaagcagtatccacacagcaagctcacaggcgcggtaatagtaaactgcctcctccttgggcaatcgtggccattgctattcttggtttcaatgagatcatggtgcttattaggaatcccatttatctgttcttgctatttgtgggctacttgatggtcaaagctttggcgatgcagctagatgtcagcagagaattccagaatggagtggttcctggaataatctctgtgtcggtgaagctcctaccagcgatacagaacctggtgaacaaagtggcagccgagcagcaagctgagcaccagcagcagcacccgcaccctcaccctcacactcaggccccaggacccccacagccacagatgcagccgccgccgctgctcctgagcccgagaagccccatgagcgagctgcggaggctgcacatgccgcgcagcccgcgcagcccgcgcaaggtggcgtcgccggcgccatcctcgtcgtcgtcatcgtctgccgtgtcgtcccctaggcacgttggcgaggaccagaagccaagaccaggggcagtcggggcgcctgagaacgaggccaccgtcgccgactcgatagtgtgatccacgcaccagccatcgtggcgcgcgtttgactgctataggtacaaggtatggagtatgaactatggaccttctgctgtctcctatttcaatgcattatgtatagtgattatcgttatgcttcagtaggatatcaaggcagaaataatgcaggaccctcttctgccgtgcaatcctttagtttttgcaaggagagggaggggataatgcatagatggacaattgctacctggcaccatttttcagcatatgtatagaaaggagctacccatttgaaactgaaagtcgtaggcattgtttaattaagtgcgctagaaataccccagccgcattcagctctttttatatatatgctaacaccgtaatctaatgtttaaacgct

SEQ ID NO: 21782 - DNA, 1208 bp, Zea Mays
tcaggcactccggcttgccatttccttcccatctcttgccggcccgggcacggtcagacggtcaccatccgcccgtgcggtggctcggcgcttcccgcgcccgcatcgaagccacccacaccatccacgcgtccctctccggctctccctctcatataccgccccttgcctccgcttcgcccgcccgcccgttgccgtagcttccgtccggaaccgccgcggccggcacgcacccacccgctggcctgacccgctccggcgcatgcggcgagacgccgtcgccgccgcgcccacggcggccggcgcctcgccgccgatccctgccaccgtcctcccgacggatgctgttgtcatcgatgtcgagggagagccgcttccggcggaggcccccgggctggggtgccggatctgccacctcggccctgaggacgatgagtcagcggtgccaggttccgaggtgatgctgctaggctgcggctgcaaggacgagctcggcgccgcgcaccagcaatgcgccgaggcgtggtttaggatcaagggcgataggcgctgtgaaatatgtggttcagatgccaaaaacatcaccgggttggaagtgaaaaaattcatggagcagtggcatggccgaagagtggcacacgcacaaactactgaggagagggaaagccattgttggagacagcagcccttctgtaatttcttgaactcaaactggaaagtgcagggtcgatggctgcttggtagaagaacaattccagaagtatggggcacccagtttgacggtctggcatctcagccatttgggattcagaaatctttactattaattatattgctgtgatccttttgtcaatcagcttctttgccggttaactattttgttctgtgtatacgaggatataagcttaaatccgatgagatgcatgagttcagaggaattttcatgtagtttggcagagaataaggtctcacaaatgcattatatttatgtttggcccaatgaagcagccctttgaactgctctgtttacctttattatgagcctggtacatatttctcgaagacctcttgtacttctctttgcttatatgactcttcagtcatcattgctgccatgagagaggttattgtgttctgaaaatgaagagtgatgtgactaggatatatccaaatgtcactctctcccttaccagagatttaggactctg

SEQ ID NO: 21783 - DNA, 2373 bp, Zea Mays
ggtgcctagtgactggttagatttggtatatcaaatcagatcacaggaaacattcagatctcatttaagaaaactaaaacaaaaaacggagaaaaatcaggtgattgcttcctttcctctctctccgttgcccaccacccccaagcccgcgatatattcggcgcagcccacaccttccagcgaatttccgtcacccatctccgcaccgcacccgcaacgcgtctctcttcctctcctggtcctcctgccactccgcctcaacttgctcggctattcccggattgcggctcggggttggtcattggccgtgaggtttggtttgcatttccgttcaagtataaaggaagtagtatttgccattttggcatagcatttgaatagcacaggaacctagaaaacagtgttccagcagtactacgttacactggtgttatactattatagaaaacatggtggatgtggaactgttttataaggacactagtgatcacagcattagctctgaggaagaagatatgcttgtcaggagctgtagcaatctcaatgtgagctttggatatcattgtgattcttatcagagcttttctcctgaaaatgatcatggaaatgacatttctcctaagaacatgtttgggactaatacgatgatggggtcacggaatggctcatttacttgtttgtccggtgctgctattagtgcaaattttacattggcaaatacaaatatttgcaatggtcttattggcgaagaaattttaccagaactagattctccaaactccttcagaaaaattatttcatctccatcaatgtcaagattggactcgttctctacctcacaaggcagtcctgtgtcaactgagagctcaatatttgagatcagtaaaaatatttggaggtccagtgccccaacaactgtatcatccaattttctgactaatacagaggtgaaaatggctggcggagctgctggagaggatagagtccaagctgtgtgctcagagaaaaatggatggctgatttgtgggatatatgatgggtttaatgggagggatgcagctgattttcttgcggtaactctatatgataacatagtatattacttatacctgctggagaatcggataaggcaacaaaatggtttgtacaattcatcagaaagctctcttaatggtctcaaaagtgagttaacactagccatgagaaattcagaaaatgaaggcataaaattttctgaaacatttcgatctggtgtactgaattgcctttctactgctgttgagcaagctgagaatgactttttatgcatggttgaacaagagatggatgatagaccagatttagtttcggtagggtcttgtatcctggttgttcttcttcaaggaacagatctgtgcatcttaaatatgggggacagtagagctgtgcttgcttccatgccatatgtagaaaatggtgctttgaaggctactcaactgacagagacccactcgcttgaaaatcctttggagtaccaaaaacttttagctgaacatcccaatgattcttcagttgtcaggggtaacaaaataaaaggaaagctgaaggttactcgtgcttttggagttggctatctaaagcagaggaagttcaacgacgcactcatgggcattctgcgagtccgcgatttgagcagccctccatatgtttacacaaatccacacacattgagtcacaaagttacagatgatgatttgtttgttgtgcttggtagtgatggcttatttgatttcttcagcaatgatgaagttgttcggttggtttatcaatttatgcatgataatccaatgggggatcctgcaaaatatcttattgagcaacttatactcaaagcagccaaggaagcagctctaacagccgaagaattgatgaggatacctgttgggagtaggagaaagtaccacgatgatgtgactgtcattgttatcatccttggaaatgcacagaggacgatgactgcatcaacttccttgtgaaagaatggagaggtagagagacgggggctatcagctggtaaatttttgtgggttttttgcatacatgtattccaaaatacaattttttttcctgggaatcgcgtggtagtcaataaaaccaaataaaaatgtatatattgtttcgaaatttgggaagtgaacagaaccttttgttaaatcacagggtgcacctgggttcgtttgacctacttctgtacatgaatcaaacatggaggctcgtacttgagctaatgagtccatgagcagagtggtagatcgtttcagtttccgtctgccaattttttttctctgctaataagtatgtgctgtttgtgttgatcttagaattatgactcat

SEQ ID NO: 21784 - DNA, 2395 bp, Zea Mays
  misc_feature (2394)..(2395): n is a, c, g, or t
aatcctattttctcttaattcgccacaaacccaaattccacgtcgtttcttcatctccaatcccatcttcatcttcctcctagcgccgggccctctccatcttccgctcccccctactcgcgctcggcacgcaggcggcagcggcggcgctcaggttcggtctctcagcgacggcgtcagcggcttcccctcccgcccctcgatagttgcctcgcgccctcgactccggccctccgcacacctgccggtgaccctgcgtgcccccctctctctcctcccgcctccggtggatcgtcaacggcgcccgcccctgcggctgcgccgcgcctggcctgagggcagcgggagccagcagccgctgttccaccaaggcggtcgcgcctctttgggagcgcttatgccagccgtcctctcagcacttcagcgcgctgaagcgtgcgactgatttcaaccctggatctcgaggatgcgactctagtcactctacactgcaacaggttgtaggaatcctactgttttgattaaatcactaccgcatcatcaaatatggaagttgatgatgacgtggaggaggatgacatagattttaaccctttccttagggaaggatctccgtctgagacctcatcaagccttacctcagaagcagaatgcgaggaacatagttctgaaaatcaaccaagtaaccatacatatcagcagaatactgtagttaatgaaaatacaagtgacagtgcacttcctcaaaatagattgtcgtctcaagatgctgttaacgaaatgtttccagaagaaacgtctacccaggttaatattgagaatgatggtcacttgaatggattggaaaaagacgttttagcaagcgaagctgcttgctctccaacagtgcaagaccctcatcatctatctctcgaaattagtgaggaagatgcaatttgcaaacggacaagggcaagatactcactagcaaactattcactcgaggaattggagacctttctccaggaatctgatgatgatagtggtctgcaaaatgttgatgaagaagaggaataccgcaagtttcttgctgctgtcctgtctggtgtaggcaatgacacacaaacattccagggggatgaaaatcaagatgaagatgataatgatgcagactttgagctcgagattgaggaggctctagaaagtgatggtgatgaaaatgttgagaactatcacaacacaaatcctagaaaagagaaagatgtccgtaggcctcagactaggcagaggcggccattaactgggatgtctggggctggtagtgatcaccaggaatccaataaaactcatttaagaccaattgtgccatatattccgtctgcattggtgactcctgcgcatgcttttggatggcaatatgctaaccagaatgcctttttcccttcatccttggtttcactaacacgtccacctttagcatgtggatttacttatcagcaactcgggcaattgcatgtgttgatatatgagcatgttcagctccttatccaaacattttccctatgtgttcttgattcatctaaacaagatgtggctaataatgtcaaaaagatgatagttgagttggttggtgctcgtgatcaagcattggccaggagctctcctcaacggcatatcttctttgaaacccaacatctctcatctagttttgtttcttctgataatttggaacgccaatggattccgttaatcaagagtcctattatatccgtccttgatgttgcaccgcttgagttggtcctcgactatttaagtgacgtcgcaactgctgtcgtgaagtatagaaaaagtcatgtggatggtactgctgacaaaacccgcaggaaagagcccctgtttccttcagcagcgattaacagttgcaaacaagtgaataatgtttctcaagatagatcaaatggtgtgcctacagcatcacctccatctgggcagttgcagcagaagaaatcgttggctgctaccctgcttgagaatattaaaaaggatacaattgctcttgttcctgctgacattgcaagattagcacagagattcttttcacttttcaattttgcactctttcctcataagtcacctccttcacctatggccaatagggttcttttcactgatgcagaggacagattattagctctaggaattctggaatataataatgactgggcagcaatacaaaagcgctttcttccttgtaaatcaaagcatcagatatttgtgagacaaaaaaatcgtagctcctccaaagctcctgataatccagttaagggttcaaaatttaatattatggtcaaggtgtccattgagttgcatagtactgtaacaggttagcagttcatagtaacaaattgtatgttnn

SEQ ID NO: 21785 - DNA, 1850 bp, Zea Mays
tttctatcaacctaaacagtaagcgcattcatgaacatctcagattatttgaaggagactgttcgtgatacatttagatttgtcagtgtcagtccaaaaggggtcaagtttctctctactgctgataaaatagatggagcaccactggtatttcagctgactgcagagatgattgaactagaggagcacggtagttcacatcataaagaaggtggtttgaatcttgtgccaacattagaatctgaaaaattttctgaggatgaatcaaaactctatcaaaggctcctgaatgttaggatgaagattgctcaagatattggcactgctccgtatgctgtatgtggcgatcagacaataagaaactttgcaaagatgagaccttctactggagctagacttgctaatatcgatggtgtcaaccagcattttatttcacgtttcagtaacattttcatccaaaatattgcggaattgtcgaaggagttaaacctcccgttggataattcaccatttccaccaccaccaccaacaaatccagctgcagaaaatattgctggtataccaaaacctgtacaaaacaatcttcctgggatcttgggtgatgcaaagctgactgcatgggaattgtggcataagcaggagtactcattcctgaaaattgcttatttccgcagagcagtgccaataaaagagcaaacagttattgcgtacattcttgatgctgctcgagaaggatgtgagatggactggagtaggttttgcagggaagtagggctgacacctgatatagccaccgcaattcgtcttgcaatctcaaaggttggatcacgtgagaaaatgaagccaatcaaagaggagctcccagagaatgtaacttatgacatgatcaagacattcctgactattgaggggtgtggattgtcagagcaagtctttggtaacggtaccgctgacggtgtctctagtagaatagcagagtcaccaatatcttcctgccatgcaagtgaagcaggcggaaatggtgtcccagcagcggcagaggccagtgatgcaaacccttcagcaaagagaggtcaaactgtttgtgctgaggagccagcaacaaaactgcaaaggacatacgagcatggagctgagttaactggcacggcgactgctactgtagattctgtgctagatctggttgcgagctgcaatggggtatcgctggaggatgttgccaagcacttcaagggatccaagagagaatcggtcctggagatattggagggccttgaatctgaattcacaatttacaagaaaaacgggaactacatggtcctgtgacaaacttgcccgcgtagtctgggaaggggatatgcctcagctgtgtgtgtatatatatatatctatacgatggtgggtgacttactgactttggactatggtagcaaggttgttggctggtgtgcatgtgctcattttggggattgggcagaactagcagatgtacgaacgtgtgtgtttggagctgggatcctttctgtcatctcgcatatgagtatcttggactaattgaccccgcgtattttcgttgggttttgatgcgttcaccctactcgttcaacagcttaagatcaggtttgactcctattgcaattttcctacgtgtccatttggagcaaattatcaaaggttttagaaccacacagaattcctatagaatgccttaacaattcgtaagaatttcggaggaaacattccatggtaaaaacttccgccacagatatcaaccaccactcttaccatacattttctttgctccgatgatattttatgattattacggtctagcgaaatcacgtgatgcc

SEQ ID NO: 21786 - DNA, 536 bp, Zea Mays
agttttggcttcccctccgccactctcgagagggccacacacaaaaaccccaatgcgagcgcccctggcttgtcggcgtcgcctccttcagccaaaaccctagcttgcatacgcgcccgaacaaagcttcgtctgcgaggggcgtcctcctgccgccagaagctttcaggagcatcagcgatggtgtggttccaatgcgaggactgtggcgagaacctcaagaagcccaaacttgccggccacttccgctcctgctccgcgtacaagctgtcatgcatcgattgcggcgagttattcagccacgacaccgtgcaggggcacacccagtgcatctccgaggccgagaagtacggtcctaagggacagaccaaaccatccaatggtgcacagggtaaggcagataagccaaagccaaatgcagatgtcgatatcaatgttgggctgtcgacacggcctccttggttctgtaggagcttgtttagatatttaggaactgtgtacttatcatggtttttaaagcggtaaggcggtccaag

SEQ ID NO: 21787 - DNA, 1781 bp, Zea Mays
cccacccggtctccagaacagacaacccgtccttctccttcccatcggctccacacaaccagaaggttcttcgcttcactctgccctgcgccgccgccaacgctgcagccgcagttgccgcaggcgggaacttggacgtgctactcgcgactgctctcatctgttcccgcgtaggattcgttcacaatggcccgtgtgtatgtcggcaacttggatgcacgcgtgacttccggggaactcgaagatgagttccgtgtgtttggagttctgcgaagtgtttgggtcgcacgcaaaccacctggttttgcatttattgattttgacgacaggagggatgcagaggatgctattcgtgatctagatggtaagaatggatggaaagttgaactatctcgtagcaccaatggtcgtggcagtcgtgatcggcatggtggatctgagtcaaagtgctatgagtgtggtgagactgggcactttgcacgtgaatgtcgtctgcgcattggctctggaggtctaggcagtggaagacgtcgcagcaggagcaggagccgcagtcgcagccctagataccgcaggagtccgagctataatagaaggagctatagccctcgttatcgttctccaaggcgccgtactccttcaccggctcgtggacgcagctatagcaggtcgccatagtacaactgtgacaaatatgcatctccctcgttaacggagtaatgatggcagatactggtgtagcaggagcttggcctgaagcccgtgcctgattcttctctgtgtgaggacttggttcttggtttggctgtggggaacaaatttggaactgtcgtcaactgcatgacttcagttcaggcatgttctgcttaaacgactcggccaactacggctctcagttgtagtcttcatggttttgttcctccattcttggcacgtccttatctgcaaatgaatgtcaaccttccattactatctgcctgcgatgtttcatcatgaaattcttcaccaaagatgctacttcgtcacaaattagtaacattctttcccccatatagttgatatggtttgagtgtactgagcactaacaattgcagctcatgaaaataaggcccttgatttttgtcatagaacaagagcggctattttaattgcagcactcacatgaaaataaatctactctgcatgccggggattgaggcgactgaagtgtgagccttcagctgcacgtagttggccatccaaggaacctagtcaggctgatttcagcaagaggcgcagcctacgactgaacttggttttattttttgtggttttgattcttcacttcttccttgtgttctgccttcactgcatcttattggtagtggtcgaataatgcttctgtatgtggtaaatcattcttggtacaatggctctcttttttctgctgatcaatgtatgtaggaatttctgatagtcgccgttaattgtagtataaatatgtttcctctgcaagataattgtaattatatgtgaatactctcagaaaacatagatttgaggtataatctgctcttggcaaatgattttttttaaaaagcatcattctagtgcccctgcagtcttgttctcaatgcttcctttgggcaattatggactacggcatgtgcagtagaggtttcgtattgcttggcttcatgttgcatttttaggtcacttttccttatggagtgatgaatggttcctgttgctcttgcattgcatttgcgtgtcagaggatatgatacaccaatttaatttgg

SEQ ID NO: 21788 - DNA, 3127 bp, Zea Mays
atgctgcagatgctgggcttccgcgggggaagccccagcaccggcgacgcgtcccccgccatcagcggggacggcggcgcggccgcgcggccgctccgcctggtgtactgcgacgacaagggcaagttcgtgatggaccccgaggcggtggccgcgctgcagctcgtcaagggccccgtcggggtcgtctccgtctgcggccgcgcgcgccagggcaagagcttcatcctcaaccagcttcttgggcgaagcggcgggtttcaagtggcttcaacacatcggccttgcaccaaaggactttggatgtggagtgcgcctttgaagagaactggtctggatggaactgaatacagtcttgtgttgttggatactgaaggaattgatgcttatgatcaaaccgggacctatagcatccaaatattttccttggctgttttgctgtcgagcatgttcatctacaaccaggacttttatctggatttggcagaagacaacagaaaaattactccacgggattacctagagctagcattgaggcctgttcaaggtggaggaagggacatatctgcaaagaatgcgatacgggactccatccgtgcactttttccggacagggaatgttttacacttgtgcgacctgtgaacaatgagaaagatctccaacgtcttgatcaacttcctattgctcttgaaacatatttacactttaaacagtttgatggcatttacaaattatgtctgtcccttcatgacctgagtaatttccgtccagagttcagatccggtctggatgctttcacgaaatttgttcttgaccgaacaagaccaaaacaacttggagctactacaatgacaggtcccatccttgctggattgacacaatcgtttcttgatgctattaataatggtgctgtccctacaatctcttcatcatggcagagtgtggaggaggcagaatgccagagggcatttgattctgctgtgggcacttacaattcttcttttgaccataaaaaacatatagaagaggattctttgagagaagcacatgaagatgccatgaggaaggctatcagtgcttttaatgtttctgctgttggtgctggaagacagttagagcatatagatgctgaaaggaacgccctgagattgaaatgcaattcaagcgatgataagttggcattgctgaggaagcagcttgaagcaagcgagagtcacagagctgagtatgtgaggcgctatgaggaagttctgaatgataaacagaaaatttccaaggattactctattcgtataactgaacttcaggccaagagtagcaagttggaacaacggtgcttgagcttgtcttcttctcttgaaactgcaaaacgagaatccaatgattggaagagcaaatatgatcatggtattttgcagcaaaaggcagatgagagtaagttaaaatctcaaattgcttccctagagtctagggtgagtatcagtgagggtagattatcggcaacacgtgaacaggctgattctgctcaagaggaagcatccgaatggaaacgcaaatatgaagttgctgttagtgaggccaaaacagctctgcagagagcggcggtagcacaggaacgcacaaataagaaagtgcaagagagggaagatgctttgagggtagagcttgctaaccaactatctgagaaggaagaggaaattgcaagattacatgcaaaacgtagtcaaatggaaattcatgctacaagtttgatctcgaggcttgaggccactgaagcgaagtcgaagagccatgagtctgattcgttggctttgagggaggagatcagattactgactgataacctggagtctattagaagtgaagctctgtcacgtgagaaggaagttgggatcctggaacaggaaaagaaccatcttgaggagaagtatttgtcacagtgcaaaaagtttgatgagacagatattagatgcaaggaagctgaaagggaagcaaaacgagcaacagaattagctgatgtagctcgtgtagaagcttctgctgctcaaaaggataagggggaagctcaacggctcgcaatggagaggtttgcactgatagaaagaatggagcgacaggttgaagctctagaaagggacaaggctaagttggtagaagagattgagagacttcatcagtcagagaaggatgctgtgtccaaggtcgcattgcttgaaagaaatgtaggtgagcgggaaaaagaaattgatgagatgttgaagcagaacaaccagcaaaggtccagcacagttcaagtgcttgagagtctgctggcaacagaacgtgaagcacgtgctgaagccaataagagggcagaggaactgtcgttgatgttgcaagcaactcaaggcaaactggacatgctccaacaagaaaccacacttgatagcaagctcaagacctctgcaaggcgcttaaggggtgatgctacagagtctgtacatgatatggatatcgatggggacaatgggaggcgtcggaaacggtcaaaaagcacaacaagcccgttcaagaacaatcacacagaggatggcggttccgtatttattggcgaagatacttacaacgggagtcagcaagggacagaaagcgaagactatactaaattcactgtgctgaagctgaagcaggagctcaccaagcacgggtttggtgctcaactactccagttgaaaaatcccaacaagaaggatatcgttgccttatatgaaaagcatgtcatcggcaagtagttcctcggcaatacttgtatttatgctttatagacttccctctgtagcgttgaaactttaattgacacgatcggattgaagcaaacaatgcatgtaacttagtttaaatctctggtctgtgtattgcaacaatggtgcagttcattttagcatgcatcgtcggcaagtttgtagttaggagtcgtgattgaaatgtttgtctttccaatcccggcacaggttttcttgtaatgctatgacgacaatctattcggattccatggttttgtggtgtaattttatgccatcgatcttttcagattctaggcagtgttgtactgttatggctgacagtccctatccaatttgttaataa

SEQ ID NO: 21789 - DNA, 2769 bp, Zea Mays
gagaagccgaaatgtaccccccacggccggcggcgcgtttgccaccgtccagttccatgtcggccaccgtgttctttctgcccgcaaatccaagctcgacggctagtcccgctaacactctccggcaacttacgccggcttccacctccggaaagctccacttcgcggcgttcccgctccgcctcccccgccatgcctgcgcaaggacctatcgctccgccgcattcgggaggggatcgcctgtggccgggcgtagagagaaggactactacgccacgctgaacatccgccgcgactccacgctccaggagatcaagtctgcctaccggattcttgcccgcaagtaccatcctgatatgaataagagtcctgaagcagaagaaaagttcaaggagatcagtgctgcatatgaggttctatctgatcaagacaaaagatcattatatgatcgctttggagaagaggggctcagcggtgactacagaaatggagatattggcacacatgggattgatccatatgaactcttcaatgctttctttggtagttccgacaaactttttggggatagtatggggtctgggggatttcattatagtgcagaagcaaaggacaatagggcacttaacatcagctataatctgctcctttcttttgaagagtccatcctcggaggcaaacgtgaaatcaatgtttttcgccatgaaacatgtggcacctgccatggaactggagctaaatgtagcaatgacattacagaatgcacccgatgcagaggtcaaggcaggttgatgaaaactcaaaggacaccttttggtatagtttctcagatatcttcatgcttaaattgtgaaggcagcgggaaggtaattactgaacattgcacagaatgttacggttcgggcagagtccaaattgaacgcattatcaaagtagatatacctggaggtattgatgatggctccaccattcgaattagtggtggaggtaatgttgataagcaaaggggtgcaagtggtgacctgtatatatttgttcgcgttaataaaaaacaaggcatccacagagatggtctcaatctgtactcagatgcttcagttgattatactgatgtgattttaggtaccacagtgaaggttgaaacaatagaaggactcaaggatcttcacattcctcctggcacccagcctggagagaacttaaaattttctcagctgggagttcccgacattaagaagcctaatgtcagaggagatcactacttcatgataaaggtgaaaatcccgaagagtatcagtggccaggaacgtttgctagttgaagagcttgctgcactaaagaaagctcagaatatctcagttccagaacctacaaagatagaaaattttcgggagagaaaccatcatccatctgcaaagagaagatcattctggggacgtgtctggaattttttcagggatgataaaggtgataaaagatttgcttcaatcagtgtgcaacctattatcccaggatggaattcttgccgaggaactgatacggctgtccccttgctattaaaaggattcctcatgaccgcaatattcttatttgtaatcagaagtaaactcagcttcgtcctgggaaaagaatccggctttgcttgcagtgtatggtatccagacgcagcagtacagaagacacctgcagcaattccgagttttgacgaaagccacatgaaagacatgaagaaacatggccgtaggctaatgtacactgtatgtatcttgtctgcacaaagttttgtaaccatcccggcttgatatcgtttaacgattttgttgcaacataattcataagcactgaatttatgcaaacaacagttctgacgcgagacgaattggaataatcacaattcacaaacacaacaatgctcctattcacaaaaaaaatgctcctatccatacagttcaaatgcctctgtcatgttcaaatggaaacgattcgtttcgctttgagacgaagcagttcaaatgcctctgccgtgttcaaatgaaaacgattcatttcgctttgagacgaagtagttcaaatgcctctgccatgttcgatcgatttccagaccgagacaagcgccgcagcccgcagcagaaggctcgcgacatcagctcgagccagctgacgggatccacacggtgccatgtcttcccggcggccgtcgcatccgtcccaccggaatccacggcgattcccgtccgcctgctatcttctagtactcacccttgccctcctcgtcgtctccgccgccgccaagtcctcccgccgccccatctccgacaacgagatccggcagaagaaggaggcctgctacaccgacgtcgagaacgggctgtggggatgggtgtgcaggtactcgccgacggagaaggagaactgcgtgctgcgctgcctctcgccggagtgctacgacctcatatacggcggggatccgcttgaggaaggggagttggactatgttcgaagccaggagtacaagtattgtatgcacaaatcatcccttggagaaagcttggatggtgtgaagggatccttcagctactcatgaaggaatgagaagaaaaaggttctgttagtctgctgtaaattttatttacaatcttgaacagacatgcatctttttagataatggaattgtaattccagactttgctttttctcaaagcatcaccggtgcatcatcttatattaaacttacaaatgcaaattaaacattggattcatttgttggcc

SEQ ID NO: 21790 - DNA, 1532 bp, Zea Mays
ctggcataaaacgaagagtttgttttggggcattggatatttagcacaatgggctccttgaagcactatctgggattctagacagattaagaaatcaaaaccattttcctaaaatgtgaaactatccatgccactgttgtttttgtcagtcacaacaacagtaagtgagctgtcctccaagcgtgatgatgaaccagataacaatacagaacattctgaaacaaatgaattggcatcaacttctggcacaagtgatgctgctgatggcacaaaggaaatcgtacaagagaactggcttgtgttacttttcagggagcttgagaagcaaggcatcactttacccgagaggtttactgaagatgaattacgcagattttatgttgctgcaaatggtgacttttcaagtttactctcttcggttaagaagacaattcgttggagggaaacgtttcacatacttacactgcaagaacttgataaatggtctcacttagtcttttggcatggatttgacacgatgcttcggccttgtttagtaattcgtcttggacttgcatgctccagcataccaccttgtgatagaccccgttttgggcaagcagtagtttctcaaattgaccatggtgttgtaaatttgaccaacaaagaagattcaagaattaccgttttgctggattgccatgggatttctccattcagatttccaatgcaaatgatgaggtcatttgtcactgtagctcaagaaaactacccaaatcgtcttggagtattgtttgttgtccgccttcctccagttgtcagagttattgcacagacatttcttcaagttttgaaaccatctacaaagcagaagttacgttttgagggagattcatacaagaagacgttggcggagttcttgcaggccgtgccagcgtttctgggcggtaaatgcagctgcccacgatgtgagaagcctcgtaatagttcagtggtgcaggcaggggaagggagcaagaaccaggctcgcttggtcagcgttgatggcggatcacctgtcgtggacttcgacttcgatgaagaagagatcccatcaccttatagctgcgagaacgccatcagggctgcgataatctgcctgctgatggtgtgcatcttcatcgcgtttctggctgggatgaacgaccctgcatccgttccgcccagtgcctgagagctatggaatcgcctagtctcccatagtagagcttagattgtcagttgagtatatacacatctgtgttgctatttaggatgctactagggtgttgtattccctggcagcttctttctcggttgtcgtcagatcgccttctctcctaatgtgagcggagcagatgaataaatatcctgtgtgtggcaaatgttggttagcagttcaattagcccttcgatagtgtctttctttgcgtgcttgctgcagtagggcagtgtgatttctcgttagtgtacgtaaactcaaagttttcaaccacaaggcaacaacacactgactctagtggtttcagctcttt

SEQ ID NO: 21791 - DNA, 1570 bp, Zea Mays
aacaactgtttgttattttcttctcccgttcacttctctttggcccgaaaccgagagctagtgcttgattcggtcgtttttgggcaccgaacacgttcttgggaccgccgccgccgccctacttccagtcccagctgctcaggtctccatcggcctcgagccctttgccggcgacgagcactcacaacaccagtcaggctgagcagcagcagcagtggtgtgttctggcttgtgtgggacctagaggaagcttacacaacagggaagagtattgtgttagggtgtaacaatgtcttcttcaatggaatcgtcataccttcctgctacaactgagtcattagcccaagctcaagaggctaaggatgcttcagagtccatttcaatcctttaccgtgtcattcaggacccatcttcttctgctgatgcactgagaacaaaagaagttgcaattacaaatcttacaaactacctcactaaagaaaacagagctgaggagctgcgtaatcttttgacccagctcagaccattttttgcagttattcctaaggcaaagactgcaaaaattgtccgtggaataattgatgctgtcgccaagatacctggaacatcagatcttcagatttcactctgcaaggaaatggtagaatggacccgtgcagagaagcgtactttcctccggcaacgtgtggaggcaaggttggcagctctcctgttagagaatcaggagtatactgaagcccttaccctgcttactagtcttatcaaggaagtcaggagacttgatgacaagttacttcttgtggacattgaccttttggaaagcaaacttcacttctccctgagaaatctgccaaaggccaaagcctccttaactgctgctagaacagcagcaaatgccatttatgttccacctgctcagcaaggcactattgatctccagagtggaatcctccatgctgaagaaaaggattacaagactgcttacagctacttctttgaagcatttgaagctttcagtgcactggaggacccgaaggccatctttagcctgaagtacatgctcttgtgtaagataatggttaaccaagctgacgatgttgcaggaataatctcgtctaaggctggcctaaaatatctgggtcctgatgttgatgctatgaaggctgttgctgatgcatactctaaaagatctctcaagtattttgaaactgcccttcgtgattataagtcccagctggaggaggaccctattgtccacaggcatctttcttctctgtatgatacactgctggagcagaatctctgcaggttgattgagccctactcaagggtggagattgcacatatagcggagatgattgaattgccgattgaccatgttgagaagaagctgtcgcagatgatcgttgacaagaaatttgctgggacactagatcaaggtgctggctgcctcattatctttgaggattctaagaccgaggaaatcttccctgccactctcgaaaccatttcgaatgtcgggaaggttgtggacagcctttatgtgaggtcggccaagatcatggcttga

SEQ ID NO: 21792 - DNA, 86 bp, Zea Mays
gtcatctagctactgtagttgcccatcatcaaagttttgtagagtggacatattgctaagaatctgccacattatgtttgcttgag

SEQ ID NO: 21793 - DNA, 750 bp, Zea Mays
atgacccagggtctcctgagggacctatccaaatctcctgtacctcttcactctatacaacaatcagctccaattctaaatggtggtaacggaagtgccatgtctgcgcttggctctgagctagagaatgctgcagcagccatgggcaatggccacgagccataaggtagtggtgtttagccatgtgctaaagccacgagcatcatcgcgcaatgatctctgcagtaggcggtcagttggagcctgcttagatatatggaatcctgcgcctgtaggttttaagagctgcgacagtgttttgtcccgtgtagtcatgtttgcagccgtcgcagctatagcaagtttgtttcttgtcttgagtcgtgactgttaagaactgatgaagttcattacttacgtgcgtgtagttatacttagatatgagatgttctagccatgcagcaacgttttctatcaatgtcagtaattagggagcgagcgtttgtctcatggattgggcctcgaaacaaagaatcgacgcccaggagctaaactacagaaacatttcagctagagtaggtctggaatgatggaagagaagacaacaatgcaaatgaaattgataaaataacttaatataatatgggacaactatggttcaaatgaaaaagtatggttgacttagatttatgagacatgagatcttacatatataatggtcttgtttagaaagcttgctatacaaacagtgttaatggttttttactatgc

SEQ ID NO: 21794 - DNA, 268 bp, Zea Mays
cggatttcgaggtggcggctccgcggctacagagcagcaccggtgagaaattcccattcgcccatgacgccctgagctctgattcgacttcgattaccatccccacatgctgacgaatcgatcaagacacatccgaggaccccgggcgacccccagctatgaggcatcgatggcggccatctcctgcttctctctgcgctcccggatctccctctccgacctttcctctctcccgtggcggtggatgcccgttttggtgacaagagct

SEQ ID NO: 21795 - DNA, 1879 bp, Zea Mays
gtttggtatattgttggaaagaaatgtgaagaagactatattgttgctagaaccgaagaggaggcgattgcagaagctcatgaaaaatatggaaaatcagttgaaatatatcaagaccctgatgttcttgatacttggttctcaagtgctctgtggcctttcagcacgcttggttggcctgatctttccaaggaggattataagcatttttatccttcaactgttctggagacaggccacgatattttgttcttctgggttgcacgaatggtcatgatgggaattgagttcacaggatcagtaccattttcttatgtctatctacatggtcttatccgggatgctgagggtcgaaaaatgtcgaagacattagggaatgtcattgatcccctagataccatcaaagagtacgggacagatgctttgagatttacactatctttgggcactgcaggccaggacctcaatctctctacagaaaggttgacgtcaaataaggctttcacaaacaagctgtggaacgcagggaaatttttgttacagaacttgcctgataaaaatgatgtctctgcatgggatgtcttgttgtctaataagttcgactcagaagcatcactccagaaactgccattgccagaatgctgggtggttacaggactacatgaactcatcgataaggtcagcagaagctatgataagtttttcttcggagatgctgctagagaaatatatgattacttctggggggattttgctgattggtatattgaagctagcaaaacacggctttaccactcgagtgacaagatcgctgctgctacagcccagagtgttctggtgtatgtgtttgaaaacatactgaagttattgcatcccttcatgccattcgtcactgaagaattatggcaggcatttccatacagaaaacaagcacttatggttactccctggcctaccactgaccttcctaaagatttgaggtccatcaaacggttccagaatttgcaatcattgataagaggaatcagaaatgttcgagcagaatattctgttgagccagctaaacggatatcagcttctgttgttgctactgcggatgtcctggaatacgtatcaagggagaagcaggtcctagcattactttcaaagcttgacgttcagaacgtacattttactgaatcagcaccaggcgatgcaaaccagtcggttcacattgttgctgatgagggtttggaggcgtatctacctttggctgatatggttgacgtgtctgaagaggttaagcggctctccaagcgcctctccaagatgcagtcggagtatgatgctcttgttgcccgactcaattccccaagttttgttgaaaaggcccctgaagatattgttcgcggagttcgtgaaaaagcgtctgaggcagacgagaagatctctctaactaaaaatcgtctcacttttctgcaatcaaccattaccacttaaatacagtaatccacggggactctaccaggatgccattttgatcgatgacgcaggacaaaactgattgttaatagtttttggttgaaggatatgatagattggcaacgaagttgtgccttgtccagcagaaacacacattctttctagttcatatctgttgtctcttgaaacttaaaacatacattcggctaggcatataatttatattcctgacttatggttttagagcctttcgggatgcccttagttgaggtaaattttgttctgcctctgaagttttgctgatgccattgttagtaatattcatattttgtaaggtgggcgcacgttattagatatgaatgatctgtaaggtcggtgcacatgtattatcaatgactattgtttcgggcgaaaataa

SEQ ID NO: 21796 - DNA, 1762 bp, Zea Mays
ccgaacctttcacagccgcgttattattctcgtctccagccccccacacgcgctcccctccaccgtccgccgcgcgtccccaccggcggccaccgccaccggcccacctccccggcgccccttacccttctttggcgcgatggtaactcgcggcggcggtagccagtcctacggcttcccgatctactgcgccgcctggctcccgctcgcccacatcatcaagcccgaccctcccgctgccgaggcggatgcggatgacccctcctcctccaccccctcgcttccgatggctgtcctcgggggcggtggcggggagggccggagcggggtgccgaacaagctcgtggtggcggccctcgccaccggggaagaggccgcgccggctctctcccccgatacggtggtcgaggtgaatagtgaggaggaggtgccgtacagaatggccgtccacccgcgtggcgatggcgtgttctgtgccttccccaacggctgcaggttgtatcgatgggaatcacaggaaggagagggaccacagaggttggctttggagccggaccaggatgctttagcagagctgaaagatgtcggtttgcagttggccgtatccttcagtggagaaggttcaatacttgctattggtggtgaagatgggtatttaagagttttcaactggcctaccatggggtctgttctcacagaaatcgatactaaaacatcgattaaggatcttactatcaggagcagtggcccatgtagagtgtgggatttgcagtcatctgaagttgtagccagtctgccaagagaaacaggggaaatatttggattctgcagattctctaataaggctgacaacagtcatgtcctatttataactgtgatggaaggcgattatggaaaaatagtgtcttggaatactacctcatggacgagaaccggatcaaagaaaataactcgtgaggcaatttcagcttttgctgtgtcacccaacggtgctcttcttgcaattggaacaatagaaggaagcatcatcgtagttggctcaaaagacatgcggacacttgtaacagttaaaaaggctcatcttggtattgttactacgctgaccttctctcaggattcaagaacattgctgtcaacttccttcgactcttctgcaagggtgacatctgttgggtctccaaagagtaatggaacaagcatatggcccatgctactagttgttattcttgcaattttggtgtactactgtacgcagcacaaagaagacattttggcaatgttgcagcgttgagatagatttctgttcagcccctgactggtctactctgctggacgtattattagtgttgcttcagtgattgaagaaattttggacttgggccaacttcattattctctcaaggacaaacaatacagcaaaaggcactgagccctgttatgttttgtagtaaaaagggtaatgtacttactcatgttgtcgaagtttttgtaagttgatggccgcaagtgatagacatatgtggcaatgtttcttcatgctgcacttgtgaattgcaagatgttcgccccaagagtccaatatagagagttcagaaacaaatttttttggtgtgcgaaacaatttattatgtatgcgtaataaagctgtacaaagaatatctaaaaatgcagatagcttctgggtgcttatacatgtgatgaccaattattgtttggatgacaaaagggagttgtaacactatgctctacatctgtgtgtcgg

SEQ ID NO: 21797 - DNA, 1495 bp, Zea Mays
aagctcaaggataatcatttactcatgattgtcgtatttgctggtggtgtcgacacctcggcaactgaaacaaagggaaccgtgttgatccattccgctgagcagctagaaaattatgctaagactgaggaagctaaggtggaggagcttatcaaagctgtcgctgactctggtgccaaggttattgtcagtggagctgcagtgggtgacatggcacttcatttctgtgaacgttataagctgatggttctgaaaatcagctcgaagtttgaactaagaaggttctgccgtactactggggctgttgcaattttgaaacttagccaacccaatgcggacgaactaggatacgcagattctgtttctgtagaagaaattggtggtactcgggttactgtcgtcaagaacgaagatggtggaaattcagtggctactgttgtcctgagaggcagtactgacagtatactagatgatcttgaaagagctgttgatgatggcgtcaatacatacaggtcaatgtgcagggacagtaggataattcctggtgctgctgcaacagaagttgagctggcaaagagattgaaggagttctctttgaaggaaacagggttggaccagtatgccattgcgaaatttgctgaaagctttgaaatggttccaagaaccctggcagaaaatgctggacttagcgcaatggagataatatcctctctttatgctgagcatgctagtggcaatgcgaaagttggcattgatctggaggaaggcgcctgcaaggacatctcgactttaaaaatatgggacctctatgtcacaaagttttttgccctaaaatactctgccgatgctgcttgcacggtgctgcgggttgaccagatcattatggcaaagccggcaggaggtccaagaagagatgcccagcctggtggcgggatggacgaggattagtttgattatagttgttttctttgtatcacgtatgtgaggtttcagagcagagatcatactttatcttggcttttggttctgtagaaggtttgggtgcctggagttcacttttggaaggtctgcacggttgcgcggatatcacataggcaatttgtatgttttttcctggtgtattgcggtgcggatgtatcaaatgattcattacaggggccgttccgtcagttcatcacaccaactgagctcttgtaatgtctcgtttggttgggttgagtactaaagattagtcatttcattttagtccttaaattgccttaaattgccaagcggagagactaaaataaggactaaactgtttgtcttagtctggagtaactaaaagagactaaacaatattaattccaccttttgtcatcttttcttttatgtcagttatattgatggcaagagaatgctaagggtattttagttctgttatgatttatttaatgagttttaaatacgtaggcactaaactttagttttttaattaaattttagtccctgtatt

SEQ ID NO: 21798 - DNA, 3564 bp, Zea Mays
cttcgagcagccgccttcgcttcctcgagtcgatgaaggaattgctcgaatcgaggcctggattgacgggtgtttgaggctcggtgaccgaggagcgccgcttcagatatgaacgtggtgggaagggttgggtcggtgatctcgcagggggtgtactccgttgcaacacccttccacccatttggcggtgcggttgacattatcgcggttgagcagcctgatggttcgtaccgcaccacaccatggtacgtccgttttgggaagttccagggcgtgctcaagggtgctgagaaggtcgtcaccatcagagtcaatggcgtcgaagccaacttccacatgcagcttgacaattccggccaagcctatttcatgcgtgagcttgtgcccggcggtgaagattctggaacaggttcagacgacgaaactgtcaatgagcctgaacctccagcgcgtagtaagagtgatggggaactttacattggtcctagcgacagactgggtagccaagagctcaatgtggagcatcaagagaagcaaactagggatgagtttgagtcatatgatggttatggtaggttagaggaatcagaagatttgtcaacccaagcggatgggggaaattcggaggtggttctagttagtgtggacggacatgtgctcactgcacctatttcttcaacagaggagggtatggaggatgtgcagttatgcgaccctcagtttcatttgggacctgggcagagctctagtggggagttcacccgaagtggcgaggtctgggatgctgacattttagatggtttatacatatcacaggaaaaggtaaagattaattctggacatcagtcagaggttttaacagagaatggagaggtaccggttgaaaaggatgggtcacatcacatctcagtggacaaagatgaagtacatgtgtcaatcaatgatgatgaagctcatgctgtttctacaaatgaagttgaggttcaggatgtgtcaaggtcagggaatggtgatgtggtttatcaaaccatgaccagtgaaggtgagtcccatagtattttaggggacatagatgttggccatcaaacattgaccagggaggatgactctcctggtgtttcaggggagaatgttgtgggttatcaacccttgaccaatgaacataaagctcatgatatattagagaacaatgatgaggatcaaccacccctgaacaatgaagatgaatcttgtgatgtgccagtgcttgaaaaagacaaggattgcaactccccagctaataaggatgaggtttgtgatctcaacaatgaggatactgaggataccagtgctagttttggtaaaaacgacgctttccagagctgtttggatctgacgtcacaaatagatgacggggattcaggaaacgaactattttcacctggatctgattctcagagggatgctgagcataatttgggtaactgttctgttgctgaaacagatttggaggaaggtgaaagtaaaactgcttactgtggtcagtatggtcctttacaggagggagtgaatgtttcattatttaccttagaagttgataagactcaaaacaaagagagttctcctgctggaggttctcatgatagggacaaggaaattgcctctgaaattgaggctgccgcatctgatggtttacagtcatccatggcgaccagtggtaaagacaaactggggagcattccagagcactcagaagttgaagatgaacagaataaagaagaacattctcagtcacagaatggcttgggtgttgagatttctctttgtgggaacatgttacgaccaggaatgggccgagaatctgctgaggaagtgtttcaacagaatcttgtccatgaggaggatttcaaatcatctggatcaacaatgataaaaaatgcaaaccttattgtcaaagttgacaataattatttcccctggaataaagtttctcatgttattcttgggaaggctgtatatggctcaaagtttcccttagaacccactgatgctgttccggttgaacaacaggaaacacccaaatcaagagaggactctcttagaatgtctccctcaagccggagatggaggctttggctcaatccctttcggataacaagatcccttcaacgtagtaacagtgattcttccgaagacattttccttgactcagagtctgttttgagtccaatggatgatcaaactctggagaacaacaaaaaccagtcacctagaaagcaattcgtacggactttgattcccacaagtgaacaggtagcatctttaaatctgaaggagggccaaaacttggtgacctttagcttctccaccagagttcttgggaagcaacaggttgatgcacatatttacttgtggaaatggaatgctaaaattgtgatatctgatgtggatggcaccataacaaggtctgacgtgctgggtcaggtcatgcctttggttggacgtgattggagtcactcaggtgttgctcgccttttttctgcaattaaggaaaacggttatcaactactattccttagtgctagagcaattgtccaggcatatctcacgaagaacttcctctttaatctcaaacaggatgggaaagcactacccaatgggcctgttgtaatttcacctgatggcttgtttccttcactctaccgagaagttatacggagagccccacatgaattcaagattgcttgcctggaggacattaaggcgctctttccttctgattacaatccattttatgctgggtttggtaacagagatactgatgagctcagttacaagaagatgggaatacctaaaggcaagatttttatcatcaacccaaagggtgaagtggctgtcaacagttctgttgatgtgaagtcttatacgtccctacatacccttgtcaatgacatgtttccaccaacaactctggttgagcaggaagactacaacaactggaattactggaaggtgccattaccagatgttgatttgtagtgtagttttgacagaaacagccgtagataccagtagatcctgcaaaagcctagcagtagagcttcctgtaccctaatattcagccaccacgacggttttaggtccaatttgtgaaggtctcaagaattccgggatgtatggttttctgaaagccaatggcccaaggaaacgttgccactttatttccttcgacggagctttcacgtgatcatacggcttttgggtagtcatctgattgtcttcgtcgaacttgttgtacccagaggtctgagccctagaccctcgattcattagagaactcgtgatctggtcattgtccaagctactttgttctgattgcaggaaatctttaggtgccaaaagcagctgtacattttttttttcgtgatccaaaaacagctgtacatcgtatatcagcgcatagaagagaattgctaagcatatctgcatcttgaaacccttctttcttgtgctctaaaagttggatttgataattgttgagcatatctacctgtgaggtggaatggaggtgtgttgctgtagttg

SEQ ID NO: 21799 - DNA, 153 bp, Zea Mays
tgtgcaatcaacacacaaggatagaggtctacctctatgtttatgtcttggttggacggatacaccaatatgtatggttgcaacaaacatgttctccttaatctctatgagtatatgacaatatacaagactcatttgtgggagtgttcaata

SEQ ID NO: 21800 - DNA, 1544 bp, Zea Mays
gtgtgatttagtactgtaattgctgttgtttgtgagggttttgatgttcaagagtctgtctttcttccagagtctaattattcagatatcaaacctgccatttgttgtttggatgaccggtgtaaattcactcaaagttttctggacatgacaactgcaccttcagtactgctttggcaccatagaaaaatgttaatggaaagcaattcgactaatggttctcagcaatccatgtcatgtgctttggatgaggatcatcagcagttgtttcgagatcaaaatgagccttgtattggtgctgataggccatgttcctccaaccttagtgttatttgctcttcacagaagtttgcagaggatcgtatttccatcaatattcctcaagacaaagcaattgatgcaacaaatgataaacctcttgacaaagatgaaaaagaaaagcatcctatatctaacttggttcaggaattgaatgaacatccaattggtcgtgttacaccaactgcccccagaactacttcccatcggaaccggtttacgtctatatcacgtgcttttggagatggttcaaagttactgccagaagaccacatgttgactggcttcgctagtggttctaagaagccacgaagtcaagtttcatactcaggttctcctagaagtgaggaacttggcttaaaaaacaaagatcatttccgcaagatacaatctcatgtcagtgttaagacaagtgatgcaaaaaaacttcctgatagttctagaagtgggcatagcagtccagagctattgacttgcattgcaaatgttcttgttacagtgggtgatagaggttggagggagtatgatacccagatcacaatggattctgatgttcacagtgaacagaggatatgcgtgaaacttgctgaagggaccaagtatgctcacaaggtctgtcaagttttgcagcctggggccacaaaccgctatacacatgccatgatgtggaagggtggggctgagtggtgcctggaatttcctgacagaagccagtggttgattttcaagcaaatgcatgatgagtgctatagccataacatcagagctgcttctgtgaggaacattccaacccctggtgtccatttggttggaatccatgatgataatgatatggtatcctttgtgcgatctgaagattatcttgtccacatcggaacagatgttgaaattgctcttgatgaggcccgtgtgttatataacatggacagtgatgatgaagagtggatatcaagccggcagaaattcttagtaagagacaacaacgccacacttgagttggcagaagatttgtttgagagggttatggacaaactagagaagtttgcatatagccacgactctaatgaactcagcattgttcagatgaaggaactggagactgatgacctacctctggacattattgaagtgatacatgcatattggcaagctaagaggcagaaaaagggaatgccacttattcgacatttccagctaggcttatagtactgaagtgagaaggacag

SEQ ID NO: 21801 - DNA, 281 bp, Zea Mays
cgtcgaaccgccattagtgaggggggaatggatccagtccgccgccattaccacccacccacagcaccgattggtgattgaataagcgccttggtagttcacctgtgagtatgggttctcccaaacgagtcaattggaaacaggaaacttctgggcgcgtggaattcgtcgacagatcctcaccattcgctcgggccgcacttgccggggtcctacaccactaccacaaccaaacaaccggtatgaatagcaccaattgtttcgtcttcatctctattgcg

SEQ ID NO: 21802 - DNA, 1966 bp, Zea Mays
tataaatcagcccccttcctccacggtcgcgtttcacgggcgtagagagagagagagagagagagagcgcgagcgagcgaagagggcgtgagagaggagggaggccaagccgtacgcgtcgtctcctgctgtttctccccatccctttcctgcctcggcttgcaccttcaaccttacttaaagctctgacctcaaactgaaagggacctgcgaagagttttttttgcggcagtacaatggaggtatttggcaaatctgtgattgctgagcccagcaatgtgattttcttgtccgcgatccttaacacagaagggtcaaaccctagtcacaagtgtgacaagaggtgccagagcgagcgcattttggggaacatgtaccgttgcaaactgactgaaaccactcacatctgtgacaaaaactgtaaccagaggattctatatgacaaccataactcgctctgccgagtgagtgggcagctttttccgctctctccactggagcagcaagcagtgaggggcatccgcaggaagcatgaagtggacagcagtgaaggttgctgctttaagcgcaggcgcggcgcacagctgcatccttcccccttcgagaggtcctactctgctgtgtatccaatcccgagccaggttggagatggcatggacatgagctagagctaatgagacttccttttcttcggccagccacctaatttcgttctgtctaccctttttccctacgattacaagatggaactataagagcttccttctttttagacttatatgagactccttagatgcaccgaataaatgttcatgtagtatctattctgtttcatgggaccttgttgtaactcgtgaactttgattgaacgcctattttgatttagtggtactttcagataatcattagattcttctcttttttttgtcacacttccaatttagttattttatgtgctttactttttgttcaactaatttgccttctaattttaatcctttgatgcaatttaatataattgagaggtttacatttgtccgccaatgtaagtaagtgaaggattctttggtcctgtaatccaggcacagggaactgacatgcctttgctgactgaagtttttgtacagctgttactagtgttttgcttgacaagttcctaatcaagcttgaatcatttacggtgaacatctctgattccattttcatctgttgggtggcaagaaactaatcaaggagtctctctcttctcattctctgcgtggaggactgtttagctgtagctgagtggcatgctttccagaacataaattggtggaagagaagtttgatgctaccactttgcgagaaggaccgaaccaacacaataacatcaaacttagatactgcagtttaccaactttttcaatattgaagattgaagagcagcaagatcagcctcttccatatgcagtttgaagaaatcctttttaaggtctattagactagaatccttccggcaatcttgccttcaccccaagcatgctgcataccttgtaatgagtgtggtacttgacgactgttaccaaagtttttttgagggtaagactgttaccaaagtagtggatgcttttctttggcacgaagtttctttcatatccacctagtttgtctgtaaaaaaaagtgaaacaccgagaaagacgatcagactaacctaccgtttggttcacatattggtaacgtaataggtaactgataacgttaaatcatgtttgtttaagtctaactgtaatcgataccacactataaatggatatcgccttttttaatttgttactgtcggtatttgagtgtgaatcgttaccattactatttacgttacatttcgcgaaccaaacgatacctaaggtgaatgaggcaatttaaattttcttctgattttggtcgctgttcaaatctaactccaaagcaccaaaaaagcacaaaaaa

SEQ ID NO: 21803 - DNA, 588 bp, Zea Mays
gcttttcgaatcctaagacttgggcccactgtcagcctcggtagatatcacactcactagtccactcccctcttcactcccgtcggtggattccatgtccaaccgcgtcgccggaggccggaaccatgaagcctgtcagtgtcgccgaacacaacaaccaccagcctcgcctgcactcccccacgccggcgtcggcgaccaagatctcgatccccatctcttcgagcgaggcggcgctgttcgggaagggtaggtacaaggtgtgggccctcgcggccatcgcgctcctagcgctctggtccatgttcgccgcctccgtcacgctgcgcttgtcctccgtcgatctcgccaccacgttcggggacgcgagcgatccgctcatcgacgaacttgatcccctggagatggagcaaagagaaaagctagtgcgccggatgtgggatgtgtacacacgcacagataatcatctatatctgagattgctcgcatgtcaatccataggcctgaggttgagcaatcgtcgaataaggattaggtattcttccggaggtggtttccatttctcagtttgaagcaacgtccattgga

SEQ ID NO: 21804 - DNA, 1873 bp, Zea Mays
gtcgtctcctcggctatatatccgccagccggggggaaggggaacggccaaaccagcacccgccgccgacagggaacatcgccggccgagatcggctgcacatctgtgctgcttcagggcgccggagttcgcgtcgtcgttcggtaacttgcggggtcaatgggaggagggaaagacaagcatgacgagagcgacaaggggctcttctcgaacatgatgcacggcgttgccggtggtcatgggtacccccaccagggataccctccgcagggctacccaccgcaaccaggagcatacccgcctcccccaggggcgtatcctcctcctccaggggcatatcctcctccacctggggcatacccaccacaatatgggtaccctcagccaggtggctacccacctcaaggtggatatcctcctgcaggctaccccggctcatctcaccagggtatgatctcctcttcatcagttctatacttagtttgtaacttggagtgagatcagaatagctagcagttgcatcggtactgacacaacatggtatgacttactctgcttagtttgtaacgtagagtgatattagaatagctagcggttgcattggtactgactcaacatggtatgaattactctgcggttatgtgctttaccttggaaatcatggagccttcaccatgataatatctagtagagctttcctttcacaaaagaaatggctatgagaatagctaatttgtctaactccagcaaatactcgtatttgtaagtaataataatacaacagtttatatagtacgtagtttgagattgttttggcttgcttgctttgttatattgcttatatattacattttattgtccagatttagaattgtactaaaccaacatttacatatacattctgtagctgtaatgttggaaattggtatttctgttctgttgatccagtaaaatattgaagctcattccatgctaactgatgcttcttgtgattccaggttatgggagcagccacggcgggggccacgggggccacatggggacgggggcaatgctagcgggaggtgctgccgcggccgctgccgcttatggagcacacaagctttctcatggccatagcggacacggtggacatggggcctttggaggctatggtcacggtggttacggccacgggtatggtggccacggcaagttcaagcatggtcacggccaccacggcaagttcaagcacgggcacggcaagttcaagcatggcaagcacgggcacggcatgttcggcggcggcaagttcaagaagtggaagtgatgtgccctccatggttgatcgtagctgaactcaggcttccaggacatgtgttgccagtaataccttttcagcgttactcatccttcatctgtatttccagtaatccagcttgtggcgagtgacataatgctaataagtgacataaataaccatttgctgatatgctgtatatgttggtcttgtggatggagcgctctgaagattatatccattgccagtaataaatcgtggctttatctgaccaatcgatttcggtacgttgttgctggtgtctgaaaagacgtgttgatctgatgacatcaaccgtttccctgcttgcctgaggctctgaggctgaaatagtagatcgagtcatgtctctaaattctgttcttataatgaaaatcatgcagtgggtatgagcatagtttaggtagagtttggttctctaaattctgttcttataatgaaatcatggagtgggtatgagcatagtttaggtagtgagtatgagcatagtttaggtagcatttggtttcagagtcaattggagtggttctgtccaggatattttgaaaagatggt

SEQ ID NO: 21805 - DNA, 539 bp, Zea Mays
aacaaacctcatatcctggtgggaattaatttctggaaacatgcctatagacatggtcacatgcacaccgtcgccaatccgcattacatgagtcaacctgttccctatggacaatacgagagccagcacaccaatgttcaaagatgactggctgcaagagatagctttgactcgcctgccatctcattgtaacaggatagtcgcagaatccaccatgttacattgaaagtgctgaagtcctcatgttcatgattttttttttatttatttggctaatttgttccagaatcgatgggttgaattttggagcaaaaacctctcgcgcctctccatttactaccctgatgattcctcagttagtgatggtgttattcagggacgatgatgcctctagccttttacgaatgcgaccgtccatgctcgccgagatcaagcttagggcatatttgggagtaaagtatttttatagtttcttgataatgctatgtttttaataatattttagtattttatatcataagatgtttggttgtgtttct

SEQ ID NO: 21806 - DNA, 4245 bp, Zea Mays
ccaggccattccgcaccgccaaaattgctccgcgcgggaattccaatttcctccccacctccgcccgcttcccagttcccagtgcacagccgattcgtctccattcctatcttctcccattccctccccagtccgacctccgaccccccatttcgtcgccgccgccgtactcgccgagaacccgccccaaatccataggcccatcccttacccattaacccccaatgcctccgaagaagcgcgccgccgccgccgcctcttcaaagaagccgcagccatcgcagccatcgcagcccgccaagttcggtatcctccacttcttcgagcgccagacccaggcctcccagaacgccaagcgccagaagcccgacccccctgcgcctccccctcctcctccgccgccgcccgagaaggagccctcggaggtctcgccggaggttaccaagacgctggcgccgaagcgtgtcagattttctcccggaatgttgattaagcagagccaggacgatggggtcgcggaggtggtgacttggaagatctcgccggtgaaccatcgccttggtacgacgaagtcgaagcaatttctggggatggcgccccatccgtactcaagcgagaaaaattcctcccttgatgctatgaagaagtggcattcatctccattgggcttgtcaaggtgtactactttgggaagtaattcaggagttcttggatctgctatagttggttgtgatggtgtgggggatactcagagtccatttcggaccccaccatcgctttcctatggctgcaacgagcaagtgagcagtggtgtaacttctgagggaggtgccgaaccatcgggagcagggcagcacaaaaaggcattacttgatcttctagaccaagtagaggatgcaatcatggaagaagaattgcctgctgatcctggaaataaaggagggcaaaccacgaatgaggatatcaccaacaatagccgttctcctgttgctgatactgacttaactatcccatccaagaaaactattcatgtcccacccttcaatagttttcttgtcttggaggtgtccgaaaaacataaagctgatgattcatcatgtgatcgctaccctgttaaggttctgcgtctgctgaatgaacactctggtacagaatgtgccgtgcatctgtgtgatgagtggttcgacagtattgttgggcctggtgatactgtaaatgtcattggagaatttagtaaccatggaaaatgtattgttgaccatgacaataatcttgttattgtccatccagagcaactcatttccgggacacgggctgcttctagcttccaatgtttaagaaggtctgttctcgatgagaggctaaaaagcaatgaatattctaccagcgcgttgactggtactctgcttcaccaagtctttcaggctggattactcaatgatgctccttcatggcagtttttggaacaacaggcaaaggaagtacttctgaaaaatattgaaactttatatgcatgtggagtcaatgaaagcaacatgtactctacgctcattgaagctatccccaaaatgttgaattggttcaagtgtttcttaaagggttcaaaatgttctgatgttgattttggacataacgaagtgagaaagactgttggagtgactgaggtcatggatattgaggaaatggcatgggcaccaagatatggtatgaaaggggttatcgatgcttctgttagatcaagagttgagtcacacaatggtggttcatatgatagaataatgccactagagttcaaaactggcaaagcaactagtggccaggcagctatggaacactcagctcaggtgatgttatacacactgttgatgacagagagatacttgaatgaggatattgacttgggccttctgtattatcttcacacagaccagacattgggcattaaagtaaagaggactgatttaattgggctaataatgcgccgaaacgagcttgctactgagatcctgaaggcatcgatgtcacagagttttcctccaatgttacagagcccatcaacatgtaatagatgtcgacacctgatttcttgcaccatatatcacaaggcacacggaggcagtggtacaactagtgggcttggtgatctatttgacaaccttgtgaatcacttaacagtcacacatcataattttcttaaacattgggatagattgattgatcttgaagctagagcttctcaggtaaaaaagaacatcttgcagcctcataattcaaactatgggagtgggagttctgctgtaccttattttgttcttgacataaaaaatggacattcaatagattcttcaggaaaaagcaaaagatacatatataattttgttcagcaaaagatgcagcctgaaacagctgatcagttagatgctcaatttgacagcatagatttcagcctgaaagttggtgattttgtggtgcttagcactcagtctgggagaatagcagttgcaaatggatgtataagagaaataataagtcactctcacataacggtctctttgccacgccgtttgagaattccagatagcaattccttgtcagagcaagaggatctgacacgtgaaatttggcggatagacaaggatgaatttagttcttcatttggaataatgagactcaacattgtccaactatttgctcagaatccacaaaactctcacctgcgcaagttgattgttgatcttgaggcacccaggtttgatagcggaggtctgtttagccaagatcctgcactatcatacataaggtcactaccaaacttgaataatgaccaacaaaggtcactgcataaaattctaggagcaaaggattatgctcttattttaggaatgcctggaacaggcaaaacatacacaatggtgcatgctgtgaagtcattattgataagaggggaatctattttgctaacttcatatactaactcggctattgataccctgctcatgaagttgaagactgagggtgtagattttattcggattggaaggcctgaggctgtacatcctgatgtcagggcccactgcttgtcaacaactgaggcacaatcggttgatgccattaaagcaaggatggagcaagtacaggttgttggagttacttgcttgggaatgtatcatcctttattagcacataagaagtttgacacatgtatcatggatgaagctggacaaattacattgccggtttcactgggacctttgatgcttgcaacaaagtttgttctagtaggagaccattatcaacttcctccactggttcagagctctgaagcgcgagaaaatgggatgggcatcagcttattttggagattgtcagaagcacattcccaggcaatttcagcactgcgatgccagtaccgtatgtcatctggtatcatggagctctcaaattcgttgatttacggtaataggttgtgctgtggttcattggaaattgcaaatgccaaactcaagttttctggtagagaaccaatgcagttgaagttaaaagagatcttgaatcccgatagggctgtgatctttgccaacacagatcaaatacctgcacttgaggcaaaggaacacagaactgtgaacaatcctacagaagcacacattatttcatggatcatcaaagaattactaagaaggggtgtagctcaagatgctattggtatcataaccccatataacgctcaagtgaatatcattcagcaatacactgattgtttggttgaggttcatacgatcgataaataccagggtagagataaggagtgtataatagtatctttcgtgcgctccactgcaaactcaagggctagtggttcttctctgcttggtgattggcacaggatcaatgttctgttgacacgtgcaaagaagaagctcatcatggtgggatcacgtggaacgctttcaacaatacctttgctcaggcttcttgtcgacaaagtagctgagattggtggcctgttggatttgacaaataaggatgcacattctttttcgagaacttgaagttcttgtttgaatgcacaataggatgcacggtagatgaatctggaaggtttttataaggccaagctgtaaataagaatatgctgtaaattttgtttttggaaatgtatagtaaacctagccaagagccacacagctagaggttaggttttgtatattccttccgttagttataacttatttcaatttcatt

SEQ ID NO: 21807 - DNA, 1918 bp, Zea Mays
ttctgatccacagctcttgattccggaagttggtcaagaactggggatactgagttgaatatgatctcaaatccggtggactggtatagtttcggacccggatagaattggtagggatgcaagattggagggtgcgtgagttcgaaggtaaattcactgatgagtttgcccacagcagtagcaacgaacataaaggtggagttgaggcttctggtgtcattagtagtaagaagttgaagcatgcagttgctaatgagaaaatccaaggtgtcatccccggtacaaatagctcaggttcactgaaacgtaattcagagaacatccaacatgcgaacggggtattatcccagaatataagctgcgctggtgactacaaaaatggctccattgcctttcctttgagagaagaaaatacaataactgagaccagatgtccagatgataactggaactcctgtcagtttgcactgaacaatggttcgtccattctcaataaccacagtgctccccaggatagcctcacttatggagataatgatctaaactacatcgaatggcctggcattgacaattttgaggatgtcgatacattattcaggagttctgattcaacatatggtcagcagcagctggagaatgcagatgggttatcttggattccgtcttcagatgctgtttactctaccgatgttgctttgcaacaagggcttgattcgtcttattcagattatggtattctggatgatctctccgcattccaatgtgcagaagataaatcactacccttggttgatccttcatcagctttatgtgataatcaattcaatgatacctacctgttcagtgaacaaaagaatgtgaatgcatatggtgaacagatataccaagaggatttgatggagttgttgcccactgaccagatatgcagcggacatgaaaacattgatatggttggaaaccagtatccatctgaaaatgcaattcaagattccagttcaccaagcaatattacttcggagtcctatccaggaaagttcggtccatctagctgttcttctgcacaaagaaactcaaaagtgcagaagaaaactgtcaacatacaaccaagacagccagcaaatgataatgttatgaacacaagcagagcttcttacccttgtgagaactatgaaactgaaagaagaggattagggaaagaactctgggggatcctcaagttacaatgggtagttcaatggtagtggatggctcatttgtatcatctatgtcctctgataactcagtcgaagaaagcagctttcaacaactgcaggatgctgttagtcagctggatgtgcaaaccaaattgtgcatcagggatggtttataccgattggcacgaagtgcgcaacatagacaagtttttccaaatacgatgaacagcaatggtggtagcgaggacggaaaggaactggagaacgcagaaacttcgtgcaagttcatggaccctcggagcatcgagacgcagacaaacccgatcgatcggtctatagctctgctacttttccgcgagtcatctggcggccatgtccatgtggctgtagcagccgacgatgcctcgtcactgaaatcccctgctggtgtatgatttcctgcctgccacatctcagttccagggccctgctgctaacccaggatgtttctaggcatgtatgtaaaaaaaaaaacaagcgtattgtgtagccaatagtctgtactctgtagtcacattaattttgtcatgcttgtatcctattgctagacggccgatgtgctaacctagtgctgttgactcaaattttatgcgtaatctaaaaaaaattatttcttttcgtggatctctagcataccttcaaactgatgcacgggagtggaaggattcgcttcaacaatcgttagg

SEQ ID NO: 21808 - DNA, 1893 bp, Zea Mays
acaaattaaagtctgccagatttataataaaacagacaagtatgtacaatatatatagtacaatttgcagtcgaaatgtcaaatttatacacactaacacaagttagaactgaattgatatataaaacagagtcttatacttaaaattcagaatttaaaataataaaatgggccattctgggcccttgaaaacagccaaggcggcctaccaggcgggccaggcagcggcctggtggccagcacgccggcccagcctggctggccagcctaaacggcccaactgaggccacgaagcccattagaaataggggcgattaggttttccaaaccctaaccgctccagccgtcgtcttccagggagcgccccagccgccgccagggtgttcggccgccgccggacctgcgccttcaccgcaccgccgccgagcgcgctcgcgtcgaggagcgctcacgcccaatccacgtcggctgggccgtggccgagccgccaggagcgctccagccgaggagtcgcgcccgaggaggaccgccgtggtccgccggggcttgccgaggccggccgaccgggcacgcgccgcgctgggatgcatgggtgctggtgctggggtcggaccgcgcccgcccctgcgctaggtccgaggccgaggccgaggccggctgtgcccttgcccggaggcagagcatctcgctgctcgtgcccacgtggaggccgagcaggcctgcttgcgcgtgtgggggccgtgggggcccgcctgccctctgccagagtcgatgccgcgccgcccgggtagcgttcgtccgccgtctcccgagggctagctgcacccgcgccggggccaaccgctgccgcgcccgagcgtcttcgggggccggacgcgcctgcgtcgcgccaggagccagcagcacccggcgagaggccctccgcgcctggggccgaccgtggcctcatcggcgacgggccatccatgccagggcccgaccagccgcgcccaaaccgtgccgcgccgagggccagcctgcgcagggagccgcgtccgcggttgcctggtcgggcgcgcggccgccagggaaacgccgccggtcctccgtgcgcgctcatgccgaggcacaggacgctgcgccaaacagccgcaccaggacgtccccgccgggaccctgccaagcccgctctagccgcgcgccggtgaccagccgcgcccgtgtcggggctagcttcacacacgccgactgacgcgcctaaaaccgacacccaggctgggaggcgccctgcccgcgttcgcagtcagagccgcgcgcctgcgcaatgaggctgggtcgccccatgcagtgcagcgagcgcaggagttctcactggagtggcagatttgttcattaattatgaacttggtaagtttgttgttcgtaccttgtaaaatcaggcttctctgattacatgaaggagcgctgcttgtgcgtgctgcaatcggacaaggacttcatcatgatgattctggcatagcgtgtacccataatccttgttatttctctctgttttggcgagcaaagtgctgataacgtgttgaagtatactcagtggagagagacagagagaatacaaatgaagtcacggttgtctttattgcagagagtacactgtttatatataagtacaaaatagtgtctcccaaggggtgtgtcccttgggaaagaactgacaagggttgatcacatcatggtaacatattttgtaacagctagattcctgcagcggagcaacaggctctgtcccgtcgagaaagaacaggacggccgcgcgcatgtcggtccacgccacgcatgtgttgtttcctcactggtcaaaatacatgcatgcttgttttttttttcttgcccccggacgcgacaagcgctgct

SEQ ID NO: 21809 - DNA, 1844 bp, Zea Mays
gagagaggctaagcaccacctgactcggctgaaaatctagcgcgaccggcttttaacacggcccggcccatcaaaatgaatgcactgtactagccggcgaggaccacgtgtacccgccaccgcgccgcgcggctccaccgttcggcggcgctcgggcacggcacgccgtaaaaccctagctcttgcgccccctcctctccaccgcgccggcgagccgtggagacgcggagctaaggatgccgcggaccactgagctggagagccccggctgcccgccgctccgcgccctcaccaccgacatcctcggccttgtcaaagtcgtcgaggcccacgcgaggccggcgggtgccgccaaggtcgtggagacgtggggcgcacccgacgcctcctgcgccatcgtcgctgcctccctcgccgatcgtgccaccgaccccgttttggctgtggcgaggatgaacggcgtggttgagttgctgaatcccctgaacggagatactttggctgctgtcaaggcagtgggaccagcaccaaatgatggtggcgctgaaggggaaagcttctataaggtccatcacgaaagaaaatgcagcttcaggctcacatattgagccatctgctacatgggatgtgtgcggtggggccaatgtgcaattttgctcagttgatcatggtgaaaactatgtgatgtttggagggaaaggtatagaagtgagtttgtgggatattacatcttgtagtaagacatggtctgctaaatctccccgaacaaatagtcttggtatattcactcggccttggttcactgctgggaccttcttgtgcaaggatgatcatcgtaaaattgtagcctgcacaaatagtcatcaggtccgcttatatgatactgcattgcaaagaaggcctgccatctctgttgagtttaaggagtcaccaatcaaggcagttgctgctgatccgaatgggcatgatgtctatattggcacagggacaggggaccttgcttcctttgacatgagaactgggaaattgcttggatgctattttggcaaatgcagtggaagtattagatccattgttaggcatccagatctacctttgatagcatcttgcggactggatagctacttgcgtatttgggacacaaacacaagacagttgctatctgctgtctttctgaagcaacatcttacaactgtggtccttgattcacatttttctgttgaagagcctggagagatgaaatccaagcaactggagtcttcagtggagactgagactgaagtccgaaaagaaaagaagaaaaagagtaaggcaattacagaggatgagactgaggcacaaatccgaaaagaaaagaagagtagaacaattgaagaggaagaacaagctggattggtcgaccatagcgatattaatgatgaagtatatgccagaaaagaaaagaagaaaaagaagagtagaggtattgaagggggcaaggagcgagacagcgacggggaaatttgcagtcccaagagaagaaaatctggagaaagaagcaaatgcctgaagaagaggagcaagaaacagctggttgcctagtacaagtatcatttctcattacccgccttcttgattttgcagaattacacaattttgtgtggtagtttgttcggaattgtatcccttttgaaaccctgcaagggaagtgcatcattttcgtgtgcgcatttttctactctggtgtagctaaattttgagacatacacgctggagtagttacagccaaaacttgaaactaatttttgagatagacatgtgggactaaatttcgagatatacgcgtaggagtttctactataaaa

SEQ ID NO: 21810 - DNA, 216 bp, Zea Mays
ccttctagattttcagagagacacttagaattttgtggactaatatgactgttccaccaccttgagcgggattttcttgagtgcacctttcttttcatcttcaccaaaatataagaaaatctcctctgatatgcagagctaattgaaattcaaaaggaacagtgagtagttaaaatgatgtgcatgatgcaagcaacatgactagccttgttaaga

SEQ ID NO: 21811 - DNA, 2334 bp, Zea Mays
gcgcactaacgctcacccgcgcctccgggttctgggctttagcgctcgctcgccggtcggccccaccattccgcgcagttccgcgtgcgaggaacaggaaccgctgctgctctctgcctccgctccgatcctgcttgcgctcgagaaccgcgacgccgacgcccttccttgacgcgttgttgatctgcgagctcagaaatggagaagcaggtgaaacaaatgttggggctcattggcgaaggagagttttctgcagaaaaagcggaggtgttctatgagaagcggcctttacttattactcatgtggagaacttctattgcatgtatcgtgctcttgctgcccgatatgacgatgtaactggacaactacgcaaaaacattccatcatctcttcaatcatatggctcggttggtgtctctgaatcagattctgagacacaatgtttcacatctccagagtttgatatgccacagcaaaagcaaaagcctggaccagatttccttgatttttccattggctctggtgttagctctgatgtatcaaagaagggtagtgaaaggtcttcatcatcttcagattctgattcagagcttgatgaggccaaagaggaaaatggcagtatgttttatgccttgagccaaaaaaatattgagctagaagatgagcttcaagaagtaaggggaaaacttgatgctttagaggaaaaacatgctcattgccaaagagatttgagtaccaactcaaaagatactgaacatgaagaaaacctgcacacttcagatgtggaatccaacacccttcagaaggatgcagaagaaacagattttgctttagagagctcaacagaagtcaacagcgaaaaggaagcattggaagctgtgctgtttgagcggaaaaatgagattgaaatgctgaaaggtgcaatggcctcagctgctaagcagtttgaagttgaattggcacatcgtgatcttgaaattggtaagtgcaagcatgaacttggagtactctcggagaagtatttgcatgataagtctactctcgaggatgagcttagaaggctccatggaataatcaagaatatggaaggtgacttagaaaaaatttcacaggagagattgcagctcaggtctcggattaaagagctcgagcaggcagctcacagcttagactattcagcttccgagatagttgagctacaagaagtaataaggaatacacaagcagaattagaaaaggtcacaaaggagaaagaagtgctcaaagaacacgctaacgaatttgagcaacttttaaagggccttgaggtctcaggtacagaggttgcaaagctaccagaaactatcaagaacctggaagcccagctagaaagatccttcgaagagaaatcagtactccaagaccagatcaagcagctggagcaggttatgtctgaatcttcggagaaacattcacatgagcagttctctcttactgcggatcttttgaagttatctgaagtgaacgcttctcttgaagacaaattgtccgatgtggcggcagagcttatccaagtttatgctgacaaggaagaagaatctctcgataatgagaagcaaatttctgtcctcagtaaagatattgctgatctcaggagaaagcttgaattgttgtcatctgagaaaaccacagttgatgatgagttggccaaactgctagctgatattatgattcgtgacgaaaagatgaagcaaatggatgaccacctaaatcagcttcagttagagcatgccaagctgatggcagaatttgacagtgcacacaggtccttgtcagagctgcatgcgcaggtttctgagctggaagacgaggtagagaagcagaagcttgtgatatccgagagtgcagagggaaagcgggaggccatcaggcagctgtgcttctccattgaacactaccgcagcgggtatcagcagctgaggcagctgctgcaaggccacaggaggccgttggtgatggcaacctgataaatgaacaaagtccgtttgccaacaaattgcgcagttgcttgtctctgggcgtgttctatttgtagctctgttctttcacaacttgtgccgtgtagtttatgttataaagaattctgtgtggtatgtgtgtagaatgtaatgggatgggatatttatgttgttccttcatactcctgtggctgttttctttttccttgctgtccgctgatgaatgttatgatatgcttgaaccttcgtcttttcagtcacgactttatgtggtcaataactgaactgcacaatggaactcccttttcaatctaagacgtgtttggcagaaacata

SEQ ID NO: 21812 - DNA, 237 bp, Zea Mays
gttgaacatgtgtgagctcacccttgttgtctcacaccccccacaggagatgaacaggtggttcaagaggagccatacaacgaggagtttgattcaattctaggtggtgtctccgagtcgactttctagcgctaaggatggattttagatcatgttatatttatcttttattttgtaagacttccgctatgtaataagtactctgattatattgtgatatttatctctatacactct

SEQ ID NO: 21813 - DNA, 2504 bp, Zea Mays
cccataacaattgagcatggtggttcaacgctgaatctgtccttcaatgccttcacaggctctacccctgaagaagttgcagagttagaagctattgccgcattttttgttgaagggaacatttttttgggtcatatccagattgaatacgaaacatgctcgtccttttgggactttaagagaataagaggcaaaaggaacataaggatagaggagagaaataaacaatggggaagggagatgtggctaccaggtcaaaatctcaaaaatcaccagcaatacagaatgagcagagtacacctgctaacccgcccacagcatatcctgattggtctcagttccaggcatactataatgctgctgggacagctccagtgaccccacctttttttcatccatctgtagctccaagccatcaggggcacccatatatgtggggtccacaggtatattctctctcttcaaccattttgcaagaataagtctagcagctagtgtaagtctgcaacatgaggtttaatgagttgatgttaggatgaacctgtcttctgctacttgtagtacgaggtacgattctggcagattttttaacatttgttcatatggtttgctagccatttatttattttaaggatactatcagctaccacaaccattgtaaaaaaactcggccggggagggtaagaccaccctcacggtattatattaatagaaggccgcgacaacggtcccgaccgagaaatccccgaaccccgtcctcccatcactaacgggcagggtcaaagctgcttactctgcaaaggcccacctaggcctgagggtggcgcacaaccgagctgtaacccgagagcggacgaggaacaatgaggggatttttttgtacagggccagggtattaccccatgacctggtgaaagggaccactgagccgtaatgcaaccattgtaactctggagataatccgtcatctaacatttgattattcaactggatagatgatgtctccttatgggacaccaccaccatatgcagcaatgtatgcacaaggtacaccatatcagcaggcaccaatgccaccgggttcacacccatacagtccttatcctatgcagttaccaaacgggacagttcaaactccaacatctggtgctggtggtacagcgacagataaatcaaataaaaataagcggaaggcttccctcaagagatcaaaaggaagcttaggtagtctggatgttgttgcagtaaaaaataacaagtcaccggcaaagccttcaacttcttcctccaatgaaggttcttcacaaagtgagagtggaagcgggagttcttctgaaggaagcagtacaaattcaaaaagtcatctgcagtatgcagatcgagtgcgtgagaggtgcaatttggaacactttgcaactggttctgtctgtgtacatgggttcaagggtgaaggataattctgagcaaggacagggtaatgatgctaggagtaaatgtactcaaagctctgtcgttgagcccacacaaccatcttcagggtctgttgtgcttaaccctatgatgccattttggcctgtgccccctcccatggctggcccagcaactactctgaatatgggagtggattactggggtactcctgcttctgtacccatgcatggtaaagttattgcagcaccgacatcagctccttcgtcaaattcacgtgatattgttctcagtgatccgactatacaggatgggagagaactgaagagacaaaaacggaagcaatcaaatagggaatcagctcgacgctcaagattgcgcaagcaggctgaatgggaggaagtagccaatcgtgcagatttgctaaagcaggaaaatagttcacttaaagaagaattgaaacaacttcaggagaagtgtgatggcttgacctcagaaaatacatctctacatgagaagcttaaagcgcttgaggatgagaaatcaaatggaaattggtacaaggattaaaggctgaaacttctctctctttctgactgctgatataatttggtggtaacctgataggacgacaactaaggaggtattcatatacggtattagacttttgtccgagggggtaaaattgtatcataggatttgacatggttgacggctacagattcttcgtccagttgtgctgctgtgctgtgttgtctttcttccctcttcgtgctagatcctacagaagtacaactatgtagaaacccccaggtggtgtttgaagcctggggggattagcgtgtggtattggtatagctgttgtagagctgctcactgagcttcttgacagaaactgaagcgtgctaaagcagtcgtgtgatttacgattcagacggattaattttacggatagtaatgtaactgcactcatgaatacaaatagccttttactgatttcgccctgtacggggaacggctttggaaaactgtggaagctgaacagtgtgtggtgttgctcatatgttagttgggaa

SEQ ID NO: 21814 - DNA, 1211 bp, Zea Mays
aaggctcatgaaactttcgacccattggaggcccacgacctctccgtccgatccctaggcggcggatccttcctccaccaaacccgcacctgccgcaactgaatcgggtcagatcgggccatcggggaggcgagggagctcacgcggcgccatggacgaggaggagcacgaggtttacggccaggaaatcccggaggacggcgacatggacggcgctgacgttgatatggctgcctccggggatgacgcggcgaagctgcaggagctcgacgagatgaagcgcaggctgaaggagatggaggaggaagccgccgccctccgcgatatgcaggccaaggtcgccaaggagatgcaaggaggtgaccctagtgcatctacagctgaggcaaaggagcaggtggatgcccgttctgtgtatgttggaaatgtggattatgcttgcaccccagaagaagtgcaacagcatttccaagcttgtggaactgtcaacagggtgacaatcttgactgacaagtttggacagccaaaaggttttgcttatgttgaatttctggaacaggaaggtgttcaggaagctcttaacttgaatgaatctgaattgcatggtcgccagattaaggtcgccccaaagaggactaatgttcctgggatgaagcagcgtccaccacgagggctcctagattccgccgccctatgcgctacagaccttacttctgaagtacggggtagggtaatgaagttcaatgcaaaaccagcccatggtcactggtcagtcccgggaataatcaactgtatcgtttgcactgttgcggctcaatgctcctgtatcagctgccttttctgacctttgtttcaagtgccgccataagcgacggacatgttgtattggcttgtaatacaggacgtagtaagtgcacacactttctgtaagcgtgctttcccacttcccagggttactactgtttgcaatttctgtagttctttgggtcggtcggttaggacatgggagtggatcgttctatgcccatttgaggtagattagttatatgaagagaaagcttcgcatgcggggctgtcttgtttgcagattgccactacctcagtacggttccaggttcctcaaggtatccgctgagcatctgttctggtgtcggattccgagttcaggtcttgtaactaataaaaaacggaaattataatgtctctcttta

SEQ ID NO: 21815 - DNA, 482 bp, Zea Mays
atcagcaacccacgtggggctcggtctcactcacctccgctcctgtcccgtgccgtcccggaacgcgcgcctccactccgctccgcgacgagggcgaggaggaagaagaggacgacgggagtgaggtaggtgggctttgcacaagaagatgaagcgaggcgcaagggggcaggcagtcacaccgcagcggatacaatacaattacaggcaatgcactataataattggaggaaaaactcacgggagggagtgaggtcaagtcaattggctcaagccgaaggcgatgcaattccgcaacgaaggtggggggagaggtttcttgtccgccgggtctcttactcacgccgcacttgtccgaggaagcttcggcgcgggagaggagaagacgatgatttggtaaaagggacaatgcttgtcgcgatcaccagcacgagctcaagacgtttgctggtgaggtggtgtatcattatccactggcagag

SEQ ID NO: 21816 - DNA, 2504 bp, Zea Mays
cttttccaactgtgtcgaatacaagttgctccctaaaggactggttaggccttttccccacccagctaacccgtgatggcacgccagaaaaagctggttcaggtcatagagggttcatcagagatggacttcttcagtgaatacggtgatgctaacagatacaaaatccaagaggtcattggcaaaggaagttatggcgttgtttgctcagctgttgaccaacatactggcgacaaagtggcaatcaagaaaatacacaatatcttcgagcacttatctgatgctgcacggatcctacgtgagatcaaactacttcggctattacgccatcctgatatagttgagatcaagcatataatgctgcctccatcaaggagggacttcaaagatatctatgttgtatttgagctgatggatacagatctccaccaagtcatcaaggcaaatgatgatttaaccagagagcatcatcagttctttctctatcagatgctccgtgcactgaaatacattcatactgctaatgtttatcatcgtgatttgaagccaaagaatatattggccaatgctaactgtaaacttaaaatatgtgattttggattggcaagagtggcattcaatgacactcctacaacagtattctggacggattatgttgctacaagatggtatagggcccctgaactgtgtggatctttcttttctaagtattcaccagctattgacatatggagtatcggttgcatttttgcggaagtcttaactgggaagcctttgtttcctggaaaaaatgtggtccaccagttggatttgatgactgatctcttgggtactccatcacttgatacagtttctcgaattcggaatgagaaggcaaggaggtatttgaatagcatgaggaaaaaacagccagtatcatttcccggaaggttccctaaagcagatcctgccgcgctcaaacttttgcagaggcttttggcatttgatcccaaggataggccaactcctgaagaggcattggctgatccgtattttaaaggcctcgcgaaagtagagagagaaccatcatgccagccaataacaaaaatggagttcgagtttgagcgaagaaaggtgaccaaagaggatgtcaaggaacttatattcagggagatattagagtatcatcctcaacttctcaaggattacatgaatggaactgagaaaacaaactttatatatcctagtgctgttgacaatttccgaaggcaatttgctaacttggaggaaaatggaggaaagagtgtggcgcacaccgcttcatcagacaggaagcatgtttcgctcccaaggacaaccacagttcattctaatccaatccctccaaatggaacctcccaagttccccgaaagattcccacaggtggtaatttctcctaacgaaatattatgttcttcaggcgccactatctaatgtagtgttattttctgaaaaaaaatcaggtagaccaggaagagtggttggttcagtaataccatttgagaacgcaactgctgttgatccatacagccaacgcagggtggtgaggaatccagtgcttcctccagccacctcaaacctgtcagcatacacctatcaccggaagtcagacaactcagatggagaactccaacaggagctggaaaaggaccgcatgaagtaccagccagcacagcgattcatggacagcaagctagtatcacacatgtcccctgacctgaggtcttcctactacataccaaaagctttcccaaaagccgacgcggcagatagagctgctttgcattcaaacatgattcatggaatcgccccttttagtggcatcgctgctgcaggtggaggtggctacaacaaggttaatggggttcagtatggagtttctaggatttactagttctagttgcattgaccatctccagaacacctgatctgagttgaagtaataacatggcgaacagtgaaaagatttaggtgccaaagaactgccatgttgactccgagccgaagatacggagcatgaagagtatggtctccgatctcggatcaaggaggaagtgtgacgtcagattgaaaaacagataatattgggcaacagtcatggttctgttcattggacatagcttttcggaaagcaatgccatcaccccgcggcaacggtaaaataaaaggagagaaaaaaaggcagtgccgtcagttggttgctgcttataagagtcaaaggggagcagagacaattattacatggaaaattatgtactttgcaagaacggaaacattggggaataaaaaatagttagtctacgtttacctctctgtatataaaaaaagtgacttgattttatgtattacggctggtgagacccgcttctttaattcaaagctgtgaagttttggcctatattttgctctataataaagttcagattggtacattgagcctgtttggtatccgggactaaagattagtcactctattttagttcta

SEQ ID NO: 21817 - DNA, 652 bp, Zea Mays
cttctcaggactagcaggtgggctccgtggtatgtccagaaggtgtcgaaggaaaattttcagcatgtcctggaaggatggtcttcttgaagctcggaactgcaaacattcaccaatcatcttccacagctccccaggaagtcctacacctactactcttgaatattgaggtggtggcttcttctcttttgcaacagacttacagatctcctctgcagtcagtccagcccatctgcatttcaatgagcatataagaacaccattcacaaagcattaatgataacgaattgaataatcatgctacttacggaacagcaccagtacacatttccacgagcgtgcaaccaaaactccatgcatccgactctggtgatataccgtttgcactatcccaaaacatattcagtgacttcttcagtggtccccatgcctcaggagctgtataattgggactaagcagcatagcatcaatgccagcaccggagtcatcaggaactctcctattcttcagaattgctgaaagaccataatccgaaacgactgcatgtccatgagcatccaaaagaatgtttgacggctttatgctcatacaaacaatacccgctgcatggagttctgctactccacgagcaatatcagccccatacctgta

SEQ ID NO: 21818 - DNA, 1937 bp, Zea Mays
cgaatggaatcctcgggtccgtccggccacgcaagcggcggcaccaccattcatctacgaatccatgggaggagattggagtggggccagctaacggatcggagtcggagtccttcttgtgcttctcctgctctgctggtgccgctgccatgggtttccccagcacccccaacctgaagctggagcctcgccctcgcacgcggaggctcctgcgctgcgccctcagctctgagcctgtgcagcctcccatgactgtttccatcactggagccacaggtttcattggacgcagattggttcacaagcttctatcggatgatcacaaggtttgcatcttaacaaggtctgcctccaaggctgcgtcagtttttcctgcttccacctatcctggactcacaatagcccagcaaggggattgggaggcatgcgtcagaggctccactgctgttgtcaacctggcaggcatgcccataagcactagatggtcacccgagattaagcaggaaatcaaacagagccgggtcaatgttacatcaaaggtgtgcagagaatgggaggccacggcatgccaagtaaaccaggaggatgttaggcttgtacttctccggattggggttgttcttggcaaggacggcggtgctctaggttgctgtgtttcatttaattccttttctcccctcttgtccttttattttccttcctcaagagaaggaccattccaatctacgctgcttattcacctggttcatctgtccatctgcagcaaagatgatacccctttttatgatgtttgctggtggtcctctggggacgggacgccaatggttgcttctctctcttgtgctacagacttatagtatacgctgggatcctagtcattctgttttcagacagatgggatttgatcgttagtacattcaacttcagcatattgtaccaattaattgattatctgattgctaggttttcttggattcatctggatgacctagtcaacctcatctatgaatctctaacgaaccctacatacaaaggtgaactcacacattctctgacccccccccccccgcccatgtgttacagactaggtatgctgctagaagccatgcaaacaccctactgcaagcaaaacaacttatgaatttcatgaattgtaagataatggtatggatatcagttgaatgcaagacactttatggtgcgatactgcaatgaattcatattgtggtagcattcaagtaatgacgtagtgctagctgactttggagtacatgatacactttatggcatgattttgtatattgagagcagcctcacattctgtttattaggtgtaatcaatggaactgcacctaatcctgtgcgtttgtctgagctatgcgaacgtctggggcgaatcgttgggcggccctcttggttgcccgtgccgggatttgcgctcaaagcggtgctaggagaaggcgcttctgtggtgttggaaggacaaaaggttgttccggcgaaggccaaggatctgggcttctcctatagatacccctatgttgaagacgctctaaaggccattgcccgagacctatagagctaggttgaggacgatacaggcaacttaatttaattatttcttatcttaactaggaacgtgcccgtgcgatgctacggaatacaaattgcgaccctttaatagacttagggccctgacgacgtgcggcgtgagtacaatagtgacggcaaaatatgtgattgttaaacatagatatagaacgatataaataagtctacccaaatagattgaaatggaatcacacaaatagtttataaagagtaaatatataatgcttaatcataagtaaatatgctgacaccttgtacactaatctaatcttttttaataatattgttaactctctgttgtatatttgccgggatggcatatctgc

SEQ ID NO: 21819 - DNA, 5206 bp, Zea Mays
aagcgctcacctcgtccttgctgcaaaaacatcatcttttatacagtcattgtgcgcactggcccctttccactggcaagaagaccctgaagtcatcgatgtgcggtattgcccttgtcctcgccagtgaccgccttgtcatcgttccctgtgccactgcaactactgccgcattggagacccagcactcctgcaagaggaagggcgtgccagatgagctgaaggaggccctgcgccggcggggccctgatagcctaggctacagaagtcgctgccttcttgctgatggcacggttgttgttggtgatggttgcaatgatggagtagagggtaaaatcggtgtgagtgactctagtgttgctgatttgttcttcatcggagcaacactgcatcttaggggagctaagctggtttcgcagccgctggtggcccccagtggaagtgtctttctgtataatggtgagatatatggaggaattcaggttgcggatgatgaaaatgacacccaagctcttttcaactctctggaatcttgttgttcatgtgattgccatgctcttggtagagataaaacatgtacttgttgtggtactgggagtggtgccaaatcagttttgcaagttctttccacaatcaaaggtccatgggctttgatatactggcagatgaagtcaaatacgatttggtttggccgggatgcatttgggagaagaagcctcttggtacattggcccacagctgatgattctcacttcatattatcatcagtatcacccccttcatttgcaaagattcactctgatcaaacagtgtcagatcgtgacatgtctaaccatactaaagctagctactgggaagagcttccttgtgggatatacagcatgcatatgaaagacattggaaagcatggtgcatgcatgaaggaagggtggattgtggaagttaacacacataaatggatggcttcttcattgaatggattgatcaaatgggagaggaaactcacagttcctaccatggagaacattcctgttgacagagggaaccatcagttgtctcagagcttcataagctcaagagaacctgaagaaaatacgaataatgggatcacaaaggcagattttctgtcagattctagtttatgtgatgcaaattgcataacacagtcagcacatagagtattggttgcattaagggaatctgtaatgctgcggactaaaatgaacacactctttcagggtactctggatagatctgaggacggagagtcagccccaatagcagtcctcttctccggtggcttagactccatgctacttgcagcactgctagaccagtgcattgattccaaatggataattgatttgttaaatgtcagttttgatgggcaacttgcccctgataggatttctgcaatagctggactgaaggagcttcagaggatatctccgtgccggagatggcgtcttattgagattgacactgctttgacagacttgaacggggaaagtgaacatgtgatgtcactcatacacccttcaaatacctttatggatttgaacattggtattgcactctggttggctgctggtggtgatggttgggtggatggaagtatatgtcgtatgcaagatggttctcgctataagtacaggtcgagatctagagtccttatagtgggttctggggctgatgagcagtgtgctggttatggtagacatcggactaaatataggcttggagggtggaacgcattggatcaggagatgagactagatgtgcagagaatatggaaaaggaatatgggaagagatgataggtgcatctctgatcatggcaaggaggcccgtttcccatttcttgacgagaacgtgataaaaactttgttggaaattccgttatgggaaattgctaagcttgatgaacctgttggaaggggtgacaagaagatcttgagagaggttgcaaggctgctgggcctacaagaagctgctcttcagccaaagcgcgcgatccagttcggttcaaggatagcgagggagtcgaaccgcaagaacttcggcagcaacagagccgcgaaccaggcatcagcaggcagcgtgcagattcaccagagtccagcttctccagtggcgtcggccacacgccagccatttcttaccaacaatcagccatgaacacgcttagctgtgacaagtgccgcatggtttggttgatggagcatcattatcagttgttacggttcatcacaaattttcaaacgattcattgtcagctggatggagcatccatcatttgttatgtatactagccctgaatcctgatcatgtaacagcaacttggacgtggttgaaacctaaaagtggccggctgctttgtgtcaggctgatgtggcgcctgcgttgggccggtttagacgagtaggtccaacctggatctgaccccacatgtcagtgactcaactgcaggggatctttctccggtctggacctgaccaaacaatgctggatgtaaagcagtcgtcggtgtcaatattttttaaaaaatcctatatttctttagaatcagctcgtacttctataatctcttatctactactataataaaaatatttatataaaaaataagtatataaaaataagtatttaaacattgatggttggctccatatttatacacttaatcaatagaaaatatatattttgtgttaatgttataccccggagtcgagtggcgagtccaatctcagactagccacgtgtacggcgtgcagtccttgctacgcgcacccctcctaccgcacacgcgaatccagccagcccacccaccgccgccgcctgctcgtccgcctctataagatgagacctgcccaccgccatggcgccatcccctccgtctctgacccgcctacccatccccaccatttgccgcccaatccgccccgccgcgctccgccttgcctcgactcgaattcttaccaaccgtttgtggcttgaatttgaattccagctcgaatcactcaggcggccagccgggagcgagagcgagctggaggagctcgattcgatgcgttgctgagcgtgggtcaatcgattcgggtcgggcggtggcgcagtccgagagatctgaaccctagcggccgtctgcccgtccggatctgtgaccagccctgctcggtgcttcggcggcatgagtgcctggaaggcgtggggaggagaagcggcggagatatgagcggaggaggcagcggcagcggggacgagttcgggcgggcggtggcacgcgccgcggttgcgcaggcgctggaggccgcggggttcgactgcgcgcaccgctccgcggtggacgcggtcgtcgacgtcctcttgcgctacatcacccacctgggccggtccgccgccttcaacgccaacctcgccggccgcgcgctcgccaacgaactcgacgtcatccaggtgctcgaggaggtcggcgccgacacggacggcttcgcgggcgcggcggacacgggccgctgcctcgttggttccggcgtcgtcagggacctcatggcgttcgtcgactccaaggacgaggtgccgttcgcgcggccgctgcctaggttccccgtccagcgcgtgcagccgcagccctctgccagcccggctgcggcggcggcggggagggagactgggttgaagcacgtgccggagtggctgcctgcgttcccggatccgcacacctatgtgagcacggaggtgtgggatgagccttcggcgaccaaggacagggtggacaaggtggagcaggtgcggcaacggaggaaggccgagaaatccctgctcagcttgcagcgaaggctggctatggcaggcgcggatgggtttcatccagcggttgcattggcggaggatagcgcagagaaggggaaggagatacaggcagctgggacaaagagaaacccgtttcttgagccagcattgccgcctggggagaaggatgtatctgaggttggtatgcctccggaaaagaagaaactatctgtcctcgaggcatttgcgccagctatgcaatctagaaccatcgtcagggatgttgatgctggggcaggattggatgaaaaccaaaggagcattgttcccaaagagagggctccggtgcaccttaagattggatttggaaagaagccgttggcagcagctctgaattcaagaaccctggacctgagagaagatccatccttcttgaaagaggaagcaaaggatgacaagaagcggagagcaggcatgatattaagggcatcaatggagaacccacaagagcttcctcagctctaaagttgtttgcggaggaagtgccgtacccagagtggagttgcatcatggtgtaattgtggaacttcagtttccagaatcttgaggccatgttccctgatacaaccttctcaggatcaccatgccctgatacaacctgcaccggactctcctgcctccacctaccgttttcctaaaacaccatgcgctgatagattctgcagcactgtaactgaagttggaagttccaccatctcactgcgttgaagttggtggttgtgctggtatttcacctttaactgtaaggactaatttgggaacccaatttttccactggattttcattttcctaaggaaaattagttcattttcccttgagaaaataggaatcccttagaaaaatatagtttccaaactagccctaaaattaaaagtgggttgtggttcaaacggagctgatttttgtgaggccatgttcctcatccccagacatggcatccaaaagaaagtttagttcttgtagctgtactccctggtagaatgagagaggtttgtacaaaaggtaacctgattgttcttaccaagacttgtcatagaaaggattgatgtatctagtggctactcaagggacagcttcataatgccgtatgtgttggcacgcgcacgcaccccgccgttgtgtttgggacgaaaacacttcctagaattcctagataactgttgaaggacttttatgaggatttattgattgattcgagttcatgtccttaatgacttgatgtagtgcttcatagttggaggctggggttgtataacagtgtaccatatggttctttcgacttttgcccccatctaacttgagtatttaagattgaacttgtaaagattttattttaaaaggaagcatgttgaaa

SEQ ID NO: 21820 - DNA, 1207 bp, Zea Mays
tgtgagtccctcaatcactcaattgacccaagacctttggcgggtcaatggccagcgcagattggttcttcatcctcggatgaccaacaacggacacctggagctgcccaatactatactggctcacgccagagtggaacacctggcataggcgatcgaggaatgttttcatcctaccaagcaggttctgttcccgttggactttatgcagtacagacggagaatgtatttccagagagacctgaccaacctgaatgtcagttctatatgaagaccggagactgtaagtttggttctgtatgcaagttccatcatcccagggagcgaataattcctactcccaattgtgcactaagtccattaggcctacctttgcgcccgggagaaccaatatgcagtttctataatcgctatggcatgtgcaagtttggtccaaattgcaaatttcatcatccgatgggaaaccctatgtatggccatgcttcatcaccgacaagtgaggcccaaacatctcggcgtatgctggcacatgtaccatcgcatccagaagtatcacctgacagtggctcgggaaggtctaggaggattgttcattcagattcccagcaaataccctctgttgaaaggatcaccgagagagaggcgtcctaagccatcctcggtgtcttcgttcatgctgcctcccctcccctcccctcccattcttgacgagtaattaaatgcaacaacatctgagaatccgaagctgtacaggtcttttgcctcatctttgagctttacataccggagcttgcttcaacatgtattgcatccaggcatgaaaaagttcttgccggttcgggatgctcatttgcccccataaaaacgggaacaaacctaccttatttaaacatatgtatgaaactcactcacctctggacattcaaacccattcgagtaatggtcccggtgttgtagtttatagagctgtgtttcagtggacaaacctttgcgaaactgactggggatgcgcaagcatagcctcctttattaattattatctcgtttttttcctagcatctctcttttcataagggcaacccaaagtgttggaataatagattgccaccataatgctctgtattacccaccatatttaaacctggttacttgtgagtaattttctctttgtagttctgacttactcgatcaatctgccaggagattt

SEQ ID NO: 21821 - DNA, 1986 bp, Zea Mays
gcggccgcgtccgcgaggaggatcgccgcgacgctggggcggggcgcatccgccgccgcgggagcccgggaaagcgcatcgacggttggagcctagcccaaggcatctgcatactcctgatcgttgcaattactacaaagcggtccttgagggcaggacaggaactaagcctcttggcaatggcatcattcgtgagctgctgacgaagaaatctctcaactcaaagaagagcttaggcaggcccgcaaccggattcatgagcttgaagctgagagccgatctgctaagaagaagcttgaccacttggtgaagaatctcgctgaggaaaaggcttcctggaggagcagggagcatgataaggtccgaagcatcttagatgctgttaaaggggatctgagccgagagaggaagaatcgacaaagggccgaagccatgaactcggagttgatggatgagttctctgagctgaagtcactggcaaaacgatatcttcaagactatgaaaaggaaaagaaggccagggaactgatggaggaggtgtgcgatgagttagcgaaggagattgcggacgacaaagctgaggttgaagctttgaagaaagagtcgatgaaggtaagagatgaggtggaggaagaaaggaagatgctacagatggcagaggtttggcgtgaagagagggtacagatgaagcttgttgatgctaagctgacactggacagcaagtactcacagctgtgcgagcttcagactaacctggaggccttcctaagtttccaccgaagcagcagtgtagacaaggaaacaacgagagatggtgaaaggctcagggaagcaattagctcaatgaagctccacggcaaagagttctcgtacaaaccgccgcctccttcggaggacatctttgccgtgtttgaggaactcaggcagagagaagaagtcagtgagaaggaaattggacagtgcaatggagatactcctatgagccgtgcaacaaagatccatacagtgagccctgaaactgacatctttctggggaaaacagcaaagagatatcccactcgaccttgcgccagagacgaggatgatggtgacagtggatgggagaccgtcagccacgcagaggagcaaggctctagcaattcgcccgatgggagcgaaccatcggtaaacggtttctgtggaggaaacggcgcgtcagcaagtggaaccgactgggaagaagataactgtgagaagtgcagatcaagtagcggcatcaccggtatctgttcgacagctggagagaggcacccgaagaaggcgtcgtcttttgcccgactgtggagatcatcaaacggcgacggcgggaggagaacaggttccgagttactgaatggtaggctctcaagcagcaggatgcccgatgccgctctttcccctgatctcaagaacggtgaggcgtgccaagtctcaccgggtgttggggaatggagtccggacctgctgaaccctcatgtggtccgtgctatgaaagggcgcgtcgaatggccccagccccagggcacccaaaagcgcagcctgaagtccaaactcgtgaacgcaaggaccaatggacgtaaggtacagctgcaccaagcgctaggacagatgatatagtatggcatgctcgttcatactagtcgtcgtcagaaagaacaccatggtctttgcctggtgagggaggtatctgaagcggacacctttgcctgttgagggaggtatctgatgcggcattggtcctccatcgagtgttatagctcgctgcccttgtagttgtagagcatttagctcgcttagaaaaatagtgacctccgatgctccgtgtaatcaaatgtaacagcagtattatttacggtatattattttttccccggacgttactcaatagtgctattagcttcttgcgtccctttgtgcggtttctctttctttcaaattcaaatcgtataaaaagcgctcgatatcgcg

SEQ ID NO: 21822 - DNA, 2215 bp, Zea Mays
tgttgttaccattgaaaagctagttgtttgcctttaaatttgtgcattggcttagatggtctggtatgcaagaatatgccagtgggcatatctgctacattgtcctgtcatcagaatatgctgaattttttgagaagttcatggcggtaatgataaaattggttcctgcttggaaacagtccagttctccaaaacatggttcccactcccagagttctatagctttgctccttgtctgtgttaatgagttttgctgtcttggggatagacaatttcatgaaggtagttacagctagatgcatctgtgtcaggattatgatttgttcttgtattaccgagatccaggaataacctagtctcagtgcttctcttctgagatcatgctggagagacacacataccgccacaggggctttggcttcgtgacattcgaagatcgaagggcagttgacagcgctatcaaagagatgcgtggccaagagttagatggtcgtaccatctcagtgaacaaggctgagcctaagatgaatacagatgacacaaggttcgacagtggcggtggacgaggagaatatcgaggtggtagaggtgatggtccaccccctggcaattgctatgagtgtggccgtcctggtcattgggtccgtgactgccctagtgctgctggtggtcgttctggcagattcccatccaagttcagtggtggtggcagaggagaccgcttttctggatcagataggtttaatgatcgttacatggatgatcgttatgatggtgatcgttatgccaatgatcgctaccccgctggtggcgatcactttgacggagacaggtatggaggtggcctggatcggtacgcaccgaatggttatgggagggaacgagaaagaagttacgagagagatggagttcgtggcggcggtggctatgataggagtggctcaagaggtggtggaagctatgacagggatggccctagaggcggcaagggtggtggctatgtcagggatggcccacgcggtggtgttgctgatcgttatggtggtggaggacctgcacgctatgatggtggaagttacagggagaggcctgggccatatgatcgccctagcaggggaggaggtcgttttgatgaacgccactgatgaactgcctctagactcgagcccctggtcttgtagtttagccttttgcagttctgcatagcttaatgtttaatgggctatggaagatgcctaatttacccccctctttggcacttcaatgtctgctctgtatttcaaccagtacttgggcgccgttgttgccttctcgataagtttatcaagctgactgtttttgcatgagacgggtcatcctttgggctactactctgcctgttggtccggatgtttcagttgtgcatgccgtgcgtcctgcagttatagtggagtcgaggttctcagtgattgtttgtcattgttgatctgaatatctggtatgcatggactgactatgttttcagtgattgcctgtcaccgttggtctgaatatctggtgaacatatatgctcagtgacggtgcttgtcaatgttgttggtctggatatttgggttcgcaaggatatatttgcagtgctgagatgcaagtgcttaaccgaactgtagccaaagtaaccctatgctagaagtaactggcaaccatgttgaattgttaatctcgttagttttttgtctggggtcttgaaaatgccctccagatctctcacgagaacgtgaacttcacctatcttctctatcgagctgcatcgccctctcttttggcgagcaggtctttggattcaccgtttgcttgtgtgatatctgcttagttgtgtggggatgatcaagtggttggaaagctttgctgtgactgttcgttgatcttctttctgccgctcattggatcggaggaccgtcttgtttttgtgtgaatgttcgaggaacgacactgttaacaactgacctttttatgttgacaaattacagagttgttcaccttggcattagatgttcgtttgactttaatctaaaatgtcttctattgtttatattgtgttttgtttctatggattatacctgcagcagttcgaacatccgaacagtcagcatgttagcttgagttcagcaaatgcatgttttttttgataaaataagggaaccgagagattcagaggtggagcaaggtgcggttagtc

SEQ ID NO: 21823 - DNA, 1713 bp, Zea Mays
ggactttacttctttgatcacagcgtagcttcacagttggcacagcaaaaagagtataatttgaagaagccttctgcctaccactatgacattttggtccttggattcgtggtcctgctctgcggtttgcttggtatccctccatctaatggagtgcttcctcagtctcccatgcacacaaaaagtcttgctgtccttaagaggcagttgctaagcaaaaagatggttgatactgccaaggagagcataggaggaagtgctaccagtttggaaatatatggcaagatggaagaagttttcatcaaaatggatagcgaacagaatactgattctgttgacagggagttgaagaacttcaaggatgctgttctgcaagaaggcgacgaagaagggagattggctagagaatttgaccctcgcaaacatatagaagcccacttgcctgtccgagtgaacgaacagagactgagcaatctgctgcagtccatactggttggtgggtgtgttggagctatgccagtcatcaggatgatacccacatcggtcctctggggttactttgcctacatggccatcgacagtctaccagggaatcagttctgggagaggatacagcttctgttcattacagaaagccgacgctacaaggttcttgaaggtccccatgcatcgtttgtggagtcagtggttcccaaaacagtaaccatcttcacgatcttccagttggtttacctcctaatatgcttcggcataacgtggataccgatagccgggatcctgttcccagtgcctttcttcctcatgatcgtcatcaggcagtatctcctcccaaaattttttgatcccgtcgtcttgagggagctcgatgcagctgagtacgaagaacttgacggggtcccccttgaacacaaactggaagatgaagcatctgaagtaggaagttgtcctagccgtcctgatgcggagatattggatgaactcacgaccaaccgcggagagctgaagcacagaagttctagcctgcgtgaagaaagaccaattcaagtgacagtgagcacgcatatggagccaaccggttgaattttttgggctcttttcttttctctgggataacaagtagtcaagtacgcaccacgcatgtcagtggctgctttccgcctaacataggaagattttcacaggctagttcgagttgcttcaagtgcggttcagccaagcctgtgaagacggcgaagtgttctttttatccgtagaattatgatcctcaagctgcactccgttgatgtgaatactgttgctatgtaatgtactgctactactagtgttgtacttgggtttttgacccaaacgcgtctgttggtaaggggtgatttgtaagaacagggacttacgtaaactacgtaggatcgattggtaagaagagagggagagaggagatgcaatacaagtcttcttggatatgaaagggggaatgccgaaggggcatggagtagaataatatcatatattgtcattagttcaaatagactgtagtaaccaagtttgcactctttgactgcaatcgcgtcagtgaagctgacggtgaacggttgattttttgtgaacaaaaagtacgaaagcagagcaggccgcagcaacggcacggcgtaggcgtcactgcacgcagcagcggtaacgctgcccatgtcgcgtgagtgagtgacacgttgtacg

SEQ ID NO: 21824 - DNA, 485 bp, Zea Mays
aagtggggttgtgcttgaaggccacgtaggtgtgcatgggttgtgttggcgttcccagaactcctctccattgtgaactaaaggaactcagtgaccaccccctgcatatatatgcagtacttaaaggctttgagtagtggagtttcttccctgccttaagttctacctgaagtccacagcgtggatgtggtgatccttatgttcctgctggtgctaaactcctccccagtctccagagtaatatgttccagagctatacacactgtcttccttggtctggtgaccgcaccccatagattctcttacctcaccatggccaagtcatctggagcagttgtgcatctggggccatgccaccgtggtctggcgctacggacagcctccacgccggccgagcgactcacgctttctccggccgtcttcacgcgagcaccaaagtcttgcaagaaaaggcgggaagcaatcatcccaatcttcagttcccg

SEQ ID NO: 21825 - DNA, 131 bp, Zea Mays
aggtggcttagttcaaaaccactaacccacaaccggggatattgcatacatgtgtattgttattttgaggccattcagttttgaatggatcgacgctcaaggtaaggtgagatgtgagagcatgactgaac

SEQ ID NO: 21826 - DNA, 649 bp, Zea Mays
cccagctcacgttccctattggtgggtgaacaatccaacacttggtgaattctgcttcacaatgataggaagagccgacatcgaaggatcaaaaagcaacgtcgctatgaacgcttggctaccacaagccagttatccctgtggtaacttttctgacacctctagcttcaaactccgaaggtctaaaggatcgataggccacgctttcacggttcgtattcgtactggaaatccgaatcaaacgagcttttacccttttgttccacacgagatttctgttctcgttgagctcatcttaggacacctgcgttatcttttaacagatgtgccgccccagccaaactccccacctgacaatgtcttccgcccggatcggcccggcgaggccgggccttggagccaaaaggaggggcggtgccccgcttccgacccacggaataagtaaaataacgttaaaagtagtggtatttcacttgcgcccggaggctcccacttatcctacacctctcaagtcatttcacaaagtcggactagagtcaagctcaacagggtcttctttccccgctgattccgccaagcccgttcccttggctgtggtttcgctggatagtagacagggacagtgggaatctcgttaatccattcatgc

SEQ ID NO: 21827 - DNA, 2103 bp, Zea Mays
agggaacgttgaagagtcccgtcccgtcgtgcaccaacatgccgccgcagctgctcgccagctccattattgcctctactccgccatctccttcctaatcgctcgcctcgtttcatcacctgagctctcctaatctcattcaccgttgcttgctctttgaattgcctttgcccccatttgctttcctgtttcttccatcccatccgtaccagctgacggtgcccgggttccatgcccagcggccagcgccttgtgacctgatccgcggctcgtccattcctccctccgtgaatggctcctccagcagggtctggggcagcgacggagggagggccggcacggcggcgcggcaccggcaccggtaccagccccggccgcaccaaagtgtgggtcgagccgccgggcaagagccaccaccagaccccggcgcggtcgctgcccccgccctcgcccccggccccgtcggtggcggccaagagggtgtccgtggtgtactacctttgccgcaaccgccatctggagcacccgcacttaatcgaggtgccgctcgccgccccggaggaaggtctctacctgcgagatgtgattaaccgcctcaacgtgctgcgcgggaagggcatgtcctccaagtattcctggtcttgcaagaggagctacaagaacggcttcgtgtggcacgatctgtccgacgacgacctggtgctccccgcgcagggcaacgagtacatcctcaagggctccgagcttcttgaccgctcgccgccgctagatcggcagcagaatggcgttagcaacccaaaggtggagggcctcaagccatgcaaggaagagtcccctcagtcgcggggctcgcaagaaggatgctcgtcgtcatcgtcttcgtctgcccttggcaaggagatctcacctccacctgccactcgacggccacagcagcaggcgcaatcagcagtgctgccatcgtcgtcggcttccaccaaccatgaagatgacctgtgcccgaccgcgcattcaggctcgtccggcaaccagtcccctgaacctgcaggaagaaatgctccattgtcagaggctagctccccgggaccttccgaatacagggtctgcagacccatcggagctcaggatgccgcgacacaaacagatgacagtgagagggatgttgctaaaacccatacttgcgtggtcggagtgtccatggatacgacgttagatgctgagattcaggaatgtcatcaaaggagctcactgctgtcaccaaaggtacccaagattgttcaggaatcaccggccctgtgttcctctgatgcttcaccgggtgtcagagttgagaccttggagtccctaataagagcagaagcctgtaggagaagtagctttagaacactagaggaggaacacatgcttggcccaattggtgtgaaactgaagccagccaatttgctaatgcagcttatcacttgtggatctatatctgttaaagaacaccgaggctttgggttcatcccaacgtacaggcctcggtttacacaagttgagttcccttcgtcagtgttctccactcctgtggcattgcgacaccttgacaaaatcccctgcaatacaagaacaatcgggacgagagctccagagtctgaacgtttcagtgggagcttggttgagaccaagatgcaggacgagtcaaggagaggaatcagctcactcaaacgctcatcatcttatgacgaggatagagtttatagagcagcacattccaaaagtgatacagaaaactcttgtgagtcaggtagtttcaggtgtcttccgcagactatcagaatcatatcatgtaagcaatcgagaaatggaacaatactctcccctttctctgatgtgagaaacagctctagtcaacaagaatatagtactagatcctcaccactgggttcatcaaagagtgcaagcaataggatgactgatccatcactgggtaaagtagattcattccacaaggaaaaggacatgatcaagatcgaagaaagcttccttctggagctcgggttataatccaatctgcacctttgtgtgaagatagtgatggcagcaatgaatcactcattgcaa

SEQ ID NO: 21828 - DNA, 3834 bp, Zea Mays
tggacggatgaggatgccgctgtgctgatttggtcaatgcgatgtgttagttctgttgcctcatggtgtaatccttacaactccgatgattctgtttcttctgcattttccgtgctatgggacttctatttgaatgttacccatcactccactattgccaatgagatcggagctgaacttcacctggcagcttatgaagctcttgcctatgttctggcagttctatctactgcttccagtactcagtttttggattttgtggaagcgaagcagacagatcaagcccacaagttttcattggacattttggtcaccactttccttgacaacatcaaccatcttcttacagagggaactctgacgcgaagcagaagagctgttttgatgacttggaagtggctttgtatggattctcttctatctatttcaagctgctatagtgacaatgaatctcaaatgaagaggttggaacctttattttctgattcaaccctccgatgcatttttcttgatattatcgaaagccttgaaaacactggtgaaaattctgtcttatctatcttgagatgtgtgagatctgttttgagattgctacacctgaatgagggcaacacaattttttcctctttaggcatcagctatgagatgatgatgcaattagcaaagtcttcctggatcttgcaccttaactgcaacaaacgccgagtggctcccattgctgcactactatctgcagtattgcacccagcaatattttgtaatttggaaatgcaccagacaaatgaaaaagggccaggccctttaaaatggtttgttgagaatcttcttaatgaaggctcaaaaagtcctcgaactattcgcctagcagctttgcatttaagtggtctatggttgatgtacccaaaaactcttagattttatatggaggaactgaagctgctctcgttatacggatctgtggcattcgacgaagattttgaagctgaactctctgaaaaccatgaagcaagatttgaggtttccatgctagcacaaagtcctgatcgtgaattcacagaggtgttcattaatacagaattatatgctcgtgtttcggttgctgttctctttcatcagctttggaaacaaatcaaagaacatagtatattggaaactgaagaagctcttgaatgcggcaaactatttctactagaacttctggactcagcggtgaacagcaaagatctttcaaaagaactctacaagaaatatagcagtgtacataggcgtaaagttcgtgtgtggcaaatgatatgtgttctatcacactatgtagaagatgatattgttggagaagtgacatctagcattcacatctgtctttatagaaataatttgccagctgtccggcagtacttggagacgtttgctatactcttatacttaaaatttccaaccttggcagaggagcaacttattcctatttttcatgacaaagggatgcgacaacaggcactatcttcatatgtttttatagcagcaaacgtcatacttcactcaagacagtccgtccagatataccacctgaatcaattgcttcctccaatactgccgtttttaacatcccatcatcacagtttacgtggttttactcagcttcttgtccattcagtgctatcgaggttgtggcctactctgcatcccgaaacttcagaagatgcagtctttgagaggaggtgctttcaagaattgaaagattatttggcagaaaattctgactgtgttaggcttagagtttcaatcgaaggtttccttgatgtctttgatcccaatgcatctgggaccccccctggaatatttagcgcccgtcctgaggtgtctgacttcgaatgtgttccggtgtcagtgatggagcgtgtgattgagttcctgaacgatgtgagggaggacttgagacaagctatagcaaatgatacagtaacaatcaagaatgaggatctcgcggtgggagagcatcacaagagtgacgagagcgtgtctgagatggtaaaaactggtcaagaggtacttgatttccagaagaaaataacaccccataggggggactccgagcaagcattgaacttgaacaccagaggtcattcaggcgttggtgacgaatacatttcaagaataatttcagagatggaggaagatgaccaagttttcgacctagcgctagaagcaagattgcatgctgcggaaacgatcaagcagagccggcaagaactgatcgtggttgcgtcattggtggaacgcataccaaatcttgcggggctgacgagaacgtgcgaggtcttcagagcagccggtctggttgttgccgacaagagcgttcttcaggataagcagttccggctgatcagtgtgaccgctgagaaatggctgcctgtgacggaggtccccgtggacagcgtgaaggcttacttggagaggaagcggggcgatggttactcggtgattgggctggagcagacggccaacagcatgcctctggaccggttcgggttcccggaccggacggttctggtgctggggcgggagaaggaaggcatccccgtcgacatcatccacattctggacgcgtgcgtggagatcccgcagctggggcgtggtgaggtcgctcaatgtccatgtcagcggcgccatagccgtctgggagtacacgcgtcaacaacgcaatcagcgttagcttgttgcttgtttttgctccattgaccattgacgacgaagactactactactacctgggagggagagtagaaatcaacatgcagcactcacaggaaggagagaaagacctgggctgggctgggccgacagtaatgaacgctagcccaccttcctttcccaccaccaagacgtacaagtcagactatattacttcatttatttgtgctaatatcgtaacgttttattgtgtaagcaatttggtacttgaagcctgcctgcatttggatttggagcggcatcagaagttttttaaagtatttattcgtagaggggtcgatcgagctcgcccttttattgctgcaaatatataatacacattattactgctgcaaacataagattacgttacattacattaaatgaaaagctatattacctcccgttctcgttatcccgctagttcatttttaacgaaacagtgacaaatatgaactaaacagcaacaaataaaaagaaacggaggggtactacgcttttttttatttcagtgcgcgcgtgtctgctccagacggtgctgctgcgcccagtccttgacgatgtgcggctgctgacccgacgacgaggtcgtggtctgaaggtagcggtacacccacgccagcacagccaccgcagccacgccgaaccctcccgacgaaacgatgcctaccgtgagcagcgccaccgtgatggccgccggcaccagcacggggctgaagatcaccatcaatggcgtcgccacgatgagcgccagcaccgtgcccgtcaccgccagccccgacaacaacaacatggagaaggctgccgtggctgtggctaacgccttggccaccgccatgggcgcgggcggcggccgctgctgctgctggtgaccgtagtgggtggcgttgtagtcatcgtcgccgtagaggcccctcatgtagttctctccgacggcctcgcttcttctccctgcacgatggtcatccgcatgatgagcagtggccatacaagctctggctagctagctagctagtatacaatgattcaaaagaaatagatgagtggagcagctagtaggttcttgcataatatatatatagatagatagataggataaggactgga

SEQ ID NO: 21829 - DNA, 812 bp, Zea Mays
ccccactcctcctctcacctcacttgctcgtcgccgcacctggatctggctctcgtctcctccaagcacggattaggagtgcacctattttgattctgcgaactgagtaactgattctaaaggatagggcaagaaggctcctttctaagcctatcaagtttttcaatgaaatgcaagagttgtttattaacagcagtgctgatggctctctagccatggaagctacaacttgtatgaatgaaactcatcctggagatgacagtgacttcaatgatgatgtgtgcagtgacttctccaactatcctcagcctgtgcatgatctaggtgatgattctgacactttacaatctcccaatcatcatccatctcaaagtgttgatcatagctcgtcaagttctggactgaagcgcccacaaggagagggagtaccagcgaagaggaacgtggaaccaaagagtcgcacaacaaagcaggatgatccatgtaggagatgaatggtgtgatagttggggtttttgcatttcttctaggttgatggatgtcaattgatggagatatttggtggttgtgactagtgttacattgctctttttgttgatttttaactttgagggtaccaatgagcatagtgcatagcaccagtaccttttacaattatggaatctctgcaaagcaaggaaggcattggactgtaataaattttgctccaatttcgcattgcaaatgttctagtagtgtcagatttttctctaatgcttctagtgaaaaatgagaccttttggagacagtttctaaattttgtgtgctgctag

SEQ ID NO: 21830 - DNA, 568 bp, Zea Mays
gcttccaagaccttattttcatgataatcttcactcaagaaaagatgattcaaagattgaataattttgtccgaaatcttcagcaacagttggtgcagtgtcgtggcaacaacaggacagttaatcgttctggaacttctttgacatcttatattagtgagatccagatgccgcagatgatggatgactgacaatgtcgcgcggcatgaactatacggataaaaagataggatattcacagagtcatgtggacagcgaagttctcccagtaaaagcagtcataatgtagtattagcctggacagaacaatattcgatcagttccagagagaaaggaacgctgatcctttgaaaacccgtgtaattttatttcccttttcctctttttcccccctaagagaactgaaaattctttgttttatgataggcatctatatatacttattatcctctacagatattgtgatatgaaggtgttttagaagtgtaaattgctctttaatgcgtgctctggcacaatagcactgaaacctcttcagtgaggagaggactctgcctttacatattac

SEQ ID NO: 21831 - DNA, 604 bp, Zea Mays
atgacgatggtctccctcgccggcttcaccgctctatctgccggcctcctgctcatctcctcgttcctgcgagctcaaggagccagcggcggcgagtcgtacgtgccggtgcggagggtggtgtaccggtccatgtcgccggcggcgggggcggcgatgaccacggcagaggcggcggcggcggcgccaccgtaccagccgttcgaggtgtgcgaggggtgccggtgctgcgcgtcgtcgtcgtccaataatggcagcagcagcagctgtgtggacacgagctgctgctacgccatcgactgcgacctccccggcaagcccttcggcacctgcgccttcaccccgcagacctgcggctgcggcgccgccagcaacaactgcagccagccggcaccctgaccacgaccggtggtttcgatcaattcagagtcggcggctacctgttgggtttggatgggtttggctttgactcttgctacacagcagcactagtatgctattgtcctgtcagggtggccggcctaacttgtcgccgtgttatatacatgcaaacacacgtacaatagagtacatgcatccggttcccttttttatttaaaaaaca

SEQ ID NO: 21832 - DNA, 1261 bp, Zea Mays
ctccctatcctgaaacgccaatccgataaaaagcgcgcaccggcgtggcgcgcttcgcccccaggagccccgatcatctcccgctcccttccttcctcctcctcctcctcatggctctgtcgtccgccggctcgttcgtggcctgcagcctccggccaagcggagctagcatccatgccccgaggtcgccgccgggcgaacgcgaccaagggcggcgtgtccaccgtgtgcgagccgctgggccccgacaggccgatctggttccccggcagctcccctccgccgtggctcgacggaagccttccaggagactttggatttgaccctctcggactaggttcggagccggagctgctgcggtggttcgcgcaggcggagctgatgcacgggcggtgggcgatgctggcggcggcgggcatcctggtcccggacctgctggcgcggtggggcttcatcgacgcggggttctcgtggttcgacgccgggtcccgcgagtacttcgcggacccctggacgctgttcgtgtcgcagatggcgctgatggggtgggcggaggggcggcggtgggcggactacctgaggcccgggtgcgtggacatcgagccgcgcttcccgaaccgcaagaacccggtgcccgacgtggggtaccccggggggctgtggttcgactgggccaactggggccgcgggtccccggagcccgtgatggtgctgcgcaccaaggagatcaagaacgggcggctcgccatgctcgccttcgtcggcttctggttccaggccgtgtacacgggccagggccccatcgacaacctgctcgcgcacctcgccgaccccggccactgcaacatcttctcggcgttcacgtcccactgatccgatcttgcttcggagctggcggagagactgcgaaggattaaaaaaaagggcatcctgttgagggagaaagaacttcgcttgggacgtctgtagccaaaagtttaatacgcatctgcaggagaaagaaaagaaagaaaaagaaattatcatccagagaatacgtgggaaataagcaggaatacataaccaagatatttgccaggccatcatgcaaatccttggagttggcggccacaaagataggagtttgttgtaatcttttcctattatttagaataagttagttttatatccagttagagacgggatatataagcactattgtaagctgcaaagacgagagatcaacagttatcattttctttaatctactacatattccttt

SEQ ID NO: 21833 - DNA, 3229 bp, Zea Mays
cggtcgtcggcccacctagttccttatccgtcgtctcctacgcctccatccacactccacagccacgccacagtcgttgcccaccacccagagcacgcggcggcttgtcgccgtgcgcgccgccaccatcaccacacgaggcgccggagaaagacatcaagcgcacgcccatggccatgactcctcacgcctcggcggccaccgtagccgttacccctgcgttgcgctttccccacactttgtctgccacgggcctctcctcaccgcctctggctgggggctgcggcggctgccgggttcggttccggcccagccagcgcggccgaggcacgcaggggcggcgaggtggctctcacgtgtcgcgcgtggggggcctgctgggcaccgtattcggcgggggcggccgcgacgacggggaggccacgcggaagaagtacgcagacaccgtggcgcgtatcaactccatggagctcgaggtctccgcgctctcagacgctgatttgcgtgcacgcaccgctgcgctccaggaccgtgctcgctccggggaatccctggattcccttctccccgaagcatttgctgttgtgagggaggcttccaagagagttctaggcctccggccctttgatgtgcagttgattggtggtatggttctgcacaagggggagattgctgaaatgaagaccggagaggggaagactcttgtggccattctgccagcatacttaaatgctttgagtgggaaaggagtgcatgttgtcactgtaaatgattatctcgcaagacgtgattgtgagtgggttggtcaagtcccccgatttctaggactgcagagaacatgacacctgagcaaaggagggaaaattactcatatgatattacttatgtcacaaacagtgagcttggttttgattatctaagagataaccttgcaatgactgtagatgaacttgtcttgaggaacttcaattactgtgtgatagatgaagttgattcaatccttattgatgaagcaagaacacctcttataatatcaggcctagctgaaaagccaagtgatcggtattacaaagcagcaaaaatagctgaagcttttgagcgagacattcattacacggtggatgaaaagcagagaaacgttttacttacagaagaaggttatgctgatgctgaagaaatactggacatagatgatctgtacgatcctcgtgaacagtgggcttcgtatattctaaatgcaatcaaggctaaggagctcttccttaaagatgtcaattacattgttcgtagcaaggaagtgcttattgtagatgagtttactggcagagttatggcgggcaggcgatggagtgatggtctccatcaagcaattgaagcaaaagaaggtgtacctatacaaaatgaaaccataactctcgcatcaataagttaccaaaacttctttcttcagttccccaaactatgtggcatgactggaactgcagctacagagacccaagagtttgagagcatatataaacttaaagttactgttgtcccaacaaacaagccaatgatacggaaggatgactcagatgttgttttcagagcaacaaatggaaaatggcgtgctgttcttgttgagatatcaagaatgaataaagttggccgtcctgtgcttgttggtaccaccagtgttgagcaaagcgaatctttatcaaagcaattgcgtgaagctgggattcctcacgaggtcctgaatgctaagccagagaatgttgagagggaggcagagatcgtagctcagagtggacgccttggtgctgtgacaattgctaccaatatggcgggacgtggaactgatattatccttggtggcaatgcagaattcatggccaggttgaagttgcgtgagatccttatgccaagagtcgtcaatccaatagatggtgttattgtatccaaaaagcagatgccaccaagaaagacatggaagacaaatgaaagcttgttcccatgtgaactttcaaaagaaacattatcgtctgtcaaggatacagttgaaatggctgtcaaagaatggggagataaatcattaactgaactggaagcagaagagcggctgtcctattcatgtgagaagggaccaacacgtgatgaagtaatagcgaatttgagaaatgcatttgtgaagatagcagacgaatataaagtttacactgaggaggaaaagcagaaggtcattacagtaggtgggcttcacgtagtaggaacagagcgccatgaatcacgcagaattgacaatcagctccgtggtcgaagtggaagacagggggatcctggaagctctcgcttctttcttagtctcgaggataatattttccggatctttggaggtgacaggatacagggtctgatgcaagcattccgagttgaagatcttcctatcgaatcgaaaatgctaacgagggctctagatgaagcgcagcggaaagttgagaattacttttttgacatcaggaagcagttgtttgagtatgatgaggtattgaatagccagagagatcgtgtatatgcggaaagaagacgtgctcttgcatctgacagtcttcaatcacttattgtggaatatgctgaattgacaatggacgacatattaggggctaacataggacctgatactccaaaggaaaattgggacctgaacaaacttatagctaagctgcaacagtattgccatctgttggatgacttgacaccagaattgttggagggcaaaagctcaagctacgacgatttgcgggagtacctgcgtaagcgagggcgtgaagcttacttccagaaaactgttagttatttctccttttcctttcatggatattgttttttcgcatggttcaaaggttttaagaagttcaacaacaacaacatcaacatagccttttagtcccaaacaagttggggtaggctagagttgaaacccaacaagaagtcaccaaaaagagaaagagagagaaaggggaggggaaaaagtttttgagagaactaaaagggaaaaggcctaatcacagttcgggcacgtggatagtttttttccaagcacttctatccaaacacaactcctttggatattccattccttcaagtcccttttgattgcttccttccatgtcaagtttggtcgtcctctacctctcttcacattattgtcctgtcttatgatgcctttgtgcactggtgcctctggggg

SEQ ID NO: 21834 - DNA, 352 bp, Zea Mays
agcctcgccggcttgaacccgaggccatgctgctcgcgtcgtcgtcgccgtcgctgtgctcatcgtctccgttgttgccgcgatcgccattgccgcgcctcttgtcaccgtcacggggcttgcgctgcttgttccgttcccgacgccgcgcctcccaatgtgcctcagtgagcaacagctgcccgatgccctccgtggcgacctccttcgccttggcgtcatccgcgtcggcgtcctccgcaacctgtagtcggccgacgagctcttcaatcgtcgtcgtgttgaggtcggtgagcatctcgatcgccacggccacctgcttgagacgcttggggacgacgcggaggatctt

SEQ ID NO: 21835 - DNA, 236 bp, Zea Mays
tagccgcgagagtagctagctacttcacgagcaagtcgatcggtcgagcagtgtggccagcccatcacatcatcaagtcgattgcaattgcaataatactactagcttgacgccggcgttgggggtgcgggcgacgtgatgtccaagcaaaagatcgtgatcaagctgggcgtacccaacgccaagaaccggtctaaggccatgcagctggcatccaaatttgtcgcgtacgtgcc

SEQ ID NO: 21836 - DNA, 1633 bp, Zea Mays
tggaaccacaaatccaaaatcccttgtttactctgtggcgcccctggatggatccttggctttgtcctgactgaagtggcttcttctttcagttacctatgtgctctatacatggggactgcctcctttcatcatgttcccatgacttcttccgcactctgacgtggtggatagtgccgtgcctagccgtgaaggtgacccgggaggtctcccgcttcgcgcacatcctgcagcaggggtcgtcgtcggcctggacctggagggcctgcgcggtgctgttcgcgtccgtggcgtcgtggacgtacctgacgacgatcatcctgtcgtcctgcatgctcttcaacctggtgtgcagcctgcaggtcatccacttcgacgactacggcaagctgctggagcaggacgcggacccgcttgtgtacctcaaggagcacctgcagctccgccacaacctgtccaagatcagccacaggttccgcgtgttcctcctcctgctcttcctctccgtcaccgccggccagttcgccatcctcttcaagaccacggcgtacagcgggccgatcaacttcaccaacggaggggacatcgctgtgtcttcggtggttcaggtggtcggcctcgtcctctgcctgcacgccgctgccaagatctcccaccgagctcagaacatcgctgcgctggctagccggtggcacgcgctggcgacgtgctctaccgactccacctacgtgaccaccccgaacagttccgggaacctcgcgcctttccccgcgcacctgttcctgagagactactcggggagtgacctggagtccctggacagcgcgtcggttcagggcagctcccacggcacggcccagctggcctcctacatgtcctcgtaccacaagagggagtcgcttgtgctgtacctgctggccaacccaggcggcatcacgatatttggctggatcgtcgaccgggcgttcctgaacaccatcctgatgctcgagctgacccttgtgctcttcgtgcttagcaagaccgttgtgatcccggccaagacactggtgcacagttacatcggctacccatgattacgaccagattcaggttcaggttcagttaggcgatgggatttgatgacaggcaggttgccggggtttgcacgctacggtgaatgaaactggtaggaatggtgggtctcccccctcaagcgcagatcatatgcgctggcaatccaagcatgccgcaggttgaaggcaggctgagggctagggtcgtgacgtgtacagtttttttggggaaaaaaatctctacagccggttgcagaaagcggtcctgcaggttgcaaagcaggttgcttcagatttacacttctgcaccaatcaatgatcagagattgtttttctctgcagccagttgaagagaatttctcccggtacatatactactaatactataaaccaatatatgtattattgtacgtatacacgcacgcaatgtatatgcactcttataataatataaactaatatactacctccgttcacaaatatatgataccattaactttttttcaaaaattttgactattcgtcttattcaaaatatttattaaaaaaatataaattttaaatcaaacacagactac

SEQ ID NO: 21837 - DNA, 2065 bp, Zea Mays
gcaccaatacaaagttttggaaggataaatggttaaatggttagattccatcctcagcgttctgatattcttgctagtggaagtttggattgtgaagttcgtctctgggatgctaaaacatctcgctgcacagcagaactggtcttctataggccagttgcatcaattgcatttcatgcaactggggagcttctggcagttgcatcaggtcacaaattgtttttatgggactgcaataaacgatgggaaactttggaacttccaatcatactagaaacccgccgttcactgagagctgtgcagtttcacccccatggtgccccatatctacttacaggagaggttcacaaccttgattctgaagattcaacgatgacccctgcacttctgagcaattattccttcagagacacacctctccttggtggttctggggtagataacttgattagtgaactacaatacatgcagaattttgagcaggttggtgcctcatcatcagttccagtcactactggcagttttgatgggtcaaggctacatgatacctctggccatcatctgatgacctctttacctagtgttgggaggccccttctgggtactcatgctgctgaagctcctgccatctcattaagtgtcgggtcagaacaaactacgtctctgcttggtggtggcaccgaattaccttgtacggtgaagctaagaatatggcgccacgaaatgaagaatccatttatcacattagggcctgaggcatgcctcttgacaattcctcatgctgtactttgcagcgaaatgggtacccatgtttcaccctgtgggcgatttttggttgcttgtgttgcatgtgtgctgccacacagttatggtggccatggaagtcagttgcatgaacattatgactctactggggctggaacatcaccaactcgccaagcatttccgtctcgccaaattatatatgagcttcgggtttattctcttgaggacgcaacatttggaacagttcttgcaactagagcaataaaggctgctcactgtttaacttccatccagttttcacccacatcagaacacatactattggcatatggtcggcaacatagttcactgttgaggaccattttgatcaatggggagaccagagttcctgtgtacacagtcttggaggtgtatcgagtttcagacatggagcttgtaagagttcttcctagtgtaggagaggaagtcaatgttgcatgttttcatccttcccctggatcaggtcttgtttatgggactaagcaagggaaggttaggtttcttcggcaccatggtgcatcattcacttgctggggagaacgttcatgagatttagaggcatgtgctacaaatgcagttctggacataataactgaatttgagcatcgcattcttgtgctgctgaatcttatcttgattatggcttcggcaacatcctggaagaggaatttatggtcaactgagatcatctccaagaccgagagggctaacagaaaacatcagatttcagcatccaattactcttgactaacgttccactctttgcaaaaccattgtgccggcaaggagggctactattttaggtccggttaacgtgtgtaagtagccccgtctatgagaaaatggacaaggaatcgcagcctcattcagcatgaattaccaacgatggttgactactactagtacaaggagacctcaagggatacggtcgcctgtacgaatatggatgcgagccatatactgacggccggcctcccaaagatgcgatgtgttccttagttcgatgattttttttttgaaactgtatagaagcctgcgaagaaatgtagtggttggctgagtgaagtgagggaagggataggcattatttcccttgggtgacattgaccctgtttggatcagattctagccgcgagaatctgattttcgtaataaaaaaatcgaaatcgaagtggtttacggtctatttgttttggccgaataattctttccatttggcattaaatcgccaaaaaccaagaaaaaaagcatggtcctaaat

SEQ ID NO: 21838 - DNA, 230 bp, Zea Mays
cttgagtatttggagaggtatccaggagatcatggatgaagaaatggatgaagatgtcatagtcaaggctgtggactgctcgaaccaatcagagatatcgagctcaaacagtttatcaaaggctactcagatggcagcaaaggaggagatggccacttgttgatgctgaaattgaaagagtggccccgacccagtgtcttggaggcgtttctgttgtgccaaaggccaga

SEQ ID NO: 21839 - DNA, 1145 bp, Zea Mays
agattttgagtcggcatatatctatatttcaaataagtatcggtcattatatttatatgtgaatagcgacgcttcgtcggtcggcaattctcgctaatagcatctcatcgttagtcggaataaagaccaaagaccacagtcgccgcgcacccacgctcgtacactcagctgccgctgcgccaaggagaagctgtgcgcggtccaggcacaggtgcagggtgaacaggaggcggcgacaacactccagaggagggtggatgagctagagagcggcggataggagagggccggtgtgttggcggtggagggcgtggagctgcgcagggcaaacactgtgctagaggagaacaacagggagcttgccttgaggctgcaggacgcgatcgagcaggctactgcatctgcctccgctaatctagctcctaaggttcgacatgccccgtgcctaccatcactctcgatttgaagaagagtctcaagattttgcaggtgttgtgttactcctgattcagttaccttactggcagtaggatgccattgcaacaatctaaaagtgcaatcatctaattgaagctcttttacttatacaagatagatctagaattgttttacttgagattcaagcaatgttggatgtgtctgtctcagatcaattggtattgtgtgtttggtgatcctggtttatcctttgggatggttatgtgatagtatatttgacatcttattttgctggtgagctatgtaattgacccaaaaggcacttcaagcgggcaggaaagtctaaggcccttactaattacttccaagagggaggtcctagaggtagcaagcagatcgtggtggtacctatggatgagcgctatagcaagatcaaaagttcttgtggatggatgttattttgttttgtatttctcgaaaagagaaatttgcaagtgaacttaaaattgtgaagccacatgttctcatatgtggttgtactagctagtatctctgaggtttaacaagtcaaacttagggttgttgtctgcttattttgatctttattacgacaagagcaaacttgtgacctttatgtatgaatgcagtacaattgttattgccatgaatgaaaatatgagctatgtttgaccaaatctgtatctaat

SEQ ID NO: 21840 - DNA, 2481 bp, Zea Mays
atgaccttacaggcactaacattgtaccctgcatctctcagtagggagcaaaaacggcagcgcattgccaggacagaggtttcttcttcacagcctgttgagaatgtgaatcagtttaagacctgtcgatgtggggagggagacccaaactccacatctgaaactggtgacagcccgccggcctcttgtcctaattgtcaggaattggatggacatcatggaaaaagcgctggtttattcttacaagggcatccctagttttcttcagaagtgaccctaatgtacctccacccagaggagctgaaccgattgttacacttggtggaatcgacttgaatagctctggaagcgttgccgtcaaagaagaaaggaaacttttgacagtgttctttcctgatggtcgtgatggacgaactttcactctgaaggcagaaactacagaagacctaaatgagtggagaaatgcactggagagtgctttagcacaggcacccagcgtagcaaatacaatggggcaaaatccaatattcagcactgatgtagcagcagaacctgctgaagctccagctgaacagtcggaggacagttctgttattggcagacctgcagaatttgcacttgtagatgctgatggtagtccatcatttctggagaaggccctgaagttcattgaagatcatggggtaaaggtagagggcatcctgcgtcagtctgctgatgttgaagaagtcaaacgcagaattcaggattatgaaaaggggaaaaacgagttctctccagaagaggatgctcatgttattggtgactgtattaaggacttggaagaaggttcctgttcttcagatgcttataccgagtctgaggatgatgatgttgataaggaatattccacagataatgacattaatgatgatgatgacggttcttatgattctggtgaagatgacattgaagaagacttggactactctgatgacagtgaacatgacagtaagatcaacactaatgtcaaggatggcaaggttaaaaacaatatctcagaaactgcagaagttgcacaggcaaagggtgcttctcatatggagaccaatagtcaatccaaccagaaacaagaatcatgtggaccaaatggatccaaagatcgtatactaagatcaacttctcgttcatcatcctccagagaaaaatctatggagaaatcatgcagttcggcacacaggggaaaaagaaccttatggggccgtacttcagcaagaaaagacctgtcaacagaggagattgaatgctgcagtgatgatgagtcccttattgagaaacttgagagcaacaaggttgatctccaatcgaaaattgcaaaggaggccaaagaaaatgctattctacagtcaagtctagaaaagcggaaagaagaactacatgagcgccgtttagcacttgaaaaggaagttgaaaatttgagggagcagctgcagaaggagagaagtttgaggacatccttggagtccggggtgatgaatttgcgaagagggcaggtgtccttgccgtcaacaacagacagcaagactaaggctgatcttgaggaggttgcaactgctgaatctgatattataaacttgaagcaagaggtttctgatcttcgtgggcaggtcagtggccagcagctgtgctgtgaatcatgcaacaaaaggctcctaaacacagacaggcttggcggacctgaaagctcatcagtggcagcgtcaccgaccattgggagtgactctgcatctggcatggttaaaaaagaacagaaaacatttcagggtgatatcgagcaatcaaggaagcagacggcacaggattcgccttcttcgacagacaagccaggtcacgaggcggtcgggggcagcagccagagggctcctcaaagaaggcaatcgattgccagggagggccaagatgggtggtcgtcatcatcctctaattcgaagtggaatcttgctcagaaacaatattcaaatagcccattgataagagggcttcatggatccagcagactagaggatttcggtggaagcataccaccagcagcgtcatcggcattagtcaagctgacaaaccggctcaacttcctgaaagaacggagggcgctgctggcaagcgagatgcagagcttggatctgggtcggcccccagcagcagctgctgctccatcagccaagtccccaacaccaaaaggccatgaaaggaagaagagtcgagactgaggaagatgttgtgctcttctgaatgctagttagccttatgattaccagcagtgtagtttgtgtgcatcccattcccttccatagtgctgtctgtctgtacatgtttccacaaattctactgcggatacataatatagatacggctggacaggctgctttgttattgttcaaattgttgctgaattgattcgtcgctcaaagcactttgctgacacatttctgatgttaaaaaaaa

SEQ ID NO: 21841 - DNA, 3028 bp, Zea Mays
aattaataaaataatgttgagtatctccttcgcccctccccacctggctcctgctctacacaagcagtcaagggccataaagcgcagcaggatctccctctgcccaaaaccaaacctgcctccgcacctaccatttcctcccccaaaccaccatggacttctccgccggagggagtgggagcggcggaggaggcggaggcgccggcgacggccgggcgcaggcggagcgctggctggagatcgccgagaagctcctcgcggcgagcgacctcgtcggctgcaagcgcttcgcggagcgggcgttggaggcggacccgctcctccctggcgccgacgagatcctcgccgtcgccgacgtcctcctcgcctcccagtccatgggcccctcgggccaccaggacccgctcgccatcctccagctgccgcctggggtcaaccccgaccaggcctccgtctcccgcgcattccgccgcctcgcgctactcctcgggccccgcaacccgcaccatggcgccgagatggcgctccgcctcgtcaacgacgcctacgccttcctctccgatccgtctcgccgcccccctccgcccgccaatcccgccactggcactgatatgtaccactgcgcctgggggttcttccccctcggatttcccaacgcggccgacctgggcgccaactggaagccattctacaaggcgttcccttggaacacggctcccagtggtcaaggtgctgatggtaggagccatggcaaccgtggtggcaggcaggcacagaatgacagtgctcgtggtggctcctctagaggtaggatcaagaagactaccgcccgcaagaaggtcggggcagggttgaggaggcgttctcttggtggtggtgtggagagtggcattgattcttcgatgctcgggcaggaaggctgggctggggatgaggacggtggagatggaaggaccgaggaggtgaggggaattaacataaatgaggcggcgcaagctacagacggcactggtagggttaatgttagcggtgctggtggagttgaagatatgggcaacttccatatcgatgttgatgcaaccgaggatatattggggaatttgcacaacctgcccttcctgagggtggacaatcttgggcggatgatttaactgttcttatggtttgctgtggctagaaaagtattgtatgattagccaggccgaaacagatgtctcagggactggcccttgctgttcaactgttcgttttattttaactgttccatctcctgttatgccatgttgtagttgtagacttgttgtctaccttgtacctgtagttacttagcatcagacatgggaaatttgtatctccattagatggagatcatgccctttgccttagcaaacaaacttgcggagttttatggtgatggaaataatgcttcaaagaggtgtggctggtgcttaccatgccacttttggtttcttcctggcatggtgacacaaatgttgctgagatcaagtaagtgaattatgttctgctttctgagttcgaaaactttcttggctacaaaagaactagtcttagttatgataacctgttgatttggtaatgatcattacattgttctgctgtgtgaattgatacttgatacctctgattttttttatagcctgcttagaattccatatgttacctaatgagatatattccattttccattgtttctgttaacaccaatcctaccacttttgtcattatatatttatttgattattgtgtagagatccattatcagatacacatgagttctcaaattgtttcttgatatgtcacagtataagttttctcctacagaagataggattcaatgatgacatgccacaaaaaatagttgtgattttgtccatcctactgcactgtatgttagtaccatttcaacagtatatttaaccataagaaataggttaatcccacagcagactttaatactatatgctaaataaagtgttatctttctggatcatctagtctttgaaacacatgcagagcttggtctaaatattctttgcggtagcatgtaatagaaatcattgacttgggtgtttgacatagcaagcacttgatggttttaagttactaatgttcaatttttctgagtatccatattaatgcagaaggccatagttcatttccttgtcgttatttttcactgagaaagaacaaaacattgacttcttgggggagtagacttattaccaacgttggtgtcctgttatctagtttaacctgaacctgttcttgaaaactgtgtcagaaagtcggtttgttctataatatattgtctgtgctatgagctacaataagcaagagtattttaaattagaaagcagttttctaaatgatgcaaaggcagattggtttgagattgcacatggaattcttttagtgaacatcttatcttagtcaagcagtagttaagattaactgttttacttattacccccaagaactctttgaaactcgactaactattctgtggtttctttcaggtagatgactgttttggccacccgcagtgggttgtccataccatgtcctgaaggaagcaaagtgcggttggcccagcttagtggggatatcagcagccctcccctgaagggcgaattccttttgctgttttaacccatgtttgttaggccttttattccagaaacctatgcaaaactctgctataagtttgccaagaaatgctaactgcagttgttatgttttcagcaatttcagggtaagaagatgttaacaagcaaagcaacctctctgcatttgcagggaattgcaggggaagccttctctcagtttatccctttcttagggcctctttgcatttgcagggagggcttatctcggtttatttcttcttcatactctacctgagtgggaacttttgatgctgagtttgtcttatgcctatttattttaagtcgaatgaaatatgaaggccaaatcttgactgattactagtgactatttagctcgctta

SEQ ID NO: 21842 - DNA, 881 bp, Zea Mays
aggacaatctagaggcgattcaacatttttggccttgctggttcaatgcattgggttgttgacaaagtccctgatcaatctctactgaacacagctaattggaaatttatcattcctcgtttatactggaattacccaaatgacgatatactgctaaatatctcaatggcctcatccccggtgataagggttacatcagaaaaaattgaagctaccattaatggagacatgataattgatgttgtagataacaaggagatagttccagttgcatgcatctcagtgattgtcagtgcttcaggtgttgtggatgcatcaggcaataaagtatatggtagagttggattagataatttctcccttgcgttgaagtggagtaaaattggcaacttccatatgtctttgattcagggagtgattcgggttctcctgaacacagtatgcatgccgtatttgaactcacggcttgggaatggattgatcttgcccgtggtccatggtttcacacttcaagacgtctacgttttaacctctgctgagcagctgacgctttgttcggatgtcaccttcaacgcaagcagcatggcgagtttattatgatacagggaagtgcgtgtctggcgtatttcatttagcgttgaagtacaacactcgcacatatgtgtacattatattgtacatactacacaacatctcgttataaatattgtttacattcaattctaccaatccatgaattcaaacatctgtgtacaatatcttaggtaatcaaagttatccacagcacaaaatcctgtacagctctggaatgggggctggataagataaacagcttatattaatccttatgaaactaggagtaaaggaatcgtaaaaaaaag

SEQ ID NO: 21843 - DNA, 2481 bp, Zea Mays
gggtgcgcttactctgttcaccaggtttttgcctcagggcatgtggatctgttagttcacctgctgcaagcaagtatagctatagggttgaccagtgcagaagtatgaatccttactttgttgggattcttgtccccgtcgcggtctccctgctgctccgcaagaggagaaaggcccaaaggatgaggggagtgccagttgaggttggtggggagcctggatatgcagtccgtaactatcgttttgaacaacctgttgagacacactgggagggggtgtccacacttgctgatctgtttgagcaatcttgcaaagagtatgtatacatgccactccttggcacaaggaagctcatttcaagggaaactgaagcagcacctggtgggagatcgtttgagaagctgcatctgggcgagtatgagtggaagtgttatgcagagtgcttcaagagcgtttgcaacttttcatctggactaattagagtaggtcaccagaagaatgaacgtgttgctatttttgctgagacacgggctgagtggcagattgggttgcaggcatgcttcagacaaaacattacagttgtcaccatctatgcctcattgggggaggaagctttgtgtcactcactaaatgagactgaggtcactactgtagtttgtggtcagaaagaactaaaaaagttgattgatataagtgggcaacttgacactgtcaagcgtgttgtctatatcaatgaggaaggcatctcaactgaagtttctttagctcaaaactgcactagctggatagttgaatcatttgaggaagtaactaggttaggagctgaagcacctgttgaagcaaacatgcctctaccttccgatgttgcggtgataatgtacacaagtggtagcaccggattgcccaagggagttatgatgacccaccgcaacgtcctggctacactctcagcagtcatgaccattgtgcctgcacttggcagtaaagatatatacttggcctaccttccacttgcacacattcttgagttggcagcagaggatatggatcacctttgaccctgattgatacatccaataaaataaaaaagggaactctaggtgatgcttctgcactaaagccaacattgatgactgctgtacctgctatacttgatcgtattcgtgatggtgtcaggaaaaaggtggatacaaagggtggtatagcaaagcaattgtttgacattgcctataaccgtcggcttgctgcaatcaatggaagttggcttggtgcctggggactggagaaactcttgtgggatacacttgtgtttggaaaggtgcgtgctattttgggaggaaagattcggtttgtactttcaggtggagcacctctatctggagatactcagagatttatcaatatatgccttggggctccaatagggcaaggttatggtctgactgaaacttgtgctggagggacattttcagagtatgatgacacatctgtcggtcgtgttggtgctccactaccttgttcgtatattaagttgattgactggcctgagggtggatacttgactgctgatttaccaatgcctcggggagaaattgtcattggaggtccaaatataactaaaggctatttcaagaatgaagctaaaacaaatgaagtctacaaggatgatgagaaaggtatgcgatggttctattctggagacatcggacggttccatccagatggctgccttgaaatcattgaccgtaagaaagatatcgtgaagcttcaacatggcgaatatgtatctctcgggaaggtagaggctgctttgattgtgagcccatatgtggagaacattatgatccatgctgatcctttccacaattactgtgttgctctcgtggtggctgcacacattgagctggaaagctgggcttcgcagcaaggaatcaaatacaacgatttctcagatttgtgccagaagcaagaggctgttaaagaagtgcttggatctttagcaaaggctgcgaagcaagcgcgacttgagaagtttgagataccagtcaaaatcaagctgataccagagccatggacccccgagtcgggactcgtcactgctgccctcaaactcaagagggaggtgatcaggaagacgtacgagaacgatctggctgagttgtacgcatgatggttctactctttttgatacgtttagtgtggaaaatgtgtagagtgtcaatgtcacgctgagatctatggtaatttgataccgattatcgttctgggattattattattattttgttcagttagaggagatatataaaccttgaagttttgagttatatggcttctcttgatgccgagaagctatattgcgatgattcctatgtgtttaggatataacgctttcgaattcttattgcgcttgttcatctcgtaccttgaggtaactactggtattgctgtctatagaattgtatgtacggtttcggtgta

SEQ ID NO: 21844 - DNA, 2418 bp, Zea Mays
atccctaggtacggccactacaacagtgcagagcatctgaagcgtccgattgtctttgtctccatagcagcgttggtcttcgaggcgagaaccgaggaggagaacatggcgggtgacggcaacggccgcgcggagcttccccggatcgcggtgatcggcgccggtatctttgcgcgcacgcagtacatcccaaggctccgcgagatcgcgcacctcgtcgtcctcaagtccatctggagtcgcacccaggaatctgcaaaggcggccgcggagcttgctcgtgacttcgcgcctgatatcgagtgcaaatggggtgatgcggggctggaggagatcatgggagatagttcaatcatgggcgttgctattgttctcgctgggcaagtccaggttgagctttccctaaagatgctcaaggctggaaaacacgttattcaagagaaacctgcttctggatcaacaacagaagcagaaactgcactgtcaatctaccactcatttcaaaacctgttcccgcataaacccatttgggcagtcggagagaactacagatttgagcctgcctttattgagtcaagcaagctgatcaatgatattggggatatgatgcacatccaagttatcatcgaagggtcaatgaacagttcaaatccatatttcaatagcacctggagacggaattttgtgggtggtttcattctggacatgggtgttcacttcattgcaggactacgaatggtaacttcatcatgttatatttcgaagtctccttttttttctcaaaaaacacaggaaatctgggcatcattaagaagaatagagggtgtaagaacccaacagcacttacaccacacacccaaacacaacgcactcacacaacacactctacagcagccttaaaacacagacacaccaagacagctgaaggtcaacccgcacagacccaaaaaactaatcacctgggaggtgagcggacaagaggaatagtcctcaggaccctgccatggcccacaactggcgttcctcaccatccatgactaaagccccaacaacacttggacccgattcataaaaaacacaacgattatgatggttccaaagaatccaagctccaagaataattaaggaattgacacctttccttcaagactatttccagcggccttaatcatcctatctcctattttaaactctaatctgtaaacagtatagtctacagtgcaaacagtgttttgtatggtcatatgcatgatctgctggtcacatcctaattgctccaaagtagcattatctcattcccaccaataagaaaggaattttcattaggttgtgggtcggcctagagactgacctgccttagcaaatgaaatatggatcagattctgagaatatggatcggactctggcctatgctaccagaagcaacattgtttagttaataactctaatcaatttttagatttggcaccccacatccacatagaaagtttagtcctgaaaaactgcttgtgtcatcttaagttgaagtggtcagatttgccaccatgtaactcttttgatagttgtaccctttggcccaagtttcttagcaatgtttctacctactgaattgaagtgtttaagataacaaattcattcactaattcccttgtctgctttgtgaagatgaggatctttctctaacagcttgtaggttcagaaatcacaagcgtatcttctatctcccgtcatgtggatatggctttgccgccaccagataacatatgttccctcttccaactggaaaatggatgcgctggtgtctttgtgtttgccgtcaattcaagatcaccaaagatattatggcgggtcgatggaacaaaaggaacaattcaggtagaacgtggagttgatagtggaaaacatggctaccaggtgttattctctggtgaaaatgggcagtgccagaagacattttacccgttctgtggagtgaatgaagaactgaagacgtttgtccatgacatgttggaagctggcaaagatggagatcacaaggctgcaccccgtggttcttatgtcgaaggcgcccgtgatgttgccgtgctagaagccatgttggaatctagtgcgaagcaaggagccccagttcaagtgaagagattctaacagatccgaaatgtcacataaaagagactacgtttcttctagggtgatttgtccattggatcatatattttcggtagtaaaatgaacattgttccaaattcatgtacataccgtcgaggttatatattaaatatatatgtgaaaaaatgacatacattagaaccaccattcctacactcgtaaaaatcatgtaccttttcttatacactagatatgttgccctattagatattataaatattagtttttttacgggaaatacgaaagaga

SEQ ID NO: 21845 - DNA, 3671 bp, Zea Mays
cttcagttaaccaacaggctccagcgaagggtctttctggacgggagatcgtttctgtgacagattaatgcctactgcaagcttgaagtcctcgaggacattctcgattgtttttgtggctgccagaacaaaaataaaaatcaagggttttagaagggtttggtattccttcgtttcctccctttcttcctctgcaagcaaaaacaccgcagggaaaaaaaggcccaaaacaatctgcgacttcgagaaccctagtatcaagcgcagaactccgtcatgctgcgtgcggcggcggctgccgccgccatattcccggcgcgggtcgccgctgcgccggctgctgcggcggcggaggaacttaggtatccgctgctcagggttattgggacgctgaggggcagccgcggctcggtgctgctggggaggagggtgcgtttctgctccaactcctccgcgagcgactccgaagtggcggcggcagatgcggaggcgaatgccgaggatgcgaccgttgcggaggaggaggcgggcagcaaggcgtcttccgccatcgtgccgaccagcaccaatatcgacgactgcctctctgttatagcgttacctcttccacatcggccactctttcctggattttacatgccgatctatgtaaaggaccaaaagctgttgcaagccctaatagaaaatcgcaaaagatcagctccgtatgctggtgcctttctcgtgaaagatgaagaaggtactgaccctaacattgtgactggttcagattcagagaaaagcattggtgatctcaaagggaaagacttgctgaagcgtcttcatgaagttgggacgcttgctcagattacaagcattcaaggggatcaggtagttctacttggtcacagacgtttacagataactgagatggtcgaagaggatccactcacagttaaagttgatcatctaaaggaaaagccctacaacaaggatgatgatgttataaaagctacctcattcgaagttatatcaactttaagggaagttctaaggacaagttccctttggaaggatcatgtgcaaacctacacacagcacattggtgacttcaactaccaacggctagcagattttggtgctgctatctctggtgccaacaagttgctttgccaggaggtgcttgaggaattagatgtatacaagcgtctgaagttcactcttgagttagtaaaaaaggagatggagattagtaagctacagcaatccatagcaaaagcaattgaagaaaagattagtggagatcagcgacgttatttgttgaatgaacaacttaaggcaatcaagaaggagctcggtttggagactgatgataaaacagcattatctgcaaaatttagggaacgtatagaatcaaagaaggacagatgtccttctcatgttttacaagtcattgaagaagagcttaccaagcttcagcttttagaagccagctctagtgagttcagtgtaactcgtaattatttggactggctgacagtattgccatggggaaattatagtgatgaaaactttgatgtccaccgtgctcagaaaattctcgatgaagaccattatggtttgagtgacgtgaaagagaggatactggaattcatagcagttgggaagttaagagggacttcacaaggcaagatcatatgtctttctgggccaccaggagttgggaaaactagtattggtcgttcaattgcacgtgcactgaaccgccagttctacaggttttctgttggaggtttggctgatgtggctgaaatcaagggccatcggcgcacgtatgttggtgcgatgccagggaagatggtgcagtgtcttaaatcagttggaacagcaaatcctctagtattgatagatgagattgacaagcttgggaagggtcattctggggatccagctagtgcattgttggaactccttgatcctgagcagaatgttaatttcttagatcactaccttgatgttcctattgacctatccaaggttctattcgtttgcacagcaaatgtaatagagacgataccaaatccgttattggataggatggagatcattgctatagctgggtatataactgatgagaagatgcatattgctcgggactatttagagaagaatacaagacaagcctgtggcattaagcctgaacaggttgaagttacagatgctgcccttcttgctcttattgaaaattattgtcgagaagctggagtgaggaaccttcaaaagcatattgagaaaatttaccgtaagattgctctccagcttgttcgccaaggagtatcgaatgagccagaccaggagtctctcggtgtcactgtaaatgaggaatctaatagtggtgatagcatcacagcaaaagatgagattgtgaaggatcctgctgtagaagatgcttcagtcgccaacaatgttacaaatcctgcctctgaggaagctaatgaagtaaatttgacaactgaagcaccaaaagaagacagcacatctaagggcaacaagaaaacagatggagtagcagaagatgcagcagacaaggcaactgagaaggttgtggtagattcatcaaaccttggtgattttgttgggaaacctgtgttccaggctgagcgtatatatgagcagactcctgttggagtggtcatgggtttagcttggactgctatgggtggttctactttgtacatcgaaacaacaaaagtggaggaaagggaagggaaaggtgaccttgtgctgacaggacagcttggagatgtaatgaaagagagtgctcagattgcgcacacagttggcagaactgtattactggagaaagagccagataatcatttttttgcaaactcgaaggtgcacttgcatgttccagcagggtccaccccaaaggatggccctagtgctggatgcaccatgataacgtctatgctgtcgttagctatgggaaagcctgtcaagaaggacctcgcaatgacgggtgaagtaacattaactggaagaatcctcccaattggcggggtgaaagagaagacgattgcggcaaggagaagtgcgataaagacgctcatatttccggcagcgaataaaagggactttgacgagcttgcttctaatgtgaaggaaggactggaagttcattttgttgacacatacagtgaaatatatgatttggctttccagagtgacgccgggactgagatgatttagctttacattacaggattgagattttttccccttctctagatctggttacaggctaaataccaaagaagtttgtcagcagaggcagaccattgtaaccaagatgagtggagttaattgatatttacgagaaagaaaaataatatttctttttttggccccaatataacatcattgaatctaagagatttatttggctaggctgtacgtaactagtgtgctaggtggtggtattggccttttatattgttgggacttgggagtgtgggaaaaacagtactggtgcaccatctgttatttattttaagtgttttccaaaggcagcaaggtcatatacctcatatcataatttagccacaaatggcctgaatattttgtattttggtcatttttttttcgaaaaaatcacatttagacccctaaaccacttaattctgtttttg

SEQ ID NO: 21846 - DNA, 1090 bp, Zea Mays
tacatcctcaacaacttgcgccttccttcgtccacttcatcatctacgacctattgcaggaaaactcaataacataataagggaacaatgtcttcgggatgttggacagctagagcaagatcttgtgtttggcgatgctggaaccaaagaactaatcaactttttgagaacacaattgcacttaacccagagaagtttgaaagcgacaagggtgcaaaattaatgcagttggcaggattatctgctgatgacatgattgctgtaaataatatgcgttgcttatgtgggcctgataccaaaaagtcttcagtagggggttttacactgaaatttgatgttcacaagaagaaacacacaaatcgaaaagagcgaacaggggaagaatcaacatgggcactctctcgattttaccctattttggagcaattgattgaaaatcttagcaaaggtgagctgccaaaagatgaatataactgtatgaatgaccctagtcctactgttcatggactgccaaccagtagctctgcccgaacaagccccgctcactcaatgcgatccagacgaacaggtggcacatgggcaagacctcgtggctctgatgatggatattcaagtgattctgtgttgaagcatgcctccagtgacttcaggaaacttggtcagcgtatatttgtttttgtaataggcggtgctactcgatcagagttacgtgctgcacacaagctttcatccaagctgaagcgagacatcatccttggttcatctagccttgatgatcctccccagttcatcacaaaattaaagttgatgtcagtagaagaattgacacttgatgaccttcagctgtaaatggtgtccgcccacacggagtgtaaccttttattttctctgttctgtcagctcttatttgtgggggcctgtcatattcattcggtgaaatgcattcttaataccacttttactggtgaatgtaagaaaaaaactgttatgcaattaatcttttcatgcaattattgtgcaaccaaaataccagaagtcatgagaagttctcaaaattttattgatgaattttatttactcaatcgatcta

SEQ ID NO: 21847 - DNA, 2350 bp, Zea Mays
gcttggcttggcttgcattcacagttgcacgccggccgccgccaaccccgcccccacgtcgcgcgcgctgtctccctctcgcctctctcgtggagacgactgggcgacagccgacagccgctgtcgcccaacgcaagctgcccaggtcttcttcgggctcttcgccggcgacgagcacagccagatgattatggagcgcaagtttcaaccagtcataattttcagctttagtagaagagaatgtgagcatcatgccatgtctatgtcaaaacttgacttcagcactgaagaagaaaaggaatgcattgagcaggttttctgtaatgctattggttgtttagtggaggaagacagaagtttacctgctatagagttgatgttgccacttcttaaacgaggtattgcagtacaccattctggactacttccaataattaaggagctagtggaattgctctttcaagaaggtcttgtgaaagctctctttgctaccgagacaatggaaatgagtgttatcaaggacatggtgttaggcaaaccagcacctctagtcagtactttccgtctgagctactacactattctgaacttaatgagccgtgtggagggccaatttaccgctgagcatgtgattaggcattcattccatgaatttcagtatgagaaggcattgccagaaatagctcaaaagattacacggttggagaatgaagctaccttgcttgattcttctggcgagactgatcttgctgaatatcacaaattggggcttgatatatctgaactggagaagaaaatcatgtctgagatgattagaccagagagggctttgttgtatttggttcctggaaggctggttagagtgagggatggttcaacagactggggatggggtgtggttgtaaatgtagtgaagaaacctccagcatctgggactctccctcctgcattaagtgcatcgcgcagcaacaactatacagtcgataccttgcttcactgctcctctaattccagcgagaatggatcacgttcaaagccatgccctcctcgcccaggggaaaaaggtgaaatgcatgtggtgcctgtaccattgcctttagtatctggtctaagcagtgttagaatcaacattcctcctgatctacgaccacctgaagcaagacagaatatactttctgcagtgcaagaactaggaaagcgctacccccaaggtcttccgaaactacatccaatcaatgacatgggtattcaagaacctgaactagttgacttggtacataaacttgaagaccttgagcagaaacaatgctctcaccgacttcataagtccggtcaaagtgaacaggaactatcatggtaccaaaaaaaagcagatctgaatactgaaattcagcaactcaagtcaaagatgcgggattcacagctacaaaaatttagagatgaacttaggaaccggtcccgtgttctgaagatgctggggcatattgatgctgacggtgttctccagttaaaaggacgtgctgcctgtctaatagacacaggggatgaactgcttatcactgaacttatgttcaatggtacatttaatgatcttgaccatcatcaagttgcctcccttgctagctgctttgtaccttgtgataaatcaagtgagcagatacgcctaagaaatgaactttctaggccgatgatgcagcttcaggaggctgcaagaaaaatagctgaggtacaacgagaatgcaaactggaagtaaatgtggaggaatatgttgaatcaacctgcagaccctaccttatggatgtcatatactgttggtcaaggggagccacctttgcggaggtgatggaaatgaccgacatatttgaaggaagtgtcataagacttgctagaaggctggatgaatttctgaatcagttgagagctgctgctgaagccgtggggggaggttaaccttgaagaagaagttcaagaatgcaagtgagagtttgcgtcggggtatcatgttctccaactcactgtatctgtaattagcactttagcagcaatagtaccatatgttagccgacaaatgctagcggcggggttttgacctgaagcaaaatatgcgttgtctgtaggagagggcattgccagatagcctctgtaaccttgtactctagttcctagactaaattaatttgttatcatgtatacatcagggtaggcgtgatgctgtcttaagaaatccaagtgataccaatttaagggcctgttattgaatagtgagggattctagctccctcaatcctctctgttactcttgcttccaaacaaatcctaaaggtctaatatcactgttggttatgctct

SEQ ID NO: 21848 - DNA, 1666 bp, Zea Mays
atgtcgatctccacgctacgccggtgtcgtccccctcgacggcatcgcccacactacagtaccagcgagcaggtgggcacaaagcgcgcagcattgaaaaggagagccatgcgcgccaacagttccgtgcccacttggcgctttgccaacgctgcggtagcacgcgggccccgtgcgccagtggcagcatcgtcagttagtctcgacccactgacaactcgggtctcacgttacgttgctatatccactatgtactactatatgcactgtcaagtgacaactcgggccgcacggtctccgctcggttctccagtccagtgggcaatggtgccaatggacccctcgatctcctcgtcctcctcgcctctccggctccccggaacccccaccagcccgggcgcgagcccgaggcccaccctcgtcgcggccggccgccagcccgccgccgcgcccagcaccacccgcctccgcgccatctcgccgtcccagtccccgcccaccccggcgtcccccgtggagccgttcggcttcgacgcgctcaaggggaccttctccgtggacgtggcggcggccgacgcgcgctcgctcgacgtcccgctcgccgcgcccttcaccatcgcgtcctcccgcctcgtcgcggtctccaacgtcgccgtgcgcgtcgagctccgcaccggcgctgtcgggtggggggaggcgcccgtgttgccctccgtcacggccgaggaccagccggcagcgctcgacgccgcgggacgggcgtgcgcagcgctcgtcggcgccccagcggcgcccctcggcgcggtgctccaggacctcgccagtgtgcttccgggacacgccttcgcctcggccagagcaggggtggagatggcgctgattgatgctgttgctaatagcattggcatacctctatggagattatttggaggagcatcagatagtttgacaactgacatcacaattccaattgtgaccccaaatgaagctgctcaattggctgcaaaatatcatggacaagggtttcaaactctgaagctcaaggttgggaagaacttgaattcagatatagaagttctgaaagctatacgacttgtccatccagattgctcatttattttggatgcaaatgagggatacacagcaaaacaagcaattgaagttcttgatagactaaatgaaatgggagtgacccctgtgctctttgaacaaccagttcacagagatgattgggacggtctccgagatgttacctctgtggccatggagaaatacaaagtcgctgttgctgctgatgaaagctgtcgaagtttacttgatgctcaaaaaataatagatggaaatcttgcccatgttattaatatcaagctggcaaagttgggggttcttggggcccttgaaataattgatgctgcaagaaaagccaatattgctctgatgatcggtggcatggttgagactaggatcgctatgggcttcgctggtcacttagctgctggccttggttgctttagtttcattgacctggacacacctcttttactgtctgaagatcctgtatatggtggctatgaagctttcggacctctgtacaagtttacaaatgctcgtggccatggcggtttccttcacttggacaatgaagcctcggacaactaccttcaga

SEQ ID NO: 21849 - DNA, 117 bp, Zea Mays
gtttgttattcttgtttttttgtgtgatattcaatggttgatctagtagttgagaatcaagatatactccgtggaagaacctcgagttttcaataagcaaggcaagtggacttctcc

SEQ ID NO: 21850 - DNA, 219 bp, Zea Mays
accacgacggagttcgacggcgagtaccattcggcgcggacagcgctctcggcgactccaactctgcggcgacgagcgggagagaaccagggcgagagaaattggcatgagagaaaccgacgggacatggggaggaaatggggacgagagaaggtggagacttagtgtggcaccgggctgacaggcgggtcccactcgtggcggcgctgggtaactgcc

SEQ ID NO: 21851 - DNA, 3961 bp, Zea Mays
attcgaacaaaaatataagcaagtcagcctaaacccctccgccgcctcctcccctctctagggttttacccttcccgcccgaaacaagggccgccgctgccgcacaggaacccgttctgggatctcagccatctctccggccatgggcaaggctaataagtctccgtcgccggcggtggccaaggaaggcgactactcggcgttgcgggagctgttccggccgcacgtggaatcctttgattacttcctcgataaggggctcgacgagatgattgaatccatccgccccatgggtcatgtgctctcgccgatgaggggtgcccggccaggtgtactacccatctacccccaggagtgcagacaagcaagaatttcatatcacggggaattcaaagttgaggtctgcttccagtataatgaaggggcacaaatcaggcataccttcaattttggccatttgcctattatgttgatgtcaaaactgtgtcatctgaggggtgctgatccccataaattagttttccatggtgaagaggcaactgagatgggggggtacttcatatgtggtgggatggagagacttgtgcgtattcttgttttacaaaagcgtaactatcccatgggattggtacgcaattcttttcttaaacgtggtgctggatacactgacaaagcagtggtcataagatgtgtccaacgtgaccagtccagtgtgacaataaagttgtattacatcctaaatggaagtgcaaggcttggattttggttgggtggcagagagtttctgcttcctgttgggattgttctcaaggcccttattgatgcaagtgaccgggaaatctttacaagcttgacttgctgctacagtgataaacatggaagaggaaagggagttgtcagtactcaactaattggtgaaagggcacaaatagttcttgacgaagtcagaaatctgtccattctgactcgcacacagtgtttggtgcatattgggcaatacttccgatctgtgatggaaggatttgaaaatgatgactatataactgttgctgaagcggttctaaaggactatatttttgtgcacttggaaaataaccatgataaatttaatctattgatatttatgctgcagaaactttatgctctggtagatcaaactgcttcacctgacaatcccgacgcgctacaataccaggaggctctattgcctgggcacttattcacagtttttctgaaggataggcttcaggagtggctaagaaagtctaagcgtttaatccttgaagaggctgcaaagaacaaaggttttgaccttggtaatgcgctggagataaggaaatttcttactaaatatacaacatctgtcggaagagctgttgagagtatgataaaggttgggaacgtgaattcacgatcaggattggatcttccacagagagaagggatgaccattcatgctgaacggctcaactttcatcgttatatctcacacttccgttctgttcataggggctctgcttttgctaaaatgcgtacaacatctgttagaaagttactcccggaatcatggggtttcctgtgtccagttcatacacctgacggagagccttgtggtttactgaatcacatgacttctacatgccgtgtttcatcattctacaactcagaaggggtgataaaaaattttggggaaatgaagaagttgctttctgctgagttggttcgtgttggaatgaacccagtgttaccgaagattgagcaaaccggtcccccagaagtactccatgtccatttggatgggtgcattcttggtactattgcttctgctatgattgagaaagcagttaattatcttcgtacattgaaacttctggcacactcagggattcctgaagatctggaagttggttatgtcccacctagttttaatggagcttttcctggcctgtacctttttaccaatccggctagatttgtccgacctgtcagaaatctttttattctatctgatggaaagcaaagtattgagctcattgggccattcgaacaggcatttatggagatacggtgtcctgatggtggggatggtgggagacaagaaccatttcctgcaactcatgaagagatccaccctacagctattctcagtgtagttgccaatctgacaccttggtctgatcacaaccaaagtcctaggaacatgtaccaatgccagatggcaaagcagaccatgggtttttgcggacaggccctaaaattccgtactgatgtaaaagcattccatctacagacccctcagacaccaattgttcggacaggtacatataccaaatattgtatggatgaatttccatctggaacgaatgctattgttgcagtgctatcatacacaggttatgacatggaggatgccatgattttgaacaaatcagctgttgagcgtggtatgttccgtggacatatttaccagactgaatgcattgacttatcaacaaaaagcagagataatgttccagaaacttttgcaaagagtatattaacaagggatacaagtaatgtgattgattcagatggccttcctcggcttggacaggctgtacatccaaacgagcaatactatagcgtccataatagccttacaaatgtgataaggcctgtcaaactaaaaggcacagagccagcatttattgactatgttgctgtcaacgggacaggttcaaaatgtggcctgcagaaggcgaacattcgtctgcgtcgtgtaagaaaccctataatcggtgacaagttcagcagtcgacatgggcagaagggtgtttgctctcagttgtggcctgacattgacatgccattctctgcaaatactggcatgagaccagatctgatcattaatcctcatgcatttccttcaagaatgacaatagcaatgcttttagagtctatggcagctaaggctggaagtctacatggaaagttcattgatgcaacaccttttgcaaactcactcaaaaaggacaaggactccgacaagcctaattcgattgtggacgaattgggtcccatgcttgcatcttatgggtttaattatcatggaaacgaagtcctttatagtggagtttttggcactgagatggactgtgagattttcatcggacctgtttattaccaacgtcttcgtcatatggtctcagacaaattccaggtccgcactaccggtcgtatagaccagataacaagacaacccataggaggaaggaagcatggtggagggatccgatttggtgagatggagcgtgatgccctcctcgcccatggttcgtcctacctcttgcatgacaggctccactcctgctcggattaccacatcgcagatgtgtgctccttctgtgggagcctgctgactgcgacaatgatcaaatccgatacccagaagaaagtcaagcacgagatgcttgggctccccactgtgagaccagcgaagaactttgcatgccaggcctgcaaaacaagcaaggggatggagaccgtggcaatgccgtatgtgttcaggtacctggctgctgagttggctgccatgaacataaagctggagctccggttgagcaacaaatcaggattgcctctcagctaagaatcataacaccagaattagcgcttgttcatcgcgggggctgcttcgcaggagaagcttaaatgtaaccattggtccggcgtgtagttgtttcatatgtcggtgtgatgtaccaatgtaacttgtaagaaaaacataaatgacaacacgagttattatagtttgaatggcggttctttttcattgtcatgtcttaactagtgtttgaatataccagaactgagcttagttagctgttaaaattagggagtgtttggtttttagagactattttttagttcctccattttattctattttagttattaaattgtcaaatatagtaactaaata

SEQ ID NO: 21852 - DNA, 2303 bp, Zea Mays
gttcaaaaaccaaatgttctccctgctccaccccgttctcactccgtcgccgcgtgctcgccggaaccctaggaccctgcggccgtggtaggaagcgctgccgcagccatgacagggacaacttggataattgacagccaaagatttgccaccaaaataaaaaatgcttctgggtcttcagatccaagtaaacagaaatggatcggcaacccaagtaaagagtgcccaaagtgcagtcatgtgattgataacagtgatgttgttcaccagtggcccggtttgcctaaaggtgtaaaatttgatccttctgaccaggaattaatctggcacttaatggcaaaacatggaaaatctggaataaaaccacatccgttcattgatgaattcattccaacagttgaggaagatgaaggcatctgttacactcatccacagaaacttccaggtgttaaacaaaatggaagtgtatcacatttcttccacagaacatttaaggcttacaacactgggactaggaagcgtcgaaggataaacactgacgatgctgatgtccgttggcacaagacaggcaacacaaagccagtactagttgatggaaaacaccttggttgtaagaaaataatggtgctttatataagcccgttgaagggtggaaaggctgagaagaccaattgggtgatccaccagtaccacctaggcactggagaggatgagagagatggtgaatatgttgtctccaaaatattttttcagcaacagtttaaacctagggacaagaatgctcaagagctaactacatccgatgatctggaatcaatggctgctgaatcaaatctcccagattttactacattgcccactgacaaacatgttggtacagtccaagaagttgttcataatcctgagcataatctttaccaggttgttcaccagtggcccggtttgcctaaaggtgtaaaatttgatccttctgaccaggaattaatctggcacttaatggcaaaacatggaaaatctggaataaaacctcatccgttcattgatgaattcattccaacagttgaggaagatgaaggcatctgttacactcatccacaaaaacttccaggtgttaaacaaaatggaagtgtatcacatttcttccacagaacatttaaggcttacaacactgggactaggaagcgtcgaaggataaacactgacgatgctgatgtccgttggcacaagacaggcaagacaaagccagtactagttgatggaaaacaccttggttgtaagaaaataatggtgctttatataagcccgttgaagggtggaaaggctgagaagaccaattgggtgatccaccagtaccacctaggcactggagaggatgagagagatggtgaatatgttgtctccaaactattttttcagcaacagtttaaacctggggacaagaatgctcaagagctaactacatccgatgatctggaatcaatggctgctgaatcaaatctcccagattttactacattgcccactgacaaacatgttggtacagtccaagaagttgttcataatcctgagcataatctttaccagcttaatagaaactgtgaaataagcattgaagagactgttgtcctcccaccctctgtaaaaacaacaaaggacggagataatctccaatcacaagatcagaagttgtgggaaggcgattcccagtttgaattgttagactctcagcagctggcagaaggactcgctctctgtgacgagttcctcctgagtcagtctcagacctcttgtggaggtggagatgaacctagagagaccaaaccctgcctggctgcttatgcccatctgtcagcagaggacttcaagaaggatttagagtgccagcggttggagcccacagataacacaaaccttgagcttgacaacactgatgagtttcgactcagccaaattgaattttcacaggatagctttatgacatgggcagctgaaaagattactgacgactgacgctgctctagtgcactctcggcaccattttggtacatgaagaaacaactgatctgtttttttgtgggacggcagtgaagtctgcaacaacagtggtctcgcttttgctttgagtagctctggtgcacataaaataatttatatgaaatatgaaaggctgaggaatcatgcggtaccaactgtggagtactgttcagtgtgagattggccttggttgcatcagcttgtacattttgtaatgaatatgctcattttagttggcagaccagttgcttgtttggaattggtactga

SEQ ID NO: 21853 - DNA, 633 bp, Zea Mays
gacaaaactaaccaaatcggttatacgataacggtcggttcgggatttttccatcctactttcatccctagtctccagtccacaatgcggtcgcgcccacgccctcctagtcctccaccaacgacgtgggtctaggaaagcgtgcatccagatctagtgtccccgttctgttgtccccatccccgttcttctttgtttctttatctccacgatctagtaggtcatctatcctccaagatccgctccagtgttagcagtgagagatcttggtggaagcaatgaatactttgagaagaaaaatgtagctgcagtgcctatgtgataagcttatggattgtagttttgttctctctcaaacactatttttcttccctatatgtgtggatggagatgactatcttttattatctgtaaaaaatcgttttactttttattagcttggttggacatttggtgcctaaactttttattagtttggttggacatttggtgcctattgtgacaagcttatgcagtgcctatgtgacagttgttgttttctgtgaaacacgttgtatcatgttctggtttctgaaaccgttgaatctgtataaacaatctgttgtttgaaactgtttggttggacagttggtg

SEQ ID NO: 21854 - DNA, 3743 bp, Zea Mays
aaatccaattccgacctcgccatcgacggaggcggcgtcgcggcgcggcgcgggatcgggcggcgcctccagaagcctctcggacggccgagaccaacaggccggaggaggaggcgatcaggacgagcccaatcgctctcagtcccagctacctccccgtttctttgggaccgaattcggttcgtcgtcaacccccattttcctcgagtcgatgaaggaattgctcgaatcgaggcctggattgacgggtgtttgaggctcggtgaccgaggagcgccgcttcagatatgaacgtggtgggaagggttgggtcggtgatctcgcagggggtgtactccgttgcaacacccttccacccatttggcggtgcggttgacattatcgcggttgagcagcctgatggttcgtaccgcaccacaccatggtacgtccgttttgggaagttccagggcgtgctcaagggtgctgagaaggtcgtcaccatcagagtcaatggcgtcgaagccaacttccacatgcagcttgacaattccggccaagcctatttcatgcgtgagcttgtgcccggcggtgaagattctggaacaggttcagacgacgaaactgtcaatgagcctgaacctccagcgcgtagtaagagtgatggggaactttacattggtcctagcgacagactgggtagccaagagctcaatgtggagcatcaagagaagcaaactagggatgagtttgagtcatatgatggttatggtaggttagaggaatcagaagatttgtcaacccaagcggatgggggaaattcggaggtggttctagttagtgtggacggacatgtgctcactgcacctatttcttcaacagaggagggtatggaggatgtgcagttatgcgaccctcagtttcatttgggacctgggcagagctctagtggggagttcacccgaagtggcgaggtctgggatgctgacattttagatggtttatacatatcacaggaaaaggtaaagattaattctggacatcagtcagaggttttaacagagaatggagaggtaccggttgaaaaggatgggtcacatcacatctcagtggacaaagatgaagtacatgtgtcaatcaatgatgatgaagctcatgctgtttctacaaatgaagttgaggttcaggatgtgtcaaggtcagggaatggtgatgtggtttatcaaaccatgaccagtgaaggtgagtcccatagtattttaggggacatagatgttggccatcaaacattgaccagggaggatgactctcctggtgtttcaggggagaatgttgtgggttatcaacccttgaccaatgaacataaagctcatgatatattagagaacaatgatgaggatcaaccacccctgaacaatgaagatgaatcttgtgatgtgccagtgcttgaaaaagacaaggattgcaactccccagctaataaggatgaggtttgtgatctcaacaatgaggatactgaggataccagtgctagttttggtaaaaacgacgctttccagagctgtttggatctgacgtcacaaatagatgacggggattcaggaaacgaactattttcacctggatctgattctcagagggatgctgagcataatttgggtaactgttctgttgctgaaacagatttggaggaaggtgaaagtaaaactgcttactgtggtcagtatggtcctttacaggagggagtgaatgtttcattatttaccttagaagttgataagactcaaaacaaagagagttctcctgctggaggttctcatgatagggacaaggaaattgcctctgaaattgaggctgccgcatctgatggtttacagtcatccatggcgaccagtggtaaagacaaactggggagcattccagagcactcagaagttgaagatgaacagaataaagaagaacattctcagtcacagaatggcttgggtgttgagatttctctttgtgggaacatgttacgaccaggaatgggccgagaatctgctgaggaagtgtttcaacagaatcttgtccatgaggaggatttcaaatcatctggatcaacaatgataaaaaatgcaaaccttattgtcaaagttgacaataattatttcccctggaataaagtttctcatgttattcttgggaaggctgtatatggctcaaagtttcccttagaacccactgatgctgttccggttgaacaacaggaaacacccaaatcaagagaggactctcttagaatgtctccctcaagccggagatggaggctttggctcaatccctttcggataacaagatcccttcaacgtagtaacagtgattcttccgaagacattttccttgactcagagtctgttttgagtccaatggatgatcaaactctggagaacaacaaaaaccagtcacctagaaagcaattcgtacggactttgattcccacaagtgaacaggtagcatctttaaatctgaaggagggccaaaacttggtgacctttagcttctccaccagagttcttgggaagcaacaggttgatgcacatatttacttgtggaaatggaatgctaaaattgtgatatctgatgtggatggcaccataacaaggtctgacgtgctgggtcaggtcatgcctttggttggacgtgattggagtcactcaggtgttgctcgccttttttctgcaattaaggaaaacggttatcaactactattccttagtgctagagcaattgtccaggcatatctcacgaagaacttcctctttaatctcaaacaggatgggaaagcactacccaatgggcctgttgtaatttcacctgatggcttgtttccttcactctaccgagaagttatacggagagccccacatgaattcaagattgcttgcctggaggacattaaggcgctctttccttctgattacaatccattttatgctgggtttggtaacagagatactgatgagctcagttacaagaagatgggaatacctaaaggcaagatttttatcatcaacccaaagggtgaagtggctgtcaacagttctgttgatgtgaagtcttatacgtccctacatacccttgtcaatgacatgtttccaccaacaactctggttgagcaggaagactacaacaactggaattactggaaggtgccattaccagatgttgatttgtagtgtagttttgacagaaacagccgtagataccagtagatcctgcaaaagcctagcagtagagcttcctgtaccctaatattcagccaccacgacggttttaggtccaatttgtgaaggtctcaagaattccgggatgtatggttttctgaaagccaatggcccaaggaaacgttgccactttatttccttcgacggagctttcacgtgatcatacggcttttgggtagtcatctgattgtcttcgtcgaacttgttgtacccagaggtctgagccctagaccctcgattcattagagaactcgtgatctggtcattgtccaagctactttgttctgattgcaggaaatctttaggtgccaaaagcagctgtacattttttttttcgtgatccaaaaacagctgtacatcgtatatcagcgcatagaagagaattgctaagcatatctgcatcttgaaacccttctttcttgtgctctaaaagttggatttgataattgttgagcatatctacctgtgaggtggaatggaggtgtgttgctgtagttg

SEQ ID NO: 21855 - DNA, 2432 bp, Zea Mays
cgtccgacaccggcgggagtgcacgcgtaggcgtagccatccgtccacggaaagggaaagacatgcatcccagtccggcggccaccacggatgggtctctttgatcgcctcctcctcggcggcggcgatcgcagcagggggacggaggaccaggagcgcggcggcgccgaggcggccgccatggggtcagacgtgccgccgccgtcggccatccctcccctctcagccgccgcggcctccgtcgttcgccagtgcgcccggatcgcgggcgtgccggtggaccagctcctccggcgggtggacgcggaggagcaggcccgcgggccgctggagtacgccaggagcgtcgtggagtactgctcccacgtcgccctgcgcgtggaggccaggcgcccggaccacctcggcgacagggagttccacacgctcacctacgacatgatgctcgcctgggaggcgcccgacgaggagaccgacgccgtgttccagaaaacggcattcagtgttctccgtggagacgacgcggacgacgacgacagtgggtccatcttctattcaagcccgacgcagatggccattcaggtcgatggcaggcggacagttggacccgaggcatttgccaagattgctcctgcatgccctgccatggcacaccccatcaccgtccgtaacctgttcgacgcgatcaccaactccaccggaggacggctgcatttccttatctaccacaagtatctcagaatcctgaacgaggcgttctgctctgcgaagcgtgtgctaggggggcacagagccccagccctccagctctccgacgacgaagtgatccttgacatccacggcgctgcgacgaccaagccagttctccagcacatcggcacgtccacatggcctgggaggctcacgctgacgaaccacgcgctctacttcgaggctatcggcgtcgatttctcgtatggagaggccgtcgtgtatgatctggcaagggacttgaaacagtcggtgaaacgagagtccactgggccatggggtgctcacctcttcgacaaagctgtcatgtacaagtccagcctgactgaacccgtgttctttgaattcccacaattcaaaggccacacccgccgagactactggtttgcggccatcaaagaggtgctgcacgcacacaagttcatcaggaagtacaagctcgccggtttccagaaggcggaggcgctctccgtcgcaacgctagggattctgcggtaccgcaccgtgaaagaggggttccacatactgccggcgcatttcaagaccatcctcgccttcaacctggcggagaaactgcccaagggggacaagattctggaggcactgtatggccagctcaagcagcactgcccgaggttcagaggaggccaggatcttggccagagcagttccgaggaactgatgcttgctgaccccttcccgctctctgcgtataccatggtgacgatgggtttgctgaagctgaaagaggaggacaacgccgaggagagggatttcgctgtgcgtgacgtgcagattggagggactagctcagttcagatggctctagagcgttcggttgggtattcgggtagagtggaagcggcaagggctacgcttgatcaggaactactatttcctctgattgaaataggcaaaaggttgctcgctttgtctgggtgggaagagcccttcaagtcttatgtcttcttgttatgtttcctctacatggcttacagtggttggatctggctcatgtttcctggcttcttgcttggctctactatcttcatgctatggaacaaacactataggcatgggcgctcggtaggagcgtttgagatcataactcctcctcgaagaagaaccgtggaacagctcttagctctgcaacaggccatctcgcagctggaagcgcacgtgcaagcaggaaacatttttctcctgaagctccggtccctcatgcttgcagcgtttcctcagagcaccaacagagttgcagctgcactggttgctgtggctgcgatattcacgttcgtgcccttgaggaccatcgttctactaatccttctagaagaatacacaagacagatgccggtgaggaagaagagcagtgagaagctggtgaggagattgcgggagtggtggctccggatcccggctgcgcctgtacagcttgtaaagcctcgggagacgaggagatggagatccaggttgagatgagataagtaagccaaaaaatgttggtttgtttgcttttagttttacaccatgttccgtgcacattctttgagcggtagggatcttggtatcacgccttcaagtgaaagcaagaccttggtgtaagctgggactggttttaacaagcagaaacagatgaagaaatcgtgtcttattcggtgcaacaaacgtatactaactct

SEQ ID NO: 21856 - DNA, 881 bp, Zea Mays
ggcaactgctatattctgcatctttcgtatgttttgtcacgcgaggtcgttcagggcgtattaggttaatggaagtggccaattctgtggcgtggctgagatgattggacctgtcgatttcgacagaagtgttgattactggcagcaggataagtggagtggccagttccctgtgaagtggcacataattaaggatgtaccgaacaatcttctgcggcacatcattcttgagaacaatgacaataaacctgtcacaaatagcagggacacacaggaggtgtccctagaaaggccacagtgctacaacaaccaacaggttcaattaggttggcatgatgctggtacctatgacaagaacattatcgagtggcccaagtgcagtggcgctaatggtagcttgagattcaaagtcgagttgaagcatggggccaatgctgatcttgtgaatgctatgaagctgatcccgccttcaacgacgtccgaaccccatccgcgatccatgtctgccgcgccatcctcgcccttccatctcagcgcccccattcgtgcttgaaggaaggcccattcgtgttggaacgaatcctcgctcaaaatccatgcgcatccgatgaggatccagagctgccctgctgcccttccatcctctttgtccctttccatcgtcggcgatccacttctatcggcggcgcccccttctagccccttccatagttgtgcttaggtacttctctctatttgtgaaatctagggttcttagtgtacgattgtcaatatctctataaaagaatagattagtgtacgattgtcgatatattgtttgttttcatgtaattgttgtgcactcgcgttttattaataatttgtgagtcgtcgcaacgcac

SEQ ID NO: 21857 - DNA, 1245 bp, Zea Mays
  misc_feature (1)..(2): n is a, c, g, or t
nntttacctcaatttggtgcttgaatatgtgccagaaactgttcaccgtgttattaaacattacaataagatgaaccaacggatgccattgatttatgttaaactttatatgtatcagatttgtagagctttggcttaccttcacaactgcgtaggagtgtgccacagagatataaagccacaaaatattctggtgaacccacatacccatcagctgaagttgtgtgacttcggcagtgccaaagtcttggtacaaggggaaccaaatatttcatatatttgttctagatactacagagccccagagctcatatttggggctactgagtatacaacagctattgacgtgtggtctgctggttgtgtacttgctgagcttcttctaggtcagcctgtttttcctggggacagtggtgtcgatcagcttgttgaaattattaaggttctaggtactccaacacgggatgaaattaagcgcatgaatccaaactacaccgaatttaagtttccgcaaatcaaagctcacccatggcacaaaatcttccacaaaagaatgccatctgaagctgtagattttgtgtctcggcttctgcagtactcaccaaacctccggtgcacagcatttcttctctctctaacagttggaggcgttaatccatccattctttgatgaactgcggtacccaaactcacgtctaccaaatggccgttcccttccccatctcttcaattttaaacctaatgagttgagaggagtaccagaggagtttgttgtgcaattgatccctcagcatgctaagaagcaatgtgctttcttaggagtttgagaaagcagttcaattttattccagaaaagaaaaaagagagaggatgcagcagttgagaggttacctgagtattgattacttacgttctgtttaaccgcacagtagcattagcctacagtattatcgactaggcaacgtgtgctgttatctttcacgacggcttttacatcgcaatgttctaccacggtggtgggatctttttcaccacattctgtaaagcagaagaagacgtaaatcgactggtcacccgttcttgtggtctgtatattggtctcccccaatcttgagaacacgttcttttgtttttggagatggattcatttcgtatctgtatcactatcaccaaatgaaacaagaactcatgtattcttgaactggattcagttacatgagagtcaaaccatgtcctttctctaag

SEQ ID NO: 21858 - DNA, 4865 bp, Zea Mays
cacaagtacacctaatgtgtgacaggcaatatcagttctactgagatctctctcttcatataaggatcttgattcagtcatggctgagaatggagggtcgcctttgggtcttgcaattttccattcagctgcagaaattcttgaagttttggttgtggattcaactgcttcatcgcttgaatcatggattgggtttgctgttgatctgcacaaggctctgcattcatcttctcctggttcaaacaggaaagatgcaccaacaaggttgcttgaatggattgatgctggtgttgtttatcagagaaatggtgctcgtgggcttcttcgttattctgctattcttgcatctggtggagatgctcatctttcttcaggaaatgtgcttgtgtcagattcaatggatgtagaaaatgtagttgcagattcaaacagtagagatggtcaggtcatcgataatcttcttggtaaacttgttgcggataagtattttgacggagttgctctatgcagcacttctgtggtccaattaacaacagctttccgtatcttggcatttatttcggatgataagcctgtggcgtcatccctttttgaagaaggcgccataactgttatatatgttgtcctgatgaactgcaagtctatgcttgagcgtttatcaaatagttatgattaccttgttgatgaaggggctgaactgagttctaccacagaattacttctagatcgaactcatgagaaagctattgttgacctcatgattccctcacttgtcttgttgataaatctccttcatatattacgtgaaacgaaagaacaataccgcaacaaaaaacttcttagttctcttctgcagttgcaccgagaagttagcccgaggctagcagcttgtgctgcagatttgtccttcatgtttcctacttttgctataggttttggtgttgtttgtcatcttatcacgtcagcacttgcttgctggccgttgtataattgggcacctggtctgtttcattgccttcttgaaaataccgaggctactaatgcgtccgtaccattgggcccgaaggctgcttttagtctgctttgtctcctgggtgatctgttcccagatgaaggcatatggctatggaaagttgaacttccttctctcagtgccattagatctttgagtactggagcagtgctagggcctcaagtggagaaaggggtgaactggacatgcttcgtgttttcattgttcgtgttgccttagaaaagattgagtgtgcagttgttcttctacgccctatatttatgtggttagatgataaagttgacaaaacttccctgtcagagagagacacctttaaggtccatcagttgcttcagtttactgtaaaattgtctgagcatcctactggcaaggcattgctttggaggatggggttcacaaggattcttagcaagttactacagaattgtagccgagcatctttcccgtatgataatcagacttttggaagggcgcactctaagaatgaccttatgctcaaatggaggatccctttgtttaaatctattgcatatatctttagtatcgacccatgtaataatgagaaggctgatgttgaagagtccctgaatgagaagtctgttcatgaatgctcttctgtcatgcatgacctcatgatgttctgccaggttttgcctgttggccgggaaatgttagcatgttcgttggcgttcaaggaattggtttattcttatacctgtagaagtgcagtaactttgatactttcacaaatacatacttccaacaaagatgttcttgaaaaagatgagagtgaccctaaccataactcaccatctctggatggttggaattgcttttcctcattgttcaagtgctggaagaagcttgtaaagtatgttggttctaatgaacgaacagattatttagtagaaactatttattccttgacactaggtgctatcaccctcagccagtatggtgaaaatcttgagggtctgttaatactgaggtatctatttgggctcccttctgatcctagtggttccttggaatcatctggtgagagtccaagtgagattgagttattcatgaagacatatgaagagaagatatgccagggcattgaaaattcagcgactgctgttggaaagactcttttacgcaagctactgaattcgatcaaattactacgctcaattcttgagaattctggtcaatccgcagatacagttcagatggttcttgaagaaggcactgactcactgtctgaaattgctcgctctgttgttatgacagctcatcttatgccatccctagccaatgtgtcagtaaatgatgaatctccttttctcttctctaatatgtggaaggttattgttgattcagaagagcctcttgactgccaagagggtgaatttgcaaagaggctagtttgggagttgcctgattcttctcttgatagacaactagcacctggccaatctgccaggaggaaattagcactgggagagagtgcaagtaggcgtgtaagggataatcaactgcctgaacccactgggcagttctcacgaggtttaaatacatccaatgcttcttcgggacatacacgcagagacactttccgtcagcggaaacctaacacaagtagaccaccttcaatgcatgtagatgactatgttgcaagagagagaaacatagatggtgcaagtagtgcgtcaaatattgtgaactctaccccacgaggaacacttagtggaaggcctccatccattcatgttgatgaatttatggcaaggcagagagaacgtcaaaatcatgcgccagccccaactggagatgcacctcaagctaaaagtcagacaacaagtttagatgacagtcttcgtactaagccagagaacttgcgtcaacccaagactgatctcgatgatgatcaagaaattgaaattgtctttgatgaggaatcaggttcggatgataaacttcctttccctcaaccagatgatagtctccaatctccacctgtcattattggggaaaattctcctggtcctgttattgacgagacagaaaatcaggagaatgaaagagttccctttttccagagggccacatctatcccgaaggacgatgaaaatcttggcattggcatttcttcccagactgcaatgctctcagaagctaacagttctttggaactgaaacattcagtttctagcccagggaagaattcttttcgtgatcatgctgaagagtctaattatgattctattggtgtatctgggagaccatctttacaagcagatcatcaacaattatctcgtagacatgaaaagagaagtccacgaaaattttctgagacttctctgtcaaatggattccatgggcgtgagcatagacattccaataaccatccacctctgccaccaatgccacctccaatttcatccgtgtccatgcaaaatactgattcagttaataggcagtcatcttcgttcagtgctcgagatcgaccaacacctaatccttctggttatcctacacaatcttttgactctagtatgcctagtgctttcacaggccttcagggtcaaactcaatacatgcttgcaggcgctggcagttcatcagcgaatgagttacccaatgtggaggccaagcttctatggaacacatttccagcaaataggatccctctggagaccttcagctcaggtttacctgctcggccgatgccaccccttacaccttattcagctgttgctactcagcacgctacgatgaactctggctctcctgcaaacctgtatagccagggcagtgttgtccagccttctccaactgcttctattattagtgattcaaatttggccatgaactccgcatctggcagcatgcttgcatcgaatctgctgccatcatttgcatcacaatttctgatgagcaggccttcaatgcctactccgttttttggcacgcctcttcaacaagttcaattctcatccggtcttccacaaaatatttctaaccctcagccacctgtctcaatacaaccacggccacccccacccccaccacccccgcagcagccacatccttctcagacactccaacaacttggtgctatccaattaccacaccaagatcagcagcactcatatccccatagtgctatcttgccacaagttacgttgcagtttcctaaccagctacccattcctcaagtacaattgtatcatcaaagccagcaggaatctgggcaaacactgaggcaagttggtgaacaatcacaacttcagaaccagggtatgcaagcagatagtttctctcaacagcagcaagactcagggatcaacttaaaccagttcttttcatctccagaagccattcagagtctacttagtgatcgtgagaagctctgccaacttttagagcagaatccaaaacttatgcaaatgctccagttgtagtcgcactggaggtgctattgtgaaagtgaaatctgatgctggtcgatcgctaggttcctagagtatggtgttgttttgttttcggctatggctgtagctagatgaaagcaactgccagcttgctagtcgccgaaatgtattcctatgtacattatatgtaactttgttctgtaatgtgaaaatttgtaatgttagtgcgtatctaatttatagttttaagtttaccttagtggttagatcgtgtgacatgcgcagcgacgggaaaacgacgccgccttttgtctgcaaaggcatttgacgctaactacctgtagagttctgaatatcctgttgcactcttgtgtgtatctggttgctttaatgctcgaaaatgaatatcctaa

SEQ ID NO: 21859 - DNA, 473 bp, Zea Mays
ataccagatttctccatcacaatctgcatatccagcaggacacacagcgcaaatcctttagaaggtgaccatagattgttattatcaaaataacgaaatatagcttccagaactcgtcgcgttgttgttgtttccctggatattctagcaaggttatgtagacaaatccctgaccaaaaatttgggcttgttgattcttctctgtgggaaaatagtttagaagagataatatattagataaattcataaagtacaaaactttcaagtattccatatgcccgaagtttatttacattgtcaaacttaattcaccatgaacagctctaataactttccatgaaggaaccctggtcaaaatggtaacagcaggaggttcatgaccttcggctttgagcacttcatccacccactgagttcgaatatcctcaacagcagcatcattatcagcatttgcatatgggctctcataattt

SEQ ID NO: 21860 - DNA, 725 bp, Zea Mays
tgaacgttgtcagcttctatgtataattttacacagaccacattttttactccatttcctaatgattggcctgattaataaaactatagattttatttcgcagatcactgtcatcttatgtggtcgactggtcgtagattgttgcatgacctttttttggtacaatgacgataacatcttctacgattacttcttggagaaagagaagtaacacaaattcagttttcctcaatctagttttaatttcataacttctcgagttttgtttcctgtttttaacgtttgggttttactaaactgcttctgatttaatatctttctgttctcactcttagtcttcgttcgacctttgcaaaattagatacgattttctgctcgttccacacaattttcctcctctcttgttgttttagatgtgagtttccttagatcaatacgtgtagccaaagcacattaaagtcaacatccatgttgtttgttcatacgcaaagaatttcatctaggcacgaggactaatatttgtgatccttcgagctttcatggccgagattagaatttcatctaagcatgaggaccaatacctttgatcctaagagcttccactgctgtggttctgtttatttctgcttttttgttgaaatatgtggaccagaacctccgatccttacatgcttcctcgatgaggtaattgacacttactttaacatgtcatcttcaccaagttc

SEQ ID NO: 21861 - DNA, 1458 bp, Zea Mays
cttatctttaaactttagactttgaaacttgctagccaagctgaaaaacggttgcatataaccagaaagcttaccaaaaggcactaagcaaagctccgggatatactgattcctcgatctttatataggaagtgtacattgctttattgtttcattcagattttatttatgcgtagattagtgtcctccttcgggccagggttgagactttgaggcatagcccagatgattttagcaaagccaaaaggtagttccgtcgggaaagaagaatatctcgtcataccaactaaatgctttgttcatgtctgccatttggtttatcatagagccatagaggcgcatctgtccatcctcgtatgggtgtggtgtctgctcaggcaatgaattctgcttttatgagctggacggtttccatatggacctacttcgttggcatgtagaatcattaatctgatgcagatgccaaagtttcagtcaaccattacaatatttgaaaatggcctttccactagaacatgagctcgctttgtgatattaattggaattccggcccctctactgaaaccgtaatactgtgcgccagagtaaatggctggtggctggttctcttgcttttgcagctatttggaagcgtgatgctgaaattatgtggtttttgctgggtgcggttggcaactctctgctttcgatggttcttaaaaagatgctaaaccatgaaagacccgcaccagctttgcggtctggccctgggatgccatcgtcccatgcacagtccatattctatgctgcgaccatcctggctctttcattgtactactggcttgggacaaattatctgaccatgattcttgggcctgcaactctgtcggtggctgcctatctgtcttggctacgggtgtctcggcgccttcatacactaaaccaggtcatggcgggagctgttgtaggatctgtcgtcggtgctctatggtttgtgctctggcattcgcttgtgcaggaggcttttgcttcttctctgctggtcaggattgcagtcgttcttggatcatcagcattttgtgttggctttgtcatctacatgattcgtcactggctcaaggatgagtaatgtacttcttagccgcaatgggagatcgactgataggcacggtgcgtttggatgagtgaatccgttccaattgttatcagaatcgcttgaaatggtgtcaaatgggttgtgagtggagcgattcacgagtgaaaccatttttaattaaaattcaatctagtagttaaatgatttcacgaagtgattctagttcgtgatcagaaacatttcaagaatttagatccaaaatgtttctatacccatcatggtgcaaagacctctaaacgcacatttgatttctgttgtgaattagacctttttatttaacactgaaggaaagttaaagcatggattcttgtggtaccgaataa

SEQ ID NO: 21862 - DNA, 914 bp, Zea Mays
  misc_feature (914)..(914): n is a, c, g, or t
ggttatcacaataacccgactctcggacccacgacgagttaagcccggagggaaaaaggacaaatcacacaaaggcacagggaatcgcgccaccgtgggacgcgtacggcgcaccgcccgcccgccggatctgcgccggcgacgcgcccggacgtcggatctacgccgccgcaggaggggggaggcggcgctgtggccgttctctgcccgcgagcgcccggatccgtcccgccggtgacttcatctccgctaatccaacggataggcaaaactctaatctttgtcaaccatcaagaggtggtgaaaacatcttctcttctccaaagactgctgactgcaagttgcaaaagtttgtcttcagcttgctgtgttctttcttccctctctggcggagtacacgagaagtttgtagatataggcactaggcagctcctttcagctcttctatgtccagggatttggactgtcctgttcagacacagatggctgtggcagtcctggaccggagcttcagcagtgaatatcctggaggcagcagaactgaggggaggcaactgagctggaagagagtctttgtgcaaactgacaatggttctgtccttggcattgagctggagagaggagaaaatgtgcaaactgtgaaaaagaagctgcagatagctctcaatgtgcccactgatgagagttcattgacctttggtgacctggttctgaatgatgatcttagcagcattcgcaatgactcaccgttgcttctcaaaaggaatcagattcaccgaagcaattccacaccttgcctctcccctactggccaggatgtttggcaaagagaccggagtggacccattgaaatacttggctgttcaagcccttcatctcggatgaagcagattgcgaaggatgtcataaggccn

SEQ ID NO: 21863 - DNA, 3664 bp, Zea Mays
gggttccacattactacataccttccttttacgttttcctcgccttccggttttcactcccctaccattgcattggcccccctcatgagatgagaatgagatcccctctcgtcgcgtaacacacacacacacaacgaacacacagtttcatctcgcttcctctctatctctctgtcgatcaattcattgcccatcgatcgatctcgagcaagaggaacaaggaaaataggagtactaggggatcgatcaggatgttggacacgacggacgacatcgcggaggggatatcattccaggcgttcgaggacgactgccgcctccttgccagcctcctccacgacgtccttctccgcgagctcggcccccgcttcatcaaaatcctcgagcgcaaccgcatcctcgcgcagagcgccgtctccatgcgcgcggcggggatggaggacacggcggccgtcgtagagcggcagctggagaccgacctggccgcaatgcccctggaggacgcgctctgcctggcccgggccttctcccactacctcaacctcatgggcatcgcggagacccaccacagggttcgtaaagcacgcaacatggaacagctctcaaaatcatgtgatgatatattcaacaagctgattcaaagtggtgtcccttcagaacaactatatgacactgtctgcaagcaagaggtcgaaattgttctgacagctcatcccacccaaataaatcggcgaactctgcaatacaagcacctaagagtagcacatctcttggagttcaacggtcgccctgatctaagccacgaggataaagaaatgctaattgaagatctggtaagggaaatcacagcaatatggcagacggatgaattgaggcgccataaacctacaccagttgacgaagctagggctggtcttcatattgtggagcaatccctttggaaagcggtaccgcactatcttcgccgtgttagcagtgctctaaagaagcacaccggaagcccactaccgctaacctgcacaccaatcaagtttggttcttggatgggtggtgaccgagatgggaatcctaacgttacagcaaaagtgactagggatgtttcgttgttgtcacggtggatggcaatcgacttatacatccaggaattagacaatctcagctttgagttgtctgtcaatggatgcagtgataaggttgcaagcttggctaatgacattttgctcaaagcagccgaggacctaaaggccaatacctggaacaaaacagtaccgcagaacaatgcaaagcttcataacttggctctgcctgcacaacttccttcgggtgctgatcttccttcatgtacagaatgcagtgatggagaatctcaatttaggatgataaatcttccaaggaactcaaatcgtccgggggctcttaatttaacagaaaagtttgaagacagtccattatcatctcctactggtcgtcaatcacacatagctagaactccaagtggccgtcaaccaaggaaattgttcaaagaatctaatataggtcgatcaagtagcttccagaagctacttgagccaagcctatctgacagaccgggaattactccttacagggttgtccttggtaatttgaaagaaaagctggtgaagacacgcagaaggcttgagcttctgcttgaggatctaccatgtgactatgacactgaagaatactgtgaaacatcagatcaacttctggaaccgttgctcttgtgccatcaatctctgcaatcatgtggatctagcgtgctagctgatggccggttagcagatttgatacgaagggttgcaacctttggtatggttcttatgaagctcgatgtacggcaggaatctggtcgtcacacagaagcacttgattccgtcacatcctacttggatcttggtgtttatagtgagtgggatgaagaaaagaagctggatttcttgactagagagctgaaagggaagcgccctctagtgccccaaaacatagaggttgctgctgatgtgaaagaagttctggacaccttcaaagttgctgcagaactagggagtgactcacttggagcatatgtcatttcaatggcctcaaatgcaagtgatgtccttgccgtggagctgttgcagaaggatgcaagacttgcagttagcggggacctaggaaggccatgccctggtggcacgttaagagttgttcccttgttcgagaccgtgaaagatttgcaggcagccgggtcagcaatcaggaagctactgtccatcgactggtacagggagcatatcatcaagaaccacaacggacaccaggaggtaatggtgggctactcggactccggcaaggacgccggccgcttcacggcggcatgggagctgtacaaggctcaggaagacgtcgttgccgcgtgcaacgagttcgggatcaaggtgacgctgttccatggccgtggcggcagcatcggccgaggcggcgggccgacgtacctggccatccagtcacagcctcccggctcagtgatgggcactctccgttcgacggagcaaggcgagatggtgcaggccaagttcggccttccgcagacggccgtgcgtcagctggagatctacacgacggcggtgctgctagcgacgctgcgcccgccgcatccgccgcgcgacgccaactggcggaacgtgatggaggagatctcccgcgtgagctgcgcgcactaccgttccacggtgtacgaggacccggagttcatcacctacttccatgaggcgacgccccaggcggagctggggcacctgaacatcgggagccggcccgcgaagcggaagcccgcgggcggcatctcgagcctgcgcgccatcccctgggtgttcgcctggacgcagacgcggctggtgctccccgcgtggctgggcgtcggcacagggctgcaggacgcgctggaccggggccacggcgaggagctccgcgccatgtacgcggagtggcccttcttccagagcacgttggacctgatcgagatggtgacggcgaaggcggacgcgcccatggcggcgcactacgaggagatgctcgtggcgcgggagcggcgcggcgtgggcgccgggctgcggcgtgagcttgcgcgcacggagcggtgcgtgctggcggtgagcggccacagcaagctgacggcgcacaaccggagcctgcggcggctgatcgagagccggctcgcgtacctcaaccccatcaacatgcttcaggtggaggtgctccgcaggctccgccgcgacgacgacaaccgcaggctccgcgacgcgctgctcatcaccatcaacggcatcgccgccggcatgcgcaacaccggctgacagctgagtgctggtgaccgcggcttcctgcctcgttggctcgttgtttgatcaaccgagaagccgccattttggacttcgtcgtgagctcaactgacagctttggtttttcttttctttcgtgaacggccccacccagagaccagagtcgcattttttttgctgctcgatcgtctgcgtctaaataattttaagtcttgttcgtggaaatatttttgcgcgtctgttgcggtcaactgtttcatgcgcgcggcaagggtggagcgtggagttgattgatgcgcgccgacacggcgacacggccgttg

SEQ ID NO: 21864 - DNA, 2312 bp, Zea Mays
tcctctccgctctgctccctccgccgtgcgctcgaacgaactccacacgaaattatccgcgtaaagttggggagcagcgaacccgtagcgcgcgccccggatccctccacggggggcaatggcctcgtcggcgttcctgcccgagctgggcacgcaggtggtggtgcccgtcgcggccgtggtaggcatcgcgttcgcggtgctgcagtgggtgctggtctccaaggtgaagctctcccccgagccgcgccgcggagacggctccgccgggaagagcggcgccggcgccggcgccagcgagtacctcatcgaggaggaggaggggctcaacgagcacaacgtcgtcgtcaagtacgccgagatccagaacgccatctccgaaggtcattgcggacaatgttggtgacaatgttggagatattgctggtatggggtcagatctctttggctcttatgctgagtcttcatgcgctgcgcttgtcgttgcctcaatctcttcattcgggatcaatcatgaattcacccctatgttgtacccactcctcattagctctgtgggtatcatagcttgcttgataaccactctttttgcaactgatttctttgagatcaaggctgtagatgaaattgagccggctctcaagaagcagcttataatttccactgctgtgatgactgttggcattgcacttgtcagttggttagggcttccatatacattcacaatcttcaactttggtgtgcagaagacggtgtataactggcaattattcctatgcgtggcagttggtctgtgggcaggactagttattggatttgttacggagtattacacaagcaatgcatacagtcctgtacaggatgttgctgattcctgcagaactggagctgctacgaatgtcatctttggccttgctctgggatataaatccgtcattatccctatttttgctattgcttttagtatttttctcagcttcagccttgctgccatgtacggtgttgctgtggctgctcttggaatgctcagcacaatcgctactggccttgccattgatgcctatggtcctatcagtgacaatgctggaggaattgctgaaatggctggcatgagccacagaatccgtgagagaactgatgctcttgatgctgctggaaatactactgctgccattgggaagggttttgcaataggttcagcagccttggtgtctcttgccctctttggtgcttttgtcagccgtgctgagatctcgactgttgatgttctgacacccaaagttttcattggactgattgttggtgccatgctcccatactggttctcagcgatgacaatgaagagtgttggaagtgcagcactcaagatggttgaggaagtccgcaggcagttcaacaccatccctgggctcatggagggcattaccaagcctgactatgcgacgtgtgttaagatctctactgatgcatctatcaaggagatgatcccacctggtgcacttgtcatgcttacacctcttattgtggggatcttctttggtgttgaaaccctctctggagttcttgctggtgctcttgtttctggtgtccagattgccatctctgcatccaacactggaggtgcctgggacaacgcaaagaaatacattgaggctggtgcatctgagcatgcaagaaccttgggcccgaaaggttcagacccacacaaggctgctgtcatcggtgacaccatcggtgatcccctcaaggacacctcaggcccctcgctgaacatcctcatcaagctcatggctgtcgagtcccttgtctttgctcccttcttcgccacccatggaggcatcctcttcaaatggctttagaggaagaatggaagatggatgggtagtttatttttgccgggggagagcactagatatatgtcatagagaagtttcagtttacccatatggtgcacttcatccttttttgtttcgcttgtactgtgtcgcagtcttgttgaacttgtcagccgtggtatcacctagtttttgggtctagatgcagtagccgagtggagcaaaaacgtctagcattctacaggattggaatttggacatggatgtgttgggaagtttgatactgcatgtagatatttcgatgatgatgatcaaggaatgcacaagtcagatttacctgtgtttgtgaaacttgaaactctgcgtaggagtgtatggcggtagaatagtcaatcagtgaccgatcaaaatctgtaactcatcgaccttattttaatagtataaactagataaaattatacaacaaacccaattaaa

SEQ ID NO: 21865 - DNA, 1945 bp, Zea Mays
tctatggaccaaatccaaatggttcattagctggaattattttcatgcaaatcaaggtcaccatcttgatgatacttgggtggcttatgctggaagtggagctggaaataggccgccccctatacttagctggcagcaattagcatccggcactccaggtggtcgtttcagtcattcttgccttctagttggtgacacattagtcttgtttggtggaatcacagatcagggacagcgtttgaatgatacatggactggtcaaatcatctgtgaagagcctcgaaggccacggatctcatggagattgctggaggtaggtcggcttgcaccacctccacgtggagctcatgcagcctgctgtgtggatgacaagtttattgtcattcatggtgggatagggctctatggaagccggcttggtgatacatggcttcttgatctctcaaatggccttcagtctggcagctggcaccaaataggcaacacatggcctttgcctcaacctcgttctggccactctttaacttggattggcagcacatgcatggtattatttggtggtagaggatcggaatttgaggttcttaatgatgtctggctgtttgatatcagtgatcaataccccaaatggaaggagctaaagtatggcttgtctagtgctcttggtgagcttccttttccacgggttgggcattcagcgatacttgtgttgggtggcaaggtccttgtgtatggcggggaggactcacaaaggcgacgaaaggatgacttttggatcttggatacaccagctctacttcaatacgagtcaggttccaagaaaatgaccagaaagatgtggaagaaactaagaattgatggtcagtgcccaaactaccgatccttccatggggcatgtgtagatgcttctggttgctgtgtgtatatttttggtggaatggttgatggccttgtacacccttcagaagccttgggcatgaggtttgatgggcatctgtatcaagtggagctcgtgctacatctttaggacgtgtttgttcccttgtatatccgagaaattccataggtttgatgtttagcgtctggtgtagtaccatgtcacccaggttttcaacattgtaaggatactccagatggtgcctaacggtcgtttgcgcatggatgcttgcgcacagctgtcgctgatctgtgaaaggaacagtgacccttgtaattttggcctgatgtgtctgcatatggccatatgggtttgaattgtcattcctttgtcagattcatatgttccaaagaatgtccgtcaataccatctggagcagatggttgttttgctacctgatgagccatcatatagtcatgggaagagagagaaagatattcttttccacaataatccaatgcgcgaggattgctcgggaccatatggagctgctattggatctttgcatcccagtcacaggttagctcaatgcaggagaggaccatgtcccattcaacccttgggttcacatgcacagaacctgttatttgtatttatctaatgatggtgcatgagtcatattggcatcaccaagcatcagaatttcttccaaagatgaatgctggtttgatctttggtccaccagcactcgatagtcatgtcttgcgcgcattaattctgcgataacaggaccgatgattgcttggattatttcagattatggaccatttgcagtatgattgctcgagagaaatctggagctcctgttcagatccactttgtgacagcaaggcatgcttcagcatgaagatccatgtatgatacctctgaaaggtttacttaggcctagactcagtttgtctctgattctgtacattcttgatagattatatttgctcaagatgttgtttcagtgcagcattcaactgcaaattttattgctggatgaatcgctatccactagtacat

SEQ ID NO: 21866 - DNA, 4046 bp, Zea Mays
ttttctttttgctccccgaagctgcaacttccagatcgttctcatcccatcgtttcctcctctgctcaagcacggcagccagtccagccaccatttgggtgctcatctccctctgctcggcacccagccccagctcgcccgagctccctgcgccgacctcatcctccccatggtgcgtcaccttctactcctctccttcccacggcacagcagcgcccctgcagctccccttctccagatccatggcgcccaacaccttgagcgcccctgccgctgctcctccaccgggatctcctcctccactaggcgtccaggcttgtcccaccatggctgcccctcctccatctcctccctccccaccaggttacccagattccatggccgccgccgccccagccatctccctggtggccgacctcgcccctgccccagccacagctcccccttcggccctgctgctgcaagcactcagcccctcccatggcacacgccccatctgcaacaccgtcgacccccgacgaggtcctgttctcgccctgtcgttttagtactcggcgtcgattaagtagatgctaaccgtgtgtatattcgtgtgttcttgtgaggagaaatcccatgatttgggggaagacgaagtccaagcacaacccccgccaatcgctcgatgaaaaatctaaaccaaaaccctcagcgttttcatgggttccggagggattttatgttggtaaggtgttgtgcggtgtgatctccaattccctattgctgatgtcttactccatcatgaccttagggaaggatgttttcctctaaattactcgtaataattatgcttggtgtatgtgttgttttagctacttgatgaaatgttttagttgtgtgcgataatatggttgccgttcgagtggaaagtagatgtgttgtatgacctgagttggagttgaagcaagtatgtgtgtctcgtattacgaaactaattagagatatgcatgatgtttgtagatggattatgtgtagagtgttttagtacaagtatttttttaggtatagttgaaccaattattgtatatgaattgtgcgatatcaaggttgttctaatgttcttttaacatcttgctaataaggtgttagagtattctaaatgccaaacataggataattttacaagccaaatagaagttaaattgaaggtattgatgtttagggctgtaggtatagttttagttatgcagctagtccaataaagtagatcatgttttctgtagaagcgttatatataaaacttgtagataatctctttatcttacttgtgtaaaaatttcatgaccataggtgtagtagtttaggagttatgatttttccaagtccagtctcagaatctgtccgaattctatacaggtttcgaaaattggattgtttggctaagctaaactgagaatcagcccttagtaattatagaagaattgtagtacttttcttaagctttccaacaaattttggagcaccctttttggtggtctagagatcaagttacagctgtttgaactatagagtctgaatctgtccaaatctggacagcgaagtctgtttgtagtaactgactttgatatgtattgaattaacctgagatgtttataaatgaattgtagacaattctattaactttctaaaaagtctaggatcaccggatttggatttcggaaactccagttctggacttttgaagtagttagtcgaattctgtccaaatctggacaaaatttatgtttagcgctgtttgacctttctaaaggtcgaatcttgttgtgatggtaatacaaaagttatagaggactttataagctttccaaaaagtcctagtttactatttttggatacatattttatgaattgtgagctaaacagatagttgttgacttgctgttctgctgtccaaacacatgtctactgtctgaaaatagctcattttgtagttacatttgcatcaggctttgatgattgctgtacaaggatgatatggcctcccgcccaaagctgtctggtattcagaagcaggttttggcgctgtacaggggattccttcggacagcacgccttaaggcccctgaagaacgccgcaggatcgagtctgttatcttggcagagttccgtgacaacgcaaggagtgttgaccgtaggaactttgtacacatagagtacttgttgaggagagggaagaagcagcttgagcagctcaagaatcctgatattactggactcgctacccttgtagtaaagaaatgagcaagagaagaaggaagacaagtcagacaaaacagaagacgagaagaggttcctaccataacacttaagcaaggaatcctgtacacttctctcctggggttgtgacttgtatattgtcaaggatcacttggatgtggtaaatgctatactggacactgatgatagctgcataaggattgtgcgaaaaaacgggaagacatccctacatactgctgcaaggattggataccatcgtattgtcaaggcactcatagagagggatccaggaattgttccgatcaaggataggaagggacaaactgcacttcacatggctgtgaaaggcaagaacacagatgtagtggaagagttactgatggctgatgtttccattctcaatgtgcgggacaagaagggaaatactgctttgcacatagctacatggaaatgggagaattttgggattatgaaacaccgcagacgtggcttcgacgaaacggaggcgtaggcgagggattcgacattatgaaaaaccagagaagatactacactctaaaatggacatgaatcctctattaccagggaaggatgatgtttattacactgaaacagacgctgtctcacatccgttacccgcactagacgcacccagtctttctacagagagaatcgcgccgttcttgaatctgccattcgctgaatctgccattcgctgctgttgtttctggacagtgaagcagtattccggacagtgaacaaaaatctgggaacacatttcattttcactgtcattggctaccagagtccgggaacaaaatctgggaacaaaatctgggaacacaaaaatctgggaacaaaatctgcctttggctaccagagtttattgctcccatatcattcgctgtccatttcactgtccattcgctgaacacaaaaagctgggaacaaactcattttcccagtgaacaggtagcacaatttagttcacaaaatctgggagcacaatttagttcacaaaatctgggagcaataaacaggttgaacaggtagaacaaaatctgggagcaataaactgccatcccagaacaaaattcgcagctcacatttcagttcacaagctagttcacaatttagttcccaggtaccacaatttagttcacaagctagttcacaagctcacatttcaatggagcaatacacaggtagcagtttgacaagctattacacaagctcacatttctgggagcaatacacaggtagcagtttcacaagctatcacacaagctcacatttctgggagcaaaaaacaggtggcgtagtagcagtcgtgtgttcatcttcatttgcagcaacgacaagttcacggcttggtgcttcatcttcatttccagctacaagtattgcaacgacaagccacctgctttggcgcggactagggttgtggtcgcagcgccgccgccacctgctttggcgcggggccgcgagcagcaagggagaagacgcggagtttggagagaaggaggtgcagcgccgccgccacctgctttggcgcgggaccacgggcagcagatctccgggcagcaggggaggagactagcaggggagggaaatggagattgaagaaaatgagatggaaggaagaggcttgacgggagagagaagaaccttgaagagagaagaacggctctggacggcagaagaaaacggcgcgtgggctgatagcgacggaagatcattattcgttctcctgaacgactaataacgatgctgtctatcttgtttttcag

SEQ ID NO: 21867 - DNA, 4470 bp, Zea Mays
cgacagcactcgtgggtcaccacggatccggaacccgagcgcacttccaaattcctatcccaaaccaaccaacagtcgccacgttttccacggctaaaaggttccaacaactggctccaatagtgtctcctgtgtcccagacgtccaggtccagatcatcacgagttcgatcatcacatggattggagctcctccgtcctcctcgcctcagcttgcagacacgtcaccatcgtcctcccctcccctctcccttctcgagttaaaatgccggcgctcgtcaaccaccagtccaccacctctcttgctccttcccacccctcatcggctcctccgtttcccaccacaacaccccatgtccgtcgcctcccttcccccacacggcgccaggccctgagcagccagcagcggacccaccaccctctccgcctccgatccgccgctcgccggggaggcctctggtctcgggtccgtctccagaccatggccaccactgccaccatctccctcctacagcacgtccgacctccggcttcgggcggtagtcttctcccccttcccctccagcgcctccgccctattcactgccgacgctcggcgccagcctcccatcactccctccatcgcagtctccacctccgtctccccacccgcggcgcacccgcggaccggccccgcgccacggctgacccgtcgtccgcgctcgacgcggcggccggggagggggccgccggtgccaccaccgcgctgctcgacgtgagcggcatgatgtgcggcggctgcgcggcgcgggtgcggtccatcctggcggcggacccgcgggtggagatggcggcggtcaacctcctcgctgagtccgccgcggtgcgcttgcgggcgccggcgccgccgggcgcgggggaggagctcgcggccaggctcacggagtgcgggttccccgccacggcgcgccgagggggagcggccgcgggggctggggagagcgcgcgcaagtggagggagatggcggccaggaaggaggaactcctggtgcggagccggggccgagtcgcgttcgcgtggacgctcgtcgcgctctgctgcggctcgcacgcgtcccacatcctgcactcgctcggtatccatgtcggccacggaacgtttttggatctgttgcataatccttatgtgaaatgtggcattgctacaactgctttgtttgggcctggaagagatatactctttgatggttttagagcattcaagcaaggttccccgaacatgaactctctagtaggatttggatctgcagctgcatttactatcagtgctgtgtccttgctgaaccctgactgggagtggaattcaaccttttttgatgaaccgcatgcaggtcatgcttcttggatttgtacttcttggacgatctcttgaagaaagtgcaaggcttaaggcatccagcgatatgaatgagctcatttcactgttatcacctcagtcgaggttaattgttacttcctcaagtgacaacccttctgcggacagtagtttgaattctgatgcgatcacagtcgaggttcctgttgatgatgtccgtgttggagactcaatattggtcctgccgggagagactatacctgtagatggtaatgtcattgaaggatcaagttttgttgacgaatcaatgcttactggagagtccttgcctgtagccaaggagactgggcttcctgtattttcaggaactgtgaactgggatggcccgctaaagattagagcaacatgtactggaccatcatcaacaatagctaagatagtccgcatggttgaggatgcccaagcacgtgaagctcctgttcaaaggctcgcagattccatcgcaggaccatttgtgtatactgttatgacgttggctgcaacaaccttttccttctggtattacattggcacacacttatttcctgaggttcttctgaatgatattgctggtccggatggggattcattacttttgagtataaagcttgctgtggatgtattagttgtttcctgtccttgtgcacttggattagctacacctacagctatcttaataggaacttccctaggtgctaaaagagggttactggttagaggaggtgatgttttagagcgtttggctggaatagatactcttgtgcttgataaaacagggacgcttacagaaggaaaaccagtagtgacttctattgcttctctggcatatgaggagacagaggtccttcgtcttgctgctgcagtggagaaaacagcattgcacccaattgcaaatgctataatgaacaaggctgaactactcaagttggatattccgatcacaagtggtcagcttacatcgcctggatttggttgtttggctgaagtagatgggagtttagttgcagtgggcactttggattgggtgcatgatcgttttgaaactaaagcatcgccaactgaactgagagaccttagaaaccggctggagtttatgttgtcaagtgaagcatcatcatcaaaccagtcgaagtcaattgcttatgttggccgtgagggagaaggaattataggtgctattgctatatcagatattttacgagaagatgcaaacttaactgtggagaggttgcagcaggaaagcattacaacgttcctgctgtcaggggataggggagaagcagtgacaagcattgggaggaccattggaatcaggaatgaaaacataaagtcttccctgactccgcaagacaaagcaagcattatatcaactttgcaagcgaagggacacagagttgcaatggttggtgatggaataaacgatgccccgtctttagcagccgcagatgttggaatagccatgcgaactcattcaaaagagaacgctgcctctgatgcagcttcagttgttctactaggcaacagactttctcaggtggtagatgcgctatccctgtcgaaggcaacgatggcaaaagttcaccaaaatttggcctgggcagtggcatataacatagtagccattccaattgccgctggagtgctgctgccacaatatgatttcgccatgacaccatctctctcaggggggttgatggcccttagctcaatctttgttgtcagcaattctttgcttctgcagctgcatgggtcgtttcagaacacagaaaaacggcagggtgatctgagctcaagattaaactgaattgttgggtttagtttgacccagccgaaggacagtggtattgaattatagagggttctgatactggttttccagctccggctaattgaactgagtcagaactataagtagcaagctattcgtgtcagtagtagcatgttcctgtactgtttgtcaacccaactatagtagcaagtatgacccagaaggacaataatctaccacggccttcaaaaacattgtaaattagtaatggtactgctgtaagcctgtaaacaaagttaaggcgtatgactatcgttcatggtctagcaatgtgcaacaagctataagcttcatttcacacaggtatgggaagttcagtcaacagaactagtcgaatagcaagcagtacacatagcaactatggccacactataatggcaatcatacccctgaacaatagcatagctaggagattactggcgattcttctacttctacttctacttccatgtgttggttgttctaggcttctagcactcttcgtatccatcgttgttggcccagtgcaccttcttgccgctgctgctccgcatcaccttctcgtcgacggccttcaccccggcctccgcagctgccgccgactcggcctgcacacgcgccatcttcctccctcgctttctcgccgcggccgccttctccgtctcggcctcctggtactccctcgcccaacgccggctcagcacgcatgttgcagctagcgcgacggcctgcgccatgaacatggccagcagcagtagctcctcgaggaacgccagcacgaactgctcccggcgatccctggcggagccgaggaggcggaggctgtggtcgtggcggaggaagaaggccagggaggccagtgcgtggccggacagcgcggcgagcgcgagcgccgtgctcgcggcgaggcagaggtgggtgagctgcgcgtggagcgctgcgagtgcggagagcagggtggtggcgtgcacggagacgagcgcccagccgaagggcgtcggccgcgggcggaggaggaagaccgggccgagcgcggcggcggcgaggacgaggagggagaggttgaggagccagaccagtaggttgggaagagaggagcatctccgtaggctcgagttctcggtggcggacgccattgctttactgggtgcttgtgttctcagtgcgacagtgatcgtgtgagtctgatctgttgctgaatgctgagttcagaggagcggggaagtgcgtggcgcgtggggtaaggtttatacagagtgggaagactgacc

SEQ ID NO: 21868 - DNA, 1870 bp, Zea Mays
aaaaagttcgcagctttgcttcaccgcgacattgaacattgaaaaggggaaggtttataaggtgagcctgcatgttaggtcatcagatgcactgtccttgactgcttccttgacaagctccgatgggctacaaaagctcgctgctcataccatcacaggtagcaagaaaacctttgcaaaatggacaaaggtagaatttcatttgagatccaaccaaaataacagcaactcaaggtttcaacttacaacaagtaaaagcggggtagtttggcttgatcaagtatcagttatgccaatggacacttacatggggcatggttttcggaaagatcttgcttctatgttggccaatctcgagcctcagtttctcaagtttccaggtggcaactatgccatgggaaattatctacgaaatgcatttcggtggagtgagactgtgggaccatgggaggagagacctggtcactttaatgatgcctggggatactggactgatgatgggcttggattttttgagttccttcagttggctgaagaccttggggcttccccagtttgggtggtgaatgatggagcaagccttaatgaagaagtttccactaaaacaattgcatcattggttaaggatgttgttaatggcatagagtttgccagtggaggacctaagacaacttggggttctgttcgtgcagcaatgggacacccagaaccctttaagcttgattatgtttcaataggaaatcaagaatgttggatgctctactatagaggaaattaccaaaagttttactcagcgattaaatctgcctacccagacatcaacattatatcaagttgtgataggccaactatttcgccatccaaccctgccgatctttatgatgttcatgtctacacctcttcgactaatatgttttcaaaagctagtatgtttgacaacacaccacgtggagcaccgaaggcaattgttagcgagtacgctgtgaccggaaatgatgctggcaaaggaacactggtagcagcactggcagaagctgcatttctcattggattggaaaggaacagtgatgtggttgagatggcaagctgtgcacccctttttgtaaatgacaatgatcgcaggtggagcccagatgccatcgtcttcaactcggggcagcactatgggtgtcccaactattggatgctacacttcttcaaggaatctagcggcgccaccctccatcctacagccattcaggtctccagctacgatcagctggttgcgtctgccatcacttggcagaacgctaaagacaagagcacttacctcaggataaaggtggtgaatttcggcaatcaagctgtggatctgaacatatcggttgtggaactggccaccggcgtcaagaagtctggatcgaagcagacggttctaacgtccagcagtccgcttgacgagaactccttccagcagccagagaaggtggcgccagtgtcgagcccaatggcgaacgcggggcagcagatgggcgcttccgtggggccgtactccctcacctcgtttgacctgctgctggagccgagcaagcatgacagcgtgtaaaactgtcaactgaagaagcatgacagcggtgtacgtaaaggaggtcaaagatagaggagacaggtcagaggtcaaaattgagaccttgataccatattggattggattgtatgtatcaacaagttcaacctaaaagtttaagctgatagtgaaatgcggacagttcacattctaacaaatcccagtcaatgttgcatccaacaatactttgtacttgatgtctgaatccatttgattcagaagatagcgctttattgttttgccaatgcaaatacacatgcgatc

SEQ ID NO: 21869 - DNA, 2365 bp, Zea Mays
cgtccctcaggcctcagtgtccgcgcattttacaacacggccacaccaacgccacgacatggacgccgccgccgccgcctcactgttgccccgcgccgccgcctcctcactgttgccccgacgcgttctctctcctctccatgtttcccgaagcggcctccttccccgtcaaagctccttcctcgctgctcgctgtgcccactcccgtgcccctcctccacatccgcctctgccgcgcgccgactgcgatgatgctgccgccaaggcgcacccgcgcctccgtctccgcctgcttgcggaggagttccgcgcactcccatctgacgcagatcgcgcgcgccggctcctctcactcgcggccgcgctgccgcggctcccggagcccgaccgcgcccagggcaaccgcgtcatgggctgcgtcgcgcgggtgtggctcgtcgctcgctgcaacgcgtcaacgggctggcggatgtggttctcggcggactccgactctgacctctcgcgtgggtactgcgcctgcctcgtcgccgcgctggacggggccaaacctgaggacgtcctcgccgtcgaccccgccgatcccgacctcgcgccgctcggggcggggacaacggcggcctggtcgcgggccagcacgtggcataatgtgcttgtcggcatgcagaagcgggcgcgcacggccatcgcggcgcgcgagggtaggcaccccgggaagccgtttccgtcgctcgtcatcgcgcgcgacggcgccgtcagcgcgcagggcagctatgccgaggcccaggcgatgtttttatcccctgatgagtccaaggtttcaggccttgtgaatacccttaaagagaaaaaaatcgggattgttgcacacttttatatggatcctgaggtgcaaggcatactgactgctgcaaagaagcagtggccccacatccaaatatctgattccttgattatggcagatagcgctgttaaaatggctgaagcaggatgtgactatattacagttttaggtgttgacttcatgtcagaaaatgttcgggcagtacttgatcaagcaggatttaataaggttgtcgtttatagaatgtccagtgaaccgattggttgttcattagcagatgctgcttcaagttgtgaatatactcattttttgagggaagcttcgagatgttatccatctttgcatgttatttacattaatacttcgctggaaacaaaagctcatgctcatgaacttgttcctacaataacttgcacctcttctaatgttgttccaactatactacaggcattttcccaaataccaaatgttaatgtctggtatggtcctgattcatatatgggtgcaaacatagcagatttatttcagagaatggctacaatgtcagatgaagaaattgcaaaaattcatccagaccacaacagaaaatctttgagttcattactgccacgtctacactattatcagagtggtaactgtatggtacatgacatgtttggccatgaggttgtggagaaaataaaggaacaatattgtgatgcatttctaacagcacactttgaggtccctggagaaatgttctctttggcaatggaagcaaaacaaagaggaatgggagttgttggatccactcagaatatcttggatttcattaaggatcatgtgatgggagctctggacaaaaatgtagatgaacaccttcagtttgtgttaggaacagaatcagggatgatcacttcaattgttgctgctgttcaggaattacttcatttttattcttctcaagagagagcaaacatcaaagtagaaattgtgtttccggtatcttcggatgcaatttctaagacatcgaatggttctcatcatgttggttcttcaatggctactgatttggataatcttactattgttcctggtgtgagttctggcgaaggctgctccattcatggtggttgtgcctcgtgtccctacatgaagatgaataccctggggtcgctaattaaaatttgccatcagcttcctgataaaaacaacaaattatctgtataccaagctaacagaattaatgtcaggacacctctcggaaaatcagttgcagaggttgggtgtgagcctattctgcatatgcggcatttccagaaaacaaggaggttacccaacaagcttgttcaccaggttgtccatggtaatggtgacaaacccttgcaatagctgttcatcaatacttgtatttattttatcaaggcggctggatgatggagtatatctcaagtgaatgccatgtttagctggcataccgaagaaatctccgggacaagattatttgccctgtacgacaagaaggtattgtgaggcaccata

SEQ ID NO: 21870 - DNA, 1698 bp, Zea Mays
ctttgactccacacctagtgggcgaatcttgaacagaatcaaagcacagtggatacaagaatttttgacctgatgggctatcttctatttcctgctattgagattctaggaacagttattctgatgtcacatgttgcatggcaagtcttcatagtttttgtccccattattactgcatcgctgtggtatcagcaatactacatagatgcagctagagagttgcaaaggttggttggagtttgcagatcccccgtgcttcaacatttttctgaatcaatggctggctcaaatataattagatgctttcaaaaggaaagacaatttatccgttatattggatatttggtggataatttatctcgaccaagtttgtataatgcagccgcaatggaatggttgtgctttcgcttggatatgctttcatcctttgttttttccttcacattgatacttctggtctcttcaccatctgctttaattgacccaaagactgctggtcttgcggtcacttatggactaagcctcaatatgctacaagggtgggctattgctgtcctctgcagtttagaaaatagaatgatatcagtggaaagaatgttgcagtatacgactattccttcagaaccaccacttacaatatcagaacgccaaccaaatagacagtggccaacaaagggcgaaattgagtttcttaacctccatgttcgatatgcaccgcagctgccttttgttttaaaaggcctgacgtgcaccttactcggaggaaagaagacaggtattgttggtagaacaggtggtggcaaatcaaccttgattcaggcactatttcgcattgtggacccatgtattggccaagtgtttatagatggcactgacatctgcaccattggactacatgacctccggacaagattgagcatcattccacaagatcctgttatgtttgaggggaccttgcgaaccaatattgacccccttggggagtacagtgacgagaaaatctgggaggcattggattcatgtcatcttggggatgaagttagaaagaacgagcttaagcttgactctacagtgacagaaaagggcaaaaactggagcacaggtcagcgtcaacttgtgtgtctgggaagggtgattctgaaacggaggaagatcttggttttggatgaggcaacttcatccgtggatccaattacagacagcttgattcaaaaaaccttaaaacaacaatttctcaaatgcacaatgattacaatagctcaccgtatcacatcagttcttgatagcgacaaagtcttgcttctggataatggtgaaattgcagagcatgacgccccagcaaaactgctagaggacagttcatccctattctccaaacttgtatctgagtataccatgggatctgataagtggcgaatgcaagaaagcagctaaatcaatactctacagataatacaggacaaacgccctaggaagtgtgagtatctacgtgtcaccaattttatagcttaataaaaagcaaatttttaaaaaacaaaaaaaaaactatgaatatccatattccccaaggcccttggaagtgtgatatatttgtttcattgtatactagttaggggcctgtgcgttgctacagtttctatatatcacattgataaacttgctttattgagataacttttgaaacatgttcaattgagc

SEQ ID NO: 21871 - DNA, 2132 bp, Zea Mays
agcaaaggcatcattgagcgcagcgttgatgagccagccgccgtgcctcccctgtcggctgcggcggctcaccagcgctgcactcaattacgcctttgctttctcccgctggccgcgtgtgtgcagagcgggcgggcgttcggcatcattcatcaggtggactattggtgcatctattgagaagctgagaaaaggatgaaggactgtcacgcgtgcgcgcaccctgatctgttgagaagctgagatcgtaggaacaagaatcactaaattcggagttacagatttcaagttatgatttttcgaaggttttatgtgtttggtacggaattgattaagtgatcaattttaatatgggtttcatgctaaaactgaggtactaagtggtaaacaaaattatagaaattggaatgggttaaaaaggagtttgcatgattttcctatgaattatacaagattatggatttattttaataccaaaatcactttttatatttattttaccctggttttctatccactagactgcgcccaagattatactaaagtttaggggcaactgcataaaaaaactaagacttagggcccgtttgtgatggactgcgggttgataacttagaaacagagggtctcttatgtaaactgtatgtgctgaaggggtatgaagcatctacgatcgtcagattacaattccacggccaagattaaatcgccagtgcgatgaaccgttacgtaacagccatcatccgatctgagatctacgaccctgattctaaatgccctaaaacctcccagatccactccctttgtccgaatcggtacgcatcggattaaatcgcagccgcactctgatggatctacggcccacgcagatcatcccccataccaacggcgaacgggcgccgccgcccgtaaacacggcggtggccatggccgtggatggccaactcgacttcgaggccgtaatcctctagtctaagacgtgctacgtggtaagtggatgaagacgatttccatgggttcagtacttaccgagggcaaggtcgtgcacaagctgttcacggcgaagcgcggccgtagcaaaaattgaaagggaaatgtgactttgggctatttctataaatgttttggtgattagatgcccaacacatattgttttagttcatatgtgctaagtgattgagaagtgcaaatcaagaatcaaggtatatttctagccctagtaaatttcttttggatactaacatatctctctaagtgctagggacactaccaagaaaagtggaaatgaactggagaagttttggcagagttcagccaaaccagcaccagcctgtggtgcaccggagaccggactgtcaggtgcctaggttggcccggtgacgaactcgtcgctctcgggaaaaagcaaaggcaccgcagctaaaattcaccggactgtccggtgagccaacggcgcccgcggccaacggtcggcagcgcaatctgcgggagacgtgtggcccgcggcaacgatcagttggtcacactggactgtccggtgtgccaacggaactgaaggtccaacggtcgggtgcgcccggtaaggaaggagatcgggcaccggacaactactgttcatgtctggtggtgcaccggactatccagtgcgccacccgacagaaggcaagaattgccttccgattggatctccaacagctcttagctgccatggggctataaaagggaccctgggcgcatggagcaggacaccaagcattctctgaacattctaagacgcctagacttcgccaccacgcactcggatcatcgtgttagagatttgagcaccgtttgagttgtaaactccttgcaccgtgttttgtgctcacgtcttgacttgtgtgcgtgtgtatctttctctcccttactctagtgcttttgttgtgaacaactttgtaagggtgagaggctccaacttgtggagattcctcacaaacggggaaacaagtataaggaaggaaaccatggtattcaagtggatcgttggatcacttgaaaggggttgagtgcaaccctcgtccattggggcgccacaacgtggaagtaggcaagtgttatacttggccgaaccacgggataaaacattgtgtctc

SEQ ID NO: 21872 - DNA, 1333 bp, Zea Mays
ccctcaaatccaaacattccttcctaggactggcacggtgctccagttcatctaaagcaatttgtcttttggtaactttttgagtaccagtgatgcaaagggacacaagctctagcgatgtttctgcttctcatgtaggacgtgtaagacgtcgcaaacatccaactgaggctaccacagatgggaatagagctaatggacagccattgcttgtcaatgatcagaacaaatataaatcaatgcttacccgtacgtattctacagtatggatgattggaggctttgcctttattatttatatgggtcatctatatatctgggctatggtggttgtgattcaaatatacatggcaagagaacttttcaatttactcagaaaatccagtgaagagaaacaactgccagggttcagggtcctgaattggcacttctttttcacggcaatgctgtacacttatgggcgctttcttagtcgtcagctggtgaatacagtgacttcagatcacttgctttataaggtcgtcagtggcctaattaagtatcagatgtttatctgctatttcctttatattgcagggtttgtatggtttattttgactctcaagaaaaagacatacaagtatcagttcaaacagtatgcctggacacacatgatacttttaacagtttttgcacagtctgctttcactgtggcaaacatatttgaagggatattctggtttcttttgcctgcttcacttattgtgatcaacgatatttttgcttatttatttgggttctttcttgggagaacaccattaatcaagttgtctccaaagaaaacttgggaaggttttattggtgcatcagtgacaactatcatctctgcgtttctgttagcaaatgtaatgggccattcgcaatggttgacatgcccaagaaaggatctgttgactgggtggctttattgtgatcctggtccaatgtttaagccagagcattactcattgggagagtgggtgccgcattggcacaacaaggtcttgatctacacactgctcttctggacattcgtacgtaatcccgaagcctctccaaaaagctgaagaatatccaaaataatattgatatccatggctgccgctcgaaggaagatcacatcatcagcatagagttgagacctggtgctgcagtgcacgtggagcaaggggctgcagcagtccatcctgttcggccttattaatcaagaagcccaaagtatccaattatcgatgaccaagatgaacagaaaaggagacaaaggatctctctgtcggaggccacgacgatgaagaatagactgtcataggcaaac

SEQ ID NO: 21873 - DNA, 2390 bp, Zea Mays
cgaggtcgagggggaaaagtggtctgggccgcgctagctagcgacgacgaacgagcgtcgcgcggcgcacgcacacagacacggacgcacgagccgtgcagtgcagctgtccagtccagtccagctgaggaaaagcaaagaaaggatggtgcacgcttcttgatgcccgctcacaactcgtgccttactttaaacccgcagctttagcctaaacaaacagtcctggctgtgtgattcctcgggtagataataagacacaagacgcgctgctccaccttgtgcttcaccccgcccccgcccgaaggcagcatctgccagcagcaaccgtatacagagagagagagagagagagcttcacgactccggtcggccgtcagctcgattcgccttcccccccacctcccccgccctccgatgacggggcgtccgtgggcgggcgcgccgccgccgcctcttcctctcgccgtcgccgtgggcgtcgcggcgctgctgtcctgctgctgctgctgctgctgccagggcgcgtcggcgacggcggcggcgtcgttcggcgacaacttcgagatcacgggcgccgaggaccacgtgaagacctccgccgacgggcagacctggtacctatacctcgacaacaagacaggcgtcgggttccagacgaagcagcgctacctgttcggctggttcagcatgaagctgaagctggtgggcaacgactccgcgggcgtcgtcaccgcctactacatgtgctccgacctggacgcggcgcccctgcgcgacgagctggacttcgagttcctgggcaaccgcagcggggagccctacatcatccagaccaacgtgtaccacagcggcgtcggcggccgggagatgcgccactcgctctggttcgaccccaccgccgacttccacacctacgccatcctctggaaccccaagcagatcgtgtaagtaaataaaactactctccgtttcattcatccctctccacttgttgcctgctgctcctgctggctgctgctgctgctctgggtactgagagagagctgaccgtgacacagcgcgtgccgacttcaatgcggccacccacctccacgttcgaccccgcacccctgcactggttggttggcatgaggcatgaggcatggcacgttggatttggatacgatcccgtcggcgcccctgcaaacttggtacacgcccctgtttggggccgaaccatgcacggcgtctcgcccatgccctcccccggtcgcggtcggtccatgcctattattcccggtccacgacaccgcacatggatccactgcctgcctgcccccagggcccaggccccagtcctgtccgatccttggcatcggcagtcggcaccaccgaggatcgagatccataccctaccctaccctaccatacctcatcacgagtggtccatgacggtgctggcaggttcttcgtggacaaggtggcgatccgggtgtacccgaacgacgcgtccaaaccgccgggcggaggaggcggcggcgacggcttcttcccgatcgccaagcccatgtacatcttttccagcatctggaacgcggacgactgggcgacgcgcggcgggctggagaagacggactgggccaaggcgcccttcgtgtcgtcctaccgcgacttcgccgccgacgcctgcgcctggccgccgccggccgcgggggtcgccccgtccccgccgacgcccgcgtgcgccgcggccacgggggacagctggtgggaccagccccccgcgtgggcgctggacgccggccagcgcctggacaacgcctgggtggcaaggaacctcctcgtctacgactactgcgacgaccgcaagcgcttcccgacgccgcccgaggagtgcaagctccggcccgccgcgaccgcatcgtgatcatactatactgttggattggttcgtgcatgatgatgagatggttttttttttggggtttgtttcttggtgcgtaaaaccgggctgattgttgggggtgggggatggagaaaggccgtattatgcgtacattgtgtgtgggcgcatggacagtccggaccgatggttgtggcgttggaacggaccatgtcggccattcttttgttacgaggaaacgaggaatggattcagttttgtaccaccaaagcaattttgtttcccgttggcaaagccgccattttcacttagttaagttagacagcggaccgaacagacctaacaaactgtacagtaaggtggtgtttggttactgtacagtaaggtggtgtttggttagccatgcacagaagcggcaccgtcgtcctccagcagggatccatgcatcgcacatgcaactagtcaccaagcatcaagcaagcagcttaattagctaccacctcacgca

SEQ ID NO: 21874 - DNA, 1488 bp, Zea Mays
cttaccgctttaaaaaccatgttaccgctggtaatcaggcagtgcatctgaaaccagatgatagtgattctgaccaagtgccaaacatgttaagggagaaacttggcatggacagtataaatatatctagcagttcagtagggtctaagcatgaagaattcgatggaagtgtaaacatggatgataaagatagtgatgatagcaacattgatgctggccctggttcgaaagacttgtcaagcgatccaactgcagttcccaggattaaaatcttgaaagtggtacccatgcagaatgttgacaaagactacataatcaatatttttgatcagatttcagaggaaaatgatgatcctgaagttgaaaatgaatcttcagaagatgctggtgatgaagataacagtggagtagcagaaacagtttctgcagaagagaacggtgatgaatctggtgacgaaagtgatattgaacccttggtttcaattgattttgtcattgagaataacgatgactatgcttctcatccatctgctgaagcttttgaacgaatgccagctagattagaaaaaagagaccgcttctcgttttccttctatactgaagaatatagtaaaaaactagatgctggaaaggcccagcagacttcaaagaaaacagttcgtttgcataccgatcagcaggattatgatggttttgttgagcttgatcgtgtaaagttgagcggcagcaacaaaaaactttcgatactacaacttggcatcaaacgaaataacaaggttcagaaaaaactgcatggagttacccactttagtcgtattcagatgcctatatcttcagatcctcttaccggcttatatttgaccgcatcaggatttgactcagaaattcttagtttacaacgaaaatttggtcaatggcgggaggatggtccatctgaggagcatagtgacctattgttctatgagtatgttgaagctgtaaaattaacaggggacaacctcatgccagctggtcaggttgttttccgtgcaaaagttggtgaacactatcggctccctcataagggaattatccctagagaacttggagtgattgctaggtacaaggggcaaaggaaaattgcagatcctggtttccaaaaccctcaatgggttgacggggagcttttgatactagatggaaagttcatcagagatggtcctgtgatagctttcttttactggacatctaatgttcatcttttcgaattctttagacagttgaagcttcctgactagttcccttctaaaagtagttaaagtgttgctagctaatatgcttgcatgacacacaatccatgaccagaaagttgatgcctgaaggttttaggtcagtttatgttcaggggtcgtgtagtcgtgtgctactatgcgttggttctttttgctgtactctgaagttacacctgcctaccatcttcacaatgcatcaaacataacttgatttctt

SEQ ID NO: 21875 - DNA, 1284 bp, Zea Mays
gaaccaaaagctttgcactggaatagatgagaaatctgtgggttcctccttccagcttgtgtttgcaccaattgatgagcattttccggatgatgctccattgatttcctctggctttcgtgtcataccacttgatatgaaaacagatggtgtatcctctggtaggacgctagatttggcatctagtcttgatgtgggttctgctgcaccccaagcctcaggggatgcacctccagatgactgtaatttgagatctgtgctgacaatcgcctttcaattcccttatgagatgcaccttcaggacagtgttgctactatggcccgtcaatatgtgcgtagtgttgtttctgctgtgcaaagggtgtcgatggctatatctccctcccaatctggtctaaatgctgggcagaggatgctttctggcttccctgaagctgccacacttgctagatgggtttgccagagttatcactaccatctaggtgtggaattactcaatcaatcagatgaagctggtgaagcattgttgaaaatgctctggcatcatccagatgctgttctgtgctgctcttttaaggtaccagaagagttgtactcaagtccgcaatattccaatcttctaaagcagaggcagatccctttgacaagagaaacctatgtttacgtttgcaaacaaggcagggctcgacatgttagaaacatctcttattgcgctgcaagacctgacgctagacaagatcttcgacgagtcaggaaggaaagcaatattctcagatatctcaaaactaatggaacagggctacgcgtacctgccgtcgggcgtgtgcatgtcaggaatgggtcggcatgtctcattcgaccaagctgtagcgtggaaggtgctcggcgaggacagcagcgtccactgcctggcgttctgcttcgtcaactggtccttcgtttgacacgccatcccatggcctgtgtgatgagcaggccaatttttttgtatggtgatcccaatatggggaaaccatcagctgtgacagaaggctttatgttgcatgcactagttgtacgtcttgaatcgagtgtatttatgaagaaattggatactgcgcaaagtctggtgccacttacgtttgactgcctgcccggcaacaggctgtttgtctatctcaccggccaaccgaaacgatgcttattccattcagatgttacttgctgatgttaaggtatggttcaaaccagacagcaacaaaagtcggctgtttccaagtggtggaatggcatagcgacgctaca

SEQ ID NO: 21876 - DNA, 2161 bp, Zea Mays
gtctctccccccgtcgagcacacaacacaccctcctcgtcctccaatccaatcaacctggtagactcgcttcgcttctcccccagccgtcggacggagctcctcgcagtcgcagcagccgccgatcagcctgcgctcgggctcagcgctggaaggtgttggaagagaatagcctgaaggttcacagtaaccttcatctgtcggaagatgtatcgggctaagagggctgcattgtcaccgaaggtgaagcgccgcgtcggcaagtacgagctcgggcgcaccattggggaagggaccttcgccaaggtccggtttgctaagaacactgaaaacggggaacctgttgctatcaaaatccttgacaaggagaaggttaagaggcacagattggttgagcaggaacgaggtggagaatgaattttcttccttggatgctgccgtgacagcatgggagcataggaagatgtaacttcaattaagaaacgatacgtcgatactatacctgcatatttgcatgccatcgagatatatccacatggtggtcttccagttcaagtcatacctgcaccaactcaattaagcgtgaaatttgtatcatgaaattagtaaggcaccctaatgttgttcgactgtttgaggtgatgggaagtaaagcaagaattttcatcgttctggaatatgttaccggcggagagcttttcgaaatcattgctactaatggaaggttgaaggaagacgaagcacgtaaatacttccagcaactgattaatgctgttgattactgccacagtaggggagtgtatcacagagacttgaagctcgagaatttgctgcttgatgctgcaggaaatctcaaagtttctgactttggtttaagtgctttaaccgagcaagtgaaggctgatggtctgcttcatacaacatgtggaacccccaattatgttgcccctgaggtgatcgaggatggaggctatgatggtgcaactgcagatatttggtcttgcggagtaatcctctttgttcttcttgctggatatttacctttcgaggatgacaacatcatcgccctatacaagaagatttcagaagctcagtttagctgcccctcttggttttcagctggggccaagaacatgattaccagaattcttgatcccaatcctacaactagaatcacgatttctcagatactggagcatccttggttcaaaaaggggtacaagcctcctgtttttgacgagaaatatcaaactagcttggatgacgtggatgctgcttttggagattcagaagaccggcatgtgaaagaggaaactgaagatcagccaacctcaatgaatgcattcgaactgatttctctaaaccaggcactgaatctggagaatttgtttgaagcaaaggaggagtataaaagagagacaagattcacctcacagtgccccccgaaagagataatcacaaagatcgaagaagctgcaaagccgcttggctttgatgttcagaagaaaaaatacaagatgcggatggagaacccgaaagcaggtagaaagggcaatctgaatgttgcaactgaggttttccaaatagccccatccctgcatgtagtcgagctcaagaaggcgaagggggacactctggagttccaaaagttctacagaagcctgtcgacccagctgaaggatgttgtgtggaagtgcgacggcgaggtggacggcaacagcgcggcagcatgaaagtgccctttgaactttccactggacggcgccggttttcctttgtacatagcttctctttcggatgatcccgtgtccattgcagagtcggttttgcaagcaagttctttggtttatttgtagtaagcccggtgaaacaaccgccctggaggctgttgtggatgagcttactggcgtgtttagttcgtttcatggtcgggaggttggatggaatggaaaccacaatcaaggctgtagtagtgtgtgtagtaacgaagtagatacatgcatcagatggtgtaagggagtaccagctgttagttcatggtttcaagcttagccccccttcaatttgttcgatgatgtattacttcacaataaacattattacttagatgtatgaggtgagcacacttggtcttttgtcctctttgtgctattttgcgtgat

SEQ ID NO: 21877 - DNA, 875 bp, Zea Mays
aaaagttactacaaaaacaatggaaccttcaaatggaatatgttgatttgtacctgattcattggcccatggctgtaaagcctagcaagcctcacttcccaatgaaaagggaggacattgtgccgatggaccttagtggtgtatggcaggcaatggaggaatgccatcgacttggccttgctaaaatgattggtgttagcaatttcacaacaaagaaattgcaggagctgcttgccattgcaaaaatttccccatttgtaaatcaggttgaattgaatcccacttggcaacagaaaaaactaattgagttctgcaatgacaagggtattcatgtgacggcttattctcccctaggaggccaaagaatctctaaactgaatccagtacgacaatctgacatattggaagagattggaaaggctagagggaagtcagtggcccagatttcactgaggtggatatacgagcaaggtgcaagcatggtggcaaagagcttgaaaagggagaggcttaaggagaacattgaaatcttcgattgggaattgagtgacgaagatcggtttaagattggtcagatagcacagcgcaagttggtcacagtacagaatctcctgtgtcctgaaggtatctccagtgtggatatcttggatgttgatgttattgaaatatagctgtggtctccatctatttgcaatgggcaaaagaattggtgtacaacatgttggatacatcagaagcagtctttcacgtttctatgtactaatgttcatcttgctaaattcacatgtgcacctttctattgtcaccaatacttttgtaccattttctggattaatctactattaaaaatgcaaaaatatataacgatccaaaaa

SEQ ID NO: 21878 - DNA, 1877 bp, Zea Mays
aaagatcacactagtgactttattcatacgagtataaatacgtcccggccggtcaccggctgaggcagagccagttggttggacattgacatttggcacgccatcagcatgagccctcctcctcctcctcctcccacctcctcctctagataggacgaagctagctgccgccgccgctcccccgtccgaaacgggccgggacgatacatggcgctgatgactggtcgtcgtcgggggagctcgagacggctgtgttcttcaccttcttcctgttcccgacgaaagaggccttccacgtacaccaattatcgcttgtactagctaccacagcagagaggggaggggcccgggcgcccggccaaccgagttgcgcacgcaggctgtacgcaaccgcagcagccaggctaaggtgctaggtagctagtttgtagagtgcgcgcgcgcggggcaggtggcgtgttggcgccgtcatcgtactcgtacgtacgtctgttctctctctgcggatggtcatcatggccgggatgctccccggcgtggagttcgcgcggcgccggcggcgggcgtcgtccttgtgcctgtacgcaccttcttccaaggagtggagcagcgcgtgcatggagacgacggcgacggcgactgcgcgcgcgtggacgacgctggggctgggcagcggcgcccgggaggcgaaggagaggctggatcagaagctccgtgcccagagacaacctgtggtgctcaagaggcatgagatgagcacgagccccacgatcaccaaagcgcacgacgacgcaacgtgcaggtgcagcggtggcctccaccgccaccactcgtcagcgtgcagcagcgacacgggcgtgctgctgcggcgggaagtggtgtcgtcgccgaaaccgaacaagaagggaggaggaggaggagggggccggttcggctggtgccggctactggcaggcgggcggcgcgggccgccggcggcagcggaggcggggtgcgcggtgtgcctggaggagctccgcgcgggggacgtggtggcgcgcctgccctgcgcgcaccgcttccactggtcctgcgccgtgccctgggtccaggccgcgtcgcggtgccccgtctgccgcgcccacgcccgcgtctagctgcctcatcggctgctgctggcctgcacccgcggcgcgccgcatgggatgcgtcgtgcctcgtgtcaaagagaaggccgcgccatgcacggacggggagaagagaaccacgagctaaagcaaccaggacaaatagggaggggagccgagggtactgcgtgtctaaacatttttttttacccgcctacagaagtaatgcgcccccactgtgtcatgatgtcaaataacaaacatcaggcagtatacctgaaatagaaataagatatgtaatggtgtaaatatagggggtgtttggtttctagggactaatgtttagtcccatcattttattccattttagtctataaattatcaaatatagaaactaaaatagagttttagtttctatatttggcaattttggaactaaaatggaataaaatgtagggactaaaaattagtccctagaaaccaaacacccccatatacacgcagttaatccgaacgttgtaaatacagcagaaggtaccgtggtacggcatgacgtattggtattgactcgcggagaattgcacaggtagccacatactgcattctctttccaggatatattatccaagaagctatcccgtctgtcctcttgttgtacgactaaaggtactctagctaccagactaggctgtctccaacaaggacctgtataaggtccggtacgctatatttacagagactgtacgagcgtccgctatctcctgtgtcggc

SEQ ID NO: 21879 - DNA, 3842 bp, Zea Mays
acatcgccccgaccaaagcttccccagacggcaggagacagcagcaggccggacgccggactcctcctccctcccccgtacgcatccactgagatccttcctgtgcgaaggaaatctccagttcttcggccccggccaggttttcaagtgttgcttgccccgccggagttttcctctaacccgcaagtccaattggctaagaagttgatgggatcggggggacactggaaggctgtgtgagatcgcgaaggggaccgtgaattccttgcagggctgcggcgattcggctgcgctgctgtatgaactgtttcgtgaacctgggactcaactcgaactcgaaccactacgtcgcctgcctcctcatcttcctgctgcatttctccccccagttgttaaatccatccaattctaattcaaatagtaattgtgaaggagttcaacagagctgcacagatggcgaacaacagtaagtcctgctgcttctccgggagctctttgagttttgagcttacagttggcagatcggttcttccaatttaaaagatatatcttataatcgatgtgaattattaaagctactcaggtgaggaagaatcgattggcatactttattaggttgttgattaggtattcgtttggtggatctgacgcagcttccgtggcaaatttgaaattttccaacttaactttttgatagtggtttcgaatttttttcgttcgataaccaaaaaaatcggaggttcttatggttgttgggaggcacgcatgggcccgatggatggaagggccatggaccatgaagtcccatattcatttgtcggtggaaggaagaaaaagaaaagtagattacaagcacttggtagctgtttacagttcacacttgttatacctaacatctcacgcaaggggaccgaccacttggaagcttctccgatttgaccccatgtggatttgtggactcctgtgcttcattttttagtactggggaccttcgttcactaaaatagttactctcacaagcctgccactgttgcacgataagggaaaaaatagcttatcccgattgctacaaaacctgactacagaaaagcatatgccgtcaagtgctatgctgtctgtgttaagtgcttagtaccatgcatgtgcgatccacattgttgtcatgctgatgaacacgagcaggcaaatgtatggtaatattggctagtggatatagctgtcttgttaactatattccaatgctgcaatttgcatttatttgttatgtctcggtatatactaatgcatggttttgctttagtgtgtcttgttgtggctgctagcattaggtgataaatgcttggtgaccaatgaagttgggcagcttttttagtgtcctcagcatatctgatagagaggtttgctaaagaggtttcttccacgatcctacagactaccagtgctaccaaggcaaacattagccaccagacatgacatgcttattccttatagtctggtgcccatcttgtccaaacataatctagaagagtgtacaaccactaatgaccttgtgtcacgtccatgctctggccttttaaaaaaaagataaataaaaagttattcccacccctgtgatcttctgaaaaaaaccctaatctatatgctttaatagtgttggaggagtcaagagtgaactgtcttctgccagagcatctgcgattaatacagaccaaggacactacattggcccaaatttagttgttgagaggctaactgaaaatcttaaactgtcctgtcttacctcaccatcattgttctgagacaggggaacatgcctcactactaaccctccatggtggagggggtagaggagggttgatgtgagaacaacaggcgatctcggcaatttcacaacttggctcatatggtgaaaatgctaggagaaagccacacacaccatctgctattgttattggtggtgggtttgctggtcttgctgctgctgatgctctcagaaatgcatccttccaggttattctactggaatcccgtgataggattggtggcagagttcacactgactactcttttgggtttccggtcgatttgggagcatcttggcttcatggggtctgtgaagaaaatcccttggcaccaataattggaaggcttggacttccactgtaccgcacaagtggtgatgattctgtgctgtttgatcatgatctagagagttatgcactctatgacactaacggacgccaagtaccacaagagttggtagaaaagcttgggaaggtgtttgagaagatactggaagagactggcaaattgagggaagaaatcaatgaagatatgtctatcgcaaaagccatcgcaattgttatggctagaaatccgcacttgaggcaagaagggattgctcatgaggttcttcagtggtatttgtgccgtatggagggttggtttgccaccgacgctgattcaatttcactacagggttgggatcaggaggtgctgcttccaggtggccatggcctcatggttcgtgggtatcgtccggttataaatactctcgcaaaaggcttagatatacgcctcaaccataaggttgtggaaattgttcgccataggaacagggtagaggttaccgtaagcagcggccaaacgtttgttgcggatgctgctgtggtcactgttccgttgggtgtcctgaaagcgaaaaccattaaattcgagccgaggctgccagagtggaaagaggaagcgatcagagaacttacggttggagttgagaacaagatcgttcttcacttcgggcaggttttctggcctaacgtggagttcctcggcgtcgtttcctctagcacctacggttgcagctatttcctcaaccttcacaaggcaacaggccacccagtccttgtctacatgcccgccggccgccttgctcgtgacatcgagaagacgtcggacgaggctgctgcccagttcgccttttctcagctgaagaagatccttcccaatgcagctgagccgataaactacctggtgtcgcgctggggctcggacgagaacacgcttggttcgtacacgttcgatggggtgaacaaaccccgtgacctgtacgagaagctgcgcatccccgtggacaacctgttcttcgcgggagaggccacgagcgtcaagtacacgggcacggtgcacggcgccttctccacgggtgtcatggcggccgaggagtgcaagatgcgggttctggagcggttcagggagctcgacatgctggagatgtgccaccctgccatgggcgaggacagccctgtgtctgtcccgctgctcatctctcggctctaaaagcagacgagtagtagttgtgtatgggatggatcggcacctgagagtaggctgggacatcccactgattgccggagggaagcagggaggaagaagctcccctcgcttcgcttctcctcggcatgaggcatgtgcctggcgttacttgtggcgtgccaagtgccatatttccctaaacttattctgcgtgggaaccctctattatgtatgtatactgtgaatttgtgactgttcaggtaacacgagttatcgtgacatcttcgtagagaaagataccgtatgtatgatgtatgtatgatatacatatgatattatgatcaacaattgtagtagtagtaataataaataatacatatatgtgacttaactgtttggagtattgagtgattgtgacatgtaacacccttacatctaagcaagtataaagcaagtagtataagagcatctccaataaattagttaaatggctcgccgagccaaatttttgctactcaacaaaaaaataa

SEQ ID NO: 21880 - DNA, 4883 bp, Zea Mays
ctacttcaagggggcatctgcaaacctccctctgcgtcctcggaaacggaaggtggcctggccctggccgggagtggttaacctcggcgagccgctttgtcttctattccccactccatcctactccgccatggcggtgaaggggaagggtaagcaggtggccgccgaatcccctggccctggcgctggcgctggcggtgcctccgggtccggcgggaagcggcggatggcctctagtgacgcgggggcggggccctcgtcgtcatccgctgcgaagcgccgccgccgcgccggggtcctccagttcgtcgacgacgtagctggcgtcgacgacgattatgaggaggacgagctcgagtccgaggatgacaccgatgatggtttctttactggtggggaacatgcacaaaatctgagtcacaaaagaactgaaaggtcacaccctcttccatttcttgtgaaggaagaggagcttagtggcgatgaacttgaggaattcatcaagaaccgatacagtaatcgtgtgaaatacgctgctgatcggagctattctagagaagacgatgacattttctccatggattgtgcactcaaagagccgactatttggagagttaaatgcatggttgggcgtgagcgccaaatggccttctgcttcatgcaaaaatttgttgaccttcgaaaaattggtaccaaagtgccaattattacagcatttgcacttgatcacataagagggtttgtttttgttgaagcggagaaggcctgtgatgttacagaggcatgcaaagggttttgtagtgtgtacacaagcagaatcacttctgttcctgcagctgaagttcctagcttgttatccagccgtacgaaaccatttgaaatctctcgtggtacatggatccgcatgaagaatggaaactataaaggtgatctggcacaggttgttagcgtggatgatggacggaaaaaagtgatgataaaaattgtacccagagttgacctccatgctatttcaaaaaaatttggtggtgcagtttcactaaaaggagctgcagttcctgctccacggttgatcagctcccaagaactagagttcttcaggcctcatattgaaataaagcgcgaccgtcagactggtgaagtttttgaagtacttgatggtttgatgttcaaagatggatttctgtataagaaggttgcacttagttctttgatttattgggggatacaaccgacagaaacagagcttttgaagttctcttctagcccaagcaatagagcttctgctgatgacttggattggctctccggcatgtatggttctaagaaaaggaaccttccagaaaaacgagatatggaatcatcatcttctaaaataagatcctccaaagcatcagaccttaaagcgtcaacttctactgaaaattatgacgagaacgatgaattcaaccttcatgatcttgtactctatgggcgaaaagattttggtgtgattgttgctgttgagaaagatggttttaggatactaaagggtggtcctgaaggatctgcggtgaaagtgagaaagcaggatattaagaaaggctgcgtagataaaatgtttacagctgttgatcatcaaaagaagacaatatccattaacgacactgttaatgttgtggaagggccatttcagggtaagcaaggggtcgttaaacacttgtacttgggaatactgttcatttataatgaaagtgaaagtgagaactgtggatttttctgtgctcaaagcgggtcatgcgaaaagatacgaaagggtctgggaagctctactactgaaagttcggactttacaactcctatgtttcctgaacctgcttatgagcaaaatgggcatcgggacactgaaaggccttacaggagcaccagagaacaacttttctctattgggcagatgctgcgcattagaaagggtcctttgaagggctacctctgtcgagtagttcggatatttcggaatgatgtgactgttaagctagattctctactgaaaattgttacagtacaagctgatcttctctcagtcccagctaacaggggggataacttgtctggtgccccagctagtaaatttggaagtcaagatacatccttctttggttcagaagcaggcaaaacttcatgggacaatgggttgccatcgtttggaagtgactcatggcaacccttttcgagttcaacactatcagttcagaatgcaggtggagaatcagaagctgatccatggtctaagaaaacttctgccaaagatgattctgatccatggggtaagaaaactgatggtgattctgatcgatggggtaagaaaactgatggtgattctgatccatggggcaaggaagcggtatctgctgctgatggtgattccaatccatggggtaaggaaacagtaccttccgctgctggtgattctgatccatggggtaagaaagtggtgtcttctgctgatggtgattctgattcatggggtaagaaagcaacatcatcagctgttgacactgaaaaggaaggttctggtggtactgcatgggacaaacaagctggagttggtggatctgatgctgctggcagctcctgggacagagcggttgtcaatgagagtgaaaagagtgacaactggggagaggcttgcagggttatggacatgggaactggagctgaagctgacactgacccttggggaagcaaggtcaaagcagtagatatggaaggaccaaataactgggaaaaggctacagtgcctccaaacaataagctggaggatgtcagtcaaggatggggccaacctaagggcaactcaactgaagaccaagcaatagacaacgtttctaaagacgtggacaacaacagggcttgtgacagttctttgcctgtcactgaagatggtacctggggcaagtcaaaagacaacagttgtggtggagcaggtggtgcgggaggttgggatgtttctgttggcaactggaataaatcatctgttgtggctgatgcacaggatgaaggttggggcaaaggaaactggtcatctgctgagtctgaagaaacaaacaatcaaagcggaaattggaacaaaactggagcttcggaccaagctggttacaacaattgggataaaccgaaatcctttggtggtaatggttggaacaagggtgatgatcagaatagcagttggaacaggcctgaaaattttggaggtggacgtggctttgggcgtggacaagggagaggtaggggtcaacaatctggatatttcaatggcagaaatgatcaaggaagctggaagaagtcatggggtagtgacaatgctgaaagaccctcttggaggtctgataatcaggtagacaatgaggctggagagtctggtggatataggggaaggggaagaggaggaagggggcaatatggaggacgaggtaaagacaatggttggagaaatgatgatagaagcaattctgggtttggaagggaaaataacagtggcgatggaccaaaatggggtggtggaggtaattggaacgctacaaatccaccaagtagcagtgtaggcaccaagtcatatggtcaaaatcagcctttcacttggaataattctgaggataacaaaccatctgtaggtgaacaaggtgatccttgggcaagcaaggtgtcttctactgaagatacagaacaacagaatgattcttggtcaagcaagatgatttctggtggtgctgaggataccagtggtggctgggacaccaaggtgaaagactcttcctgcaatgatgggggtgaaggactacaaaatgatccatgggcaaacaagattggttctaatgaaggtaaagaacaagaaactgatccttgggccagcaagatgtcttctactgtgtgtgctgatgacaagaaaggtagctggaacactacagcaaagggcattccatctaaggaaaaggctgatgatccatggaatagtaaggggggtaatgatgacagcaagaaaactgacacctggggtgctggctcgtcaggtggggatcaggaactttcttggagcaaacctaatttctctttgggggaccaggaatctacttggaacaacccaaggttcagtgacgatgacaatgcgaataatagaggtgaccgtaaccagggcaacaacttcgggtcaggagatggtggcagctggggctctggcaggggaaatggtggccgcggtggttacaggaactggaacgataacaatgagcgatccttcggtgaaggtggtggctggtcccagtcccagtcttccgattggaatgccaacaaaggaaatggcgaaggaaatcaagctttctcgaaaagcaagcccagctgggaagcacaaaacacctctggtagagatggtcaggcaggaaagggtgatgcaaacaactcctggagtaagaacagatcatctccatctagcgcttggggcgctcccagtggaggagctggcggccgaggttcttggggaaagagcaacgaggatggctggaactcagcgggaggatcagccaaagagaagcctgcatggggtggtgggtcagaagcgtctaccaagaaagaggacaaaggtggtgaggggaacgggagccaaggaggaggtggtgtcagttcctgggataaaggggcagatgatgcatggaacggcaacacgggtagtgatattgggagtggtggatggtaagatttccgccaaaataatatgaactctgtcggtgcgtgtgtctagttcgtatccgttacttcgccatgtgtactctacactaaaaagaacatggcttgtgaccatttaaacattaccttagtggtggcagtaactagtaaaaaagataaataaa

SEQ ID NO: 21881 - DNA, 1167 bp, Zea Mays
gagttcttttaattcttaatctggaaggaattatggtctggctgctggatcatgggtgggtccatatgctatgtgccgggcatggcagacccttatccgcacaaatagagagcaagctgatgctgtcgatgggaaggaaaatttccctatggcgctatatgtcgtttcgggtgatgaagatggtgaaagaggtggagctccagttttttgtattgatgttgctgctcagctttgctccaatttcaataaaggacaatgtacatggtcacctattcttttgttgattcctctggttcttggccttgacaaaattaatccaaggtacatcccattactaaaggagacgtttaagttcccacaaagcttgggcattttaggtggaaaacctgggacgtcaacatacattgctggggtacaagaagatagggctctctacctagatccccatgacgttcagatggcggttgatattgcaccggataacttggaggcggacacttcctcgtaccactgcagtgttgtccgagatttggctctagaacaaatagacccatccctagccattggtttttactgtcgcgacaaaggtgagccgttgtagtttctcagatgccatccagttggttttttcaagctctaatccctatgtttcctatttgcatctttttacgcagacgatttcgatgatttctgttctcgggcatctgagttggcagagaaagccaatggagcgccactctttactgtcatgcagtcagtccagccatcgaagcaaatgtataaacaggatgatgggctgtgctgttgttctggcagtagcatggccaacgaggactacgaccttgacgcctctggcgaggcaggagaagagtggcagatcctctaaaccaggggaacaccgatgacatgttgggttgaaaaactcatggaacatgttgcctgaatgccctcgtttgcgtgtgaatacaggggatgatttgttgtctctgagtgtcgttgggtgccaacgtctcttaggaggaaaatgttcaaaacgtgacaggtggaaatgttcaaaacatacacttgtgaatgatcatagataaatgtatttaacattccatttgctaacaccatttcaccacggcgtgttcgcttttcaattgcttgctagaaatgcacctgcca

SEQ ID NO: 21882 - DNA, 1598 bp, Zea Mays
cgtgattttgcccccctcttccccgcaccacccagctccgctcctgggtttcactctgaccccgtgtttgggctgggacaaggagaaaccgccaaaggagagatttgttttcccgcgacactcggaaacacaagtcaggaagtggcgccgctcacctccggccggctctcgcacagcagcgggcccctcaacggcggcggctccctctccgacagcccgccggtctcgccggagatcgatgacgccaagtactgcagagcggccagcacgccgaaggcgcaggcataccgggcgggcaacaagacggtggggcggtggctcaaggaccggagggagaagaggaaagaggagacgcgggcgcacaacgcgcaggtccacgcggcggtgtccgtggcggcagtggcggcggcggtggccgccgtggccgcggccacggccacggcctcggcgtccggtggcaaggacgagcgcgccgcgcgcacggacatggccgtggcgtcggccgcgacgctggtggccgcgcagtgcgtggaggcggccgaggccatgggcgccgagcgggagcacctggaggccgccgtcgggtcggccgtgagcgtccggacgccgggggacatcgtcaccgtcaccgccgccgccgccaccgcgttgagaggcgccgcgacgctgaaggcgagggctctcaaggaggtgtggaacatcgcggcggtgatcccggtggagaagggcccgggcccggtcggcggaggaggaggaggccaccaccaccaacaccaccagaagcacggcgcgcccaagcagcagctgcaccgcaagatggatagcgacggcagcagcgtcagcgacctctcgctggaggaggagaacagcttccttggcatctgcagccaggagctgcttgctcgcggcaccgaactcctcaaacgcacccggaaaggcgctctgcactggaaggtcgtgtcggtgtacatcaaccggatgggcctggtgatgctgaagacgaagagccggcacgtggcagggacgatcacgaagaagaagaaaagtgtggtggtcgaggtgtgcagggacgtgccggcgtggcccgggcggcacctgctggaggacggcgggcaccggcggtacttcggcctgcgcacggcggagcggcgggtggtcgagttcgagtgccgcagccagcgggagtacgagatgtggaccaagggcgtggcgcggctcctgagcgtggccgccgagcggaagcgcctggcgtgacagattgcgtgcaggtgcagccccgtgccgcacaggaattatgtaggtaggtatgctagggcacgaccgcacgaggttggattggatttgtggcggtgtggttttttgtacgggctgggatgcgacgccggcgcgtggaacgccatgccatgcccttgtgggtgtgagaaggcgcttgctacgctgagctgagctctgaccttgttctggctctctctctttctctttcttgtaagttttgcgtctactctctctctctctctcgttgggccatactacactgtagctggcgaaagataaatgctttgttctggtggtagtagtaactctgtctttgaccggac

SEQ ID NO: 21883 - DNA, 1088 bp, Zea Mays
cacctacggaaaccttgttacgacttctccttcctctaaatgataaggttcaatggacttctcgtgacgttgagggcggcgaaccgcccccatcgccgcgatccgaacacttcaccggaccattcaatcggtaggagcgacgggcggtgtgtacaaagggcagggacgtagtcaacgcgagctgatgactcacgcttactaggcattcctcgttgaagaccaataattgcaatgatctatccccatcacgatgaaatttcccaagattacccgggcctgtcggccaaggctatatactcgttggatacatcagtgtagcgcgcgtgcggcccagaacatctaagggcatcacaaacctgttattgcctcaaacttccggggcctaaacggccatagtccctctaagaagctaactacggagggatggctccgcatagctagttagcaggctgaggtctcattcgttaacggaattaaccagacaaatcgctccaccaactaagaacggccatgcaccaccacccatagaatcaagaaagagctctcagtctgtcaatccttgctatgtctagacctggtaagtttccccatgttgagtcaaattaagccgcaggctccacacctggtgttgcccttctgtcaattcctttaagtttcagccttgcgaccatactccccccggaacccaaagactttgatttctcataaggtgccaggggggtcctattagtaacacccgctgatccctggtcggcatcgtttatggttgagactaggaaggtatctgatcgtcttcgagcccccaacttttgttcttgattaatgaaaacatccttggcaaatgctttcgcagttgttcgtctttcataaatccaagaatttcacctctgactatgaaatacgaatgccccccgactgtccctattaatcattactccaatctcgaaggccaacacaataggaccggaatcctatgatgttatcccatgctaatgtatccagagcgatggcttactttgagcactctaatttcttcaaagtaacggcgccggaggcacgacccggccagttaaggccaggagcgcatc

SEQ ID NO: 21884 - DNA, 141 bp, Zea Mays
gtggtataggagggtatgcgcgagagataggtcgcgagttcgaatctcaccatttacaaaacatataagtttgattcaaaataatagtgaaaaatgatagggcaacaggtaaggtagtagggtatggttggagagttgttc

SEQ ID NO: 21885 - DNA, 155 bp, Zea Mays
aatattaccgctccaagtaaactttcgactgagattcaggtaaatcataaataaacagcctaaattactacctcaatatatggtttatacgctgatgatgtggtgatatttcttcgtccgactgctttggatatcaatattactttggatattct

SEQ ID NO: 21886 - DNA, 572 bp, Zea Mays
tagtgtgcagcctggtccagagtgtcatagacacactcgatggagtgttggcaaaagtgtaatttcagtaacgaatgacatatactgtgtgggattccaaaatggtgcattacaatcaaaagatgggaaggacattgtgcttatgggagatcttgtgctttcaaacaagttggttgtctatgacttggaaaatcaagtcatcgggtggactgactataactgttcgtcgagcattaaaattaaggacgacaagacaggcacaacctatactgtcgaatcacatgacatatcctccggatggaaattccactggcacaagtccctggttctgttgttggtaacaatggtgtggagctatttatagtacactaactctattgtacaacacgaacacgcacttaccgaaattcatttgattcgtattcttttcacaaaaaagaatatctagggttttaacttgcgttctctgaccacggaaaacgatgaaaacaaaaacgttgtgtgccatacaatgagcctgtgtgtcactagtgttatgctgagacaagtgttgatcccacttttgggcaggc

SEQ ID NO: 21887 - DNA, 1168 bp, Zea Mays
cttttcttgttaaaactgcaagaaacatatattcaattattgggctcagggagcatattaagaaacggccaccattggctacctctgagaaagttcaacaatttgtgagggcacgggggagagaatcaatggttgcaggattttatcacgaaggctatgaagatccattgcttatgctgatgagaaggagaactgttcatgctggactagttgtgaagggtgaggaaggtgcgctttccttgacaaccaaggaaagatcagcccatgcatcaaaaggactccctgttaaccactgttcagggtttcggacaccaagcggcataaatttctctgagactgatggtattcctagagaaagcttcagggtcattgtgaatgcccaggaacttggttttgaatccactgaaactccaagaactgatagatcagtaagccttttctgccctggctccttggcagtatacattgatgtttgctagtgatcatgtatgatcaataatttgtcggcatgggatatagggacgcttactttatttcctaatctgaatcagattctaaggaacttggagcttggtctggcagcactaggtggcgaaaaaggagcagcgtatgaccgaatcgttcttaacgcggctatggctgaccacttactaggctgcagcggagctgaggatatcgacgctgcacttgaccgagcgagggaagccattggtagcggtgaagctctgagaaggctcatgagttacataaagatctcgcacaaagtgtcctagtgttgacccgtgagtctgtgaccatgtactgactgtacaattttggcgtgagtcacgactggatatcttcttcgcgttgtctgagtgccttccccactcaatgttacaaagccaccatgaaaaagtatactcccttgccctcaaggacatgtccaaaaaaaacagttgaaaggaaacaatgccttgttggcaaggaatgtgtttttataagatttttgttttgcaccgagagacacgtacagattctcctcttgagatgtccgaatctggttattgtggctattgtgaatactctgcatagcctcatcgtcaatcgtcatccaggttgagaacttgtaaaccgtatttgattttgtttatgaatgtatgtgctcttctttatgttgtgtatcgtg

SEQ ID NO: 21888 - DNA, 515 bp, Zea Mays
gctttcagttctcaactctcataggtcgtgttattaggaggcattgcctatggattggatcggttggtgatgcttttggcgggtgagagctcgatccgagatgtgattgctttccccaagaccacgactgctcagtgtgcactcaccgaagcaccatcagctgtagaaccacagcaactgaaggatctcgccttccccaaacctacttcgtgagacgctgttcatgtgttcatgacaaaaattccgtgctctcaaggacagctatagtttgcttcttctagtttttgagtgtattggcctattctatttttgcatagtatagaatgcacagtttttggaccgtgaatccgtgataaatttgtagaagatgcttaacatgccaaagttctggaagagtattgttttaatagcggtgcttatgtgtttgtgcttgtgcacaaacttacctggcatattattcaacagaatccattttccaaggctagctagctgagtcgctagctactccttttccg

SEQ ID NO: 21889 - DNA, 1017 bp, Zea Mays
cactttccaatttccgtctccaccctccgcggtccgcgccgcggaccgcggtcaccactcaccagcagcgctgcagcgccacgccgccactccagtcccccaccgaccacttgccgattgccgttgccgcgtcggcgttgctggatcctcaagcagaccgcccggacccgggaacccgcccgcgcgcttattaataacggccacctcgttcccccgcccgccccgaaggccgagggaagtgtacgcgcctagcgaccagcatagattcgttccacgcctacctcctgccctcgcccgtgctctcagatctcgcgcgcgccccgcaaagggtaactttgagccatgggcacagttgtggatgctccagcagttgtggctgaagaggtcactgagaacatgttgggtggtaagaaagttacagctgtatttgttctaggtggtcctggaagtggaaaaggcacacagtgtgccaacattgtggaacactttggattcacccatcttagtgctggagatcttttgcgtgcagagattaaatctggctctgagaatggaaccatgattgaaaacatgataaaggagggaaagattgttccatcagaggtgactataaagctgttgcaggaggcaatgataaaaaatgaaaatgacaaattcctgatcgacggatttccaaggaatgaggagaatcgtgcagcatttgagaatgttaccaaaatttctcctgcatttgtgctattctttgactgttctgagaaagagatggagaaacgtctcttggggcgcaatcagggaagagttgatgataacattgaaactatcaaaaaaaggttcaaaacctttgttgagtcaagtttgcctgtcattgagcattacaactcaagggacaaggttaaaaagattgatgctgcaaaaccaattcctgaggtgtttgaagacgtcaaaaccatttttgccccatatgctccaaaggctgaatagagcagtctaaaagggacatgataaaggtgataccac

SEQ ID NO: 21890 - DNA, 420 bp, Zea Mays
gctcacgttccctattggtgggtgaacaatccaacacttggtgaattctgcttcacaatgataggaagagccgacatcgaaggatcaaaaagcaacgtcgctatgaacgcttggctgccacaagccagttatccctgtggtaacttttctgacacctctagcttccaaactccgaaggtctaaaggatcgataggccacgctttcacggttcgtattcgtactggaaatcagaatcaaacgagcttttacccttttgttccacacgagatttctgttctcgttgagctcatcttaggacacctgcgttatcttttaacagatgtgccgccccagccaaactccccacctgacaatgtcttccgcccggatcggcccggcgaggccgggccttggagccaaaaggaggggcggtgccccgc

SEQ ID NO: 21891 - DNA, 3598 bp, Zea Mays
accgatttcacgctcctgagctgctgtgctcctgtgggcttgtgagccaaagccatggaaatcatcatacaaggtcaataagtattctggaatgtttttccgagctgaaatagatagcttctggagctggatctcagtattctgttagggacatgctccaaccgagggaagctgatttgcctgcactctttcttgtcttcattgtacttcctgtggtagcttattttcttctcgggagatggcatgatgctgcaagtaagaaggcaagggtaagtgtgcttgctcagcgagctgcagaagaagcctatagagaggaaacaatggcgtgcccagacattattctgccagggtcttccttgagaactatgccctatttcagacctatgcctgcattaagacaggaataccatgaatgtgcaacttgccatgcccctgcaaagactcgttgctccagatgcaaggctgttagatattgctctgggaagtgtcaaatagtacactggaggcaaggacataaggaaacatgccaaaagtggcttggtagtggttctagcagctttggtggatctagcactgaggctactgaacagatgccgttcttgactaacttaaattcacctcttccgggtggtgacattcacttgcgtgacttgaacttcgatactttatcagaaccatcctttcccacaactgatggttataatctagatactgatccatttttggcagacagaagcaacatgaataaatcaaatcaaggtattcatatgagcgaaaatggtgctgttggtgtatcttttgaaaagaataattataatgctgatgatgaaatccactcaccggaaaatttatctagaaacaaggtgtcaaacaactattttggttcagatgcaataagtggtaatggggatgcaatttatcctgccaaaagtaatgcacagcagcctagcagctgtgctcctgacatgagaaaacagccaaaagcaagcatcacagtttatcagcctgacataggtgtctatttaacttctgacatggtcagttcttgtgaggggtcatatgcttctgccagtgagccactgcaaaggagcttgtcatctggaagaactattgggaaagcaaacgcggtgaataagaggcctccatacccatcaagtaaggtggtttcagcacaaaagccacaggatagggtgtctacatcatatcaaaatgatggccatgagaagaatccttgcaacaaaaatgaccaaagatctacccccaaatgtgaatcaagtcaatcaacaagcagcaatctacaaaagtttggagcatccaaggttgaagttttaaagaagccttcaaaatttctcaaaaccagccttgtgggattgatcaatgataataagaggaacaaggtattgttcccatatgaagatcttgtcaagttttttcagtatgaagcccggggtatttcccctagaggtcttttcaattgtggaaacagctgctatgctaatgctgttcttcaatgtctcatgtgcacaaagccactgatgatctaccttcttctgagattgcattctaaagattgttcttcaaaaaaatggtgccttatgtgtgaacttgagcaatatgcttcaactttacgtgaaagtggtgggcccttatctccaagtagaattctttctaatctgaggaatattggatgtcgcttgggtggtggaactcaggaagatgctcatgagtttttaaggcatcttgtgatgtctatgcaagcagcttgcttggatgggctgggtggtgagaagcatgttgagccaagtttgcaggaaacaacactgatacaacagatgtttggtggccgtcttaaatccaaggttaagtgcctcagatgttatcacgagtctgaacgatatgagaatataatggatcttactttggagattcacggctgggtagagtccttgcaggatgctttgacacagttcactgcccctgaagatttagatggtgataatatgtataaatgtggaagttgtgctgcctatgttaaagccaggaagcaactgagcgtgcatgaggtgccaaacatattaacagttgttcttaaaagatttcagtcaggaaaatatggcaagatcaacaaatgtgttactttccctgatatgttggacatggttccttttgtgactgggtctggtgacaatccccctctttatttcttgtatgccgtggttgtacatgtggatacagaaaatgcatcattctctgggcactatatatcatatgtcaaagatatgcagggtacatggttgagaattgatgattcagaggtccaggttgtatcagtgaatcaagttatgtcagaaggtgcatatatgcttttctacatgaggtctttcccccgaccaccaagaatatacatcgagaaggggccgactgttccatccgcgaagcgccacacatcaaagtattccaagggctctaaacacgagcgcgagcagacagagttactcctctcggcgaacgatccagcatacggtgtttatgactttagacctgatggcgagggctacacgcaagatcagcaagcagagttgagatccagggatttccatcgcgccgacgatgccttcgcagactcggtcagcgcggacttctcggaggccacgtcaagcgaatggtcgctgtttaccagctccgacgagtcctcattcaccaccgagagcacaagggactcgttcagcgttgtggactacggcgacaacgctggcctggacccaatctcctcgatatttgggccaagctatgctccggagcatcatcccggtccacctggcagtttcgccgcgtgcacgaggctctcgccttccaacccacagacaaggtacttctcggagagcacagggttcgtctcggactactcttccagcggcattgtacatagaggaagggatccaggtagggcatacacctgttcagcggaaccgctcgcttcggctgcggcggcgcaccagcaccagcggtacgcccttagcggccgagacggtttggtccagacatctgggttctgccaaatgtaaccggctttacgatttcgtagctatagctgtagctggtgctcgggcagctgcggtttagcactgccactgatgctgctgcctctatgttctttttatttcaggtgaaattttagagcgcggtggagctgctccggttgaagccatcccccgaggcccgaaccagtaaattacgccgaatccggcagtcgtatggccctgcacaccagtgctttgtgaaaagcttgcagattcatcaattgacgtgcacttgccttttatatggacgctgacgtatggaggtgcacactctccacctccgtatatctcgccacctactctgtttatattagaaggttgattgctgacacacaacacctgctcgtacttttttgtcgaaatcatgacggacaacaacgctaaacatatagtacaatcttcttgtcttgctgatctgctatgcccctttgtgaaatctgccggtgacatcagcgatggcgtcttgctgatctcgtggtatacctgatgtttcctcggtctcagcttttatcacgcag

SEQ ID NO: 21892 - DNA, 2291 bp, Zea Mays
ctgcgcggcatgaccagacggcacacggcagcacgcatcgttcccaccaaaccagattgtcactgggcagcggcgacaagaccaagagcgtgacgcggcacggtcgtcggaggcccagcgctcccctcctcctcggtcgtaacgcaggcggccgcccaccgcgccgccgaaacaaaaaacctagcagcaaccagcaaccccacgcgaccacggacggaccggccatggcatctgcacgggctgctgctgcctgctgatagagtggacaatgcatgagctgctgcagatagaacgctgccggccgggtctgctgctgatagatgcatgtatagatagagacactgctgcagctgcagctgcagtgcagatatatagaacgctagctgccggccggtgcagaccacgggaggcgcgggcgcgcgctataaaagccgagccagtgggcgcggccagtgtcacaactcacaattcacatcgaggtctcagcttcaggaaagggaaggaagcatgttcgggcaccaccaccaccacggccacggcgggcaccaccaggccccgccgccgcacgagcagacgctgttcaggatcttctgccgcgccgacgaggcgtactgcctcaccgtgcgccacgacgccgtcgtcctcgcgcccaccaacccccgcgacgagtaccagcactggtacaaggacatgaggcacagcacgaaggtgaaggacgcggagggccagccggcgttcgcgctcatcaacagggccaccggcctcgccatcaagcactcgctcggccagtcccatcccgtgaagctggtgccctacaacgcggagtacctggacgagtcggtgctgtggacggagagccacgacgtgggcaagggcttccgctgcatccgcatggtcaacaacatccacctcaacttcgacgccttccacggcgacaaggaccacggcggcgtgcacgacggcaccaccgtggtgctctgggagtggtgcaagggccccaaccagagctggaaggtgctgccctggggggacgaggcctacgcgccgcgcccgtacgctcctcctccgcctgcccaggtggaaccaggctacggcgggtaccgtcccccggctgcagggggctacgcgccgccgcctccgcctgcccaggtggaaccaggctacggcgggtaccctcctccaccagctgcagggggctacgcgcctcctcctccgcctgcccaggtggaaccaggctacggcgggtaccctcctcccccagctgcagggggctacgcgccgccgcctccgcctgtgcctgtgcaggagcctggctacggcgggtaccgtcctccatctgctgggggctacccggcggggtacgggtacagcaacctgcctcgcgctctggcgtctgaacagaccgtccgcgtctactgcaaggccggcgaagggtacagcctcaccgtcaggaacggcaccgtgtgcctggcgccaaccaaccccagggacgagttccagcactgggtgaaggacatgaggcacagcactagcatcaaggacgaggaagggtacccagcgttcgcgctggtgaacaaggtcaccggcgaagccatcaagcactcgctgggacagagccacccggtacgccttgtgccctacaaccccgagtacgttgacgagtcggtgctgtggacggagagccgcgacgtcgggcacggcttccgctgcgtgcgcatggtgaacaacatctacctcaacatggacgccttccacggcgacaaggaccacggcggcgtccacgacggcaccaccgtcgtcctctgggagtgggccaagggcgacaaccagcgctggaagatcctgccctggtgaacagagacgagctagatgaatccaaggaaccttacctagctgctgccgccgccgcctaattcgtcctcctccgctctagctgttatctgtctgtgtcttcgcgtcctcggttcctgaatggacgaataatatatagcatgcatgtacggctagcgaccatgtctgaatgacatcttcgttgctgctgctgctgctactgctacctgtccgtttggtgttctaaaagactctgatgagtggttctgaatgtctgcatttcaagtttgctgtgtgatgttaatgtaccgtgcgtaccagagctgctgctcctcctaaaatctttatctacctttgttttgatttttgcctgcttatggttatggcaacactgccacaacaatggccttttttatttcaaactttctataaaataaatatataaaaaaataactttgtgc

SEQ ID NO: 21893 - DNA, 1561 bp, Zea Mays
gcagatcagatccggtgccactggtgccttccctcctcctcatcgaagctttggggcccgtcgctgcctccctgcatcgcaccctgttactgccttctgcgcgagagatatggttgggaacagtgtgatgtggcaacacctggaagtggaggatctccttctctaccacaaggagaaaatccttctttactacaaggagaaaatccatgagtcggggagggcctttgttctaagggaggtccatcacgaagagtgtgctcggaggcttaatgagaagtatggtgctaacttcacgtggaaacaaacctacaacaagtaccacaagctgaaaggagaatggaaggtgatcatggaggcgaagtctgctaggggtgctggttttgatgatgttcagaagaagataacctacgacgagatcgaggttgtcaagatgaaagctaaaggcgacaagaaggctaagtactacaatgttccgatccccttgtatgatgagatggagtttgtcttcacggggaaacacgctactggagagttcagtgttattgaagcaccgtttgatcgctcaggaaggcaagaggatgatgccgttgggaatgtcaacctagatcaagagccagcagatctgaatggtgactcttctcaacacgatttcgacaccctcgcagagtctgatagtccgaacccagtaggctcgaagcgcaggcacgaggagaaggagaaggagaaggagaaggaatggaaatgggctaggcaaggcgtccccatcttcatgcaggccctgtcggaagctgtgagctttacccacggtggcacggacccatacgagggtatttacaaagccattgaagacatggatgagtatcctttgccggcacgccttgatctgctgacctatcttgctcagaatcgtcacattgccagcatgttgaagggacggcaggaggaaactttcaagcaatgggtggcacgatgggttgctggtcactaccctttgtgattcgtgtttgaagctcaagtcgtcttatgattcgtttgcgctcggagtagggtctaacttgatagggcaagatgcatattttggccgtatgtaaactatgcatggcagaatgtatagttttttttcctgatagtatgaaactagatagtgagtgttactaggcatgcatggcgtgttgaggtgagggtcatgagataatcacttcatctattattatactactaggagaagagagcttaacaaaagacctactttatcttgttcctataagattttgatggggatgagaatccaatagaatttggcttcgtgcagacgatcgatcactgccactgcaataataaacgtcacatggaatgacaaccatttgtcaacagaggaacaagcgaagcaagccggtatatttatacaaagtctcacatactgaatattccatctagcaacagaacgacacctcgatttatttctgtgtctttgtttttagatatttgacgacccataaaaacatgagacaactagcatccagggaaggcgatctttgtgtagcacataacagattccaac

SEQ ID NO: 21894 - DNA, 672 bp, Zea Mays
cttcaaccttgttttagatgctctatgtgtcatgtcacgtgacctcattaccatgagaaccacagagaaccacagggacacaaccaaaggtctcgtaggttgttagaggatgctctatttgagtcatgggtattgaagcatttaagtgatttggacctgtgaatcgactaggttgatccaagcaggaggtgaatgtgtgatggttggttattttgcatttcttctaggttgatgcatgacggttcatggagaaggctggtggttgtgatagctatcacacactcttttggttaataattagatactctttttgttgagcaatgtgaacctttaatggtgtttatgggtcttgtggagttgtgatggggctattatgaagatgctatggcctgttatggatgattggacatgttatgggctctatatattaatctgttagtttggtttcctcatattcatcatgtcatggggctattatgaaggttcttgcagctgctaaagtgcatctgtgatatttgtaaatgagttattggtaactgaaatgaaggaaagggatctgagattggctttcttggtgagaactggccatgaaaattgagggacggtggtataattgttgcatgcatatatgcttttaggaattgttccattgaatttgtttagtaaaaaatc

SEQ ID NO: 21895 - DNA, 3748 bp, Zea Mays
atggatccgcgccgcgcacccccgcggggcggcggcgggctctcttactccacgctgttcaacctcgagcctttgcagaacttaagggttcctgtaccagaaaatctcgcccgctacgggaacagcagctcaaatgggagtccaagcagtgagggtcaaggatccttgttggatcagtacaatggtgtacatgatgcttcccatggcttgcatcggaagcgaaaaaagcaccctgatggtgccggcgatgatgatcatgcagatgcctatagtaacaaaatgatggaggatcactaccgtgcgatgctcagtgaacatgtccagaagtaccgaaggtcaaagtttaaggagggtgcttttatttccgatccttctcagccatggtggattatctgaacccctgccacaatttgaatctctcaaggaaagggtaaaggtgcagaaattttctcttcaagttaccgaggacccctttgcaattccggaaggagcagctgggaggatacgaaggtctattatatcagaaactggcaatttgcaggtccattacgtcaaagtcttggaaaaaggagatacatatgagattattgagcgcagcttaccaaagaagcaaatagtaaagaaggaaccttttgtaatcgtgaaagaagagtctgaaaagacttacaaactctggcagtatcttgctactaaaagcattccaaagcatcacaggaattttacttctttgatgaagaaacgacaagtagatgcgaagcgcttctctgatagttgtcaacgagaggtaaaattcaaagtaaggaggtcactgaaactgatgagatgtgctgcaatacgtacaaggcagttggctagggatatgctgatattttggaaacgagtagacaaagagcagtatgagttgagaaaaaaagaggaaagagaagctgctgaagctttaaaacgtgaggaggagcttcgtgaagccaaaagacaacaacagaggctaaactttctgctgtcacaaacggagctttatagtcatttcatgcagaacaaggctggtggctcagcgccacctgatgaggaagatgtccctgatgaagatgaggaagaagatcctgaagaagctcaattgaaaagagaggccttgagggcagctcagcatgccgtttctcaacaaaagatgaggactaatgcatttgatagtgaaactgtgaggcttcgtcaaacttctgagtctgttcttccaactgatgattcatctagcatggatcctagtaagattgatctattacacccttcaacaatgcctgagaagtcatctgtgcaaacaccagagttgtttaagggtgtattaaaagaatatcagttaaaaggcttacaatggctggttaattgttatgaacaggggttgaatggcattcttgctgatgagatgggtcttggcaaaactgttcaggctatggcattcctgtctcatttggctgaggacaaaaacatatggggcccctttctagtggtggctcctgcatctgttgtgaataactgggctgaggagttgattagattctgccctgacctaaagatacttccttactggggcccagagaggatgattcttcgaaagaacatcaaccccaagcgtttgtatcgcagagatgctagcttccacattcttattacaaactatcagatacttgtgaatgaagagaagcttttgagacgtgttaagtggcaatacatggtactggatgaggcccaggctatcaaaagttcaagcagccagcgctggaagacattactgagctttagctgtagaaatcgtctacttcttactgggacaccaatacagaacaatatggctgagttatgggcacttcttcatttcatcatgcccactctatttgacagccatgaacagttcaacgagtggttctcaaagggtattgagggtcatgctgagcatggaggagctttgaatgaacatcagcttagtagattgcatgctattttgaagcccttcatgctccgccgggttaagattgatgtcattgctgaaatgaccaaaaagaaagaagaaattgttccctgcaaattgagttctcgtcaacaaattttctatcaagctataaaaaataagatctcgcttaacgagttgcttgatggaagtcgtggcaatctaaatgacaagaagttacttagcctgatgaatattgtcatgcagctacggaaggtctgcaatcacccggagctgtttgagcgcaatgagggaagctcttacttttactttgctgatatcccaaactcacttctttctcccccgtttggggcattacaagatgtacattatgcaggcaagagaaatcctataatctttgagatcccaaagttagtttatgatggaatcatctgcaacacagaaaattctggaagcatctgtggatttcagaatggatatttgaacaggttgtttaatatatttttgccaagcaatatccatcgctcagccattccagaagttaattcatcaaatgagtctgttttatcatctggtgcatttggctttacacgtttgtcaaacctgtgcccagttgaagctttcttcctggccacttcatcattctttgagggactagcattttcagtaatgcgatggaataggaactacactgatgaaattatggatgcattccttgattcagaagatactgacatccagttcagtcagaatgattccacaagagttcgtgcagttgcccggttgttgctttcttctacaaaggccaagcccagcttacttaggacaaagattggaactggcccaagtgaaggcccatatgaagcactggtgctttctcatcatgacaggcttgcttcgaacataagggttcttcgttcagcatacacttatattccgccagctagagcaccacctataaatgtttcatgtgctgatcgaaattttgcctataagttcactgatgagatgtatgatccttgggtcatgaaactgttcctgggatttgctcgtacttccgagttcaatggtcctagacaaccagttgctcttcatcctttgatacaagaactcaatactgatttgcctatccttgagccgatgctgcagctaccctataggatatttgggtcttctccaccgatgagtaattttgatccagctaaaatgctcactgattctgggaagctccacaccttggatatgctactacggcgccttcgagctgaaggtcaccgtgtgcttctttttgctcagatgactaaaatgctggacattcttgaggattacatgaattttagaaaattcaagtatttcagacttgatgggtcttctgcaatctcagaccgccgtgacatggtccgagctttccagaacaggaatgatgtatttgttttcttgttaagcacaagagctggggggcttggtattaatttgactgctgctgatactgttattttttatgaaattgactggaatccaacacaagaccagcaggcaatggatagaacacacagacttggtcaaacaaaggaggtaactgtgtacaggcttatatgcaaagatactatcgaggagaaaatattgcaaagagcaaagcagaaaaatgcagtgcaagagttggttatgaaggggaaacatgttcaggacgatcatttgttgagacaagaggatgttgtttcattacttattgatgacacacaaattgcacataagttgaaagaaatatccatgcaggtaaacatcaca

SEQ ID NO: 21896 - DNA, 1152 bp, Zea Mays
ataatttgagggcagcgatcatcatcacaagaaccacaaccgaaaaactcaccacctcaggctgggggagagtatgagatggaaacaggtggtctgccgatggatttaacagatggcattgaaaaactcagggcaaacatgagtgcaaaatatgacagagcttacaatattcttcacagtgaccatagtgttactcctggaagtcctgggttaagtcgcaggtctgcttcaagctctggtggctctggatcggcgtttatacaattggatccagaagtacaattgccatcaggaagtggaaggtccaaaagggggcagcattcatctgcaagaagcttggggaatcttgatactgttgaggaagattttccactggagcaggaaacctactggaagaaactgaaccgactcaaaccccatatgagaggcgctccaatccaatggacaagatcacagaaacaatccagtcgcatctcaaacttcatttcgataccccaggtgtcccacaatctgaatccttaagtcatttagctcatggaatgaccaaagccagggcagcccgactattctatcaaatagctgttttggcaacttgtgattacatcaaggttactcagctggaacggaaaggagatgaactgtacggagacatcttgatctccagaggattaaagatgtgacttggtgatgttggaaacaattttgctgcggtggttcccggtgcacatctcgtgtttatattacagaatgcttacatattgcataggatgtcttgtagttaacacataatctatacatggtgatctggtgaaagaaagggagcgagatatgaggcagtagttttgtgttatgtggcaagcaaaattctaagctgttattttagaggtttcataatttaagtacgaacatgtgttatactattatgaaactaagttgtcctgaaagcacttactgaaagggagaaatttacatggtaccttgtcaacgatgaaacatacatcggaggacaacataaagatgcacactgtatcctgctcttcggctgcttcatgttacgatacctgtccatttgccctatctttcattttttatgggtggctttgtcctattctaaatgcaccttacttagcaatctgatattttttcgcctgg

SEQ ID NO: 21897 - DNA, 1430 bp, Zea Mays
ctacatcgccaaaccctaactaggtttttttcaagcctccccttccctaccctcgccccccatggatccgttttccaagaagcgcaagcccgacgacaacggcgccgtcactgcttctcccgccggtggggctgccacgctgggtctcacccgcgaggacgtcctccgcctcctcgagccgctctcccgggaccagcttgcggacatcgcggccgccgctgcactcgtctcggcgcacgcgctcgatgccgtgcgcgcagccgccgaccgcgacccggccctgcgcaagctcttcattcgggggctcgggtgggagaccacatccgactcgctccgcgccatcttctccgcctacggtgacctggaggaggccgtcgtcatcactgacaaatccacggggcggtccaagggctacggcttcgtcaccttccgccacgccgattccgccgtcctcgcactcaaggagccatccaagaagatcgacggtcgcatgactgtcacgcagctcgccgccgccggctcggcaggcgggccgtccgttggggctcccggcagtggcggtgctcctgtggctgatgtgtcgctccggaagatcttcgttgggaacgtccctgcagacatgtcgtcggagcgtctccttgcgcactttgcctcctacggcgagattgaggaggggccgctgggatttgacaagcagacgggcaagttccggggctttgcacttttcgtatataagacacctgagggtgcgcaggcctccctggtggactcggtgaaggtaattgatagccaccagcttgtatgcaagcttgccatagatgggaagaaggggaagcaggggcaatcacagcaatctggacctggcaaccagcagcagcaacagcaacagcagatgctgccgggtggtccgcaggaaattcagggaggcctggggcttggttcacaaatgggagcacagtatggtggccctgggagtggtatgccttcgtttggttttggtggcgttggcggtgggtttgggggtccaaacccttatgctaacatgccatcttccatgggtggaggaggcgcaggtgggttagggtcggtgggaggccaggtgcccactgggttggctggtgctggtggatttgggcctgggggattgggtggtggctcatttgggggatcatctcagtttggtgctgctgggatgggggcatatggtggccttggaatgggtggaggctccatgtaccgcatgcaacagggagcaggtgggctgcctgcaggcgcatttggtgaaggaggaaactaccctcttccaggttctggtttccgaggccacgaccctcaaggtggaatgtctcctcctgggccaggtggcagggctcctcctatgtatcccaacgtgccaccttatttctaaggttagtcgatttgagccattg

SEQ ID NO: 21898 - DNA, 2651 bp, Zea Mays
acggttggtccacctcctcctgctcctctggcctctgcggtgcctcctcccggtcccgagtcccggccatgtcgtcgccgctggaggatgtcagcgtgggcatggaggaggaggatcagcggcccctgaaccgggccctgctccaccggagcgccaccaccaacgcctcccaggtggccatggtcggctccaatccctgccctatcgagagcctcgactacgagatgatagagaacgagctgttcgaccagaactggaggacgaggcgcaaggcggaccaggtgcggtacgtggtgctcaagtggaccttctgcttcgccatcggcatcctcaccgggatcgtcggcttcttcatcaacctcgccgtcgagaacgtcgcgggcttcaagcaccaggccgtttccgccctcatggactccgccagctactggacggcgttctgggtgttcgccggctgcaacctggcgctcctgctgctggcgtcgtccatcacggcgttcttgtcgccggcggccggcgggtcgggaatcccggaggtcaaggcctacctcaacggcgtcgacgcgcccaacatcttctcgctgcggaccctcgctgtcaaggtagtggggaacatcgcggccgtatcatcgtcgctgcacgtcggcaaggcggggccgatggtccacaccggcgcgtgcatcgctgccatcttcgggcagggaggctcccgcaagtacggcctcacctgccgctggctgcgctacttcaaaaacgaccgcgaccggcgcgacctggtgaccatcggcgccggcgcgggggtggcggcggcgttccgcgcgcctgtcggcggcgtgctgttcgcgctcgagtcgctgtcgtcgtggtggcgcagcgcgctcatctggcggtcgttctttacgacggcagtggtggcggtggtgctgcgcctcttcatcgagctgtgcgggaccgggcgctgcggcatgttcggccggggcggtctcatcatgtacgatgtcagcaccgtgttcgacgacctcatgacctaccacctcaaggacatccccaccgtcatcctcatcggcgtcaccggcgccctgctcggcggactctacaacttcctcatgataaaggttctccgactctacaacgccatcaacgagagaggtggagcgcacaagctgctgttagcggccaccgtctccatcgtgacgtcgtgctgcgtcttcggcctgccatggctggcgccgtgccggccgtgccccacgacgggtccactttcgtcgccggacgggacctgccacgcgctgaaccgtttccggcggttccactgcccaaagggccactacaacgatctcgccagcctgttcctcaacatcaacgacgacgcgatccgcaacctctactccaccggcaccaacgacgtgtaccacccggtttccatggtcatcttcttcgtggcgtcctacgcgctcggcgtgctcagttacggcgttgtggcgccgtccgggcttttcgtccccatcatcctcacgggcgccacctacggccgcctcgtggcaatgctgctcgggggccgctccggcctcgaccacggcctcgtcgccatcctcggctccgcgtcattcctcggcgggacgctccggatgacggtgtccgtgtgcgtcatcatcctcgagctcaccaacaacctgctactgctgccgctcgtcatgctcgtgctgctcatctccaagacggtcgccgactccttcaactccagcatctacgacctcatcctgcgcctcaagggcctgccccacctcgatggccacgctgagccgtacatgcggcagctggccgtcggcgacgtggtggccgggccgctgcggagcttcggcggcgtggagaaggtcggcaacgtcgtgcacacgctccgcaccacggggcaccacgcgttccccgtcgtggacgagccgcccttttcgccggcgccggtgctctacggcctggtgctgcgcgcgcacctgctggtgctgctcaagaagagggagttcctggtggcgccggagcggtgcccaaaggagtacgtggccgagaggttccaggcggaggacttcgacaagcgcgggtccgggaagcaggataccatcgccgacgtggtgctgtcgccggaggagatggagatgtacgtcgacctgcaccccttcaccaacacgtcgccgtacacggtggtcgagaccatgtcgctggccaaggcgctcgtgctcttccgggaggtcggcctgcgccacctcctcgtcgtgcccaaggcctgcgataggtcgccggtggtcggcatcttgacgaggcatgacttcatgccagagcacattctggagctgcaccctgtccttctgaggagcaggtggaagaggctccggtggcagaggggcgccatggccaagtacttccgatcgctcatcgtgtgggtcgccaacagcggctgaagcagatacattgctgccaggaaactgctgctggctcctgcagattgaaggagtcatcatcattgggtggcgtcctttggacgccctgcaatgactaaatgaagcaagtccctgctgatcacaggcaacagaaggtttaacccacagccttagtgaatgataaatgagtaagtatgaaagagcttagaggataaatgacag

SEQ ID NO: 21899 - DNA, 2133 bp, Zea Mays
tgaagctctagcaaacgacattgatgcgataaatggtaataataaagaaacttcaaaggcagcgaagcatttaatcaaacttttcccaaataaagtgatactcgaggcaccacaagatgaaatggagctttcacggtggaaccagatgttaaaccgagatattgaagtccttaaaggaaatgcaaacatttcaaaaatgcgttcttttctaacaagggttggtttggaatgcactgatcttgaggcgatattggtcaaggatcgcgttcttacaaatgagtgtattgataaaataattggttttgctttgagccatcaacttaagaactgtacaaatccagacccccctttgagtaatgtgcagtttgttctatccagcgaaagccttaagcatggtattgacatgttggaaagtatccagtctggctcgaagagcagcactaaaaggaaatcactgaagatgttatccctccacatgaaatcggtgttacctttgaggacattggagctttagaaagtgtcaaagatactctgaaggagttagtgatgcttcctttgcaaagacctgaactttttaaccgaggacaacttatgaagccgtgtaaaggaattttactttttggcccacctggtactggaaagacaatgcttgctaaggctgtggcaactgaggctggtgctaatttcataaacatatcgatgtcaagcatctcttcaaagtggcttggtgaaggagaaaaattcgtgaaagctgttttttcactggcaagtaaaattgctccaagtgtaatttttgtggacgaggttgatggcatgctgggaaggcgggagaaccctggagaacatgaagccatgcgtaagatgaaaaatgagtttatggtgaactgggatggtctgagaacaaaggagaaagaacgtgtattagtacttgctgcaactaacaggccatttgatcttgatgaggctgttattaggcggcttccaaggaggttgatggtgaatttgccagatgcatcaaataggagaaagattcttagtgtaatactagccaaggaagatttggcagacgatgttgatctagaagctatagctaacttgacagaagggtactcgggtagtgatctcaagaatctttgtgttactgctgctcatcgtcctattagggagattcttgaaaaggagaagaaggagagagcttcagcagaaacagaaaataggccattgcctctgtcgcacactagcaatgatgtccgtgcattaagaataagtgatttcatacatgcgcatgaacaggtgtgtgcaagtgtttcctcagattccagtaacatgaacgagcttgtgcaatggaatgatctctatggagaaggcgggtcaaggaaaaagacaacgctaagctacttcatgtagctgatgttgcaagtatatcgggagaagtgccctggcacaaagcagaaatggttggaggcagttgggggtgtgtatcgggtgcagttggaaaagagctaggttcacctgccatccatccattgagagaattgatggctcaggtggagcggaatggagtagtatacacattggttgctgcctccactctgggccatgtatcatgcatctggacatgacggatggtctggcttgcagttgtcctaacaacagttttgagtgcaacatatcactgtctgggaaagaaaagaaaagaaaatataccatttgtgttgttcccactccacaggaagcacggcgacgacatcgcccaacaacccttttccatcgtttcttaaaaaataattcattatttaggttgtaaacatttagagcctgtgcaagtgtacagtatgagcatcaggagtattaacctagtgttgatgtctatacctaatctaatttattgattagaatcatttaacatgaaatacatgattattttgtatcttcgtgccttcgttaggttgataatggtcgaattaaaactaaccttgtggttatgatctctgttcacatcgtgtacaataaatagagagggtcggtacacttagattcgatccatctcactaaagtgaaggctgttgtcgtctatcttattgttcttaagctgacccccatcgttctaatagttaatctcatggctagggt

SEQ ID NO: 21900 - DNA, 3829 bp, Zea Mays
atgatccagtacttcaagattgctggctggtcggtggaagactcccaaattgagggtaaattccctagaaacagcaaccccaaggagattattgtaaaaattccaaacagcatgtttcttttctgcttgatcaacgattacaagatggctgttcaattctcaatggcttcgtcgcgaaaagtgaggaatgcaaataaacgctacaccaaaatcaacgaagattggcaggataaagatgagacaaatgtacataaaagtaaagtgcgaaagaaaaagttatctgacatgcttgggtctcaatggagcaaagatgagctcgagcgcttctatggagcctacagaaaatatggaaaagattggagaaagttttttttatgcccttctagacagaaccgagacataaaaatacatttagttgctggtgcaatacgtgataggacatctgaaatggtggaggctctttacaacattaataaggcatatttatctcttccagagggaacagctactgctgcggggttaatagcaatgatgaccgatcactacaatattctggatggaagtaacagtgatcatgaaagcaatgattcaccaaaagcttcaaggaagccacagaagcgtggtcgtgctaggtttcaatctgtttctaagacatctgatgcacgttatgctgatctagggcaatctcagccttcttcatcaagctatggctgcctttcgttgttgacgaaaaaatgtgctggagatctgcttgtagggaacaggcctcgtgctgttggaaaaaggactccaagagtacctggtgcaagtatatactatcgagatgacaggggtgtaacagataggcgtgcaaaaacagttgctaacaatggtgatgatgaaggagctcatgtagctgcgcttgctctggcagaggtatttcaaagaggaggctcacctcaggtttctgaaacatccaaatggtgatcacatgttcctgtctcctgttaaaagtagtgacagaaaaaatgctgattcagagatgggaagctcaaagttgcatgggtttcatttggatgctgattaccccgaaggtagcttaggaagcagggaggccgagactggtgaatattgcaaaggttcatcatttttgacgaaaaatgaaggttctggtaagcctctgaagaagggaaaaaagtctcagaagaggaggaaaaaagctgcacataaaacaggtgatcagttcgaggatgacagagaggcttgtagtggaactgatgaagggcataggtcgataaagattaaagaagactcagagctggagtcattgggatggccgtctagcacgtcaaataaaagaagtcgtcaattgttttttggtgaatcttcagcccaaattaaggatgaaaacaaagatgttgattctgatgacaggcctggcatgcctgcggcagtatcagtgtatgagcagaaagttaactccaaaagcactgcaaggaaagttaaaaggcagcctgaaatttcaaattcagagatggtcactaggaaaaaagctaaagttactaaagatcctcatcacgatgggagcaccacttctgatgtaaagcagcaagcttgtacatgtggtgtcaaaacagagaaaaagaagaggaaatcatccacgacaaaggtttctgctgaagaagggaaggtgtcgtctaatatcgggacaaccacacaaggtgatacaacacaagctgacttatcatcaaagggtaaaagctgccgtaaaataggcattcagcaagcactaattgaagaatgcaaatcaaccaaggttgccaatgatactggaagtgataaattttctcactcagtgaataatgttattgatcttaaggacaaactctctcactgcttgtcctcacgtttgcttcggaggtggtgtatgtttgaatggttctatagtgcaattgattatccatggtttgcaaaaagtgaatttgtggagtacttgaatcatgtcaagctgggtcatgttccaaggctgactcgtgttgagtggggtgtcataaggagttctcttgggaagccccgccgattgtctaaacaatttttgcatgaggagagagagaagctttctcaatatcgcgattcagtcaggcaacactatgctgaacttcgatctggtgttagagaaggactacccacggatcttgcacgacctcttgcagttggacagcgtgttatagcctgtcatcctagaacaagggaacttcatgatgggaatattctgacagttgacaataatcgttgtcgggttcagtttgatcggcctgagctgggtgttgagtttgtgatggatattgattgtatgcccctccatcccatggaaaatgagtccctcaggcaaaaaaacatcgtgaataaatacttatccgaggtgaaacttgaggatcagatgaatgacttgggtagtgggggtgcagcaaggttcgcatcaaatgtgaatgtgaattgtggcgatgcagcgttccaaataccttctagccacccggtaaatagtttaacgaagcaagcaaaggttggcacagttgattcaattgtacaggccaaagctacagttaatgaggttgcaattgcagcacaacaagcaatgtacaatcagccatgcagtctctcacagatacaggaaagagaagctgatataagagctcttgctgaactatcacgtgcccttgataaaaaggaagctttattggtagagttgaggcacatgaatgaagaagtgtccagaaagcaaaaggatggtgagactgttagagttgaagcatttcaggacgcaatatgctatggtgcttgtgcagctaagagattctaatgatcaagtagcctcagctttgctttctctgcggcaacgtaacacgtatcatggaaatcaattaccgtcatatcctatttccatggaaaatggtggaaccattactggagcaccagatccatataaccgttttggttatattaatccagaatccggttcccaagtaatggaagttattgagacttcaaggtgcaaagcaaaaatgatggttgatgttgctgttcaggcgatgtgcaaagtgagggaaggagagaacgcctttgctaaaatcggtgaagcactagatgatctcgatagtcgtggcacaggctctggttcaagcatactaggaataagacggatacctcccgattcagggaaggcaaatacatcctttcaagataacggaacgcctgcccctgcagcaatcaactcttcaggtccaagattgcccaacgggtatgattctgaagctcaggttcctactgatttgatttcgtcctgcgtagccacgatacttatgattcagaactgcacggaaaagcagtatcatcctgccgaagttgcacacatccttgattcggccctgtcacgcctacaaccgtgcagctcccagaacatcccgatcttcagggagattgagatgtgcatgggcattataaagaatcaaatgttggcgttgatacccacaccaagcggctagttccttgctttcctgtgagctggccggaagaggggtaaatttcggaaagaaaccggaatactgtatgtggcgtgtattgttttttttttcccattttttactgatttgttgtgttgtacaagctgtatgtttttttactgtcgtacaagctgtatgttattgctttatacatgtataatagtaatcatgaaagttcattgttctggcaagcgcatgtacattcagcttgaaatactgaaccctttttccaaacggaaattttttcctgttcctttacttttttgaaattcttgcgttccaaacggggc

SEQ ID NO: 21901 - DNA, 1413 bp, Zea Mays
gtgttgtgtgtgagtttgagtgaggtactcacttgtgtgggccggcttgatcctaacacatgtgagcttgcatgtttccttgatcagtacagtttttactccttatgaacatcttgctgcaatgaactcacctattctagtcactactggtcaaatggtcctgattggggaacatttcgctatgctagtgttcatgcacatcttgggagaacaggtagcaggagggatgatttagaatctctagcatatacactagtctttcttctacgaggatgtctaccttggcaaggttatcagggtgacaacaaaagcttccttgtctgcaagaagaaaatggccacctttccagtatctctctgttgcttttgcccacatcctttcagaaagtttgtagagtatgttgtcaacttgaagtttgatgaagaacccgactatgcaaaatgtgcatcactttttcatagtgtactaagtgtagtaggttcaaatccagatgtcagaccaattaacactgatggtgctcagaagcttatacatcaatttggtcaaaagagaggccgattttttatagaggaagaagcagatgaacaaccaaagaagaagatcagggtgggaatgcctgcaacacagtggataagtgtctataatggcagagtacctatgaaacaaaggtaccactacaatgtttcagattcaagagttggacagcacatcgaaaaagggaatgccgatggactgtttatcagttgcataacatcttgttccgatctatgggctctaatcatggatgctggaactggtttcacatcccaaatttatgagctcattccacatttccttcacaaagaatgggtaatggaccaatgggagagggactactatataactgcggttgctggggcaaacaatggcagctcgttggtagtgatgtctaaaggcacaaagtacacacaacaatcctacaaagttagcaatagtttcccctacaaatggataaacaagaaatggcaagatggtttctatgtaacttccatggcaactgctggaagtaggtgggctgttgtcatgtctcataatgctgggttttctaatcaggtggttgaactggatttcttgtatcccagcgagggaattcataaaaggtgggacaggggttactggataaccgcagctcctgctacttgtgatcaggctgctttcgttttaagtgtaccaaggaggcgacttacagatgaaacccaagagacactgaggacaattaatttccctagtaaacatgtgaaggacaaatggtctaagaatctctacctagcatcggtatgctatggtcgtactatatcctagggatcttttcgagcggaatcctgccagcaccatcttttgacgtagagcaggagatatccagagccacctgcc

SEQ ID NO: 21902 - DNA, 610 bp, Zea Mays
tcctaaatttccgtacttcccaggccaccaaaataataaaacatctatctagaagcctacaataagacaaaggcaattgcagaaggcgacgacgtgaagagcaagaacccggatgcttcaatcgtagataaatacaacacctccaaacgatcagtgtcccttgtgcagaagcaccgagagagtaaaaaggagaaaaagaagcaaaagcagcaggagaaagaggaatgggagggaagccacccatggaagccatgggaccgggagaaggatctgtctgctgggcgccagaatgtggccttagacgcagagaacatgtcgcaaggattatcttcccgtttcgcatctggtgctgttcagcggaacttcctgtgagctgtgtggaaagatactcctggagcttggtctaatcgatgattaatgtccagttattacatcctggtcggcagatggcaaagataatgctgacatataaaaacgagttatgttaccaaggaccatcgtcctgtaatatcgatcgtgcttgttgtgcttattttctcagtgtattatcgggtgagctaaaatggtgccatagtttgttcgtacgatacaattactttttttttcaaac

SEQ ID NO: 21903 - DNA, 160 bp, Zea Mays
tagctctgaatatatacctttcaaccataaggcttccttagtaacttctgcaatcgccatatactcagcttctgtggtagacaaagcaacaatatcctgtaaacgagctttccaactcacagcacaatctccaacggtaaagacataacctgaaagtgat

SEQ ID NO: 21904 - DNA, 3323 bp, Zea Mays
cttaggcgagatgtggcgttggagtttgagagggaaggtaatgagttaagacgtgtaattgaagataaccaaaagggaagccatcctgtggataaggatttgcacacttctagacataagcatgtacatcagaagctgtggaaacagaatctgagtcaccgtcactcaggcaatcaggatttggagaaatcagcagaccagaattgtctaaataaagatgtggagatcgaggaaggagaattgattgaagaggaccataataatatcatttataaaagcaagcttaagcaggaaaatgttgtactgaaatcagttattgaaacaagttcagcagagcagttacaggtgaataatgcaacgtcgaaggatgctacctgcaacaacagagctacaagagaatctgatgagaaacacattcttgaggctgctaaatgtttctctgtgtttatgtattcaagtttatctcttcatactctgaatgccatcatctccagagttctttttattattatgcagcaattgtgtttttccccgattaagccagtcacatacaagttgcagtctgcagttagttgttgccttacccactctgtcaggctaatatatctgtctgagtcagagagaagaacggacatttgccctctcgtcagaaggcgaacacgcgagcagctccattgccaagagaatttggagaacgctgagacgacacgatcgtgcccactgcccacgagaggagttgccgcctgtcaaaggctggaagcggggacttgtggggaagatgggaagccgccttcaactcctgcagacagaataacagaaatatcgaacgacgtacacactccagctccgacaccgtcatccgtcaagtcgtcaactgacagtgcactcggcggtggttcgaacgccgaaccgacgtggcgcgctgacgacctccaaccgtgccctcatcccagcctcccgcttccgtccctgcaaggtccaagcccggtacggcaccgcatccgagagggcagacccgtcagtccaggcccctcgtccttcactcctccttcgcctctcaaaggcgcgcctcgctccaccattcccactggcgatttgcaacagacaagctccactagagctcggccggcatccatggcgatgcggctcctgtccccgtccacgccgcccccacgcttcccgagccccggccagaaggcacccgcctccatctccgcatcgtcttcctcgtacttctctgtccgcttgcgccgcgcgcgcgcggcggctgcagcggctgcaggcgcggccgcggcgggcgggtccgaccggcgcagcggacgcttcgagggggaggcgatgagcggggcattcgacaggggcctcgcggagatcgcgaggaaggtgccgctctttgagcccacagcggacggggagctcgccgctgcggctggcgagcggccgttgcctatcaatctcgagctctggctctaccgcgtcaaagtgcacaccagaaagttcgagttccctgaagcagaaaaacttctggacaagtgtatctcattctggcctgaagacggacgtccttatgtggcgctggggaagctgtatagcaagcagtcaaggtatgacaaagctagagcggtgtacgaaagggggtgccaagcaacgcaaggcgaaaacccatacatttggcagtgctgggcagtcctagaaagcaagggtggaaatattcgaagggcacgcgagctatttgatgccgctactgtggctgatgcaaagcatattgctgcttggcacgggtgggcaattttagaaataaagcaaggaaacataaaaaaggcacggactttgttcgagcaagccagtcaatccaatccaaaaagttgtgcaagctggctagcttgggctcaggtagaaatgcgtgcaggaaacaataccatggcaagaaagctctttgagaaagctgtccaggctagtcctaaaaaccgattttcatggcatgtatgggcactatttgaggcaaatgaaggtaacattgacagggcaaggaagttgcttaagattggacatgctgtaaatcctagggaccctgtaattctacagtcactcgcgctactggaatacaacttttcatctgcgaatgttgctcgtgtgttattcagaaaagcgtctcagattgatccaagacatcagccagtttggatagcttgggggtggatggaatggaaagaaagaaatgcaagaacagcaagagctctctatcaaagagctttgtcagtcaattcaacaaatgaatgtgctgctcgttgtcttcaggcttggggagtcctagaacagcgtgctggtaactacacggccgctagacgattgttgaggtcttcactgagtataaactcccaaagtgaggtgacatggatgacatgggcagcacttgaggaggaacagggggatccagttcgagctgaagaaattcggaacctttactttcagcagcgtactgaagttgtggatgatgcatcctgggtcataggcttcctcgacatcatcgaccctgccctagacagcgtgaagaggctactaaacctggatcagccttctagaccggcgaggcaagatgatgttaaaagcacaacagaaccgtgtcctcccactgccaagtcttcagaaacttctgcgggcaatgatgctcgtaacaacgggagcgaagcaatggggactctaacaagtgatttcgatttggatgctttcatcaagaagaggctggccctcgacccatcggagctggatgccgtgctcgagggctctgacccgaggggtgttgtttctcagaggaggaaacagcggctgcccaggaagccactccctcttctccctgtcccgtaaattttccagatcggtctgtctcatttccattccaccggtaaaatccataagggctagtttgtttgagactccatttttttccaagtgttaaaaataaaaatcccttgaaaaaaatgaggttatcaaactagccctaaatccctaactgtagcagcctgcaatacgtgaatatgtgtgaggactaaggagatgacgtcccctgccgctgccatagcaatcaccacacctgttaattgtcattccagccacgtgtatgtaattctgccaccatttgttagtaaagtctagctctgtacataaattagactctttttgtctacataatatcgccggactaagttatcgagaagtattttgacaatggtagtgccattacttcaacaccttagagcatccaagaaaatatgtaaaaggttcccaaaaccatttttgacggcgaaacaccatcttcattcact

SEQ ID NO: 21905 - DNA, 1960 bp, Zea Mays
ggcgtggtgcagggcttttactatgtggaatggaatactgtcgagggtgagcgtgagccgggcgctgcatccaccttactccctccagctctcagctctcccttcgccgccgccgggtactcggcgctccatccaggcactccagccacccccaccccttcctccgccgccgggtactcggcgctccatccaggcgtccccgccccgcggccgcctgctactcgttcgggcgctccatccagcgttctccctccagctccagtctccggcgcgatgaagatcgcggtggaggggtgcatgcatggggagctggacatagtctatgacacgctgcgaaggctcgaggaggccgagggcgtcaagattgacctcctcctctgctgcggcgatttccaggctgttaggaatgagaacgatttacagtgtgttagcgttccacaaaagtatcgtaccatgaacacattttggaagtactactcaggagaagcagttgctccgtacccaaccatctttattggtggaaaccacgaagcatccaattatctgtgggaattgtactatggaggatgggcagcacctaacatatactttttggggtttgctggtgttgttaagtttggaaacatacgaattggtggattgtcaggaatacataacaaacaccattatcatttaggacactatgagaggcctccatacaataaagatactatacggtctgtgtaccatgtaaggcattatgatgttctcaagctcatgcatttgaaggagccgctagatgtattcttgtcacatgattggcctctgggcattaccgagtatggaaactggcagaagctcattagtgtgaagaagaactttgaagatgaggttaacaatagaacactaggcagcaaacctgcagctgaattactgaacaagctaaaaccaccatactggttttcggcgcaccttcactgtaagtttcctgctgttatccagcatggcaagaatggacctacaacgaagtttcttgcacttgataagtgcattcctgggcgcaattttttgcaggttatagacattccatccaatccaggaccatatgaaatccagtatgatgaagaatggcttgcaataacacgaaaattcaacagtgttttccctttagcacggacacagtttactatgcgggatgagcagctcgacactcaagaagaccggcaatgggtcaggagcaagttgaatactagaggagctaagccttttgattttgttcagactgcaccatctttcaatccttccagtacaacatctaaacagtccataacagtttgctgcaggaatccacaaactgagtcttttcttcagcttctggaactcccatatctgctggactcatctaaatctgagatgtttggtagaaatgagtcaacttctcagacaggaaacacacttgataatgaagatatagagctaccagatgaagatgaggatgctttagaagatgacgagtgaaggacagcacttttagacaagtaccattgcacctatcatgttggttgcagggtttgcgatagatttcattgtcttttgtagattgcaatctatatatctagacgaggaactaacatgtactagattgtattgtcatagctgcttttttgttggaggacgtttgtggatctagagggtgatctgttgatcacaatgccaactctttggtgtttagttcatacagttttttgaactaactacaattaatcagtagactagatgcatccggtggaaagtgttaacaaaaatatcatctactagcaaggtagagatcagctatatatataaaacatatatttgaaatctgtgtgggtaactactagcccgagttagttccttttttaagctgaaaatacagcaggggagactccccagtctccactgtaagttttattaaataaaaggaaacaagaacaacactgta

SEQ ID NO: 21906 - DNA, 662 bp, Zea Mays
ctgttgatccaattcacatctgctgctgtgtgtcatcttcaatccccctcccaatctgctgctgtagctactcggaaggccaaggctttgcctgagagaatgcaagacccaagggatgatgatttcttggcgccaaagttgcataagaagaaggttgtctaccggccgcagccatcaggccatctgaagggtgaacctgaactgttgcggagagagtttccgcaatcatcaggcatggtccaaaagccacccaaaagaagcttgaagggtgagcctcgcacgcccccttccgacagggggaccccggattccctgccggaatctggtcctaccgacgaataccgtgcgttaaggaggaagtacctgatgctggaggaagagaactttgcactggacaaagaactgagcatggaagatgaagaaatgaaggccctagaggatgaaaagcttgcactgcttgatcagcttgttgtcttggaaggccttgtcgagccatcccagttgcagtctcaacctaggccgtaagggttgacaacttcttagtccgtttgtgtaaagtaagaagaatttagttgcgaaggtagttctgtgcagatgaagccttgttgcggcttacctgatgttgagctcatgatgtgaaacaggaacgatacacttgtctt

SEQ ID NO: 21907 - DNA, 1312 bp, Zea Mays
ggcttcggcaagcccagcccatgacacgcacagtagcccacaaaatcatggcctgcctgccaccgtcggaggtggcgccggccacgtcgctgctgctggccgacctgctgccgcgctacgtggacccctcgtgcgtcagggtcgtgcagggcggcatcgcggagaccaccgcgctgctggagctccagtgggacaagatcttctacacaggtaacagcagagtaggacgcatcgtcatgtcctacgctgccaagcacctgacgcccgtggtcttggagctcggtggcaaatgccctgtcgtcgtcgactccgacgtcaacctccacgtcgctgccaagaggatcgccgccggcaagtggggctgcaacagcggccaagcctgcgtctcgccggactacgtcgtcactaccaaatcgttcgcgccaaagctgctggagtccctgaagcgagtgctgttcgagttctacggggaggagccgctgcggtcgccggacctgtcgcgcgtcgtcaactccaaccacttcaacaggctcatggcgctcatggacgactactcggtctccggcaatgtcgcgttcggcggccagatcgacgagcggcggctaaggatcgccccgacgctgctgctggacgtcccgctcgactccgcgatgatgaaggaggagatcttcgggccgctgcttcccataatcacggtggacaagatcggcgagagcttcgctgtgatcaactccatgcccaagccgctggcagcttacctcttcagcaacgacgggcagctcaagcagcagttcgagaggaccgtctcggcgggagggatcatgttcaacgacaccggcatccacctgacaaacccgaacctgccgttcggaggagtcggggagagcggcatgggcgcctaccacggcgccttcagcttcgacgccttctcccacaggaaggccgtcctggaccgcagcttcctcggcgaggccagggccaggtacccgccgtacacgccggcgaagctcgccatcctcaggggcgtgctcaatggcagcccgcttgccacggttcaggcggctgcggggtgtacaggaggggcatcagctgactgactgactgaccccccttcatgcttattattaataataagcataaatattcaccgcatacacattgctgtgcttttattaaggttgttgtgagggcgaaaaatgtattgaccctttgcgtgtgcgcgtgcgtgtatagcaactattaataaaagaaaaaagtgatgttcatttcgtacagagtatactaaattaagatcacatcacgagttttaagc

SEQ ID NO: 21908 - DNA, 2489 bp, Zea Mays
atgcattatgcatagtgtattcaaacatgggcacatggcctataatactagcgggaacacaaaggccaactaactacgacgcgagaacggtctatcagtttcagagcccaagagtccaagaccaggtggtacgttaaccgtttgtctggcccaggtgcggcccttttcctgagtgtaatggcaggcagcattgagctgcaactgcaacagcttggaagcagtaagcacgcatcgccgccccccatctcccccgcaccgcgcacctctatggccgccggcgaaggcggaggtggggacatcggcgccgactcggagcggcgcctgcaaaaggctatggataagctctaccacttccccaagcccaagtcgagtagcaccggtggctccaagccctcttcgtcgacctcggctccaagctccgggagagcggtggggaaggcagcggcggaggcagcgaggaggttcggggtggtgcgcgggtcgcgactcccgcatcagatgttggccatggcagcgatctcgccgccaccgccgtgccgcccctgggaccgcgccgacctcatgcgtcgtctcgggtcattcaaagccatgacctggttcgccaagcccaaggttattagtcccgttaactgtgcaagaagaggatggactaacattgagccggatgttataacatgtgaagcttgtggggcacgactcctgttctccactccttcctcatggacaacacagcaagttgaaaaggctgctgctgttttcagcctgaagctggactctggacataaactactttgcccgtggattgataacatatgtgatgaatcacttgctttatttccaccaacacctcctcctgttttagttgggaactactatgagcttttgtcctctctgctgcgacttttagcactcccaagaatttcctgctcttctcttgagaccatgaaaaagaggaatccacagctagagcagttcctatcagaaccattctcttcatcagttgttctcaaagggggacttatgcttactgaggactctacaattaaggatttggatgatgcttttcaagatgctgacacatattatcaggcacttaagataataagtttgtgtggatgggaacccagactacttccttatgctgttgactgtggaactgagtttcactccgatgcaaactctacctctaaattggctcaaccagagcaatcaagttccatgaaacgtaaaagaagcacagatgagcctcatttgttggaaggtgatgccgatgatgttgatacatccaccataggggcaaatcatgaccagccaggagaaaattctgaaaagagcatatcaaacttagtagtgagcactgaacagaaacaagatggttcacattccaatgcagctaaggatactgaattggatgaagcttccaatgaaacacaaccagaaacaggttctccattaagaaaaagtataacaagcacatatgcagatgctgatcaacatggattggaacctagattttgctcagtccagggtacgaatgaagaaccttctggtggagtgaccctgacagagatgcatgcaaacaattccaggtcaactgaggtcagcacaatcacagaatcattagttaacagggaaaaagaaaaacaagggctgtatgacagaatgaatgagtttgatcctatcaagcagcaccggacgttctgcccttggacttcccctgattacggcgaacccttgcctggatggaggcttactctctcggcattacttgctggggacaagagatctgatggggacttgcaagtggatattcagaccagccttctcgatgaggaggatgaccctcttacctctgttaggaagcttttcatgacaccacctccgaaaaggcggaggatacagcaatctgaaaagagctgagaagcgaactggatccacatgttgggaaagctggggtcaaactcatacggttggacaatatcatggggcagatccagaatgccatatgaattgaatattggaactggaaatgtttacgctgcacatctgtgcgatgtacaaattcttgaggcagcagctgggaaaatgatttatgacatggttaattgttccaggacgatactgctgctgtagaagccattgttgtggtggttaaggaatgtagaagttgggttacctcttccccatttgaaaccacctgagcatatacaccgtgatttcgtagcttagtaatgttgtcaacttgttatattgcattctttatattgctgtacgatcacctgttaactgttaaaccctcggggaattttgattggcaagagcgaattcgtttgacgcctttgctggctgacttacctgtaataactgcttaaagatctgatcggcttgaaacgataggttctgccattcaatagcctacaatgaatcatttttgtaaacaggtctaccgtgcgtgtcttccagaaaaaaaaggataaacgtttgtgccg

SEQ ID NO: 21909 - DNA, 952 bp, Zea Mays
tattcccatgatgtcgggataaagtaagaaaagttgaacagccttttgaagaataatagcagtacagagacagtagagccaccaccagcaccacttgaagtggaagagcctttgcctgtggaaatagtactcctagaaagaacactacctgatggaagcacagaacaaattttattttcttcagccggagatgttgatgtatatgatctccaagccttatgcaataagaagttatttgacagagggagaagagaagaaacagctcattgggatggcacgagcaacctcagaccatgccttcaatgcaacgatttgggatgtccttgttgatccttcataccagggtcagggtcttggtaaagcactcatggagaaagtaattcgtactttgctccagcgagacatcaacaacattacactgtttgcggataacaaagttatagatttctacaagaacctggggttcgaagttgatcctcaaggcatcaagggcatgttctggtaccccagattttagcaccagcagccagatatatcgttcgaggggttgttgtacttgaagcatctccccgttctgaaagggtaattgacaggtcagggctccacgccctgatggatctcgcacttaatatttcatccttggtgagaagctgtaattttcttcaatgctaaaacgaccatgtgatcggctcaactctccgcacccctgttgtaaccataaccccaacaaaacacgctatttgtaatacccgtgtttcatacatgcgctctagactcttgccatctgtatgtaacgtacgctttcaaatttctacattcgaaatggaaaaaaaaactgtatccatcagttatccatatgcgcacaccatcagtttttactgtctcttggaaagaatttgctttccatcaacatccacttgctgttgctggaactgtaacttaagttgagtcg

SEQ ID NO: 21910 - DNA, 2567 bp, Zea Mays
cccctatttagctaatgtggtttgaatatacttcctacttttcaaattgttggaaatgttgatgctttgagctgctattacgctcacggggagcaaaatccaagtttccagagacggtgtttctggatgctggaacctgcatacgaacacattgtgctggtacaatatagagaggttgatgtggttagaaattattcatcacaactgtcaaatggcctcccagaacctctttcatccttgggatatccaaatgccatctgtggaaaccaataccacagctcctcttctggcgctagcgagtgtagtgagtcccatcagagctattctaatttgagttctgtaactgaagtaagttcctattccggtaacaaagagtacaccaaaaatgatggcggtttactgagcataccggaggttggacacacttgtctgcaacaaaatcggactgataatggtaactcgaaaaataaatctgggcttaatattgctttaaagaagatagctgagcagttaagtttgggtgaagatgatgatgactatattttctcaaatcaagctcattctgtgggaggcgacaaccaagtaaaacatattcaacaagaaggaacacagaaaggtttaagtaggaatatagcgccatcatgggaagatgtactgcagtccagttcaggtttaccaatttcatccatataccagcaatcggatgtcgagtatcagaaaaattcagaataccatccaccagaacgcctggacagcagtgatttacgcatacaacttgctgctgctaaaaagtttcttttaggaccagaagccaccgttgactcaccatctttgaactctgtgctgagaaatagagcgaactgtgtaactgatactatttcagcttatgacagtagatttggaagctctctgaacccagattggcaaacaaaaacagcattaacatttcaaagcaattctcagggctctgaaataacggagttgtttgaccatggtcattttgaacactactccagagaagatacaacattttctttaggacagacaaacaagtttaatattcgtgagatctctccagaatgggcattttcatatgagatcaccaaggtcatcattactggagattttctatgtaatccatcgaatttgggttgggctgtgatgtttggtgatagtgaggtacctgctaaagtagtccagccaggtgttcttctctgccacacgccactgcactgcagtggaaatctcagaatctgcattacttcgggaaacagagaagtttgcagtgaattcaaagactttgagttccgctcaaaaccctcttctagtttcacagacatcgcaccatcttctagacatctgaaatccagtgaagagttactaattcttgcaaaatttgctagaatgcttttgtctgggaatggaaaccctgaagttccagatggtgatccccaatctggacagtgtccaaaacttaagatggatgaagggctctgggataggttgattgaagaactcaaagtagggtgtgaaagtccattaagctcggttgattggattttggaggaactgctgaaaagtaaattacaaaagtggttatctgtgaagctcagaggattcaatggaacggattctatatccaagcatgaccagggtattatacacttaatctctgccctaggctatgagtgggcattgtcttcagttctcagtgttggtgttggtctaaattttcgtgattcaaatggatggactgctcttcattgggctgcttattttggaagctgttcattcagaagaaatacaaaggttgcaaaggtcgcaacatttctcaacatgagaagaaatgcagttaaaatacaggctcatgtaagaggccatcaagtgagaaagaaatacagaacaattgtaagcactgtcagtgtgctagagaaagtaatacttaggtggcgccgtaaaggtcatggcctccgtggcttccgagctgagcagcaatcaatggtcgaagcaatagaggaagatgatgaggaggatgatgacttcgatgatgacgaagcagtcaagatctttcgccggcagaaggtcgatcaagctgtaaaggaggctgtgtcaagagtgttgtccatggtagactctacagaagcgaggatgcaataccggcgaatgcttgaggaatttcgccaggcaactaattggaaggatcaaatgaagtaacatcaatatttgacagtgatttagagttattacttattagggatcaacgacttcatgtaaggagcatttatgtctcgagatctgccagcacccatcaatgacataaattaagtatttagggaatgtgttccagttgctactaattggccgtctaattgtacagtgttagcgaaatcgaaagtagattatttctgccacgatgtattttcactttctgtatttaggtatattttgacaatggcagatcaattaagtatattttttatgggttgttggcttcgccagtttggaaaaaatcagtttctcaacaatggcagaacttcataatgctgttaaaaaaaagacagcatgag

SEQ ID NO: 21911 - DNA, 1512 bp, Zea Mays
atagtaggactagagagtagagaggccccgcccccaggaccgaccgaccagggagtccagcggcgcacatcgcggcgacccccaccccaccgagcgcccgcggccgcgatggagagaggcgatggcgggagcgggaggccgccggccgagaggaaggcggcgtggagggacggcgccgtcacctacttccacctcctcttctacatcgccatctccggcggccagatcttcttcaacaagatatattacttcagtcattccaattggaggaatgtttgcaatgacactttggctagggaacagtgcgtacctctacatatctgtcgcatttgcacagatgttgaaggcaataatgcctgtagccgtgtttcttctgggagcagcatttggcctggaagaaatgagctataaaatgctttctatcatgtctgtcatcagtgttggagttattgtggcttctgttggtgaaattacaatcagttgggttggagtggtttaccagatgggtggagttgttgcggaagccctaagacttatcttcattgagatatttctgaagaaaaagggtgtcaagctcaacttgatatccatgatgtactatgttagcccttgcagtgctgtatgcctctttattccctggctgttcttagagaagccaaagatggatgatagtatttcatggaacttcccaccattcacattgttcttaaactgcctgtgcacctttgtactcaatatgtcggttttccttgtcatatcaaggactagtgcgctgacggctcgagttactggtgtcgtgagggattggtccgtagttttgctgtcagctgccatctttgctgatacacagcttaccttcataaacataattggttatgccatagccatagctggtgttgttgcgtataacaaccacaagctcaaggtaaaaccccaagcgaacccacagcaaggcgacgagaacaaggtcatctcaggaagcactcaagatgtggtgttatcagtgagctcagcaaaagaaacttcgtagcaccaaaagtagcacgattttgaaacaattttatttttcacaaaggagaattgtgctctctttcgttgggttggccagctctccttggactatacattctttttccttcccctgggtctggagggaagatattttgtacaatgatatgctcaagatgatgatacgctgccttcactgtcgtaatattgctgctcaaaaaagtgggagcacgccacagatggaaattaggccatgtaaagttgtgttttctcttgaactggtgtagcgactcatcaggtgctccaaaaatggcagccctgaatctttgtacatggttgcttggtggtggtcatgagatgtgatgtaaaacgatatatgtaagcctggcagatcaaagaattcaagatacgcaagtttctgtgtttttgaatccagcatttctcttgcgctgatagtttgcttgagatattgattctgcaatatatgtttttaaactatctgat

SEQ ID NO: 21912 - DNA, 4767 bp, Zea Mays
gccctctcctgtcatccattgcattttcctccccctctctctcgcgcgggggtcccgagtcccgactcgcccctccagatccaccaccaccacctcttctcctccagatccaccaccccatcctctccgcagctacagccaggtggagctcggcttagccgtcgacgtggctgggcacgccgggacgggaggatgctgaccaagttcgagacgaagagcaaccgggtgaaggggctgagtttccacccgcgtcggccatggatcctggcgagtctccacagcggggtgatccagatgtgggactaccgcatgggcaccctcctcgaccgcttcgacgagcacgacgggccggttcgcggcgtccacttccacgccactcagcctctcttcgtctccggaggtgatgattataagattaaggtctggaattacaagacgcaccgctgcctcttcacacttcatgggcatcttgactacattcgcaccgtgcaattccatcatgagtacccatggattgtaagtgctagtgacgatcagacaatccggatctggaactggcagtcacgcacctgtgtggctgtgctgactgggcataaccattatgtcatgtgtgcatctttccatcccaaagaagacctagttgtatcggcatcacttgatcagactgtgcgtgtttgggatattggagctctaaggaagaagacagtgtcacctgcggatgacatcctccgtctcacccagatgaacacagatctttttggaggtgttgatgctgtagtgaaatatgtcctcgaaggccatgaccgtggggtcaactgggcctcgtttcatcccactttgccgctcattgtttctggggcagatgaccggcaggtgaagctatggagaatgaacggcttgggaagttgatactttaaggggtcacgtgaataatgtgtcctgtgtgatgttccatgcgaagcaagacatcattgtgtctaactcagaagacaaaagcattcgcatttgggatgccacaaagagaactggtatccagacatttagacgggagcacgaccgtttctggattcttgctgctcaccctgaaatgaaccttcttgctgctggccatgacagtggcatgattgtgttcaaattggagagggaacgcccggccttctgcgttagtggtgacactgttttctatgtgaaagatcgatttctccgtttctttgagtactccacccagaaggaagttcaagtggctccaataagaagacctggatcggtcagcttgaaccagtcacccaggatgctgtcctacagcccaaccgagaatgctgtcttgatttgctctgatgctgacgggggttcatatgaactctacattgttcccaaggattctgctggcaggtctgattacttacaagaggcaaagaaaggggcgggtagttctgctgtttttgtagcgcgtaacaggtttgcagtccttgagaagagtagcaatcaagttttggtgaagaatcttaagaatgaaattgtgaagaaaagcccccttcccattgcgactgatgcaatatattatgctgggaccggtaacctgctttgcaaagctgaagatcgggtggccatctttgatcttcagcaaaggttagttcttggtgagcttcagacacctgctatcaaatacgttgtttggtccagtgatatggaatccgttgcactgctgagcaagcatgcagtggttatagctaccaagaagcttgtccataggtgcacactacatgaaaccatccgtgtgaaaagtggtgcctgggatgagaatggtgtgttcatttacactacactgaaccatatgaagtactgtcttcccaatggagacagtgggatcataaaaaccattgatgttcctatttacataacgagggttgttgggaacaatattttctgcttagatcgtgatgggaagaacaagctggttgcagttgatgcatcggagtacattttcaagcttgcccttctccgaaagcgctatgaccatgttatgagtatgattaagaactcccagttgtgtgggcaagctgtgatttcttatttacaacagaaaggtttcccagaagttgctctacactttgtgaaggatgagaagaccagatttaacttagctcttgagagtggaaacattcaaattgcagttgcttctgcgaaggagattgatgacaaggatcactggtacaagttgggaattgaggccctgaggcagggaaatgttggtatagtggaatatgcttaccaacgaacaaagaattttgagaggcttgcttttctgtatcttattaccggttacttggacaaggtgggcttcatgtgcaaaattgctggacagaacaacaatttgatgggacagttccacaatgcgttgtatcttggggatgccaagaagcgtgttgagatcttggagaatgctgggcagctgcctcttgcttatgttaccgctgccactcatgggctcacagaatttgctgagaggattgctgctgaattaggcgagaatgttccttctctacctgaaggaaaacccaaatcactactgatcccccctgcacctctcacagcctgtggtgattggccattgctgagggtaatgcgcggtatttttgaaggtggattggatgctactggaagggcggatcttgaggaagatgatgaagctgctggtgctgattggggtgatgaggagttggatattgttgatgcaagtgaggttgtggccaatggtgatggttttgatgtagaagagggtgaaccaaatgaggagggtggtgaggaaggtggctgggacctggaagatctggaacttccgcctgaaactgagactccaaaagctgttggcaatgctcgttctgctttatttgttgctcctacaccaggtattcctgtcagccaaatttggactcagagatcttctctggctggggagcaagcggctgcagggaactttgacacagcaatgaggttgcttagccgccagttgggtatcaagaactttgttccactaatgcccttgtttcttgatctgcacatgggcagtcatacatatttgcgtgggcttgctgccgctcctgttatatcagttgcagtagagaaaggttggaatgagtccgcaagtcctaatgtgaggggccctcctgcgcttgttttcagcttctcacggatggaagacagactcaaggctgcctacaaagccacaactgagggcaagttcccagaagcactgaggcagttccttagcatcttacataccattccagttatcgtggtggactcacggagagaagttgatgaggtgaaggagttaatcgagatagtgagggagtatgtccttggtctgaggatggaactcaagagaaaggaactgagggatgatgtgacccgtcaacaggagttggctgcttacttcacaaactgcaagcttcagagagttcatatgaggcttgtgctcgctagtgccatggctctttgcttcaagcagaaaaactatgcaactgcggcacactttgctaggatgcttcttgagaacagccctcaggaggcccaagcaaagaaggcccgacaggtgctgcaagcttgccatgacaaggacgattcccaccaactgaactatgacttcagaaatccattcgttgtttgtggcgctacgtatgttcctatctatcgtggccaaaaggatgtttcgtgcccatactgtggatcccgatttgttccttccatcgaaggacagctttgtaccatatgcgagcttgctgcggttggggcagatgcatcaggcctcctctgctctcctacacagtcgagataagcgatggtagttagaggtcccctatattctttctagcgtctcaagttccaagatttcatcatatatatgttaccagagagtttactgattgtaaggaataagtattatacatgctgttgagtttttcttttcttttttgttctgttaccataatttttgtttgccttaggggctgctgtcatcacctgccgtatggtttagatttctgatcgacttccaatatgctggaaattgatgtatgagatgtttctttcgttcttcaaaaatcttttttgggatgcctcagctttgcttttagtctggaggtgatctctgctcgctaggcgggctaatgtgacgtcaaaattcctcaagcctgaaagagtttacatgctagagtgccaatctcagatctcttagtacacacgaagagacatgggaattagtggtgagagttgacaagagttaaggtgagaaattgactttcagtgttaggacttgttcagttatttccattccatgtgggtcggggtggattgagatggattaggatgtattttgacttgtatgaatttaaactaacccaatatcattcaatccatatggataaacggtgaatcgataagtcttcaatctcttgtttgattcatgagagggaaataagagaggcagttgaagatggatttacattcatggtttgtgtttggtgtgtgggattaaagcatgaaattagtaaacaataaaacatgataaacgatgaggttatctataccactatataatccatcactttaaactttttaaaaaacacccaaccaaattatctacatatttacaaccactactaaattcatcaaataaataacactcagatgtaacacaaactcaatccatcattaaaaactacggtttaaatcactgaataattttttctcttacttaaatctaat

SEQ ID NO: 21913 - DNA, 840 bp, Zea Mays
ctgtgactcagcaaagtggcaagatgcaaggcttgccgagctgcctagccattataatgcttggtccttgaattgaagtcaattgatttccgatttaataaggcacagtttgtttgagcttctgctgtcgtcttcacatattttaatttttaatgcatgtggggattactgaaattgttgtgcagacatgtgttttgagattgtgtgctatttgtgcctgattttattgcacaggcagggtggtctatctcaaagatttttgaaagttgtttcttattatggtctcacgactctgccatataaactggtctgtaagcttgttggtgccaatctcagaaggatgctctggaaccttacatgagaaagagaacagttgaacttcactagggtaagcaccatcaagattacgtggatggcttgaataagtagctggctaccagccctctgtatgtatatacaccctggacgatctgataaaagaagcccacaacaatggtctcgaatcatcactttttctgggaatcgatgcaaccagaaggtggtggcttacctgagggaggtgtgctatagcagattgaaaaggattttggcttgtttactaattttagggaagagtttattcgttcagccttacaactattggggtctggttgggtttggcttgcttgtaagtttctttctattttctttgaagtacagacaccaccggttcaaactaccgatttcctgattgctctttctaaagctaatattctgctggatatttgttgcagtgaagagaaataagagaaagctttcagtagttcatacacgaaacattatctacccacttgcttttgg

SEQ ID NO: 21914 - DNA, 1390 bp, Zea Mays
aggtttttaaggaggatctatggttatctgctttccccgttggtaccgagtgggaaaacatcgataagataaaggagttcaactggagctttgaaaatgtagaggaagccttagaagaaggaggagagcttcatgggaagaccctttatatgtttggaagcaccgagccccagctattgtatgttaatggtgaatcaaagatagtgcttatcccaattgtcgtcgctgtagactgtcctttcccaccttcagacaaaattggcataaattccgtccaaagggaaaatgaggaaatagtgccaatgaaggcgatgaagatggcatgggtgccttatgttccccttgaggaccggctgagcaggattgacattttcaaaacaaaaatattcacgctcggatgcacacagcgaaggtctgcactgaagcatctcaaaattgagagagtcaagaagtttgactactgcatgccttattatatgccactgcaacctcttgaagatgaagaaaacacaactatcaatttcttatatcctctggaacccccgatagtagatgagttcgactgggaaatggatgattacgaggattttgcagatcagaaagtccaagaaggtagcctgcccgagggcgagaaagaaaaattcaaggagttcctgaaggagaaggttagagaaaggaagagagagctgagacaggctaaagaagccaggaagaaagctattgatgatatggatcctgcgatgaaagaggcattcgagaatatcaaattttacaaattttatcctgtgaaaaccccagacacgcctgatgtaaacaatgtaaaggctaggtacatcaacagatactacaggaatgcccattatctgaagtaaaggctctcctgatctcacgtgcttgaggacgagcttgtcatttgagttggtgtaaaaaaattttgaaacccgggggagaaaagtttggtgacatctttggatggtcttactgttgtactgtactgtactagaattgccctcagactttcgctgtccggtgcatacagtcagaaaggttcaaggtagttttgagactaaccaaatcatgatggaacaatttgttcctttgtcatcatggttactgcacaccctgatggttatgctgtgactttttttaacatctgctatgagcaagctatgaattatgctgtaatctgtctggtgaagcgaccaggtacagtagggttcagactggttaacaatgggataacctggcttctaggcctgtttgtttttttccaattaataatcggtcttttgatctaatttaaattggtttctactccctttgccctacaatgaatgttgtttgacttttttggcataagttcgactgactcgtcttattcaaaatattt

SEQ ID NO: 21915 - DNA, 2454 bp, Zea Mays
  misc_feature (1)..(1): n is a, c, g, or t
ntcgtcgccgacccctcctccctccccgcgtcccccgacaagccatccgcggccatgatcaccgcgctggacctctaccacgtgctgacggcggtggtgccgctgtacgtggccatgacgctggcgtacggctccgtccgctggtggcgcatcttcacgccggaccagtgctccgggatcaaccgcttcgtggcgctcttcgccgtgccgctcctctccttccacttcatctccaccaacgaccccttcgccatgaacctgcgcttcctggccgccgacacgctgcagaaggtggccgtcctcgcgctgctggcgctggcctcccgcggcctctcctccccgcgcgcgctcgggctcgactggagcatcacgctcttctccctctccacgctccccaacacgctcgtcatgggcatcccgctgctgcgaggcatgtacggcgcgtcgtcggccggcacgctcatggtccaggtcgtcgtcctccagtgcatcatctggtacacgctcatgctcttcctcttcgagtaccgcgccgcgcgcgcgctcgtcctcgaccagttccccgacggcgccgccgcgtccatcgtctccttccgcgtcgactccgacgtcgtctcgctcgccaggggggacgtcgagctcgaggccgagcccgacggcgtcgccggcgccggcgccgtctcctcccgcggcggggacgccgggcgggtgcgcgtcaccgtgcgcaagtccaccagctcgcgctccgaggccgcgtgctcgcactcgcactcccagaccatgcagccccgtgtgtccaacctctccggcgtggagatctactcgctgcagtcgtcgcgcaaccccaccccgcgcgggtccagcttcaaccacgccgacttcttcaacatcgtcggcgccgccgccaagggaggcggaggagcggcgggggacgaggagaagggcgcatgcggcggcggcggcggaggacactcgccgcagccgcaggccgtcgccgtgccggccaagaggaaggacctgcacatgctcgtctggagctccagcgcctcgcccgtgtccgagcgcgccgccgtgcacgtcttcggcgccggcggcgctgaccatgccgacgtcctcgccaaaggttggtaacaatgcgtgatcttttgcttgtatttcctaaccaaaatgttgtctgctgcatttttattgtcaccaatgggtgtgcacaacacaagcaggagcccaggcctacgacgagtacgggcgcgacgactacagcagcaggacgaagaacgggagcggcggcgcggacaagggcgggccgacgctgtcgaagctggggtccaactcgacggcgcagctgtaccccaaggacgacggcgaggggagggcggcggcggtggcgatgccgccggcgagcgtgatgacgcggctcatcctcatcatggtgtggaggaagctgatccggaaccccaacacctactccagcctcatcggcgtcgtctggtccctggtctcctacaggtggggcatcgagatgccagcgatcatcgcccggtcgatttcgatcctgtcggacgcgggtctcgggatggccatgttcagcctaggcctgttcatggcgctgcagccgaggatcatcgcgtgcgggaacaagctggcggccatcgcgatgggcgtccggttcgtcgcaggccccgcggtcatggccgccgcctccatcgccgtcggtctgcgcggcgtcctcctccacatcgccatcgtccaggctgctctgcctcaggggatcgtgccgttcgtgttcgccaaggagtacggcgttcatcccgacatcctgagcacagcgtatggtccaataacatcgcatggtttcatcacttgccatagttaacgggaaaaaaaagcagaagcaatcgatgacgacgcactgaattcactatgattcattactaatgatggtgtgttcatgcagtgcagtcaaagaaccactaataagcactgatctaggacagcatcagcatgattgattgcttgttttctcctgacaatctgcatttcttactacacagtgtgccttcactcatccatccagatgatcatacaacactactgatgcatcttttttttttgattctgctgcagcgtgatcttcgggatgctcatcgctctgcccatcaccctggtctactacatcttgctggggctgtgagcctctctcgctcgcttcttcagcgtgcggaaggcgccatgctgtggtgtatcggccccacatgaaatttctgatgagcattagcgattactattagcttagcgaagaatgatgagatggtgtcggcctgtcgggactgggggagtcagaccagacccccctcgaacaaaagtttcttttggcttctgtccgtcagaaacaaaagttttggcttttggcatgcgcactcgaagcacagcagcagcagcagcatcatccatgag

SEQ ID NO: 21916 - DNA, 362 bp, Zea Mays
gagatcagagttcaacaggtactgggagttgctacaaaaatctgaagaaagatcttcacatccctgctgtcctccacttatgtgcacaaactgagatagacttggggtgggcaatatggggctcgaggttcagtccccctctgcagaaaaatatcagttttgcacctgtttgagcctaccacagtagagtttttgtctgtctctactcctgtctgtattcagtggattggttggatatttgtggacaatgagcccttatctgctctactctctatttgaataactggacaaagcagatatttgagctaagtcgtggctggtgtggatcttgagcatgaaagccacgtgtgttagtccttgtt

SEQ ID NO: 21917 - DNA, 2778 bp, Zea Mays
agagagggagggagtagaaaactcttgcaaagaaacctgcaactctgcaagcaaccccacaaggcagccgttctccactctccatctcgaggatcaaaagttcaaaacaacagagaccgaaactcgccatccaccagacagaaaaagcttccagctcccctcgccgaaactcgccgccgtctcctcgccttctgcctcgccaccggtcccgtcgcggtttcacacgcatccgtccggtggacggagcaggctaggttgccggctgcccccggtcgtccctccttcgccgtcgagctggaggacacgcgtagcaacgccgggttcttctgcggcgagctgtggtgtggcctcatggagcccaagggcgagttggctcagaagcctattgaagaagcaatcaacagcttggaaattgatgctagcacgaaggcaagcaatgtcaacttgcctgctaagaaagacgcaagttcttcagatgcagtatcttgcatttcctccggcgatgcagctagtactgccaaggaaagtgaaatgaaccgagaaacttcttttggggaccaagggatgtattactatgggtattattatcctggttcatacggaggatgggatgagaatggctactttgttggatataatggcgtagaggtgcacccagcagtggttcaaactgacaatggttcatatctgtgtcatcttccgggatatgaaaatggatatgcttcttatagtcaggttgttcctggaggcattgctagtgtggatggtcaatatgtcagcaaagaaccatattattccactgcacttccaattcaggatcctaggacacctggcatttttgctcagccaattgcttacagaactgaactagcatctgcatactcatgggacccttctttcgttcttctggatggggttcagggacatccagttggtgtgcatcaaacaaattatgctgcaagaccaaaatattcttttaataagcatgttattccttcttcgaaagccacccgcagtgcaaaatccgcagcagatactgtcaaaggctcatcatcagctctagaaactgtaacaaatgctgtcaatagcagcccaccatcaaagagtgcaaataagacacctggtgcttccataacaaaaggatatcttccatatagcaagtctgtgatgcacactaataaccaagaaaaaaacagtgtttatcaaagcaaaggcatcaatgtgaaagaaagtggcagaagctggaacagccgagagaagcttgggagaagtaagctaaatggacagggtgattctgaatctaatgagaacaaccataccgataacctgaaacatagtttgagccatcggtctgatgttgttggattgtcaagtgcaggggatgccaatgctagcataccttcacctgttgcaataagcaaaaatgcatgcaatctttcagatttcgttacaaaggttgcacaggaaaggatagcagaaaaaggaaccaaatgtcctgttttccttttcttctcagttaatgcaagtggtcagttctgtggcgtggctgagatggttggtccagtagatttcaacaggaacatgaacttctggcaacaggacaagtggaatggtttcttctcggtaaaatggcacattatcaaggatgttcccaatccacaatttcgccatataattttggagaataatgagaataaacctgtgacaaacagcagggacacacaagaggtcaatttttcacaaggtacagagatgttgaacattttcaagaacttcacatgtaaaacatcaatactggatgactttgacttctatgaaaatcggcagaaagtaatgcaggacagaagaggcaagctgcttactacatcgtttgatcacccattgccaaaagctgaaaaatctccagaaattaaaagccaaacacaattgataagtggcccagaagttggtagagccaagagtgatgaggggcagggcaacaatgttgggatggtacttgatacaaccaagaaaaatgaggagcagagcagcaatgttccagaaatactcgatgcagcctgtagtaacaaggagcaacccaacaaaattgcaatagaaggatgatgcctcggctagttggtctgggaaaacgagatagcctctggaactgacttcaacctgaaatgataagtttgatgtgtgcaatatcaagaaaccaccattggtcatgggttctcttccattatctcatggaagcggggaaagggaaaaaatgaagcaaaggagctgtcttcccacgagaattgttcgatgactgggaaaaaaggttctaggactcatttaggttgaggaccctagtgctaaggcattagagcgccctccatgtctattttttccccatcttggagggtcctttcttttgtcgtgttgtgtctttttttctcttctttttttctattatactgcggctgatgtccaaagaagccagtctgccttatgggtgggtgtgctttaagggaatgtttgttgctttgtgggttgtcctctaggatgtggtatgttttgtttgttttctttaatctgtgcacttgttctagagactgacatagaagaaaagagaaaaaaagattgtgagggattaggaattaattacagtaacattatcttatgtctctgtttcttccattatcaagaaaagggaacaaaaaggattttaaaagctgttgatgtgtacttcgccgataccatttgtcttgcagcctgctacgagccttccgttttcgcttggttctttccggc

SEQ ID NO: 21918 - DNA, 1152 bp, Zea Mays
aaagcgccggcgcctcttctcgcgtggcctcccgaaggttctaggctcgattgaacaaattggagcggcactacactcctccacgcctccacctccagcctcccactgatctggcctctctcgagtcaatatgagaaggggctacagttacagtccttcaccaccaaggggctacaggagaagggcgcgcagtccaagtcctcatgatcattatggtggtcgtggtagggatctcccaaccagtcttctggtcaggaatctccgtcgggactgcaggccagaagacctccgtcgcccatttggacagtttggtcgagttaaagatatatatcttccaagagattattacactggggatccccgagggtttgggtttgtccagtattatgatcctgctgatgctgctgatgcgaagtactatatggatgggcaggtagttcttggtaggcaaataacagttgtttttgcagaagagaacagaaagaagcctcaagagatgagagctagggacagagtcaggggtcattcttatgatgacaggaggtattctcgctctaggtcgcctcgttattataggggccgctctccttcacgcagccaaagctactcgaggtctccacctcagaatccaagacacagacttagagagaggtcctactccggctcacctgtggacagcagatcaagaagtgggagcccttatgaggatggatatcgcaaatcatcacggagagagaggtctctttctgtcagcggatgaagcagttttacggtctagagctattgctgtgaatctgcgcatggtggcctacttgctatgtctttctgaaccatatatgttctgtctagattatcattcccagtaccagagaagtatcgtgagactgtttgctgtactttctagtcttgaggatacagaagggggtcaccgattctctcagtagatggactattgaccactagctacgccagttccactgctttgtgtatttacaggcagctttgcggtttgaataaaattgtttgcatcgtgaaagctaattggtaaaaagactgaatcatgaaacgaacgttttgcatccctgttccctgatggcatttggatacgattttttgttctttcgacgaacaatttggcaaatctgcatctta

SEQ ID NO: 21919 - DNA, 172 bp, Zea Mays
taaggaaaatgggagttcaaacccctatgctcctgttcatttcagaaaactacgaaaatatggcttctttgtagcattgattgaaatggtctaagtgtttctgcagaataaacatatactcatgtgtatatttgaatattcaggagccatacgtttggaacatacaggatca

SEQ ID NO: 21920 - DNA, 2459 bp, Zea Mays
atcttcgttctgagctctctctctctagtctctcccgtccctacccaccaaatctcgcagtcgcagcaggtccaggtgctcccgaggaatccattcccaatttgcgttcccactcccaccaccgcttcttcccgtatcccttgtcctccctaatttcctctcacaaaaagcgggtgcggcgtcctgccactcacctcggtctcggggggcgccgtgcggcgggcgcccgtgctgctggtttcgctccaggggagaaggggcagagggagtagagcaggttaggtccgtttgcgttttcttttgcgggtttgtaggtcaaaagctcggcgagcactttccgctccacctcctcacgctcggaatcaaatcgatgccccccctgatttggttcctggtatcggtgcatgagcttgctccaagagatctcccttttggttcggcgtcaggggttctgtgaggtcacgcggcttcttcctcttggcgctcctcacatgtccgggcgcttcgatctctgcccactgcgcgagtgattctgctgctgcagcagctgttaggtgcgcgcggtccgttatggggtgaaccgaagcgttcctcgcagggctgtgggtttattacgccgcctgtttgcttccccgctccatgtccttgtgcccatgcttctttgcttttgtcacgcctgaaccgtgtcttcttgtagtatctgaggcttggcagttggcaagtacaaactagcaacttgcttaggtataaagtataaaccagtgtctggtgcagagcccaaaggggtcacgaatcgttgatgcatagatctgcttctggctgagataaggctctaagttcgctctgttgatggggctaccatgagccacgggaacgggatgttgaattctgtcaaggtggagaggtggccagcagcagtcgctgcaaatggccagcctaggccgatggatgtgctccacgacggcagctcgccgccgttccttaccaagacgtatgacatggttgatgacccaaccacgaacgccgttgtgtcatggagtgccgccaacaatagctttgtagtttgggatcctcatatctttgggacggtgctgctgccaaggtacttcaagcacaacaacttctccagctttgttcggcagctcaatacttatggcttcagaaaggtggatcctgacagatgggaatttgctaatgaggagtttctgagaggacactttggatatgaagaagagattgatcagctgaagagggataaacagctcttgatggctgaggtagtgaagctgaggcaggagcaccaaaatactagatcagatctacaggccatggaagagaaattacaagataccgagcagaagcagcagcagatgatggcattcatggcacgcgtcatgcagaaccctgatttcatgcgtcagctgatctcccagcgggagatgaggaaggagctcgaggatgccatctcgaagaagagaaggcgccgcattgaccagggacatgaagctggtagcatgggcactggttctagcctggagcaagggccacagggagtgtttgaaccgcaggagccggtggaatcactcgccaacggtgtgccatctgatctggagagttcgtctgttgaggcgaagggattggaggttcgacagggtgtttcttcaggtggttctgagcatctgaatggcaggccaagcggagagttaaatgatgatttctgggaggaccttctgcacgaggggggacttggtgcagatgcaggcaatgctgttggtcaggatgatatgaacatggacatggacccagatgttagcctgcctcaactgaaacaacatggacccagacattagccgctcttgtgctatcacaatggctgtgactctgtgagtatctttacagttatgctcgttatacccctgtggtgtacctgtttcgatcgtcttcgaccaaatgtcacgtcgactgcagtctccagttgttaatacagtctgttcagcacgctgatttaagtatttgggtcaagatgttcatataatcctgtggtatccagagatattatagtttgttttcgtaactgtttgcgcagagaccatgctatgttgcctgcaggctatcagtgtatttgttctaacagatcgcaacgctggtacaacgcagtgacctgccagactgggccactatgagattgtagggaaagaccagatagcttgtgtatgtaaaagctgatccatagtagcctatcatgtgcaacgctattgccctttgggatttggcatttcactgtatataacatatcatcgccgtattgccgcatccatcgttgtcttggtttacccatttaagtttgttgtcttcccttttagcttacacatgtaccggctcggtcagtgcccgaggatctatttgcgtgcaaaagtgttcttttttcaatttctgaaatctagaggcttctgtcttct

SEQ ID NO: 21921 - DNA, 5220 bp, Zea Mays
caacgggcaaggcacaatacactgcgccgttcgccactgttcctcccagtcccagtctcagtccttcttcaagcagcagacagggcgcggagaggagggactagggagggttctagaaccttctagaagtgaacactccttgccgggggcagctcctgttgctctgcgccttctgcagcgtctttgttccgccactcctgttcctgagctcctccactccactcaagtgctctcagaaggcggccgcggcggcagacgatagagagcaccattcgccgcctcaccatcctcctgctcgccgcctccgcctcctccgccccgctcagaatggtgagggatcacgccgcgctccgccgaactccggcgaaggcttccgcctcggaagccggcaacgacgagaactcgccgggcgtcgtcccagatgtcgcggccgttggcgtcgccgtcgccgccacggaccccggccgccctccgctgctcgctatccagccgccggcgtccggtctgaagcggaagcccgagtcgccggcgccgacgccgtccaagctcccgttccggacccccgagaaggccgccacgcggagccggttcggctgggtcccgccccgcgccgacgaggccccaccgcgggtcggcgtgggggcaaccccgcactgcgcgatgaccacgccccgtgcgcatcggggcaaggcggtgacggtggcgccggcggcctccgagggcgggtccacgcacagcacgcccaccaagagcgtcaccaagccggcgcacagcattggggcgagcgggtcgaggccgcccatgagcggtggcgggcccaggggggcagggtttggcctggggttcaccatggcggggaggggaccgccgacgtcacttgggccgccgacggtggtgaattccgtggaggtgcctcatttcgagctccgagaggacccctccttttggatggacaacaatgtgcaggtcgtcatccgtgtgcgcccgctaaataataacgaaaagaacctgcacagttattaccgatgcttgaaacaagaaagtgcgcagactatcacttggattgggcagcccgaaactcgttttacatttgaccatgttgcttgtgaagcagtggatcaggaggtgctcttcagagttgctggtttaccaatggttgagaactgtatggctggatacaacagctgtgtgtttgcttatggacagaccggaagcggaaaaacatatacaatgcttggtgaaataagcgatctggaagtaaggcctagtccagaccgagggatgacaccacgcatttttgagttcttatttgccagaattaaagcggaagaagagagcaggagagatgagaagctcaaatacagttgcaagtgttctttcctggagatatataatgaacaaattacagatcttcttgatccttctgccacaaatctcccactccgagaagatataaggaatggagtgtacgtcgaaaatttgactgaattcgaagttggctgtgccagtgacataataaaactcctgatgcagggttctgcaaatagaagagtggctgctacaaatatgaaccgtgagagtagccgctcccacagtgttttcacctgtatcattgagagtaggtgggagaaggattcagcatccaacttacggtttgcaagattaaatctggttgatcttgctgggtctgaaaggcagaggacatctggagcagaaggtgagcggctgaaggaagctgttaatattaacaaatcgttatcaacacttggccttgtgataatgagtttagttgatctagcgcatggcaaacaaagacacattccatatagggactcaagattgacattccttctccaagattcacttggagggaactcaaaaactatgatcattgcaaatgtcagcccttcagtatgttctgctaacgaaacactcagcaccctgaagtttgctcagcgtgcaaggctcattcagaacaatgcggttgttaatgaagacgcttcaggagatgtgctagctttacaacatcagatacgtctcctaaaggaggagcttgctgtcctcaagcgtcaacatgtcactagatctttatccttctcagctgatgtttttggaggtgatgttgatgatggtagtgaaaacatgagtgtggatgacaagaatgataataaagcccataacggacactttttgaaagatatacgattttcaaataagcaggtgaggtcactggaagaagcacttgccggagcattacggagagaatcaactgcagaaaatactataaaggaacttgaacttcaaattgagcagttgaatgaattggttcgacaaagagaggatgacacaagatcggctaagatgatgcttaagtttcgggatgataagattcatagaatggaggttcttgtgaacagtaaattgccagcacaatcatatctactggaggaaaacaaaaccttatcacaagaagttgaacttcttagggaaagagttgataaaaatccagaagtaactcgttttgcactagaaaatattcgtctctcaagccaactgaagaggtcccagctcttcttcaacgaaggggagagggagcttctattgaatgaaatttctgagcttcgaaatcaggtttcacaaatacttgaacagaggacagaaaccgagcaacaaaataccttttctgacaaaactaagttgaaaaggaccagccaagaagtagaaacatgtagaagcaaccgtcaagtttgcttagaatcgaacatagcactaacaagggaaatagctgatcttgtggaagagaaaacagcccatgcggaagctgaggaaaaaccagctggtttaggtgacaaactgcaagaagcaaacatacatatcctccaatcgtgtaagcattgtgaggcaatggaaagagaattgaacgagtcaagatctcttattgaagctcttgaatcacagcagattatattgataaacgaaatagctgaacttaagaaggggtgtgtcgaaatctcaaggttgaacagtgaacttgacctccaccataggcaggattacttgaccaaagaggagcccaaagcggaacttcttaagtgtttcggtaaagaagattcacctttgcagaggaagtttaaaagaatgcaagcttcacttgaaaaggcacggaacctaaatacaaggtaccaaatagatcaggcatcacactgttttgctgagaaagaaatggatgaagttcgtaaacaggttgaggttgaaacagctaaggtgattcaatgcttagaagaagatctgatatcagtccaacagcaactaaatgcaagcaacaaaaatgacttgttagccaaacaaagcataaatgaacttcaactagaaatcaagcagttgaatgataagttacttgaggtgttgaaagagaacgaaatattttcttctgtgaccaaggaaaaagaaaaggaaattgaactattgtccaatgactggaacagattagctgccgacattggaaaatgtcttgtggatggaaatgcagctttaggtgaagcttctgatcaggttgcctttatttccaaatctttatctcaaagaaaatggatcgagaaacaagttcgaaagctgtgtagtggtatatctgaaagagatgagctactcgaagagcttcagaacaggttgaaagaggcagatgatataagacgtgacttagacttgaaattaaggtccttaagaggagcaatgcaggttgtaaatgaagagcatcagcaggaaaaatgtgatcaagaaaaagaaatatattttctaagatcacaaatatctgaacaaggacatgtaaacaatcaccaactagaagaaattcacagaataaacctattgttggatgaatcaattgagacttttgtacagaaggaggttctgcaacagacctgtgtttctttacaaaaggcaatgggagaagagattcatcgtctggagtcacaattagaccagtcaaagatacattttgctcatttattgaatcagactcaggaaaaggaacagcttattgggaagcttaaaaatgaagagttaaatgttttgttaagactgatgtcagaagttctaaagacaaacagtactgtacgtgagcttcgaattggattcaatacattgcagtcaagcctttatatgagccctgaagtgatcgcctgtcaaaattcagatttgaacttagaggatcgggtcgaccttagggccaatgaagcgttccaatctgtggagcggcaaaatgctgaggttctttgccaacatagcaaagaaatggagcttgcagttcaaggaatgcagataatgcagtctcaaatgactaaacttcttcaagaaaaagaaaatgcgaaggagtttaatttggagagtcaaagaacaattaaagatctaagtgatgaggtccttagattgaattcacatataattgaaaaagaaagatcctatgaagctaaattggaagagctgaatacaaaaatccacgaacacgatgcatcatttatttcatggaatgaagagaacgaggcacttcgaattgaggtttcggaggcaaaacttgttgtggcccagaaatcttttgagtctgcaactcttacagccaaatttgaagaagcgcaggcaactataagagatgcagactctacggtcaaggcattggtcgaagcaaacgaaaaggcaaaattcgaagcagataagtatgaagagaaggaggctttgtttagtgctgaaacagaaagcatgctaagtgaaattagtagtctgaaaatgctgctggatatgaaggaacaaagttacaagcttatggaaaagcaattccagtcaggcttgcttgaagcaaatgagctagctcttgagctggaagatggcattagacttacgcagaatttattacagcagaagcttgagtttgtttcttctgatgttgagtggatgaaggaaagggtccagcagtttgcagggttgactagaaaatggttagaggagaattggctggagataattggcaaagattgtgctatctctgtgttgcacctctgtcacatggagattcttttggagagaatcactgggttgaatgcagaaaatggtttcccttcagcacgggctgtgtgaatctaattctttgatatctaaactgcgagagcacaatgaaaaagccaagaatgaactggagaatgtgcagtgttctcaaagggaaattattaa

SEQ ID NO: 21922 - DNA, 3514 bp, Zea Mays
tactgtagtccagtctccagtctatctactactcgtacttccagtggggcctcgcttgctactgcaagtcctacttccgtctttcctccgccccgttatccattctattctcaccagccatcgcccatctttaaaaaaaaatcttgaacccctcctttgccgactcctctctccagaaggccccaacccatctcatcactcaccgctcccaaggcgagagatctcacctccccattcccaaaccaacccaaacaccaaaattcaaactgacgatcgatccaaaaacgccacaaatcccaccaaatccacctcaaatttgccacaaaatgccccagattggcacccaaaccccgcacccaccgtttcaaatctgacctcgccattcccactcctcccactctacccaccgcatactccagatccccaccgcaatggcgaccgcggtctccaaatccgccgtcaaatcccaccccaggttgcccaccacagcgcagccgccgccgccgaaccccggctccaacgccgcgtcggctggcggaggggcggcgcctccgccgccgccgtctcccgccgccggcgcgacgccgtcgaagaacgcggcgatggcggagctcaagtcgcgcgtgctcgccgcgctcgccaagctctcggaccgcgacacgcaccacatcgccgttgaggagctggaccgcatcatccgcgcgccgccgtcgaccgacgccgtgcccatgctgctcaatgcgctggcacccgactccccggggctcgcctccccggccaggcgcgagtgtctgcgcctcctcgccacgctctgcacgtcgcacccggatgccgccgcgtcgcacctccacaaggtgctcgcccacctcgcgcgtcggctaaaggacccggcgtccgacacttccgtgcgcgacacgtgccgagacgtcgcggggcagctcgcggcagtgtacctccgccctctgtcggcttcaggcgtttgcgaggcgggcaatgcgaccgtgacgctgttcgtgaagccgctgttcgaggtgatgggggagcagagcaaatcggtgcagggcggggcggccgcatgcttggccaaggcggtggaaggggcgggacctgggcccggtgccatcgggatgtttgggaagctcggtcctaggatttgcaagttgctcggtgggcagggcgtgcaagccaaggcgggattactaggcatcatgggaagtttggcgcaggtgggagcaatcagttcccagaatatgcagcagactctgcaaagtatccgcgactgccttgagaacagcgattgggctactagaaaagcagctgctgatacattatctgtctttgctacccattctgttcacttgataggtgacggaacagctccaaccattgctgctctcgaagcttgccgttttgataaggtaaggcctgtcagagatagcatgattgatgcagtacagttgtggaaaaagttgactggagaagatgcaaatgatggtagaaataaggatcttgctgatggtgaagggaaactggactcaagaaggtcaatacaaagaggtggaaaatcagaatcctttgatgattcctctccagattcacctagtaacaacgtgaagggcagtagcatagctgaaaaggcagcttttcttttgaagaaaagaccaacattaactgacagggaattgaaccctgagtttttccaaaagctcgagacaagaaaaacagatgacttggcagttgaggttgtagtcccccacaagactctacaatctcacttgcgaggtgaagatgaaacagaagaagatgatgatcctgttggtccagctgacagcaatggatcagctgaagatgaagcaaatctaactcaaatgcgtgctagctttaattttcagaatatccgggataaatgggctggccaaaggggaaatagaaacaaaattacaaaagctaggacaactgatgttgaagataggggcgaacccagtacaaaagattccactgctgcagccatgaacatttctggagaaggccctttcataaataataaaacaaattggttagcaatacagaggcaattgtcacacttggagaggcagcaaactagtctcatgaacatgttgcaggatttcatgggagggtctcatgacagcatggttacattggagaacagagtacgtggtcttgagagagttgttgaggaaatggctagagaaatatcactctcctcaggcaggagaggtggtggtccagcgttgggctttgattcatctcctggcagatcatctaaacacaatggtttccatgaatattctaattcgaaatatggaaggagtggtgatggacggatgggatttgcagaaaggtatttctctgcagatgctatggcttctggtacgaaaaaccaatcttggagaccagattctgaaccatgggactcatatgcttattctggatcaagaagtggtatgaatgtgaggagaggattagattctgtttcatcagacaatagaatggcaagaaatgaacggagtaatgatcaagtgggtccccggagaggttgggacaaaggtcagggaccctttaggttcggtgagggtccttctgcccgaagtgcatggcgggcctcaaaagatgaagcaacactggaagctattagagtagctggtgaagataatggaaattcaagggccgctgcaagagttgctattcctgaactggatggagaagctttgaatgatgacaaccaaggggatgaaagaggcccactttgggaggcctggactcgtgcgatggatgctgttcatcttgaggatatggactctgcttatgctgaacttctttcgactggtgatgctgaattacttgtaaagttgatggagcaaactggaccggtcgttgatcaactttcaaatgaggttgcaaatgaagtcctacatgcagtggggcagtttctcatggaagaaagcttatatgacgtagcattaaactggcttcagcagttgactgatctggtaatggaaaatggctctgattatctcggaatacctctagacgcaaagcaggacgtcttactgggacttcatgaggcgacagcgattgacctgcctgatgactgggagggagcgacaccgttgcagataatgaagcagctagcttcatcctggcacatcgacctacagcaacttatcaattagggtaacattgattaccgacatatgggttaatttcatttgttcgttgcctcttggtcttgtctggcctgttgctattaggattaggaatattatattggttggagtggaagtggcactgtgttgaaatggattggttgtattggggaaatatgatgtggatattgtctcaccttcatctaaaggctttcataattcatagtttgattctccagttatactgtaaaaccttctcacttcatggtggtggtctcttgtatgattatggtgcattggttattacatggaactcaaaatgagtagcaatgcattgtttatttgcc

SEQ ID NO: 21923 - DNA, 379 bp, Zea Mays
atggtggccggtggtgcggtgaaaggagatgacgatgtgcagcttccatgcgggcgcggggaagatgacgtggtgaagaccgccagcctctacaccgtctccagcaaatgtcgatgccctggccatggtgaacaaggtgatccttgggcaagcaaggtgtcttctactgaaggtaaaggacaacagaatgattcttggtcaagtaagatgacttctcgtggtgctgaggataccagaggtggctgggacagcaaggtgaaaggctcttcctgcaatgatgggggtaagtgggaaaatgctggtagcgttgagtgttagactgtgtgtgttagtgtgtgtgggcaaaacctctttttttttttttttttttcaccaggcg

SEQ ID NO: 21924 - DNA, 853 bp, Zea Mays
aaaaagaaagatcgctccgcgccgacaaatctcgcccgcggaagagaactggtggcgtgctggcctttggcaccttccagaagattcctctatctgcctccgttccgctcatggcgtccgcgccgagcaccacggcgcccaccctcgcgccctctctgcgcacgcccttctcttcagccccccgcggggcccgccttgcggccgcgccccgcctgtcccgcgctcagcccgggcaggccggatgccgcgcggcgccaggtcggctcgctcgccctcgctcgcgcgttcggtgcggcgcggcggcccggttcattgggcagggcgagttccccgcggaggtgctggagtcggagctgcccgtgctcgtggacttcgtcgccgactggtgcgggccgtgccgcctcatcgcgcccgtcgtcgactgggcctccgaggaatatgacgggcgagtaaaaatcgtcaagatcgatcacgacgccaatccgcagctgattgaagagtacaaggtctatggtctcccgactttgattttcttcaagaatggccgagaggtagcagatagccggcgagaaggggcaatgacaaaagataagttcaagcaatacctggaacctctcttgactacgacagtcacttaagaccattgcctgcggcttcagcaccgaccaccgaggatgccaatgggaatgttgaaggaatttccttttatgagtttagcttgtaattaactatgctgcggggtcatttgcgtatatttggtacagtatacatgaagagctaattttgatacaagcaagtttgtttttcgacatctttgtgacacacaatggtatgtttgttttttttttttttg

SEQ ID NO: 21925 - DNA, 503 bp, Zea Mays
tgcccagcggggtcctattagtaacacccgctgatccctggtcggcatcgttttatggttgagactaggacggtatctgatcgtcttcgagccccccaactttcgttcttgattaatgaaaacatccttggcaaaatgctttcgcagttgttcgtctttcataaatccaagaatttcacctctgactatgaaatacgaatgcccccgactgtccctattaatcattactccgatcccgaagaaacaaaaacaaataggaccggaatcctatgatgttatcccatgctaatgtatccagagcgatggcttgctttgagcactctaatttcttcaaagtaacgaggccggaggcacgacccggccagttaaggccaggagcgcatcgccggcagaagggtcgagccggtcggttctcgccgtgaggcggaccggccggcccggcccaaggtccaactacgagctttttaactgcaacaacttaaatatacgctattggagctgga

SEQ ID NO: 21926 - DNA, 1596 bp, Zea Mays
gcagtggctggccgccttcacggcttcacctaacgatctggttcgtctcccacctcgcgccgctcgccggattccgccgccctgcccgcgttctcctagacccaacccaaccgagtcctgaaaggggggtcatttgttcagtgatcatcaaccagtgcaccatggcgtctctgattcctccctgcctctccgtccccaccgccccgggacgcgcgcgccttgctgctccgggggcgccgcggcggaggaggatggcggtggtgagggcgaagattcgggagatattcatgccggcgctgagctcaacgatgatggagggcaagatcgtctcctggacggccgccgagggggaccgcgtgggcaagggcgacccagtggtggtcgtggagtccgacaaggccgatatggatgtggagacgttccacgatggcatagtcgcagtcgtcctcgtcccggccggtgggaccgcccccgtaggcgcccctatcgccctcctcgctgaatcagaggaggaggtcgcgctggcgcgggcgcgcgctcaggccctctcgcagggacaaagccaggcaccctctcctccccatgccgccgccgccctggggccacctcctccagcgcctgtggcgcctccagcgacaaagggcatcgcgacaccttacgccaagaaactcgcgaagcagcacagggtggacatcgccggggttgtcggcaccgggccacacggccgcgtcacggcggctgacgtcgaggcagctgctggcatcaagcacaagcgaccccctccacctccaccccctgcttctgttgacgctgcgccactagtgcccgcaagtgcggtgctgccaccagtacccggtggcacggtggtgccgttcacgacaatgcaggcggcggtgagcaagaacatggtggagagcttgagggtaccgacattccgggttagctactccatgatcactgacaagcttgacgcactctatgagaaggttaagtcaaagggggttacaaagacagtgctgctggtgaaggcggcagctgtggcgctcacccaacaccctgtagtaaatgctagctgcagagatggaaagagcttctcctacaacaatgatgtcaacattggagtggctgttgcactcgagggtggccttcttactccagtattagaggatgctgataagatggatatatatctgcttgcacgaaagtggagagtgctgctcaagaaggcacgcatgaagcagctgcaaccaaatgaatacaactctgggacgtttacactatccaatttgggtatgtttggggtggataaattcgacgcaatccttcctgctggtcagggggctatcatggctgttggagcgtcaagacctactgtagtggctgataaggatggtttctttagtatcaagagtgaaatgctggtgaatgttactgctgatcacaggattatctatggtgctgatttggcagcattcctgcaaacatttgcaaagattgttgaggatcctgaatgcctcacattatcattttttcctgttttgagtaaagttaaagcaaacgagcatagcctctctggtcgcatcagatggactttta

SEQ ID NO: 21927 - DNA, 1094 bp, Zea Mays
cctcctcgcgtcgccccttcgccactccccatcgcaccctcctcactcagcggtccttgtcctccgctcctcctgtcgcggaaatcggaatcccctgctcggccgtcgtcgccgtcgccgcccccgccgcctcctgtcactccaccagatccatagcggctagcgctggacgccggcgcttgcaaatcgagggtcagcgcagcgaatcagtgctagcggcgggcaggcaaatcagcgcggacaggtcgcgtattggggtcgaattggaccgacgcgtccgcgcgggcaaatcctagaggccgtgctcgtgccgtactgatacggctgcggcctgccggccgacgttgctcatttgcgcacaggacaggcgacggtctccagctcgagttcggcgccccgggcggctggcagcagcagaagagcagggcctggatgctgaaccaatggtgtcaggctttggctgctcttacgctgtcactggaaggaagcgcgtaaagttgttggcagccgagtcatcggatggtgaacccctcggctgttgcgtgccaatatgtgatgattcactgggggacttgattgagtggtgctccgagtggcatcacatgccttccgattgtggtgatcaaacacaacacactggtgtgtttgctgcaatgcaagaatacacctgttccactggtaacaatggtgtgatttatccacaatctgggattagccattcatctggtcaaaatggggcacagggcacatacttgcaacaccaacattttgaaggctgcatgtatatgagcgggaatggacagatgtgcggaccttacctgcctgaacaactgtatgaggggctatctagtggtttcttgcctcaaagccttgctatctatgctgtttttggtgggaaaacagtcgatcctgtgcaattgatctttctgaaacaattcctttcacaatggaatgtcggtgccgtggcttccaccccaaatgtatcgacagagacagagagagtgacttcccatgctaaaatggtttttccagataatcatgctggatgtttgaggatgcagaaggttgccgacaagggccacattctcttgctg

SEQ ID NO: 21928 - DNA, 1800 bp, Zea Mays
gtcgggtgtgtccccactctccatttctcagcgtgcgcgctctcttctctctcttttgtggtaactggcggcggccgacgccgacgccctagctcacgtcttcgtcggtcccttcccagccttcgtcgcgtccttcgccgtcgacgagaacacacgagtccatgtcctttaccgtgaccgtcgctgctgccgttccaattgatccatcaatcggtcgattaggttcgtcatctactcatcttcgtcttttagcgcgctaggtgtagaatactatttaggccttgtttgatgagattaaaaaaattagtagagattttgacttgctatggatttatatccacccaacccctcgaatccatatggattgagataaaaacgacaaacctttagttggcaccattgggcttcttgtaatcttggttctcaagtaggccttattcggttgcatctggatcgaaggggatcaaaccaaacaagcccggtacggttgcagtttaatttgaaaagacatcgggattcaaccgaacatccaatccgtgctctggaagcgcaatggattggcgaccgaggagcatttctaatgtttccttcaggacatgagcatgatgattgtcattattcaagatcgttctttcttgaaaacattgcctatgcatatccaagtgaccataatatatatgatgataatattagattactgctacattagatccgactgtatgcattttagctctactacaatgatgctaacagtttagtgaacagtgactggaccaatgtttcactacctaagggctgactatatgcaaattggttatattgcaatgatgctagcagcttcgtaaacatcgaccgggggtccggggccagtgtttcactacctacagcagtacagctgcccattttcagttctttatttacacaatagtacaataccatgtttcatgctcaggattagagctcttgatgttagggtttctggtggctctttggatgcactcttgtagtgtaggagtatatatacctttcaaccaaaggggaaaaaaaatccagagtaggtctgattccaaattttctgctggaaggaattcaaggaaacacttgcaggactgaagaatagagaaacatgtcgtctggtggtgtgaaagatttttaccggcagaaaaagaaaggaggcgtggcgaagacagcttcatcctcaaagaataagacacggcattacactggtggggcttctgttggtgcctcagatgcagctcagacatcagctctagtttctcatggctcctgggatctcaaagatgactttggtgatgaagaagagcagctgcgacagtttgacgtggacatgaagtttggtccttgcatcggtgttactcggcttcagcgctgggagcgagcctctgccatgggcctccagccaccagctcatctccgggacctcctactgcacgcggcatcgacaaagaatcgcggtggcggtagcccctctgtcgagtgcctttgggaggcctcttgttgatgtatgttggcactcgtttgtttctccaaggcacgtgttcggtaacagtatatagatggctacctgtgcgtatgttggcgcacttcatgctgaattctcttctcgtattgagatcctgttgcgttgtctgtatctgagtgcgtcaagcacgcacatgaacacatctcctatgtgctgccagttgcattgtgatcgaccgttttgggtgctgcgatttgacgcttatttagcagtcaaatcacgtgggtagcggtccatctacctcacgagtgtttttt

SEQ ID NO: 21929 - DNA, 1081 bp, Zea Mays
tttttgtccagcatgttgttgaactagtctacagtgtgttgctttttccattgaaagaagttccaaaagcaagattcctgtgtggccattcctggttctttcatgcatcggaggagcatatgctttgattccttactttgtcttatggaagcctcctccacctcccattgacgaagatgaaattggacaatggccattaaaatttctcgagtcaaagttaactgcaggactagtgtttgccctgggcattggactgatcatatatgctggcaaagctggtggcgacgattggaaggaattcattcgatacttcagggagagcaagtttatccatgccacctgccttgattttactttgctatcagccttctcaccattttgggtctataacgacatgacagcaaggcgatggaaaaatggttcatggcttctgccgcttgcactgataccttttgtggggccctcactgtatcttctactgcgcccatcactttcttccttgctggaagcatctgcttcagcatctgatgagttcaaaaaataattggtatctaactcagaactgatggagaatttggttgtgagcacatgacatgggtagagaaatggttatctggcaactgcatttgttagcccaaatgctatgtcaattgctgatttggaggaaatccacaattttgcatgccacctccctgttcaaaatgaaaggacccaatgagatcctgacaatgaagatattgtcagtattatcatcacctgggtgcctcacaaattttgtcagtgttatatttatgtgtaatccacaattttttaatcactgatgaagcagtgtaagtatgcaacaaactactaggatattatacttgtatacataggtggttcagagtatagaatattttgctcctgttacagtggaacgtaataagccaaagtagtatcactacacctttgaagcacgaatttcttcgtgtgtcgccctccctcccgtgctaataatgcagtgtatgtatgcaacaaactactaggatattatatttgtataaatggagatgaaatccaatagaaaatcgttggagcataa

SEQ ID NO: 21930 - DNA, 692 bp, Zea Mays
taggtttcgtctggactggactggactggttaggtactacttactactcggcagcagagggctgggcctggggctagtcaaggccgccgacgacggacggcgcggcaccggaatcagtggcgttcttctcccgtttggaccccccctgcagcgtcatgcatgttcatcagctccagtgtttctgtgtagtagattaggagtgtagagaagaggaggacgacgacgacgacagcacgcggcgacctaatgcgaagcggcaggttgtggttgcgtgcgtgtacgcgtcctcgatcgtcgtgcatccggggaaaaaaagaagaaaaaatatcgcgcgtgtttgtgtttgtgttttgcctaccgtagccagccaaagaaggttgtacagcagctagtaatgggtatggccactgctagtgcaagtaataaatcctagtattgtacagcttattaggtagccgccactcctgctctgtgggtttcgtgtctcgatgttttttgtactttgcagtgtactacgtacatactcagatgtgcttccatccagtgaagttggtggtctctcctgcgtttaccagatgtgctgggcactggacgcgcgtcggtcgtcggcacacaccaaaaaaaaaaacactgaagcacatctgcatgtatttttgcgcgcaaagatacgctcgtggcaacagagagaggtg

SEQ ID NO: 21931 - DNA, 679 bp, Zea Mays
ccaaccctagccgccactacctgctccctctccctagcagccgacagctgccatccagcgccaccaggaaagccgcccaggcgccccgcctctgcatccgcccgccaggagcagcgcccctgcaacccgctctgaagactcgacgcccagagccgcgcgcaaccccgttcgccgccccgccctccgtctcccgtcgcctcgcccctgcgctccgtcagctgcccctccccgtctacaggaatcagtggtcttctccgctacgctcctgaaatatttgagcagtctggagtggctagtttgttttcagacattggactttctcctcattcaacatcaattctcatgagtacccttaatgctttgctgatactcccttgtataactgccgcaatgctgctgatggatgtctgcgggagaaggtagaatctgagacaccatgaaaattagtgatgcagttgtggacttttgaacaatagctggagtgatatgaaacattagtgatgtagttgtgggcttttgaactgcttcaagctggagtgatgtcgctgtggtgcttttgtgactgatctagctagctatctgtaaatgatctagttgtgaatgatattataattgtgatgtttttgtgaatatataattgtggtgcttttgtgtttatgtgatggatctataactgtgg

SEQ ID NO: 21932 - DNA, 1720 bp, Zea Mays
gaaattaccagatctacttatcttgtttatcgtttagaaatgaatcagaggataaagtcatcaccaatgacgatgtgttaggggatgaagtgccatatgaccagcaagaagctttgcgtgtcctatgttatcggttgcttgaaatgcctcttggaagggggcatgcacactttcctggatcacatccagtttctcttaacagtgaaaatctgcaactacttagacagcgatactactatgctacatggaaagctgacggaacacgttatatgatgcttataatgagacatggttgtttcttgattgatcggaattttagctttagaagggttcagatgcgctttccccataggagcctccaaggtctgcaagatatgaccttgattgatggagagatgattatagacacagtaccagattcaggcttgaagagacggtacttggcatatgatcttatggcgcttggctcagtgtccaaaactaggttgccattttctgaaaggtggaaaatgctggaagatgaaataatacagccgcgtaataatgagaaaggccttgagcgtggtgctaagagcaatccgttgtacaaatatgacatggaactattttcggttaggagaaaggctttttgggtgctattaacagtaaaaaaggttcttaaggtgtttattccatcgctatgccatgatgctgatggccttatatttcagggctgggatgatccatatgtaactcgtactcatgaaggtcttctaaagtggaaataccctgagatgaattctgttgactttctgtttgagcttacaaatgataatcgtcagctggttttcctatatgagagaggaaaaaagaaacttatggatggtgctcggatatcatttactgatgatgtagatccatcttctgtcgctgggaggattgtcgagtgctcttggaacaaggaagaacagtgttgggcatgtatgcgtattagatctgataaatcaactccaaacgacatcaacacataccggaaggtgatgaggagtatcacagataacattaccgaggagaagcttctcgaagagactgatgagataacgctcctgccgatgtatgccgataggatgaatgttcgtgttcatacaaagatggcacaacacaggcgaagattgccaccacagtgctagtctcgttgctagagtgctgggtcgctctcctagccagcggctggcttctgtagctgtgtaattagtagaggtttcagtagcccccccccccccccccccctatgatgatggccagccaactaattctttgcacttcatttgtgtcttgtcccctgccctcacacctacctgtataggcttccctgtaaattgtgtgctctatgttcctccatattctcccctatggttttatttttcatgggtgtagaatagcgtttaacaaggcgggtggtgttctatgtaggcgttgccatctctcggtgctgcctcgtgctagaataatgtagggtgtactggcgataccatgtggttgcgatatatggcttggttttagtgttttggtttgtgcgcacctgatccgatcctttgtccaacgaagattttttccccttatttttgggtaaaaaaggacgtcaatgttaccactctatggtatagtgcttttttgttcacatggttagatcatgtactgcgtggtccattttttctctttagtgtccgccactttgtgg

SEQ ID NO: 21933 - DNA, 164 bp, Zea Mays
atttttcagatggagccgatgtgccttctggaaccaaacctgaaacatgtttagcttgtaggggttcaggatttgttagttcttcatcatgttgcttttgtcaggtagcaagtgttgagcaaagtacatagatgattactggccaacaaaaacatggagttttc

SEQ ID NO: 21934 - DNA, 1158 bp, Zea Mays
cccaacgcagtcacctagatcccatcttgtcaggggtacgtctatctcccctccagacctccacacgccgcgatggcctccgccgaaatccccaactccagccctgatgccaccaaccccgccgccgccgccgccaccgccaccgccactgccaccggccccgacatctcctcttcgccgccactcccgccgcggaagcgccgcctttcgccttcctcatctcccacgcgctccgcgtcacgctctcggtcgccccgctcccgctccccgcgcggccgccgctcccgctcccgcagccggagccggagccggagccgcagccgcagcccgcagtacccgcccgacggcaagcggcagcggcacaacgaccttaccgtggaggcgtgccgcgacttcctgcgcgataggtgcacccgctccgacctcgagtgcagatacgcgcaccctcacaactcagcttccgtcgaccgggacaacaaggtgacggcgtgcgcggattctcttaggaacaattgcttccgggggatgacatgccgttactaccacccccctccacaaatccaggagcaattgctgagatcaattggtatggaagatccaaatgtgaagacgcagatctgcagagattttacacgtgggaagtgttcaaggtcagcaaatgagtgccgattcttgcaccattcatctgttgaagatgctgcaattgtttgccaagattttttgcgtggacaatgcaatcgcatagcatgtaggtactctcatgtagtagcacatccggtgccaccaatgagccatgttcctatgccataccctgagatgctttacatgccaccaccaccaccaccacctcttggagtaccaatgatggggcctccgccttcaccatttgctgataataagaacagggttgaagtttgtagggacttcttgaagaacatgtgcaatagagaatcctgccggtttttacaccctgggacacatacagcggctgcgagcgccaatgttgaagtatgccgtgattttaaacgaggagaatgcaatcgacctgcctgtcgctttttgcatccatatacaagttgaagttttctgttagctaaagcctgccgctgtttcaaacaggcaccgccagagaacattctgatgtgctttgtgttacta

SEQ ID NO: 21935 - DNA, 4609 bp, Zea Mays
cgtctgtcactctcctctctcgcgtcttggtcctcctcctccccttcatcgaacgaatccatccaaggcaaaagggaacgagggaagcaagcaaaaaatccccaattcctcctagatcgatccaccgccgacgcggccgccgcctcctcgtccgcctccaagcgcccccgccgcaactcctcttcctcctcctctgcgccgccgcgccagcagccaccgatggaaccctcgccctcctcccgccgccgctcccgcgccgccgccgccgacaagggcaaggaccccgaccccgcctcctccgaccacccttccccacccgcccctgacgatgacgccgacgtcaccttcccccagcccttcacctccgccagcaccgccctccagggcctcctccgcaggctcggcgccggcctcgacgacctcctcccatcctcctcctcagcgccctcctccgccacgtccggtcacctcaagaggatcctcgccggcctgcaggcgcacggcgacgagtcgcgccagctccagtccctcatgcagctctgcgagatgctctccatcggcaccgaggactcgctcgccgccttcccggtcgatgcttttgtcccaatcctcgtcgggatgctcggccgcgaggacgagcctgccaccgctggtgccagccccgacgtcatgctgctcgcggcgcgggcactctccaacctcgttgatgtgctcccctcctcctgctccgcggtcgtgcactacggggccatacagtgcttctgtgctcgactgctcaccatcgagtacatggacctcgctgagcagtctctacaagcccttaagaagatctctctggagcacccaactgcctgtttgcgagctggtgccctaatggctgttctatcgtatctcgacttcttctccactggggttcagagggtagccttgtctaccgctgcaaatatttgcaggaagctgccgtccgatgcttccgagtttgtcatggaagctgtccccttgctcacgaatcttctaaatcaccatgattccaaggtactagagcatgcttctgtttgtttgacacgcattgctgaagcttttgcctattaccccgacaaacttgatgaactctgcaatcatggattagttgctcaagctgctagcttgatagctgttggcaactcatctggccagacatcactgagcacatccacatatacaggcttaatccgtcttctctcaatatgtgcaagtggatccctgctggcagttaaaacactacttcttcttgggatcagcggcactcttaaagatatcctttctggctctgctttgatttctggaacatcagtctcccctgctgtaacaaggcctgcagatcagatgtttgagattgtgagccttgccgatgatttgcttccgcatatccctgcgagaatcattaagttaccaacatattaccatacatataaaggctcttcaacaaagaaatctgcttccatcaaacaagaggggggtggttcaacaggaaatgaaaggtctggccgtgagaggctattgcgtgagcaacctgagcttttacaacagtttggtatggatttgttacccacaatgacacaggatgaagagctcgacacatctcctgttgagatcgatgatgctttgatgattgatgatgatgacatttcagatgatgatgatgatgacgacgatgatcatgaggttctccaagaagggtctcttccaatctgttctcaagatggtgtgcatgacgtgaaactgggtgatgccgatgaatctaacattggatcagctacttttagccatgcacagccatcatctggttctggggctagaaacacttctagcaggggaccggattctactgaatttcgaagtatgggcacattcggttcacgaggtgcaatgtcatttgttgctgcgacgatggctggtctggcttctgttggtggtcgcagtgttagaggtgtccgagatcggcgtggtctgtcacttggaggtagcatgaatgatcacaataaacttatattcactgctggtggcaagcagcttaacaaacatttgactgtatatcaagctatccaacgtcaacttatgctcgacgaggatgatgaagaaaggtttaatggatctgatataccaaatgatggaaaccgcttctggggtgatgtgttcacaataacgtaccagaaggctgataaccaagttgagaagggttgccaagggacttccacctcattaaacataaaatcagattcttacaggtccatttctgaagcacaaggggtttctcttcttgatagcatcttacaaggagaacttccttgtgatcttgagaggacaaactcaacgtacaacattttagcattattgcgtatacttgaggggcttaatcagttatcccctcgtttaagagtacagggagcatctgatgattttgctgagggaaaaatcaataccctggatgagttatatagaactggagccaaggtaccttctgaagtgtttgtcaatagcaagttaacaccaaagcttgctcggcaaatgcaggacgttctcgcactatgtagtggcagtttaccttcttggtgttatcaaatgaccaaggcctgcccattcctgtttccttttgagacaaggaggcagtacttctattccacagcctttgggttgtcacgagcattgaatcgactccagcaacagcagagtgataatcacagctctggtggtgaaagagaggtcaggtttggcaggttacaacgccagaaagttcgtgtttcccgtaaccgtattctagattctgctgctaaagttatggagatgttctccagtcagagggctgttcttgaggtggaatactttggcgaagttggaactgggctggggcctactctagagttttatactctcttaagccatgaactacaatgtgctcaactgggattatggagagctacttcttcatatgattcaggattgcacactgatatgaaggatgtgatccgtttagatcctgaagatgggtcgtcaggaaaagaactcaacacagatctaccaggtgatggcatgtatttgatacaagctcctcttggattgttccctcgaccttggccacctaaagttgatacttcagaaggtagcagattcttcaaagttttggagtatttccgcttaataggtcaagtgatcgcaaaagtcctgcaagatggcagacttttagatttgcctttatcaacagcgttttataagcttatacttggacaggaacttgatttgtttgacatagtgtcatttgattctgagtttgggaagacattgcaagaactgcaagttcttgttgaacgaaagcagttccttgaatccacttctggcaagaaccagctacaagttgcagatttgtgtttccatggcgcttctattgaagatttgtgtttagattttactcttccaggttatcctgattatgtgcttaaagagggtgaaggaggcacaattgttaatatttataatttagaagagtatattactttggtggtggatgctacagttaagtcagggataaagcgacaggttgaggcatttagatcagggtttaatcaggtgtttgacatgtcatccctccacatattttcacctcaagaacttgactatctaatatgtggtcgacaagaaatttgggagtcggaatccctggtggataacataaaatttgatcatggatatactgctaaaagtcctgcgatcgtgaatctactcgagattttgtcagaattcacccctgagcagcagcatgcgttctgccagtttgtaaccggtgctcctcggcttccacatggtggattggctgcccttagccccaagcttactatagttaggaagcatccttcaagtgctgtgaatacttcaaattcaactggggcagtagagtccgctgatgatgatttgcctagtgtgatgacgtgcgccaattatctgaagctgcccccctactccacaaaagaaatcatgcgcaagaagttgctttatgcgatcctggaaggccgaggatcatttgatctttcataagaaatatacaatatccgaactaacatacaggggtcagttttattctggagatttagtttcttggtccatgtataacactgagttgaggttaccagctcactcagcaaacggcttcaagggcgagagccccagtcctcactcggatgcaggctaagctatagtaattgaggatgtgcgccttgagtgaggatgtgcgccaacaagaacccccgtttgtttcagtacatgtaaataaaagggattttttgttccagaattgttatctgtaacaagaacatctacatctgtgatgactgaccattaataaatgtgtcccggtgtaccatttgttttttttctttgagcactggcagtagcaggatacacaaaagggagtgtatgctatatactactagtcgcggatagctcatctggtcatggccacagttttttcttatggagagaataacaaaatttggccctataaacagaaaaaaataaagtgcaagaatcggcagcatgagaattgtttgtacccaagactatctttagtagcttaccc

SEQ ID NO: 21936 - DNA, 392 bp, Zea Mays
ccaaacagatgcctaatgtggtcagcacaatgtttaagtttgtaagatggatggctagttggctagcagctgggagacatatcaagttgtttggtgataatggatccaaagcattcggctgaagtgtccaagcatttagacaagcaaaatcaagcactaatggaaacatatggagcaatgtcccatgagttgcataaactgcaggtagaagaagagacaatcatgcgcaagttgtatgaactgatgtccgcggaagggcttcttccaaagaaagaaaagcaacatggggaaaatatagtggcttcaactgagagcaaagaacaggaaccataaattcttatgcgacgtgtaatgtgatatgacagcaatgccattttatctggagagttggt

SEQ ID NO: 21937 - DNA, 4757 bp, Zea Mays
gtgccggacgcgaccaaattcgaaattgcccaacgtctcgcctctcgcgacctccgctccccatttcaaaccgaaaggtccgaaaccccatctcgaccccgttctgccgtatctccgatccgcctccgccgccgtctcccctgcccaggcgccggaagtccacctcgggctccagcatatccgcgatgcatctggacggcgtcgacgacgagctcggaggcggcagctgcgccccctcccccgcgcgctttgagctccaagaggatccttccttctggaaggacaacaatgtgcaggttgcgatccgtatccggccgctgagcggcagtgaggtgtcgatgcaggggcagaagcggtgcgtcaggcaggatagtagccagagccttacctggattggacaccccgagtccaggttcactttcgatcttgtcgctgacgaacatgtcacgcaggagggcatgttcaatgttgccggggtgcccatggtggagaactgcatagctggctataacagctgcatgtttgcttacgggcagactggaagcggaaaaacacatacaatgcttggtgacatagaaaatggaacacggaggaacaatgtgaattgtggtataactcctcgagtgtttgagcatctctttgtaaggatccaaaaggaaaaagaattaaggagagatgaaaagctcatgtttacttgtaaatgctcatttttggagatttataatgagcagattctggatctgctcaacccaaattctgtaaacttgcagataagggaggatgccagaaagggtatacatgttgagaatttgacggaacatgaaatctccaatgctcgagaagcgctgcaacaacttattgagggagcagcaaacagaaaggtagcagccaccaatatgaaccgagcaagtagccgctctcatagtgttttcacctgccttatagaaagtaagtgggagtcacaaggtatcaagcaccaccgcttttctcgactcaaccttgttgaccttgcgggctcagagaggcaaaagagctcaggtgctgaaggggagcgattgaaggaagctaccaacatcaacaaatcactatcaactttgggacttgtcattacgaacctaattgctgtgtcaaacaaaaagtcacagcatgttccatacagagattcaaaattaacattcctcctccaggattcccttggaggaaattcaaaaacgaccataattgcaaacataagcccatccagctgttgtgctgctgagacattaagcacattgaaattcgcgcaacgagctaaatatataaggaataatgctataattaatgaggatgcttctggtgatgttcttagcatgcgtttacagatccagaaccttaagaaagtaatcagccgtttgcaaggacaattgggttctgataaaacagaaagcattgcctctcatgggtttgtctgcgagtcccctagcacattcaaatgggatcagggtcatggcatgttcactccacttacttttgataaaagggctacacagaggaacgattgtgatgctgcccttgtcgctgcttttaggagggaacaagagaaggaagcacaattgaaggcagtaatagatgcaaagcagactgctgaacagctggtagctcaaaagacagaagaggtaagaagtttcaagatgaggcttaagtttcgtgaagaacggatcaaaagattggagcaggttgcttcagggaagttatctgctgaagcacatcttttgcaagagaaggaaaaccttgtaaaggaattagaggtcctgcggggtcaattagatcgtaatccagaaattacaaaatttgcaatggagaatctacaattaaaggaagagctacgaaggttgcagtcatttgttgatgaaggtgaacgagaaatgatgcatgagcaaatcattgttttacaagataagctgcttgaggcacttgactggaagcttatgaatgagaaggaacctattaacaagggtctctcattatttggggagtcagctggcgatgaggaaaatgagtttcttcgtttgcaggctattcaaaatgagagagaaattgagtcgttgcgtaaaaaaatgacattctgccttgaagcaaaagataatcttgaaaggcatgtcaatgagttgaccacagagttggagcttacaaagaaacacaacaacacatataaagagttcaaggctgcccagctccaggagcaaggagaagcagatttacataacttgtctgacgctcagatggaacttaagactttggttgatgcaatagcttctgcgagtcaacgggaggcagaagctcatgaaactgctatcggtttggccaaagagaatgaagaattgaggctgcagcttaaggttttgattgaggataacaagagattggttgagctctatgaacacactgttgtcaatgttgaggcaaatcaagatggaaaccctgtagatgatctgttgaatgcccaaccagcagccacatcagatttccatgcacataactcatctagtgtggcacaggagtctaagatagtagacgaaaaatgcaccaatgaggacaatttctcaagagttacatctgttgaattgcgtcttcagctggaggagatgcatgaggaaaatgatagacttatggggttgtatgagaaagctatgcaggaaagagatgaattcaaacggaaaattttagagcaaagcgactctgaagctgtaaaacatattcagttggacgagaaagatgtcgaaatgagtgaagcagctgagaatcctgaagtgaaacatattcatgactccacaattgcagctttgaaagaagtgctgcagattgttcggagtaagttggagcttgtccaagataaggttgtgtctgctcaggatgcagtaaaatattttaaggcactcgaaatagctagtggtaaggccgaagaactttctgcaagaattgagcttcagcgtctaggtgcgcagcgtggtcaggaagaaatcactttcctgaagtctgtgctatcagaatcacagaagaagaaaaatgcttttgaaggcaagtatttcttgcctgcagcatcatgttggaacttggttttgaagaccaaaagtcttgcggagtccaagtttgatgccagctttggatcaatgaatcagaagaaagaacagttgaatcatctccaaactcgcaaaattgaactatctgctgcaagaacgagagcacgtgaatctgaaactgagttgaaaagcaaaattgatggccttaaagcgaaacttcgcgctcatgaagctcaaagaaaggaggaagaaaaggtcctgtttgctattgataacctggatacttccactacactaatgcataaacccaagaactatggcaaggcaaccgacctgctgaaatctgaggaggatcggatgaagcttctgtgtgaactacagaaggcccgcgaacagcgctccatggtacataaggaaataagaagcatgaatgagtgtgattatattgatcgtgagattggagtccttgaagcagaaatagaggattcctgcatctccatactggaaactgacattgagaagtttgtccgtgacaacactttagcagagatttgggagggtagcgcaaaggatctggaggcattgctggtcgattaccaagactgtgttttccaagtcaacttgaaggaggaagagatcaaggtgtgcagtgagtccttgcagtatcaagccagggacatggataaacttcagtcgaagctgaaccaagcgatccgggagctgggtgagcttctgcaagatagaagaagcctaaccgcttgcagtctggatgaacccacgctgcccgttggtgaaaaggtgtgccagccggcggcaacctgtgcggggagcgccaagggctccaggaaagaatcggcggcgggctcgcgatcgggaaggggagcggggcgcatgcgcgagcactggcacggcgacggcgacggcgacggcgaggacgagcatgagccccagccggggtgcggggagggcgcggggcaggcggcggcgaactgcgcggcggtgtgctgctgctgcccgctggcgctgctcgacgtgctgctgctcgtcaccgtccggctccccgcgggcgtcatgcggcgggtgaggaggaggcgccggcgccgccgcggccacggaggtgccggagccaaccggaagaggccggcgcccgcgtcgccttcgggaagcagcggcaaggcgatgatcggagcggcgacgctagacatcgacgaggaggcgcgcggcgaggtggagtcggcggcggcggcggagctggagcgcgagatcatgagctcgcacttctacggcgccggcttctggcgcagcgtctcctccaactccagctcctcgtccaggcgctaccaatagatgcgcgttctggcgtaaatagagcagcagccttcggcatcgtgcaagtgcacttattctgaatggacacgtgcgaaactggcacgtgcgggttgcatcattgtactgctacgccattgtctcgagcatggaccacgccagcagctgcagcttgggatggagaagcgaaaggggtcagtgattgtgcttaggtttttcatctctctcctaatcttttttgtgtaactggagcaggaaatgctgaaacctcaagcttctgtccaaacgatgtactcctatttagtattattgattgattgagaggccgatcgataacaaatgaacaaatagaacactgttcatgacgcagtg

SEQ ID NO: 21938 - DNA, 1389 bp, Zea Mays
gaggccaaccgttgaggagaagccaatcgccagaagcggcaagccttgcctcgcgcaccggtctggttctggtgggtgccctcttcgccggtggccggaaggcgagggggaagccggaggacgctgagggcgggcgaggccgccgtccccagatctcacttccgccgcccgcccgccccgcttttgggattgagagaggaaggaaggaaaggaggtgcttcaatatgaaggcgctcattcttgtcgggggtttcggaacccgccttcggcctttgactcttagcttcccgaagccccttgtggattttgcaaacaagcccatgattctgcatcagatcgaagctttgaaagaagttggggtcacagaggtggttttggccatcaactaccgcccagaggtaatgattaatttcttgaaggactttgaggataaacttggcatcacaattacatgctcccaagagactgagcccttaggaactgctggccctcttgctctagcaagggacaagcttgcggatggatctggcgagccattctttgtcctcaacagcgatgtcataagcgaatacccatttgctgaactcatcaaatttcacaagtctcatggtggtgaggcaacaattatggtcactaaggtggatgaaccatctaaatatggtgttgtggttatggaggaggcaactggcagggtggaaaggtttgttgagaagccaaaaatatttgtgggcaacaagatcaatgctgggatttacttgctgaacccatctgtccttgaccgcattgaactgaggccaacatcaattgagaaagaggtcttccctcaaattgcagctgatcaacagctctatgcaatggtccttcctggtttttggatggatgttggtcagccaagggactacattactggattgcgtctttatctagactcgcttaggaagaaatcggctgccaggctagctgctggagcgcatgttgttggcaacgtgctggtgcatgagagcgccaagatcggagaaggttgcctgatcggtcctgatgtcgcaattggacctggatgtgtcgtggaggatggcgtgaggctttcccgctgcactgtcatgcgtggtgtgcgtatcaagaagcatgcctgcatctcgaacagcattatcgggtggcactcaactgttggacaatgggcacggatagagaatatgaccatcctgggcgaggatgttcatgtgtgtgacgaggtatacagtaatggcggtgttgttctcccacacaaagagatcaagtcaagcattctgaagcctgagatcgtcatagaatgaagatatgcgtcgatcatgttcagttacagtgataaaaacgtcgtctaatagttacaatggcggggtaccggtgtac

SEQ ID NO: 21939 - DNA, 1903 bp, Zea Mays
ccttggtgagagcacacaaataccttatacaaagcagcaagagaagaaggaagacaagtcagacaaaacagaagacgagaagaggggttgtgacttgtatattgtcaaggatcacttggatgtggtaaatgctatactggacactgatgatagctgcataaggattgtgcgaaaaaacgggaagacatccctacatactgctgcaaggattggataccatcgtattgtcaaggcactcatagagagggatccaggaattgttccgatcaaggataggaagggacaaactgcacttcacatggctgtgaaaggcaagaacacagatgtagtggaagagttactgatggctgatgtttccattctcaatgtgcgggacaagaagggaaatactgctttgcacatagctacatggaaatgggagaattttgggattatgaaacaccgcagacgtggcttcgacgaaacggaggcgtaggcgagggattcgacattatgaaaaaccagagaagatactacactctaaaatggacatgaatcctctattaccagggaaggatgatgtttattacactgaaacagacgctgtctcacatccgttacccgcactagacgcacccagtctttctacagagagaatcgcgccgttcttgaatctgccattcgctgaatctgccattcgctgctgttgtttctggacagtgaagcagtattccggacagtgaacaaaaatctgggaacacatttcattttcactgtcattggctaccagagtccgggaacaaaatctgggaacaaaatctgggaacacaaaaatctgggaacaaaatctgcctttggctaccagagtttattgctcccatatcattcgctgtccatttcactgtccattcgctgaacacaaaaagctgggaacaaactcattttcccagtgaacaggtagcacaatttagttcacaaaatctgggagcacaatttagttcacaaaatctgggagcaataaacaggttgaacaggtagaacaaaatctgggagcaataaactgccatcccagaacaaaattcgcagctcacatttcagttcacaagctagttcacaatttagttcccaggtagcagtttcacaagctatcacacaagctcacatttctgggagcaaaaaacaggtggcgtagtagcagtcgtgtgttcatcttcatttgcagcaacgacaagttcacggcttggtgcttcatcttcatttccagctacaacaacgacaagccacctgctttggcgcggactagggttgtggtcgcagcgccgccgccacctgctttggcgcggggccgcgagcagcaagggagaagacgcggagtttggagagaaggaggtgcagcgccgccgccacctgctttggcgcgggaccacgggcagcagatctccgggcagcaggggaggagactagcaggggagggaaatggagattgaagaaaatgagatggaaggaagaggcttgacgggagagagaagaaccttgaagagagaagaacggctctggacggcagaagaaaacggcgcgtgggctgatagcgacggaagatcattattcgttctcctgaacgactaataacgatgggatctggaataacaggagcctgatggttgcatcagtagagttgaccacttctcagtattgcgagatgcatcttacatggtcaagaagataattcctattctgaactacttgctcgtgttgatcagttttgcctagtcccagtaccatacaaagatgttcaggtgaacctgaaaattcttctcaatttgacttgcaagctttctgatgcgagcactaaatagtgatttttttgcaattttgtatgagccttgtttgagtgaatctttcctttgggcagcatggatataaa

SEQ ID NO: 21940 - DNA, 1859 bp, Zea Mays
gaagcaataaccggggtggcagaaaagaggccgcaactgcaaggcaccgcaggagagaagaagatcaccagcaacaccaagcaactactcgtacgcggaaagagaaacccagaagccggtcttgttggattattccgttcgtcagttccgtccggagcggcggagcaaaaatgagtgacaacctgatggacaaggttagcgcctttggtgagcgcttgaagatcaccgggacagaagtcagcaaaaagatgactgccggaatgagctccatgagtttcaagatgaaggagttgttccaggggcagactccagctgacaagattgttgagggtgccacctcagaggatctggacgggcctgactggaactcaaacttggagatttgcgacatgatcaacacagagaaggttgacagtgtggaactcatccgtgggatcaagaagaggatcatgctgaaggatgcgagggtccagtacctctccttggtcctgcttgagaccattgtcaagaactgtgacaaggccttctcggaagttgcggccgagcgggttcttgatgagatggtcaggttgattgatgatcctcaaaccgtggttaataacaggaacaaggcccttatgctcattgaagcatggggggagtctggtgatgaactccgttatctgccagtctatgaggaaacatacaagagcttgaaatcaagaggagtgcggtttcctggacgtgacaatgagagcttggctcctatatttactcccgcgcgatcagttgctgaagctgatgttgatgcaagcttgccccagcaggtgttcgaggacgtccatgttcatacatatactgctgaagaaacaaaagaagcatttgatgtagctcgtaacagcgtagaacttctttcaactgttctttcctcttctcctgagcaggatgctttgcaggatgacttgacaaccactcttgtgcaacaatgctaccaatctcagcacactatccagatgattattgagaccgttggagacaatgaagctgtgctctttgaggccttgagcgtgaacgatgagatccagaaagtattatcgaagtacgaggagatgaagcagcccagggcctccgagcatgcagaacatgtaccagttgtcataccgattgctgcggagcatgaagatttgaatgctgttggcaatgaagacgcccttgtcagaaaaccagctgccgcgagagcaacgtcaggtggagatgatgacatccttgatgatctcgacgagatgatatttggcaagaagggaggtagcagctcccaggaaggtccgaaaaagccagatccgaagaaggatgacctgatcagcttttaattacctttccataatcgcagccagtacttgctattgtctggtgctgtacccactcggtagattgaagatttttattcgcatacgattcataccggtttgttcagttaagtcgctacactttgtcaatcttgtttcatggctgggtcccatgaccatgaatgtattgtattggatggtggattatgcgagacggcgggaaagtgtccaatcctgtgaactgtgatactatgaggacaactgtgacggcacacttgggagaaagaatgttgtagtgacgcaagctagagatagggtgggcgggacggaagaggatcgtgttgggaccatgcttcgtcgtcgaaggtcctgcagaaagagacaactttggctgaagctgctcgtacatgacgtcgaaggtatcattcatggagcttcggtattacaacatatccgaaggtaagggtcgaaccgacttaaggataaaatgaccttttagtccataaaggtctgagtcaatgttgtaaactttta

SEQ ID NO: 21941 - DNA, 808 bp, Zea Mays
ggttttgcattggctgattgcatcccgcctccgccttaaaccctaaacaatgacctctcgcgccgccgcggaggccgccctcctccttccgctccgcctccactctgccccgctccgcctgcgcttcttctgtacctccgcctcccggctccgatgggcgtgttccgcggcggcgctgcttgccgtcgtttcgctcgtcaccgccatctgcgctatgcccgacgccggcgccggcaccaacgttgaagccgatgccggcgccttgcggttggagattgaagcgctcaggctaaaggtcgcgcggctggaatctcttctagaggcaaattcgaaggcattagacattaaggctagtatcttggaggaggacaacaaactcaatgaagcaatggaacgtgaaatccagcttttaacgaatggaccagacagaactaagaactcccaaagcaaatcatattctgctggcaatattaaatctatggaagatgaggtgcggcaacttcagcacgagatcattaagataaacagcaattcttacaccgttgaatcattagcacatgatactgagaaaagggtggaagctttgagcttggaggtaaaaaagatagaggatatgactgcagaacaatggatccaaattcgacaacttgaacaagcatttgtgttaaccaagatgatgacgtcaaaagttcatgagagaagtaggccatcagatacagtttataagtggcctggaaaagaaataattgttaagtaaatcgagccaaattttgttcagggggtcaagtagacagtggatttctgggct

SEQ ID NO: 21942 - DNA, 489 bp, Zea Mays
ggaacggttacggatagtctaacgcggttgcagcttgcagggttttccccttccgttctgcattcctcgtccagtccgcccccgatacggcggccacacccccacacccccacacttctccgacaagggaagggaaccccagatctccgccgccccgccagccgctatgccgactgccgccaaccccgccgccgcgctgcccctcaccctcgacctcgaggacttcaagggagacttctcattcgacgctctgtttgggggactggtggacgagctgctcccggagtaccgcggggaggacgacgccgcgcccgcgccacctcctccgccgcccgtgctcggggcggccccgcccgtcttccccgctgtcgacgagcttcttgggctgttcaagcactcatgcaaggagctcgtcgacctccgtaggcagattgataagcggctccagaatcttaagaaggagacttctcattcgacgctctgtttggg

SEQ ID NO: 21943 - DNA, 584 bp, Zea Mays
cgaattcgcccttgtttcataaaggtcagttggaacttagacacgcttggtgatttcgtgattatgagaagcaatggacagcctgtgtataacttttgtgtgacagttgacgacgctaccatgcaaatatctcatgttatcagagctgaagagcatctaccaaacacattgcgacaggctttaatttacaaagctcttggattcgcaatgccttcatttgctcatgtttcgcttattctggctcctgacaggagtaaactgtctaaacggcatggagctacttctgtcgggcagtataaaaatatgggctatctacctcaggcaatggtcaattatttagcactactgggctggggtgatggcactgagaatgagttcttcactattgatgacctagtccagaaattcactataaaccgtgtcaataaaagtggagcagtctttgatgcaacaaaattgaaatggatgaacggacaacatctaagatcatttccccatgatgaactcatcaaagcttttgaagatcggtggacggacacaggcattctccaggaatctgaaagtggttttgctaagttgatttt

SEQ ID NO: 21944 - DNA, 715 bp, Zea Mays
catttcggtataatatcaaacattttttctttgatgttgcctctcaaaaatctcgatcctccagtaccgaacatgattatttggaactgtgttcatcgtcaaacatcaggtaatgtaaatgttacagtttatacccatcaatctgaggtatcattggggccaaggataacaattgtggtatatactacagaactactcaacaactacaaccaccgctatatatataactaattcaacatgaaaatttgttgcctgtccaagtccagaagaaatcagagagaaacgaggacaagaatagaaaaacatggctttcagctcggcgccaagcaacgatcatatttcacaaaatgacctgcgttcttggttttagaatcagtgatcgctcaatcaaataaggctctgccatacattttctctgcgctgacccaaaatggggcgatattatcttcacttagtcacactttatgttcctgtagatcctcctcacaaacaatgtcgatccaagatacccgacggcacctagcaaaagcaccaagcagtattaaactaacgataccatagtttgtctaccacaagatagcagaagagcttaccgcatagtgttcctaagcctaggcagaacattagagtgtagccgaaatagaagctggtctggaagaatccagacatcttggtcttcatgtggtaataatatatggaatttaaaaaaaaaaaa

SEQ ID NO: 21945 - DNA, 3635 bp, Zea Mays
ccgaaacatatttccctccagaatccctcaacggaacgctgcagcagtgcaggtcgctttcttccccaaaattttgaaccccgaaccctagctctgctcctcagttccccgtctccatggacatcggcggcagcggcggcatcatattgtcgcccggatcggaggatgataagtttgcgcggaggcgctcccgccgtgtgagcttcgcggacaccaccgcggtgcacgtgttcgaccgcgacgaggacttcgagacgcctcccgaggagcgcgagcccgactccacccccgcacccccttctcccaggaggtcctcggttggccgggaggttgaggacgacacggaggaggatttcaaccgcccccctgtcatcttcctccacgacgtcgactcgtcgtacccagacagcgccgctgaatccatcgcctccgccgatgatgaaaacttttttggacctgtgtcggcaagctttattcaaacaggaagaccatcagattctggaatgtcagaggatgacaaccatgatataactatggattccaggacgttctctttgcattttcgcaatattgctccaccagatgactgtacagcctactcagctgggagtctaatgacacctaatactgcatctgagggacccctgaaggaacttactgcatctaatcctgcaagagcatcaattaatggccgagatacattgactgacatgagtttgttgagtggtaaccccagaacttatggttatgataagttgtcacccacgttgaacagtatgatgaagaagataaaagggagcaagcaaacaaactctcctaaacttggtatttctgatgtaacttctgattgtgtattaaccttgtctacatctgaggaagaaagtagggaagaaaatttatgcattgacaatggtgtatcttctgatgagctggtcatggttaatacaattgcagagcacatttctatgagaaatccagtttcgaccagcacagatctgattcaagatgacaatgaaatgataattgatgtccaggagaattcaaagaactgcaaccatgatcacatggatgatgaccctggtgccaataatactgcagaacctcctgcaaagatttccccagcatataagtcattcatgattaatggtgatgtgcaatcccacctagtcgatcaatcttcgtcaaaagatcgaccatctggatcaaattgcactgcaagtgtttcctccatgtgtaatgttgacatggaaacccatcttttggatcaactacctggtaaggataacacatatgctgcccagtcgtcaagtgaagctactgccattttgctgatggatgctgagcagctgcggcagaaaaatgaggtgatggatacagaaacagttctacacactccaagaactgcaggtctgcagttgcaagttccacgaggatccatatcctccttacgctcaaaaaggcataagcttttcactaatactgtatccaatagtaaagtagcaagacaggagggttgttcttcgggtactgagtttgttcaccatgacaagagactttcttctctgaagcatcaagaattggctgcagcttcccagttacaattggttgagaagaatgaacttggtcatcgagcaagtgacatgttcagcaatactgaagatcatgattctacgttatctgtttcttctcattctgttccaaagctgaagaaaaccaatgaatcttttgtcctaggcactcctcgaagacatgggctaaatgagtctactaaggtcctagatacattatgtcatgcctttactttggatagccaacctagtcgtgaatgcaactctcatgtggatttaaatggtgttggaagaaagagaactgctgaggaaaatggttatgctgtgcaagagtgtcctgaaaaaaccactaagacagcaagaagccctagaaaatctagaaaagagattccttgtgtatctcagccttctatgattgaagaaaaacagaatggtgctcatgataatggaaagtccgtggatattgattggagcaaggtagtatgtactataactaatgccacggagcaagttttgccagcatcaataagcaagtataatctacaacagcttgacatgctaagcgataggttggatgagattcatatggctagaaaatataaaaggctttctactgctgtgaggatcaaagctttctgtggtgataagcaaaagagattagaggaggcaaggtttctccatgacaagcttttctatgaaaaggcgaagctacaaataaataatatgaagctagttaaactccaaaaaaaggctcaactatgtcaagatggaattcaagagtgctgctttctgaaatccaagattttgggcgctggacacatggaggattcttcacttcctgcagctactacagtcagtgctggtgatagacaggaagaacttgatatcatttctgaaaagaggcttgaactcaaaattattcaacggaaggtggagaaattaaggagttcccttgaatgttttcacaatattgaaggtggcattggtagtgatagtgttgtgaggtatgctgaagagcagttgatgatgagaaatcagcatcgcatcatccactggcaagcagggctctgcaagttgaatgacatagttaaaaggggcaacaagtgtgatatcatcctcaactatcacaatttgttgttccaaagtgatacatctagcatatttgtgaacaattcactgaatggaaaccaaattggaaagacatttccaaatttggatgcatctttggcattcaattttgttttcgaagccgaggagaaccaaagagttagtgatttacagtccttgcagaagaagacaatggaaacaagcttgctgcttggaaatcttattgatgttttagaagaaatcaaattatctaagttggagttagtaaatcttacctccgctgcttttgttttggagtcccagacacgtaaacttggcctccacctgtctttcatgagtttcaagagtggcaagaagattgctttcatcatcgacatgacagacttgaaccgctcggtctacccttctgaaccatctgagctcattaaggtttttgaagcacatactacgctagcacagccaagcatagacgagaccatggcttctataaggaacctgcaatctggtcgcacagcaatactaagattgtgccggatggtatcccggctgattcatggttacaatgatgacctgatcactggagtgcaagctgtaggaagtaaacatcatccggatatgtaggtagtaggcattaacagtgttggttttgtttttgtttttgcatgtaggcttaagatgtttgaatgcataaagcagtccttttcaggtggacgtgcaagcgattttggttactgcaaatccttgtaactgcccgtttattacagcaacaatgcataactggtagcttggtgcgttagagtgatggattacagtcttgcagatatgtcggcactgttgtatacgagttagtctaaaaggagccaggctaatgttttctccccgcagctgggactgttgctgaaagattgtgcattttttttacaacgactccaatatatttaattaagcattgttacgcaa

SEQ ID NO: 21946 - DNA, 2110 bp, Zea Mays
agcataatgttcccctccccgactccgccttccccgcctcgtccttctcggaccgccggctccgcgtccccagttctacgtcgccagcacctcatccataccgttagcccgcacagcagtttttactgctctgtagtagtaggctgtagactctgtactctctagtctctactcccccctctccgccttctctctctccgcaggcggtatcctcccttcctcggttcctctcctctcccccaccaccccaccccagcgccccaaatgccgctccaaccctagcctcccgccacgcctttcgatctcggccggccatgggcaactgctgccgctcgccggccgccgtcgcgcgggaggacgtcagctcctcgcacttccccgcatccaacgcgaagaagaagccgcaccaagcgcgcaacggcggcggcgccgggcagaagcggctctcggttctgggcgacgaggggtgcgaggtcgtcgggatcgacgacaagtacgtcctggacagggagctcggccgcggggagttcggggtgacgtacctgtgtatggatcggggcaccaaggagctgctcgcctgcaagtccatctccaagcgcaagctgcggacggccgtcgacgtggaggacgtgcgccgggaggtggccatcatgcgccacctgcccaagagccccagcgtcgtgtccctgcgggaggcgtgcgaggacgacggcgccgtccacctcgtcatggagctctgcgagggcggcgagctcttcgaccgcatcgtcgcgcggggccactacaccgagcgcgccgccgccagtgtcacccgcaccatcctcgaggtcgtccagctctgccaccgccacggcgtcatccaccgcgacctcaagccggagaacttcctcttcgccaataagaaggagaactcgccgctcaaggccatcgacttcggtctctccatcttcttcaagcctgagactgaacaaggggtggcgcaggctattcttcgtggaaatatcgattttaagcgggaaccctggcctaatgtttcggaaaatgcaaaagatttagttcgacacatgttggagcctgatccaaagctcaggctaactgcaaagcaggttcttgaacatcattggcttcaaaatgcaaagaaggctcctaatgtccctcttggagatattgtaaagtcaaggctcaaacaattttctaggatgaatagattcaaaagaagggctctaagggtcattgctgatcatttgtctgctgaggaagttgaggatataaaggatatgttcaagactatggatactgacaatgatggaattgtatcttatgaagaactgaagactggaatagcaaaacttggttctcatcttgcggaatcagaagtacagatgctcattgaagctgtggacacaaacgggaggggggcactagactacggggaatttctggccgtctcgctccacctgcagaggatggcgaacgacgagcatctccggcgggccttcctgttcttcgacaaggacggcaacggtttcatcgagcccgaggagcttcgagaggctctggtggacgacggggcggccgacagcatggaggaagtggtgaacgacatactgcaagaagtcgacaccgacaaggacggcaagatcagctacgaggagtttgtggcgatgatgaagaccggcacggactggagaaaggcgtcccggcactactcgagagggaggttcaacagcctcagcatgaagcttataaaggacgggtcggtaaagctgggtgtcgagtgaaaaccgcaccgacgctcgttgatgtgtgtgtgggtgtgtgcgcgcatgtagttttaggcccttgggccactaagcagaagaactctaggccttcttcttctttttttgtcccctcgtgactgtcttgcgtggaaattttagataggtggaagtggcggaaccctccgatttgtcttactacctgtgtaattagctatcccggtctcgctgacaggcactgggccaaacggtgtacctaatgctctcacccgttctcttgatggcagcccgagtgctgtacgatacagtgtgttttgcggtctggaaatgctcaacaatgtgttgggaga

SEQ ID NO: 21947 - DNA, 2720 bp, Zea Mays
ctccctctctctctctcttggagttgctgtgaaaatacgacctatcggggacagctcgatctccctcccttggctggagcctggagccgacggagcagaacgacggttccttgcggcggcagcgacctcgagctgagggcggcgagaaggcgggaacaactcgatctccctttgctagctagctagtcccgatggagccgagggttccttgcggcgacggcggccccgaacctagggccgcgagaacgcatcgacgggagggcgagcgaaaccacgtcctcgatgcgcgaatcctggagcctcagcgacagagatcgaatccaatcaggtcaggtatcatccattacattctgacatcctggctagcggaagtttggatcatgaagttcgtctatgggatgctaatacttcagactgtattgggtcacaagacttccatcggccaattgcttccattgcatttcatggaagtggggagattttggcagttgcatcaggtcacaaattgtacatatggaactacaataagagagatggcacttctgtaccagccatcatactaaaaacccgccgctcgctgagagctgttcattttcatccgcgtggggctccatatcttctaacagcagaggttaataatatagaatctgcagactcaccgctgactctggcaagatcctctggatatctaaattacccatcggccctgctgagatcatcattagttcaaccttccacatcagatactgcaaatgtacagcttgaacagtttgctacccctatggatgtatgtccgggagagccaacttcatctaatgacatacccgatgcagtaactgttcctacttcaaatggaaatgaaatgcatggtgctggaggccagtctaactcaagactgcagggcagcagctctactagtaatcttgagaggttcagtgctagagatgatttgcaagtgtcttccctgagcaggactgacccaatcccattaacagcagggccttcaggatccgatttacaccgtgctatgccactaaatatgctcctcactggcggattagatgttcaaatgttcctaagaaatgtaggaagtggacagcaggatcattctctcttcggcgactcacgtaactgggaggtaccatttttgcagggtttcttgatggccccaaaccatgcaggtttgcaccctgcacttgtgaacaatagtgtccttgaagacatgtctattgctggtactgcagggactaataacttgaaatcaccacacatgcgcaactttggatgtccaggtgcttcatcttcgattccccttaccactggcagttctaggggaccaaatcgacgctatgcttcacgctctgtacctggggttgggaatttgctcctaggtcctcaaattgacgaagctgaagctcatgctgtttcactaggtgctggttctgaaatcactgcgtccatgcttgctcctggtactgaattgccttgtacagtgaagctcagaatatggcggcacggtaccaatgaaccatgtgttcctttagaacctgaggcatgctgtctgacgatttctcatgccgttctctgcagtgaaatgggtgcccatttttccccatgtggacgatttctggtagcatgtgttgcgtgtttgttgccacaaacagaagacgaccgtggtagccaattgcctgtgtcttacgaaggggctggatcatcaccaactcgtcacccgcttccctctcatcgagttatttatgagctccgggtttattcccttgaggctgagacatttggggatattcttgcttccagagcaatacgggcagcacattgcttaacatccattcagttctcacctacatccgaacacatacttttggcatatggtcgtcgtcatagctcgctccttaggagcatagttgtggaaggcgaaaatggggttcccgtatatactattttggaggtatatagagtttcagatatggagcttgtgagagtgcttcctagcgctgaagatgaagttaatgttgcatgctttcatccttcaccaggaggtggccttgtttatggcactaaggaagggaagctcaggatccttcagcacaatggcgcagacatgacaaacatgggggtgggttgcttcattgaggaaaatatggttgagatccagaggtacgcattggaatgctgaagaagcttcaccacaccatgtgtttttaggcttacttccatggaatttttttctgcaggcttcatctgtgtgatccatccaaggggaaacattagatccatctctaactaagtgccttggggattggtctgtgcagaggtggtaggagatgtaaatctacatggccatcgtcgtggctgccataacgatgctgtaattataccgttgtacatgtatttccaattagcttaactcgattgctgttgtatttcagaaagttgacgatgctaatccttttaaagtcaaaagttactttttgttgtatacttcacctttccgtacaagctgtcgatgatgcaagaagttacacaggcgaatggaattgcctgggcttgcttttacacttgtgaaaatcgtgtattttattttcctgctctcgtctgagcgtatcttatgggcatgggcttgcacatctccaatcctgtcccttcaaccatgatcctatggtcattgttaacactttggtcgctgatgaagatgaaaagtagcc

SEQ ID NO: 21948 - DNA, 1673 bp, Zea Mays
ctgcctatctggcttgctactgtcacttccatgtgggttgatgaccaggtttagtttagtttctttaaaatttctgaaataagtttccagttgaaggaataatccagataactgttaatagcatatgtaaaaacattcaagcacctctagaaaattcaggaaaaaattctggagatatattatgatttacacccaatttctctttctgaactcaaggtcattgatgaatcatgtgttggtagcaagcctaagaagaaagacaagtatgattgcctagttcggctctatggaacatgtcaatatttatatgtagacccttggaagtctaactcagaatttgaaatgatgctgaagcaagaaaacaagagcgcaatggaagcattccgtgaggtgcttgagaaggagctctctggcgttaacttgcgcagtgattatgaggatggttatgaagaggaagatgtcaactcaaaaggcggtgacaacaaagggacctcaaagaagacctcttctagaaaagccagaaaacaagaaggtctgaagcaacaatataatggagaggaagaccaaaatggtgggagcaatgcaactactggaggtgctcggaaaaaaaagggtgggcatgtaagacaatcaagtgctactcatgatgccattgataaaaattatagtggcagttcagctgaaggtttaaggaacaagagacagaagtctgctgctcaaagcgcttcggtaggcagaagggaagggttgaggcaacgatctgatgccaagcaacatccagatgcagccgagggcagtacagaaccactcgctgatgtacctggaagcgatggtgcagctcaaggttcaatgcaacatggaacttcggctcctcataccgaaataaaagcgatggtcaggaacatactgttcaaggacatcgttgacaaggagcacgatgctgagatggcttatgtggaagaagtgatcaatggcatctgtaacgctactgacagcatggtcggcggcggcggcggtgatgcttccgcgaaaggtggacgaggctccaagcagagcggcagcggagtggagggtgagtctagcaatgccacagaaaggcgaagagatgaagcaactgagaatgccctcgccgtgaaagggaataccccttttgacgaaatttcctcagagcaggggaacaatggcgatgacgccggggcagcttagcgcacgccaaaataggcagaacaggatcatgcaaaccctagctctgatccctccatcaggatctccgtttggcaggaatgaagaggttgcagccagccgtcaaaaactctaattcacttatgagcgccctaagaaacagtccgtgagcccccctagcgttttgcagtcctgtcctctgcgcaccatgcctagtatcgctgctgccattcagcttgcttttgggagacgcctatatattgcgcctgatctgctgaattacgtagcagttgctattaatctatccagaagacttggactgagtttgattgctatgtaaccacgcggttggttctgtacttctacgcaactgtgcgacattggccaatgtggtgccgttgaaccttatgtattattgtgcacccccatcaccatgttattactagcccccttcggcatttcagttcagcattcagcagttttgcatgttc

SEQ ID NO: 21949 - DNA, 1039 bp, Zea Mays
ttcaggtatcagctagtgcactagccattttagactgacgatttgcacgaccatattattatattaggctttggacgtgttgggcagatcgttgcgcaactcctgtcagagcggttaattccttttgttgcccttgatgttagaagtgatcgggttgcagttgggcgtgcacttgaccttccggtatattttggggatgctggaagcagagaggtactgcacaaagttggagctgaaagagcttgtgctgctgcaattactttggatacccctggtgcaaactatagagctgtctgggcattgaacaaatatttcccaaatgtgaagacatttgttagagcacatgatgttgatcatggtgttaatttggagaaagctggtgcaacagcggttgtccctgagaccttggagccaagtcttcagctagctgctgctgttcttgcacaagcaaaactcccaatgtcagagattcaggaaagcatcaacgagttccggaatcgtcatctgtcagagcttacagagttgtgtgctacgtcaggaaattctcttggctatgggttttccagagttatgtccaaatcgaagtctatcagctccgatgatgaaagcgaaacagtggatggcgcactagcaatttgaagacgattagataaaatgggatcccttgatagtactagatcgattgcactgttagtagataagcttgttgcatgtagaaaaatggaataaaaattaatgcaagagctgtcacaaaaatcggcgtgcaattttgtatgttagagtacttatatatttcttctctcccccaaaaaaattgtttgcatacaactcttcacaaagaaaaataatacactctagcagtgcacgtgaaaatgagacccttgtaagcagggaagaaaatagatgtcagaatgctgaatacttcccatgcttgctcaaaggagcatatggtacagtcaggccagttggacggttgggacctggctttgggtatgtttagtacaatttttgggtgtgtttgggacagttttttaaagag

SEQ ID NO: 21950 - DNA, 271 bp, Zea Mays
gtaatgccatgttaattattgtgctaaacaagttaacctagagaattagtttaaagagttaattaaacaatttctatgcttattccaagtttgaatgtcgaggggtaggttttaggagagtaaaatgcttatacatagtttactgttgtgtgctgttagaattgaatccgagtaagttagaatgccatagctatagttttaatgtgatatcgacatttagtattttcgtactagatttgtgatgtcttgctataggtgtttaatattcttc

SEQ ID NO: 21951 - DNA, 4504 bp, Zea Mays
acactggagaagcatcaggcaaacgatacagcccttccctcttcaatcctctcgtcatttcctctcgcttctgctcagctgcaacccagcgcttagatcttattcttggacgagaactctcctcaagctctccgatttctgttctcgcgccgcttagcaattcaaccccgaaattcttttgcggcgcagtcttcacctgaatcttgggtcgtagccaagaagatgaacaaagacaaagctccgatgccgggagacggcggccccagcgacggcttgccgccgcagtccacgcgccgtgccggggcgccgccctcgtcgtctaccccgccgctggagtgcgacatcagccgcatgccggacttccctacccggagcaccggccaccggcgtgcgcactccgagatcctgggcctacccgacgacctcgacctcagtgctcccggaggcggcgaaggaccgtcgctgtcggacgagaacgatgaggagctcttctccatgttccttgacgtcgacaagctgaactcatcgtgcggggcgtcgtcggaggccgaggctgagtcctcctcggccgcgggtggcggcggtgagggggctgagctggccgacgcgcccaggccaaggcatcagcacagccagtccatggatgggtccatgtcgatcaaggcggaacagctggtgggtgcgccggggatggaggggatgtcatctgcagaggccaagaaagcagtgtctgcggcgaaactggctgagcttgctcttgttgacccaaagagggctaaaaggatttgggctaatagacaatctgctgcaagatcaaaggaaaggaagatgcaatatattggcgaactcgagctcaaggtgcaaaccctgcaaacagaagccacaacattgtcagctcagctagcattgctgcaggtaagaactatttctctttagctcccttatggatttttctggttttgaagttattttctacactggccgcaaccgaatttcatcacgatagtaacgaaattacaaagtatagtatgcaatattccagccaaaaaaatgtaggaacgataaggctatctccagcagatcccatatcgcatcccctatttcacacttctctctgcaaacagtgtcatctacagttccacgtcccatattttacacactctactgaagacagtctaaactccctgattctgatcacccagggatcagacatcgaggacctaaaaccacccagtaacgtatcaaccaaacacggcaacagcgaccagacagaaatgaagcctccaaatacatggccctcggctttgaactggctattgtggttcttctcgagatcatccaggtttagtaactgatagacaatcattataccaaagaagcataatttaaaaaaccaaactagccattgaatcgctcaaactcagttctggggctcagaccagcagtggagtagtagtcgtgtggttcaaattaagttagatgccataatatatatttccatacactgcagcctagcccctggctccctgctgccgcacacccaggaacccaggagtccaggacccgaattctacacttctgctccaatcgacatgtgttttcagggacctatggtttttaacccatactatgttttgccttgtcatatgcacgataagcatatttgggcgttaggcatagtcgtttgattgcaaaatgcttaaatgctatttaatccaaggtgaagctataggcttatagctttttcgttgccataagttataaccataactagtgttttcttgggtgttagtttgggagttttgtggagatcgggggttcagcccatccatatttatgtcataacagctgccagttttttttttgggtgtgaaccagctctgttccgttttaaaaggttgtgctaaagtagaactatctgttgataacatatcgatctgtccaatatactgtatcatggttcttctcagatgttgctgctttttgtaatataaaatactattgagtagatttgttctctttatggaaatgaatgatgttccatcaatgaaagatgtatatatctgttcaaatatgcaaacacaagtgcgatctagatgtgtccttgcactgcacaaaacatcacatacatgtgttttactacagtacagccacatgtgatgagatatagcttggaaggatcattttctaagttgcgatatctcataggcctgtggtttggaactattgatcaatttccctgtggtttgaaactattgatcaaaatcagccacaatgacatgccagctttgtaatggctacttgttacgtcttcataccattcacacagttacccaagtaatggggtgtgtttggtgttcccttgatggatataatgttcagaagaaaatactgttatagatgatatactttggagtttcttatgtcacaagtgaagtgatctttttttatccgttgtcataatatcttaatgattggccaaatttatgctgtattatgcagaaaagtatgccacgttacaaaagttgacatcttaaagctttactgaaatgaggtccccaacttcaacaatttcttattttgtatggagcatcattcctttctagagctaccaattaacatacaaaatacttgtggagggcgcctggatgcttgtgtttcactatgctcatgcggttatatatacgttaacagtagtgcgctcatttaccttgcttttgctactactgttattctgcttgtgttgctatgtcagagagacaccactgggctaacaaccgagaatagtgagctgaagattcgcctgcagaccatggaacaacaagtccacttacaagatgctttgaatgacaccctgaaaacagaggtccagcggctgaaggtggcaacaggacaggtgggcaatggtggtggagggatgatgctgaactttggggccatgccacgcctggtcggaggcaaccagcagatgttccacagcagccaagcgatgcaatccgtgctggcgacgcaccagctgcagcagctccagctccactcccagcctcagcagcagcaactgcactcgctgcagctccagcaggtggcgagagacctcaagatgaaagggcatctgggcggccaaggccagtggggcgatgggaagtctgggagtgggagcaggagcagcggcagctgagcctactggcaccgtggcacgggagttttggtgtatgtggtgagcaggaatggtgatcccttgttttgggggatgttgctgtgcaggtgtaattatcgttaactcagttgtctatctataggcccagttcagcttgagttttatggttaactcggcgatctttataggctcagctcacctgcaacgcacttcagttcagaaactcggatggtggcagatgtttgtctgttggatgttgtttgtatctcttttgctagtttaagggtaaaaatggttggcatttcagtgtttcagatgaagatctcccgtctcagccaggcgctaaaagttagcacggtactagtagggtattcgatttaggccttgttcgtttttgtcggattgcacctggaatcgttagaatcatgtcaccatcaaaaaactcacaatgcactacatcattgataatagtcatttctcaaaccaaacatctcataacatattttttttcatgcgccgctcacttaatttgatccttgtatcaacgagaacatcaccatgtttatgaattactgccatacaaaaaatacattacgcccatggccctaccgaagattaccatgatattttgcctaattctgtttcacctgaaaatatttcttaactactaatgaggtcataatgatggagaaggctggttatcaatcctagtggcaccacttatgcgtcatcagcttattgtaaatgaactgttgcgtcaaagcaaaattctttccctggttcaaatgctgcctcaagctcttcatagctctgctgaactttcatattcttcgatacagtcaggccctccttttgaacatactcagcaaccgtgctacttataattttcttgattgtttctttcttcacttttgatggcccgattaagtgtagagcaacttctttcggtatcttcagcaccacaaaagagtaattactaatcagtaagttagaacaacttctgcctatatgcaaatgagttcaactgatataaactgaaatggctacttttgagtgggaacttacgtctggagttttccctgaatatttaagatagcatcacgtggaagacaatgtcaacaaacttaaacagtattagttttcatatgccaaatttaaacaacatatagtataatatgcaagcaaccaaatttaatatcttatttacagcctaactggtatggcatattgaactcagtatcctttaagtacatctgaggtgaattcagaatttgcaggatgagagtacgaatcacatgcacagttttaggcaatttaaaattgtcaaatgatggacagaaatctggg

SEQ ID NO: 21952 - DNA, 935 bp, Zea Mays
gttgcatttcatgtcgaagcatagtttttgtttgctaaaggagactttgacagtatttacgttcgaaagaaaaagaaattatcgtatttaagttatttaggcatggtctaaaatgaacaagtacatctatttatgtatatatatatctttacaaaagaaataaaaaaatagaataataaaaaaagagagaaataaaaaaggccatgcagccccgcgcttggcctttggcccggtctagcacgtggttgcccacgcctgcacacgcccacgtcgtgctcacaagtgcggcaaccgctcgcctggcagctgcacaaaagccttcgatccctttcgtttatacctcgctacactgcatcttgccgcgtccacgtaggaaccatcacgcgctcgcctcgtcggagcagccacaggagcatcgtcgcgtccgcgcttcatcctcgccgtcgtcgagtcgtcactttggagctccaccagactccacgaggtcgccttgccgagtcgccgacgtccatggcgcggagttctctgtcgctgtccacgttccatcttcaacggcgagcctctgtgtctccgtgtctaggtgagaaatcttctcgtccaattttctccctccgatagtcgtgctcttcttctctaccgcgtgctcggcgggcgcccagaccgtgcccctattcccacacccacgtagcccctctccccggcacaccgttgcggcggcctcggttggctgcgctgccatggccgtgcagccgcgcgccccagccgcagcctgccttcatcgccgttggtgctcggccgccgtcgacaagcccggccaccggtgccgcagctcctacatgatctgcccctttgttggcaaccaccctcgcctagatgcctggcgcgtccgtcgctccaggaagaagaaagcctatgcgaagaccatgcgattgcga

SEQ ID NO: 21953 - DNA, 4244 bp, Zea Mays
tcaggcaggcaggcaacgcccaccccccacagaggagagagagagagaaagaggcagcagagcacataaccaaacgacacccatccgaaaaccccgaaaggaggagggaaaagggtgagagaaaaccacgcagtcgcttgtccagacaaaacaagaacaagaacccaccagtacgcacttcctcctcctcctcctcctctctgcctctctctcctccctccctccgccagtccgctcccccctggcccatcagatccaattccttcccccgacccccgtcccggatccgccgcaattccttcctgcgtcgagctcgactgctccctctccctgcccgcaagaatcccgccgtggccggcggcttagtgggactcccaagtcgaagccaaggctggtggggggcgcgctcctgccgggcgtagcgggccatgggcgcgctgttgccgttcgtgcgtcgggtaaccagggccgtcaggctcagtccgctgcagcgcagcgccgaggatcggtgaggtaatttctcgtgaacgcattccgctattgactgctcgccctgtcgagcagattgagctatccaatatccatttagctcgacacagtgaagaactgaagatacacattgggcttgcttgtgttccgtctctctcaaacatcctgttggtgtgctgtgaaggtctgaaggtcacataatccacttggctatatgccggggtgggtaatgtgagtcgggcttgataaatgcagacttgttaacttgttttgcaacaagaatgggggcaaaagtagaacgggaaagttatatgcctggatattatgccacgggggatctcaatttggaaccaaatggtagatggtctccatactatgaggagatgacatcaaatgatcagttatgcaatggcttcacaacaaaaccaacaaatgactattcagaatttgacaaagaaatactcaagcatcaaatacttgaacatgaagctgtgtttagacaacaggtgtatgaactgcaccgagtttacaaaatacagaaggatatgatgaaacaacatcaaagcaaagaggtatattcatacccaactttggcagttgcatcacatacaaattcaccatcacaagtgccacaaaacggtgcaaagatgatgtggcagatgccagttcctccaatgtccacaacatacaggaaagctattggagagcataatgatacaaaccagtcctccatgaagttccttagagaaggcagtgtgcagtcctcaccaaatggatttatatcaagtgatgttggtccaagaagcagacaaggcacttttgaccttcaacttccagctgatcattatatagatgacgatggcacatcagataacaagcccatagatttccttggtttggcatcagatacaaaaccccggaatgatgctgagcttacattagttagtgcagaaggcttgggcaagttcagtgataatagttcatcctcgggtttgcagactacaaataatcttggaccccggcaggttaccgacctgaatgaatcaaatactggcttccatatgggtagagcaaatggatcagtttccagaggccttccgcgtacccttgagaactcatggaaccaaccaatattgagagcaaacacaactaatttcagtttcagtaaaaaacactccaaagaaaagcacacagatgaaggtacaagctcaaatttctttgacacaagtgtgaaaacaatacatgacgacaaaccatcaatcaataaaggtaaacaagtcagcagtgtaacttttttagcacccagatataatgatgctgaccccccaaaatacttcaaagctgttgatgggaggcctgccactgccagttataaccactttgtttaccaaggtcagaatagttcagttggatggattgcacaaagtcctctggaaccttctgttatcaataattttgctagagttgaccgtccacatcatttgaatatgggtacatttactgcccccgtctctattcctcaaatagacaatccttcaattgtctccccgatgggttcttgcacagcagacccaaggagcagcgttatcaataatcctgctttaattccaagattcaatgggttctcaactgtgaattcgtacaccagtcttagtgctgtgacgcagagcattggaacttcaatcccaaagctgataaatgtggataatgtagataaacgctatcgtggttttccacttgattcgttttccgtgtctcactcacgacatcaggtagcagtttcaagtaacctggagcaaaagaattcccagaagttggaagattcagatcaacagtcccatggcaagggtatgaagaacttcaatttgaatgagacactgtcagattgtcaggaagatggtcttgtagaacaagatgggagatgtgcttccagttttcagcatgataaagatggggggtcagtacttgggatctcttggctcaaaaaaaaacttatgtctgctgacccaacagctgtggagaagccagggaagatttttggacattcattgggaactgcaatagagctgaaaaatactaaagaccagaatgaaccagctgtgactattcggaatttgtcagattctgcttctacatctgttggctgtgcaattaagaaggataggccttcggataacattgttaccggaactctgcctgtctgtaataaagcccaagagggtgctacatgtttacctctttcgtgccagaagcatgtgcctaaagatggacaagccgctgaaggagccaccaagaaaagtggcgcccccatcaggaacttcatcgatctcaatgatgatgtaccaaatgatgacaattctgaggaatcagtagtgtcacacgaatgccacgtggaaccttcacggaacaaccatcctaaacgagcatttgtgattgatttagaggtgccggcctgtgaagaggacgcttcgtgggatattgatcaagaatgcgcgcagccgaaacctgatgcgtaccaggaagttgacgacggatctgatacatccgctctagctgcagccgagaacatcgtagcgttgtcaaggaatacgccaacagccgcagaggcatcggacgatacgttgcagtggtttgcagatctcgctgtattaaacatcaacgaccttgctgagcaagctgaactccaagcttgtacgaatgattccagtaactacgagtcggattcattcgagtccttgacactgaagctggaagagaccaagatcgacgatctctggagcaggccactggaacctgaaaccgcaaccgatgaacagacagtttcagctgctcaccttctcaccaagcccagaaggggccagcaaaggagacggcggcagaagcgagatttccagagagatgtcttgcctggcctttcgtcgctttcccggcctgagatcacagaggacgtccagttgctcgaggggttagtccaggcttccgggggatcctgggagtcgagcttgactaggcgaggacgttgtggtgggcgtgctagaggcaggaaacctcggaaaactgtagtaaccgtaattgtagaggaggaggaagaggaggaggtagaggttagcccaccgccaaaacctgctggcactggggaattggaagccgatggcaggggtatgatcgggtggggcagaacaacaaggcggtgtcgcagagcgagatgtccgtcaggtaacagcatggctactgcgtcttgagtgggagggtatttcttggcagcaagcattggacctgattaggtactgggtggttcacaattgttgtattgactccgatggatgggctggtggtataaggtgatcacactcatatgagtgtcggcctactggtctcagcacaactttcgtgcttttgggtcgaaacatggtttacgttcttataataagttcggtaaattagctggcgagacatttctgcgacagcattgtactaagctgttccaggttatgaggcccggtgccccggtatatattcattgtgagaaaaactgcaatgcatgtaaaccaccttgatctctgaagaatagctcatcacatgtgtaacaaaagggtgtgaatgaggctctgagcctgtattctttttgtagctgtatgccctgcctaattggcgctagtatccagcatgcgaattgctaatttagttttataccgtggatattgctcatatcgtgtcccaacgcttttcttccctatgggaatgcatatgccact

SEQ ID NO: 21954 - DNA, 3161 bp, Zea Mays
tccttcctgatacattcgtgtctcccatcgccaggtagatccctttcctcacgccacgccgagagagaaaagatagagggagaggcaagagtcgcatcgcagacccagaccacgccgccgccacctccgccgccacttccgccggtgatcgagtcgcgtcggcgctaccttcaagctagaagacaataagcatcggcagacatgttcggctccaccaacccatttgggcagtcgtccacaagcccatttggccagacctcgtttggaactccacagggatttggccagtcttccactgctgccaacaatccttttgccccaaaaccatttggcagcccgaccacagcttttggggcacagaccggaagctcgctctttgcaactacatccactggtgcctttggccagcagcaatccactcccgcatttggcacaacatccactggtgcctttggccagcagcaatccactcccacatttggcacaacatcctcatctcagtttgggagctctacaccagccttcggtgcatcccccactcctgcctttggtgccacatcctctggatctttgttcggacagaagccaagttttgggggttttggatcatcttctagccagtcaagtccttttggtaacacgttccagcaaacacaaccaacatttggcagcagcacttttggttcatcaactccgccggcgtttggtgccacggctcctgcatttggcacaactacaccagcctttggcaccacaactgcaccagccttcggtgccacgactagcccagcatttggttcaacttcaacatctttatttggtgcttctagcgccccaatgtttggttcttcagcctttggcacatctgctactggttttggaacttcagggactacagcatttggtgtgagtagtactactccgggttttggatcatcaagcacaccttcatttggcacatcagctagtgcgttcagttttggttcgtcaccatcttttggacaaacagcagtttcctctggtagcactccctttggaacaactccctcaccttttggtgcaccagctcctgcgtttggctcacagacagcagcaccaacttttggacaaccacaatttgctaatcaagctggaggaaccagaataaaaccttattctcaaacaccagatgttgacagtgctactagtggtactcagcctgctgcaaaacttgattccatatcagcaatgcctgagtacaaagagaagagtcatgaagaattgaggtgggaagactaccagcgtggagacaagggtggaccgaacacttctggaactcaaacattggcacctagctttccatcaccaatacaacataacacttttgcttcgacaagtaatccgttctcaacgaacccattttcaacaaacaacccgtttgctcctaagcccactacaactactagttcaccattcaacacctcatttaacaatgcatcagttgcaagttcgagtctattcacatcatcccctggtaccacaatgtttgggcaaccaggtgtttctacacttccagctccagcaagtaattcaccatcattatttggaaatatcaatcctgctcctgctacatcgtcaatatttgccacgtcagtgacgaataatccaagtccattcggcactggcacatcattggctaacactcaatcagccccactattttcctcagcatttgctcaaccgacatcaagtacaccggctttctcctctgggagcctatttggctcaactaatcctggcagtctgtttaccagcagcggtccttcacttttttcaacaccaacatttcaaccatctgcccctgctcagagttcgaacatgttctccttccaacccccaattcaaccagcagcttctaccggtggactcccttttttccccaacacaaatcaggccttgacgggacagccgttgcggagaagcctcttccaagtagatcattgtccatggcggttcctaggcatttgtcacagagaaggataaaactgctgccaagaaaatataatccaatatctgatggcaaggttccattctttgctgatgatgaagaatctccagcaacaccaaaggcagatgcttttttcatccctagagagaacccaaggaacctggtaattcgtccaattgagcagtggtcttcacggagagaaactggccggcaatatactgcaaagaatgttactgattcgaacaaatatgaagatgcttccattgaaagtgagcgtggtaagtctgccatgtcaccaagcagcaggccacctgcagtggaaaatgacaaacagcatgaggccagggccatggctcaacatgcgaatggaaatggtacttcagttgagaggctgttgcctaagcttccacgtgcagattacttcacagagcctagtatagaggagcttgcggccaaagaacgtgcggagccaggctactgcggtcgagtgagggacttcgttgtgggtcgacatgactacggcagcatcaaatttttcggggagacggacgtgaggtgcctcgatctggagtcaattgtggagtttaacgaccgggaggttattgtgtacaaggacgatagcaagaagccccctgtgggcgaggggctgaacaaggctgcagaggtgactctactgaacatcaagtgcgtaaacaagaagaccggggagccgtgccagggggcaagagtggagaggtacagggagatgctggtgaagaaggcggaggagcagggcgcagagtttgtgtccttcgacgctgtcaagggagagtggaagttcagggtgaagcacttcagcgcctacgggctttggtgaaatcctggggagttaagtagtttgtttgttctgatggaacaacgctttacgctcttgtcaattaccatgcttggatctgttgtgctgcttctgtacaatgttgctgctgttaaaatgcttgcaaattgcactgctctgctgctgaaaacaggagcagcagtagaaactaccgcaacaggagggcgtgctacctgctactgttatgtattattattattatactatattctaagtataataagacttagttttttaaatacatgaatattactttatgcacttagatatatgctatgtatggagagaaaataattatat

SEQ ID NO: 21955 - DNA, 602 bp, Zea Mays
catgaaaatggagtacagaaaagaaacaaagctcattatgttgtttttagtgcggttttgattgatctggtggtttctacattgtattttctagcagctttgggaagggtggtgtcaggcgctgccgttgcgtatgctgccctatgcatcttctgcctctacatgtttgcacaaagcaccgatctgtttgatcagctcccttcttgggtccctgtgggtagggattctttgggcggtactcaggataccgcgtgattttccacatgtacatggattgcagagtttttcttctcttccactgtctgtatatggtcttgcaggctaatagcttgaactatagcatctatctctgcccccacggtattacaactgtacccagtgtttagcaatggagtaatgatctttgtatatatatatgacacgtttgcaacttgccagatgccagtgatgcatcctgtatgttttcggagctcattgcagatctctctggcttgacatggttgttggtcgtgagattttgtgatggtgtgttttgcctgtaatctaaatatctaataaagatctgtctttcatcacgtaatacatgctcatgcattgcgaag

SEQ ID NO: 21956 - DNA, 1241 bp, Zea Mays
gatggaattaagattttagttaatttcaagtgctatcggtacacaataagtgtgtctagcaatgggcattatgtgagtcaagcgaaacaaagtcttttattgatatattatgatgcaattaagatgttaattattcttcaagtgatgctggtgaaggacatgctggtacagtggtgagagatgtctcaccactcaggttgcgggtttgaagtagcttctccgtatttgtgtggtgtaccttttttcgagtgctgatgttacataataatggggcctaggagtgagaattatgtgaatcagcttggtttctaattggcggcgtcgaaaagttttttttcacaaacattaccaatttaaaagacgtgctcaaaggatgagatttcttaatggacatatttgattatactgaagtcgcacagttgctatgtgtattgctcgaaatttcgttattttgtgttcaatccaggctgaaagtgcaattatggcattaaactttagtggtatggtccttggctcacttcctatcagggtgagcccttccaaaactccagtccgtccacgttctcctcgtgtgatgtccaattgatcaggctgctaccaatagcaaatcatcctaggcagagcttattgtagctatgatcgccctagaacccacttcacggatcaatgacgtcgttgtcctgagagtgtccaagtcagtcataggaaaccaacttgttgccaaatgctaatgtttttctgtttgccagatccatgcaccatttcccttctttttttcattcccccttatgttaattatgaacataattgtttataatcgcctttctcaggcatcagaataagaatgaataactctggtatttttttgttgtacgggagatcgtatatttttattgtatttttgtttttttacctcattttgactgataggcatgtgcagtttatttgtgttggtctgcactctgcgtggatacataggacatgtgtttctgccgttgttttggctcaaaaaagtggcgagttttggcaatctgttcccaagtgcaagtgttgttgcctacgatttctgcatcgttgtccttccctgctggaggagtgtttctgttgttaatcatgcactggagtttgactgcacgacaacgtctgcacgattggttggtggaggcgacggatccagcaatgccggtggccacccactgaatcgtggggcggtatttgtttcctcttctgttcatctctga

SEQ ID NO: 21957 - DNA, 5092 bp, Zea Mays
cttctctcaccccggctcgctagattctggtcttagcatttgatttcggttgtttggggacttgggttctctgcagctgtagattctggtcttagcatttagcatttgatttagatggaacttaattggcacttaacagtatgtaaaggactagctagaattcaagatggtttggcaagttacgcgactgtggactgtattttttgttcagtgccaccatgcatacagtagcggacccaccgcttgatcatagcctgtgcaagtctcactgagctaatcaaaactcgacctgcgggggtaagacagcccccgggcattgtattaagaagaagaccttctcacacaggtcgagaaaacctccgaacccctgccccacccgtacacagcggcatcgaagcccatgtgagaacgaccacaaccggggctgagccttagacctatgctttagcgtgggacagaattcaggatttttttaaccacaacctgaaattctctcccacggagagtcgaacccaggacctgaggagtgctactcagacggtcagaccacctaaccaactcagctagaggccctttcgcctcactgagccaatcagatcatgcgttttggagctcatagcaaaacatgctgcaatagagacccaaggatgcactggcatcacaaccctgggttcagtgcgcatacaacacctattgctggaagcaatcagtagtctaatgtcgttggatatcatgggcctgcagcttctgctatgtgatggctgcagtcttcgtttgtttaggctagacatgcatgcgggctggatcgtgactggacaccaaggcacattgcttgccgcaaagttcagccactaagataccgactttgcgatcaaatgttccgtgggcacaacagacttggctgcaaaacccgatggatctgctacacctatactcctatagcatctctctatttcatggaaaaagcttctatgcatccaaacaaaacacatgtgtggttgtttcatgcaacctcccggccttgttttggtgccgggccttagaccagtgcttggcgtgggacagacgaggggatttttttaaccacagtctgaaatttgctcccacgggggagtcgaacccaggacctgagcagtgctactaagaccacctaaccaactcagctagaggccctttcgccccccacccctaatgacctcctcctttcaactggtctcgattatgtagacctcctgctgctgctgcctgtgtgtgtctgtcatctactaattaattaactcgctgcccatcgtcttcactggactagaaaccataaggtcaaatccaagcggcaacggcagtaaggacatggcgacgagctgctgctgctggtgcatgttgtctgtggacatggacgacgatgtggcagtggtgcaagatagcttgccatcgttgatggctcgacgtgccatgcggcggctgtgaggagctgatacggaggggtgcgttgtcgtgcatcatgtcaataaagacgctgccatccacaaaggcggaggggatgatgtgctcgaggaggcgtgggatccatgatccagaggtagtacgtgaggtcctcgtctttatccaccacggaggagcgatggtcggggttctgttgccagcacctgcctcatccgcaaacttagtttctatctgtgcgcgcggaggtagagcgggcagaggagatgacgtgcggatgtctgtggcgccgatcgtggtattggtttgatagaaacagtagctggctggttcttgcgggttgttgcaggttcttactgttgtcgcgcgggcttgagcaatcaaaagatgtcgggccacaatgaagctgcagctctctcgcattggtcactaatgctgattttgtgggttgggttggtgggtacgttaacagcctgccccgcctgcacaagtttaggatgactgctatctgttttttttccaacttaatgtgctcactatgtacacttagatgcttataggtgagttcaactagtgtaatggactggtgcactattatgcaccaaactgttgtgtacggtatatactacatacttatgaagcctcttctcaaactgcgaatcaggatgaatatggaatgtttgtctaattgaagcatgccttagtttgtactggttcagtaactatcatgttacttggtgaccatttttatcaaactatagaatggatcttatttgttgccgcttcactacaacaacaacaaagtctttcagtcccaagcaagttggggtaagctagagttgaaacccaacatttgttgctgcttcactagtcaatatttatagttgggcatgcaaactttgtgaattagctgtctcactctcatgtgaacaaatgtacattacaaatcacaatcatcgaattgtttacccagttcaaaagtattgcatgttatcggtggtgttttttatgcaactgaaatgtaatacttatttcaagcacggtataccataccatccttgcatgttaacatatgctattgctacgagtctttgctgcattttccattcattacaattgcactattcatctacttttagccttaaatttatactattagtcaagagcacccaaacttccctaaaaacagtgctgtatgcagtttcactggtggaacaaagggaacctatgaaagaatctgccatctgccattatgcttttccctgtctttagtgaacaatcctggcctggtctttgtcttttctgaggaagcaccacattacgtgaattacattgtttatatgtatacttcctctgattgaaaatggatgtcattttatacttcctaacttttttaaaaaatgaccccactttccagtgtactataaataaagggcaacaaggtcattctactaacttccttaatccttgtgcgcaactctgaaatagcattgcattttgatttacggggagcaatacttttaattgccgtgttccatggttccatggtttaaaaggtgtcgcctaggcgacgcctaggcgtccaggcaccaaatttttctgggcgtcggcctcgccttgccctggtcgactaaggcgtccgactaggcgttgtaggcgttgccctggacgccttagccgttgaatagaaccgcccaatagtgtcttctcttctaaaaatctggcgccttccctggaaagttggtgctctttccttagaagcacgggagaactaaagaaacgagaaagagataaggaagggagagaaagagaagggagagggccagcaccagaacttggcggcgtggcacagcaccagatctgggtggcggcgcgacacagcaccagtaggtggtggtgcggcgagccagggcgcgacgcagcgaacaggcaagggcgcggcgcgcgcgcgacaagccagcaggcaagggcgggcaagcaggcaagggcgagcaagcaggcaatggcgcacgacgatcaagcaggattatgttaccatcatgctcaagaatggaaaaagtaaggatcatgccagtgaggaactccatgtatttctaggggatgatactgcagtattcatttcctggttgtggggccatctttcttcaaatatgcacttatatgtgcaaccacaagaacgaactcgggaggttaaggatgatgaggcccccaaagaagtatctggaagagaaaaatcatcagatgtgctcccgagaagcaaacatcaaactcattctgggcacacaattgaatcaagtgaagctactagtaggagacggagtaaccgggaatggaaagggattggtcggaagggtaatgaaaaatttccgcttcgaaatgtactaactgatattcttcatggggaggacaaaagatcgcaaaagtccaatgaagtacgaccccctccatcaaaacaacagaacgacaggaagcgtgaaagggatgatgagacacatcaaacaaagaaggactcctcatcacgctccatgcttggtgatggtgcttcccgtcgtcttctacagtttgctgtccgagatgctgtaaaagctgtacagccaaccagtacctctgctgaaccagcatccaagcgcctgtgctctgtggtcgccactacttctacagagcacatgcgtgataggagatcagaaagatctcaggactacctgaacgatagaagatcagaaagatctcaagacaacttgagtgacagaagatcagaaagaactaggccaatgctacaggtacatggagctgctttagctcttagagctgcagcggaagctgctgcagattctgcaaaggttagatctactggaagtgttttcaagcgattgggtcaagggaatgttgtgaaacagccatctcgttctcgtgaagagaagagagattatgaagattttgagccagttacgatcgcagatgaacatgattctgatcaatatgttaataatgaggaatccgaagaggaatctggagagctaaccatggcagatagggtagctggaagtggaatgtatgttgattcgagctctgaagatgatatggaccgagatgagggtattacaagataccaaacttctctttcacatgacgatactttctcaccatttgcagagaagaaaactgtatcggcaccatgcagtgttgaactagagactaatgcaataagaccttcaagtgtgaatgacgaggaacaacctgttccttcaacaccaacagcaagtaaagctgtcgctatttctgttgatgtaaatatggtggagcctcccagttatgcaacaccaaaagatgttcatgttgtggagaagccttatgttgcacccatgaattcaaatgccgccagtattgctaccaatgccaaagaattaggtcatgctgaagttcaaaaggattctcagcggtctgcaccatctgttccggtttcatatagcacagcgcatccgatggaggatgcagattcaagaacgctttatgttaacaatgttcactttgctgccaccaaggactcattatctcgccatttcaacaagtttggtgcagtgctgaaagtagtcattgtcactaatgccgcaacgggccagccaacagggtttaatgaaaagaaccacatcatcaa

SEQ ID NO: 21958 - DNA, 2314 bp, Zea Mays
cacaggaccttgttctgcctccccgcgcatcggctgctgccgcgcacaaatccgccgcgccctcggtcccgcaaatccgccgtgccagctccgcccgctcgattcccctcctagcgcccgcattccccgccgccgtcctcgcggccgcagcgcccctggaccccacgccagcaacgcccgcagtccccgccgtggatctcgcccgaaggcgccgccatggacgccctagatctaccacctcctcctctccccatcactgcgccgcctgcccccgccgcacacctacagcgcgccccttcccccaccgtggatctcgcccatacgccagcggatctcgcactccttccttcgacggcgcggtggcgaggaggtcagcgacggcggcgtcgagtcgaggtcgggcacgaaggcgcggaggccgtgggagcggtcgtggcctacgcacgcacgacgccgctcccccagttcaaaccgaggtcagcgacgacgcacgcacgcaccaccccttcccccttcgtcttccattcccagctggaggtgcacgctgccgggcagagcgtcttgctggaggtgcgatagccatgtctggacctccgtcgccgccatagaaggttgaaaaaattgctaaactgtcatttgagaaaaatgaagtaaaaaaagcctgattatgttggagttgatgatgataagtcaaaggctactgttgaaggcctgcagcagggttattgtgtcatttctagcgataaaaggttcttggttctgtatgctttcctaagaaagagaagataatggtgttcttctcatcatgtaattcagtaaagttccacgttgaacttctgaatttctttaggatagagtgttttgatatccatggaaaacagaagcaactgaagcgaactactacattctttagcttttgcaaggcaggaaagggcatcttattgtgtactaatgtggctgcccgtggacttgatactcctgacgtgaaggaaggcagtgttcatgtctcatccagttcaaatgaagtgacaggaaccattccagagacgaatggaggcgatcatcatatacctggaagctcttttcatgtttagtgaaggtctatgacatgtctgatagtcaaatgaagctaaatgattttatttcaagccttgttcttgagaggatggtcaagattaatttgagtagggtgacttcataatggacgacgaggaagaagtggaaggagaggaagaggaacaaaagagtgatgaccagaagcgaagaaacaaaactaaaaagaaaaggaagaggtacctccctttgttcgtactaggaataaatgccaatgtactgtgtacacctatcctgaaatgaggatgactatatgttgctttaggataataacatcactgccatcactctcccaaagtcgctatgtttttctgtcatagtttgttgtcctgaccaaattttttaatttgttgtctatttctcttaggttgttctttcaataagctgtatctttctctcgtatgcaatgtaaatttcaggtatttgtgaaatatgagtgttgttttggtctcaaaataaatccacaaaagattttagcatctgtaagcactgttgcacattatccaattatatcagggtggtctagaactgttttgtgttgtttatttttagttgaggtgtgtatctttccccaccattgtatgttacaattttctaactacatctgttatgtttgggtgctcttgcattctcgcaaagtgctatagaggagcaacggtaccaggacgcgtcaaggttgacaaagctatctgggaccacttttgtaattgccaactcttcactgattattttcctatatgttgctccagaataaatggatcatagtgcggtggtcatgggattgggatctgctccgtatttgcagggtgaagccttcgtgtctcctcgagggaaagtcactgacctttcttgggacgtggaccactgacggcccccgtcatcccccatgacggtgatcctagggtgaagccttcgtgtttcctcgagggaaatctaccagtgcgggattgatttagtcagcaccattggacacagggtttagttccattgcctggacccatcaatgaatcatggtgccaaggtcttgatggttcgacttcaaggtactgatattctccaggactattgttagcatcccttgtggtccatctgcattagcagtgaagaaagtcgcatggggacttgcttgatatgttgttattgctcagatcagatcaattagattgcagcctgccttgcatgcactgtgcgccatcatcaa

SEQ ID NO: 21959 - DNA, 5438 bp, Zea Mays
tcgactaagagccggctgcagcacagtttccaaaacaagcgttttcaggtccatttggaggcccaggataccacaatcaagaacgtgagaagcactttgaacatcttacacctaatatgagcaaaacacgaaatggatctgcattttctcaggatgaaattaactcacacagagagcattttcgtaatgaactgaccccagattcagttgcttcaaagaagccaaaagtaaggaagaaagaaattaacaattctgtttcaacttctccccacagcattcctaataatcaagaagttattgctaccttctgtgaggcggtggaggatttctgtggaaaagctgaaattcctgacgatggtgatggtggtgactggttgtcaatcccacttgacgatgttaaggttcttgtgaatgaaattacatctgttcgatccaaaaggatattgcatgaggttcctatggatacagttacaaggttattagacgtgattgaccgtcagattcgatgttctcaaggtttgtcgatagatgtgaaggaaaattctgacgcctttgatgctgaacctctggttttctctgctttggagtccagtcatgctgcgttggcaattatgacccaccatgatatgccaaagcaactgtatcgggaagaacttattgagcgtattatcgatttctcaaggcatcagatcacagattgtatggcagcaagtaacccaacctttcgagctctctacaaaccagctggaaatgttgcaaatgatggagatgatgatgaaggtgatttggaaaatggacaagttagcaaaaggagacgtactgctactaatttgagcatgagaaaatcttcaaacagagtttctgcttctgtttattctgctgtgcagaaactatgcttgatattgggttttcttaaggaactgctcacaacagtgcgcttgtcagatagttgtattctgcaattagcgaaaacatgctttactacattcttggtggataatatgcagctattacaattgaaagcgattggggttatttgcacggtgttttcatcatacacacagcacaggagttacttggttgatgaaacacttcaccttcttcgtaagttgcagttttccaagaatgccgttagaacctaccatctagcagatgaagaccaaaagcaaatccagatgataacagcactgttagttcacttggttcagtttagtgctattgttcctgatagcttaaagggaacagttgattggaccactatcgttgatgcctctagtgatgctgattattatccaattcaatgccatgaagcggcaacagaggcttgttgtcgtttttggactgatgtccttcaacgttttactgctgctaaatctcaagatatgtcggaaaccaaagggataatagacaatcttgttcaggatttcctaacgatactaaacttgccggagtatccagctgctgcttctattcttgaggttctctgcgtgttgctgcttcagaatgctggattgaaatctaaggacattaatgctcggtgctttgctattgatcttcttggtggtattgcatcaagattaaagcgtgattctgtcgtctgtagtgaagaaaagctttggatattgcaagatttcactgataaaggcagtgacggctcaatttttttgaaaaacaagtgttgcgtttgtcttggtggaagaggcataaatatagcctgtaatgaatgtggaagatgtttccattcagattgtatgggggctggtagtcaggataacttacagcgtgatagtgtctgccccttgtgtttttgcaaacaacagctcaatgtgctacagtcgtactgccagtcacaaattaaagaaaatggcaaaaaaactgctgcctctgccagtaagaaatctgctaaaccaactgaggtgtcagcagtggaaattgttcaacaaatactactgagttatctccaagaagctggttcacaagatgatgggaacctgtttactcgatggttctatctgtgcatctggaacaaagatgaccaacattctcaggagaagatcatttactatcttgctagattaaaatccaaggagattctgcgagattctggcaatggtctggcaatttccagagattcagcaaagaaaatttgcttggcacttggtcagaagaactcattttgtaggggttttgataaaattcttgcccttcttttggctagtttgagagaaaattctcctgtaataagagcaaaagcattacgtgcggtcagctgtatagttgaagctgatcctgaggtcttgggtgacaaacgtgtccaatatgctgttgaagggagattttgtgattcagctatttctgttcgtgaagctgcccttgaacttgttgggaggcatattgcttcacatcctgatgtgggcctgaagtatatagaaaaagttgctgagcggataaaggacactggagtcagcgttcgcaagcgtgcaatcaaaattataagggatctttgtgcttcaaatccgaacacggacacaactcatgcctttgtggagataatttctcgtgttaatgatgaggagtccagtgtacaggatcttgtatgtaaaacattttatgaactatggtttgaagaaccaactgggagtcataagcacttggttgctgatggaagttcagttccaatggagatagctaaaaagactgagcaaattgttgacatgttgaggaagatgcccaatcaccaacccctgattaccatcataaaacgtaacttgactcttgatttcctccctcagtcaaccaaggctgcagggattaactcatccatggtggcatcaattcggaagcgttgtgaattgatatgcaaacgcttattagaaagaatattgcaggttgaggagggagctgctaatgagatggaaatccacacactaccttatattgttgccttgcaagcattctgtattgttgatcccacactctgcattccagtaactgatccttctaagtttgttgtgacactgcaaccataccttaatattcaggttgacaataaatcatctgcccagttgcttgaaagtattatttttgtgattgatgctgttcttccactcataaggaagccaccacaaaatgttgttgaagaacttgagaaggatctgaaacatatgatagttcgccattcgtatttgacagttgtacatgcctgtatcaagtgcctttgtgctctgagcaagtcagcaggtagaggtccaggattagtggaaaaccttgttaatattttctacaagcatctgtgtggagctaattcagatagtcagctgttgggtcgatcactgttttgtcttggactcctccttcggtatggttatcaattgatgctaacatctgaaaatcagcttgattttcccaagatcatcaacttgctccagagaaaatatcttctcaaggatgatttcagcttgaaggttcgagctttgcagactttgggatacatacttattgcgaagcctgaatttatgctacaaaaggatatgttgaatctcatagagacagcactctcttctgaggttgattatagattcaagattcaaggacttcaaaacctctacgagtatcttagagatgctgaaagccaacttactgctgagagtactgcgaaacctcctgggcagtgtgaaataaatggcagaagtgaagtgcctgttgctgctggtgctggagacaccaacatatgtggtggtattatccaattgtattggagttctattcttgaaaggtgcttggatacaaatgatcaagttcgccagagtgcacttaagattgttgaagttgtacttcgtcagggtttagtccaccctattacctgtgtacctcaccttatagcacttgaaatggacccgctggaggggaattcgaagttggctcatcatctcttgatgaatatgaatgaaaagtacccttcattttttgaaagtcgcttgggtgatggactgcaattgtcatttaaattctttgaatccatagtcagcaaccataagatgtccgcaaacataaaatcaaatccaattgcatttgtcaaacctggcatatctagaatataccgtcttatccgttcaaatcgaaattctagaaacaaatttgtccactcgatagttcggaaattcgagtctgatagccggagtcgcagcacagttagctttcttgtatactgtgctgaagttctcgcctctctgcctttcacatgctctgatgaaccactttacttgatctatgatataaatcgagctattcaccttagagctggaggagtcgagggcaatttgaaaaggtggacttctatgtctcagtctcaagagatggcgggtatgccaaccttgccaggagagagtcatgttgtcatgcaagaagagcctggcggatattatgataacatgggagatgccactgaaagggtgaatgacaatccttgcagtacttcagatgtggacattgccaaagttcagggagattgccatgatgcaatagccctccagctacttctgaaattgaagagacatttgaaagttgtttatggtttagatgatgcccgctgtcaggcattttccctgaaggagcccccgaaatctggagaaacattctccaggcagaatgtttcttttaatattggcaacactaacctcagtctgccgagctgcctgcaggacgcagcctctgtttaccaggatttcaagacagtgcttcgcgaagattccatggactttgctgtgttcgtcccttcagtccagactaggaagcgcccaaccccaagaaatacaacgagcccaaccccaagaagtatgacgagagtcaggagaacggctgccccgagtgttacaaaagcccgtggtggtgcacgtggcgacgattccgacgataccgatgacgacgactggaccgggggtccaagagtgctagacttcagtgggggcggccgcgtgacaaggcagagggtccaagtatgatgtttcttttttgcgtgcgtgcgtgtgtacattatagggaagggaaacctatagcaggcttagcagctgacacgagagagttaggggttgaattttaggtttcaggtcgtttattttagggtacatagaagcagaaaggaaaggaagatagccttttacttagatgtcattaatttggagcactccttttcttgctctgcccctgtcctgtttgtaatttccgtggggcttcggcaaaaaactgacaaaataggttgtgctccggtttctgatctctgattcaatgggaaatggaattattccttttgctttgcctgtgtaagcagttagcgcctactccgtctgttccaatatacaatttgttttagcattttatttttgtgtctatatttattcgtttggctttaatccgtatcggtttctatagatgtttttgtc

SEQ ID NO: 21960 - DNA, 2329 bp, Zea Mays
tgcgacgtcggctcagctgcagtcctccccagaaaagcagagacgcgtccgacctccgacgctgccaccaacctcttcccccagccacgctccaccgcgccatagccgcaggaaaatatcaaatcggagccgcgatgcaccacagaaaaaaattccctagggtttccaagcaaaagccctcctgaattctccaattccgcgccttcccccgcttcgtgggcctcggatttagggtttatgcatggcttccgaccctcccggcgacggcgccggcggggaagagccgacgccgggccctgcccccgccgtggaggtgcttgctgctcccgccgttccgctcaggccgcgctgggccacggagatcaaggtctacacccgtaagcacccccgcaaaacccctaaacctcctccagaaccagctcccgcccccgcctccgtccctgcccctgcccttgctcctgccccggccccgaatcccctttccgaaaccttatcctcgattcgtcgctccatccgccgcgcggacacggttggcgctgcggcgcggcccgatccggcagcgccggcctcggttcccgcccgggggccacctggggaacgcggtgccgcctcgggggacccctcatctgaggtgaaccgtgtcggcggcggtatttctaacggccacggcgacgaccgggcggcggccgcggctgagaagtctgagaaagcacggaaacgcagggtgaggagtgagttgcggcgccgactggcgggggagctcgaccaggtccgcgtgctctccaagcggctgaaggaggctgccgaggccctggcgcagcaggaggcttctgagcctgcgcctttgcccatggtggtgctgccaacacagcagcaggtggtggatgctgggtatgtgcaactgcagttctcagctggtgatatggcggtgcccatgtctgctcagattgcagctgctgttactcctgcccgttccatgctgcagcgcagaccactaaccgtgtcggttgttcataatgaagcctttgagaaggtgaagcggacgccaaaggccaatcaattgtaccaaaattcggagttcttgcttgccaaggataggatccctccctcagattcacatgtgcgcaagaaatctaagcaccacaagaagaagcataggtccctagaatctcgtggcgcagactttgatgctgagcggcggctgtactctcatgcgttcaagaagtcctcgtcacttctaagccgtttaatgaagcacaagtttgggtgggtgtttaataagcctgttgatccagttgcacttggtttgcatgattattttactattatcaagcacccaatggatcttggcacgataaggggacggcttagccgcggacagtacaggaacccgaaggagtttgctgaggatgtccggctcactttccataatgcgatgacatataatcccaagggtcaggatgtgcattttatggcagagcagttgtcaggaatcttcgaggcacagtggcctgagattgaggctgaggttaactaccttgcatcgtgtcctccattgccgaagaagtttccacctccaccaattgacctgcacttcctagagaggtcagattcgatgagacaccacatggcattggacaccaattcaagaccgatcagtcatactcccacttacacccggactccatcaatgaagaaaccaagggcaaaggatccaaataagagggacatgacaatagacgagaagcgtaagcttagtgagaacctgcagaatttgccacctgagaagcttgatgctgttgtgcaagtcattaagaacaagaacctatcagttatgcagcatgatgatgagattgaggttgaaattgatagtatggatgctgagacactttgggagcttgaccggtttgtggccaactacaagaagaacctgagtaagcaaaagaggaaggccgagcgagcgatgcttgccagacaagatgcagagttgcgtgcgcagcgccttatacaacaaccgcaaccaaccccagtcccccaagaacctgttggtgaaaaatctctaaagcaagttgcaaaaggtgagcaactaccaacatctgcatcagagaaaaacgacgagaatagacagaacgtgagtggttcaagcaattcaagcagctccagcagtgactcaggatcatcgtctagtgactcagacagtgatagctcctcttcagatggatctgatgctgccaattcatcttgagatatagattaacttggagctggctgcctggctgattccttctaaggccaaataagatatttgtagaccttccagtgatgttgg

SEQ ID NO: 21961 - DNA, 570 bp, Zea Mays
aagaaaaacacacggacttcagcagttgcagtgccggctgcctccctctcgcgtgcgctcgccctgtgcctctcgcgtgcggaagctaggcaaaccgccggcgccctagctaggtgcccaggccatcgtcggtcccttcgccaagccatcgtcggggtctcggggattagcacccgcacccacaagatggccacaccgaacggtccttctgcttctccgatggtgtaccctgtctacctttctggggtatttccccagcaaggcggggatgatcaggctcaaggtccagggatatatgccatacaacagaaccagttagcagcggcgatgggaatgggttgctatgctccaaccacactcattcccctcacttacaatatcccaaccattggtgctcctgctggtgaagagaatgtacaggatgctaggcagcaaaatgtacctcaaagacaagttgttgtgaggaggtttcacttcgcttttcagcttgacttgaccctgatcttcctactagctgcagtggtgtttctcttagccaggaaggctcaaaacaaaggctatttcttctca

SEQ ID NO: 21962 - DNA, 1077 bp, Zea Mays
tgaactgggaggaatggaatgaagcagcaggctgatacagttgtgttcaatgtggcattcggattctgaagatcacttcctctctgttaggttactcgagtattggatggagtcaaggttgagatacatcactaagggtctagaggccttatttgctactgggaaaatagcagatttggactgttttggtaggcagtgaggccttatctataggatctgtggtggaattaactggacagcaaaaatccagtggcttcacgccttcaccccagtagcaaatatcaagttttggaccatagtgcatacccaaatgggagacttatctactccctttcctatctgtttactgaacgaagggacggatattttggctgtagaaaaatatcaaccaggtgctgtgtatctgctgaacctgtgaatctgagtgggatgtgagcatgtgagccacatagataagttcatgtattgctggcactctagaaaacactctccactgcatgctgaacaagtgtagggacaccttacccatattcaggtacttatagggcatggatatgggaagcttccttactgtcattgagctctggattccctgcatatgtaaggtggtccttatgccgtcaagatggtgtaacttcctctccccagtctctagccttgatctgaactagagccgagcacgccagccctctccgtggtaaccattgtccacatcacagtggccagaactcctaccagaaggagtgaagattcaacctgaagtggtgactgaagaggaatctactccagtggctgctgatcaagtggaggatccatctaactggggtttaatagagggatcgagtacctcttcactgcaataaggtgatgaggagtactctagttgttcctgtggctggaaggcgtttccagttctggaggaggattagttaggattgtgtataagctttggagggttcctaccttcctgctattgtaataagttatgcactttgagtatatcaggacttgtaataaatgtaactcttcctatgcaataaacttcagttttagaaatgaaaagaatcttttataaag

SEQ ID NO: 21963 - DNA, 1824 bp, Zea Mays
gaaagggaaagaacaaacaaatcacaagcaataagcacacgagacacgagtggtttgttttaccgaggtttggccctcgaaggcctagtccccgttgaggagtccactaaggacgggtctctttcaaccctttccctctctctaccgatcacacaagaccggcgagctcttcttcttctcaaggatcaccacacacttaggtgtctcttgctagctttacaagcctccaaaactttggaggaagttcaatgggagtcaaaactccacgcacaaatgaatacaaagatgtagcacacactatctctcaatgaatctcacaaggcactagagctaaactcacacgagatgctttcttttgcttgctctctcttttgtggcacttgtgtgggttgtagtggtctaaatcttgtgtataagatggatcaatgaatataggtggttgggagggcttgaatatgacaactatatgacttggaatgttgcttgggctcccacaacttgaagtggccggttggggtggtatttatagccaccaaccaaattgtagccgttggagaaggctgctggcgatgggcgcaccggagagtccggtgtgccaccggacagtgtccggtgcgccgccacgtcatcctatcgttagggcttggagctggtcgaccgttggaggctttgtcctcatgtggcaccagacagtctggtgcccctctgaccatctgctctgacatctgaattgcactgttcactttgcagagtcgaccgttgcgcacagatagccgttgctccgctggtgcacgagacagtccggtggcacaccggacagtccggtgaattatagcggagctgcgcctgggaaacccgaagctgaagagtttgagctgattcaccctggtgcaccggacactgtccggtggcacaccggacagtccggtgcgccagaccagggagcacttcagtttcctttttgctcctttcttttgaagcctaacttgttcttttgattggtttgtgttgaacctttggcacctgtagaatatataatctagagcaaactagttagtccaattatttgtgttgggcaattcaaccaccaaaattatttaggaaaaggtttgtgtggcagaacatcccaagatatcaggcccacatgcacctgtccttgtctcaaagacctcagactgctatgcatgtgcaccagataacttaacaggatccgtccgattgccccaaggacaccggataaaccacttacaactagaaccgcgggattaagtaacacaaatcacacacaccaatatttttgcagcggaaatattattaccaaattttacaagttacaaaaattttacattattttatcggagtgattataagtttgaaatatatgctagctcaaatgaccatcctcaataagaagtatagaagaagtacttagacttataagaaggccgagcccaccggcacttaacaccatcaacagcatcacaaagttaggacctgaaaaacaacagggaataaaaccctgagtatggaattactcagcaagacttacccgactaaagaaaagactctcaagggtatgctggaattgggaatcaaggagaggctttagcaagagtcaactgagatacttttgcagaaatagcttactaaagtgagtccttactttcaatattttaacgccaaattaagtattaatatactctgtttgcatctagtctaatttcaccatcacattaatcaatccaacatgatttttgctcattaagattccatccatgacttagattgcagggcagtgaccaagtcttcataaccgcgaaggta

SEQ ID NO: 21964 - DNA, 2370 bp, Zea Mays
aggggaaaccgctgtagacagtcccgggcaactggaagctaaaccaaaaagctagctgtttgtttcagcttctggctttttacaccgagaagctggtgagaagctcaaacaaacagggaagaatctcctctgaggaagccgtgagtggagctgtatcaaactggcctttaggtgctgtggttggtcactgcacccaggaggctgggaaggaggaaagggataattgattcaatctctgtttggcttctaaaagtactattcctaggttggcaatgacatctgatgggaaataacaaacctccaaacttagccgtgaagccaaacaacatgctaccaagccaaaaaaaaattctaagcaaactgagatattcaagcatcacacctgtacttggccttatggctctgacgtacaggcttgcaccggggaacctggcctgcctcattgtggagactccacagttcacatgacagttgagagtaatggattaatgcattaagcaaggtaatgaaatgtaccaaaagtgacttatggaaaagaaacagagcttgttcactgctctgaatgaggaactttaatctgatgcagtctcaaaagagcagagttttgggagcaatgtcatcctctttgcctattctgccaaatcctttgaaagggagcttctcaaggcctcataacccccagcatattcctatgttgaggcagctgcctgatgactctatgcccttgtgtattgacacacatcagtctgctagtttgcacccaagagctggtgttatcggggtaccatattcaggctacactgctagtccacttgattctgtgtctaaccttgatagccagacaatggctgcaccctttatttctcagtcatccaattttgaagctctccagtctctatctaataataccccagaaacacacactaaggcagcctggttcacatcttctatggatgtttcaccactcaacacagataatattgctgcttctgatgttaatcaaatccagagtatacgtcctgctatgacatctgatgagagtgctacacaaaacgattggtgggcagatataatgaatgatgattggaaagatattcttgacgcaacagctactgattcccactcaaaagccatgattcaaatttccaactcagctacatcactacctgcagtaaatcagtcagcttcatctcatagtagggagatttgtcctgttgctagtcctcccaatagcagcaatgcttcagttgccaaacaacggatgagatggaccccagaactccatgaatgttttgtagatgctgtaaatcagcttggcggtagcgaaaaagctactcctaagggtgtgctaaagcttatgaaagttgatggtttgactatatatcatgtcaaaagccacctgcagaagtaccgcacagcccgctataaaccagacctgtcagaaggtacatcggaaaaaaggacagccactgaagagctggtcctggacctgaaaacgagcatggatcttactgaagcactgcgccttcagatggaagtccagaaacggcttcatgaacagcttgagattcagcgaaaattgcagttgcggattgaagagcaaggaaagtatctgcagatgatgtttgaaaagcagagtcaatcgagcacggagaaagtccaggatccatcctcaagggatacaacagctaaaccgtcatctaatcagagccagtctacaaacaaggattgtggtgcaaccatggacccaaatggaacaggaggcatcgtacggactgcagaactgggagaacgttcgtctgaattaggtgtaaaacagaaactcgtagagatcgaagaatctggtaccgaagtagccacaggcgacagatctaagatctcccaagagaagcggcgcaaactgcaagatagttaacatatcggttgcactattcagacatagctgttcaaaccgtttgcttggtgaaaaattggtaatctgtgtgtcgaattcgactattgatccgtgagtccattggtgagttgtaccgctcttcagttagccatatatatttataaaggatccaaaggaggaccaaaggagaacttcctggcagccgtctttataacattagcaataagagctatccccgaagttatggggtaaaataaggtcttgaaatttagctttgtttctgaattcctccttttcttttgtttgggttgaagtggtcaccgagtcgatgtagatgaccacatgaatgaatttatcggaagcaagctagtgctgttccctattggcatagaaaccaaatattgaaacacgaacactgtttgatggtgcaaacttttagaatgtaattctgcatcgatttgtttggtggtgttggg

SEQ ID NO: 21965 - DNA, 1985 bp, Zea Mays
ctccactgccgtctcttctgcttcttctaatcctcttgtcccgcgaaccccagtcgctaccgagagcacaccaatcctcatcacctccgagattttcatcgcctgccgcgcaatctcgggatcctagccgtccgcacatcgccgcggccttcctccgcgccacgaatggtgttctctggccgctgtcttttcccgaggacctaacccaaggcggtaggtaccagctaaaagtctaaaggcgaccaccggaccgggcggcaatgacgaccgccgcgagggagaggcgcctgccgccgacgctgcccctggccacgcttatcggtcgcgagctccgtgcggggggctccgagcgcccggccctgcgctacggccacgccggcttcgccaagcgcggcgaggactacttcctcgtcaagcccgactgcgtccgcgtccccggggaccccgcatcggcgttctcagttttcgccgtgttcgacggccacaacggcgtgtcggcggcggtctatagcaaagagcatctgctcgagcacgtcatgagcgcgctgccgccggacatcgggcgcgacgactggctgcaggcgctgccgcgcgctctcgtcgccggctttgtcaaggccgacattgatttccagcgcaagggggaggtgtcaggaaccacggcgacactggtggtcatcgatgggttcacggtcacagtggcgtcggtgggagactcgcgctgcatcctggacacgcagggcggcgagttgcagctgctaaccgtggaccaccgcctggaggagaatgcagaggagcgggagcgcgtcacggccagcggtggggaagtaggccggctcaatctcttcggtggtcaggaggttggtcctctccggtgctggcctggtggcttgtgcctttcaagatccattggggacatggatgttggggagtacattgtgcccattccacatgtcaagcaagtcaagctatcaaacgctggaggaaggctgataatagcatccgatggcatatgggatgcattatccaatgaagcagctgcaaaagcatgcagaggattgcctgcagaactggcagcgaagcttgtcgttaagcaagctctgaaaacaagcgggctaaaggatgacaccacctgtgttgtagttgacattatcccatccgatcatttgacatcaccacaattgtctccaaagaaaaatcataacaagttgaagtcactttttcgtagaaggtcgcatagttctgttggaaagctcgggggcaagtctgcctccattggttctgtggaggagttatttgaagaaggctctgcaatgttagaagaaaggttgggcaggaatttgtctttgaaagcagtttcagcaccttttcgctgtgcaatctgccaagtggaccaagagcccttcgaagatttgatgagagataatggaggtggttactgctcttccccatgcgctccatggggtggtccatatctctgtttggactgtcggaaaaagaaagatgcaatggaaggtaaaagatctagctgctccacagcatgcaggtgaaacagtccttgcctcaagcagaaaagaaccgatgagagaggataataagttgctggacccaagtataattgtttgctgaaactaactgtattgccagcccggtaaaagacatatttggctggtagtaagacctaactagtctgttacctgcgcacaatccgaatggaaaagtttgttgtcgttgaggacatagctcaaataacttgagcttgtagttttgatgtaccctgtagcgtgccttgtgcagggaaaaattgacctgcctattgctgtttttttttataaaatagctatcgagggtgattaatcgtggacatgtttttatttttttggtgggattgaaagaagtacatgcctggtgcaggaacgagagtgaatcgtattactaggactctaaacaatgtgcttcgcaataatgccatccgaaagatttaa

SEQ ID NO: 21966 - DNA, 7621 bp, Zea Mays
gtcgccttctccgccgcctttcttcccgagattttcaggaattttgctctctttttatggcactgtgcttttgagaaggcctttaattgtgctgtctgggccacggaacggcaatgtcgcagcttggattagctgcaactgcctcgaaggccttgccactactccctaatcgccagagaagtccagctgggactacatttccatcatctgcattgccgaggccctcaaaccgaaggaaaagccatactcgttcacttcgtgatggtggaaatgaggtatcagatgccaaaaagcacagccagtcagttcgtcaaggtcttgctggcattatcgacatcccaagtgacgcagtttcggaagtcgatatttcacatggacctaaggatcctagggggccaacagattcctatcaaatgaatgggattatcaatgaaacacataatggaagacatgcctcagggtccatggttgttgaattttgtgcagcactaggtggcaaaacaccaattcacagtatattagtggccaacaatggaatggcggcaacaaagttcatgaggagtgtccgtacatgggctaatgatacttttggatctgagaaggcaattcatctcatagctatggcaactccggaagacatgaggataaatgcagaacacatcagacttgctgatcaattcgtagaggtgcctggtggaacaaacaataataactatgccaacgttcaactcatagtggagatagcagaaagagtaggtgtttctgctgtttggcctggttggggtcatgcttctgagaatcctgagctgccggatgcattgaccgcaaaaggaatcgtttttcttgggccaccagcaacatcaatgaatgcattgggagataaggttggttcagctctcattgctcaagcagccggggtcccaactcttgcttggagtggatcgcatgttgaagttccattagagtgctgcttagacgcgatacctgaggagatgtatagaaaagcttgtgttactaccacagaggaggcagttgcaagttgtcaagtggttggttatcctgccatgattaaggcatcctggggaggtggtggtaaaggaataagaaaggttcataatgatgatgaggttagagcgctgtttaagcaagtacaaggtgaagtccctggctccccaatatttatcatgaggcttgcatcccagagtcggcatcttgaagttcagttgctttgtgatcaatatggcaatgtagcagcacttcacagtcgtgattgcagtgtacaacggcgacaccagaagattattgaagaaggcccagttactgttgctcctcgtgaaacagttaaagcacttgagcaggcagcaaggaggcttgctaaggctgtgggttatgttggtgcggctactgttgagtatctttacagcatggagactggagaatactattttctggagcttaatccccgactacaggttgagcatccagtcactgagtggatagctgaagtaaatctgcctgcagctcaagttgcagttggaatgggcatacctctttggcagattccagaaatcagacgtttttatggaatggactatggaggagggtatgacatttggaggaaaacagcagctcttgctgcaccatttaattttgatgaagtagattctctatggccaaagggccattgtgtagcagttagaattactagtgaggacccagatgatggtttcaaacctactggcgggaaagtgaaggagataagttttaaaagcaagcctaatgtttgggcctacttctcagtaaagtctggtggaggcattcatgaatttgctgattctcagtttggacatgtttttgcatatggactctctagaccagcagctataacaaacatgtctcttgcattaaaagagattcagattcgtggagaaattcattcaaatgttgattacacagttgacctcttaaacgcttcagacttcagagaaaacaagatccacactggttggctggatacaagaatagctatgcgtgttcaagctgagaggcccccatggtatatctcagtggttggaggtgctttatataaaacagtaaccaccaatgcagccactgtttctgaatatgttagttatctcaccaaaggccagattccaccaaagcatatatcccttgtcaattcaacagttaatttgaatatagaagggagcaaatacacaattgaaactgtcaggactgggcatggtaggtacaagttgcgaatgaatgattcaacagttgaggcgaatgtacaatctttatgtgatggtggcctcttaatgcagttggatggaaacagccatgtgatttatgcagaagaagaagctggcggtacacggcttcagattaatggaaagacatgcttgttgcagaatgaccatgatccatcaaagttattagctgagactccctgcaaacttcttcgctttttggttgctgatggtgctcatgttggtgcggatgtgccatatgcggaagttgaggttatgaagatgtgcatgcctctcttgtcacctgcttctggtgtcattcattgtatgatgtctgagggccaggcgttgcaggctggtgatcttatagcaaggctggatcttgatgacccttctgctgtgaaaagagctgaaccatttgatggaatgtttccactaatggacctccctgttgctgcctctagtcaagtacacaaaagatatgctgcaagtttgaatgctgctcgaatggtccttgcaggatatgagcacaatatcaatgaagtcgttcaagatttggtatgctgcctggacaatcctgagcttccttttctacagtgggatgaactaatgtctgttctagcaacgaggcttccaagaaatctcaagagtgagttagaggataaatacaaggaatacaagttgaatttttaccatgggaaaaacaaggacttcccatccaagttgctaagagacatcgtcgaggaaaatcttgcatatggttcagagaaggaaaaggctacaaatgagcgacttgttgagcctcttatgaacctactgaagtcatatgagggtgggagagaaagccatgcacattttgttgtcaagtctctttttgaggagtatcttaccgtggaagaacttttcagtgatggcattcagtctgacgtgattgaaaccttgcgtcatcagcacagtaaagacctgcagaaggttgtagacatcgtgctgtctcaccagggtgtgaggaacaaagctaagcttgtaacagcacttatggaaaagctggtttatccaaatcctggtgcgtacagggatctgttggttcgcttttcgtccctcaatcataaaagatattataagttggcccttaaagcaagtgaacttcttgaacaaaccaaactaagtgaactctgttccagcattgcaagaagcctttcagatctggggatgcataagggagaaatgactattaaggatagcatggaagatttagtctctgccccattgcctgttgaagatgctcttatttctttgtttgattacagtgatccaactgttcagcagaaagtgattgtgacatacatatcacgattgtaccagcctcatcttgtgaaggatagcatccaaatgaaattcaaagaatctggtgctattgttttttgggaattttctgaagggcatgttgatactagaaatggacaaggggctattcttggtgggaagagatggggtgccatggtcgttctcagatcacttgaatctgcatcaacagccattatggctgcattaaaagattctgtacagtacaacaactctgaggtcaacacaatgcacattgtgttattgaatgctgaaactgaaagtaatataagtgggacaagtgatgaccaagctcaacataggatggaaaagcttaccaagatactgaaggatagtagtgttgcaagtgatctccaagctgctggtttgaaggttataagttgcattgttcaaagagatgcaggtcgcatgccaatgcgccacacattcctctggtttgatgaaaagaactgttatgaagaagagcatattctccggcatgtggagcctcccctctctgcacttcttgaattgggtaagttgaaagtgaaaggatacaacgaaatgaagtatactccatcacgtgatcgtcaatggcatatctacacactaagaaatactgaaaaccccaaaatgttgcatagggtatttttccgaactattgtcaggcaacccaatgcaggcaacaagtttacgtcggcacaggtcagcgacactggattaggatgtcctgaagaatctctgtcatttacatcgaatagcatcttaagatcactgatgactgctatagaagaattagagcttcatgcgattaggacaggtcattctcacatgtttttgtgcatactgaaagaacaaaagcttcttgatctcgtcccattttcagggagtacaattgttgacgttggccaagatgaagctactgcttgttcacttttaagatcaatggctttgaagatacatgaacttgttggtgcaaggatgcatcatctttctgtatgccagtgggaggtgaaactcaagttggactgtgatggacctgcaagtggtacctggagagtcgtaactacaaatgtcactagtcacacctgcaccattgatatctaccgagaagtggaagatacagaatcgcagaagttactataccattcagctacttcgtcagctggtccaatgcatggtgttgcactgaataatccttatcaacctttgagtgtgattgatctaaagcgctgctctgctaggaacaacagaacaacatattgctacgattttccgctggcatttgaaactgcactgcagaagtcatggcaatccaactgttctagtgttcctgaaggcagtgaaaatagtaaatcctacgtgaaatcaactgagctggtgtttgctgaaaaacatgggtcctggggcactcctataattcccatggaacgtcctgctgggctcaatgacattggtatggtcgcttggatcttggaaatgtcaacacctgaatttcccaatggcaggcagattattgttgtagcaaatgatattactttcagagctggatcattcggcccaagggaagatgcattttttgaagctgtcaccaacctggcttgcgaaaggaagcttccccttatatacttggcagcaaactctggtgctaggattggcatagctgatgaagtgaaatcttgcttccgtgttgggtggtctgatgaacgcagccctgaacgagggtttcagtacatctatctgactgaagaagactatgctcgtattagctcttctgttatagcacataagctgcagctagataatggtgaaattaggtggattattgactctgttgtgggcaaggaggatgggcttggtgttgagaacatacatggaagtgctgctattgccagtgcttattctagggcatatgaggagacatttacacttacatttgtgactgggcggactgtaggaataggagcctatcttgctcgacttggtatacggtgcatacagcgccttgaccagcctattattttaacagggttttctgccctgaacaagctccttgggcgagaagtgtacagctcccacatgcagctgggtggtcctaagatcatggcgaccaatggtgttgtccacttgaccgtttcagatgatcttgaaggtgtttccaatatattgaggtggctcagctatgttcctgcaaacattggtggacctcttcctattaccaaacctttggaccctccagatagacctgtcgcatacatccctgagaacacatgcgatccgcgtgcagccatccgtggtgtagatgacagccaagggaaatggttgggtggtatgtttgacaaagacagctttgtggagacatttgaaggatgggcaaaaacagtggttactggcagagcaaagcttggaggaattcctgtgggtgttatagctgtggagacacagaccatgatgcagctcatccctgctgatccaggtcaacttgattcccatgagcgatctgttcctcgggctggacaagtgtggttcccagattctgcaaccaagacagctcaggcattattagacttcaaccgtgaaggattgcctctgttcatcctggctaactggagaggcttttctgggggacagagagatctctttgaaggtattcttcaggctgggtcagcaattgttgagaaccttaggacatataatcagcctgcgtttgtctacattcctatggctggagagcttcgtggaggagcttgggttgtgatcgatagcaaaataaatccagaccgcattgagtgttatgctgagaggactgccaaaggtaatgtgctcgaacctcaagggttaattgaaattaagttcaggtcagaggaactccaagactgtatgggcaggcttgacccagagttgataaatctgaaagcaaaacttcaagatgcaaagcatggaaatggaagtctaccagacatagaatcgcttcagaagagtatagaagcgcgtacaaaacagttgttacctttatatacccagattgcagtacgctttgctgaattgcatgatacttccctgagaatggcagctaaaggcgtgattaagaaagttgtagactgggaagaatcacgctctttcttctataaaaggctacggaggaggatctctgaagatcttcttgcaaaagaaataagacgaataattggtgacaacttcacgcaccaatcggcgatggagcttatcaatgaatggtacctggcttctcaggccacaacaggaagcactgctggatgggatgatgatgatgcttttgttgcctggaaggacagtcctgaaaactacaagggatatatccaagagctaagggctcaaaaagtatctcagtcgctctctgatcttgctgactccagttcagatctacaagcattctcgcagggtctttctacactattagataagatggatccttctcagagagtgaagtttgttcaggaagtcaagaaggttcttggatgatgatatgataccaacacatccaacacaatatgcgcatgctacatgttatttttcaagtacatacatagaaggatattgcttggccttgattgatcatgtctgatctaagtcgatcattattttcttgaaacttcctttcggacgtggtgctatggttgatgaatttggatgtgtgcgttctgccaggtgtaagcccaaaggtttatacagaccgagttaaggttaggaagagcacgagtgaacttgttctggttttgcagtggttaaggcagaaagttgtttcactgtagttctgagatgtattaccagcggcgctgtaattttagggtgtataatgcggatgctagtaaacaattgagtggttcattaaattttgaactcgaataatatgtttctgtaggcacatgtgacgtaccactacatgaaataaatgtcgctgaactagggcaccagagttttggtaggactaaggttttgtttggttatgggataaggtgagcatctccagcgttcccaaacttgaatttccc

SEQ ID NO: 21967 - DNA, 3097 bp, Zea Mays
tccaaaccgccccttaacccctttgtccccggcgcacaccccgtctccgcagcaccacaccacctccttcccctgcgggctgcggctctgctgcctgccactcttctcttctcttctcctccgctcctgcagagtgcaggccagcacatgacgacggggccttggcgctggtgccacggcgtccgcgccacggccagcctggcgctgctcctgctgctcgcgtgcgtgtccggccgctccgtcacgtgcgcgcgagcgcagtccacggcgttcaccggcagggagaccaccagcttctccttccccaagttcgaccagaaccggctccagctctccaccaacctgacgttcaccggaaactccaccgtcagccagggggcgctgcaggtcaccccggacagcggcaacaacttcagcacgtacctcgccaaccaggccggccgcgtcttctactccacgcccttcgtgctctgggcctccaacgcgtccagcgccgccgccgccggccgccgcgtcgcgtccttctccacggtgttccagttcaacctgtaccgcaccaacgcgtccgtcaagggcgaggggctggcgttcgtcgtcgcgtccgcgatagccgacccgccgcccggcagccacggcgggttcctcggcctcaccaacgcgtccacggacgggctcggcgccaacgggttcgccgccgtggagctggacacggtgaagcagccctacgaccccgacggcaaccacatcggcctcgacgtcaacggcgtccgctcctccagcgccacctgcccgctcgcggccctgggcatcgagctcgcgccggccgacaccggcgccagcgacggcagcaacttcgtctgggtcgactacgacggcgccgcgcggcgcctgcgggcgtacatctcgcccaacgccaccaagccgtccgccgccgcgctcgacgcgtcgctggacctctccgcggtcgtcgccgccagggacgcctacttcggcttctccgcgtccaccggcgcggacgactaccagctcaactgcgtcaagatgtggaacatgaccgtagaggtgctgcacgacgacgacgacaggctgccgaagaagctgtccggctggaagctcgggctggccgtcggcgcgccgtgcgccgccgcgctggcggcgctcgcgctgctcgcgggcctgtacctgatgaagaagcggaggaaggtcggggacgacccgagctccgtgtcccacagcgccatcgacctgaggagcatcccgggcgtgcccaaggagttcgactacgaggcgctcaggaaaggcaccaacggcttcgacgacaagatgaagctggggcagggcgggtacggcgtggtgtaccgcgccaccgtgcccggggacaacggccgcagcatggaggtggccgtcaagcagttctccggcgccaacaccaaggggcaggaggacttcctcgccgagctcggcatcatcaaccgcctccgccaccggaatctcgtcaagctcatcggctggtgccaccaggacggcgtgctgctgctggtgtacgactacatgccacacggcagcctggacaggcacctgttcggcggcagggaggcgtcggcggcggcgacgacgacgacgacgctggactggaagcagcgctacaacgtggtcgccggcgtggcgtcggcgctgaactacctgcaccacgagttcgagcagacggtgatccaccgcgacatcaagccgtccaacatcatgctggactcgtcgttccacgcgcggctgggcgacttcggcctggcgcgcgcgctcgagtccgacaagacctcgtacacggacaagctgggcgtgccgggcacgctggggtacatcgcgcccgagtgcttccacacggggcgggccacgcgcgagtcggacgtgttcggcttcggcgccgtggtcctggagaccgtctgcggccgccgcgtctcctgcgacaacccggcggggtgcagccagctgctggagctggtgtggaggctccacggcgccgggcgcctcctggaggccgtggacccgcgcctcgccgccggcgggtacgggtacgacggcgaggaggccgagcggctgctgctgctgggcctggcgtgcagccaccccaacccgcggcagcggcccaaggcgcaggccatcctgcagaacctgcagacgcggtccgtgccgccgctccccgtgcccatgtccaagccggtgttcatgtggcccgcgccgctcgccgacggggaggaggacgcgacgcaggcgtcgtccatgtcgcgcagcggggtcaccagctcgggcgtcacctcctcgtccaactacccctacacgtggtcgtcgtcggggtacaatacccagaccttccaggtgagcagggaggtgcacgacgcggcggagagggacgtggcgaccgtttgactgagaagaagacggtgtcgagctcagcatgctgccgccggcaggacggctcactgacggtggtgcacgtggagcccggggggcgggccagtcggcagtcgggttgcgcgctttcatcaggagtcaaaaggggcttgtggcaacgcggctcacgatcgaatcggacaaaataaagacgccaacaaagcgcacgcgacaacgcgggcagggttttcgtcgtcggagagccttttccgttgcagctttgagtgggtagccaagtgggtccttttttctgcagctgttgcttggtttgcttcttggaagccatcacagtttggtgtagatagccgccacattgtcagcataaagatgatatgctgacacacatctccgtgtttgtcacattgagcattcagcagagcctgcaccaacccagcgattctccaaacacagacagtgcactgctctcgtctggactggatcaagttcgcggtgatcttctccattgagccggttgacagccgcctcagcatccaatgccaaacaatccacatgatacagtcttcttatccaatgcttggcgccggactggatataatgttgcatccttgtgcgtgcatgcggatcccgaattgaatcggtgtcgcgtccagggatcgaactcgtattattattattgtgagttcgtcctctg

SEQ ID NO: 21968 - DNA, 1701 bp, Zea Mays
ctttggtgccgccacttcctggttggatttcttcagtatgtccagcagtggaagaagaaagttgtatttattctaaataaattggacctctatcggaacagcaatgagcttgaagaagctactgcatttgtcaaggaaaatgcaatgaaattgcttaccgcagaggatgtcacactgtttcctgtatcttcacgctctgctctggaagccaaactttcatattccaaaaacagtgatggaaagcattcaaccgaagctatgtataatgatcctagatggagaagcagcaaattttttgaacttgaggattacttactgagtttcttagatagttcaacggaaaatggaaaagaaagggtccggctgaaacttgaaacaccaataggcattgcagatcgattgttaacttcgtgtcaaaggctggtgaaactagaatatgaaaaggctgttgaagacttagcatccatcaaggatcttgtttatggtgcaaacaattatgccatcaaacttaagtctgatagcagttcctggcagaaccagatttcgtctctcattgagagagcaaaaggtcgagcagttacactcatggaatctacacttcagctgtcaaatattgaccttatttttgcatacacgatcaaaggaaaaacaggcagttccatgagagccacatcatttgttcagaatgatattctgagtccaacccttgatgatgctgtgaatttactaggtgactactcgacatggttgagttctagcaatacccgcgaagcaaatgtatatttggagtgtttctgtgaaagatgggatgcactggttgctccggaagaaagggctctgttagatccaaatgggcttgttaatgaaggggagaaactcaccataaaggcactggaaggcttcaatgccagtgctgccgccaaagattttgaagaggaaattcgagaattggcttttggaacatttggagggctaggtattgctggactgtcagcttctctgttgacatctgttttgtcaactacccttgaagatcttcttgcccttgctctttgctcagctggcgggtaattcagtaattgataactgtgcatcgttctttagcaaatattttaacaatgaaatgggacggttgatgtgtaaccattttgatttgtccttcagtttttttgttttatcaagtttccctggtcggcggaagcatgcaatagacaagattaacaaggctgctgatgaactctctcgaaaagttgatgaagctatccaaaaggatatctcacagagtgctaataacctaatccgcttcgttgaggttatcagcaaaccttaccaggaagcatgtcagcgaaaaatagattggttacagggcgttcagggtgagctatctgctgtcgagcgtaagctccaaactttgaaagttgaaatccaaaatcttaatggatcataaggtttcatttcaacttgtttatttgcaattattttttggatactaatagtttttgttggtttatactgcgttgtgatgctattgagttgacgtagtgcctttcctgtatatgatgaagtctgaaagtgtaatatgtgttgtaaattcagaataagtgataaactatcacatgataattacacaccttgagaaccgagaaggatgttttgaaaacttgcctttttgataattttacaatatgatgtgggcaagaa

SEQ ID NO: 21969 - DNA, 1306 bp, Zea Mays
ttatgcgtttccgagtatcgagcgtctccttgacgcgggcgcccggggccatctccaccgtcagtggcgagatcggacggcctgctggaggtgttgggcccatccgtccccgggtactgggaccacccgatccctcttcaatacaaaaccagccgcagttctccattttcgagcgcagaagcgagagagatccggagcagccgcagtcccaccgaccccgccgccggtcgccctccatctcctcgccgctgcctctcgatctttgtacagtttctcttttcaataatcaagatgagccgtggtggtagtgccggtggtggtcaaagttctctgggttatctctttggaagcggttgctgctggggttaccagccaaaccaataactaccacagggctgatggtcagaacactggcaacttccttacggaccgtccttcaaccaaggtccacgctgctcctggcggtggctcttccctgggctacctgttcggtggcaactgatgcccgtgctggtgcgctcaccaaagttatcctcccctgcctgctgcgtgctatgtctgaatcgtgaacaaccgttgtcatttcatgtgtgtaccccgtgcaatgctttgtgcgcatggttgatttctctgtggcaaacttcccgtcctgcatggggttgtaagctgtctctaaatttcacggcaagtcgtgtgcctgaaccttcatcttaagttgttgtcgtatcccttcgtcttgtttcggttgcaccccgtgatggtatggattggttgctgaccacttgatctatctattctgcattttcctttgaaatgtacccttgtgcatttggatgcttctagtgtactgttcttgcatggttactcatatgaccgagcagttgagtacagcgtgactgggcttctgaagcggccaaatgatcaagaaaccgttctggcgatgcctggagagtggccctgaaaaagtatcagggcaagccttggggatggtggttaaatagacctgtttaaaaattatcttaatgcagcagttggtaataggcgtggaactgttgtgttgtgagatttgtgggtgagaccgtaaaaagggctgcgtaatagagtacttaagtacacaattttaaatagcacaattcaaaatttgtctatttgagatcgagtaaagtattgatgtgtagtggaatctattttaccattttaggctctgtttggtagacctctattttaagaattttaagtttatttcagcttctttccaaccaggtatagctctacgaactctagtttaaaaaactgaaactatagg

SEQ ID NO: 21970 - DNA, 530 bp, Zea Mays
aggggtgtcaactcccttattgccttgggggcctggattatttgaaatcatcggaatcgaattgtcttcgatggaatctcccctagtgtttctgcagctctttgtcaggttcatacgtgacgcacgagacaaactactttgtatatttctacatcgactctaaagctgtcttgctattcaagtctgggtgattgctcgcagccgacgcaatcaaccttgcacgcctacgttccattgctcccatgtatgcaccgcacccttccccccaggcccagggtcgtctgcagccaagctggaagccggtaatcttaatgagcctgcatgttgatgtatatcagcaacggattattcttcgtatgcccactagtgtgagatcagattgcatcttacttatgtctgatatatctaggttaggtgttgtgagtacattgtcttgttgcaatatgattgccggacaactggacgaactgcctctcgtctgtttgtgattatctcaatagaagcgtccttgctcatgcgtaatactcata

SEQ ID NO: 21971 - DNA, 3337 bp, Zea Mays
gttaaagcttgtttcggagtgagttccgtcttctccttcttcttgttcccttccacggttccacccccgcacgaccgcaccactccaccaccaccctctcctcctcccttcgcctcggtgtggggcccgactcccgagccagcattccgtcaacgccgctccgtcccgctcgactcgaccactcaaaccttctggtggggcgctccttcggagcgaggggaaggagctcatgaaagccaagcgaggaggtccatgacgaccggaggccgccgatggaatggcagatcccgtcgacatcgacaaggcacttgttgctctaaagaaaggcactcaactccttaaatatggtcgcaaaggaaagcctaaattcattcccttcagactatcgaatgatgaatcgactcttgtttgggtttcaaataacaaagataaaagtttgaaactagcttctgtgtctaggattctctcaggccaaagaacgctggtttttcaacgttttctgctccccgagaaggaccatttatccttctccctcatatataatgatggcaagcggtctctcgatctgatctgcaagaataaagtcgaggcggaggcttggtttactggtcttagtgccttgatatgtcgaggacagcatggatcccaggtccaacatatagatggaatccggatcgctggacttccttttgatggtgcaagagaaagtagcctaagtggtagctctactttcacttcggattcctttgagaataagctgagctcggtaaactcttccaaggatcgttcttcgggagaatatacatattcagaaaggactgatgtgtcggatatgcaagtgaaaagtgtttcttcttcagacattcgaatcagtgtttccagtgcccttagcacatccagccatggctctggaggtgaagattccgaatcgtttggagatatttatgtatggggggaagtcatctgtgataccatctcaagatcagggtctgatagaagtgcttactctcctggcacaactacagatgttcttgtaccaaagcccctagagtcaaatgtaatgctcgatgtgagttatgtggcttgtggcgtgaaacacgctgcccttgttacaagacaggcagaggtatttacgtggggagaagaatgcagcggtcgtctcggtcatggcattggaacaaatgttttccagccacgtcttgttgagtcactatcgacctgcaatgtcgaactaattgcctgtggtgaattccacacttgcgctgtcactgcaactggtgatctctacacctggggagatggcacacataatgctggattgcttggtcatggtagtaacgtgagccactggatcccaaaaagagtgtcaggtccactggatggtcttccggtatcagctgtatcttgcggcacatggcatacagccttgataactagctctgggcagttatacacatttggtgatggcacatttggagtcttaggtcatggaaacagagcatcatgctcatatccaaaggaagtggagtctttgaagggtctgaggacaatttctgtttcgtgtggtgtgtggcatactgctgctgttgttgaggttatcatttcacagtcaaatgcttcatctggaaagttgttcacttggggtgatggagacaaatatcgcctgggtcatggtgataggtcttcaaaactgaaaccaacatgcgtcccctcgttgatagattacaacttccataaggctgcatgtggccatactcttacgattgggttgactacctcagggcacatttttactgttggaagccctgtgtatggacagcttggcaatccaaataatgatggaaggtatcctcgcctggtcgaagagcagcttgggggtggcggtgttgtggaggttgcttgtgggtcttatcatgtcgcggttttgacaaatgctggtgaagtttacacatggggtaagggtacaaatggaagattaggccatggtgatattgcggatcgtaaagtgcctacactcgttgaggcattgaaggataggtctgtaaaacgtgttgcttgtggatcaagctttacagcagccatctgtcagcacaaatgggtgtctgggatggagcagtctcagtgctcggcatgcaggcagccatttggtttcactcgaaaaaggcacaactgttacaattgtggtttagtacactgccattcgtgcagttcaaagaaggctctgagagcagcattgtctccaaacccgggtaagccataccgtgtctgtgattcatgttacgtgaagctaagtaaagttttggattctggtgttagttatagcagaaatactatcccccgcttacctggtgatacaaaggccgagagaatagacacaaaggcaaccagagttgcacagtctaatagttcagatatgattaggaatttggatgtgaaggcagccaagcagacgaagaagtctgagtattcgtcgcaagttccagcgacgttgcagctgaaagacatccctttcatcagcgcacctgacctgcagaacctgtctacagtggctaatcagtacccttatgaccccagatctactttaccatccttgagaatgccatatctgaactactccagctccatgtcctcggaaagctccgagagtcttaaggatgcaaatgaactcctgaagcaagaggttcaaaaactacaagcggaggttaatagtttgagacaggaacgtgaacagcaagatgctgagctgcagaaagcagatgctaaagcccgtgaagcgatgaaccttgccaccgaggaagcatccaaactgaagacagcgaaggatgtcataaattcactaacagcccagctaaaagaaatgtctgaaaggcttcctcctggagcatgtgacgtgaagaacaatggacgcgttatgggcgatttagcgcccgaaatggggagagagaagcagatgcgatatggtgatcggttcagtggattgcctgctcaagtttaccaaacaagcaactacagtgaaacagccatggttcctccacaagggagcagcaggagcgagcacgtcgacggtgtccgagagttcttctcccctgtgcagcagatggccaatggaggagggtctacgactattgggtatcgttacaggtcagatgaccacgaccgaagggagacagacaggttccagataaatctgcagagcttgaatacgagaagctctaattctcccagtaaccaagtcgacgcggagtggatagaacagtatgagccaggagtgtacctgactctagtttctcttcgtgatggaaccaaagagctgaaacgcgtacggttcagtgtcgtt

SEQ ID NO: 21972 - DNA, 674 bp, Zea Mays
cgagtgggctctgagttcatccacacagtttcagctaatcatctatatgacagaacacacggcaaggacttgacagatggatacttcctctgcttaatgattggttatgccttcggattgtcatgcacatacgttggcttgtacctgatgaacagcgggcagccagctctgctctaccttgttccttcaacactaggagttatcgtcctgcttggagcgaggaggggggagctcggtcagctctggaacgccaaggtgtagcctgcctgggaggcccgtgcatatagctgatacgatgacactggttgcaggcttcaaatgggctttggtttagctagacatgcatctgatggttttttggtgaaattatgccaagcatcagcatgatccatggttaggaaatttctttgttattagagtacacaacacacaccacacatacgaaggctggttggtttgttactagcctgctgctgtagggcacactgcacgtcaaaatccctagcgtgatgcaaatttcagcaaaatttatagacagatatgcatcaataatacctactatatcaaagtagtttttattgagcctatcagaaaatatatgtttagttgtgtgtttatttggttagtaagagcctctagctagatcgggtggtttgagtagcacttctaggttg

SEQ ID NO: 21973 - DNA, 655 bp, Zea Mays
gagacgacctagagttgagtcggttccagcagcgcgtgaaactgaaaaagaccagaacaaatgagtttgggtctcttggagttctcaaatcattgaagaaactgagacaacttgatggagtcatggggttttacaaaggaaatggtgccagtgtgatgagaattgttccttatgctgcattacatttcatggcatatgagcggtaccggtgttggattttgaataactgtccctcactgggaacagggcctttagtagatcttttagccggttcagcatcagggggaactgctgtattgtgtacttatcccttggatttggcccggactaagcttgcctttcaggtcaatagttcagatgaactcagcagagctttgaaaaggggaagtccccagccagcatatggaggaatcattgatgtctttagatgtgtttactcagaaggtggagtgcgggctctttaccgaggtgtaggtatagttattcccttcatatgtcatattatcattaattagtcaagcacatggaaatctctagtcagttcactaggcgcatcatattttagttgtctggatgaattttttacttgttgatgtagttatactgttcagagtttagtcagcacactagacgctataaacagtttagattcagg

SEQ ID NO: 21974 - DNA, 546 bp, Zea Mays
ccgcttcacgtcaaacgggtgaagagagttgctggagtaaaatcggcgcccatgccagcagaagcggcgaaacttccacccccaccttcccctcctgctgcgtgtgtatacatatttactcgccccggctggctcccaccacctcactccattcctgacggcggtttgaccttctgaccggagggagagagagagagagagagagaggagaatcatagctgctgcgttcgatttgcggagggctggaggggacgcgagacgggacaggacggatcttcgacggagcgttgcccgattcgtcgcagttcccggacaagggaggaaaggcgtgggaagagggaggacgcgcgttggtctccgatccaagagctttgttaacaccagagattaaaagatagcgccgtagcgcaatgaaggcaccatcgctactggttcggtgtttccctggcttgcttcccagcaaggacactagttgtgtgccaattgtgtccgagaaggatctgcagctaccatcactagccgttgaaataattccctcaaaggtgc

SEQ ID NO: 21975 - DNA, 1172 bp, Zea Mays
tgaaatcagagcgacaactttaggattcgaacctgatatgcttgccttttcggggtgctattacggtggtggagagaaagagaggagagaacttggtgctataaggaagaggtggaaaggcttgcatgtatgtatgctatactgtgctatcatttaaaaagctaagattgaaaattttaatgcagcatgcgctgttctgtatttcagcctaacccagagaaaggaagaaggcaaggtagatgccctctaactcctgaagaggtgggtttgatgttgagagcgctgggctacagaaaggatgtccacatttatgtagcttctggagagatatatggaggagatactttgggcacaagagaacgatccgaccaaatgccaaaaggctctatcccttatttttgaacagaggaaacatgtcgtgggatgcattctcctcaaaagtacacatggttcagaaaggatttatgggagagcccaaagagctgaggccagggaggggagagtttcatgagaacccttctacctgcatttgtgaaaggactgatggcaaagcagtagccagagccaaatctcaagatgatcaagtattgaatagtgttgctgaccaaggcaaaggcattggcgagccagctgttcccaatcatacggatgaagaggcgggcgaacctgatgatgacgaagatgtccctgctgacaaagaggttgttgacgctgaaatggttgacgatgtattggccggggatcctgagttagaacagattctttcagactagtatccatcatcagagatgtttgcacaaaccaatttttggccgagtgattgatgaattttgccacgtccctcgaaattgtacatactttttttttgcgatgtaaatgtacgtatacatccaatctactctagcttagctcgcagcctccttacacagtagctcttttgtaacgtttgtggattgttatagcttgtatcatgggttttgctttttgtgtagcaactctttgacgccctttttgtgtaagcatcttttggcatgtaggatgtgaggtgcttaagcacggataattaaggagagaacgttgttataccattttcataaatgagttacttgcctagatagatttagccatcttgttaacacaaatgaaaaaattggtcttaagtaatatttgag

SEQ ID NO: 21976 - DNA, 1621 bp, Zea Mays
gttttttttttgttgttgaagggaagatctggtgcagcggcgagagctatctcattgagtcatcaagtcgtgggtgccaagcagtttctctgcatttgtgggggaaggaggattgtcacggtttatccctttcccagaccccactcatgtgggagcctccaacattgggtttgcccttgctgtaatttttttgttggaagtccatatcagtggcgagagctatctcattgagtcagcaagtcgtgggtccaaagcagtttctctgcatttgcggggaaatgattgcctcggtttatccttttcccagaccccactcatgtgggagcctccaacattgggtttgcccttgctgcaatttttttgttggaagtccatgtttagtcaatttatttatgatggatttatgcactgtgcagtcctgcttgagcttaattgagattagtttctcaccgcaagagaactgcaactattcctggagtggaatagtcaaagtatggagcatgccacaaataactaaggttgcaaccttgaaaggtcacacagaacgtgcaactgatgttgtcttctctcctgctgatgactgcttagcaacagcttcagctgatagaactgcaaaattatggaaaccagatgggtcacttttgatgtcttttgatggccaccttgatcgtcttgctcgccttgcttttcatccatctggaaagtaccttggtacagctagctttgacaagacttggagattgtgggacatcaatactggcaaggaactgctactccaagaggggcacagcagaagtgtatatggagttagctttcaccctgatggttctttggcagcatcttgtggtcttgatgcatatgctcgagtatgggatctgagatctggaagattgttctttacactcaagggccatgtgaaacctgtcctaggagtcagcttctctcctaatggttatctggttgcaactggaagtgaagacaatttctgtcggatatgggatttgaggaaaaggcaaatgttgtattctattccagctcataagagtattatttcacatgtgaaatttgaaccccaagaagggtattatttagcgacttcttcctatgacaccaaagcagccctgtggtcagctcgtgattacaaaccaatcaaaagtttggtgggccatgagtcgaaggttactagtttggatattagtggagatggacagaagattgtgactgtgtcgcttgatcgtacgataaaaatttggtcatgcagaagtagcacacaagataatgagatggaactggattgagacaattgggttcattgttgccagccccgcttctctattcatcagctagaagtagatattctccctttttgctgatcagacattccaatcagtcattggtgctattgcacggaactatttcatagcatgtataaacccttggcttgagaaatatgttctgcacttactttgctgatattccttgtcatatactagggctagtttggctaccccattttttaagggattttcatttttctaacgacccgtttggatcattagaatttaacaatagtaattttggcatatattaattaagctaattcagttttatacaaaatata

SEQ ID NO: 21977 - DNA, 725 bp, Zea Mays
gaggataatcacaaccttttttctgtcgggtgctgggacatcagcacatctgatgctaaagttttggccttggttacaacttattggctgggagatcgaccctatgataattgaattgtcaagggattattttggtatgtctgatttagagaaggccacagaatcaggtggttcacttttggtgcgcattggtgacgcactttctccatcagcaacagtcgaaggaggatttgctggaattgttgtagatttgttttgtgatggaaaggtcatacctcagctacaagaagccaaaacttggttgcaaattgcaaaaaggctaatgccagacggtcgaatcatggtaaattgtggtggatcagacactgaagaatctctctcatcgccttgggttcaaaaccctacagttaaagcactttgttccgcatttcctggacaggtaagctggaagagactatcggagaaagagagtgtaaactatgttgccctgactggacctctcccagacctggacgggtggtcggcgtcggttcctagtgagctaagcacgaatagggccggccctaagcctatgctagagaggcgacggccgggggcctaaaattcttaggggcccaatatttagtatatataacactatataatatatcaatttacactttacaaaacccatctaaccaaataactcacacacttataatatttacgaaatccatcaaacaaat

SEQ ID NO: 21978 - DNA, 1420 bp, Zea Mays
ccgagccgaacgggcgtgcgccatgcgcatgcgaccctgacgagcaacgacaaccacagagcccaaccgggaggaggatcggtaccagctcacggcggcgtcagcaccacacgccgccgccgccgcccacccccttcccgacaggcacgcttcttgcgcctcttgtgggatgctactacggataacgtacgcccaacccacgccttcggcggcggcccagttgaggctccctgggccgcgtttacgccgacgccgcgtcgctgcttccgcggcggacggcgccggcaattcaagctctccgctccattgcgacccttcgccccacgcgtacctcctgggtccgggcgtcgaacccagtggctcactctcactgagtacatatccaattacagagaagggaaagcagaggtcttgggtcggtccaagtgggcagtactaccgtgagctgccttgccccagctgtaggggtagaggttacactccatgcaaggagtgtggaatagatagatcaagtttggactgccctatgtgcaatggcaaggggattcaaacttgtctacaatgtagtggagagtgtgtgatatggcaagaatctgttgatgaacagccatgggagaaagttcggtcaagttctcccttgaaagtaaaagaagatgacgaagttgacaagttagagataaatatcaacaaccccaaaagatcaaagcgtacttatgcatctacttcaccggaagttgccaagaagattagccggtctttaagaagtctaaatgctcaaacaggattgtttactaagcacatgaagattatacaccaagacccagaattgcgtgctcaaagagttgctgcaatcaagagaacaaaaggaactgatgttgcaagaaagcgtgcttctgaaattcagaaggcattcttcagtgatcctgagaaccggctcaagagaagcattgccatgaaaggggtgaaattttactgcagcaaatgtgggcaagaaggacatagaagcttttattgccctactttgagggaaggttcaaccagggtgcggttcaggtgccggttgtgtggcagagaagggcataatagtcgaacatgtggaaaaccaaagtccgagaaggagcacaaacaacgacctcaccactgcagccgatgtggtgaaaagggacataaccggcgcaactgccccacatccactgatttgggtagtgatgcttcaggctatgtggttaacaaagttaatggctctaattcagctgtttatcaatgtagtatatgcttagaaaaggggcataacagacgaacatgcccgaaaagaaaggctaccttactaaaatgaaaagtgtgagtaaaattaaaagaaaggctatcttttatgcctgtgttttttctatttctctattttgtattaattcgttcaaac

SEQ ID NO: 21979 - DNA, 1736 bp, Zea Mays
tttttcgtaccgaatttattgggggaattgctggttcgcgagatgctaagcaattgagagatctgcttgactccggggtgggacttggagcatgtggaatggggttagctatgcgattgcgtttttttcccgatcaatattggacaagggcacgggcacgccttgttatccttacacgagtctgaaggatggaaatgttttttggcagctttctcagtgaatcagtatcaccgcagaaccttttcggacacccggatgttgagaaatgcccattcctgaggaatatcaatggagctacaaccttttccctcgcttctgctttgccagtagctgctcaaggaggcaagggtccaatttttgaggaagggtcaggctttgagtctgcattcaagcttttccatggccgagatggaatagttcccctttcagaaagatcatatgtatctgatgaaaaccacaatgagagcattgatgtcaggactgaacctgctctgccgtttaatccattggctgctagagcagccacaataagtctatcagcatttggaccatttggttttggctttttcaacggcaagggcaaaaggcagaacaagaaacccaacaatctagatcagtcccaccagaagcccaagacaccagatcagtcttccatgaaacaaaaaggagtcaacccaccatcacatgaggcattcagcgatgagtggttggaaaatggccagtgcccacttgcgcggtcttaccgggcaatgagtggtgttttgcccctcgttgccaaggccttacagccaccagctggtatgaagctgaagtgcccacctgctgtggttgctgtccgagctgcccttgcgcgaactgcgcttgtgaaatccctccgaccacagcccctgccctcaaagatggtagccattgcactactggggatggcagcaaacatccctcttggggtgtggcgggagcacaccaagaagttctctcctcagtggtttgcagctgtccatgccgctgttccgttcattgcaatgctgaggaagtctgttgtgatgcccaggactgcgatggcattcaccatagcagcctccattgttggccagacaattgggtcaagggctgagcgcatccgtctaaggaatcaggcggcaaatggtactggtgattcttcaacgcacactgctatgtatccaaacaagaatgggcattgcagcgacactgaaggcaaggcatgggaccctcttgcgacgaagataacaggctcaactgctaggggttctcctgcaccaaccccaagcgtgtgcttctgattgtgttaagcatgtgattcacgcacacctgtgaagagattatacatgaaccagtttatcttatagtgccatgtaattgccttgtgtgtcccagaaaactgagctgcccgtgtgcgataagtagaataagaggtgctaccccactgtttgctgtgttgctatggtcgagattgatgtattgatgctgctgcatttctttctttttgttaatgtgtggtggcgtttctcgcttctgtaaagcagctgaagctgtcacatcatttgatcagttgaagctgtatgttaccatgtgtgtgccatttaatgtttggagttatgaaatgaggcacatgtctcgaccctgaaataacatatagttcttctgcactgtgagaatgctgccctctgttcatgtctatattttagttcaaggcatcacgttcacgtgtaggcagt

SEQ ID NO: 21980 - DNA, 2681 bp, Zea Mays
tgttgttgggcggagacaggacgaaagaaaacgctatatgtaggggacagaataatttacaggatattgttggagacagcctaattcacgagcggggccaaggcccaacagcgcatccagagcctctccatccggctcggaacagtcgatccaccagccaatctttgatcacccaaccggtctcctcgtgctctaactcgaacccaaaccaaaccaccgtctccttggcggctccgccctaccaccatggctgccgtcgcgcctccgcccgacaacatggacccgccgccggccactcccccagccgccactcctgccgcgacgctaaccccgcctcccgccgccacctccaccccgccaaaccccgcgacgcccggccccgcggcgcctagtccaaaccctaacctgccccccgcccccgcttccgcgcctccggcggcatttgcgccaccgatgcccccagctccggtctctttcgccgctaccttccgcccgctcggtgctcctgcgccaccgccgccgcaccaggtcccgcagtacggcgcgttgccgccgaacccgggctacccgatgccgccgccgatgcagccgccgggcgtccccgtcgtcatgcctccgggctccgttcggccgccggtcatgtacggaccgccccagccgggagcatacatgccgcagcagggcgctgcggtcccccatcctggaatgcctcgttatcctgcaccgtatcctatggttcgtccaggttttgttccacgtccaatgccgccacctggtgttgtgacaattcaacgaccaccaataatttctgggatccgggctattcctcctttggtagccctgactgcccgtccacctcctccagctgttatgctggctgataaaccgccaaccgcagtttatgttggcaagattgccccaacagtagacaatggtttccttctttcacttctccagctttgtggacctgtcaagagttggaagcgtgccgaagatccaagtaatggaaaacctaaaggttttgggttttgtgagtttgaatctgctgaaggcatccttcgtgcgacacggcttctcaacaaattgagccttgatggtcaggaactggtgattaatataaatgatgccaccaaggagtacctgaagaaacatgttgaggaaaagaagagagcacaagtgaagtcaaaagatgcaagtggggatggaactacagctgttgctgaaaatgaatcatcaaaatctgttcctgatgaatcagataaggagacaggagatgctggagacaaggacagtgacgagagcactaagaaatttgggattgttactgatgaagactctcaagctgataaagacgtcgcagaaaaaataagcagtatgattgagcagtggttaaagactagaccgccacctccacctccaccagttcaaccatcggcggatagctctggtgtagataaggcaaaaaatgattctgctgataagactgatgctgacactgttaaaagagcagtcaatgaaactgaaagatctgaaactgcctctcctgataggaggaaggatagagagcatgataaggataaacgggacaaagatattgaaaggcatgaccgtgaacgcgaacgtgaaaggatacggagggatagggagaaggatcataagcatagagaagttgatagactatacagggatcgccttaaggagtgggaatctagggagagagagaaagaatatcagagatatagtgaaaaggagaaagaaaaagatagagaacataaccgcagaagggagatcctgaagcaggaagatgagagcgacgaagaggataataggaaaaggaagcgaaggagtagtagttcacttgaagataggaaaagaaggcggcaacgtgaaaaggaggaagatttggcagataaaataagggaggaagaggaaattgcagaagcaaggcggcgggctgtagagttgcaacagcaagcagatgaagcagctgcagcagcggctgcagctgctgaagagtctgctacacttatggaggttgatgctgacgacgaaaaagaaacagatgcacaaaacgagccgtctgttgtggaagctgataacatcccgagctttgctaatagtgttggtgctggtggacttggtaaggaaaataacagtgaggaaataagcatggtacctagtcataccaagcaaaacaacaatgtcccagtaaagaaactgggttttggtttgattggcttgggcaaaaggacatctgttccatcagtttttgctgaagaggatgatgaaaataatgttgataaaagcataagacctctagtacctatcgactacaatgaagaattacaagccgtacaggctaattcttcgactggggcaaatgtcgcagcagctgctgagtttgccaagcgcatctcagtttctaactcaaaggaagagaaggctgacacagagaaggataggaataggagatccagtgaaggtcgtcctagcgatgagcgaagagagaagctacatgatcgtgagaaggataagtccaagtcggagaacaagaagattctggatgcaaagcaattaattgatatgatcccaaggacaaaggaagaactttttgcctatgatataaactgggtgatatatgacaagctggtgctgtttcgacgagtttttgcgtagatttg

SEQ ID NO: 21981 - DNA, 1908 bp, Zea Mays
gtaatattagctaaaaaaggacggaccagtgcccggaggctcccactttgtgtgggtcatggggaaggacaggaccaaaacatctatgccaaattggcagcattgagggaggcaccatgatgacagcaatgctttgatgtggctgagaggagttgctggtgaagggggctttcagtctttaaacttccagtcacctggtgtaggttcctggggacaacagagactccatccatccttacttagcaatgaccatgatcagtatcaagcagtggttgctgccgcagctgcttcccagtcggatggttatctgaagcagcaattcctacaccttcaacaacctatgcagtccccacaggaacagtgcaatctcaatccgctgttgcagcagcaaatactacagcaagggagccaacagcagatggttagtcctgatgctcaaaatatccagtccgtgctcaacccaaatgctattcagcagcagctccaacaattccagcagatgcagcatgctcataatgaccagaagcagaagattcaaccagatcagccgtaccaagttcctagcagtgcggttctctcgagtccaacatcattaccaagccatttgcgggaaaaatttggcttttctgatcctaatgtcaactcttccagcttcatcagctctagcagcaacgagaatatgctggaatcaaacttccttcagggaagctcaaaatctgtggatttgtctagattcaaccaacctgtagttagcgagcagcagcagcaacaggcatggaagcaaaagtttatttgctcacaatcgatgtcttttgggggctcggtttcacttaactcacccactaccaaagatggtcctgttgacaacaaaattggtcgtgatgtgcagaaccagaccctttttagccctcaagttgactcttcctccctactgtacaatatggtacctaatttgacctcaaatgttgcggataataatatatcaacgattccctctggatcaacatatctgcaaagtccaatgtatggttgtctggatgactcttctggtttattgcaaaatacaggagagaatgatccgacaactagaacattcgttaaggtttacaagtcaggatcggtggggagatccttggacatcacccggttctctaattatgctgaacttcgagaggaactgggtcagatgttcggcattaagggtcagttggatgaccctgatagatcaggctggcagcttgtatttgtcgacagggagaacgatgtgcttctccttggagacgacccgtgggagtcatttgtgaatagtgtatggtacatcaaaatactttcacctgaggatgtgcataagatgggaaagccaggaaacgatccacgctacctatcttaaattgatacccagagctctttcgggctcccgtgacgattctgtggcacactgtagcactgtccatggcggtccggtgtgctgtgctcccatgttcgctggtgtcacctctagcatgtacaccgtgcgcgtcttcagaactcccccgttacttgtatccggtgcaggccaccgctctggactgatatcttgtaggttccacttaggaatcagtatcagcgactctatcctagttggtttgtagctcgcacggcactcgttcttgtgtcgcatcgaaatcttcaggctaaatgcttagttgaaactgttcccgtgattcttaagctatctatgtatttgaggattccccggcatgctttcgacgatgaactgcaataatctgaatgcaggaggattgtttgaatgctatcttgtgtctgccgggtgctgggtgcaaggttgattttgacgcatctagctttagcttatgacgtttcaggtgttctctgtctgaaactatttttatgcatggtgagttgatg

SEQ ID NO: 21982 - DNA, 1124 bp, Zea Mays
cgccttccatctccggccggtctccgctcgtcgtcctcgcccagcccagagacgcccacggaatcgcaattccccactcccaccccccttctcctttctataaagggaaacttcgccaccaaatctcgaatcccatctcgctgctctccgccgctcgacgccgacgccgacgccgacacctctccctcccccattccccgtgccccggaccgcggagcagacagaggcgagatccggagcgccgcgcgatggcgaacatcgacatggcgaagatcctggcggacctggaccgcggcgccggcgacgcgcggctgcccaagaccaagctcgtctgcacgcttggcccggcctcccgctccgtgcccatgctcgagaagctgctccgcgccggcatgaacgtcgcgcgcttcaacttctcccacggcacccaccagtaccaccaggagacgctcgacagcctccgccaggccatgcacaacaccggcatcctctgcgccgtcatgctcgacaccaagggtcctgagattcgtacagggtttttgaaggatggtaaaccaattaagctaaccaagggtcaagagatcactgttaccactgattatgatatcaagggtgacgaaaaaatgatcgctatgagttacaagaaactgcctgttgacgtgaagcctggaaatgtcatactctgcgcagatggtactatctctctggccgttctgtcttgcgatcctgatgctggaactgtgcgttgtaggtgtgagaacactgcaatgcttggtgagagaaagaactgcaatttgccaggaattgttgtggatcttcctacattgactgagaaagataaagaagatattttgggctggggtgttccaaatgacattgacatgattgctctatcctttgtccgtaaaggatcagatttggtgactgtcagacaggttcttgggcagcatgccaagcgcattaagttgatgtcaaagttggttagcgaaatgcaattctgttaacttgacgctacatttccacctggttgagatgagataagcaataagtgaaaaaaatgttgatttgctttctttgtatgcacacgcttttgaggggtaagattagtctccattggagttgag

SEQ ID NO: 21983 - DNA, 2521 bp, Zea Mays
attaagatcgtcatatgaggagagcagcaagttgttagaatctaagaaggaagatgtagttaaacttgttacagacaaggaaacgaatgacaacataattttgcaactcaggcaagaacttgaggcaacaaaaaagttgcatgaggcagagactcagcaattagagaccaaagctgccaaagtaaataaggagtttgaacagaggataaaagaaatagaactcatgttagaagattctacaaagaggagaagagaacttgaggaatctactgaatctagaatccaattttggaagcagaaggaaatagtggtaaacaaatttgtgggtttgcaagtaaagaatgctcaggaattgaggctctcttctgtttcagttagacttgaaatacaaaattgtcaaaaaagatggtttgaagaattggctggccttggacaaaatcttaagatggtaacaagtgctgcagaaaaatatcatgcaactcttgcagataatagaaaactattcaacgagatccaggaactgaaaggaaatattagagtttattgccggataagaccttttcgaccctgggaggatgagaagtccacttcagtggaatatattggtgagaatggtgaactggttttatcaaaccctacaaagaagggaaaggaagccggcaagaatttcacttttaacaaggtttttggccctacagctacacaagatatggttttcaacgatattcggccactaattagatcagttcttgatggctacaatgtttgcatttttgcatatggtcaaactggatcaggaaaaacacatacaatgatgggtccggaaaacgcaactgagaaagaatggggtgtcaactatcgagcactaaatgaccttttcaacatctcacatgatcgtcgggacacaattaaatatgaacttggtgttcaaatggttgagatctacaacgagcaaatccgtgatctacttggtaccggtggctcgcagaagaaactagggatccagaataccacccagcccaatggacttgcagttcctgatgcaacaatgtgtcctgttgattcgacttctcatgttattgaactaatgcaaacagggcacaacaatagatccatgagtgcaacagccttgaacgagaggagcagcagatctcacagtgttgtgaccatccatgtccagggccaggatttaaaaactggtaacactttgcgtggtgctctgcatcttgtggaccttgcaggaagtgaaagggtggaccgatctgcagttacaggagacaggctcaaagaagcacagcatatcaacaagtctttggctgcacttggggatgttatattttctttatcacaaaagaatgctcatgtaccatacaggaatagcaagcttacacaagtcttacaaacttctttgggtgggcatgcaaagactctaatgtttgtgcaagtcaacccagatgtttcatcatacactgagactttaagtacactgaaatttgctgaacgtgtatctggtgtagaactaggtgctgcaaggaccaacaaggagggcaaagatgtcaaagaattaatggaccagctttcactgctcaaagataccattgcaaagaaggatgatgaaattgatcagctccaactagccaacagtagcaattccctactgaagtccacgaaacatggtgactccttgttgaagcattcggcctcttctccaggaatgacatccttaggaaaagtggcaagctttggtagcggggcagcttctgatcttgacaactgctctgacaccagtgataggcattccgaagctgggtccatgctctctactgacgaggcccgacagctgagccagaactcggctgatcctggtggtgattcagatggaaggctaagtgatatatcagatggcggtatacccgcgggtgcagaaactgacagttcagcgaacaacgttgtggaccaagaacaagacaaaacatccgctactggaaaagagcggttagccaaagcagtaagtcgagtccagaagctaacagtacccaaagtcggccaagcatcaagcttgaggcctaaaccaagagatccttctgctcctaaatcttcagtcacaccaggtgtgcgaaaaggtaccaccactcaagcaactccaccagcaaaagcaagcggcacttcaaaaagagtaccatagatcaagataatcatttggcgaagccgcttcccagccatttttctttttgcatagctttttcagatcttattgccatgtgtaacaccgatgccaattactgacttgtgcatctcaggtggataggttcttttcttttcattgtttgcaatgagggtgttaactgcatcagtatgtgatgttagcatgccatgagatatcattgctcaatgtgttagtacaaacagtgaaggaattcggattgatccattcatgttgatattgtggcgttcagcagtccctgtaatttcatgcaacaacgcagagtcgttcatcgtaaccaaaacctcaatattcaaa

SEQ ID NO: 21984 - DNA, 3150 bp, Zea Mays
atttctccatgcccctacccagccattcccctaaaaatctccagccgtctgtcttgctgctcgttcctgcagctcagacgtcgcctcccttctaccccttgctcctcagccaggcttgttagccgagcccctccaactagcgtgctagacctttgacgccgtttccccgtcgtccaagctccaccatgcccacacgtccgtcctgctcctccatgcacacgcccatgcatccttatctccctggaaacttcactcgtgtacggctccctggtgataatattcagcgatgcttcgccagggcaccgttcccctgcgcgctcgctggacgccgtcgcacatgctccctgctcggcctccccggcgtgctgctccctcgccttggtgcccctgcgagctccttctctctggcccggtttccagctcgggcctcgctagatgccgatgccgcttttctgacctcgtctcgatactcaatcgctgcagcacgccatgccgtgtgtgctgcactgtcatcattcgctatcctcatttttgctaatttttctcgtcgtttctcgtctacaaccttgtcagctcctgcgtgtcgtgcgcgtcttgtgttcgggtcgagccccaggattttgaggaaaaggaagctccagtgcattggccggtgaaatgaataaaatggattttgaagaaaaggaagctccaatgcatcagccggtgaaatgaataaaatggtggtaattatggtccttgtgaaatctgagatcaacttagtcgcggacacaccaagataacacgtgttatgtgctctccatcaacaagtgaagctcaccgaagaaggatcattaactctaccggtgtctactgctcagaacagggtctcgctgccgcagaacgttgtcgcagaccgcttcaccgtcgaccctttgaactgcgtcatccccggttaatctcgcgcgcgtaccgacagcttcgaagaacacctagatgaggtggtacttgaagaagtctactccagtgcctgctcatcaagtggatggagctatctaactaaaggttaggtataaggatctagaatctcttctctgcaacaaaggcaagccccggtgcatttaccccttccttgtatttttaaaaagacttttatatactttaagtctagtgaaatgtgcattaagtttataggaattgattggaaactattggatgcattgactaccttgatatccattcctgttatatatacttctttcgaagtatcaaatattgtttacaaaaatgcttagccctgcttagatctggtggatagaggttgtcttttgcaataatgcctagctcaggggttatcctgaggacggatggcttctaccagcaagaatattttcattgggagcatggtgggatcttactacaaagttccctataatgctcttttcatcctaaggaacacaaaacaatcctaaggatggaagtacttaaatcgagacttgggctaggaacaggtgatgctcctcccaggttaattaaggattggatgcgtatgtaggcctgtatgatcaaggactatcttaactggccacatgccctggatatgggacagggtaagcttgaacccctctattccatacatgaaaagacaatcgcgcactgggagtggagagatggcgagagtgacacatacgctcctggcaaaggaccgcctaaaaggggtggtgtgctctcgggtggcgcgcacctgttcatgcagtggaggatccgtgggaattgtagacatatgcaagagttacgagaaacatatgtcgtgtggttagagatcctcagctgagtaaatcgattcggatcgtcgttatatccccggaaagtggagacttgatctctgtccttcaacctaagtcaggatgtaaacattatgaataaaaatgatgttgtattgatgagatgctgaaataagactagatgtaaccagagtctattaatatttaatctggcgttaaaatattgaaagtaaggactcactttagtaagctatttctgcaaacgtatctaagttgattcttgctaaagccttttccttgattcctatttaaccagcatatccttaagagtcatttttccttagtcgggtaagacttgcgaaagtgcacgccgtacttagggttttcgaacccatgttgttgtaggtgatgaggagtactctaagtgttcctgtggctggagggcgtttccagttctggaggaagactagttaggctagtgtataagctttggagggttcctaccgtcctgcttttgtaataagttatgcattttgagtatatcaggacttgtaataaatgtaactcttactatgtgtcaaacgatttttgtttgatttcaaactttaccagagtatgttcaaggtaatttggcaccactttcatatttgggttttgtagatttgagttttggaaaacagagaacacggctgaacttcataaagggtttacagtataaaaaggtatttggagaaagagaaagaacaccatagatgtaaggtaagaggatatatccataatttaaagtatttttagaggtaactgctatggttttatggtgcttgtaaagcttttagaaagttgcagccgacgaggaagaccacggcacatgtgcgctcgtttgggagcggcaggcaataggcggtggcgcaacaccggcactagggggagggcatagacgggcaacgcgttgcgtatgagacgattgggtgatagtgcaccgcgctgaggtgcggtgcggcgggacgggacgccaccagacagaaacagcacggcagccgctagatggcgggcttggcggcgctagggtgagggcgagaacaggcggcgctgggaggaagaggaattgatgtgagtggtgtcagcaaatactccagccgcaggacacggcatctcagcccatgagccgaaacgcaccgatcgggctcgtagtccaagcatagaaacctcctacccagaatgggctagattcaccctagaagaccggctcatctccagcaggccgtttatagttatagggtcatgtaaagtactattttgtactatagattacattgtttctagaataaaatttaaaatagagagtaaaatagggagtctgttggagatagtctaaagctttacgagc

SEQ ID NO: 21985 - DNA, 1979 bp, Zea Mays
tgcccctgttcttgtcagctgtcaccccacaccaactggggtgatctcattccatttcgcaagtgtctcgggggtatctcggtcggaaagctggggcctattctttaggattaggaggagccgtatgaagcaagcttggttcctctagattcagtttggtggcaatccgtgccggcggcagagcgcggcagctggttttttcgttagattcctcccaccttgtttgcattgcccctgacgcgtgcagtaatgcttacctagccttccgatcgttcagctcaagagaagaatgagagatccgttcttcagtggggagatatccaatcatcgatatgcgctccaaaatgtggcagattggtgaagacaaatgccgtgtttggatttagcctaggcgatgatttggttcgggtagcacagggttgcctgcttgctttgtgctgctggaacggaaatgcgtttttcgtagtggtccgttgatctttcaccagtgtacatattacattcagattcggatttttgccacaccctcggcaagatagagaatctggagcactcttgaatgctaatcagacaccctgcccatttctttctctgtcttagacacaaggccttctcatggccagagacttgcctcatctgcccgtaactagacggaaaatcctgcaattcaagttcctgataccgtttgttcttgttctttctgtgtctgttattgctgtcacccagtacttccaaagtatctcctaccttctacgcccactgtgggacacgccgcctaaaccattcacccgcatcccacactactatgcacccaacatctccatggcccagctgtgccaactccatggctgggacatcctccccgcccctcgccgcgtcttcgacgctgtcctcttcagcaacgagcttgatattctagaaatccgctaccacgagctccttccacatgttgacaggtttgtcatccttgaggccaattccaccttcaccggcatccccaagtcactctccttttacgaaaacttcagccgttttgggtttgctggatcaaagattgtctacgacatgctttctattggagagctggataccggttctcgtcgccaaccattccatgtcgaggcctatcaccgtcgctcactcaatatgctgatacgaagatcgggtattgctgccggtgatatcctgatcatggctgatgctgacgagatccctacccccgagaccgtgcagttgctcaagtggtgcgacgggataccaccggtaatgcaccttgggatgaagaactatatgtactccttcgaatttcctgtggacgacaacagctggagggcgacggcacacgtgtacaacgagcacacatcgtaccgccattcccgccagagcaacttcatcctggccgacgccggctggcactgcagcttctgcttcagggagatcaaggagtttgttttcaagatgaaggcgtacagccatgcagaccgagtgaagcagaaaagcttcctgaacccagacagaatccagaagatcatatgcaacggggacgacctgttcgacatgctgcctgaagagtacacattcgccgacctcttcaagaagatggggccgatacccaagtcagggtccgccgtgcatctgccttcccatctgatcaagaatgcagacaagttcaggttcttgcttcccggtgggtgcttgagatcggagtagatcagagattagctttttttttgttagccgacagtatttcttttagctgcaatactgttgttcctggagaaacgatttcttttgggagtttcgtatgatatggtattgttactttttagatagggtgctaggagctgttttggtgtgggcttgaggaagttttcatgttgtatctgtagcggtgggcttatcagcccctgaatttacagcaagtaacgtacaggtcaaattgctatagtaaattggtaccttttgggtgcatcctgatc

SEQ ID NO: 21986 - DNA, 3279 bp, Zea Mays
ggcccagcggcgcctccaaattcgaaagcactaattctagcgtccgtttaataacccctcccgttttaaaatgcccggcctctagaggcctccccgatctgatgccccctggccgcctccctgcctcctcgccgccgccaccgcttgtagcctccgctacgtagaccacgtgtattttcttgtttgatctggagcatgctgtatcggtgattttctccttcttttgccgacgctgcggagcggcgaggagttttgattcagctgtagagagattctaggatctatggggtccgagaagggtggagccaaggttattggcggcggtggaggaggaggcgggatcttcaacctatttgattggaagcgaaagtcacgcaagaagctgttctccaactcgccagaggcgtctaagcttgtcaagaggagcgaagaaaccttgctgtcagtgcgtctccacttgggtgatgaagatgaggggattggtgtatcaagcttcaagggaagcagcgactacagctgtgcgtcttcagtgaccgatgaggaagggcgtgagatgaaggcgccaggtgttgtggccaggctcatgggcctggacgccatgcccaccttgggtgttccagaaccgtactgcacaccgttccgagacacaatatcattcagggacagccacagcctcaagaggagccctgagtactcaacgaatgaccaattcggtcatgttcctcgaagagttgatggatatatcaggaagccattggatttcagagcaccaaagatgccaagcagcccgattgaaaggttccagatggaagcattgccaccaaggtccgcaaagcctctaccaatgtctcaccatagattgttgtcccccatcaagaatccaggtttcacttcagcgaggaatgctgtccagatcatggaggaagcagccaagattcttcagccaagggcacaaacaagctctagggagaaagtatgttcttttagcccggcgcggattcctttgagagtttcggagccaagagagaacatccctttttctcagagggctgtgcctctgaaaccgcaatcatccaggactgctcctgagctgccaaatgtgagaatctctagagcacagcagatgaaccgaagctggaatagtgaggaggatattgtcatattcagaccatcggttgattcttatgagattaataatcctagttgttctaagaacaacaagggaaagtctgtttcattggcagtccaggcaaagaacaacgtccagaagagggaaggcgcaactggttctgggaggaattcacgagtacaaaaagaacatgatgagaaaagggtaaaccaaccatttaggagtcagtctaatctccagagaaacaagcagcaaaagaagccatcatcatctggcacttcttcccctgttctttggcaaaataatcagaaacagaattctttggtgaccaaaggcaaggtggcactaaacaaaaccgtctcaacacagcaaggcagaaaggtgatggccggagattcatcttctgggaagatcaagagtggaagcaagaactctaaagttggcagaaaagacattgtggaaagcattagtggtgatagagaaggatcatcgtcgaacaacaaggacttcccgcagaagaaacggttgatagagagaaactccaccaacgagaagggtacatttgtgcctgaaaacccagtgggtaaacttctgaagcaggttcaacctaatgttgttatggacgagcacattaaatggaacaaggaatgtaaagataccacagatgttgtgtcatttaccttcacctcacccttggtcaaaccatcggcaggaccgtccagactggcgggtaagtgggatacaagaagcaatcttgatatggacgcaggatgtgataaagatgattcagataacaaggctcaagggttgtcatcagtggggctgaactttgtaaatggtgatgcattgagccttcttctagaaaagaagctgaaggagctaacatcaaaaattgatccatcaatcacctttacgaggggtgacacatttgcgcctgctacttttaccttggaggaaccaccaacctcttcatgcagtaattggggctcagaaagtggagcatttgactgtagcccttctgaactaaaaccttctcagtatgattattgcccttcagcccagtcatctacaaaaggccaaaattttcgaggcagtaaaataaaggtggaagaacaagaagaatgcagcagcataagcaatgcaaggaaggaacaggaaaatgaagatctaagtcccctatctgtgcttgaacccaccacctctctaagcgagagttgctggtcttctgagtgttcggacagcagcggtgggggtaaggtttatccatcactttttgatgttaaaaatggtcaggggaatttcttgattaacccagcatcagttgatatcgaggcaaagacaacagactcagcctcttcggcatcagcagatacatcggatgtttcagatatcacccaatgctctaaaagatcaagacacacagagctggagtacatcgcagatgtgctaagcagtgtgaacttgacaacagatgaactgggatcactcttcgtcaatcaggatagatcagctctgcaccccctcctcttcgagaaactggagaatacgcatgcgtacacacaagggaaagagcccttttgccatcgagggtacaggcggctgttgttcgactgcgtgaatgagtgcctggagacaagacgcacgacctacttccgggcaggatatgcggcatggagcaaaggagcagcgacgctgggcatggaggaggcccaagtctgcagtgaggtaaccagctggaagcgcatgggagactggacggaggacgagctcgtcgacaaggacatgagcggcgggctgggcacatgggtcgatttccgggtggaggagttcgaggccggtgaggaggtggagaaccacgtactgagctcactgctcgatgaggtggtgggcgacatggtcgcgagacggcggcggccaggagtatttgtgatttgagaatgggccctgtaattttgtttcgttttgctgttacatatctccccaatttattttgtcaccccagaagtgtgctgttcaaatcagtgataaatgttcatcgatcgttttcagctcggctactgaatgccctgcttgacacggtttctgaagtctttttacctctgtgataggcaaaacaactctggccatttctactcgtaattcgatccaaa

SEQ ID NO: 21987 - DNA, 2676 bp, Zea Mays
tcttgaaacttggagacttcgtacacccaatgaatgggatcatatgactgtttggtatgatctgctccaatggaggaatgagatgtacaattcagtaatagatgcattcaaggactttggtcaaacaaatcctcaacttcatcatcttggctaccgagacaaggcttggaatgtgaataagctcgctcacatagctcgcaagcaaggtcttcctgaagtttgtgtaactatacttgataagatgtatggtcatgctactatggaagttcaggaagcatttgtgaagatatgtgaacaagctaaggcttacttagaaatgaaaggagaactagtcagtggtcttaacttaatcaataataccaatttagaatttttccctgtgaagaacaaagcagaaatatttcgtctgagaggtgattttctgttaaaaatgaacgaatgcgagactgcaaatcagtcttattcaaatgccataactctttttaagcatttgcccaaaggatggattagctggggaaattactgtgatatggtttttaaagaaacaaaagatgaggtttggcttgagtatgcagtcagttgttttttccagggcatcaaatatggagtttcaaactcaaggagccatctagctcgaattctctaccttcttagctttgatggacaaaatgaacctgttggaagagctttggataaatatcttgagcagctgcctcactgggtttggctttcatggatacctcagttgttgttgtcgttacagagaagtgaagcccaacactgtaaattggttttgatgaagatagctcaagtttacccgcaggcattgtattattggcttcgtacatacttgatggaacgccgtgatgttgctactaaaactgaaataggaagaaacatgttggctcagcagcgcatgcagcaagctatgatggcaaacaatgcggccaataacttacctgacggaagtgcaagggcatctaatcatgcagttggtgctgcaggttctcatgatggtggtaatgtccaaggacaagatccggaacgatctacccctgaaggtggcacaaataccagccatgatcaaggtcaacagagttctacaggtgctgagggctcacaagttccgcttagacgtaatagcggacatgggtgggtaacttctgcagcaagtgcatttgatgctgcaaaagacataatggaagctcttagaagcaaacatactaatctagccaatgagcttgagcttttactgtcagaaattggatcacggtttgttactctgcctgaggaaagacttctagctgtggttaatgctctgcttcatcgctgctacaaatatccaactgcaaccactggcgaggttccacagtctctcaagaaggaactctctggtgtatgtagagcttgcttctcacaagatgctgttaacaagcatgttgattttgtgaaggagtacaagcaagattttgaacgtgatcttgacccagagagcgctactacttttcctgcaacccttgctgaacttacggagagattgaaacactggaagaacattcttcagagtaatgtagaggatcggttcccagcagtattaaaactggaggaagaaagtaaaacacttcgggattttcatgttgttgatattgaactcccagggcagtacttcacagatcaggaaatcgcaccggaccacactgttaagttggacagagttggacctgacattccaattgtccggaggcatggcagtagctttcgacggttgacactcattggttctgatggttcacagcgccattttattgttcagacatcactgactccgaatgctcggagtgatgaaaggatgctgcagctattccgtgtgctaaataaaatgtttgacaaacacaaagaatctaggcggcggcatctggctatccatactccaataattattcctgtttggtctcaggttcggatggttgaggatgatttaatcttaatcaagccgtttcagggcagctctctcctgaagcaattgtggagctacgtctgcaagcatacaatgagattacaaaaaatattgttaatgataatattttctcccaatatatgcacaagattctgccaactggcaactacctgtggaccttcaagaaacaatttgcaatccaagtggctctctcctgcttcatgtcgtatatgctgcagattggcggcagggctcctaacaaaattctatttgctaaaaatactgggaagatcttccagactgacttccatccagcttatgatccaaatgggatgattgagttcaacgagcttgttccatttaggctgacacgcaacttgcaagctttcttctcgaattttggtgttgaaggtctcattgtgtctgccatgtgctctgctgcccagtcagtggtttctcctaaacaaagccagcacatttggcatcatttggctatgtttttccgagatgaactgttatcttggtcgtggaggcggcctctgggcattccatcagtccctgtcgctgctggaatgatcaacccatcagatttccaacagaaggtggtaaacaatgtggagcatgtcatcagtcgtatcaagtcaatatcgccacattgtctggctgaggaggaagtgtttcttggtgggattaatattgtatcattatggtgcttctga

SEQ ID NO: 21988 - DNA, 1707 bp, Zea Mays
gatcacgcggggaccgttaaaaccaccatctctctgtcgaccacaggcgtccccgacctctagttacggacgcgatctctcggcctcccattcattcgattaagtcctagatctgcattttggaagagccttttggatcaggagatggcgacggacagtgccgacgcccagaggctcttgctcgggcgccagaactcgcatcagcaggctgacggagcagacgggttcgaggacaacgaccttgccgcaccgccggagcccttgtcccgcgacaatggagcgagtttccggaggaatccaagctctgcagattcgtcgtcgggcgtgttcgggagcctgaaggccgtgctgctcaaatccaagctcaatttgcttataccgtgtgggttcttggcggtcctggtggactgtctcagccagaacaaggcctgggtgtttcctctgagcctgctgggcatcattcctctggccgagcgcctgggtttcgctaccgagcagctagggctctacactggccgaacagctgggggcctgctgaacgccacgttcggcaacgccacggagctggtcatctccatccacgcgctgcggagcgggaagctgcgggtggtgcagcagtcgctgctcggctcgatcctgtccaacacgctgctggtcctcggctgcgcgttcttcggcggcgggctcacctgcggcaggaccgagcaggtgttcagaaaggaagacgcggtgctcaactccgggctgctcctgatggccgtgatggggctggtctcccccgccatgctgtactacacgcacaccgaggccaacctgggcgagtcggcgctggcgctgtcgaggttcagcagctgcgtcatgctcttcgcctacgccgcgttcgtcttcttcgagctgtccaacagtcgccgccgagacgaatctaccgagggaggaggaggaggtggtggtggtggtgaccaggcggacgacgactgcgagtacgcgttccctgagatcaccaagtgggaggccattgcctggctcgcgatcttcactgcctggatctcagtgttctctgactttctagtcggtgcaatcgagggggctgccaaggcttggaagataccggtcgcgttcatcagcactgtcttgctcccgatcgtagggaatgctgcagaacatgccagcgctgttatgtttgcgatgaaagacaaactggacctttcgcttggagtcgccatcgggtcttcgacgcagatatccatgtttgtgataccgttcagtgtagtggcaggatggatgatgggccagccaatggacttgaacttccatctgtttgaaaccgccagcctcttgataaccgtgctggttgtagcacttctgctgcaggatgggacctcgaactgtttcaaagggctgatgctgattctctgctacctgatagtggctgccagtttttatgtgtatgctgatccaaatatcgatggtgtttagcctcttcgaaactagcaccttcaatgatgggatgggactatacttctagttctccaaagaaacctcttcgaagagggcaagaggagctcctgcgattcactgaagaagaaaacagaagtggctggcctattcagcattcctcacctgaaggggccattcaagcacacccactgctgtagctgtcgtcatttacaggcagaaataaatttagtgacacatggaatagatgaa

SEQ ID NO: 21989 - DNA, 2017 bp, Zea Mays
cgccgtcgaggcgtcctccctcccgagtcccacgagcacggagcaccggcctccggttcagattcggtgacacgcacggcacggacgaacccaacggggcactgctcacgggaaagagagaggattcctccgccgcgtccgcgttggactggacagctcacgccgctgcgaaagcaaccagccagagccagatccgtcggttccaacgaaacatccattcacgcccgccaccggcatccccatctccgatccgccgcagccgcagtcgcaggcacgtcctcctctccggccacccggagcgcggcagccagcgagcgagccactgtggtcgccgtgcaggtacctaatttttgcagcccccacaaagtcagagggtgggggcaaaaaagaaagggggaagacagtcacagagaggtgcgcggccaacttgcctggtgcgggtggtttcgggcacgggcgagcgccatccgctcgctgccgatcccaatccggccagcagcggccgccccgccaccgggcctccctccgaccgttccccccgcccgccatggctggttccatggtggaccgcgccaccagagacatgctcatcggcccggactgggctaagaacatggagatctgcgacatctgcaaccgcgaccccgggcaatcaaaagatgtcgtcaaggcactaaagaaacggattggccacaagaatccaaaagttcaacttcttgcactaactctgttggaaactgttataaaaaattgtggggatatacttcacatgcatgttgcagagagagatatattgcatgatatggtgaagatagtgaagaaaaagtctgatcctcgtgttaaagagaaggtattggtgctgatagatacatggcaagacgtgtttgggggatcacatgcaagatatccacaatactatgcagcataccatgagttggtgcgtgctggagctgaattcccgaagagacccgagaaacctgcacctttgtttaatggccagtctcaggcagcaaggaatatgcgtagtcctgaccaacaggaagcggaatcttctgctgccaatgattttcctgctttgagcatgtcggagattcataacgcttgtggtattatggatgtacttgctgagatgctgaatgctttagacccaggaaacagagaggggctaaggcaggaggtaattgtggaacttgtggatcaatgccgcacttacaagcagagagtagtgcagctagttaattctaccacggacgaggaacttatgtcgcaggggctcacactgaatgatgatttgcagcgtgttctagcaaaacatgatgcaatagcagcaggcattgcagtccgagtggagaaaaaatcgaagtctttgcaagcacttgtagagaccaaggattcgacaaaccaggattccaaaaaggagcaaggactcatagatattgaggatcccacaagtcaagatgctgcaaaagatccaaatcaaagtacaagtgaccaatctccttttgagcaattagctcttccagcaccaccagtgtcaaatggcgcagcaacttcagcaccacaatctgatcttggcattgatcttctgagctgggatgatacccctgctacaacacaaaatccacttgctcttgttcctgtcacagatcctcttgctgactctacttcatcaaatcaaaatgcgctagcaattgttgacacattttcagaaaacagcaccacgaaccacaacgctcaaccagctgacccctttggtctcaatccgagttctgctattccaggatctcagctatacaacacgccaactcagcagcctttccagtcacaacagcctccgcagcaggcggcgctctatgcgaatgggggtgctgtggaccctggaacgtcttacgatcaggcatcccagtttaaaaatgttagttctgggtggaatggtcaagctgccaaccctgttgtgcccctgccagagcaagcactgaattacgaactctctgtattcatatgaatcttcttttct

SEQ ID NO: 21990 - DNA, 2015 bp, Zea Mays
gtgaggtgtgactgtgtgtgcaaagaaccgcttgctaccagcaagaaaaccctctacaagcccttttttttttgttatccggtccgcccaggctcttcccattctccggcgcttccctctgtcccttggctcgctctggcgtggttctcccgtcccctggtgcgtgcgcgcttctcgctctctcgtggcggcgactgggcgactatcgcctccgccctacaacagttgctcaggtcttctttgggcccttcgccggggacaagcacccaccggagaaaatcaataaatacatcggcctgaaagaatgggttatggcatgagtaggctagacgatgaatactatgaggctgaagggcagaatactggtggatctggctcagttcaagtgaacgatgagtttgcaacactacataatgatatttttcatatgacccgaatgagatcaggacttactgaaagctacaagtccatgggtaccaacagaggcataatatcaactgccaagttattatctcgaagggaaattgattgttctggaaaggggatgttctcttctggtgaccgtgcatttgttctaggtcgtcatgttccgatgaacaatcctgaattattggataggatggattctcgtgcttacgtttcacagttttctgctgatggtactctttttgttgctggttttcagggaagtcacataagaatatacgatgttgatagaggctggagcatacacaaagacattcatgctaggtgtttaagatggacaatcagtgatgtatccttatcacctgatcagcggtatcttgcctactctagtctggcacctattatccatattgtcaatgttgggaatgcggcaagagaatcctatgctaacgtcactgacatccatgatggattggatttttcacagcatgaagatgttcaatattcatttggaatattttctgtaaaattttcctctgatggacgggaacttgttgctggcagcaatgatgactcaatatatgtctatgatcttcatgcaaacaaattgacattacgtttatctgctcatacatctgatgtcaatacagtagcatttgctgatgaaaccggccatctcatatattctggaagtgacgacactttatgcaaggtctgggacaggcggtgtttgtccgcaggacaggctgccggagttttgactggacatttgcatgggataacacatattgatagtcgtggagatggccgaagtttcatatccaatggaaaagatcaagcaatcaaactgtgggatatcaggaaaatgatgtccaatgctgatagttgtgcagatggagccccagcctgggactacagatattcaaggtatccgcatcaacataaacagttaaagcatccgcatgatcagtcaatagcgacgtaccgtggacatacagtcctccggacattgatccgttgctacttttctccttcgtatagcactgggcaaaagtacatatatacagggtcgtatgattccaatgtttgcatctatgatgtggtaagtggatcccaggttgcgaagctgaaatggcatcaaatggcgattcgggactgcagttggcacccatttgagcccacgcttgtgagctcatcctgggacggccgggtagtgaaatggaccagcgcacgtgatgaaggggcttctgatgtcgattgagttgagtcgaccgtgcaggtgcagcgcgagtgatctttactgttcgtggttgtgggctaaaaaaaaacatacccaatcttgcactaaaaaaaaggagagtaagcacagctcgtaataaagaaagaagatcatgtgttgcagtggtaatttgtaaatgtaaatactgaactgaaaccatgtgggcaggaccgagtgcataagcacctttgtgaatatggttgttccataaagccttttccatgtcctttggagggagcgtgtttttgttggcatttggttttcgacgttccgttttttttgggtatgggtatgggcaatgcgctttttt

SEQ ID NO: 21991 - DNA, 655 bp, Zea Mays
taacaagttgtgatctttttttccaagggacaccacattaaatcacaggttaatgctgcttcaggtgctatttctctaatacaacttcaagaagggatgaaaaagatggaaggaagcgagaacagtgaagagcaacttatgaagagttttgaggagaaaaaagatgccatgcttagctcgctatggaaaattaatgtggttgatattgagtcaacactttcacgtgtctgccaagcagttctgagagataacacggtctccaaagatgtcctgaagctgcgagcgaaagcgttgaaaaagctcggaacgatattccaaggcgcaaaatctatgtaccgtcgtgaaaacagcctgcgcgttgaaacgagcacaaatcagcaagctaacccgtcacactgaagcccatggaccaccgtgtagcaagggatcggatttgatgtgagcatttaacacgaagctgtgaattgcgcttgatgcagcactataatctgtagctgtgtttttcttccaggattttaagcattgtatttgtatacttatgtgccaagtatgtcttgcttcatttcactctgaatcgctgatgtcctggccgttctgcaccttttcagggcacgggaattttccctgtataatttcaaagaaaaatcaaaattta

SEQ ID NO: 21992 - DNA, 1684 bp, Zea Mays
ggcgaatcaggcgaaggaagggtgttttcacaaatggagcgcggatacgtgttagatcttgtcgcttgtaacaagggaggggagactgcaagcctaccttcactcactcacactacaaaatctgatgaagatgttcttgcaacgcctaagtctcatcccggtgaagagataacactaccttcatcagatagggaaagagatcaagatgatggcgtgctacagaatgctgctgccactaacactttaacagcagccagtcaattgacagatccttctgggaggtcaaggccacgttttggtgtcaactttgggttgagtagagctgtcagcttgggatcatcagtagcctgctctattctgtcatctggcctcccgacttctgctaacccaggtgaaggtcggggtgatgtggatgactcttctgatacagtcatctcccagcagggtagtgcaccaactgctgggattgattcgactctagacatgcttagagatagtgtcacggcacaagctagagcagctcgtcaggctagaagaaatctgcaagaatctgaagatgctatcttgaggaactcctacagaaggatgggatctcaggaaccttttgaaggcagtgttcggtttagccgaacattaagtgttgggcggcttcgggacagagtcctcaaacggcctccattctcagatgggttattcacccctgcccttctttacgatagggcggtatggttgtctggaaatgctagtgctaggcaagattcagcagtaatgcaaaggactaattcagacaggagttcagaatcgcgctctgatccttcaaccaatggtctgtacaacttgagctctgagaggcaggccagtaatagtgacctactggagcgtagatcagtttttcttgagaggaggcggaggatacggtctcaggtcagagctctgcaaaggttgggcagcaggtttgaaaatttatctggtcatgagaggtcctgcatactatctggtcagcatagaacaggaacttgcaactgcagaacaggtagtcgacaaggcaatcctgatgaagaaactagcacaagggctagcatatcaagaattgttatgttagcagaagcactatttgaggttctggatgaaattcaccaccaatctgctgcgttatcgtcatcaagaccagcgttttcttcaattggatctgttcctgctccaagggagattgttgagcgtcttcctgcaaaagtgtataggagaccattgaaataccacagtgaggaagctgcacaatgctatatttgccttgttgaatatgaagagggagattgtcttcgtatacttccatgccatcatgaatttcatctaacatgtgtagataaatggttaaaggagattcacagggtttgtccactttgtcgtggcgatgtctgcagatctgatgcactgattggaaaggtcagctgattctgtctcttgagaatgcagcttcctacagagaaaagtggagctctttccatggttctaattccgatacaacctacaaaactattgcacaggatgctcctgtattgtatggaaaattcgcattgaaactggtcacacgctattgtgaatttaagactcttgtatggtggggcgagtttgttgatattggattgttgccttccgtttccttataccgatgtgacgtttgatc

SEQ ID NO: 21993 - DNA, 1663 bp, Zea Mays
gagcttgtttttggtcaatgtatagtaggattgctgcataccacaccacacatcgggtgaatttgaaatctgatagtttttttcttttgtttgggtaaagtcagtgaggagaagtctatagttctctatttgtccactcaggaattaatgttgagtaaattgttgcattacaagttaatgttttgttgagtctatgaactcagggccactaagagtttatggctgcttgagtctatggattcatggtcatgaaaatatatttttagtgctttcttgcttcctgataacacttaatttatatagaattgttggtacctttattggcatgtttatgttgattatgttaggtgatggtgattagaagctacaacagtggtttatgttattagttattcaaagacagggctctaaatcaaaataaagttcttccacaagataaacagtcttcctggacctgtgactgattctgagaagctaatttggaatgttctggaagctgaacgacctgacatgaggcaattacatggaaagtccctcgttgaagtaaacagaagtttccttgaaaaacacaatgcttccttgatgcaccgagcagctggtgctgaaatgatgtatctcttagagccaaataagaagatggaggcaattaatttaattgaagattcaacaaatattacatcatcagggcatagtttgcttggtcctgtaaaaacatggcaaattcaagattgtattgatgttcataaattgctggagacagtctttggtgatcagaatgttgcaaataggtggaaggcacggtgcgcggaatattttccgtactcgacgtactttgaaggcatcaagagcgctatttcaacctatgccattgaccatagtctcgagagcccaccagaaaatggaattgcttcaaaccctcatctgaaatcaaaagatggagaacaagggagtttgaatgggactctgcatattgtagatgatttgagcagcctaagcattcggtaatgcacgaacaagttgctgaatggtcacaactggaacacaacattttagaactggagccagtacccaattaaccaaagcgtacacgaacaaggggaacaaagtgctctggtgcaagtagttgtcggcacatcacatatgaagagtatattattgattgggagctgaggtgtccagtcaggttattgtcttggttccagcctgtacctttttgttgccattttgtagacagggaaagaaaaaaaatcttccgtctcaattacggtgaagttgtgacagcgtttgttgcctagcgatatcagggtgtgaccattcgtttgaaacagtgctccctctctttttggactacaaaattttggcacaaagcaggtgtacaaggttaaaccttttaaaactttcatctatttgtttcgggatagtttggtgtgtgggggggtttgtcttgatcctttgtgctactgcaacatttggtcctcgacattgtaaattagttaatcttaaacatagaaactgtattccagttgtcatgacaaataatgatcaatgttaaccctgggtgtttgatctattccatttgggatgcgttgaaaagcatgcattgtcggatttgaagataaaaatccataatgttacatttattaatcatacttgtatagtgacc

SEQ ID NO: 21994 - DNA, 1695 bp, Zea Mays
tacttgagcggagctggtaacaaggctccgcttcacgtggtaacctctttcatgtccccacagagtacagatggcgttcccgccagcgatttgcgtcctccgacgccatgtcatgcatggtcagctgatcactgataactatgagtagtcaaatctgagaaattaccccgcctttttttctctcctcatctccttgttccaaaaaaacaccagatcttcttaattaacactatgttacagcacttaattacactcccggtacactaacaaccgccgttgcggcacatcagtagagcaagagcgacggacggcagggcgcgacgagggctacgccggcgggcttgtcgccggatcaagctccgtccgccgtctggcactagcacagtagcactagcggctagcggccgccttcgccttgggcgcggcggcgacgctggtggcccagtcctggtcccgcaggaagaggcaggcggcggagcagtcgtcgacgcgggacgccgggtacctggtccgccagcgctgcgccgcggcctgggcgacggccttggaggcgtgctgcttccttggcgtggcgcagacgatggacaccacctcctggttgctgagcacgtcccacacgccgtccgtggccaggacgaggaacaggtcccccggcgcgacgcggcggtgcgccacctccggctccgacaccacgccgtgccgcttgaggcggtggtcgcccagcgaccgcgccatggccaggcccgggcagtcctcgtcgggcagccacacgcgaggcaccgacgcctcgtccttgagcgcgaacacgcgcccgttgcagcgcttgatgcgctcagcctcctctgcgacaccgacacacacacggtagcccgtctccgacacggtcgccagcacggccctggagtcgccgaggttggcgacgacgaggtcctccccctgcttgatggcgcacacggccgtggtgccgctgaagtcgcagtccaccttagcctggaccccgagctccctgtccatggcctcgaacgcgttggcgcaggcctcccgccactcctccagcatctgcgccggcgccggcgacgaccgctcgctgcggctgccgtccgtggacgacgacgccgcgggcgatgcgtcgctgaaggccgggccgtcgccgtcgtcgtcggagcccaggagcagcgcgttccgctggctcaggatcatgaaggggaggtggtccctcgccagcttgctgaccagctgcccgcagcggccgtgcccgtcgaacacgccgcagaacacaccgtcctccatgccgaatccctggcagaggatgacggcgtcctggttgggccccttcttgcccttctgcgagaagagggaggcggccaccgtccgctcccacgccgcgccacggccgtcccctccccatccccctccaccgccgccgccctgcccgtccatcaccacgtacaccacgttctcgtccgagtcctcctcctcctgctccacgcgcttggacgacgcgcagatccccatagcaaagcaaccgagagcagacgccccgccactggctggctggctggctcaactcaggcaaccgtctccccttcgccttcttggcgggagaacagagctaagcaacggaagcggtggcggcagacgcgctcgagcttgctcacaatgatggcggcgaatcgcacaggggtggtttggtgg

SEQ ID NO: 21995 - DNA, 720 bp, Zea Mays
gccaggagcctaggagtacagactgcctcggtaagatgtcgggtatctcggtttaacccgaacccgaacccgaaatttcggggggtatcaagtaatatcgggttgagttcgggttcaactgctgaatacccgaatttttaaaaacccgaactacccgacccgaattttcgggtatacccgaacgcccagccctactccttgcctggcattggttcagaagctggtagacacctgacaaagaaaggcacagttaaccgatccctgaaggccacaaaagattcccacatgctggggtcaagacatcatcttgccagttgcattgatccagttcccactagagttgagctggagacttagaaggcatgtgatgcttgaacatcgccatggattgcacttagcatagcaagtagcaacttggatgccattcatgtctgcatggctgcatcgtttgtactggcggcagcggcttctttcaacaccgaatatgcacgtcagcatgtccatacatgctgaggttaccccattgggcctttgagatgtaaattatgtcgttcagtcgagtggtatgcttatcatgtgtttatcggtgtatgatgttggtatagttgtaacttggaaggctaagcgaagttgtactgttgtatttggtattgccgtattgatatatagattgcacatgcgtcttgcagttgaatttctaccattttagacaaaatttgc

SEQ ID NO: 21996 - DNA, 2986 bp, Zea Mays
atccgtcagtgcagtcaagtagtcaccggttcacgcaaaccctagtaccaggccgccagtcccgacctccccggctccagcccccgcgcacgaccagctctgacgaccccgctcctgcctcccacctcctccggtggcctcgcgcctgactccctcctccggcacccaggccagccgcgccccgcctctcgcacaggacggaaatgatgccttctcctttttgttagctgattctgatcaaactggttagttcgatagagaatatcagtaatatcttgctgcccaaactgcagcttcaactgattccgcgtcaggagcacttagagcaaccatgggggggaaatcggagcagaagtctcgaaaagagaggcggaaagaggcgagatcagagaagcacaagctgcgatttctttcttgggttgggcatcagggtggcaaaaagaagaagccgtcaatgtcagtagtagagccaagttcggttgaggagaagccaaagaaagagcctgatggcatgatgaagaagaagagaaagagggaagcagagggtaagcggaagcccaggtccaacttccaggaatatcttgagatggagatgggtggacctgtgagcatggaggaggatctagagatggagaggaagcttgcaaaaaagctcaagttgaagaaaggaaagttgggaggtcctgatgatggtatggatgacctttttgcggaccttgggtttggtggtgactttggttcagatgatggtgaaacaaaagcatatgattggaatgtggtggaggacactaatttagacaagagaaaaggtaaaaagaaaaataaggagaaaaaggatgacacagtgatggaggaaccagatgacattgatgaagagaatggtcggaaaaagaagaaaaaaaagaagaaggatggtatggagaaggaggaactggttgatgtaggtgaagagaatggtcagaaaaggaaaaagaagaagaagatgaaggatgactcagagatggacgaaccagatgatgaaggtgttcacatggatgaagagaatgatggagcagtcctggaatctgaggatggagtgtctaatgtggttgaactgcccaaagaatcaaaagggaagtatgtacctccgagtctgcgtaatgcttccaattcagaatcagaagaaattgcccagatgcgtcgcagagacttctgaacagactttcagagtcaaatgtggagtccattactcaggaaattgccacactttttcgatctgttccacgaagtgatggctcccagataattggggatgaggttttggctagttgttcccgaggacctcgtggcaatgaacagtatgccgctgtctttgcagcctttgttgcaggtatggcatgtttggtcggtgttgacttcagtgccaagatccttgcatctattgctaagtcatttgaggatgagtattcaaaagaagatggtctatctttgagaaaccttaccttactcttctgctatttgtgcatatttggtgttacctcaagcgatcttgtgtatgatcttctgtcgattctgagcaagcgcttgacagagctagatgtctctacagtgttgaccatcctacagtgctgtggaatgaagctgcggggagatgatccatgtgctatgaaagattttgtccttagtattcagaactctgtgaatgatcttaaattgcactctggtgttggagcagacgggaagactgatatacgtagcagaagaatggaatttatgcttgaaaccatatgtgacattaagaacaataagaaaaggcctaaagaggatccttcacaccatactcgaataaaaaagtggcttcaaaagcttaaggcagaagatgtcctcttgcgtgggttaacatggagcaggcttttggaccctgataagaaagggcagtggtggttgtctggggatgttccatctacagtagctaagattgaagatgttgcagctgttataagcaaggatgttgcagagacaaaaaaacttcttcagcttgcagctgctcaacggatgaacactgacatacgaagagcaatcttttgtattataatgagtgctgaagactatgtagatgcttttgaaaagctcttgaggctgggcctttctgggaagcaggaccgagaaattataagggtcattgttgactgttgtctgcatgagaagatgttcaataagtattacacagtccttgcttccaagctatgcaaccatgagaaaaaccacaagttcagcttgcagtactgcatctgggaccattttaaggagctagataatatggagtcaagtagatccatgaaccttgcgaagctagttgcggagatgctgttgaacttcacgctctccctcgcaactttgaaggttgttaacctggccaacccggtggagatgactccggcaagggtctcgcatttccggatgctgtttgagaccttgctacagaaagacgatgcacgcgtgtggaatgtcttcactcgtgtcgctggccttccagagctcgaggtattgagggatggcattgtgatgttcatcaagcagcacgtgatcgccgaggactcagggaaggacttggctagcaaattcaagattgcgaagaaggcgctcgacaatactgccggagttctgatgtaactctgcccttgtcgaacattctgggcatctccaagtaaaacaaagttattagaacattctgctggagtcctctgttctcgttttgccttgttattagaatgcttctccaagagacctttcatgggttttgaatgcttacccaaaaaaaaggctttgatggtcatacattgtaccatttcttagaagtactctctgtttattgtttagctgcacatgaagatccttaggctatctgcactgccacatggtatctattgctccaaaagtgcgctgtaacaaatagagcaaaattgctccaggacgccaatcactacggcaccgtttgtttgggctt

SEQ ID NO: 21997 - DNA, 3084 bp, Zea Mays
ctccagggtccaggctctctcccgctcacggcagcgccgtccttcgacacccccctccccgctctagttctggcctgctgaggactggaggtccatccatccggactttgttgatttcttctgttggtaatgaaacctaatctgctccgactctaagaggagtgagttccgagcaatcacaccgaaatcttccttcatcccctccattgatcccctcacaagtgctttaccttcccgagtggtggcgtcttaatctgatgcacccacgtatggttccgtctgatttcctcttagtcatttccccccctcctttcataacttattgatcagcgcgcgcaagatcgacctcggtcgatgccgtagggattgagacacaatgtgtgggttaggaagcttgttttccaagagatagggattcaactgaatctccacgccgcgctgcagcattgtggtgttcagctcaaaatgaaaggagtgcttccgattaagggggcatcaggccgtgaaaagaaagcgcctaaggagctcgagagcgtcttgaaccgatatttcgggtattcgggatttcgaggaaaacaactcgaagctatagaagctgttctatcagggagagattgcttttgtttgatgccaactggtggtggaaagtccatgtgctatcagattccagctctggtgaaaacaggcattgttcttgtcatttcacccttgatagaatttacaggagaaccaggttgccagcttgaaaaataaaggggttccagctgaatttctctcttcaacacaggcatctcacactaaacaaaggatacatgaagaccttgatactggtaatccttctttaaagttgctatatgtgactcctgaacttgttgcaacatcaagctttatggcaaagctaaagaagctatacaacagaggtcttcttggtcttgttgcaattgatgaggctcactgtatttcaagttggggccacgatttcagacctagctaccgaaaactttcatcattgaggaagcagttcccagatatccctttgttagctttaactgcaactgctgtaccgaaggtccagaaagatgtggtatcatcattgtgcttgcaaaatccagtaattcttagagcttcatttaatcgacccaatatattctatgaagttcgttacaaggatcttcttgatgatgtttactctgatatatcaaatttgctgaaatcaagcgggaatgtttgctcaattatatattgccttgaacgggcagcttgtgatgatctaagcatgcatttgtcacagcagggtgtctcttgtgctgcttatcatgctggcctaaatagtaaagtgcgaagttctgttctcgatgactggctttcatcgagaactcaagttgttgttgcaactgtagcatttgggtagggtattgatagacaagatgtccgtattgtttgccacttcaacttgcctaagtcaatggaatccttctaccaggagtcaggtcgagctggtcgtgatcaacgaccttcaaggagtgttttgtattacggattagatgaccggaggagaatggaattcattttgagaaaccccaaaactaagaaatcacagccgtcttcctcttcaaatgagctttctgagaaggctctagctgacttcagtcagattattgactactgtgaaatttctagctgccggcggaaaaagatcattgagagctttggagagaaagtacaaccaactttatgccaacgctcatgcgatgcttgcaaacacccaaatttagtgttgtctcgtctggaggaactccgtcgtgtgcccaactgtcgctttaataagatctctccagtgtttcaaagctcagttaaagaagcacacttggacacagaattctggaatcgtgaagatgaggcgagcttatcagctgaagacatatctgattctgatgatgggaatgaggtagtgagtaatatagccatttcaaaggttccggcaaaagctggtctggatgcaaaatttaaagcactggagcgtgctgaaaatgcttattaccaaggcaaaggtcaggcgaagcagcagggtggcggccttgctgacaagaaaagcatctctgagacgctaagagatgcatgccgaaaaagattgttggatgctcttggacaagcaaagttgcgactcgggaatattccgtgcggagacgaggcttctgctacacaccttgaaacagagtgcttcaaaaaatatgtgaaggcgggcaagacgttctacaactcacagatagccgccacagttcggtggctgtcatctgcaacactcagtcagatgcgtgaccgcctcgacactctttatcgaccgaaccaaagatgatggtgcgtcaggctgccccgacattgtcccagagtcacctccagcatctcctgaaatcgtcgtcggcgcaaggtcaggagaaaccagtaacgacaaaccgcagcatatttgtgagttgaagagttcagatgagtctgcaaagggtgctgcatcatcgactgggaacatggtgctccccgccataccgacgttcagagaattcttgagccaaaaaggaagggatcgggcgaagtgctattcaaattctaatgcgacgaaccagccatctggtattcgtaggaagtttagtggtcaccttgataaggaagaagccagcaagaggatgaaatcatgaatatctgtcgggcaacttgattttttttctgccttttcgttgtcactaatcaaacattgcaaatctacgttgtagtgaaacgttcctgaatcagaatctccatgatgattttcttattatatctagtttgtacagtgaaaaggggtgttctacgcttctcgtgcaacatgaaggatctgcctcccaatccctatccaccctctataggttagtcatctcatgtggacacagccagaagggaagcggtaaacttaagcaagtatatacacatgtcggacctataacaccctatttgatcagctcttacaacggtcaactacacctgacgcaccctatttgatccgaggaatccttctcaagctccgcgatcagctgctcaatgtttcttctgtat

SEQ ID NO: 21998 - DNA, 6380 bp, Zea Mays
ctcgtcgtcaatcgctctccttgctcggcgtcgcctgcttcctcccgcaccgagagtccgagacgccgcttctcctcccacctacctacaccccccctctctccatcctcccagccgcatctaaaccctaaccctaaacccctcccccaccaacccagcaaacgtcgatggcattgggagatctcatggcgtccaggttcggccactcctcgtcctcgccgtcgccgtcattggccccggtgccgccgctaccccatcaccaccacaaccaccaccagaaccacgtcgcggatgacctccccgtcgccagcgggccggagcccaagaacgggttggaggtccccgaggtggagaagccggcgtccgaggcgtacctgccccaggtggtcgtgctgtgcgactatcgccacgaggggatcgacgaagctaccaccgccgcgctctctaccagcggcctcgtctccaactggcgacccaaggaccggacgaagactggatgtggtgcacttgtattatgtttgaacataagtgttgatccacctgatgtaattaaaatttccccttgtgcaagaatggagtgctggatagatcctttctctatggcacctcctaaagcccttgaaagtattggaaaaacattgcattcccagtatgagcgcttgcaacctaaggctcgatacaagcttcagctggatccaacagtggaggaagttaagaagctttctaatacttgccgcaaatatgccagagaagagagagtccttttccattataatggccatggtgtaccaaagcctacatcaaatggtgagatttgggtgtttaacaagagttacacacagtatatcccactttcaattactgatcttgattcatggctgaagacaccttccatttatgtttttgattgctcagctgctggaattattgtgaaagcctttctagagcgcctagactggagttctacctcctcggcatcttcgcagaaggatttcattcttcttgctgcctgtgaagcacatcagacgcttccccagagtgcagaatttcctgctgatgtgtttacggcttgcctcacaacgcccatcaaaatggctttgcactggttttgtaagcgaacatcactccatggtcctctggatcgttctcttattgaccaaattcctggaaggcaaaatgaccgtaaaacacttcttggagagctcaattggatttttactgctataacagatactatcgcatggaatgttcttccacgtgatctgttccaaaggcttttcaggcaggaccttcttgttgccggtctcttccgtaacttcttgcttgctgagagaatcatgcgatctgcaaactgttctccagtttcttatccgttgttacccccaacacatcaacaccatatgtgggatgcatgggacatggctgctgagatttgcctttccaagcttcctcagttaattgctgatccaaacacagagtttcagccaagtcctttttttatggaacaattgatggctttcgaagtttggcttgatcatggctctaaggacaagaaacctcctgaattgttacccatagttcttcaggtcctgcttagtcaaccacacagatctagagtgcttgttctgcttggaagatttcttgatatgggaccatgggcagttgatttggccctgtctgttggaatatttccttgtgtgctcaaactgcttcaatcaagtgctatggatatacgtcaaaatctagtgtttatatggacaaaaattctctcccttgataagtcatgtcaggttgaattggttaaagatggaggacatgcatattttattaagtttcttgacagtttggatgctttcccagaacagcgtgcaatggccgcttttgttatagcagtcattgtggatgggtataggatgggtcaagaggcttgtatgaatgctgggcttatggatgtttgcctgagacatctgcaacctgagaattctcatgcacaaacagaacctttgcttttgcagtggctttgtttatgccttgggaaactatgggaagatttccctgaggctcagttacttggtctgcaaacaaatggaccagaaattgtaatatgcttattgtcggagcctcaacctgaggtcagagctgctgctgtttttgcacttgggaatctccttgatactacatcaaatagtcatgatgatggttccgatgatgatgaaaaggtgaaagctgaaataaatgtagttcgaagccttctgcagatctcttcagatggcagtccccttgttagatctgaggttgctatagcgcttactcgctttgcgttgggtcacaacaaacatctcaaatctgttgcttccgagtattggaaacctcaacccaattcattgctgaaatcactaccatcgttggcaaatataagtaatccaagcaatgtttacagtcccaacaatattctacaaggcaggattggtcctgtgttgagggttgccagtgatagcggtgccgctggtcgtgatggaagaatttctacaagcaacccaattgcaacaagtagtatcatgcatggctctcctgagtcagatgattcttcccaacactcagattcaggcatattactgagggggaatgcaagtaatggtggtttcagctacactagatcgaggcctgttgataatgtcatttattctcaatttatatcaactatgtattctgtttctaaagatcctgacccaacaattgcaactattggtcggagagcactgtcccttattggtgttgaacaagtggttatgaaaaatactaggtttaacagtggcggttcacatcgaggagagacatctgcgtcaaattttggaatggcacgatcttcttcctggcgtgatatgaagtctggaagcatcttgatgaaatttatgacccctcctgttagcccccctcagcatgattatcttccaggattacgccgagtgtgttctatggagtttggacaacatcctataaatccccccaatggcttagctgatcgccttttaagctctgctgcaggtcccagtaatgcagaaccacttccccaatcaacaatttacaactggagttgtgttcaattctctaggccagttttaactgtctctgatgataatgaagaaaccaatgctagaagagaagagagagaacaaatcgcactagattacatcactaagtgtcagcgctcctcttgcaagatgacaagccagattgctagttgggatacaaagtttgagttgggaacaaaagcagctttattgttgccattttctccgattgtcgtcgcagctgatgaaaatgaacaaataagagtgtggaactacgacgatgcactaccagtgaactcttttcaaaaccataagttatctggcagagggctatctaaacttttgcttataaatgagcttgatgagagcttgcttttggctgcctcaagtgatggaaatgtacgtatatggaaaaattttgctcaaaagggtggagagaaacttgtaactgctttgtcatcagttcagggacatcgagctgctggtcgcagtattgtgattgactggcagcagcaatctggttatctgtatgcatctggtgacatgtcttccatcttggtatgggatcttgacaaggaacaacttctcagcaccattcagtcaactgctgatactgccatttcttccctgtctacatctcaggttcgctccggacactttgctgctggttttgctgatggttctgtcaggatatatgatgttcgctctcctgataggttcgtctatgtggccaggccacatgccccaagaacagaaaaggttgtgagcataggatttcaacctgggtttgatccatacaagattgtaagtgcatctcaagctggagacatccagtttcttgatgttagaagggcagcagaaccctacctgactattgaggcacacaggggttcacttacagcattagtggttcatcgttatgccccagttgttgctagtggctcagccaagcaaatgattaaagtgtttagtcttggtggggagcagttgacgataattgggtacctgccatcttttatgggccaaagaataggcagtgtaaattgcctttcttttcacccatacaagtcactcctggctgctggtgctggtgacaatgctctggtctctatctatgctgaggaaaattacaaacatgcagtagctggtctggtgcattattttacagcgacggtgtctagggtgaggaattttctttgggaaatcaaggatcaggtccatattgtcatctctagtccttgcgagaggccctcaccggcggcggcgagtcaccgccttctgaggaagaagccactgtcagacacaggcgagggagtaaggattccccaaccccaaccccaaccccaaccccccaagaagcaccgcacagaaccctctgctcctctcaccctcacgctccaaggcggcggcgccatgcacggcggaggcgcggcctcgcccgatgccgccatatgcatctccccagaagctgggcccatcgtcggggtcgcccccgccgggatcagggtcgaaaactgctacgtgttcaagagccggctgcaggagtatgctcagagggttggcattccaaccccggagtaccacacgctgaaagaaggcccatctcatgaacctgtcttcaagtccacagtgttcgttaataataccaagtatgagtcgctgcctgggttcttcagccggaaggctgcagaacagtctgccgcggaagttgcgctcatggagatagccatgtccgctccggtgaccgaaattaggaacatgccagcagttcaagaaactggcctgtgcaagaatctccttcaggagtatgctcagaagatgaattacgccattccatcttatatttgcactaaacaagcttcgggtgtagctcctttcgtatgcagtgttgagattggtggcatcctatacattggtgctgcagctaggacaaagaaggaggcagagataaaagctgcccgaactgctcttcttgcaatccaaagtcaatcagaaggtggtgcaaatggtgccaaaaagtacattgttgttcctgggcaaaggccagataaggagacgaataaaaatccaactgaaacccccataccacttagagtcaagaagcgtggttccaggaagaaatggaacaagaggaaattcaggaggatggctgaccgaattgttgatgctggaaaggatgcagaggggcttggaacgcttctacatgatgactatgaggaagctagaagaataggatatgagttacctacagatactgctatggttcaatttaacaaggaagttgtaatgacacaacctggtgaaggagataggatagtacaattggagccacccagagatcctgcagaggtccaatataacaaggaagctagaagtgttgaacaggacccacccagagatcctgcagaggtccaacataacaaggaagctagaagtgttgaacaggacccacccagagatcctgcagaggtccaacacagaagtgtggaagcctgacaataaggctacaactacagagcaggagtcggtgagcgctttcatagcattgagatctaatggggattctacagatgtggaggcggcaccaggcgataccttgatgatgcagggccaggagtcggaagccacaatgcaagaagcatctcacgctggtgaacaggcccagcctaactaggaacctgaaagcaaaaaaaacttcctgaacaggaagaccgaaatgtaggtcgaatgcatgcattgctgtaggagaataagtccactggaggtacatgagcctaaaataatttgtggagtggtggttgactccagtggtaagtgccttccagagtgtaccggcatgcccaaaactgaaatttccggtttagatagaattgggggcgcggaagagggtgccatgtgtgtgtttgtgtgtgttgcctgtggatggaggaattgatgggagtatgtgaactgatgtagctagtctatgtttgttaccattgagggcttgttcggttagctctcaatccatgtggattgagcgggattggatgggtttgaatcccaaacagctcaaacttcttcacaattttttccaatcccatccaatccatgtgtattgggaataaccgaacaagccctgatgatgattgtgtttggccatgttttcactgtcatattggttggcgaccgctacttgcatgcacaatgcattcgaggtagccggtccaagcctccatttggtcactggatgattgcttaaatgatgtttgagttctcttgtgttaaattattaatgcacaaggaaaataaaaacaattgcaaactgga

SEQ ID NO: 21999 - DNA, 1397 bp, Zea Mays
gggggatggaacccgggacctgaaggaacttgactgggaatccatcgctgctggtttattgcatgacactgttgaagatacgaatgtggttacttttgaaagaatagaaaatgagtttgggccaactgtgcgacgtattgttgaaggggagacaaaggtgtctaagttggggaaacttcagtgtaaaagtgagggtagcacaaaacaagatattaaagcagaagacctaaggcagatgtttcttgccatgacagaagaggttcgtgtgattattgtcaaactggcagacaggttgcataacatgcgcactctcacacatatgcctcagcacaagcagtatgccatcgccgtggagacactgcaggtctttgcccctttagcaaaactccttgggatgtaccggataaagtctgagctggaatatctatccttcatgtacgttaaccccactggttttgctgaactaaggaaaagagttgaagacttgtacaagtcccatgaacaagaattggaagaggcaaatagaattttaaggcaaaagattgctgaggatgagtttctcgatcttgttagtgttgaaaccgaagtgcgttcagtttacaaagagctctacagcatttacaaaactacactcaaatccaagagttcaataaatgaggtgaatcaggttgctcagctgagaatcatcataaaaccaaaatcttgcaatggtgttggcccattgtgcactgcacaacagatctgctatcatgttcttggccttgttcatggcatatggacacccattcctcaagctgtggaagattacattgcaactccaaaacctaatgggtaccaaagtctacacacaacagtgataccatttcttaacgagagtatgttccatttggaagttcagataagaacagaagatatggatttaatagcagaaagaggcattgctgcacattacagtggaagaagggtggcttctggacctgttggccttggaatatcaagtggaagaaatgccaaggggaaagtaatctgcttgaacaacacagactttgctctgaggattggttggctcaatgcaatccgcgagtggcaagaagagtttgttggtaatatgagttctagggaatttgttgatactatcacccgagatcttctaggaagccgtgtctttgtgtttactcctaaaggcgagattaaaaacctgcctaagggagccacggtggttgattatgcttatctgattcatactgaaatcggcaacaaaatgattgcagcaaaggtgaatggcaatctggtttcaccaattcatgtacttgcaaatgctgaagtggtggagattataacttatgatgatgggatggaacgggacgatccctcaaatagggttgtttggttcaggg

SEQ ID NO: 22000 - DNA, 2314 bp, Zea Mays
ccgcacgcgcccgtggctagctgccagccgcgcgcccgccgccaccccgcgcccaccccactgcgcgccggctggcgcgccgccacccagcgcggcccgccctcgccaccctgtggccccgccaccgccccgctgccccaccgttaaggcaggtgatgcggccgacaagggggcggcgtccaggaacccacaaaatcacgtcgtggtggggaggcacgggattcggatccggccgtggccacacccggaccccatcgaggtgatgcgggcgcaacggatcatggagcgtgtgcaggaggaacagcgccgctggtacggcgtcaaggagccggggcaggtgctcgccgtcaccccgacctactcacgcgcgttccaggcgctccacctcaccggcctcctccactcactccgtcggaatccttgcgcatactggcaaggcagaccaactgctgctcagcgaggaggacaagcagaatatgcctcttccagtccatggccctgcttgcaagtcctcagggcatctgattggatggcacacgttcaactcattgcccttctctaggaagacggccacagttgttggtgaagcagcccctattctgcccagggatttctagtgggctagttttgtgttgaactcgaggatgctgtggaaggaggctgacggcaagcctgactgggtgaaggatcttgatgctgtgggcgagaactttgaggagcgctggttaaaggcatcaaagcgcagtgccgctaagaaactgtcaaaattgtcgaggtcgcataatgattcgctgctgtggatcaacaagatacctgatattatttctattgacgacgaaatctattcaaatgacgatgatccagagagatgggacatgcagattttccgatcaattgattcgaattctgtcaagggttttccaaaagatccacgggaggccactagtaagaatcttgtttgtgggaaaatgtactgattgatatgagcgtgcatacaacatatgtgaatgccatccgaggtgctcaacatttcatctatattgagaaccagtacttccttggctcttcatttaactgggattcacatagagatgttgagatccatggaaggaactagagatacagagattgcaatggctgcataccaaccccagcatacattggcaaatatgctttctgctcctcgtggatagattttcgggtacaggaaaatacagtgtacgtgttgaaactgttatcctgccccaggttgggatagacggtggtacattcgtgttggtagaactgtgagaagaaaagatgggaaaactttgctttcttggctgtgatgattatctgctcaaacaagacatgcaaattgcaaaactcttaaaggatagtattagttctatttgttcatatagttctacagctagttgtttcttgctttgttcatggattgcaatactggataagatcatgatggatgttgtgtgtgttttaatcaccatttctaaaatttattctattggtaagacgattctaagatataggtcggagatggattccttgcatatacataaatagataaagaagcaaccggtttataacaaaaatatgtcttctattttgcctgttgcccaattctcttttagtgtagcctacttacaataattaaaagaagagttggtgtctgtttgagtagacaactaagtgcatatataagtacgtgcatgattttgattactaattgtgattttgatgatctttcttttgaagacggtctaacatataagcgcatgatttagatgaacggaattactattgtgccatttctgaagaatcttactgatttctcttgccttcttagaacaacatgggaagaagtgatgatgacagtccatcgccgccaagaggtcacaagagaagaacttgcagcccaagtcctcgtggtagttatggaggccatggcaagcgccccacaactaatcttatggtgacgaatcttggtccggattgtaggattctaactctcatcaagtgactcctcccctcacgatgactttgcggacagatgtctcaattatagtggtggagctacgaacaacaatccgatgtcctgatcgagagcgatggagctaatgtttgaacttgtgtgtttgaacttgtgaactaaaaatgtgaactatggatgtgaatttatgtgaatttgtgaaattatgtatttgaacttatgtgaatttgtgaacttatgtatttggacttgtgtgaatttgtgatatgaatatatatccatgtgtttgaaatttgtattgtatgtgatattctgtgttgc

SEQ ID NO: 22001 - DNA, 3421 bp, Zea Mays
gggggcgcgagttcaggaagaagagcgagtcagcgagaggcaattccgctgccgcaattcaacacgcgaggctaaaaacaattcgaaacccccgacctacgccgagtcgccgagaaaacaacagtgctccggcgcttagagaagagcgaaaggcgagcgcgcagcacagcacggctcccgtgggccgtggcggaggcaaaaaccccgacccgcattaccccgaaaccctccgattcggcccggggcgagctcgaatccgtgcaacctcgccgccgccgggctcgatctgagccagggctaccgcgcgccggcgaggaatgaggagcgtgaacggcgaggtcgaggggacccacgaccacgaagctaatcggcgtggtcagctgatcgaatggatgaacgccttactcccggaattcagtttgcctccggattcatcggatgaagagctacgagagctgctcagtgacggcgtggtcctgtgccgtgttgcgaacacactcatcccgggggttcttgagggatcctgggacggttatgcaccgtcggatcaacggttgggcaatctgaacaaattcctctcagtgattgctgatatggggctgccaggtttcagtgtgaaagatcttgatgagggatcaatgtctcctgtagtggaatgtctcttggttttgagagacagtgtggatcctagattaggtgacgatattccaccagatgttaccagaactcctttgagaaaacaatggggagttccggaaatggacaagcctcaagttcatggtgcagcactagggaaaagatcccctgcagaggacaagagaaatggcgttgcagatcccaaagcccatcagaaaacttctgtcttttctggacaaaagttttgtgatgttttccaattaaaacacggatcatattctggacctgctgctgccaagatttcagagatgatgcactctaatagcttagataatgcaccaacacagtcacttattagtgttgtcaatggcattttggatgaaagcatagaaaggaaaaagggagaaataccacatcgtgtagtttacttactgcggaaagtcgttcaagagattgagcgccgtctctatattcaagcagaacacataagaagtcaaaatgttatcatgaagagaagagaacagaagtactgttcaaaaattaaagtacttgaaatgttggtaaatggcacaaatgaagaaaaccagatggcaataaacaggcttcagatagtcaagaatgagaagtcaaaaatcgaagagaggagaaaacttagtgagcaagatgttcatcgattgatgagagagaaagaacattctgaaaacatcatagcaaacctaaagaaagatatagaagccatgaatagattgcatgaacagcaacttgagcaaactgaaagaaaggcaaaggaaatggaggagcaactaaccaccaaagtaaaagaagtagagtatctcttgctacaatcgaagaagaaagttgaagaagttgagactgcttccaggctaaaatcacagttatgggataagaaagaggacaattttcagagtcacatggataatcaacaactaattatcaaggacataagaatattgtcgcgatcatgtgaaaatgatatgtatgcacttcaaatgcagtggagaaatgagatctctaacttaggatctgggttaaaatgtttggttgatgctgctgaaaattatcataaagtcttggcggagaaccaaaagttatttaatgaagtgcaagaactaaaaggtaatataagagtatattgtcgtgtgaggccatttctttcgggtcaagacaaaaagtctactacaattgactacatgggggaaaatggtgagcttcttatatcaaatccatttaaacaagggaaggacggacacagattgttcaagtttaataaagtgtttagtccatttgcttctcaagctgaggttttttctgacatacaaccactaatccgatcagtcctggatggattcaacgtttgtatttttgcatatggtcagactggttctggcaaaacttacaccatgagtgggcctagcacatcgaagcaagattggggtgtcaattatcgggctttaaatgatttgtttgatatttcactaagtagaagaaatgccttctcatatgagatgcaagcttgcactcagttaagtcgacatctgatgtattagacttgatggaaattgggcaagcaaatagagcagttggttcaacagcactaaatgagcgaagtagtcggtcacacagtattctaactgtacatgttcgagggttggatttgaagaatggatctacctcgaggggttgtttgcatcttattgatcttgctggtagtgagagggtggagaagtctgaagtaactggggatagattaaaagaagctcaatacatcaacaaatcactttctgcgttaggcgatgtgatttttgctctgtcacagaaaagtatccacgtgccttatagaaacagcaagctaacacaagttcttcaaagttctttaggtggacaagcaaaaactctaatgttcgttcaaataaatcctgatgttgagtcatattcagaaactataagcactttaaagtttgctgaaagggtgtctggagtagagttaggtgctgcaagaagcaacaaggagggaaaggatataaaagagctactggaacaggttgcgtctttgaaagacacaatttcacgcaaagatatggaaatagagcagctccaagtcatcaaagacaaagcaaaatccccaaatttattgttagatagaaatgggcctggcttgacaaagattacagtaaaccaacctagccaactattatcaggcgaacgaatgctcaagtctagtgacagagttctatcagatcctcctgataacagagattctaaccataatttgacggatactgctccagtgagcttagatgaagcagaatatgatggcaatgcatctgatgatggtttatcaggtgaagccgagaattacaattcagctgctgagatgacagcggaacggttgcatggaattccatcaagaataagcagattcactctcacaaaaaacgggcaaccatctatgtctagatcaaaatcaaaggatgctaagactccaagtaatgcaaaagctccatctagccagttaacaggaggttcttcagccagggggtctaaaagatggcagaagtaaagcacgatcatgttgctcgtgttgatgcacattgtaattgaaatgtgaatttgctgggtagctgtgttagaaagttaggcatttttagttttaatttaatccagaaaaacagtgcgatatatgtgatgacatgtatgtgcatgtgtgtataactactcgcataagcagtaaacaacaatgaaacatgcacaaatacgaagaaca

SEQ ID NO: 22002 - DNA, 1230 bp, Zea Mays
ccacgcctccacggccaagcgcctcgaaggcaaagcttccactagccacaggccaacgaaatcgcaaagcgaagctacggccaccgaccgacgttccaagaagcgaaacgaaacgaaaatgatgatgatgatgggagagagagcgcacgcgcctccgtggcagcgctcgccggcggccagcggcgtcacggacgcggacgacgcgtctccgtacgccctcctagcggcgctgcagcattacctgccgtcgaacgaggtggcggcgtacgacgaagacgacgaggaggcggccctggcggcggcgaccgccgccacgccgccgccgcgctccgccgcggctcgtggccgggcgtagggtcgcccgtcaacgaggtcctcgcgtcgatgcgccagctgcggctcggcggcggctcgccgaggtcggcgccttccggcgggtcgttcttgggcggaggctacccgttcgggtccccaaagtcaccggccgggctgtacagcctcccgtccacgccaaccaggccgtccccggtgaccgtgaccaccgcctccggcgccaccgtcctcaccgtggaacgcctcaacctcggactcatcggggacgaggagccggtgatggagagggtcgagtccgggagagccctccgcgagaaggtgttcgagcggctcagcaaagaagccgccgttcccagcgacaccgccgcatccgccaacgttgagggagcggcccccgccccggatgttggatgggtctccgacctcatcaactgagggaactcgtggaactaccagctcagaagttcaggggggaataacaaaaaaaaaatgatggcatgtcggtgaaggagacaaggtgcccagcaaaccatggtggaaaatggatcaagaagacatgtgcaggcgaccatgtatacgggttgtctagatgcacatggtgtcttccctgcctgtgaggtgggagcatgggaggcgatcatggcggcgatccaagaccgaacccataatttccgcgagcgattccagaacgaacggcgtcttgagttgatgttcattctgctatttgccttttaagattcgacgagttattactgctctgtgatttttctcaaagtatttccatattgatctatgcatgcatgtacaatgtcagtactgctactttcgctgatactccgtaacaaaattaattaaaaccggcgttgctaattactgtaccatctaaaaacatagcga

SEQ ID NO: 22003 - DNA, 3177 bp, Zea Mays
caaacgagaaaaaggagaagaaagcaaaacggacgggcgccgccaccacaccacccctcccaacccaccttctgcctggctgccttctgcctccccttcggctccggtccttcctctcaagtcccacacccgtgtcccaccgcaccggccctcaagcagggcagggcagggcagctacctccaagtctccaaccccccaaccccaacagacgggacgccgcctcgtgtccggcacgccgttccctcccgtccccgctccttcccctcgctaaaacccatcgaatcgaccgacgcacgtcctgacactcctgctcccctgtcgccaccgcgtcgcgcgcgggcagaggcctctctcgccatctcgcggccgcggcaccccacagctatcctaccacccgacctcccaccaccgccgccgccgccggcctgctcccaaccacaagtccaggaggacgccccttcgatccgccgcagggaggcaggcgcccgcgcccccgccccccgccaggctccatctccggatccgatcgcccgccggctcggttcaatccgtttacttaattatactgaccttctcatatggcgttggatccgtgatgcctcctccattcctgaagctatttggaattcattgcctgaatcagtgttctgaagtgctatctaacagtcagaaatggatggatccgagcttgaaaatcctacttctagaagctcatcccagaaatctagccgacgttcgagtagtaggcgttctcaaaagtcagctggacagcattctttgaccggtgctcaagagaaaagaagcaaatcgaaatcttcaaggcagaaacacttggttattgacgacaaagaggctaaaaaagggaaaaaacatgaccacaaaattgacgtggcagatgagaggtccaattttctaggttatgaagtgtatgctggaaagctgattcttcaaaagaaaaatagaagtgcgagtgataataatcagttaccgtcaaacggaaaagctgatgcaattgatgctagactcacaagtaaagctctgatctggggcagctctgtactcctactggaggatgttgtctctgtatcatataattctggagtcaaacattttacattgcatgcatactcaactaaaaagtctttatttaaaaagacatgcagagttcagaaagatttctgctttatagcctctacccttgacgaggccattttgtgggtgacatgctttgctgaacaaagtatatatgttaacttactacctcgccttggagcatctagtatcaatcaagactcagaaaatcccctcagtgagtctttatttgaccagccaccgattaaatgcaaatctccgcaaagagtacttgttatattgaaccctcgatctggacatggtagatcaagtaaagttttccatgagaaagctgaacctatatttaagcttgcaggttttcagatggaagttgttaaaactactcatgctgggcatgcaaaatctcttgtatctacatttgatttcagtgcatgccctgatggaatcgtgtgcgtgggtggtgatggaattgtgaatgaggtgctcaatggtcttctcattaggagtgatagagcagaagctgtatcaattccagttggaataattcctgcagggtctgacaactcacttgtctggactgttttgggagttagagatcctatttctgcatcattattaattgttaagggtggtttcacagctctagatatcttggctgtcgagtgggttcaatctgggcaaatacattttggctcaactgtttcatactatggttttgttagtgatgtcctggaactttctgagaaatatcagaagaaatttggtccacttcgatattttgtggctggaatactgaaatttttatgtttgcctagctacttctatgaactggaatatcttccttcgccaaaggagatggccgtgaatggaaaaggtacagatcaagacaaggcccacctgtccaatgtctataccgatgtgatgcacagcagatcaaagaaagaaggaattccaagagcctccagtttgtccagtattgattctattatgactccaagtcggatgtcgcttggggatgttgatacatcaggtagtacagtggcaagcactgaaccatcagactatgtacgtggtctcgatccgaaagcaaaacgcttgtctctgggaagaagtaacattgtttcagaacctgaagaagtgctacaccctcaaccacatcatggatcattctggccaagaaccaggtccaaagcaagggctgatagaaattcagttggtataacgtctactaatgacacacggtcgtcttgggcagccccatcaatgcatgataaggaagacatttcctcaacaatatcagacccaggacctatttgggactgtgaaccaaagtgggacacagggccaaaatgggatagtgagctaacttgggagcctgaccaccccattgaacttcctggaccacaagaggacatgggaattggagcaccgatggaacttgtgccaaatttggatgagaaatgggtagttaggaaagggcactttcttggtgtcctagtatgcaaccattcatgcatgacagtgcaaagtctgagttcacaggttgttgcaccgaaggccatccatgatgacaacagcttggacttacttttagttggtggaaaaggaagatggaaattgctgagatttttcatacttctgcaattcggtcgccatctctctttgccttacgtcgaatatgtaaaggtgaagtcagttaagcttaaacctggtgcaaacactcacaatggctgtggcatagatggcgagctttgccgtgtcaagggacaggtactctgctccctgcttccggagcaatgcagactgattggccggcgatgtagacaatctatttaagcgctgtgttgaatttcatggatcctggggttctttccacttctaacaaatgtttatataactatactttctgatgggattaagcttgggttggtgttgcaaatgttgagagtttgaaccagaagcaatgttgtgaggtttctgtatatttgagcggttataggatgatatgctgattctgtttaattatgttgattttgcttatatatattcaatagagtaatttagtcccacttcggcgtggcggg

SEQ ID NO: 22004 - DNA, 383 bp, Zea Mays
gcaaacggcagccagacccagaccgacgtgtgtgagctagcttgttgccgtgttcgcacgtaggactcgagccaccggcttcccgcctccttttccttttcaaaacaaaaaacaaacaaaactgctcaggctcgctcgagcaacacgtacgatgatggttcctgtcgggagtgatgacgaaacagcggatgtggcgatggacagggagtcctcaccgccggcagcgacgacgcggagcggtgggacgagcagaagccacagcgaggcggagcggaagcggcggcagcgcatcaacgcccacctcgccacgctgcgcacgctcctccctgccgcgtcgcggacgtgcctgcgcatgtgtatgcgacactacaacacgcagttca

SEQ ID NO: 22005 - DNA, 2066 bp, Zea Mays
acgtcgaccagtacgtcgaaaaggaacacgtcgcccccatttcccacccgctttctccccctttggcctccccccctctctctctctcatctcctgccgataagaagcttcgccgccgtctcctctttctccgtcctagcaaaatcctccccgtattgagagccaaagaagaaaaaaaaaaaaggcaggaggccggcgaactacgcgaggaaaaattttctttcccgggaggctcgggagtcggacacgccacacgctttggtcaaaatcgtttccggttgttagcgcggctgctgctgccgctgctgtcgggggcgagcaggaaggggagcgaacgagcttgggcagctcaagaagaggggacgggggagggagcctgtggaaggcacctgagtacgcgtgaaggagcccgcgcgagagtaggggggaaaccaaatcgagagacatggactcggagcactggatctcgcgcctggccgccgccaagcgttactacgcggcgcagctcggccgcgtcgacgatgtgcccgggatggggacggaagaggtggagatggaggtggaggacgacggggacatggagatggagttggagatggcgctggagctcggggacgcgacgtggccggaggtcgcctgcccctactgctacgaggaccatgacgtcgcatccctctgcatccacctcgaggaggaccacccctacgagccccacgccgcgccctgccccatttgctcccaaaggattacaagggatatgcttaaccatatcaccatgcaacatggttacttgttcaaggctcttctagggggtggtcatggccacagatcaaataacgcagtgaccacaaacatttccagtgatcctcttctttcatcgtttggcctgagcttctcagcatctgatgcaccagaaccatcaaaatcagcatcttctattccagacggtaccgcaatacgtaaggagacaccagttcagccttgggaatcaaggtatatattactcctgatataagtttgctagattctttatggaccacatttacgattgttctccataaatttgaagctattttattaattacttgcatatctgctgaaaacgatctcatgatgaacctattgcatcttctgttctcctttagtcctttctattatccaattacctttacattggtttcttaatatatgctattgcctgaggtttggagttgcagtatgatagttcagacttccgcaaccaacgaactcttctctttcaatggaaataatcttagtcttaaattgaattcattgagcaagcggttctttgatatttccagcacctctgcttaaaactaaatcacaagaagggtacactgacaggtaattcgctttactgttaaaggatgcacattcatggcacttcagacaaagggatttcacttcctagatgcttttatgtttttttcttctcatttatgtatactgtcaagccatgtgctttagtgcttacaagtttcaagggctcgcttccttgtgtatgacacacatgaacttcagcttctgtttccttttcgatggcagtattgattcatctctcacgagcgaggaaagggagcaaaagcggaaacaggccaccgggagggcaacctttgtgcaaggcctagtgatgtctactctattcggagattgatcgctcaagcagccctaggttcttgcacttgctagatcggctctttctcctgcctggtccgtcgtcagatagtgctccacccggttcggactctgatggcagggaaaattcgccccaggaaacttagccgcgttcacctttttttttttcagaaaagtgcgccgttgattctagcatgatgcagcttgatttaagctagctgttgctgtacctgtacctttgtttttatcaatttatcggccagcaattcttatctgtaactcactggtacatcgtgttcgttaccaacatacatggtagctgtggcatctgcttacacaatgcaagaaaagacttgaaaattgctgctttcgtgaaggccccaaaaccacgcttgtccacgtgaacgcga

SEQ ID NO: 22006 - DNA, 2990 bp, Zea Mays
tcccacagccacagcctcacacagacaccaacgccactgcactgcaaaagcaagagcagctagctagtaaagatgctgagcgggatcatcgacgggctgacgggggcgaacaagcatgcgcggctcaagggcacggtggtgctcatgcgcaagaacgtgctggacctcaacgacttcggcgccaccgtcgttgacagcatcagcgagttcctcggcaagggggtcacctgccagctcatcagctccaccctcgtcgacgccaacaacggcaaccgcgggcgggtcggggcggaggcgaacctggagcagtggctgacgagcctgccgtcgctgacgaccggcgagtccaagttcggcgtcacgttcgactgggaggtggagaagctgggagtgccgggggccgtcgtcgtcaagaacaaccacgccgccgagttcttcctcaagacaatcaccctcgacgacgtgcccggccgcggcgccgtcaccttcgtcgccaactcctgggtctaccccgcggacgtacctgccaagccagatgccggcggcgctgaagccgtaccgcgacgacgagctccgcaacctccgcggcgacgaccagcagggcccctaccaggagcacgaccgcgtgtaccgctacgacgtctacaacgacctcggcgagcccgacggcggcaacccgcgccccatcctcggcggctccgccgaccacccgtacccgcgccgctgccgcacgggccgcaagcccaccaaaaccgaccccaactcggagagccgactgtcgctggtggagcagatctacgtgccgcgggacgagcgcttcggccacctcaagatgtccgacttcctgggctactccatcaaggccatcacgcagggcatcatcccggcggtgcgcacgtacgtggacaccaccccgggcgagttcgactccttccaggacatcatcaacctgtacgagggcgggatcaagctgcccaagatccaggcgctcgaggacatgcgcaagctcttcccgctccagctcgtcaaggacctcctccccgccggcggggactacctgctcaagctccccatcccacagatcatccaagaggacaagaacgcgtggaggaccgacgaggagttcgcgcgggaggtgctcgccggcgtcaacccgatggtgatcacgcgcctcacggagttcccgcccaagagcacgctggaccccagcaagtacggcgaccacaccagcacgatcacggcggagcacatcgagaagaacctcgagggcctcacggtgcagcaggcgctggacggcaacaggctctacatcctggaccaccacgaccgcttcatgccgttcctcatcgacgtcaacaacctggagggcaacttcatctacgccaccaggacgctcttcttcctgcgcggcgacggcaggctcgcgcccctcgccatcgagctcagcgagccgtacatcgacggggacctcaccgtggccaagagcaaggtctacacgccggcgtccagcggcgtcgaggcctgggtgtggcagctcgccaaggcctatgtcgccgtcaacgactctggctggcaccaactcgtcagccactggctgaacacccacgcggtgatggagccgttcgtgatcgcgacgaaccggcagctgagcgtgacgcacccggtgcacaagctcctgagctcgcacttccgcgacaccatgaccatcaacgcgctggcgcggcagacgctcatcaacggcggcggcatcttcgagatgaccgtcttcccgggcaagtacgcgctgggcatgtcctccgtggtgtacaagagctggaacttcaccgagcagggcctccccgccgacctcgtcaagaggggcgtggcggtggcggacccgtccagcccgtacaaggtgcggctgctgatcgaggactacccgtacgcgagcgacgggctggccatctggcacgccatcgagcagtgggtgggcgagtacctggccatctactaccccgacgacggcgcgctgcggggcgacgaggagctgcaggcgtggtggaaggaggtgcgcgaggtcgggcacggcgaccacaaggacgcgccctggtggcccaagatgcaggccgtgtcggagctcgccagcgcctgcaccaccatcatctggatcgcgtcggcgctccacgccgccgtcaacttcggccagtacccgtacgcggggtacctcccgaacaggcccacggtgagccggcgccggatgccggagcccggcagcaaggagtacgaggagctggagcgcgacccggagcgcggcttcatccacaccatcacgagccagatccagaccatcatcggcatctcgctcatcgagatcctctccaagcactcctccgacgaggtgtacctcggccagcgcgacacccccgagtggacctccgacgcccgggcgctggcggcgttcaagaggttcagcgacgcgctggtcaagatcgagggcaaggtggtgggcgagaaccgcgacccgcagctgaggaacaggaacggccccgccgagttcccctacatgctgctctatcccaacacctctgaccacagtggcgccgccgcagggctcactgccaagggcatccccaacagcatctccatctgagcgactggtaccactaccaccccaggagtgctacgtacgagctggtacatgaataagctaatataagcaatcgtgtaaacgggaagagagcggccggcacgagacggaccatgtattttgcgtaaacgtgtgggctggtgaatcgaattactaccacgtaataagtgaagtgcttgttgcaatcattggcctgccagcttcaagattcttgcagttactattctagtcgtttcgcagtgctcctcgatcacaacatttcacgaggtgttttattacaataatttggagctattcaatttcaaagcctatgtagaatactatatgttgtagggacattagtcccacatagctaaccaaaaat

SEQ ID NO: 22007 - DNA, 715 bp, Zea Mays
tgtggggccatgatcccagaatctcctcctcagccgtttcgttaagatttgatcgctaggaagccgggattcgtttgcttctcctcatccgaactcccatgcggaagatatatgctggccggatttttctcgctggccgttttgccacctcgaacacaaccgccgctaggagcttcggatctcaggcggagtctgcagccctgcccatctctataaaaccggccgcaaccccgtcgcgctaccaccaactactcccctcgctgtccctcgccgtctcacaccacaccggttaggctgtcaccgagggcgccaatattagcaacgtgcgtgttccagggccgtgctatttcctcctcgccaagctcagattcgaagcctgaagaaaattgcaccagcaagccctcgccctgatgcacgccgtcgcttgctgttgctgcccgcgcggctgctactgcttcgaagtcatgtggctatgctgggcgactggagccgcgccgctgcgcctgtctacgacgcgacgatagagtgcctcgcggtccggatggccggcgcggggaatggcgatggtggtcaactaaagctccattgatggccaccgaacaccatggttgaacctgctaacctcctcttctaccggtaagaaccatctcatggcattcaccgtgttgccctcgtaagatacttgtaccgcgcttttggaaaagtcttgggcgcc

SEQ ID NO: 22008 - DNA, 75 bp, Zea Mays
ttcaactgctagggtgacccatgatggagaggaggctgaagccaccgaaacaaccctgatttccgaagttatgaa

SEQ ID NO: 22009 - DNA, 1091 bp, Zea Mays
aagggaatggaaaacgttaaccaggttcatgtttcatcttaaggaatgaccagcagtcgacaaatggaactgcactacataaacactggatttccatacacaatcaccgagagtttcatggatttctttgagggtctcacttatgctcatgctgactttgctctcatggatggctttcaggatcagggtaatccgtactggacaatgatgcatacaaactcatacaagtatggatactctggttctgggaactattacagttatgctcatgcctatgacattgacgattacatgcatagaactgatggtgggcgcagaacatgggataacactacacctgtaaacaatgtggattctgccaatgttgtcctgcagggtggtgaagctccccgcacaactgcaaatactactagtgaggattgcatccaacaggtacaccaaagtccgggtagtcctcaggttgtttggcaagacaacattgaccctgacaatatgacatatgaggaactcttggatttgggtgaggcagttggaacccagagccgtggtctctctcaagaatgcatttcattgcttcccatcactaagtataagtgtggattcttttcaaggaagaaaacacgccgtgaaaggtgtgtgatttgccaaatggagtacaggagaggaaatttgcagattacgcttccatgcaagcatgtataccatgccagctgcgtgacaagatggcttagcataaacaaggtatgccctgtttgctttgctgaagttcctggcgaggattctctgaggcaatgattcatcagttgtgatgccactatgaagttgctgctctgggtactgcgcccccaatggacgcatgatttctgctttgaaggcagcttgttgtccccactttagaattgtgtattagcgccatattaccaaataggttattacttatcagatgtatttaggtagtgtttggtttcagaatatggtaggatggagtcactttgctcctaatttattgttgtttgaattgatttcatgtaggacatagtaactctaaaaatggaaaaactatgcttaaatactgaagcatctgactcccc

SEQ ID NO: 22010 - DNA, 3574 bp, Zea Mays
ggaagggggaagagaggggacgaagagggagaaggaactgggacttgccgcccccgcctccgaattccccactcctccaccaccgccaccactcaccccttgctccgctcggcctcctgaatccggcgtcgtcaagcaaccccactccttctgccgttatcagaaccctaaccgatcaatccgtccgattcccagctgccggtttcgcgttgggagcgccggagcaggggaggggcggagggtcggatcggcagccgcaggagcattgagcgatggctgccgtgtaggatgcagctggactccgccggccgccgcctagctgctgctgttgttgctgaagttccgatgcttcagcaaccgcgatcttaataggagcggagggtggagtaccggtggagtgggccggacggctggttgatctccgtgagctccagcgcctacgcactgggaggtggggaggtgattgccggaggcgtatggaggaacctgggagggagggggattcccccgggccgccgtgggcgccaagtgagtcctcagctttccgggcgttcgttacggcggtgggggagcgggcggtggcgtcgccttcaggctcggacaatggggattccgtctgctcaagcaacctccgcgccgtcaggaagagacctgtatgttgtccaagaaatgcttggccaaggtacctttggacaggttgcgaaatgctgggatgcagaaactaacagttatgttgcagtgaaggttataaagaatcagcctgccttttaccagcaggctatcatggaggtctctttattaagattgttaaatgagaaatttgatcctgatgatgaacatcacattgtccggatgctggattttttcctctaccaaaaccatttgtgtatagcctttgaaatgcttggtaacaacctgtatgagctgttgaaaaggaatagtttaagaggtttgcaaatgaaatatgttcgaactttctcaagacagatactggatgccctgattatcatgaaagatgctggcattattcattgtgatctaaaaccagaaaacatccttatagctccaactgtaaaaacagcagttggagtgaaagtaattgattttggatcagtgtgcatggagggtaaaaccatttattcatatattcagagccgttattacaggtctccagaagtacttcttggttatccatatactactgccattgatatgtggtcattcggttgcatcgttgctgagctatatatagggctgcctttatttcctggtgcatcagaatatgatgttctttgccgtatgattgagattattggtgggcaaccaccagatgatctgctacgtgaggctaaaaacactgggaaattttttaagcatgttggaagtatctatcctagtagtgaggctcggaatggcgctagcagtgcatacagaattttaagtgaagatgagatcgaagcaagggactccaagaaaccgaaggttgggagatggtatttccctcgtggaaggcttgacagactcatatatacatacccctggaagaatttgagcgagggaaacttgccagagacagaaaaggctgattgcttggcattagttgatttcttgagaggacttgttgagtttgatcctaataagaggtggtcaccgctgcaggcctcgtatcatccattcatcactggtgaagccttcactggtccttacgagcctgttcaggagaccccacgaattcctgttggacgtgctgcagtagttgaccacaatccaggaggaggtcacttgctgggtgctggtctttctcctcaggttggaagcattaacagatgcttacgatttaacaacgctttgcaaccaaatatgcctttttcatatggaagcagttgtggcagttttgggagccatggtagctttaacgataatgctggctttagctatggaagctatgattttaacagtgtcgacatatataattcaccaatggatccttctgggtttaatttacgttcacaacttggaggatcgtttctcggatctagcccacatattcgacgaagacctcatctctcacatggtggtggcattcggttaagccctggtggtccagggcatatgtctcttggggccagtccatcacaatttacaccgccaaattcccagatgcaaatcccaacaggtcctaatggaaggtatggtgcctctccttcaagaggtggacatggctcttcgttgggaaaggttgctgttgtaggccaatacaataggaggaggaatcagggttatccacctatgccaatgccaccacatgaacacacatctcaactgatccaggggcaccaaggagatggtgtcagtactgctcgctttggtgcatatgcccaaggaaattctacctacctacataatgcactccctaattctagtcattatagttggagatcgcaaaggggatctggcagtggtttacctttggacccttcttctagccgtggttcttttccacccaccaattactatggctttcctttacactccgatgcgtcagcagatacattgccctccacctcatcagtatcagatccagccgattgggatctcaactctagtgacaagtcactcctgcaagaggaccgaacactgtcagctgggttaagtgatcttcgcttgatagacgcaagtggccaaacaaacagatctagcagattggctcctttccaaagtcatgatattttaagttcaaacccttcgactatgaatcaaagaaatggacacctatttcatgcatcatctctgggagagagtacacatactccaggtcatgtcacattggatggatacgaacacacaacttattctcagcgaagtttcccaatctatcgtgggcaaccatttcagcagtacaacaacatgacttccagttacatccgaccgatgagggctcatcacaatggtcagcctgtctggtctaattataggctgacagaacctccaccaactacaatgggtgacggaatgctctggggagggaggggtggccattcgtttgcagcgagcggactgccacctacacttaggaaagattttgggagaatcttttagtcctgaatccggaggaatgccgaatgccaccaaattgatggcatcagttgtttgcatctgcaattccgggttggattatttgctgggggtgcctactggtattgcaatttgttgtgttcctccgatgtctcccaggatgttcggttcaaatgattatatggtacgggatatgattacagtgctcgttctttgctatacctgcacgatctagtagaaaaatgtcagttgtgctacttgatgcgaatcttgctagttcgaggtttgggagagtttttctgtctcggttattgtcttcctttctctattctatttttgacagagggttaagttcctgaaccttaacatggctaagactgaagtgaaggccacgtggtcgtggtgacatgatttcgttttcgtgatacttgaggagccgactatctgtttttaagcatctttctgttgttgttttgctacaacaggttttctaagggcg

SEQ ID NO: 22011 - DNA, 2504 bp, Zea Mays
cgaggctgtacgcgctctgcgtcagcctgctggcctggaacaccgtcgtctactcgctcacgttcctgagtgctgcatctgccttgcgtagtacggggagaaggaggaggttcggcagctgccgtgcacacacgtgtttcatctcaagtgcatatacaggtggctcaggatcatctcctcttgccctctctgcaagcaagagctcaagtgaactttatattcattacacacatgacattctcgcttattctttggatcaaggtgttagtatcctagacacaacagatattttccagctaacaagggaaatcaaggaagaattgatctttatattagcaggcggatgcaatcactaatcaaaaccacgatgcaaggtaacctaaatggattttaaattttattttggattgttaaatctttatttctgactactattgttttatgtcgtggatgccctcgtgaggttctacgccgacgccttcaggagggattcacagaggccatggtgaggatggccagcttgagtcggctcaccgggagcagcgcgagatccgctacaactaaatgataggaggtattttctagaaattacaaccccacctctgtcaggccttctgttgagtgaatttggtttgcacaccctcaccctgcacgctcttaccggactaccgctcctagcacccactcacacgagattgcaccccgctcgccatgccaccatagatccagctagggcgacatcattgtgggcaatcctgtgcgagagaatgtgaaattgttgtaggattgataatgaccaggggtttctccgcccacatgcaccaggtttcgctgccatttgcagcgactgtgttccagttcgaccgtttggggaaaaggtgagtcctcccatttcatgtagatgcatgggttgataaacatttgggagaaatgtcccctctttaattcgaaaaatagttgtgtatttgttcgacttatctgcggcgatgtacctttgtacgcgtacaaacatctatagacaaaaacaaaatgacacttcatggatgtagcaagagcgggctacgagaaactagcagatcatgcctaaaattcaattagcattagggtcagacaaaatactacattttctggattacaataatgtataggtgcatgaaaaaaacttgattccaatgtgtgacaaagtgtgaagatgaaagtgcactttcacgctgtcataacgcggatttgttttccttgctcatggaatgtgcatttgtgtgtttgcgtctactgtgcggctacaggcaaggaaacaggatctgtcacggaaggcgattcccatttctcagtgatgtcgatgtcctgtactcctgtatatttggattcaacaatatgccattagtatgctgtcaagcgtcctatttgcaagagataaatggcttacgcccgaggggcttattcttccttatcatgcgttttcaggtcggtcgtgactttggttatccactgaaaagatatgcttggtggtgctttcttgtgttgaagaacaagtatcccacggaaccacaaccgtttgtattatctggtgatttcctacattattagctggcctaactaaaccatgcgctcagaccctaaaccagctgtaagtctgtaacttaaaagcacagtgcactagcggaatggggttccttgctttttggagcgtttccccagtcagatcggcggcagggcaggtcacgtggacggggctccttgttgctggaactaaataccgtggagagtttgaagtgagactaaagaaacttatggaggaaattaagcaaaatgaagacattattctctttattgattaagtgcacacactgattggagcaggtgcagcagaagtgcattggtgccacaacactggatgagtataggaagcatatagagaaagatcctgccttggaaagaaggtttcaaccagttaaggttccagagcctactatggatgaaacaatacagatcttaagaggacttcgtgagagatatgaacttcatcacaaactgagatacacagatgatgctttaattgctgctgcacagctgtcttatcagtatatcagcgatcgttttctgcctgacaaagccattgacttgattgatgaagctggatctcgtgttaggctgaggcatgcgcagctccctgatgaagccaaagagctggacaaagagctgcggcagataagcaagcagaaaaatgaggctgtacgtggccaagattttgagaaggtatactgttgtttggcacagcggtgacaaagccgatccgctcccacctctctagcaacgtcgatatggttaataccaagcattatgttgtttccttttgagataaatattttgttactgattttaccttttgtctcctcttcttgttttttgttctagaatctgtagcaaatggctaacgatgaggatatccattactttgtttatgacaataaaactgatatgttcaagattccgtagcaacgcac

SEQ ID NO: 22012 - DNA, 1079 bp, Zea Mays
aaaaatacacggagcctgcacgcgtgtttctccacatgccctctccttctcggatcctctaccgtaatctcccggcgacgccgccgccatgtcttcccagtcttctgcaggaggtccggcgatccatcatccccactccaactaccacccgtacatctttcagcatgaccctccgctccactctaattcccgccgtcgccgccgtaaccatgatgacccatatcaaccctatctgcctctaccccacgctcactcccacggagccactgccgtcgttaccggcaccgttcgttgccatgtcccccgggatccacttgtgctctcacacctccaggagcgcctctttccgactctccctcaacatcacccgatcgcgggtccacccccgacgaagcgggcccgccgcgcgccagatactccgtgggatccgccgccgccaacgctgcagccggcacttgtcccggtggcgctagagaggcctccggatgtaggacattctgccggggcgttgctttcgcgtgacgagatcgagaggcggtctccatcaagaagggacgggatcgattccgcgcttgaggccaggctgcgtgcgtcctactgcgcctacctgcattgcctcggcaaccggctcgggccgcagacaacaattgcgacggctgtggtgttctgccatcggttcttcttccacagatctcatgcctgccatgatagatttttggttgcgactgcagccttgttcctggcagcaaaggcagaagaaacagcatgccttttgaatactgttcttagggcttcatgtgaggtttctcaaaatcaggaattcaatcttcttccttacatgctatgtggtcaggactggtttgaacagtacagagagagtgtaatacaagcggagcaaatgatacttacaacacttgattttgaactcgaagtagcccacccatatgcttccctatcctctgctttgggcaaactaggactcacacatactgttctgtttaatgtggcttggaatctgatcaatgaagggttagttgaggttgagaagatgaaccaacacatgcatcagctgttcttct

SEQ ID NO: 22013 - DNA, 3494 bp, Zea Mays
cattaacaatgacataaatttgtatatatccctgttaaccttgaaggtcaggagggtgaatctgcttgtgcgataacagatgtagttaagaaagcccctccaaaagtattcaatctaaagattgttggggaatctatggaaggaagcaagatatctgccagtgctactgttacaggtggaactgaagggtccagcagggttcaatggtacaaggcatcttcctctgaatttaagaatgaacatgagcttgaagcccttactccgtcacgagtttctaagacattccgcattcctcttggtgctgttggatattatatcgttgcaaagtttacacctgtggcacctgatggtgaagtcggtgaaccagcctatgctacatcagatggccttgtggaaacactaccacccagcctgaacttcttaacagtcactggtgaattctctgagggtcagatattaacagcatcatatgggtatatcggaggacatgaaggaaatagtttatacagctggcaccttcatgaggctgaagatgacgaaggcactccactttcagaggcaaccggtttgctacaatactgtgttacaaaggaagctgttggaaagtttgtttctttcaaatgcacccctgtcagagatgatgatattgttggtgaggcaagatcattcataggaaaggacagagttactccagggatgccgacattactttctcttgaagtaactggtgatgcaattgaaggaacaactatgtttgccagtaaaaggtattggggaggagaagaaggggacacaatgttccgctggatactgacaaattctgatggaaccgagaaagaaattgaaggagcaacaagttcatcatacaccttgaaatgcaatgacattggcttctacatatctgtcttgtgcaagcctgttagaaatgatggagttgatggttctttagtgtcgactgaagcgattggtcctattataccagggccaccaacatgtcaatctcttgaactagctggctctatggttgaaggtggccgtttgacctttcatgctgtgtatacaggaggtttgcggggaagttgcatccaagaatggttcagattacatgatgatgggcacaaggacaagttgactgctgatgaatgtctagaccttgatctagctgatatcgattgccggattgaacttatgtatacacctgtacgagaagacggagtgcacgggttaccaaggagtgttacttctgatacaatcttacctggggagcccaagggtgtcaatcttattctacctgagtgttttgaggacaatgaaatttctcccatcaaaacctatttcggtggcaaggaaggcactggcaaatatacatggtttcgaaataaagagaaacttgataacttggaatttgatctggttgctgaatcatcagaagttgttggagaaaccttaaaatataagccttcattgaatgatgttagttcctatctgattctttattgggttcctacacggcgtgatggaaaggttggtgatcctttgatggctatctctgatgatccggtcatggcagcttttccatctgtttcggatgttcacttagagcagaaaagttcagatgtatattgtggactaggcatctattatggtggatatgagggattaagcttgtatagatggtacagggaatctagtgatggaactaggcttcacatagatggtgctgattcagtcacatacgaagtgacagatgctgattacagctgccgtctactgtttggttatactcctgttcgttcagatgggataagtggagaagaaaaactctctgaaccatctgatgtaattttgccagaactactcaaaatcgagacactcaatttcaaggggaatcaggttgaaagagaaacactgactgctgctgaacaaattccgtacagtgagattcaacaacatatatggaaaaattataagaaagagatgaaatatcaatggtttatttccaatgaatcaggaggcgatcagtcttttgaaccattggcaacccagtgttctcgctcatacaaagtgcgctttgaggatattggtcgttgcctgaaatgcgaatgctttgtcactgatgtatttggacgatctagtgaattggtatccgctgtgactgctcctattttgccaggaaggcctaaaattgaaaagctggagattgaaggaagaggtttccacactgacctatatgccgttcagggtacctatagcggaggcaaagaaggcaagagtaaaatacaatggctcagatcgatggttggaagccctgatcttatctccatacctggcgaaactggaagaacgtatgaagctaatgttgatgatgtagggtataggcttgttgcaatttatacacctgtaagagaggatggagttgagggacaacctgtttctgtttcaacagaacagattgcagttgagcctgaactttacagggaagtgaaacagaagctcgatgatggttcagtcaaatttgaggttctgtgtgacaaggaccgaacacccaaaaaggcacaagtaatgggccatttggagcggagggttttggaagtcaaccgaaagaggataaaagtagtaaagcctggatctaagacatcattcccgagtactgaagtacgaggaacctacgctccaccgttccatgtcgagctgtatcgcaatgaccagcaccgcttcaagattgttgtcgacggtgatactgaagttgacttaatggtgcaaacacggcacatgcgagaccgcatcatcctcacgatcagaggcctcgcccagaagttcaacagcacctccctcaacacacttctcaggatcgagtcatgatagacctgacagtgtaaaaaccaactattacgggaagctgtaccccttgttccgattggttagagtgcgtggttttagtaggattcgtgacatgccagccttttgtgtgtatgggtgtgggacgggccgagcgtgttggattacaattttttccctgacacatctctcaaatcagagcagcatcagctggttgctctgactggtgccgtcgtgcgtcatgaaatgtacatagggtggttagagcgagaaagagagtggtgtttcttggtgctgtatttattatgcactggttgggttgggttttttcgactgccattctcatactaagtattggttctttcttttttcggtcgttgggtttgcatatacttgtaccgacaacacagcttggggtgattgggcgagtgctgttcagaatgcctggtccacacttgtgtacgactggaatcctacggtggcgtattcacatgctgttttatggtgcaaatgtaaattcatctgttcataaacgagaatcaaaatcgtcggccacgtgtattcgtcgtattcgtaccgatgtatactaccttataaaccagtactaatctcacggtggcatcaattatcttcctctgtttcacaaggcacacgtt
